United States Patent Application Publication US 2017/0114356 A1 - sequence listing, part 73

SEQ ID NO: 107300 - DNA, 1607 bp, Zea Mays
agaccaccactgcgccattggccagctagagccaaccagaagagcttgcagttactgagagtgtgtgagagagagaggatgatgggtggcagcggcagggctgctctgctgctggccctggtggccgtgagcctggccgtggagatccaggccgacgccgggtacgggtacaccccgacgccgacgccggccaccccgaccccgaagccggagaagccccccaccaaggggcccaagccggagaagccgccaaaggagcacaagccgcccaaggagcacgggcccaagccggagaagccgcccaaggagcacaagccgacgccgcccacgtacaccccgagccccaaacccacgccgccgacgtacactcccaccccgacgccccccaagccgacgccacccacatacactcccgcccctacgccccacaaacccactcccactcctccgacgtacaccccttcccccaaacctccgacacctaagccgaccccgccgacgtacactccaagccccaagccaccggctagcaagcctcccacgcccaagccgaccccgccgacgtacaccccttctcccaagcctccgacacctaagccgaccccgcctacgtacactccaagccccaagccaccggctaccaagcctccgacgcccaagccgaccccaccgacgtacaccccttcccccaaacctccgacacctaagccgaccccgcctacgtacactccaagccccaagccaccggctaccaagcctcccacgcccaagccgaccccgccgacgtacaccccttctcccaagcctccgacacccaagccgaccccgcagacgtacaccccttcccccaagcctcgacgcccaagccgacccgccgacgtacactccgagcccccagcctcccacacagccgacgcccaagccgaccccaccgacgtacaccccttccccaaagcctccgacacctaagccgaccccgccgacgtacacgccttcccccaagcctccgacacccaagccgaccccaccgacgtacactccaagccccaagccaccggctaccaagcctcccacgcccaagccgaccccaccgacgtacactcccacaccgaagccgccggccaccaagccgcccacctacactccgacgccgccggtgtctcacacccccagcccgccgccaccttactactagaaaccgatgcctaccataccacactgctgtcagtctctggagcatttaggtggtctcgatcgatggaagaattgtgtcctagccagccggcaaaggtgacctgctgatgatgatgatgagaggcgagtcctacgccctagtcctactactaccctctttgtgtgctgccatccatccgtccccgctagacgatcgaggagagaataacgcagagctctgtgctcccggcctctgtcttctgccgtcccggccgtttaatttatagtctctactgtgtgttcgtcccatgtgtttagcagcagcagcaggtgtattgtgcgggtatgtaatggtattgcaactatattgggtgtaaaaccataataaatgtggaaaaaatgcaaggaaaaaaggcttctactgtttacactta

SEQ ID NO: 107301 - DNA, 1705 bp, Zea Mays
tatataatcctattgcacggccttgcgttgctggcatgccagtcggacaggcagcgcaaacacacaaaaccatgaaaggcagagcggaaccggacgcttccaaatggagtccgcagggcaggacgagttctccgccgtcccgcgcgtgataccacttccggcgtatagaaaattgcaccggcccggccacgcggaggcgagccgagtccactgcccaagtgagtgccgctgcagctggcagctgccgtccgtaaaaaataaaaataaaaaagcaccgcgctccctccctgccgccgtaaaacccacacgtccctttgacttggcctccctcgcctctgcctgcggatttttggaggcggagctcagctcacacgcactcctcccgctcccgcccccttgcgccttcgctcatgttgaaccactcccattcccggcccgactcccgctcccccttcctccaccacggccacgtccacgcccacgccgccgccgccgacacggagcacctgcaccgggcgcaggggccgatggacccgccgtcgtcgtcggggcgccccaccacgccgcgccggcagctgcagggcccgcgcccgcccaggctcaacgtcaggatggagtcgcacgccatcaagaagccctcggcctcgggggctccgccggcgcccgggcaggggaggccgcgggaccaccaccaccaccacccgcagcccgggcgcgcgcccgtcatcatctacgacgcgtcgcccaaggtcatccacgccaagcccagcgaattcatggcgctcgtgcagcggctcacgggccccggcgcgcaggcgcagcacgagcgccacgtggctgacgacgacgccaccgccaacggcggcggcgtgctggggcaggcgttcctcccccccgagctgctgctctcgccgtccgccgccatgtccccggccgcgcgcctcgcgaccatcgagcggtccgtgcgccccgtgcccgcgccggcgccggcgccggactacgccgccgacggcaccctcgcggcggtgctcggccccgcgaggcaccccggcatcctgtccccgctgccgtcctcgctgccgccggccgccgcgtcgggcctgttctcgccgctgcccttcgaccccagcagcgtcagctggctcaacgagctcagccccatcctccgggcagcgtccacggccagcgtcggcgccgctggcccaggcgccacggccaacggcgggtcccggcagccgccgccgccggcctactactccgacccgttcgtccccagcccccgcaacctgctcgccacgcccaccgtgccgtcgccggccacgtgcgccgagttcttcggcagcctgccggatctttagctcgccgccccacatcggccggcgccgcttccgtccaagacagatgcagcagcggccgaaacttttgcggcatttttccacgccctttccctacatgactctcttctggcgggtgggggcgagttggtggggccggaactggtgctatttgattagtgcagatgcaatgctgaaagttttcaggtggcagtagtagtagtgaatgaatgactactagaagcagccggccggacagcgcggcccttgtttatttcttcttttccactggatttacaccccttgtgtaggccaaggaagtgattattgtttcttcaatggatgatttgttaattcttttagcttggtga

SEQ ID NO: 107302 - DNA, 2671 bp, Zea Mays
ctccaccacatatcaagatctcccccggacccacgattcctattgtcaccaccctccctccctccctgacaccgggcctcgcccgccggaatcacacgagccacgagcagcgcgtcgccccgtccgggccccaccggacaccgccgtcgccttcctcgtctttcttccccgccgaagtccgaaccatctcgcgcctcaactttcccacgcgcgactcgcacctcctacgcgcttctagaaccaacgaagcatttgacacccagctcagccctcgcgctcgcgcaagcgcggcaagcccgccctccaccggataatagtaatgatgggcaaggaagagacgccgccggccgacggaggcggcgcattcgccttcatctccaaggggtggcgcgaggtgcgggactcggcgtccgctgacctgcgcctgatgcgcgcgcgcgcggactccgtgcgcgcgcgcgccgaccgcgagctcgagcacctcctcgcgtccgcggcgtcggcgctcacggggcccgcgcccccgctgccgcccgtcgcgacgggggcgcccatcgcggaggtcgagttcgtgcgcaggcggatccagcccaagatccaggagctccggaggcactgctcgtcgcgggcgcccgacgcccggtggccgcccggggccgcccccgccccaggcgccagcagcctccgcatcgacctctcggggatcaccgccattcgcaacgccattgtggcggaaggggaccgcggcggtaggtggagggtcgcgcggcggaagggggaccaggacgaggaggggaggaaggagtgggaggtggttcgggtgatacagagcggcctcaaggagttcgagcgccggagcctgtccagcggcatatttgctggattccgtggccgtggcgagtttgtggagaaatttaggttcggcatgaaatcactgaacaagggctatcaggaatccaaggatgttccaccactgcatctaactgaaattgtggcatatctggttcggcaatctgggccatttttagatcaacttggcatacagagagacctttgtgacaaactagtggagatgttatgcagtaaacgaaatggtcggctcatgtatcattctctttcaaaggacagacccttagctgagaacatatctgacgagcttgatctaagaatagctagggtattagaaagtactggttatcacacagatgaaggtttttggaatgaccctgcaaagtacaagatctcagacaacagacggcatgttgctattgtcaccacagcaagccttccatggatgacaggaacagcaatcaatccattgtttcgtgctgcatatctggcaagaagtgcaaagcaaaaggtgacattggtggtcccatggctctctaagtcagatcaagaattggtttacccaaataacatcaccttcagttcgccagaagagcaagaaacttatataaggaactggctgcaggaaagaataggctttgaagcaaactttaagatatccttttatcctggcaagttctcaaaagagcgccgcagcattattcctgctggggatacttcacagttcatctcctcaaaagaagctgatatagcgattttagaagaaccggagcatctcaactggtatcatcatgggaagcgttggactgataagttcaatcatgtcatcggtgtagttcatacaaattacttggaatatatcaagagagagaaaaatggtgctattcagtcttttcttgttaaacatatcaataactgggtgactagagcatactgccataaggttttacgtctttctgctgcaactcaagatctaccgaggtctgttgtttgtaacgtacatggtgtaaatccgaagtttcttaatgttggtgagaaaatagcagctgatagggagtgtggacagaaggtcttttctaagggagcatatttccttggtaagatggtgtgggctaaaggatatagagagctgattgatttattatccaaacacaaaaacgacctggaaggattcatgatagatgtatatggaaatggcgaggactctgaagctgtccagaacgctgctaggaaatttgatttgaacatcaattttttcaagggaaaggaccatgcagatgattcactccatgggtacaaggtttttgtcaatccaagtgttagtgatgtgctatgcacagcaacagctgaggcccttgcaatggggaaatttgtagtctgtgcagatcatccatcaaacgatttttttaagtcattccctaactgcttaacatatagaacttcagccgaatttgttgctcgtgtcaaagaagccatggctactgaacctcaacctctgacctcagagcaacggtacagtttgtcatgggaagcggcgactgagaggtttatggaatactcagagcttgacaaagttctgaacagaaatggtcaccctggacgaaatgggaaggttaacaaagcaagaaagataccgttacttcctaaattgtcagatgtggtggatgggggactggcatttgctcatcactgcctgactggtaacgaaatcctcagattagcgacgggagcaattcctggtacacgtgactatgataaacagcagtgcatggatctgaacctgctgcctcctcaagttcaacaccctgtatatggctggtga

SEQ ID NO: 107303 - DNA, 243 bp, Zea Mays
atggagcctgccacctaccgcccggtctttttgtcctgtttgatgcttcttgctctgaatcgagatgcgaggtggacggtgttggtatcttcgagtgtcagcgctttcgtggcattgcagcggcaggtcgggccaccactatgggccgaggctacagccaagcacggcacgacgttcttggctcttgcaagcattaggtcgtttctgaaatcatattggcacaatggactacatggtgtttga

SEQ ID NO: 107304 - DNA, 1212 bp, Zea Mays
gattcaaactgtgaggttttcatattaaatatatatggggtaataatatatagcaaatctagtacacatgtatatgtatgtatagcttattaacttatttctgcacagcttcggaagggaaaatatatgagaacgaacatttgctacaaaagaaaaactaattgctcgataaccgcgcgagcgagggggcgatgttgatcccccgcgccgcactagccagtacgaacgaaaacgaacgaacgaagcgcgcgccggtcgtcgtcgtgggctcgtggcgcagcgacgactcacacgtcgacggtgcagtcggccgggtgcgtgaacttgagggagacggtggtgttgacgccggcggggactaccccggacgcggcgctggcggcgaagacgcctccgccggcggcggcgccggcgctgccgctggtggcgagcagcgcggggcagttgacgaagaggtggtagctgcccgagacccagctgccgaccttccacttgacgcggccgtccaccctgacgtggagcagcacgtatcccgcctcgatgtcctgcttcatggcgtccgccacgtactgcgccacggggaccgcgtcgcccgacatgaccggcgaccacaccgacacgtccttgtggccctggtagatcgccggcatcgacacgggtaccgtcaccgcctcgtcgcggtacgtggtgaacgcgtccagcgtcttgtagtacacgcccacccgctcgttcgggttccgcgacgcgatcgtcacctgcgtgtgtgccgtgtgcgtcccaaatcaatgcatatgcatgcacgcgcgctcgtgcatcaatcagctgacacgtcgtacgacgacacacgccgtcgtcgtcgcgcgcgagatcgtacgtacctggaggtcgagggagagcgccgggtcgctgaggtcgatggagcgcagctgcacgtcctgcaggtagaaggacggcttggaggggcgcagcgccaggtagatgacgagcacgatgaagcctacgacgacggccagcgtcaggatgcaggcggcgatggagccgcagcagcgccggaggatccagtcgcggtggtgcttctccttgctcatggtgaccagcgagcagctgcggtggtggcgccggcgctggactgggagctctgagctcagctggctgccttgctgctatagctagcttaggagtgtgcgcgcatgtgggctgcctatagcagtg

SEQ ID NO: 107305 - DNA, 828 bp, Zea Mays
atgttgatcccccgcgccgcactagccagtacgaacgaaaacgaacgaacgaagcgcgcgccggtcgtcgtcgtgggctcgtggcgcagcgacgactcacacgtcgacggtgcagtcggccgggtgcgtgaacttgagggagacggtggtgttgacgccggcggggactaccccggacgcggcgctggcggcgaagacgcctccgccggcggcggcgccggcgctgccgctggtggcgagcagcgcggggcagttgacgaagaggtggtagctgcccgagacccagctgccgaccttccacttgacgcggccgtccaccctgacgtggagcagcacgtatcccgcctcgatgtcctgcttcatggcgtccgccacgtactgcgccacggggaccgcgtcgcccgacatgaccggcgaccacaccgacacgtccttgtggccctggtagatcgccggcatcgacacgggtaccgtcaccgcctcgtcgcggtacgtggtgaacgcgtccagcgtcttgtagtacacgcccacccgctcgttcgggttccgcgacgcgatcgtcacctgcaggtcgagggagagcgccgggtcgctgaggtcgatggagcgcagctgcacgtcctgcaggtagaaggacggcttggaggggcgcagcgccaggtagatgacgagcacgatgaagcctacgacgacggccagcgtcaggatgcaggcggcgatggagccgcagcagcgccggaggatccagtcgcggtggtgcttctccttgctcatggtgaccagcgagcagctgcggtggtggcgccggcgctggactgggagctctga

SEQ ID NO: 107306 - DNA, 3022 bp, Zea Mays
atggcaagttggcaaccacctgcagctctacatctacgcacacatctccgtgatctcttcagcctcgcgactgccaccaaatcggtcttggcaggttgctgcgccaaatcggccggtcttggcaggttgctgcgccaaatcggccggtcttggcaggttgcgctagctacccataggttggctggagagatgagggccggggggtgcacggtgcagcagtcgctgacagcggaggccgcggcggtggtgaagcaggcggtgagccttgcgcggcggcgcgggaacgcgcaggtcacgccgctgcacgtggcgagcgcgatgctggcggccgcacccgcggggcagctgctgcgcgcggcgtgcctccgctcacactcccacccgctgcagtgcaaggcgctggagctgtgcttcaacgtggcgctcaaccgcctccccgcgtcggcatcgtcgccgctgctcggcggcaaccaccactgctaccacccgccgtccctgtccaacgcgctcgtcgcggcgttcaagcgcgcgcaggcgcaccagcggcgcggcggctccgtcgagagccagcatcagcagccggtggtcgccgccgtcaagatcgagctggaccagctcgtcgtctccatcctcgacgaccccagcgtcagccgcgtgatgcgcgacgccggcttctccagcacccaggtcaaggccaacgtggagcaggccgtgtgcagcagcagcaccatggctacggccgcagccgcacccagcaaaaaccctaaccctagcagctcggccaccaccacaagcccaccgcctaaagaagctaaagccaagccgccgctcgcgctccaccaccaagcgcgcgacgaggacgtcgccgccgtcctggactgcctggcctcgcggagcaagaggagggtcgtcgtcatcgcggagagcgcggccgcggccgaggccatggcgcacgcggccgtggacaagatcaagagaggcgaggtgaagcacgagcacgacgcgctgcgaggcgcgcaggtcgtcagcctccgcgtgtcgtcgttccgtgagatgccgagggaggaggccgagcggcggctcggcgagctgcggtgccttgtcaagcagggcaggaggcagcgggtcgtgctcgtcgtggaggacctcaagtgggcggcggagttctgggccggccacgacggccagagcgggaggagaggcgggtactactactgcgccgtcgagcacgtcgtcaacgagctgcgcgccctggcgagcggcggcagcctgtgctggctcctcgggttcgggacgtaccaggcctacacgaagtgtcgggtggggcagccgtcgctggagagcctgtgggggctccagacgctcaccgtgcccgccggcagcctcgcgctcagcctcacctgcgccttcgacgacagtgccctaggcacagtcaatcagtccctgaaagcgggctctgacgcggatgggaacgggccggcgtcttgctggccgcttttgggcggcagccagctgagcctgagctccagatgctgcggcgacggcgattgctctgccgcgaggatcgacacgaaagcggcgttgcctcggccctctgtctcatcgtccaacctcccttcctggcttcagcattgccgtgatcatcaggagcctactacgagccatcttacggatcttagcaagagcaagacatggagctccatctgcagcaggccgtcgcagcggatgacgctgcatttttccgcaccggtgtctccggcctcctccatctcctcctacgagcacggcggcgaccagtcgtcgcagacgccgcctcagcactcgtggctccttgctggtctcgacgccgcgcaccaccggtgggaacccaagcgcgagaccagcgggaataaggccgccagcaggtcccacgactccggcgcctcgaacggcggctccgtggaggtggagtgccgcgccaggttcaaggagctcagcgccgagaacctcaagctgctctgcggcgcgctggagaaggaagtgccgtggcagaaggagatcatcccggaggtcgccagcgccgtcctgcagtgccggtcagggatcgccaagaggcgcgacaagtcgaggtcggcggacgcaaaggaggagacgtggatgctcttcctcggaggcgacgccgacggcaaggagagggtggcgagggagctcgccagcctcgtcttcgggtcacgcgacagcttcttagccatcaggcctggtgcctcgtcgtcgtcgccgccgcggtcaggttcctccgagggtcaccggagtaacaagcggccacggatgtcgccgccgccgcctggggaggagtcggcgccggcctgcctggaacggttgcacgacgctgtatccgagaacccgcaccgggtcatattcatggagggcgtcgagcaggctggccgggactgccagctcggcatcaaggaggcgatcgagagcggggtcgtgcggaaccgagctggcgtggaggtcggcgtgggcgatgccatcgtcgtcctgagctgcgagggctttggcagcaccggcaggtccagagcttgctcgccaccgagcaagaaggtgaaggtagagatggaggaggctaaggaggagcgcacaggtgacattgaacacaacggagatggtggttcctcgtcgtctccgtcgtgcatcgatttgaacgtggacatggagagtgaccaggcggacgagggaagtctcgatgatgatgtctgtctgctcacagccgtcgacaggaccctgttcttcagaagacaggggtgactaactgtgtacattgagtcattgaaggaaccgtatgcgtgtcaaacgtgcttcgttttgataagaacctagattagttgtaagcgcgcaagtagcattttctttagtttatgttttttatatctaggttttagagaattggatcgccggtgtatttggggcttcactaaagacaaaatagagctgttgtacatttagctggagattcaatcgcagttatccgtaaccgaccaaa

SEQ ID NO: 107307 - DNA, 1395 bp, Zea Mays
cccacctcgtcttcgttctgctcctaccaattccagtcccagccatccgcccgcccaactatggcggcaacggctctgctactccccagcctcgcggcgctcacggacacgccgcgccgcgcccacaggttgctgcagccgcagctccagctccagcgcggctcccttgtctctcggtccctccggcctccgcggcgtcggcggctcgcggtctcggccgtgcaagagacgaaggagggggaggccaagacggccgacgagataaccgagaagtacgggctcgagttcggcctctggaaggtgttcagctccaaggaggaagagggaggcgaggggaagaagtcgcggacggaccaggccaaggaactcctggccaagtacggcggcgcgtacctggccacctccatctcgctctccatcgtctccttcactctatgctacctcctcgtcagcgccggcgtcgacgtgcaggacctgctcgcgaaggtcgggatcgtgacaggggaaaccggagggaaggtcgggaccttcgcgttggcctacgccgcgcacaaggccgcgtcgccgatcaggttcccgccgacggtggcactgacgccggtggtggccagctggattggcaagatcaggaagggcggcgactgatgcgccgccactcaagtacacttctcactgaatcatgtagtctatgcaaatagctatacataagcttatataggtgttctactagccggtgccagcgaatctatctggtgctgcttttgtaaaagctgttcgatgacgattttgaacaaccagtaatgaatgacgagtggagagagtttttgaactagaagctgacaatgcagtgcggttgcttcagagtttagcaatgatgtttgcacttttcataatggattttgctgatgatgcttgacattactttctacacatctagccagcctagacacaatatgtacacagaaactgtggcaccatccaaattccaaaggcagaatcaaatggacataaaacctgaccctttaaaagctggaggagtgcacctctgtaaccagcggtttagtttatgtgtctgattgaagcattgttctgcttccaagccatagatacgctgtacaagccaccaaacgtgtcacagcaacagtccacaacaaaaggcctatctcaccaggcacatcttgcccactgcaatcctggcttccacacagaaatgacgcgtgaattgtaatgagctcagttcgtcccaaaacatccagcactgtatcatcttctttcttgcccatggttagagcccacagccgtagccttcaggtggctgctggttgaatgtccctggtgagctcacctcttcagctaggaaatcgttggggtctatctgatccaactgcatttctg

SEQ ID NO: 107308 - DNA, 1181 bp, Zea Mays
accagcgcgcaccgagccggctgagacgtgtggcggagcttgcgcgacgccactggcggaggcgccctcgcgctgccacgcgcccacgccgcgtgacggtgcgcggctagtgctcgccgcaccggtcgtcccgggccatcacgaggtcgccgcacctacacgctcgacgacactatataagaagcggccagcccacacagctgcgcaccgatcacaaaaccaatcgcggagattcaatcacgtacgtatacacacggccacacgggcacgtagctagctagcagtcgtagcgtgacgatgagggttctctctgttgcggtcgctctggtcgtggtggtggccgcggcctgcctcgccgcgccgcggggcgcggacggcgcgggcgagtgcggtgcgacgccgccggacacggtggcgctgaggctggcgccgtgcgcgtcggcggcggaggaccccggctccgcgccgtccggctcctgctgcagcgcggtgcacgccatcgggaagcagagccccaggtgcctctgcgccgtcatgctgtccaacaccgccaggagcgccgggatcaaggccgaggtcgccatcaccatccccaaacgctgcaacctcgccgaccgccccgttggctacaagtgcggaggtaaccaagcaaattaacaaccactactagtctatacactagtttcttactcctgttgctgctgctcttcactcttcacttcttgcttggagtgcatgcagcactacccactgaatgcatgcgtctctgtctacgattcttcttttatttctttgcagattacactctgccatgagcggcggtgaggtctccaggccggatttgctgcatggcatgcccgagtatcaccgaagcgcgagctcttgtgtcgagcgagtccgtgtctgtcagtcagtctctatgtgttgcccataataaacaaagacatgcgagtaccagacatgtgcaactctagtagcatggtgcgtgtatcactaggtacgcgtactcgtatagttgtgttcagttcagggtctatagagatgtagccctgcattgtcgaaataaatactgtgtccactcgttcgtgaaatgaaaaaaaaggcttgatgctcgactaactaaacgagtgaccagagccaaaacataaagatttatatcctagatgataaaaaaataagaa

SEQ ID NO: 107309 - DNA, 1023 bp, Zea Mays
accagcgcgcaccgagccggctgagacgtgtggcggagcttgcgcgacgccactggcggaggcgccctcgcgctgccacgcgcccacgccgcgtgacggtgcgcggctagtgctcgccgcaccggtcgtcccgggccatcacgaggtcgccgcacctacacgctcgacgacactatataagaagcggccagcccacacagctgcgcaccgatcacaaaaccaatcgcggagattcaatcacgtacgtatacacacggccacacgggcacgtagctagctagcagtcgtagcgtgacgatgagggttctctctgttgcggtcgctctggtcgtggtggtggccgcggcctgcctcgccgcgccgcggggcgcggacggcgcgggcgagtgcggtgcgacgccgccggacacggtggcgctgaggctggcgccgtgcgcgtcggcggcggaggaccccggctccgcgccgtccggctcctgctgcagcgcggtgcacgccatcgggaagcagagccccaggtgcctctgcgccgtcatgctgtccaacaccgccaggagcgccgggatcaaggccgaggtcgccatcaccatccccaaacgctgcaacctcgccgaccgccccgttggctacaagtgcggagattacactctgccatgagcggcggtgaggtctccaggccggatttgctgcatggcatgcccgagtatcaccgaagcgcgagctcttgtgtcgagcgagtccgtgtctgtcagtcagtctctatgtgttgcccataataaacaaagacatgcgagtaccagacatgtgcaactctagtagcatggtgcgtgtatcactaggtacgcgtactcgtatagttgtgttcagttcagggtctatagagatgtagccctgcattgtcgaaataaatactgtgtccactcgttcgtgaaatgaaaaaaaaggcttgatgctcgactaactaaacgagtgaccagagccaaaacataaagatttatatcctagatgataaaaaaataagaa

SEQ ID NO: 107310 - DNA, 224 bp, Zea Mays
gatctagattaccgatgactatgagtcatatgtaaatatgtttttatcgtaccactcaaacatatattatatatgaaactatggatcaacttcttgtaatgcaattattgatttttaatatatattatttttttcttctttgccatgtgtgtggggatgattctagaaatatcaaatgtgcattgttcaacatgttatactcttaacctcaaaataaaatattc

SEQ ID NO: 107311 - DNA, 879 bp, Zea Mays
gtgcggtgtgcctgcgttcagttcggtcacgagacgggcgctgccagtgcccgaggccaaaaccctgcttcgctgtcccccctggtcacgtcctcgcgcgcctcaggcctttttgtttagttcagcctgtttcgaccggagttggttacttggttgcacagttccgcttgcttcgctgtagcctagaactcgtccttatcggatccggtccaaagatgcaacaaatcaagggcatggccccgatggagatggcgccggcgggcgcgggcaaggcggcggctgcagctccggcctcgcgcatgccgatgatgcacatgtctttcttctggggcaaccgcgcggtggtgctgttcccgggatggcccggcgcgcgcggcgcgggggcgtacctgctctgcctcctcctcgtgctcgcgctcgccgcgctcaccgaggcgctcgccgcggcctcgcgctgcgtcgcgcgccgtggcgcgggtgcgggggcaggccgcgtgccggcgtcctcggccgcgctgctcacggcggcgcacgctgccaggatggggacggcttacctcgtcatgctggccgtcatgtcgttcaacggcggagtgctcctcgccgccgtggccggccacgcgctcgggttccttatcgcgcggagcagggtgcacaatcggggcgggagtgccgccgcggccgccgcccgtgatcgcgagctcggtggcatggacgtccaccctccggatgtctccaaggcataagactgcagggcaaatgcacgagaaaattagaaatttagcgtttttattgttggtcttcgcaagattaacatcttattctaagtctttgcaaaatcatgacctattagatggagcctttgcatcccacgccaca

SEQ ID NO: 107312 - DNA, 1256 bp, Zea Mays
gaccagctcccgccggccactcgtctagactcgagagcggcacgatgcctccttctctgcaccctccccacctccacttccacaagctcaagcgccgccaccaccccgccgccatggccaagaagggcctggccgccatcctctacaagttccgcgacgtgcactgcccgccctccgcctcgctgccgccgtcgaccccgtccgcgcactacgcccagcgctgctacccgccgccgctgtccgcgtggccctggccgtcgtgccggcacccgcgcaccagctcgttccgcgggcccaaagacgacgccgccgcggtgttccggaccgtgaacaccgtctacgactacgacacgatctcgggctcggagcaggtcctccggcgctcctccatcgatgaggcggcgtgcatcgaccggcgcccactgtcgttgctcggagaggccattgcggagcaggcggtggacgaggaggaggagaaggagacggagctgcgagagacggccgtcgtgcgcggcatgcgttcggagcgactgttcttcgaaccggccggcgcagagttcttgcccaatcagaggtttcagagcgtggcggtggcgccggcgagaggcaaggacgaggcggccacggcggacgtcaagagcgaggaacaagcgacgacagacgcgccgcacgacaaggacgagccgccggcggaggccgtcacggcgaagggcggcgcggtggtggtcacggtggagtccaaagacccgtacggcgacttcagggcgtccatggcggagatggtggcggcgcacgggctgcgcgactgggaggccctggaggagctcctggcgtggtacctcaagctcaacgctaagggtgtccacgctgccatagtcggtgcattcgtcgaccttctcgtaagcatgcagccgcaggcgtcatccccgccgtcgctgccgtcccagtcgccctcgtcgtcgtgcatcaccttcgaggagtgctcctcggcaacctttgacgaggatgactgcaagagctgagctgagctgaactgaggcggagggtgctccgtgttcgccatttctaatcttttttttttgtctcattcagagatagcggtttttgtgaattattttgtgcgcctatggaagaatggaaggtgaggtgaggcctgaatggtgccatggatgtacagttgctaaactacctgatgctgaccatcagaatagattaattgcctagacaactaattgaccatttttatttgctctgca

SEQ ID NO: 107313 - DNA, 707 bp, Zea Mays
tgttgtcttgtctggtgtttattatcccaccagtcctttggtaatccatcacatacttgaatttgctagccacctgcatgaacatgaacatgatactaatctaagtgatgttgttgttccaatgaaagctaagttcatgaagtactggaagtctataccaatgttatattcctttgcatttgttctagaccctagagctaaaatgaggggtttgtataatgttcttgaactgctttctcaatctaacaattataattacagcacttattttgctgatgttaagactgagttgtataagctatatgccaagtatgaaactaagtttggtgctgctaggccatctagaaccacacatcaatcaggtatgacaggtaagagaaaacaggcttggggtaaaatttttggaggaacaggttcttctagatcctcaactgcatcaggttcttcaggtagtagtggacctggtgtgggtatttgtgagctaactgtttaccttgacagtgacaatgtggctgcctatgaggatgattttgatatcttaaattggtggcatgagcataaactaacatatccaattctttcaattatggctagagatattatgtctgttcctgcctcaactacttcttcggagtctacttttagtttgtctggcaggattcttgaggatcgacgacggcgcttgaactcagagacagtggagatgt

SEQ ID NO: 107314 - DNA, 1115 bp, Zea Mays
accagagaaacacctctgagcattctaaagctcatagccctctccttccagagcatttcacatcgctctcatctccacctgcttgcatccagcgcctcgtcactctgcaaaacaacagcacatacctccaaaggatgagccgcagcaacaggaagagctctaggggccttgacctgaaactgaacctctcacttcctgcaacaggggactcctccaggagggcgatggctgatgaggagtcatccccgagctcctgcctatcgtcagagaacgagcatggcctgcagtggtccaacagccctgaggccacatccatggttcttgctgcctgtcctcgctgcttcatctacgtcatgctcccacaagatgaccctcggtgcccccagtgcaagagccctgttctccttgactttctgcaggacaacaacaacagtaagaacaacagtaataatagcagcaggaggagcaggaggggatgagcaatatggttccataggcggcacgacatcaagaaaaaaagttatatgaagtcctaggtccagtagttctatttgtctagtcatttcttcagtgtaactgtgatatatccattctaaaattgcgaagctagcacccatacgttagtatcacaattttgatatatcacagatacactgagtgagggcgatatctttaatccttgtttccttcctttgtgtctctaaatgtaatagttttgtttagacataggaccagacttcctatcttttcgtttcaagataagaaaagttcaccctgatagagtgaaattgagacgtaacttcattctatcattcataggagcttcaaatccaagcttccaagtctcggattcaatctcaacattggaagaaggggataacattggaagacaatctaccccagaaatgggatgttagcatcacaggttagctgaactgatctattggcactactgcgcccatagttgcaacgaaaagatctgtgcttcatgacaactacccataaagacatcaagtattgaaatggtgatgaaatttcaattggaaagagacatgtttaaaaaaggttgaaaaaaagttggtgtgacgccatgcaataaatactaattaatttca

SEQ ID NO: 107315 - DNA, 1025 bp, Zea Mays
accagagaaacacctctgagcattctaaagctcatagccctctccttccagagcatttcacatcgctctcatctccacctgcttgcatccagcgcctcgtcactctgcaaaacagggactcctccaggagggcgatggctgatgaggagtcatccccgagctcctgcctatcgtcagagaacgagcatggcctgcagtggtccaacagccctgaggccacatccatggttcttgctgcctgtcctcgctgcttcatctacgtcatgctcccacaagatgaccctcggtgcccccagtgcaagagccctgttctccttgactttctgcaggacaacaacaacagtaagaacaacagtaataatagcagcaggaggagcaggaggggatgagcaatatggttccataggcggcacgacatcaagaaaaaaagttatatgaagtcctaggtccagtagttctatttgtctagtcatttcttcagtgtaactgtgatatatccattctaaaattgcgaagctagcacccatacgttagtatcacaattttgatatatcacagatacactgagtgagggcgatatctttaatccttgtttccttcctttgtgtctctaaatgtaatagttttgtttagacataggaccagacttcctatcttttcgtttcaagataagaaaagttcaccctgatagagtgaaattgagacgtaacttcattctatcattcataggagcttcaaatccaagcttccaagtctcggattcaatctcaacattggaagaaggggataacattggaagacaatctaccccagaaatgggatgttagcatcacaggttagctgaactgatctattggcactactgcgcccatagttgcaacgaaaagatctgtgcttcatgacaactacccataaagacatcaagtattgaaatggtgatgaaatttcaattggaaagagacatgtttaaaaaaggttgaaaaaaagttggtgtgacgccatgcaataaatactaattaatttca

SEQ ID NO: 107316 - DNA, 3253 bp, Zea Mays
atgccgaaaggcaaggcaaacgcaaatgccacaacccacctctcgactcgccgccgcagccgcatgacacccaccgtcggctggccatcccctcgggtcgccacccccttcggccgctgcctcacagctcgctgcatcgtcagtctcggcctccacaaccaccaagtcctcctatcccgctttgccgccgccttcaatgccctcgcgtccccgtcccgcaacgccgccgccgccagccggccatccgttgcgctcgccactctcctcgggcgctgctgcaccgtgcgctgcctcgcccagctccacgcccgcatcatcctactcggtctccacaaccaccacgccctcctcgcccgcttcaccaccgcctgcgatgccctcgaatgcccctccgtcgccgcctctttcatcgccgcgcttaccgactcccacgccgccccgctccgcctccgcaacgccgtgctcgcgtccctcgcccgccacgccccgctccacgccgcgctcacggagttcaacctcctccgacaggccgcgctcccggactctttttccttcccttgcctcctccgcgcgtgcgcccgcgtatcctgcctccccgctggacgagccctgcacgccgccgctatccgccttggcgtgcacgccgatctcttcatccgcactgcgctcatccagttctacggcaggtgcggcgtggccgacgcggcccgggcgctattttatcaaatcgacatccccagtgaggtttcctggaccgccattatcgttgcctacgtcaacaatggtggcatcatagacgctagagctctgtttgatacaatgcctcaaaggaacgtggtgcactggaatgtgatggtcgatggttacgtaaagtgtggggacttggagggcgcaaggaggctgtttgatgaaatgcctgagagaactgctacagcatgcacatctttgattggtgggtatgcaaaggcagggaacatggaagctgcgagattgttgtttgataagttagaggaccgtgatgtgttctcatggtcagcgatgatatcaggttatgcacagaatggttaccctggcgaggctttgaggacttttgatgagttccaagggcaaggcatacacccagacgaacttgttgtggttggcctgatgtctgcatgctcccaactaggtaacatcaggttggcaagttggattgaagattacatcacaaagtactctatagatatgaacaatgctcatgtgttggctggtcttgtgaacatgaatgcaaagtgtgggaacttggagagggctacttttttgtttgagtctatgccagttcgagatgtgttttcatattgttcactgatgcaaggttactgcctccatggttcagctgacaaggctgttaagcttttctctcggatgcttttggagggactcacccctgacaatgctgtgtttacaattgttttaacagcttgctgtcatgctggtctagtagaagaagggaagaagttctttgatataatgaagaatgtgtacttgatggtgccatctggtgagcattatgcttgccttgtcaatcttcttggacgttgtggtatgctagaagatgcatattggcttatcatgtcgatgcccgggaaacctcatcctggagcatggggtgcactgttgggtggatgcaagcttcactgtaatatagagcttggaaaaattgcagcaaaaaaactttttgaaattgaaccggataatgctggaaattatgtctccctgtcaaatatgtatgctaacattgacaggtggggagatgtttctgaagttagggctgagatgactggaaagagaataaccaaaatagcagggcgtaccctagttttgcagtgaagcagtgttgaccagaatggtgtatttatcttgtaccatgttactggcccccattgaaaacttgaggctgtgaataaacgtaaaatgagatatcatgctcaatgcatatggtggaagtcatcatatggtgatatagatttggtggtcaacaggctgagttcatacactggaaacctttttctcaaatacacaggggagctgcgtaccattggattgagaagaacacctaagtacaaaaacaaaaagaccaccacaccaacacagccgtaccaaatacacacacatacactcaaacccaacctcataggtggcatacatctggaccgagttaagacacttccattagcttagagttcacattgccagactcagctgggtggatgctttgatttttggtattgtgaaagatcagggtgcttctgtacaaatgttggaatatgggcctgattaagacacagagttttgacatttgctgttaagaactcttactgcttccatggcctgctgtttgctacttcaaatatatgttttcttacaacaacaacaacaacaaagccttttagtcgcaacgtcctctttccttctcaacgtcggccagctgtttggcgcgctcctgcgcacggcacacgtccctggctcggcgacgcctggtgtacgtgcgcccgaacatgacagcactctaacatgtttgtgccagtgtgataactgcatgactgagatattgatagggcctaagctttttcttaagcagcttttgctagctgcctagagtctagagaagcaacttgctgcagaagttgatgaaatgaaaacctatgtgtttggcaacctggcttttctatgtctttttcatgcgtgtcctcctttgggaccctcgtgtcacagcctgtaccagaggactgaaggcgccattctctccagagctgcagaggcagcatccaagcctggtttctcttttcttgcccttctaccactgatccctctgatccaatctcactgcgtgctgctgccaggtcaaatcaatgtctacctcgtgccctctaccgcacacctgatcgtgcttccctggccgctgtctccccttcttagcccccatggaggcagaaattgggctgacactgacagggcctgcaccagtctagaggctgctcagctcctgccgccaccatggaggggatctcatcaaaggagagctgagggacacagaaggggtagtgggcggaggttgagtgcgtatggagggaggtgcagcgaagaagctgaggctgagccatggacagaaaaagctgctcgctcagtcaccctgcgctttagaggaacatggtttgtcagtagaaattggagacatgctgggccattgtcaagttcatgggtgaagaattga

SEQ ID NO: 107317 - DNA, 1101 bp, Zea Mays
gcgctcccataggcgcctcggcgagcggcgaatctgtttcatccgctgcaagtgatccacaccaggcgcgcccccacaacaatccgcggcgtctctctccgcgcctccgctccacagaaccagctggggctagcccgccgcgcagcgcagccacaaattaaacggagcccggcctgggcatccattattcgttgcagtagtcgcagctgacggacgactgaaccaccgacagacaacatggccgcctccgcctccaccgtctccggcctcgccggcgcctccctggccagccgcccggcgttctccaccagcttcacgcggggcagccgggtgtcggcgaggaaccccctgatgagcaggaacctggagaggaatggcaggatcacctgcatgacgtttccccgggactggctgcggagggacctgagcgtcatcggcttcgggctcatcggctggatggggccgtccagcgtcccggccatcaacggcaacagcctcacggggctcttcttctccagcatcggccaggagctggcccacttccccacgcccccgcccgtcacctcccagttctggctgtggctagtgacgtggcacctgggcctgttcatcgtgctcaccttcggccagatcggattcaagggcaggaccgaggactacttcgagaagtgaagcggttaagatcctatccatcatccctggtgctgcgctgcgttgcgttgcgtgcgtgctcgccgctatcgaacctttgctgtatagggttccgatttcgtcgaatgtaatgtatgatgctacttttgagcttcaatgtaaaatctatgccgtccggccccaacgcgctcaggtttaatttgatgcatctagctactagtatccctctcagctacttattactctgataaaaaaagcattttttttctagactacatcaggtcaaacattaaaattactaccttcgtcgtaaaaaaaacatattgtgtttagggtttagggtatcaatctaggtagagcttgttggggcgaaggcaaaggcgccacccttcgctcgaagccttcgctgcagcagctgagctaacagaaacaaaacaggcagggacaccc

SEQ ID NO: 107318 - DNA, 582 bp, Zea Mays
tttatgtaatgttgattttgtactaaatgaaacatcactaataagtgcaacctgtatggaaatcacctggcctcagaaaggcccaacagaaatcacatgcttctttacctctggtgtccgtgctactggcccaagccgagggcagtcttggctccaaaaccaagtgggaaagaaaccttcacctcgaatggttctcatggcccctaggtatgaattgaaccagccttcgaatgaaagttattcgattttcagtcagctgtttggttgcagtctcaatgcatttttctatttcccgtttggttgtgtagaattgaggcatgttgaggtgtacgtccaaatgcatatgctggaaaggtagtatatcagctgcaactgtttgtcagcagaaccaactggtggagacgatccagagccccgagttgtggttgctttaggcgattcatctgaacccgtcctgtcccatgtaatagaaagctctgctatagaaaatatacgtgtagcctttcgtctcacatgtatcgtccgtgcacattctatcacgcgacgcgtccgttgtatgatgctcgtgctttgtcgctcctc

SEQ ID NO: 107319 - DNA, 2345 bp, Zea Mays
gctaacgtggcagacctcaaagcatcactcacacaccatcgtcctctccttttgccagcaccgcgaacccgccaccagccttctcccacccacgaagtacggaaggctgccggaaggagctctcacctcacatccatctctgtcgcgcccgtcatcctcctcctcctcccctcctcaactgctatcggatttgcgctgcagtggagatcgacccgggctgggaatttctttcgttggtaaggaaccctaatttggtcggatgggattttcatcttcgacgaagcccgcgagattgatcgaccttagctgacgcgagggattggaaagcgaacgctcgggcgtagttaattttctaggaagattggggtttcagctcaaacccccatgctcgatgctgaggacgaccctggcgggagatgacgaggatcttcgtgcagcgcgggaccgccggctcctcgtccagctccggccgctcgggctcgcaatcagcgcagcagccggcagcagctgcccgggaggagttgccgttgcaacctcagccacagctaccagaactattggctatagatgatgtaactgagcatttaaatgagggcaacgagaacaacagtagcagaattaagtttttgaggacggatgacaccatttcagagagctcgagctacgcagaggagagggctgccagggagaagcctcctaaggatgactctaatgtaatcaaccccacttccttggtagaggaaccgatagtgctccatacccctgatcagattgaacatggaaattctgtgccgtcaggaactaattcatcacagatggtgggtgcagcatcgcacccgccgccaccgccagctccgcctccaaaatcattgttggggaatagtgggttgtggagaatgggacctggaagttccaacagtgtgcggattggatctccaagaagaccagtagcttggccaccagtggcagctcggacatctgcttcaggttctcgtccttcttcgcctaggtcactcgttgatggtgaaggttacaatagtgctgatgaacagggtccctgttacgcctcgagttatgatgattcggaaagagagcgtatgtttgagcatgacctaaggcgagtgaaagggttggaaatcagaaagacggccgaagatgggaactgtctattcagagctgttgctgatcaagtttatggagatgcagaagcttatgacatggctaggcagatgtgtgttgattatatggaaagggaacgggatcatttctctcagtttataactgaaagttttacattatactgcaagaggaaaaggagagacaaggtttatggcaacaatgttgagatccaagcatttgcagagatgtacaatcgtcccattcacatatattcctacagtacagagcccattaacatttttcaaggaagctacaacacagacactcctccaattaggttaagttaccatcatggtaatcattacaattcagtggttgatccccgccgacagactattggggcaggccttggatttagctcttttagagggactaatgttgacagggatcaggtgaaggctgcaataaaagctcagcaagaccagcaaattgataatgcactgatggcagaagggcgattctactctgatctggagttaacagagagggaaatagaacggatggtgatggaagcctcgcgttcagaatatctggccaaggagaaaaagcttaacataagggaatcatcgacatcaggggcagagccatcttcatccgctgcaattagtggttcctctcgatcagttgctggagcggacagaagcagcgaggactactttgtgcttccagacactgtgctgactcgcagcatgcagctgcttctcgcaatgggcttcggctacaaccaggtcatggaggcctacagcatattcggcgaggatgtggactcgatggtctgctacctggtggagaccggaggagcctcggcaggtggtagcaatcgccggaaaggaaaggctgctgagtgatgtgtgcaccttcattgctgtgaatgtaattgatggaaaacgttgggcacaactcataccagataatgacagccttatgagttgagatgtcgatatacctgctaccttatgggtgatgaataaatggaactcacaactcttctcgatgccttctggtgatcaagttaaataattaatgatagttggtggttgggattctgggaaaatttgtgggtcaccctggtgccctcattgtgatttttgtgggaactgcgaagctcgtggtgtatgtggggtgtgaacattctctatatcttttcatctttaacgtctcctaaa

SEQ ID NO: 107320 - DNA, 2078 bp, Zea Mays
aaagcatcactcacacaccatcgtcctctccttttgccagcaccgcgaacccgccaccagccttctcccacccacgaagtacggaaggctgccggaaggagctctcacctcacatccatctctgtcgcgcccgtcatcctcctcctcctcccctcctcaactgctatcggatttgcgctgcagtggagatcgacccgggctgggaatttctttcgttgctgacgcgagggattggaaagcgaacgctcgggcgtagttaattttctaggaagattggggtttcagctcaaacccccatgctcgatgctgaggacgaccctggcgggagatgacgaggatcttcgtgcagcgcgggaccgccggctcctcgtccagctccggccgctcgggctcgcaatcagcgcagcagccggcagcagctgcccgggaggagttgccgttgcaacctcagccacagctaccagaactattggctatagatgatgtaactgagcatttaaatgagggcaacgagaacaacagtagcagaattaagtttttgaggacggatgacaccatttcagagagctcgagctacgcagaggagagggctgccagggagaagcctcctaaggatgactctaatgtaatcaaccccacttccttggtagaggaaccgatagtgctccatacccctgatcagattgaacatggaaattctgtgccgtcaggaactaattcatcacagatggtgggtgcagcatcgcacccgccgccaccgccagctccgcctccaaaatcattgttggggaatagtgggttgtggagaatgggacctggaagttccaacagtgtgcggattggatctccaagaagaccagtagcttggccaccagtggcagctcggacatctgcttcaggttctcgtccttcttcgcctaggtcactcgttgatggtgaaggttacaatagtgctgatgaacagggtccctgttacgcctcgagttatgatgattcggaaagagagcgtatgtttgagcatgacctaaggcgagtgaaagggttggaaatcagaaagacggccgaagatgggaactgtctattcagagctgttgctgatcaagtttatggagatgcagaagcttatgacatggctaggcagatgtgtgttgattatatggaaagggaacgggatcatttctctcagtttataactgaaagttttacattatactgcaagaggaaaaggagagacaaggtttatggcaacaatgttgagatccaagcatttgcagagatgtacaatcgtcccattcacatatattcctacagtacagagcccattaacatttttcaaggaagctacaacacagacactcctccaattaggttaagttaccatcatggtaatcattacaattcagtggttgatccccgccgacagactattggggcaggccttggatttagctcttttagagggactaatgttgacagggatcaggtgaaggctgcaataaaagctcagcaagaccagcaaattgataatgcactgatggcagaagggcgattctactctgatctggagttaacagagagggaaatagaacggatggtgatggaagcctcgcgttcagaatatctggccaaggagaaaaagcttaacataagggaatcatcgacatcaggggcagagccatcttcatccgctgcaattagtggttcctctcgatcagttgctggagcggacagaagcagcgaggactactttgtgcttccagacactgtgctgactcgcagcatgcagctgcttctcgcaatgggcttcggctacaaccaggtcatggaggcctacagcatattcggcgaggatgtggactcgatggtctgctacctggtggagaccggaggagcctcggcaggtggtagcaatcgccggaaaggaaaggctgctgagtgatgtgtgcaccttcattgctgtgaatgtaattgatggaaaacgttgggcacaactcataccagataatgacagccttatgagttgagatgtcgatatacctgctaccttatgggtgatgaataaatggaactcacaactc

SEQ ID NO: 107321 - DNA, 1552 bp, Zea Mays
ggaccgtaccggaaaatatcgggagcaaaaaatcagaccagattttcccccgtgaggcatgaatccagtgttccaagctcccagcggaacaaacaaggaccaatccgtccagggatcggtggagcccgatccgttcgattcgtcgaccaagggagcggcgaagccgcagtcttcatcgtcgtcgctgatcttccttggtacggggtgctccggctcgttgcccgacacacggtgcctcctcaagccgtcgacgccgccctgcggcgtctgttcgatgggcgtctccctccctccggagcggaaccccaactacaggctgaacacctccctcttgatagattattgccatgacgaaacccacaagtacatcctaattgacattggcaagaccttcagagaacaagtcctccggtggtttgtccaccacaaagttccttccgttaattcaagggttctctgcactgcagatcatcctgactcatgagcacgcggatgctgtcttaggccttgatgaagtctgggtggtacaaccaagaaatggcagaaatgacattgaacaaattcctatttttctcacacaattcaccatggacagtatcgcaagaagatttccctacttgatggagcagaagccagaggatggtgatgaagatgcccaagccgcgaaaattgactggaagataattgaggatgatgtcgacaaaccatttgtagcatcagggctagagtttgtgccgttgccggtaatgcacggagaggggtatatttgtttaggctttttatttgggaggagagccagagttgcatatttatctgatgtttcgagatttctacctaaaactgagaacgttatttcaaagtctggtgctggacaacttgaccttcttatattagaagcaaacgctttgcatggagtgggagattcttccagcacccatttaactctgagtgaggtcatttaactctgagtgatactttccttgatgttttttaatcagattctcttaacaaactgtcaagtgtttcttgtgggggaaagtaataatttgttcttcagcatgaaaccaatgttctatttttagcagagtcttgatgctatcaagaggatccgtcctaaacaagctcttttgattggaatgaggcatttttttgagcatgaaagagaaaaccagatgttggccgaatggtcaatcagagaaggaatatctacacaactggctcatgacggcctgcgtgtattcattgatttgtaataaggtatacaaggtcgctttgcagtattcgaggactactgtattcattgatttgcagcatgccagcatccatatgcccatatctctgttgctgattgtacgaagatctgccagaccagtagtctagcaattattttgtgattttttatgtatccaaaagattgtaagtttggtcatgttgatatttttatacactgcagtatattgtattgttctcgtagattttaattggataacagaatgatgtcctaagccaacagaaaataaaagattatggatgtggtaacaagttaaaggat

SEQ ID NO: 107322 - DNA, 1465 bp, Zea Mays
cgccgccggccggcgtcaccatgaaacaaccccatcaaggtgggaggaccgtaccggaaaatatcgggagcaaaaaatcagaccagattttcccccgtgaggcatgaatccagtgttccaagctcccagcggaacaaacaaggaccaatccgtccagggatcggtggagcccgatccgttcgattcgtcgaccaagggagcggcgaagccgcagtcttcatcgtcgtcgctgatcttccttggtacggggtgctccggctcgttgcccgacacacggtgcctcctcaagccgtcgacgccgccctgcggcgtctgttcgatgggcgtctccctccctccggagcggaaccccaactacaggctgaacacctccctcttgatagattattgccatgacgaaacccacaagtacatcctaattgacattggcaagaccttcagagaacaagtcctccggtggtttgtccaccacaaagttccttccgttaattcaagggttctctgcactgcagatcatcctgactcatgagcacgcggatgctgtcttaggccttgatgaagtctgggtggtacaaccaagaaatggcagaaatgacattgaacaaattcctatttttctcacacaattcaccatggacagtatcgcaagaagatttccctacttgatggagcagaagccagaggatggtgatgaagatgcccaagccgcgaaaattgactggaagataattgaggatgatgtcgacaaaccatttgtagcatcagggctagagtttgtgccgttgccggtaatgcacggagaggggtatatttgtttaggctttttatttgggaggagagccagagttgcatatttatctgatgtttcgagatttctacctaaaactgagaacgttatttcaaagtctggtgctggacaacttgaccttcttatattagaagcaaacgctttgcatggagtgggagattcttccagcacccatttaactctgagtgagagtcttgatgctatcaagaggatccgtcctaaacaagctcttttgattggaatgaggcatttttttgagcatgaaagagaaaaccagatgttggccgaatggtcaatcagagaaggaatatctacacaactggctcatgacggcctgcgtgtattcattgatttgtaataaggtatacaaggtcgctttgcagtattcgaggactactgtattcattgatttgcagcatgccagcatccatatgcccatatctctgttgctgattgtacgaagatctgccagaccagtagtctagcaattattttgtgattttttatgtatccaaaagattgtaagtttggtcatgttgatatttttatacactgcagtatattgtattgttctcgtagattttaattggataacagaatgatgtcctaagccaacagaaaataaaagattatggatgtggtaacaagttaaaggat

SEQ ID NO: 107323 - DNA, 1407 bp, Zea Mays
cgccgccggccggcgtcaccatgaaacaaccccatcaaggtgggaggaccgtaccggaaaatatcgggagcaaaaaatcagaccagattttcccccgtgaggcatgaatccagtgttccaagctcccagcggaacaaacaaggaccaatccgtccagggatcggtggagcccgatccgttcgattcgtcgaccaagggagcggcgaagccgcagtcttcatcgtcgtcgctgatcttccttggtacggggtgctccggctcgttgcccgacacacggtgcctcctcaagccgtcgacgccgccctgcggcgtctgttcgatgggcgtctccctccctccggagcggaaccccaactacaggctgaacacctccctcttgatagattattgccatgacgaaacccacaagtacatcctaattgacattggcaagaccttcagagaacaagtcctccggtggtttgtccaccacaaagttccttccgttaattcaatcatcctgactcatgagcacgcggatgctgtcttaggccttgatgaagtctgggtggtacaaccaagaaatggcagaaatgacattgaacaaattcctatttttctcacacaattcaccatggacagtatcgcaagaagatttccctacttgatggagcagaagccagaggatggtgatgaagatgcccaagccgcgaaaattgactggaagataattgaggatgatgtcgacaaaccatttgtagcatcagggctagagtttgtgccgttgccggtaatgcacggagaggggtatatttgtttaggctttttatttgggaggagagccagagttgcatatttatctgatgtttcgagatttctacctaaaactgagaacgttatttcaaagtctggtgctggacaacttgaccttcttatattagaagcaaacgctttgcatggagtgggagattcttccagcacccatttaactctgagtgagagtcttgatgctatcaagaggatccgtcctaaacaagctcttttgattggaatgaggcatttttttgagcatgaaagagaaaaccagatgttggccgaatggtcaatcagagaaggaatatctacacaactggctcatgacggcctgcgtgtattcattgatttgtaataaggtatacaaggtcgctttgcagtattcgaggactactgtattcattgatttgcagcatgccagcatccatatgcccatatctctgttgctgattgtacgaagatctgccagaccagtagtctagcaattattttgtgattttttatgtatccaaaagattgtaagtttggtcatgttgatatttttatacactgcagtatattgtattgttctcgtagattttaattggataacagaatgatgtcctaagccaacag

SEQ ID NO: 107324 - DNA, 893 bp, Zea Mays
ctcgaatgcacccacgtacccgacgacgcctgcacgcccgccccggccccgcaatcgcgtctgcatccacgtaacgtacccccgcgcgcttcacggcttgacgcccgtccgaccgtccgacatcccccatggcgccctcaccgctccacctgcgccactacttatccttctccgcgccccgcctctgccgtctgcccccacccctccccttcccctgctcctcgaccacctcaacgagcttctgctccgacgacgacgacgtgccgccacatccacatggcggacgacgccgtcgccggcggagcggccgttcgctgcgcagggccggcgccggcctcgctgtcttctagcaggaagcagcagcagcagcccgacgacgccggctgcggcagcagcgacgaccactaccagcacgacgtgatcatgctgaggcggacgaggagcgggcgggcgttcccgccgccgatctccgtgatcggcaagggcgggcggccgtggctctgcctgcgggcgcaccgcgagggtggacgcctcgtgctgcggcagatgcgcctgccgtcgcaggagctgctgcagccctgcaaggaggacggcaggttcaagctcctcatgcacccggaggcccgcgcgcggccgtgcgggggcggcacactgcaggaacggcaagggaatgatagctagcgctcttaattgatcagctgatcagatgatctgccgccacgcacacgtcgtcttgtatgggctggctgctacaatgcaaccggtagatctccctgcttagtttcttgagatcgagggctccagttcttgctttgcattctgcaaccgttgtccaaatgtccacaatctttgccttccgtcaaattttaatacatggtcggaacattgaggca

SEQ ID NO: 107325 - DNA, 1328 bp, Zea Mays
agctttcaggcaatgtttctgcattgcgtgcgcgtgactgcatcttccgttttcagagctcagagttttcgttgtttgtttcggatgacgacctgtcgcaccgcgaacgcagccgccgtcgtccgtctcctgctgctgtgctctttctgcgccgccgccgccattgcctgcgaccctcctaatggcgccaagttcgggtacaccggctccgtcggtcccgaccactggggcgcactgagccccagcttcaggcagtgcgcgacagggacgaagcagtccccgatcgacatctccacggcccaggcggtctccaacccggcgctgcagccgctccacagggactacaccgtggccaacgccaccctcgtcgacaacgtcgtcaacgtcgcgctgcgcttcgacggcgacggcggcgccgggagcgtgagcgtcggcgggaagctgtacacgctgaagcaggtgcactggcactcgccttccgagcacaccgtcgacggccgccggttccccgtcgagctccacatggtccacgccagcgacgacggcaacgtcaccgtggtggccatgctctaccggtttggcaggccggatcctttgctctggcagatccaggacaagctggccgcgctgcacgcggagggctgcagagcggacaagggcgctccggtcgccgccggagacgtcagcctgtggtcgctcaggctctactcccacacgtactaccgctacgtcgggtcgttcaccacgccgccctgcaccgagaacgtcatctggagcgtcctggcccaggtgagggagatgacggtggaccaggccgccgccctgatggcgcccctggagcaagcttacaggcgcaacaacaggccgacgcagccgaggaacggccgcgtcgtccaggtctaccgcaacgggttcatcaacaagaagacggcgccgtagccgtgccatgcgctgccccgtatgcgtggcctggtccttggtggcgacgccaagtcctctgggttacttgtcagttgtttctcgtcgaagtctttgtgttcttctgcacttgttctgccgccggttttggtgctctcgggactgaatgttcgtcagtgggtctgtgggtttagctaggttaggagatttaagctgtttagtttctgcaaaatctatcctccttatctgttagtaatgattagcatgttgttggtcgacgcatgatcttcattgcagcgaataacgtaacagatagacgcaatcatctaagagcatcctctaaattattatttacagagtcatttgcataaaatcattttatatattttttcaatctccaacatcttttc

SEQ ID NO: 107326 - DNA, 1394 bp, Zea Mays
gatccatcttctgacggatacgtggaatcaaccggcttgcgtgtgccctcctttttttttttgcagggatcgagtgcgagcgaggccgatctgtctgcagtgcacgcagcagcaaaccaaagagctcagagttttcgttgtttgtttcggatgacgacctgtcgcaccgcgaacgcagccgccgtcgtccgtctcctgctgctgtgctctttctgcgccgccgccgccattgcctgcgaccctcctaatggcgccaagttcgggtacaccggctccgtcggtcccgaccactggggcgcactgagccccagcttcaggcagtgcgcgacagggacgaagcagtccccgatcgacatctccacggcccaggcggtctccaacccggcgctgcagccgctccacagggactacaccgtggccaacgccaccctcgtcgacaacgtcgtcaacgtcgcgctgcgcttcgacggcgacggcggcgccgggagcgtgagcgtcggcgggaagctgtacacgctgaagcaggtgcactggcactcgccttccgagcacaccgtcgacggccgccggttccccgtcgagctccacatggtccacgccagcgacgacggcaacgtcaccgtggtggccatgctctaccggtttggcaggccggatcctttgctctggcagatccaggacaagctggccgcgctgcacgcggagggctgcagagcggacaagggcgctccggtcgccgccggagacgtcagcctgtggtcgctcaggctctactcccacacgtactaccgctacgtcgggtcgttcaccacgccgccctgcaccgagaacgtcatctggagcgtcctggcccaggtgagggagatgacggtggaccaggccgccgccctgatggcgcccctggagcaagcttacaggcgcaacaacaggccgacgcagccgaggaacggccgcgtcgtccaggtctaccgcaacgggttcatcaacaagaagacggcgccgtagccgtgccatgcgctgccccgtatgcgtggcctggtccttggtggcgacgccaagtcctctgggttacttgtcagttgtttctcgtcgaagtctttgtgttcttctgcacttgttctgccgccggttttggtgctctcgggactgaatgttcgtcagtgggtctgtgggtttagctaggttaggagatttaagctgtttagtttctgcaaaatctatcctccttatctgttagtaatgattagcatgttgttggtcgacgcatgatcttcattgcagcgaataacgtaacagatagacgcaatcatctaagagcatcctctaaattattatttacagagtcatttgcataaaatcattttatatattttttcaatctccaacatcttttc

SEQ ID NO: 107327 - DNA, 1725 bp, Zea Mays
gtctcagaagatgaaacaaaggagcggttgcaggaagacgggcggtggcgtcgatcgagtgggcgcgcggtgaccgacatgcttcctatatatgcatgcgtgctcgttggtggagtccaagcgcaagttaacaccacaccaccatccccgcttggatcacctggagcttccgggccactcacccacccatcctgcacaggctgacccatctatctttccgaaagggtggtgtagcggcgagctcggagagggatcgagtgcgagcgaggccgatctgtctgcagtgcacgcagcagcaaaccaaagagctcagagttttcgttgtttgtttcggatgacgacctgtcgcaccgcgaacgcagccgccgtcgtccgtctcctgctgctgtgctctttctgcgccgccgccgccattgcctgcgaccctcctaatggcgccaagttcgggtacaccggctccgtcggtcccgaccactggggcgcactgagccccagcttcaggcagtgcgcgacagggacgaagcagtccccgatcgacatctccacggcccaggcggtctccaacccggcgctgcagccgctccacagggactacaccgtggccaacgccaccctcgtcgacaacgtcgtcaacgtcgcggtctgtcgttgcctgtttttgtttgtttgttttttttttttcaaacacaatgctgcgccgcggatcgaattgtattattgtacgactgccgggcccgtcgatcgatgtgtctccaataatttctccgccggtgcatgatgcacgcagctgcgcttcgacggcgacggcggcgccgggagcgtgagcgtcggcgggaagctgtacacgctgaagcaggtgcactggcactcgccttccgagcacaccgtcgacggccgccggttccccgtcgagctccacatggtccacgccagcgacgacggcaacgtcaccgtggtggccatgctctaccggtttggcaggccggatcctttgctctggcagatccaggacaagctggccgcgctgcacgcggagggctgcagagcggacaagggcgctccggtcgccgccggagacgtcagcctgtggtcgctcaggctctactcccacacgtactaccgctacgtcgggtcgttcaccacgccgccctgcaccgagaacgtcatctggagcgtcctggcccaggtgagggagatgacggtggaccaggccgccgccctgatggcgcccctggagcaagcttacaggcgcaacaacaggccgacgcagccgaggaacggccgcgtcgtccaggtctaccgcaacgggttcatcaacaagaagacggcgccgtagccgtgccatgcgctgccccgtatgcgtggcctggtccttggtggcgacgccaagtcctctgggttacttgtcagttgtttctcgtcgaagtctttgtgttcttctgcacttgttctgccgccggttttggtgctctcgggactgaatgttcgtcagtgggtctgtgggtttagctaggttaggagatttaagctgtttagtttctgcaaaatctatcctccttatctgttagtaatgattagcatgttgttggtcgacgcatgatcttcattgcagcgaataacgtaacagatagacgcaatcatctaagagcatcctctaaattattatttacagagtcatttgcataaaatcattttatatattttttcaatctccaacatcttttc

SEQ ID NO: 107328 - DNA, 1773 bp, Zea Mays
caccacaccactgcacagtctgcaccacacggccacaccggtcgagaaagcgaaagccaaagccgcgaaggccgcggcggttagaagagaggagagcagaccgagagccgagaggcacgcgtcgtagcgagccagtcgatggggtgcatctcctcgaagctcctcccgccggggccaggcggcgacggcaggcgcgccacggtgcgcggccgtgtcgaacacgtcgtctccctcacctccaccacctacggcgtcctcgacctccaccccaagcacggaggagccgtcctccccgcatctgccgctgctgacgaagaggcggagaatgagcagcagcagcagccgccgccgccgccgcctcaggacaagccgataagcaaggagtggaagcgtgccagcatgcgtccgccgccaattgcggtcccgagcgccgacaagaagccggcggggaagccggagtccggcctggaggtcatcaacgcgtgggagatcatggccgggctcgaggagtcctacgccgccgggtcgccggcgaagaagccgtccaagccgggccggtggtcgccggccagggtcatcgccatggccctgccgtcgcccaagaggtcggcgacgaggcggaagaacacgccggggaaggagaacagcccgctccagcgttgctcgggaaataccagcagcaggggcagggacaaggacaagccaggcgacgtcgacaccgacagggtcctccgcccgtacaattcgatcgacaactccaagctgtcgatggcgtccaagaggttctccccgggcagcgcgcggatcgtccgcaagcccagcgccgccgccgccgagaccaccggcggcggcggtggcggcatgtcgtcgtcgcggcgcagcctgagcccgctgttcgacccggagctgctggcgtccatcgagcgcgagctctcggaggaaggcgcccacgtcaagcggatggtagggtcggagaagcccaagcacccgaaggcggcgccgccggcgatcgtggcagaggggaagtgtccgcctgggggcgctgacgccgtcgtcctctacaccaccacactccgcggcatccgcaggaccttcgaggagtgcaacgccgtgcgcgcggccatggaggtccacgacgtgaagctgatcgagcgggacgtgtccatggactcgggctaccgcgaggagcttcgcctgctgctgggcggccgggaggtgcgcgtgcccgccgtgttcgtgcggggcaggcacgtcggcggcgccgccgaggtggccaagctggaggaggaaggcaagctgaagccgctgctggagggcctgccccgggcgcgggtgtggtgcgcgggctgcgccggggtgcgcttcgtcatgtgccgcgactgcaacggcagccgcaaggtgctcgacgccgaccgcaaggagacggtcaagtgcggcgagtgcaacgagaacggcctcgtccgctgcccgatctgctcgtgaatcgtccgcgaacgatggggtggatcaggcgattgattggtggtgtcaaagttgtgcattgctgtgttcgattgggttgatctgcccgtctacccccacggctgcttttgatcttgctatatgcgatgtgcctgttgctctcggcaacagctgccactgtaatatgaacccattcatattgttgcatatgtagtttaattatctaatttaatcaaatgtaatttgattgcttcttattgactttttgtgctgatgatttgagaattctgctcgcttctttcgatccgcctt

SEQ ID NO: 107329 - DNA, 1259 bp, Zea Mays
agtcactcgtactcgctcgtgagtcgtgacttcgtgagcagcccagatcgccgcaggaccacctcttctgcgtcggtgcccgcagcttcggcttcgcggagtccatgtccaaggcggcgtgcgagtgcgagacggccaccgtgctccctgacgccggtgccgtccaactatgcgcccgcggtggtgctggtagcgccagccctcgtgccgacgacgcgggcgcgccagcggagtcggtcctgctccgggttccggacggcgtcggcttgggccatctgtttggcgcggcgctgcggcgggacgcgtccaccaagggcagctccaaccccaaggcggccgccgaggcggcggcgcgcaagggcgcgccgagcgcggactcgaggaggttgttgccggccacgacggcggcggccagcagcaagaccgccgtggtcatcggcgtcctgccggcgagcaaggtcaaggtggcggttgccaaggagcgtcgcgctcccggccgcgccgtcgtcgcccgcgcgtggcgccggccggcggcaggggccagggtcttcgcgagcgaggccgtggggccggagcccgtgtccccgaaggtgtcctgcttcggggccgtactgtcggagagatctgccgcggcgcggcgagaggggggagaggaaggggaagagagcggcgccggcgggtgctgggcgagcctgggggccgcgcttcttggcctatgttgcagcggcgatggtcgtgaaggccgccacctgtgccgcgctagcgaaccaaatccgaaggccacggctctggagcctcatcggcggcagtgcgtcgccgtgacgtcgccaccgcggccggtggcggggcttggagacgtgaagcgcctcgcttcgcggcgttggccagagaccatggcgcgggagacggtttgaatgtcctccccgtgcttcgtgaggcacacgggcacggcggcagacttgtacgacgtccacggacaacggttgccgatgcagcgccagggaaactcctcggacctgctcctgaccgttctagtgttggagtcctgtggctgtggtgtgtgtgcatgtgtcactttttttctgtttgtttgtaagctccatctcgtgccatgtgtatcgacattggactccggtcctgtttcctttgtcattcgagtagctactagcaatttggatatcagttctcaagatggtagagccgacctgaaaagttgaaaaaagcttgggcttgacaaatgacaaactgtgattaaaaac

SEQ ID NO: 107330 - DNA, 1882 bp, Zea Mays
agagtgcggtgcggacacaacacaagcaaagcgagcacagacagacaccgttacgcgagcacgcaacgcgacgaggagaggagacgcttaccgagcgaagagcactaggctccgccatcgacgcacgcacgcaagcgtgaagcgtcctcgactcgcctttcggttcggttcggttcctcgccgtcgcgggcggcctcgtcgggcgaccgctctctcggcatttctttctatctggttgctgtgtgtggattggaggccttgtgagctcgcggaggcggcgcggttcatggccgtggcggagcggttcggaactcggtggccgccgtctcgcttcttcgttgcagtgctcctcgtcctgctcacagatggcggagcggcgtggaagagagcagaaggcctgtcgatgggcatcaactacgggcagatcgcggacaacctgccgtcgccggcgagggtgtcgtacctggtccggtcgatgcaggtgagcaaggtgaagctgtacgacgcggacccgtacgtgctgagcgcgttcgtcgacacggatgtggagttcgtggtgggcatcggcaacgagaacgtgtcggcgatggtggagccggcggcggcgcgggcgtgggtggagcggcacgtgcagccgtacctcccgggcacgcgcatcacctgcatcaccgtcggcaacgaggtgctcaagggcaacgacagcgcgctcaaggcgagcctcctgccggccatgcagtccgtgtaccaggcgctgaccgcggtgggcctgcagggccgggtgaacgtcaccacggcgcactcgctggacatcatgggcagcacctacccgccctccgccggcgcgttcggccccgacgccgtgccctacctccagccgctcctggccttcctgtccgcggcgcggtccccgttcctcatcaactgctacccctacttcgcgtacaaggccgacccgggcaacgtgccgctggagtacgtcctgttccagcccgacgccgccggggtcaccgacgccagcacggggctcaggtacgacaacatgctgtacgcccaggtcgactcggtgtacgccgccatccagaagctgggccacaccgacgtcgacgtcaaggtctccgagaccgggtggccgtccaggggggaccccgacgaggccggcgccacgccggagtacgccaggacgtacatcggcaacctgctgcagaggatcgagatggggcagggcacgccgatgaggccgtcggcgcccgtcgacgtctacgtgttcgcgctcttcaacgagaacctcaagcccggcccggcctccgaacggaactacggcttgctctaccccgacggcacgcccgtgtacgatgtcggcctgcggggataccttccacccatggactattcacaaggcaccagagagggggtccgtttcttcgtcttcatcagcctcgttgccattgtatcgatcactctcagcttatcctgagagcatgagcattgccgtaaagttgatgaagaaagcgcggagactgaggacttcttgctgctaggatagcagatcgattacaagccctcggagaagcaactaaagtcggcatgttccatcaggcaagctttagaagcagaaatttgtctctgacttactacacggccagccaaaacggtcgaagtggtttttgatgacatccagcagccaaaactggctccgcgctgacagtaaagtagaactgactgaagattgcgggcgacacgcgcccaatgcacgcatagtccatttaatttgttctggagatgtcttctttatccaactcagcaactgtatatttgtatatcggccaaaaagaaaggaaataaattcaggtcaaggctggccatttatactagtttttttttt

SEQ ID NO: 107331 - DNA, 1908 bp, Zea Mays
agagtgcggtgcggacacaacacaagcaaagcgagcacagacagacaccgttacgcgagcacgcaacgcgacgaggagaggagacgcttaccgagcgaagagcactaggctccgccatcgacgcacgcacgcaagcgtgaagcgtcctcgactcgcctttcggttcggttcggttcctcgccgtcgcgggcggcctcgtcgggcgaccgctctctcggcatttctttctatctggttgctgtgtgtggattggaggccttgtgagctcgcggaggcggcgcggttcatggccgtggcggagcggttcggaactcggtggccgccgtctcgcttcttcgttgcagtgctcctcgtcctgctcacagatggcggagcggcgtggaagagagcagaaggcctgtcgatgggcatcaactacgggcagatcgcggacaacctgccgtcgccggcgagggtgtcgtacctggtccggtcgatgcaggtgagcaaggtgaagctgtacgacgcggacccgtacgtgctgagcgcgttcgtcgacacggatgtggagttcgtggtgggcatcggcaacgagaacgtgtcggcgatggtggagccggcggcggcgcgggcgtgggtggagcggcacgtgcagccgtacctcccgggcacgcgcatcacctgcatcaccgtcggcaacgaggtgctcaagggcaacgacagcgcgctcaaggcgagcctcctgccggccatgcagtccgtgtaccaggcgctgaccgcggtgggcctgcagggccgggtgaacgtcaccacggcgcactcgctggacatcatgggcagcacctacccgccctccgccggcgcgttcggccccgacgccgtgccctacctccagccgctcctggccttcctgtccgcggcgcggtccccgttcctcatcaactgctacccctacttcgcgtacaaggccgacccgggcaacgtgccgctggagtacgtcctgttccagcccgacgccgccggggtcaccgacgccagcacggggctcaggtacgacaacatgctgtacgcccaggtcgactcggtgtacgccgccatccagaagctgggccacaccgacgtcgacgtcaaggtctccgagaccgggtggccgtccaggggggaccccgacgaggccggcgccacgccggagtacgccaggacgtacatcggcaacctgctgcagaggatcgagatggggcagggcacgccgatgaggccgtcggcgcccgtcgacgtctacgtgttcgcgctcttcaacgagaacctcaagcccggcccggcctccgaacggaactacggcttgctctaccccgacggcacgcccgtgtacgatgtcggcctgcggggataccttccacccatggactattcacaaggcaccagagaggtagatctagttcttggtctttgcacttgcacacctccctgcctgcccattcccatcaggctatcacattgctctcgtacttttggtcttctgcagggggtccgtttcttcgtcttcatcagcctcgttgccattgtatcgatcactctcagcttatcctgagagcatgagcattgccgtaaagttgatgaagaaagcgcggagactgaggacttcttgctgctaggatagcagatcgattacaaggtaagacccttatccctggaccaagatcttgggtactttagcttctatgttggacaaaactggcgattcagttaagcttgaaccaccattgttcgctaggagcataagcttgcagaaatcttactggttcttttctcctacatgcagccctcggagaagcaactaaagtcggcatgttccatcaggcaagctttagaagcagaaatttgtctctgacttactacacggccagccaaaacggtcgaagtggtttt

SEQ ID NO: 107332 - DNA, 865 bp, Zea Mays
ctgctttagttttttctccccgctgcacgttaacattctctctcttataccctcgaaagctcgaaagatcccgcggcgcagcagccacccttctctcctctccgctcccaatctttgtcgtcgcctccctcgaagtcgccgctgccttcattccaccatggcgcttcacgccccggtcctcgtgatgaaggactcgctgaagcgggagtctggcgcgaaggttcacaaagccaacatccaggcggccaaggctgttgctgacatcattcgcactacattgggtcccagatccatgctgaaaatgcttctggacgctggacgctgatggccttttatttaataaatttgtaaattatatccaaccagttcatcagatcgtggccttttatttagatctaagaacaccaacacgcttaggcatttagttggatataattcatatgttgtacccaagaaagcagcacttaccgatgaactatatcttatcagtcgtgtaaacggaatgaaatataacaaaattgtttttattatctgcacattcccattatattttgtagcatataaccacaaggtcacaaccaatttgtatgatttaattggcgtatgaatccgagatgagtgtttcatatgattttttttacagactatgtacacaagcatttcatgaagaaattatttacttgactcgataagttccaggttcctgcttttgacatttattttcttggtcatcaacatgcgaagctttacatgtcttcatgtcagtggtcatcaaattttctccagtactgccttgagtagctgcagtggtgaccacacaagtgaacgagatgcaaagaaggcaggtaagctactgcaaatttat

SEQ ID NO: 107333 - DNA, 3455 bp, Zea Mays
atgacatgccgggaagtggcagcctcgctgcaccgatcgcttgccaagtttatcgtgcctgacaacccagagaaaatcctgtcgcttgtcgctgccaaggcaagccatcatagagctcttggctctgcggacctcacatgtgccctgcaggcatgcagggggcgaggcaaccgatggccgcttgtgctggagatccacgcgacatcagtcgtgcgtgggcttggggctgaccgccttataggcaacttgctgatcgatctgtatgcaaagaatgggctcgtgtggcaggcacggcaggtattcaaggagctttcttccagggaccatgtctcatgggttgccatgctgtcagggtatgcacagagtggtcttggaaaggaagctttcaggctttacagccagatgcattggactgctgttattcctacgccatatgttctgtctagtgtgctgagtgcttgcactaaaggaaaactttttgctcaaggtcggatgatccatgcccaagtttacaagcaagcattctgttcggagacctttgtgggcaatgcacttattgcactttacttaggatttggatcctttaagctagcagaaagggtattttgtgacatgctgttctgtgatcgagtgacattcaatacattgatctcaggacatgctcaatgtggacatggtgagtgtgctttgcagatttttgatgagatgcagttgtcagggctcaggcctgattgtgtgacagttgccagtctgcttgcagcctgtgcttctgtgggagatcttcaaaaggggaagcaactccattcatatttactaaaagcaggtatgtcttttgattacataactgaaggctcactcctcgatctgtatgtgaaatgtggtgacattgaaacagcacatgatatcttcaatctgggtgataggacaaacgtggtactgtggaatttaatgcttgtggcatatgggcagattagtgatctagcaaaatcttttgaaatctttggtcagatgcaagctacaggtatacaccccaaccaattcacctacccgtgcattttgaggacttgcacttgcactgggcaaattgaacttggagagcagattcattcattaagcataaaaaatggattcgaatctgatatgtatgttagtggtgtcttgatagatatgtattctaaatacggatgtcttgataaagctcgaaaaattctggaaatgcttgaaaaaagagatgtggtttcttggacctcaatgattgctggatatgtgcagcatgacttttgtgaagaggctcttgcaacattcaaagaaatgcaggactgtggagtttggccagataacataggactggctagtgctgcaagtgcttgtgctgggatcaaagcaatgcgccagggcctgcagattcatgctcgggtttatgtctctggttatgcagctgatatttcaatttggaacacgttggtaaacctgtatgcaagatgtggaagaagtgaagaagctttctctttgtttcgggaaattgaacacaaggatgagatcacatggaatggattgatatcaggttttggacaaagtcgtctttataaacaagctctcatggtattcatgaagatgggtcaagcaggtgccaagtacaatgtgttcacatttatttccgctattagcgctttagctaaccttgcagatataaaacaaggaaaacaagtacatggtagagctgttaagacagggcacacctctgaaactgaagttgccaatgctttgatttcactatatggaaagtgtggcagtattgaagatgccaagatgatcttttctgaaatgtcactgaggaatgaggtttcatggaatactatcataacaagttgttcacagcatggacgtggactagaagctttggatttatttgatcagatgaagcaagaaggtctgaaaccaaatgatgtcaccttcataggtgttttagctgcttgcagtcatgtgggtttggttgaggaaggccttagttacttcaaatccatgtctaatgtgtatggacttaatccaatacctgaccattatgcctgtgttgtggatattcttggacgagcaggccaacttgaccgtgcaaggagatttgttgatgaaatgcctatcactgctaatgcaatgatttggcgaacacttctcagtgcgtgtaaagtacacaagaacatcgaaattggggagcttgcagccaaacatctcctggagttagagccccatgattcggcatcatatgtcctcctatcaaatgcatatgctgttactgggaagtgggccaacagggatcaggtcagaaagatgatgaaagacagaggaattagaaaagaaccaggtcgaagctggattgaagtaaagaatgcagtccatgcattctttgttggtgatcggttgcaccccttgtccgatcagatatacaagtttttgtctgagctaaatgataggttatccaaaataggatacaagcaagagaaccctaatttgtttcatgaaaaagagcaagagcagaaagaccctactgcttttgtccatagtgagaagttagctgttgcttttgggttaatgactttgcctccttgtattcctcttcgagtgattaagaaccttcgtgtatgtgatgactgccacagttggatgaaatgtacctctgaagtcacaagaagagaaattgtattacgagatgtgtacagatttcaccattttaacagtggcagctgttcatgtggagattactggtgaattgggctgttgcaaagtgtttacagcacttttttttatagaaaaatccccccagtgctattcctaatggttttcattttaagatgtctggggtctacacttatatctgctattgtgacatgtatgtatctggaaatggattcgccatgcgaaatctagcatgtctagataaacatgtacagggctttggaaattggaagagccattcatacctgtcgcatgaagcaccattcattcagagtcaactagtcaagtgtctaaggttcactgcgttaaatgagaccatctgtaatcatgacatggattaagatatttgtcagactgcagaaatgcagatcaatatgctgtttactgactcaatcaggatcccttaaagtggtaacatttacgacttctgatgtctgtgccttcatgttcagaagttcttgtgtttatttcagattgaagagagtgcagaaacagatctcggtggtgatcttcttgaactgaagagggaaatctgggtgtgctctgctttgatcaattggttgcagaatgtcatatatggatattatgccttgctgcagtttgctctcttcctgtaatttggtgttttgatgatgataagagtttttatggccattatcttgtgaaaaaataacatttggaagttaatacaaatgtactaggttctgtagctcttctcagttctc

SEQ ID NO: 107334 - DNA, 3445 bp, Zea Mays
atgacatgccgggaagtggcagcctcgctgcaccgatcgcttgccaagtttatcgtgcctgacaacccagagaaaatcctgtcgcttgtcgctgccaaggcaagccatcatagagctcttggctctgcggacctcacatgtgccctgcaggcatgcagggggcgaggcaaccgatggccgcttgtgctggagatccacgcgacatcagtcgtgcgtgggcttggggctgaccgccttataggcaacttgctgatcgatctgtatgcaaagaatgggctcgtgtggcaggcacggcaggtattcaaggagctttcttccagggaccatgtctcatgggttgccatgctgtcagggtatgcacagagtggtcttggaaaggaagctttcaggctttacagccagatgcattggactgctgttattcctacgccatatgttctgtctagtgtgctgagtgcttgcactaaaggaaaactttttgctcaaggtcggatgatccatgcccaagtttacaagcaagcattctgttcggagacctttgtgggcaatgcacttattgcactttacttaggatttggatcctttaagctagcagaaagggtattttgtgacatgctgttctgtgatcgagtgacattcaatacattgatctcaggacatgctcaatgtggacatggtgagtgtgctttgcagatttttgatgagatgcagttgtcagggctcaggcctgattgtgtgacagttgccagtctgcttgcagcctgtgcttctgtgggagatcttcaaaaggggaagcaactccattcatatttactaaaagcaggtatgtcttttgattacataactgaaggctcactcctcgatctgtatgtgaaatgtggtgacattgaaacagcacatgatatcttcaatctgggtgataggacaaacgtggtactgtggaatttaatgcttgtggcatatgggcagattagtgatctagcaaaatcttttgaaatctttggtcagatgcaagctacaggtatacaccccaaccaattcacctacccgtgcattttgaggacttgcacttgcactgggcaaattgaacttggagagcagattcattcattaagcataaaaaatggattcgaatctgatatgtatgttagtggtgtcttgatagatatgtattctaaatacggatgtcttgataaagctcgaaaaattctggaaatgcttgaaaaaagagatgtggtttcttggacctcaatgattgctggatatgtgcagcatgacttttgtgaagaggctcttgcaacattcaaagaaatgcaggactgtggagtttggccagataacataggactggctagtgctgcaagtgcttgtgctgggatcaaagcaatgcgccagggcctgcagattcatgctcgggtttatgtctctggttatgcagctgatatttcaatttggaacacgttggtaaacctgtatgcaagatgtggaagaagtgaagaagctttctctttgtttcgggaaattgaacacaaggatgagatcacatggaatggattgatatcaggttttggacaaagtcgtctttataaacaagctctcatggtattcatgaagatgggtcaagcaggtgccaagtacaatgtgttcacatttatttccgctattagcgctttagctaaccttgcagatataaaacaaggaaaacaagtacatggtagagctgttaagacagggcacacctctgaaactgaagttgccaatgctttgatttcactatatggaaagtgtggcagtattgaagatgccaagatgatcttttctgaaatgtcactgaggaatgaggtttcatggaatactatcataacaagttgttcacagcatggacgtggactagaagctttggatttatttgatcagatgaagcaagaaggtctgaaaccaaatgatgtcaccttcataggtgttttagctgcttgcagtcatgtgggtttggttgaggaaggccttagttacttcaaatccatgtctaatgtgtatggacttaatccaatacctgaccattatgcctgtgttgtggatattcttggacgagcaggccaacttgaccgtgcaaggagatttgttgatgaaatgcctatcactgctaatgcaatgatttggcgaacacttctcagtgcgtgtaaagtacacaagaacatcgaaattggggagcttgcagccaaacatctcctggagttagagccccatgattcggcatcatatgtcctcctatcaaatgcatatgctgttactgggaagtgggccaacagggatcaggtcagaaagatgatgaaagacagaggaattagaaaagaaccaggtcgaagctggattgaagtaaagaatgcagtccatgcattctttgttggtgatcggttgcaccccttgtccgatcagatatacaagtttttgtctgagctaaatgataggttatccaaaataggatacaagcaagagaaccctaatttgtttcatgaaaaagagcaagagcagaaagaccctactgcttttgtccatagtgagaagttagctgttgcttttgggttaatgactttgcctccttgtattcctcttcgagtgattaagaaccttcgtgtatgtgatgactgccacagttggatgaaatgtacctctgaagtcacaagaagagaaattgtattacgagatgtgtacagatttcaccattttaacagtggcagctgttcatgtggagattactggtgaattgggctgttgcaaagtgtttacagcacttttttttatagaaaaatccccccagtgctattcctaatggttttcattttaagatgtctggggtctacacttatatctgctattgtgacatgtatgtatctggaaatggattcgccatgcgaaatctagcatgtctagataaacatgtacagggctttggaaattggaagagccattcatacctgtcgcatgaagttgaggcaccattcattcagagtcaactagtcaagtgtctaaggttcactgcgttaaatgagaccatctgtaatcatgacatggattaagatatttgtcagactgcagaaatgcagatcaatatgctgtttactgactcaatcaggatcccttaaagtggtaacatttacgacttctgatgtctgtgccttcatgttcagaagttcttgtgtttatttcagattgaagagagtgcagaaacagatctcggtggtgatcttcttgaactgaagagggaaatctgggtgtgctctgctttgatcaattggttgcagaatgtcatatatggatattatgccttgctgcagtttgctctcttcctgtaatttggtgttttgatgatgataagagtttttatggccattatcttgtgaaaaaataacatttggaagttaatacaaatgtactaggttctgta

SEQ ID NO: 107335 - DNA, 84 bp, Zea Mays
ccatcatggttgccaccatcatcgccccaacgctgggccttggaacggccagcaggcaacgaagtcggagagagggagggggag

SEQ ID NO: 107336 - DNA, 84 bp, Zea Mays
ttgccggcgcgggcacacgtgagcacggtgccccagcagcctacagacgaagcacctcaccggccgacgacacaccaccgcgcg

SEQ ID NO: 107337 - DNA, 930 bp, Zea Mays
atgggattcggctgttctcaacaacagatctggctgcaagtttccaacgggcatttgttttcatatgttctttacagggaaagtggtaaacgcaagtccctgccgtcgcagatttcccgaaccgacaaaagacaagcaaacaaaaagtctgagcaaatgaaagctagccagagcgacacactgcgtgcgaagcaccaaaacacgtacaaagagggaggggaaggaaagagggaggtcgcgacaaagaacgagattctgcaaaggctcatccagtcatccagatcagcttccacagctagctctccagaggcatgtctcacaaagataggtatcgtcatcgtcgacctatcagcatcgacagaatcccgattgtccttgggtttgaagaagcacctctccgactccgttggtggaaggagcatgcatcttgagataaattgctctgctggtgaatcctatagtagtggcggtaaatcatacagtcttggatatagagttgtaggcttccagaatctgatgcaattgtatgcacagaggacaaacacagtgctaggagaccagtatcttgtgtatggcaacacgagacttgagcctactgccacccttctattggggtggaacgggatgccactgttcacgtcggcaccagactgcgtggaggagcgtaaaacatttatctacttcactatgatcactacgcttattcacatcttgtcttatgttctaaattatatggctaaattgaaatctgcgacggcagggacttgcgtttaccacttcctttgtaaagaagaagagatgaaaaatgcccgttggaaacttacagccagatctggtgttgagaacaaccgaatcccatatgctggagatgagaacgatcaaagtagagctacgctacatgcggagattagccgagctcaagaaaattag

SEQ ID NO: 107338 - DNA, 1341 bp, Zea Mays
atgccaaacaacatcggactacaaccactgccctcttcaaatgtccaatctaatcaaatagagtatctatctctgttttatccatcatcattattacaatcctcatcatctatggcaggcaggaaatcacaacagaaagttgcttctccaaaggttcaaatgctgaaatctctatcattccagtcatctaataagtggtctgcacagaaggagccaccgtcaaaggtccagcatcatcaacttgaatctgttaggtccaagttcagggagtcacttattgttgcgctgagtttggattcggatcagcagaataggagtcaatctcctgataatgtgcagtctgatggttctacagataaattcaaaccgacagcaggagatgtggtacatgatttagtggcaaacacatcaaaagatgtgtgcacaaccaattcaggtatagccacaactgtagctcccagtagatgtgaggaaactgagaagttaatcagtgatttagcttcagagatgaccatgagcatcaacgatggcatgcaacaaccgtcaaatcaggtttcttcagaagacgacttattaggtcagtgtatggttgcagaagaacttttgcaaggtcacgggcttagttgggtttctgatcatgttgtcgggatttctaaacctaacgcagaacctaatgatttaaaaagtctgcgaacttctgatgtggagtctgagtcaaaaagaataaagtctgctaatgaattagcaatggatgaggagaactttaatcaaagggctgaaagtttggcgtttagaattgaagaggagctattcaaattgtttcgtggggtaaataagaagtacaaggaaaagggcatatctcttttgtttaatttgaaagacaaaagcaaccctgagctaagagagagggtttcgtctggagatattgcgcctgaacgcctttgttcaatgactgcagaagaacttgcctccaaagaactctcagagtggcggctggctaaagctgaggagtttgcacagatggttgtccttccgaatatggaggttgacccaaggaatttggttagaaaaactcacaagggagagttccaagttgaagtcgaagaaccagatggaactgaaatgtacatgcatggagagaatgacacaaaccacatgaatcttgacaagctccaaaccattgaaaacaagcttcaaatgtgggtaaataacgttcgctgccagaagatgcagatcatctctagggaggtcgagatgctcaggaacaaggaagccacactgcagactgtcaatggcgtgcttcaggaaagagtactgcaaatatgcatgtcctttctttaa

SEQ ID NO: 107339 - DNA, 289 bp, Zea Mays
aaaatgaaggtctggataaaaacagctcagtgctctagaaggagctttcccattaaagaacattcggtgccagctttagtagggtaatgaacataactgacatacagtgccgaggtaaaaaacatggtacctagtatgatatatcatttttgtttattcatcatatagttgagcaaaatatggaaaatggaagaacccagtacatcaaccacaatgaaagacagattcaacgataaaggctcttggatatcaagttctcagcaatctcagtctcccaatgatcaccatt

SEQ ID NO: 107340 - DNA, 4019 bp, Zea Mays
ctcaaggagccagccactagcgagctcgcccgcccgctcccgctccaggccagcggccagccggttccctcctctcgcgcccggctcccgcgcggccaccggccctggcgcccaggccagtcgctgcgcgccgcatagtaccagcacctgcgcgccgccaggccaggcccgcactccgcaggccgggctactccctcctaatttttttattgcttcctccatttctcgcaatttagggaacaagttctgtacaattgctacaggtctggaagtgtttgactcggagcttctgctgaatggcattgtcttcttccacgaataagccatatgagtgtgatttggataggtttggttttggcaccatgcaacccaaacaaagcactccgggcttgatgaggacatggaagatgcaaatacagtacctcactagacactaggatgatgagctcgaccttgccgtggccgagttgtgcaacggaatgacatgccgggaagtggcagcctcgctgcaccgatcgcttgccaagtttatcgtgcctgacaacccagagaaaatcctgtcgcttgtcgctgccaaggcaagccatcatagagctcttggctctgcggacctcacatgtgccctgcaggcatgcagggggcgaggcaaccgatggccgcttgtgctggagatccacgcgacatcagtcgtgcgtgggcttggggctgaccgccttataggcaacttgctgatcgatctgtatgcaaagaatgggctcgtgtggcaggcacggcaggtattcaaggagctttcttccagggaccatgtctcatgggttgccatgctgtcagggtatgcacagcgtggtcttggaaaggaagctttcaggctttacagccagatgcattggactgctgttattcctacgccatatgttctgtctagtgtgctgagtgcttgcactaaaggaaaactttttgctcaaggtcggatgatccatgcccaagtttacaagcaagcattctgttcggagacctttgtgggcaatgcacttattgcactttacttaggatttggatcctttaagctagcagaaagggtattttgtgacatgctgttctgtgatcgagtgacattcaatacattgatctcaggacatgctcaatgtggacatggtgagtgtgctttgcagatttttgatgagatgcagttgtcagggctcaggcctgattgtgtgacagttgccagtctgcttgcagcctgtgcttctgtgggagatcttcaaaaggggaagcaactccattcatatttactaaaagcaggtatgtcttttgattacataactgaaggctcactactcgatctgtatgtgaaatgtggtgacattgaaacagcacatgatatcttcaatctgggtgataggacaaacgtggtactgtggaatttaatgcttgtggcatatgggcagattagtgatctagcaaaatcttttgaaatctttggtcagatgcaagctacaggtatacaccccaacaaattcacctacccgtgcattttgaggacttgcacttgcactgggcaaattgaacttggagagcagattcattcattaagcataaaaaatggattcgaatctgatatgtatgttagtggtgtcttgatagatatgtattctaaatacagatgtcttgataaagctcgaaaaattctggaaatgcttgaaaaaagagatgtggtttcttggacctcaatgattgctggatatgtgcagcatgacttttgtgaagaggctcttgcaacattcaaagaaatgcaggactgtggagtttggccagataacataggactggctagtgctgcaagtgcttgtgctgggatcaaagcaatgcgccagggcctgcagattcatgctcgggtttatgtctctggttatgcagctgatatttcaatttggaacacgttggtaaacctgtatgcaagatgtggaagaagtgaagaagctttctctttgtttcgggaaattgatcacaaggatgagatcacatggaatggattgatatcaggttttggacaaagtcgtctttatgaacaagctctcatggtattcatgaagatgagtcaagcaggtgccaagtacaatgtgttcacatttatttccgctattagcgctttagctaaccttgcagatataaaacaaggaaaacaagtacatggtagagctgttaagacagggcacacctctgaaactgaagttgccaatgctttgatttcactatatggaaagtgtggcagtattgaagatgccaagatgatcttttctgaaatgtcactgaggaatgaggtttcatggaatactatcataacaagttgttcacagcatggacgtggactagaagctttggatttatttgatcagatgaagcaagaaggtctgaaaccaaatgatgtcaccttcataggtgttttagctgcttgcagtcatgtgggtttggttgaggaaggccttagttacttcaaatccatgtctaatgtgtatggacttaatccaatacctgaccattatgcctgtgttgtggatattcttggacgagcaggccaacttgaccgtgcaaggagatttgttgatgaaatgcctatcactgctaatgcaatgatttggcgaacacttctcagtgcgtgtaaagtacacaagaacatcgaaattggggagcttgcagccaaacatctcctggagttagagccccatgattcagcatcatatgtcctcctatcaaatgcatatgctgttactgggaagtgggccaacagggatcaggtcagaaagatgatgaaagacagaggaattagaaaagaaccaggtcgaagctggattgaagtaaagaatgcagtccatgcattctttgttggtgatcggttgcaccccttgtccgatcagatatacaagtttttgtctgagctaaatgataggttatccaaaataggatacaagcaagagaaccctaatttgtttcatgaaaaagagcaagagcagaaagaccctactgcttttgtccatagtgagaagttagctgttgcttttgggttaatgactttgcctccttgtattcctcttcgagtgattaagaaccttcgtgtatgtgatgactgccacagttggatgaaatttacctctgaagtcacaagaagagaaattgtattacgagatgtgtacagatttcaccattttaacagtggcagctgttcatgtggagattactggtgaattgggctgttgcaaagtgtttacagcactttttttgatagaaaaatccccccaatgctattcctaatggttttcattttaagatgtctggggtctacacttatatctgctattgtgacatgtatgtatctggaaatggattcgccatggcaaatctagcatgtctagataaacatgtacagggctttggaaattggaagagtcattcatatctgtcgcatgaagttgaggatttttatctttgtggttgtcattattgtcgcaactcatttgtttaaccattataatttgttttgtcctgaatgtcactaactctttgttacctgcaacacttgcttgtttcaggcaccattcattcaaagtcaagtgtctaagattcaccgcgttaaatgagacatctgtaatcatgacatggattaagatatttgtcagactgcagaaatgcagatcaatatgctgtttactgactcgatcaggatcccttaaagtggtaacatttacgatttcttgtgcttatttcagattgaagagagtgcagaaacagatctcggtggtgatcttcttgaactgaagagcgaaatctgggtgtgctctgctttgatcaattggttgcagaatatgtcatatatggatattatggcatgctgcagtttgctctcttcctgtaatttggtgttttgatgatgataagagttttttatagccattatcttgtgaaaaaataacatttggaagttaatacaaatgtactaggttctgtagctcttctcagttctc

SEQ ID NO: 107341 - DNA, 671 bp, Zea Mays
gttcatgttttgtagtctcacaccttggagaacatcaaatgaggatgagtggttccaaggaaatgatcaaatatttaccacatgtcaccccatggattagttctattggggaacgatatgtgttctctagcataaattcaattgtttgaaatatattatgccttgaccaaaagatatatgatgaactcctctaagaatcttaattgaatcaagtgcatgttacaagtaattcgagtacttgatgcatacatttagggggagctcattctatatcttgtgtccttaaagactaacattttcttttagtgaatttgtgtagttctttgaagagaatgagtttctcttgatcgtttaaagaggataagtttctctttgaaatctcaagcctatcaaaagttaagatagaaattcatgattataatgaagaccatatggcatggaacaaaggtgtgtcactccatgaactattgtattacatttgtgtatctaggctcttacaagctagtgtatgcatgtatatgcaatatcttaagtcacatcataaggttgcacttgaatcttgtcttaaaatattgcatatcatgtctattagtataccttttgattatgagtaattccttaaattggtgcaatttcatattttcatactttatttgtaccaaggttcaaat

SEQ ID NO: 107342 - DNA, 1080 bp, Zea Mays
ccaaggtcaagctaggttcatcatcaagaaggcaacacaatgatgtatcaagaaaaggagaaaagactcctattcttaactctaactcttatctatgagtttacatattaacttggaaccatagtaagatggttgtcaagtatatgtggatgcctacacaaagagaaaggccacaataaggaatgtgtgggtacccaaggctcttactactaatctcaaaggacccaattcaaattgggtaccaagatatgaagcttaaacttgttttgcaggatcactccttcaatggatcaagttgggtgctcgataatggatgcataaatcatatttggagatagtagcaagggtggtaacaactgaatctcaagtgcatattattttcaaatcttatatcttttgtgacttgtgtagccactaaggaagaagaagcacttgaggatacacatcagttgttgattatgaaataaaggtcaaattggaagatgaatgaatattatcatatggtcaacaatccaaaattatgtgacatattctctatctagttaatttggatttgattcttctatattagacactcaccataatatggattaaatcagccctttaaacttcattgaacaaccatgcatattatccatgtcattcaaaatatattgtgcatgagggctcaagggaaatttagtccatattatgaggtttctctattttagcaactcgtttgaatttcacatataaagggttgctaaataagaaactagtgcttgtgctactaatgtcatctcttgtgttgagtttatccatagaaaatctatgttgagagatggtgcttatttttaaattggataaatcacaagcttaaaggatactattcaactaaagtaagaagttgataagaggccaagtgtttcaacaaggttctcccaagttctttgaagatgaattcaaaatctacaaatataagagtcttggttgtttcaatcattgagtttcaattgatatcatatcaagtatgatcgaaccaagcaaagatgaataaagttcaagatcacttggttggatgaaatcataaaagaaaagaaa

SEQ ID NO: 107343 - DNA, 798 bp, Zea Mays
aatttccaccctaatccgtatcccatcccaattcacaagccgccgtgacctctccatttcttccgcacgcatccctcgccgcctcgcgcctgcaccggagaatcggtcccattgcccgcgaacctgcgtgtgtgaggtatcgaacaccccaagatggcaactttcgcctcaccactcctctgcaacttcatggccatagaacagaagaacgcgcctcagctgaccaacagcagaaagccgtccccgcgcctgagcttcccaacgacaaggagcatgccaacattgccgttgccgggcttcagagcgaggccagactggcgcgtcgccgccgtctacaaggtgaagctcattggccccgaaggacaggagagcgtgatccaagtgccagaggacagctacatcctggacgcggccgaggaggccggtatagacctgccctactcctgccgcgctggtgcgtgctccacgtgcgccggcaaggtactggagggctccgtcgaccaggcggaccagtcgttcctggacgacgcgcaggtcggtgccgggtatgcgctcacctgcgtcgcgtacccgacgtctgactgcgtcatccagacgcacagggaggccgacctgtactaggcagcccagtcccacgcgtaaccggatcaacgactgtgcacttccatagctcccattcggattcgatcttgagttcttgacactgattcgcacttgtgcttttgtccttgcaggtagctagaactagtagtacattctttaatcgttattgtttggttgctgtggtttgattcgtcc

SEQ ID NO: 107344 - DNA, 420 bp, Zea Mays
atggcggagctcggcagtagacctcaccgtggactcaggagaccggcatccccaatcgtagcgagagggacgaccagcgggacacagtccaagcggcaaggcttccccatggtagatacgaggcgatttctagagttcaattatcctgagatgtgtgccaagattatcacgatgcagtctcagtgttcacttctcaatataagctactgcccttcgactgaggaagcaatttcagcaacaaagcgtttattgtttacaaatcctcttggatgggaacgtagtgacttcataagagttcctatcaaagatcctaagaaacagtttctggtttatgggtctagcagagccagaaatatgaggcggaggggtgattctattacaggaggaggagggagtgattcttctggaggtggaggatga

SEQ ID NO: 107345 - DNA, 1518 bp, Zea Mays
gggttttcagatccagagcactaaaccaactactacccggccgccgccgccgccggtacatgtaaaaaaaggcttcgacctgcgagatgaacgcaacggagagcattcaacaaaccaaaaccgcataaccaaaatgttcagactagcgcgtggtagtagtagtacttgcagtcatgtcatgcagtttgccacgccgccgcgtgcacgcagtttgccacgctagctaatctgttctcattccgctcgcaggaacggcaaggaagctcatcctagcgctgcttacatgtctgtcgtcggcgctgctgtacaggcagattcagccgctaccgcccaagatccccggcacgccgggcggcccgccggtgacggcgaccaggacgaggctcagcgacggcaggtacctggcctatctggaaaccggcgtcccgagggagaaggccaagcacaggctcgtctttgtccatgggttcgactcctgcagacacgacgcgcttccgatctccacggagcttgcgcaagagctgggcgtttacatgttgtccttcgatcgccccgggtacgccgagagcgacccgcacccggccaggaccgaggagagcatcgccctcgacatcgccgagctcgccgacaacctgcagctgggtcgcaagttctaccttgctggcttctccatgggcggcgagatcatgtggagctgcctcaagtacatcccacacaggctctccggcgtggccattctcggccccgtaggcaactactggtggcccggcttgccgtcgaacgtgtcgcgggacgcctggtaccagcagctccctcgggaccagtgggcggtctgggtcgcgcatcacctgccgtggctcacctactggtggaacacccagaagctcttcccggcctccagcgtcatcgcctacaaccctgccctcctgtcccaagaggacgagatgctcatggccaagtttggctatagagcctacatgccgcagatcaggcaacagggggagcacgagtgcctgcaccgggacatgatggtcgggttcggcaagtggagctggagcccgctgcagctggagaacccgttcgccgacgccgacgccgacgatggccagggggcggggaaggtgcacctgtggcacggcgccgaggacctcatcgtgccggtcagcctgtccaggtacatcagccagaagctgccgtgggtcgtctaccacgagctccccaagtcgggacatctcttcccgatcgccgaggggatggctgacatcattgtcaagtccctgctgctcggagacgatcatctgtcgtcgtcggcctcacagcctcctcattctccatgaatccaggtcgtcacgtgtagtccgttcgcatttcgttgcccgtctctcactgtttctgtaaagggaccgatgctgcaggattctctagcgttgtagctaggatgctctgtttttttaaataatggaactaagttttagcctatatatatatatcatctgagaatgttacataatgttggtc

SEQ ID NO: 107346 - DNA, 1471 bp, Zea Mays
gcctgcgtctgcgtctgcttggccccccccggtaacagcagttatcatccccatctcccgccgtcccgcgtgctgatacttgcttgcattgcctgccgtttcccccgagccaacgacgacgttcgacggccgtagccaagaaggtatctcgcccaaacaaaggccgtcaagccaccatggccgtgtccggcgagaagccgccaccgccaccgccaccggccacggcgtccggcggaacggcaaggaagctcatcctagcgctgcttacatgtctgtcgtcggcgctgctgtacaggcagattcagccgctaccgcccaagatccccggcacgccgggcggcccgccggtgacggcgaccaggacgaggctcagcgacggcaggtacctggcctatctggaaaccggcgtcccgagggagaaggccaagcacaggctcgtctttgtccatgggttcgactcctgcagacacgacgcgcttccgatctccacggagcttgcgcaagagctgggcgtttacatgttgtccttcgatcgccccgggtacgccgagagcgacccgcacccggccaggaccgaggagagcatcgccctcgacatcgccgagctcgccgacaacctgcagctgggtcgcaagttctaccttgctggcttctccatgggcggcgagatcatgtggagctgcctcaagtacatcccacacaggcaactactggtggcccggcttgccgtcgaacgtgtcgcgggacgcctggtaccagcagctccctcgggaccagtgggcggtctgggtcgcgcatcacctgccgtggctcacctactggtggaacacccagaagctcttcccggcctccagcgtcatcgcctacaaccctgccctcctgtcccaagaggacgagatgctcatggccaagtttggctatagagcctacatgccgcagatcaggcaacagggggagcacgagtgcctgcaccgggacatgatggtcgggttcggcaagtggagctggagcccgctgcagctggagaacccgttcgccgacgccgacgccgacgatggccagggggcggggaaggtgcacctgtggcacggcgccgaggacctcatcgtgccggtcagcctgtccaggtacatcagccagaagctgccgtgggtcgtctaccacgagctccccaagtcgggacatctcttcccgatcgccgaggggatggctgacatcattgtcaagtccctgctgctcggagacgatcatctgtcgtcgtcggcctcacagcctcctcattctccatgaatccaggtcgtcacgtgtagtccgttcgcatttcgttgcccgtctctcactgtttctgtaaagggaccgatgctgcaggattctctagcgttgtagctaggatgctctgtttttttaaataatggaactaagttttagcctatatatatatatcatctgagaatgttacataatgttggtc

SEQ ID NO: 107347 - DNA, 1602 bp, Zea Mays
gcctgcgtctgcgtctgcttggccccccccggtaacagcagttatcatccccatctcccgccgtcccgcgtgctgatacttgcttgcattgcctgccgtttcccccgagccaacgacgacgttcgacggccgtagccaagaaggtatctcgcccaaacaaaggccgtcaagccaccatggccgtgtccggcgagaagccgccaccgccaccgccaccggccacggcgtccggcggaacggcaaggaagctcatcctagcgctgcttacatgtctgtcgtcggcgctgctgtacaggcagattcagccgctaccgcccaagatccccggcacgccgggcggcccgccggtgacggcgaccaggacgaggctcagcgacggcaggtacctggcctatctggaaaccggcgtcccgagggagaaggccaagcacaggctcgtctttgtccatgggttcgactcctgcagacacgacgcgcttccgatctccacggagcttgcgcaagagctgggcgtttacatgttgtccttcgatcgccccgggtacgccgagagcgacccgcacccggccaggaccgaggagagcatcgccctcgacatcgccgagctcgccgacaacctgcagctgggtcgcaagttctaccttgctggcttctccatgggcggcgagatcatgtggagctgcctcaagtacatcccacacaggctctccggcgtggccattctcggccccgtaggcaactactggtggcccggcttgccgtcgaacgtgtcgcgggacgcctggtaccagcagctccctcgggaccagtgggcggtctgggtcgcgcatcacctgccgtggctcacctactggtggaacacccagaagctcttcccggcctccagcgtcatcgcctacaaccctgccctcctgtcccaagaggacgagatgctcatggccaagtttggctatagagcctacatggtacaacgtcgtcgatctcgcgcattgccggcatgaaattcttgtgcgccgcaagcttgttcacgggggttttttttttcttttcgccgcgcgatgtgtggttttgcttgcagccgcagatcaggcaacagggggagcacgagtgcctgcaccgggacatgatggtcgggttcggcaagtggagctggagcccgctgcagctggagaacccgttcgccgacgccgacgccgacgatggccagggggcggggaaggtgcacctgtggcacggcgccgaggacctcatcgtgccggtcagcctgtccaggtacatcagccagaagctgccgtgggtcgtctaccacgagctccccaagtcgggacatctcttcccgatcgccgaggggatggctgacatcattgtcaagtccctgctgctcggagacgatcatctgtcgtcgtcggcctcacagcctcctcattctccatgaatccaggtcgtcacgtgtagtccgttcgcatttcgttgcccgtctctcactgtttctgtaaagggaccgatgctgcaggattctctagcgttgtagctaggatgctctgtttttttaaataatggaactaagttttagcctatatatatatatcatctgagaatgtt

SEQ ID NO: 107348 - DNA, 1893 bp, Zea Mays
atgctgcgcttatctttgatggtgatagattgtgacttcggtctcaatgcagcacttgactttgataagtacccatgtcatttcccatgtgctgtgtgccgcctttggatgggatgggagcatgggacgctcgtgcggtcgcgggctggcggcatcgtggcctcatctcgcgctcaagctgctccccgtagtcccattgagaccaacggcagcgctcgcgttcgtgtacgtttatattatttttttataagggagcaagagggctcggcggcagcggcagcggcgacggcgaccgcgacggcagtggcagtggcagtggcaggctgtcagccgtccctatcttgtgtgtcaagcgcgaactccctatctcgtgtgtcaagcgcgttcgcgtgcgttctaggcacaggcagccgaggcgagccccttccgctcagtggccgccgccggaccgtggacgcagctagcccatcagcccatggcagggacggacgtcgcaggctccgcacgcggctccgatgccgcgctcggcaagacgggcgaaccacccgccgcggcgcgctctggcgcagccaagaaggtgactctcgctctgctagcctccttctcggcgctgctgtacagccagattcagccgccgccgtctaagatccccggcacgccgggcgggcctccggtcacggcgcccagaacaaggctcaaggacggccggcacttggcgtacctggaatccggcgtcccaaaggagaaggccaagtacaagatcatattcgttcacggcttcgactgctgtagatacgacgtgctgaatgtctcccaggggctgttggaagagctgggaatttacctgctgtcctttgaccggcccgggtacgccgagagcgacgcccacccggcccggacagagaagagcgtcgcccttgacatcgcggagctggcggacaatctccagctcggccccaagttccatctcatcggcttctccatgggcggcgagatcatgtggagctgcctcaagtacatcccgcacaggctcgccggcgtggcgattcttgccccggtgggcaactactggtggtccggcttcccgccggacgtgttcaaggaggcgtggcgcgtgcagtttccgcaagaccagcgcgcggtctgggtcgctcaccacctgccgtggctgacgcactggtggaacacccagaagctgttccgcggatccagcgtcaaggacggcgaccctgccatgctatccaaggaggacaggcttgtagctgacaagttcgagaagcgaacctatgagaagcaggtcagacagcagggagagcacgactcgctccaccgcgacatgatggtcggtttcgggaagtgggactggagcccgctggagatggagaacccgttcgccggcggccaagacgaggtgaaggtgtacctgtggcacggcgtcgaggacctctacgtgccggttcaactgtcgcggtacatcagcgagaggctcccatgggtcatctaccatgagctcccgacggccggccacctcttcccggtcgccgacggcatgcccgacgctatcgtcaggtcgcttctgctcggagatgagtgatcagtatttaggatgcgcggatccaggacttgggcactttttgcagcttcatcagtaataaaaatacactcggaggtcgagatctgtatgatccgtgtccttaaaagcttcggaatggcgttttgttgtcgatccccattggcgatttggacacgatggatcagcttacccaattggcacaacgcaacatcggagcggcatggccgacaaaacttgcatatccgagaaagtgacgtcaagtttagaactttatgcacctttttactcagaactatgaagtttccactgaatttaacttc

SEQ ID NO: 107349 - DNA, 1890 bp, Zea Mays
gtcatttcccatgtgctgtgtgccgcctttggatgggatgggagcatgggacgctcgtgcggtcgcgggctggcggcatcgtggcctcatctcgcgctcaagctgctccccgtagtcccattgagaccaacggcagcgctcgcgttcgtgtacgtttatattatttttttataagggagcaagagggctcggcggcagcggcagcggcgacggcgaccgcgacggcagtggcagtggcagtggcaggctgtcagccgtccctatcttgtgtgtcaagcgcgaactccctatctcgtgtgtcaagcgcgttcgcgtgcgttctaggcacaggcagccgaggcgagccccttccgctcagtggccgccgccggaccgtggacgcagctagcccatcagcccatggcagggacggacgtcgcaggctccgcacgcggctccgatgccgcgctcggcaagacgggcgaaccacccgccgcggcgcgctctggcgcagccaagaaggtgactctcgctctgctagcctccttctcggcgctgctgtacagccagattcagccgccgccgtctaagatccccggcacgccgggcgggcctccggtcacggcgcccagaacaaggctcaaggacggccggcacttggcgtacctggaatccggcgtcccaaaggagaaggccaagtacaagatcatattcgttcacggcttcgactgctgtagatacgacgtgctgaatgtctcccaggggctgttggaagagctgggaatttacctgctgtcctttgaccggcccgggtacgccgagagcgacgcccacccggcccggacagagaagagcgtcgcccttgacatcgcggagctggcggacaatctccagctcggccccaagttccatctcatcggcttctccatgggcggcgagatcatgtggagctgcctcaagtacatcccgcacaggctcgccggcgtggcgattcttgccccggtgggcaactactggtggtccggcttcccgccggacgtgttcaaggaggcgtggcgcgtgcagtttccgcaagaccagcgcgcggtctgggtcgctcaccacctgccgtggctgacgcactggtggaacacccagaagctgttccgcggatccagcgtcaaggacggcgaccctgccatgctatccaaggaggacaggcttgtagctgacaagttcgagaagcgaacctatgaggcaagcggccattggcgtcgtaggctattgaaatcatgatctctgaatccaactctgctctatttttcttccccttcagaagcaggtcagacagcagggagagcacgactcgctccaccgcgacatgatggtcggtttcgggaagtgggactggagcccgctggagatggagaacccgttcgccggcggccaagacgaggtgaaggtgtacctgtggcacggcgtcgaggacctctacgtgccggttcaactgtcgcggtacatcagcgagaggctcccatgggtcatctaccatgagctcccgacggccggccacctcttcccggtcgccgacggcatgcccgacgctatcgtcaggtcgcttctgctcggagatgagtgatcagtatttaggatgcgcggatccaggacttgggcactttttgcagcttcatcagtaataaaaatacactcggaggtcgagatctgtatgatccgtgtccttaaaagcttcggaatggcgttttgttgtcgatccccattggcgatttggacacgatggatcagcttacccaattggcacaacgcaacatcggagcggcatggccgacaaaacttgcatatccgagaaagtgacgtcaagtttagaactttatgcacctttttactcagaactatgaagtttccactgaattt

SEQ ID NO: 107350 - DNA, 103 bp, Zea Mays
ggttgctgcagcagctccaagacattctagactggaggtctcaagttcgattcctcttaaatgcatcttttttgtgcaattactaggggcaacaacgtccaaa

SEQ ID NO: 107351 - DNA, 441 bp, Zea Mays
ttgcgtcggtctcctctgcaaattccctggcgctcggtgctctctgcgcacgccggttccagttcggctgaccgcgcagactttcttctccctggctagaactctttcttcggctatggcacgctcgagctcctccctgctcgcgctgtcgcctcgcctgttcgtccctgcgcgctcgtccgtccgggctctgcccagcgccgtggcttccagctcgctcttcagcctccctctttcctgcgcgcgctccactgttccgtggccgagttcctcgctgccacagttgtccggtgtttggcccacgccgattcgcgttcgctcatatcgccatcgtcgtgttgtcgctggtgatagtttccgtgcgcgtcaaactcccgcgtcgagtctttttcctgctcgtagcgcgccctctcggctcgctcgactttaattcccaaccgc

SEQ ID NO: 107352 - DNA, 441 bp, Zea Mays
ttgcgtcggtctcctctgcaaactccctggcgctcggtgctctctgcgcacgccggttccagttcggctgaccgcgcagactttcttctccctggctagaactctttcttcggctatggcacgctcgagctcctccctgctcgcgctgtcgcctcgcctgttcgtccctgcgcgctcgtccgtccgggctctgcccagcgccgtggcttccagctcgctcttcagcctccctctttcctgcgcgcgctccactgttccgtggccgagttcctcgctgccacagttgtccggtgtttggcccacgccgattcgcgttcgctcatatcgccatcgtcgtgttgtcgctggtgatagtttccgtgcgcgtcaaactcccgcgtcgagtctttttcctgctcgtagcgcgccctctcggctcgctcgactttaattcccaaccgc

SEQ ID NO: 107353 - DNA, 1147 bp, Zea Mays
aggggatgtgtcaaaatccagcacaagctcatcacaagctctctgctgccgcccccaccagcaaagcaaggccctcgagtgaccggggcagcgatcgagcggcttccaaccaggcaacaagggcgacgaaggacgatatggacaggctgaacgcgaagctgtacctgcacaactgcttcatcatgaaggagaacgagcggctgcgcaacaaggctctgctgctcaaccaggagaacaaggccttgctcaccgagctcaagcagcgcgtcgccagaacggcggcggcggcggcagcggcaggcaaccacgcgccaacgatcccggacctcaatgccgccgctcctgcaggggcgcacgagaagccggcggcgtcgcccaagccaaagaaggcggtcgcaaactgacgcgcgcggcttaattaattagttctaggcaccagctatatatataagtttgtagttatcatgcattattaccggtcttctggatgcgtgtcaaggacgtctgcgcctagttttagctaatgctggctaatggaaaaattgcattgcatgcctgagcgagtgctgatctctgcagggatagctagatcatgtagtgtaggttgtctaagcgcatgcagtgcgaaaatatcaaatagcccagcgacaaagcaatggaacaggggcaatcgtcaggcttgacaattcagaaggctccgctaaatgctcattcgagataggctcttaaacagctgcacaaatggcaaggatatgtatgctgcttaagtaatacgcttgcttgtgcaggtgcccattgaagctagctccatgagactggcaaactggcaacgcaagcagtagtttataggaacataaaactaacctccaacataagcatgctactctgttggtataaccatgcatttagtcaaaatcaagtagccaacagttaccactcaccagtcgcgcgccagcattaccgtctgccaactaaaaagatagaccactagttcgttggtgcactaaaatgatgaacttcacatggtagagacatccaattggcaccacgaagtacaattggaactgttagactacccgtctagggtttgtgctattccctgtgtaatgaccattatacccctgattagggtatgggttcctattct

SEQ ID NO: 107354 - DNA, 835 bp, Zea Mays
aggggatgtgtcaaaatccagcacaagctcatcacaagctctctgctgccgcccccaccagcaaagcaaggccctcgagtgaccggggcagcgatcgagcggcttccaaccaggtgatgctctcagactctcagtgtctcgtctcgtcgtcactttttgcatggcgatgcctctcggtttcttgcattgcattgcatgcacgatcatggatggatctatgtgcggcaaatgggactagctcatcctagtacgtagaagtagaacgccgcttggggaaggaagaaagcaccaaccgttctacactgtactgtacctaacttcgtttctcgttaccggttgctgcgtggctggcaggcaacaagggcgacgaaggacgatatggacaggctgaacgcgaagctgtacctgcacaactgcttcatcatgaaggagaacgagcggctgcgcaacaaggctctgctgctcaaccaggagaacaaggccttgctcaccgagctcaagcagcgcgtcgccagaacggcggcggcggcggcagcggcaggcaaccacgcgccaacgatcccggacctcaatgccgccgctcctgcaggggcgcacgagaagccggcggcgtcgcccaagccaaagaaggcggtcgcaaactgacgcgcgcggcttaattaattagttctaggcaccagctatatatataagtttgtagttatcatgcattattaccggtcttctggatgcgtgtcaaggacgtctgcgcctagttttagctaatgctggctaatggaaaaattgcattgcatgcctgagcgagtgctgatctctgcagggatagctagatcat

SEQ ID NO: 107355 - DNA, 696 bp, Zea Mays
atggcatataaaacttgtggttatgaaaattgccctagaaaaactttcgagaagaaaggatcactaaccggtgcaagcttcatccagaaaagagaaaactcatataagtctcagctcatattcgccagccatcgtgatatatctaacccaggggagtgcctgaagcagacgtggaggcggtcagacagaggagaaggggacaaccgtctcggtggtggtcatcagctaccaccagggacaccacacacctggtacccttcaaacacgacgggattcaggttcgccctagcgggcgtgtatgacaagattcaagcgctcctcgatcacgacaccgctatcaacggtgcgacccccactgtggccctcatcgaagagcgagacagtgacgccgagtggcacctccaagaggaacgatgcattccatgtcccaaacgtgaggcatgggaccccgctgctggacacggtgatgatggagatctccgtgacgcgcgctctggagccgcctgtcttcgccggagtcgttggagatgaagtcggtgactgctcaccgatgggggcacagttcctggcgatctgcacgaccgggtctgctgaccgagagaggaggcgtggccactcgaatttgttgcagatggagctcggcgttggttggatgacaccaaggcgcccgggcggtttcgatccacgccatcgacc

SEQ ID NO: 107356 - DNA, 1284 bp, Zea Mays
ccctaacgaaatggagggaaatgcacaagaagattcttctttggtactatatggtgtttcttgcaagtgcataagaggccttcaggcattgtcgtcccgtgctcactattgaatggtacttttctgcctggggaagtataaggcacattattggttgccatttcatgtgacgcggacaacacattggattcctttgccattgctttggtggagagggagaacatagatagttggtcttggttcttacgacttgtttggatccatgtcatgggccctggtcgggaggttggtttcatatctgacagacactagggtattcttaatgcagtgcaaggccagattcctggctacgcacccggcaccacagatggtgcactcgacatctagcagaaaatcttcttcgaaaggatcgtagcaaggctaatttccccctttttgaggaggtctatcgacagttggaggtttcattttttaggacaagttgaaggaactaaaagatgcaacaaatgctgaaggtaaaaattggattgatggattgctgagggaaccccagaagcggacaagagcctacgacgaaggtggttggaggtttgagttccagactagcaacatgatcgagtcatttaatagtgtgatgaagggtatacgtggcatgtcgtcaatgctatagtaacattcactttctatggactcgtggcgtggtttaatggtagacacgcacaggacaaggcaatgcagacgcgaggtcagagatgggcaccataaccaacaacgcatcttaataatgcaaaggaacgggccaatagacatgaggtacaatgctttgatgaggagttgggaaaatacgaggtaacaacgatggctggcacaacttccgacggcgaggtgcggccttcgaggacacatgttgtgttacttgatgcattctcgtgtggttgtggtaaacctggacagtaccactttccatgttctcattatgttgccaccgcacgtcatcgcaactttgcatttgagagcaggatcccttcagagttcagtgtggagagcttagtacgtacctggagccctcgttttgagccatttcttaacgagtaacagtggccaacatacaccggtccgatatacattcctaatccagcgcgtcgttgggacaaacgtggtactaggaaaaggagtcagtgcaacatggttatggatcaagttttcggccgcactaggagaggtcgagcgtccccctttctcatggacccagagcagaatgaatgcggaaaatgtgggagactt

SEQ ID NO: 107357 - DNA, 101 bp, Zea Mays
ggtagattaatctcaaaacaagagaatgaagagaacaaaaacattgagattgtttattgtctggctcctacacgtttgatacgaactgattcatcaacacc

SEQ ID NO: 107358 - DNA, 863 bp, Zea Mays
cctcgcattattggaggtttagagttccttcggacaagtcacctagtttcctgaagctaagcctactatatttgtccattagtgcttaactgcttacttgccctatctgttttcataaacaggtcatgctgaatgtgtaaagtttgtcaagaaattcaatattccccttctggtaactggaggtggtggatacaccaaggagaatgtagcacggtgttgggctgttgaaactggggtccttttagacacagaactcccaaatgagattccaaaaaatgaatatattgagtactttgctccagattatacattgaaagttccaaatttgaacatggacaatttgaacagtaagacctatctcagttcaatcaaagtgcaagtgatggagagtttgcggtacatacagcatgctcctggtgttcaaatgcaagaggttcctcccgatttttatatcccggactttgatgaagatgaattggatcctgatgaacgtgttgaccagcacactcaagacaagcagattcaccgtgatgatgagtactatgaaggtgacaatgacaacgatcacgacgacggcacacgctaatctgcttcttctgaggccctggtgtaaatggaaacctgagattcttcactgttgtgtgtagttcagcagccttgagatgtaatagtttgtcagttgacagcagggatctaatttagcaggtcaaagtggtttagacttttataagggattctgacccctcctgaattacacattgtagtacaagtctgcatatttttaagcatgcaaaaattcaaatttctcagtggtattagtatctcaagaaaatacaaattcctcgctcagtaacattgctgat

SEQ ID NO: 107359 - DNA, 1577 bp, Zea Mays
ccagaacatccagcggatgccagagggcgacatggagcacactggagatgttggcaatgtctactttgggccaaatcaccccatgaagccacatcgtctctgtatgacacatcaccttgttctttcatatggacttcatcaaaagatggagatatatagaccacacaaagcatatccaatagagcttgcccaattccattctgctgattatgtggaattcttgcaccggataactcctgattcccagcacctatatgcaagtgaactaactagatacaatcttggagaagactgtccggtctttgataatttgtttgagttctgccaaatctatgcgggaggaactttagatgctgctcgcagattaaatcataaaatatgtgacattgccattaattgggctggtgggctacatcatgccaaaaagtgtgaggcttcaggcttctgttacattaatgatctagtattaggaattctggagcttctcaagtaccatgccagggttctttatattgacattgatgtccatcatggagatggagttgaagaagccttttatttcactgacagggtaatgactgtgagtttccacaagtatggtgacctgttctttcctggaacaggtgatattaaagatataggagaaagggaaggaaaatattatgccatcaacattccacttaaagatgggatagatgacactagctttactcggctttttaaaacaattattgccaaagttgttgagacatatctgcctggtgctattgttcttcaatgtggggctgattcattggcgagggatcgtttaggctgcttcaatctctctattgaaggtcatgctgaatgtgtaaagtttgtcaagaaattcaatattccccttctggtaactggaggtggtggatacaccaaggagaatgtagcacggtgttgggctgttgaaactggggtccttttagacacagaactcccaaatgagattccaaaaaatgaatatattgagtactttgctccagattatacattgaaagttccaaatttgaacatggacaatttgaacagtaagacctatctcagttcaatcaaagtgcaagtgatggagagtttgcggtacatacagcatgctcctggtgttcaaatgcaagaggttcctcccgatttttatatcccggactttgatgaagatgaattggatcctgatgaacgtgttgaccagcacactcaagacaagcagattcaccgtgatgatgagtactatgaaggtgacaatgacaacgatcacgacgacggcacacgctaatctgcttcttctgaggccctggtgtaaatggaaacctgagattcttcactgttgtgtgtagttcagcagccttgagatgtaatagtttgtcagttgacagcagggatctaatttagcaggtcaaagtggtttagacttttataagggattctgacccctcctgaattacacattgtagtacaagtctgcatatttttaagcatgcaaaaattcaaatttctcagtggtattagtatctcaagaaaatacaaattcctcgctcagtaacattgctgat

SEQ ID NO: 107360 - DNA, 1610 bp, Zea Mays
agctcctgctgtctttcaaataataaagttcgaatttatgattgctagcttaccaatttattttatcacacccattgtaggagatgttggcaatgtctactttgggccaaatcaccccatgaagccacatcgtctctgtatgacacatcaccttgttctttcatatggacttcatcaaaagatggagatatatagaccacacaaagcatatccaatagagcttgcccaattccattctgctgattatgtggaattcttgcaccggataactcctgattcccagcacctatatgcaagtgaactaactagatacaatcttggagaagactgtccggtctttgataatttgtttgagttctgccaaatctatgcgggaggaactttagatgctgctcgcagattaaatcataaaatatgtgacattgccattaattgggctggtgggctacatcatgccaaaaagtgtgaggcttcaggcttctgttacattaatgatctagtattaggaattctggagcttctcaagtaccatgccagggttctttatattgacattgatgtccatcatggagatggagttgaagaagccttttatttcactgacagggtaatgactgtgagtttccacaagtatggtgacctgttctttcctggaacaggtgatattaaagatataggagaaagggaaggaaaatattatgccatcaacattccacttaaagatgggatagatgacactagctttactcggctttttaaaacaattattgccaaagttgttgagacatatctgcctggtgctattgttcttcaatgtggggctgattcattggcgagggatcgtttaggctgcttcaatctctctattgaaggtcatgctgaatgtgtaaagtttgtcaagaaattcaatattccccttctggtaactggaggtggtggatacaccaaggagaatgtagcacggtgttgggctgttgaaactggggtccttttagacacagaactcccaaatgagattccaaaaaatgaatatattgagtactttgctccagattatacattgaaagttccaaatttgaacatggacaatttgaacagtaagacctatctcagttcaatcaaagtgcaagtgatggagagtttgcggtacatacagcatgctcctggtgttcaaatgcaagaggttcctcccgatttttatatcccggactttgatgaagatgaattggatcctgatgaacgtgttgaccagcacactcaagacaagcagattcaccgtgatgatgagtactatgaaggtgacaatgacaacgatcacgacgacggcacacgctaatctgcttcttctgaggccctggtgtaaatggaaacctgagattcttcactgttgtgtgtagttcagcagccttgagatgtaatagtttgtcagttgacagcagggatctaatttagcaggtcaaagtggtttagacttttataagggattctgacccctcctgaattacacattgtagtacaagtctgcatatttttaagcatgcaaaaattcaaatttctcagtggtattagtatctcaagaaaatacaaattcctcgctcagtaacattgct

SEQ ID NO: 107361 - DNA, 293 bp, Zea Mays
aggggttggggacacatatttatagccctaggggctgcactaccacaccttctcacacatactacacaacaggattgtcctctagatgctaaagagactatagaggacagtcaaaagcgactgttgtcctctagatgctaaagcgactacagaggacagtcaaaaagtgactgctgtcctctagatgctaaagagactacagaggacagtcaagctgtcctctagatgctaaaggactacagaggacagtcaaaagtaggctgtcctctagatgctcaagacttattccatca

SEQ ID NO: 107362 - DNA, 2340 bp, Zea Mays
cttatctatatcctcgtttttctaatagagaaattcaccgtgcggatttggggatcgatgaccatcgccgtctctagttcgggaaggcaaagggcgccggtgctgcacacgtagacgtaggagtatggagagtgtggtcggtcagctagctgccccggttccggagatcgccattgaatgtcccacccacattttccacctcgcatttactccgccccccgtcaccggagcgctatatctagggcggcagcgcggcactgacttctccaaccaactcatgctcgacagaccacctcgtcggggcttcgcatttatcgtgccgtccatgtccatgcaagagccgacgagcgccgccacccagcttcacgccgcgatggaagcgtcattgtcgctctcgtcactgcagctcgccttcacggcggtcgcggcgatcgcggcgctgggcgtcgcggtgaccgtcacgaggtacaaccggagatacatgggcctgaggctgcctccgggcccgcccgggtggcccgtcgtcggcaacctcttccaggtggcgttctccggcaagctcttcatccactacatccgcgagctccgcaaggagtacggccccatcctgacgctgcgcatgggggagcgcacgctcgtgatcatcagcagcgccgagctcgcgcacgaggcgctggtggagaaagggcgggagttcgcgagccggccccgggagaacaccacgcgcaacatcttctcgtccaacaagctcaccgtgaactccgcggtgtacgggcccgagtggcggtcgctgcgccggaacatggtgtccgggatgctgagcacgtcgcggctcagggagttccggcacgcccggaggcgcgccatggaccggttcgtgtcgcggatgcgcgccgaggccgcggcgtcgcccgacggcgcgtccgtctgggtgctccgcaacgcgcgcttcgccgtgttctgcatcctgctggacatgaccttcggcctgctggacctccgcgaggagcacatcgtgcgcatcgacgccgtcatgaagcgcgtgctgctcgccgtcggcgtgcgcatggacgactacctcccgttcctccgcccgttcttctggcggcaccagcgccgtgccctcgccgtccgccgcgagcagatcgacaccctgctcccgctcatcaacaggcgccgcgcaatgcttcgcgacatgcagcagaggcagagctcatcgccgccgcccgaccccagcgtcgcggcgcccttctcgtacctcgactccgtgctcgacctccgcatcgagggccgcgacgacggcgcgctcaccgacgacgagctggtgacgctctgcgcggagctgttgaatggcggcaccgacaccacggccaccgcgatcgagtggggcatggcgcgcatcgtggacagcccgtccatccaggcacggctccacgaggaggtcatgcagcaggtcggcgacgcgcggccggtcgacgacaaggacaccgacgccatgccgtacctccaggccttcgtgaaggagctgctccggaagcacccgcccacgtacttctcgctcacccacgccgctgtgcagccgggatgcaagctcgccggctacgacgtgcccgtggacgcgaacctggacatcttcctcccgaccatctccgaggacccaaagctgtgggaccggccgacggagttcgacccggacaggttcgtgtccggcggcgagacggcggacatgacggggtcggcggggatccggatgatcccgttcggcgcggggcggaggatctgccctgggcttgccatggggacgacgcacatcgccctgatggtggcgcggatggtgcaggcgttcgagtggcgcgcgcacccgtcgcagccgcagctggacttcaaggacaaggtggagttcacggtggtgatggatcggccgctgctggccgcagtgaagccgcgaaacctcgcgttctgatcggacgggcggacggacgcgcgcatgcatggctacagtgtgcgcgtgtcaggtagcgtggcagtacgacatcgctcgtacgtgtgctctgcacgcccagctgcaccacgcatcgccgtttggccatgcatgcatgcatgctagccgcccatgagttgtggatgccactactgtcgtgtactcgtgtctgtatgatgtaacatacacggaaatgctagacgtcgtttgcatgtgtgtgtggatgtgtacgtactacgtatataagaatgaactcttttgtgtatttgtatgtgtcgtcatcagttgaccgccacagaacattcgtgatgcatggtatcgctgtatatatataggtcgatgatgtgcgtatatatggt

SEQ ID NO: 107363 - DNA, 1936 bp, Zea Mays
ccgactagtttaaaataaaggagtagtattacatctgggggaatgcagcagtgcactgcatgttccgtttcattccacggtaagctggggttagttgttggttggtgtagcggagatattattttgacgcttgaccgaaccaacccggacggacctcgcgagtctatgaacgtcttcccccaccgcgccaccaacccccttgcactccaacaagcctcagcctcacaccacaccaaacgccggcgccccctatataacggtccccaccggcccgtgtccttctcagcttctcgctctgaagcttcaaacttaccccagttacaattacccggcgcggttccttcctagagagcacaaaaccaagaaacagctgaggcggagaggtagctacttgaaccaatcggtgtcgcaatggctgcagcgggtatcaccagggcgccgatcgggcagaatccgaggctcgcgtgctacgccccggggaggggcggaggcgtggtgaggtgctcgttgcagggcgcggtcgtcggcgggcgggcggagtggcagagcagctgcgccgtgctgtccagcaaggtggccgcgctcggtacgcactccgtcaacggccacgtcgcgccggccccggccccggcgccgactcagaacggggcggtgctggatttggtccccgtgagtagtagtatcaatggcgccatcaccaagaacctgccgcagccgcttcgcatcgcggacctgtccccggcgccgatgcacgggtcgcagctgcgcgtggcctaccagggcgtgcccggcgcgtacagcgagaaggcggccgggaaggcgtacccgggctgcgacgccatcccctgcgaccagttcgaggtggcgttccaggccgtggagctgtggatcgcggaccgcgccgtgctccccgtggagaactcgctgggcggcagcatccaccgcaactacgacctgctgctccggcaccggctccacatcgtcggggaggtgcagctccccgtgcaccactgcctgctggcgctgcccggggtgcgcaaggagtgcctgacccgcgtgatgagccacccgcaggcgctggcgcagtgcgagcacacgctcacggccatgggcctcaacgtcgtccgcgaggccttcgacgacacggccggcgccgccgagtacgtggccgccaacggcctccgcgacacggccgccatcgcgtcctcccgcgccgccgagctgtacgggatggaggtgctggcggacggcatccaggacgactccggcaacgtcacccgcttcgtgatgctggcccgggagcccgtcgtgccgcgcaccgaccgccccttcaagaccagcatcgtgttcgcgcacgacagggagggcacctccgtgctcttcaaggtgctctccgccttcgccttccgcgacatctcgctcaccaagatcgagagcaggccgcaccgccaccgccccatccgcctcgtcgacgacgccaacgtcggcaccgccaagcacttcgagtacatgttctacgtcgacttccaggcgtccctcgcagagccccgcgcgcagaacgcgctggccgaggtccaggagtacacgtccttcctccgggtgctcgggagctaccccatggacatgacccccatgaccgccggctcctcctccaccgttgtttcctcgtccgatgatccctcgtcgtcttgattgccgttggaggctggagctagctccgaggagaagtcgtcgagtagggacgttggttttctgctcatgtcgtcctactcgatcgcccctcgctgcagccggagtaattaattttgagtttcctttaatctttcatggtaatagtattatgtacgtgtaattgttcaaaatcatccgcggtgaatatatctgtgaaacagtactagatgacattcataatttcatattaatcagttttcggaaa

SEQ ID NO: 107364 - DNA, 159 bp, Zea Mays
tttcggccacatcctcggccaggcattgactctgaccccggccacggtttcgaggacatccgggagcagatcttcggctctgccgtcacctccgcggtgacgtcgcccatgttcggcttcgcccagaacgtgcgtggtatgggcctcagcgagtcgtag

SEQ ID NO: 107365 - DNA, 2002 bp, Zea Mays
cgtgtctgggagcggagcccgcggtgtaaccctaacgccgccacgcgcggccatccatggcctcctgcgacgacgacttcgttctcctcggtgacgacgcacaccagccggcaactcccccacccccggcccccaccgcccagcaacccgcgccgccgccgccgccgccgccacaggcctcccatcccttcagcttcactgacgcggttgcgggggctgccgccggcgccggctccttcgcgcaggcccaggaggagagcaaccaccacgccgagcgcggcaagccggcgcaccacgccaagcggggcagggagcgcgccgaggagttcagcagcgatgggggcgagtactgttcctacatcaacagcagcggcagcggcggtggtgggaagaagggccgtggcggtggagggagctcgagcgtgtcagactaccgtaaggatcgggaggagtggacggacggcgcgatcagcagcctcctcgacgcctacacggaccgatttgagcagctcaaccggggaaacctgcggggtcgggactgggaggacgtggccggcgccgtgaccgacgggcagggcaagactaccggggccaagagcgtggagcaatgtaagaataagatcgacaatcttaagaaacgttacaaggtggagtgccagcggctctccagttcgggcgggggtgccatcagccactggccctggttcaaaaagatggagcagatcgtgggaaactccgcatctcctgcctcctccaagcttctaactgctgccgaggatgagaaaccgaggcagcagcagcagcacagcagcaaaaggtatcctctttcctgtactggccctcctactggggttggtagctccagaacgaaccctctttcaaatccaagatggaagagggtgcttctgaagattgggggcactgccctatgtggagcagctcatcaaaatgttgatcccaaggtgattatgctgatcgctagagaagttcaagtggcatgccatcatggtgtggaggtggcaatcgtggtaggagggcggaatatattctgcggtgacaattgggtagctgcaacaggcactgatcgagcctcaacgtacccaattggaatgatggcatcagtgatgaattcagtacttcttcaagcatcgctagaaaagataggtgtggagacacgagtccaaaccgcattgatgatgcaagaagttgcagaaccttacattaggcgtcgagccatacgccatcttgaaaaagggagagtggtcatctttggtgggattggtgtgggcattgggaatccattgttcacaacagatacagctgctgccttaagagcttcagagatcaacgcagatgttgtccttaaaggtattgttggtgatgatgagtatggctgtcctcctaggagcaacagtaatgcttcatttgagcacatctcctttagggagttagcagcaagaggaatcaccaaaatggacatgacagcagtaacatgttgtgaggagaacaacattcctgtcgtcatctttaacatgttggagcctggtaacatctcaagagcaatttgtggagatcaaataggcaccttagttgaccagtcaggaaggatcacataaaactaggaggatgaatggtagcagagctccaggacatgccgatactctgggtgggacatcactctggggggacatcctgaattctttgctcgtggatcttttccgtatagaaggaaaacatgttcatcagatggaagcgttcaccttgatttgcctgggatgcctattgtgtattatgcgttgtggtcgcaattgcccacattgagaaaagtattaccttgtaatgtctatttgtaatttgtctgtagattagtggaagggctcatgtaaagtgtttcacggtgcccagatcagaatgtagtgttgtaagttgtaatgctattatttgagtcgtagtgtttgaggtgtcacgttttgcacgattaatttgcctgtggctttccagc

SEQ ID NO: 107366 - DNA, 280 bp, Zea Mays
gatctattttgatgcttccctaattgttatgtactacaattttgtcacttcgtcaggtgattatgctgatcgctagagaagttcaagtggcatgccatcatggtgtggaggtggcaatcgtggtaggagggcggaatatattctgcggtgacaattgggtagctgcaacaggcactgatcgagcctcaacgtacccaattgggaattgggaataatgatgagcatgcaacaaaaatatttgatgggtcctggactcctagagaaagactactagcaaatt

SEQ ID NO: 107367 - DNA, 1290 bp, Zea Mays
gcacacgcgacgcccgatgccccgactgcctcgacccgcctgcgcccaggaagacccgacaccgccaggcgaccccggccacccgtgccctgcccctgcgagccgacgccagcccgcgccaagaacgccgccagcgcctcccgagcgggcggtcacctcgtcctgctcctggccgcggggatcaccatgctggtgctctacgtcgtgtaccgcccgtcccaccccaccttcgccgtcacctcggtcgctgtgctggcgctgtacaacgccaccgccaacatcgccgcgggcacgggccaggcgccggccaccacgctggccgcatcgttccagttcacgctggtgctcggcaacccgagcgggcgatcggcggcgcggtacgaccggttggcggcgtacgtggcgtaccgcggggaggccgtgacggcgccgacgcccatgcccccgctggcgcaggacgcccatgcccccgtaggcttctttacttggcaacatattggcattaatttgatatgtttctctggttatgctaaaatattcagggatctggaataacaggagcctgatggaagcatgaagattttttaggttcctctgctcctggagctggacatgatgggccaagtcatttatattggggctaatgacaaaggtgattcctgaccttgccatctcttaactactttgctgctactgagcacatatatgaactgcatagccaggttcatttatgttaggctaataatgcatataatcatctgctaataatgacaaaagtctgacaggtttctcttaccacattggtaacatagaagttggatatgacaaaagtcattaataatgcatataatcatctgctacacatttgcaaatttgcatcagtagagttgaccacttctcagtattgcgagatgcatcttacatggtcaagaagataattcctattctgaactacttgctcgtgttgatcagttttgcctagtcccagtaccatacaaagatgttcagctggatataaacatttctccacgtctctcttctgaatacataagttatttggaaaatcctgttgagttgctcaatgaagcggcaaaagctgcagagaaagatctatggaaaatcctgttgagttgctcaatgaaggcttttgcgaatcacttgaagcgttagtacttttgtgaatgattttgtaaagtgtttgcaaatatgtgcaaaacataataacatgtgtaggttttgtgaatgattttgttgtggtgcttgttgatggtttatgtgatgggatctaac

SEQ ID NO: 107368 - DNA, 1252 bp, Zea Mays
gcacacgcgacgcccgatgccccgactgcctcgacccgcctgcgcccaggaagacccgacaccgccaggcgaccccggccacccgtgccctgcccctgcgagccgacgccagcccgcgccaagaacgccgccagcgcctcccgagcgggcggtcacctcgtcctgctcctggccgcggggatcaccatgctggtgctctacgtcgtgtaccgcccgtcccaccccaccttcgccgtcacctcggtcgctgtgctggcgctgtacaacgccaccgccaacatcgccgcgggcacgggccaggcgccggccaccacgctggccgcatcgttccagttcacgctggtgctcggcaacccgagcgggcgatcggcggcgcggtacgaccggttggcggcgtacgtggcgtaccgcggggaggccgtgacggcgccgacgcccatgcccccgctggcgcaggacgcccatgcccccgtaggcttctttacttggcaacatattggcattaatttgatatgtttctctggttatgctaaaatattcagggatctggaataacaggagcctgatggaagcatgaagattttttaggttcctctgctcctggagctggacatgatgggccaagtcatttatattggggctaatgacaaaggtgattcctgaccttgccatctcttaactactttgctgctactgagcacatatatgaactgcatagccaggttcatttatgttaggctaataatgcatataatcatctgctaataatgacaaaagtctgacaggtttctcttaccacattggtaacatagaagttggatatgacaaaagtcattaataatgcatataatcatctgctacacatttgcaaatttgcatcagtagagttgaccacttctcagtattgcgagatgcatcttacatggttgatcagttttgcctagtcccagtaccatacaaagatgttcagctggatataaacatttctccacgtctctcttctgaatacataagttatttggaaaatcctgttgagttgctcaatgaagcggcaaaagctgcagagaaagatctatggaaaatcctgttgagttgctcaatgaaggcttttgcgaatcacttgaagcgttagtacttttgtgaatgattttgtaaagtgtttgcaaatatgtgcaaaacataataacatgtgtaggttttgtgaatgattttgttgtggtgcttgttgatggtttatgtgatgggatctaac

SEQ ID NO: 107369 - DNA, 924 bp, Zea Mays
gttgtatctcaggatgatacactgaaagggacaacactttctggaactgctccactccttacagagcttgattgtgttcgttctctatgggatctactctgttccaaggacatggaccaaagcagggttgtcatagattacagtgaatacagtggaaactgtctcgatatttttgaatctttctcaaaggcgaagtgtcttgagaacgtgttcatgcagtgcttcattgagtgtgttcgtgatgattccaaaaatcatcgtcgaactatgacttctaatagattaatacttgatgtcaatgttggggctctgctaaattttgaagagcaggaacgtcatagtaaaaatcctcagtcgtttgaccaaaatgtgttacagaattgcttacataacacactgccttcgttggtaaatctggataaatgcaaattgatattggtacctatgcttagtaggggacattggtcactgtatgtaatcaacctacagaatcagtgtatacatattttagatttgaatccgtatggtatacaactcggtggcactacatggaaggactaccattatgacccaatctatttaggtggaaggaaattcccatgggctagggttataatgattaggttgagcaaagcgttacaacatgtttgccccaatgcatccttccccaaatttggtaactttccaatggatatgccatcaaattgtccaacaatgagaacagggtcaaacgactgtggcttttatgtaatgagttacatgaagtattatgatcacaatgcatgtgttatcacttcttacactcaaccagacaattctcgagacctacgtgctcatgccctatattatctcacatttcattgcatgaacaaggcgctgccacttccaatagagatccagagatttatgtttgcgcgcaagtag

SEQ ID NO: 107370 - DNA, 102 bp, Zea Mays
gtttaacatcattattaatcagttattcctttatttaaaagtgtggtggccgcgctgctacgtcccttctttcccaaagcaaagatcaggtgcctgcatcag

SEQ ID NO: 107371 - DNA, 102 bp, Zea Mays
ttttttttgacaagtgatgtgttggatttctctgtttgtgtacaccttgttgcatataatatcgcccctttgacaagtaattattcacgcttcaatattgat

SEQ ID NO: 107372 - DNA, 243 bp, Zea Mays
tcgctccttaaaatttgcaccatctgttgctgatcctaattgccaccgggctggttggttggttgcaagcagggaggggctgggagagcgcgacgtgcagtcgtctaccataacttcctggtaagcaatgccaccaccacgacctctccgtctatgcacgcttcctcttctgtttaatgttcttcgcgtcatctcattcttatgactgagtttgatagaatcgtgagatgtgtggtagcacat

SEQ ID NO: 107373 - DNA, 285 bp, Zea Mays
atgccgcagcacacgtccgcagcgacgtccatctcggcgccggcctcgcgcaccgtctatagctcccttctaggagttgtctcaccggcgatggctcccgactccgctcctcctctcagttctccctccacgtttcaccttctctcccttcctcttcgagcatcgtcctcctcgcctagatccggcagtcacgccacacactgtctctctgtctgtacatttggatctgttagatctgtgaatagaatattgccgtttctttttctgtggtttcctcgcagatga

SEQ ID NO: 107374 - DNA, 889 bp, Zea Mays
tcaggtgtccttagtctcactaattttcttaacttgctgtaatcaggcttccaagtctgtcattcccttggaggaggcactggatctggaatgggcacgcttctcatttcaaagatcagagaggagtaccctgatcagatgatgctaacattatctgtctttccctcgcccaaggtgtcagacactgttgttgagccatacaatgcaaccctgtctgtccatcaactggttgagaacgctgacgaatgcatggttcttgacaacgaagcactttttgacatttgcttccgaactctaaagctgacgacccctatctattatatacacatggctgcctaaataaaaaagaagctggcatttgatctgtaccaaatttcaatcaatgatttcgcttcttagtgtttttagaaatcatgttgtcatttagtattttgaaccaagttcagagctaatcggatcgatgtctttcaagtgccagagcaattccagagagagaacaatgatcgtcgccgccgccagtgcgataggcgcgaccatcacgtcgtgcccacgcttcaccacacaagcggctcctcttcacaatcgccgtcactggaatagcagttatgatcggctccatactgttccaaagggacgagggtttctagctccagtaggcatgggctcgttctgtcaagttgcttcttgactgggagagtcatgcggtcatgccacaggaaggtggtattaatgtataataactcgtcgaatcaattgcaataactagagtttgttagggagtatagcctaggcatgcattcgtcaaaaggcgaagttatgttctgcccctgctagttctgagacttgtgtttgctttgacactgcacttgaatttgttcatctgtaagtc

SEQ ID NO: 107375 - DNA, 3359 bp, Zea Mays
gcatcgcgtttccgatcatctgtccccgcaccggttcccccatcctccccaccttccttgcgtgccgctgccgcttccacttcctcagttccctctcccactccactcgattctcgatcccaagcagcggcgcacggcgcaactaaccgatatatttttctatattcgattgcgtgccgctttacatccacgccttgaagaaggtaggagaagcatataattgaaagaagcatacaatcatacaccgaactgatcgaagaggggaaaaggggacaatcgggcgatggaggcgtgctgctgctcgtcctcatcggcgccgtcggcgtccatcctcgccgccgcgccggacgtagccctccgccgtcgtatccccgcggcggcgggagggaggacgccggcgcgcccgctgcgcgtctccgcggtgatgctggccaccgcggtcccgcggcggcgcggaccgggcgtcatcagggcggtgttcgagcggttcacggagcgggcggtgaaggcggtggtgttctcgcagcgggaggcgcgcgggatgggggacgacactgttgcgccgcaccacctgctgctgggcctcattgccgaggaccggaccctcgtggggttcctcggttccggcctccgcgtcgagcgcgcgcgagaggcgtgccgcgacgccctgggtaaggccgggcctgcgcaagcggccaccgggctggccacggacgtgccattctcggctgcaagcaagcgggtcttcgaggccgccgtcgagttctccaggaacattggctgcaacttcatctcgccggagcacattgctctcggcctcttcgacctggacgatcccaccaccaacagaatcctcaagagcttaggagcagatccaagtcagctagcaaaacaggcacttaaacgtgtccaaggagagcttgccaaagatggcagagagccagtggggttatcttctttcaaagtacgtgagaggtctgccgcgggagctggcaagtctgcaattgtcaagtattcaaataaaaagaaagagaagagtgcactagctcagttttgtgtggatttgactatgcgagcaagtggaggattaattgatcctgttattggtcgcaaggaggagatcgaaagagtagttcagattatatgccggcgaacaaagaacaatcctattctgttgggtgaagcaggtgttggtaaaacagctattgctgagggcttagctctcaaaattgctaatggtgatgttcctatcttccttgtgggaaaacgtatattatcattggatgttgctctacttatggctggtgcaaaagaaaggggtgaactggaagccaggattactagtttacttcgtgaagtacgcaaagcaggtgatgttatgctattcatcgatgaggtccatactcttattggatctggaattgctgggagagggagtaaaggagctggccttgatattgccaatttgctgaagcctgcactctctagaggtgaattgcagtgcattgcgtcgacaactctagatgaacaccgtttgcattttgagaaggataaggctttggctcgcagattccagccagtattggtgaatgagcctagccaggaggacgctgtcaagatattacttggtctgcgtgagaaatatgagacttaccataaatgcaaatacactttagaagggatcaatgcagcagtttacttgtcagcaagatacatccctgacaggcatcttcctgataaggcgattgatctgattgatgaagctggcagtagagctcggatggaatcatttaaaaggaagaaggaagaacaatgctccattctctccaagtcaccagacgaatattggcaagagattagagctgttcagagtacacatgaagtggcactggctaacaggttgaagtattctcttgatgagaatgacaaagatgatggtgttaatattgaagtcataggggacaacaagattgcttcgccatcgatgcctccaacttcagtcgatgaacctattctggttggttcagaggaaattgcaagagttacatcattgtggtcagggataccagtccagaagttgactgcagatgaaacaaaacttctagttggactagatgatgaacttagaaagcgtgtcataggtcaagacgatgctgttgtggccatatctagagctgtgaagcgatctcgtgttggcctgaatgatcctgacagacctattgcaacactactattctgtggtccaactggagttggaaaaactgaactcacaaaagcactagcagcgagttattttggatctgaatcagctatgattaggttagatatgagcgaatatatggagaggcatgctgtgagcaagcttataggctctcctccggggtacatgggatttggtgaaggtggaactttgactgaagcagtccggagaacaccattcactgtagtcttgcttgatgaaatagagaaagctcatccagatattttcaacattcttctccaagtatttgaagatggacacctgacagactcacaaggacgcagagtttccttcaaaaatacgttgattgtcatgacatcaaatgttggttcaacatcaatctcaagcggaaggaggagtataggtttctcaacacaaagggatacagaggagaccacctatgctgcgatgaaatcacttgtgatggaagagctgaaggcattttttcggcctgaattgctcaatagattggatgaagtggttgtattccaccctcttgaaaagacccagatgatggctattctcaacctaattctacaagaagtcaagagtagacttctagcccttgggattggcctagaggtatcagaatcaatgaagatcctgatttctcagcaagggtatgacagaagctatggggcacggccacttcgaagagccgttactcagctggttgaggatgttatcagtgaagcaattctctttggacagttcaagcctggtgacacgatattgatgggcactgatgccacagggaagccttgcttgagccgactcaatgatcagaccgtccaattgtccgacactgctccaacaatatgaacatcccagcaccctgtgtatatagttgcagattacacatttattctgtacatagaatccccatctcagcgtggacataatcttccagatgttggtttgtctccacaacattataatgtaaatcttatccttaaatccaattgtacatatttttattattaatgttagaccgtgttgcgtgtataggcctgaggtctagttcatgtgtagtgtatatattgtactctttttaatatttagctattctcatttatcatggtatgagactagctccaat

SEQ ID NO: 107376 - DNA, 2585 bp, Zea Mays
catataaactgagtaacaaagatcgtaaagactaggatgggtgctgccatggatgcggtagctacatgcatctcgcgctcacgtgcgcgccacccatcagccatggttgtgcttcttgtattggtaaacttggcccaccataacattatatgattttgtcagctgcattgtccaaacagactaatcatgcactacttgtacgttagagatttcccttgaatgatgtattttctgtactgaaggacgggcctgacgcagtggtgagaagctttcccactgagccaaaggtcctgtttccgatttagcttctttgcaaaaatgcagaggtaaggcttgccttggttattccttccctagaccccactcatgtgggagctgccagcactggatctgtccatgtattttctgtactaatgatctattgattgcatagcttattggcatgaaggtttactttttttgagagagaatatcagtgaggaattaaggacactttgtggtagaatcgtggttcttgtatttagggtagactggtagacattcggttagaactaactgatcaattcagttcttcgtttttttctgaaatatcatgacccagaaaattgctcttggtacccaaccaggcaaccattgtcaactcaggttcctgcagacaaaaaaataaagcaataaaaaatcacatgcgtgctggctaacacaactcgctggggctgctccacctgccacccaactgctgcactgtctggagatccaccgcctcacagctgcactgcctgcaggatcttctccaccgctgctgctggaatgagagaaaaaggggtcaggatccactgcctgttcttgatagtccgtggccacacagccaaacagatccaagcggagagggaggacgtgagggctggagagtcggactgccagaggaggcatggacgcacgggtgcattgcgtcgacaactctagatgaacaccgtttgcattttgagaaggataaggctttggctcgcagattccagccagtattggtgaatgagcctagccaggaggacgctgtcaagatattacttggtctgcgtgagaaatatgagacttaccataaatgcaaatacactttagaagggatcaatgcagcagtttacttgtcagcaagatacatccctgacaggcatcttcctgataaggcgattgatctgattgatgaagctggcagtagagctcggatggaatcatttaaaaggaagaaggaagaacaatgctccattctctccaagtcaccagacgaatattggcaagagattagagctgttcagagtacacatgaagtggcactggctaacaggttgaagtattctcttgatgagaatgacaaagatgatggtgttaatattgaagtcataggggacaacaagattgcttcgccatcgatgcctccaacttcagtcgatgaacctattctggttggttcagaggaaattgcaagagttacatcattgtggtcagggataccagtccagaagttgactgcagatgaaacaaaacttctagttggactagatgatgaacttagaaagcgtgtcataggtcaagacgatgctgttgtggccatatctagagctgtgaagcgatctcgtgttggcctgaatgatcctgacagacctattgcaacactactattctgtggtccaactggagttggaaaaactgaactcacaaaagcactagcagcgagttattttggatctgtgggttatgccttccttcttgcatcattctcgcgttctgaaaagacatgttgcatggatcatgaatcagctatgattaggttagatatgagcgaatatatggagaggcatgctgtgagcaagcttataggctctcctccggggtacatgggatttggtgaaggtggaactttgactgaagcagtccggagaacaccattcactgtagtcttgcttgatgaaatagagaaagctcatccagatattttcaacattcttctccaagtatttgaagatggacacctgacagactcacaaggacgcagagtttccttcaaaaatacgttgattgtcatgacatcaaatgttggttcaacatcaatctcaagcggaaggaggagtataggtttctcaacacaaagggatacagaggagaccacctatgctgcgatgaaatcacttgtgatggaagagctgaaggcattttttcggcctgaattgctcaatagattggatgaagtggttgtattccaccctcttgaaaagacccagatgatggctattctcaacctaattctacaagaagtcaagagtagacttctagcccttgggattggcctagaggtatcagaatcaatgaagatcctgatttctcagcaagggtatgacagaagctatggggcacggccacttcgaagagccgttactcagctggttgaggatgttatcagtgaagcaattctctttggacagttcaagcctggtgacacgatattgatgggcactgatgccacagggaagccttgcttgagccgactcaatgatcagaccgtccaattgtccgacactgctccaacaatatga

SEQ ID NO: 107377 - DNA, 248 bp, Zea Mays
cgggatttcggacagagcaggggtccagcgttgaagaagtgcagcacgacgatgatttcccacgatggtgagaaatcgaagggcacccactgatcttcacagagcactggggccacgagagaattcctggggatacgaagaagcgcccggaatggtcaccgatgacccgacgacgccggtggaggatttcctcgatctctcgttgctctctcaggtggcgccaaaatctctgtttctggcagccgaga

SEQ ID NO: 107378 - DNA, 285 bp, Zea Mays
ggtgctggccgagaaacataatcacgttcttgttcccaggaaaaaaaacagggaggggagcaccgtcgcctggggagagagaccgtgggagcaggaattgtcgttcctgtttcttggaattcttctcccgtttaggcgttcatccctctttctctcctggcgacgaagacgaccgacgccctacgccaggtgccatgttccgtcgggtccatggtgggaagctgcggcaagcaagtcttccgtcgcgaacccgctcggccaacgcttaaccatccggtgagacac

SEQ ID NO: 107379 - DNA, 233 bp, Zea Mays
tcgagcctgcgctgccgccgccgccgcgcccgtcctccgcccgagcctgcgccgccgccgccgttctcctccccgcccgagcgccgccagcgcctacgccgccgacgccgaccccgccgcgcccgtcccgtcctccgccgcggcttgccgacgccgctgcccccgcccgtcccctccaccgacgccgctgcaacctccactgagacagtaagattgaaattatttaaaattat

SEQ ID NO: 107380 - DNA, 2658 bp, Zea Mays
agcgaccaaaagtcaaaaggaggattggcccacggccacggccgagagcggcaggcgggcagggtgaggtgaggagaggccatcagggccgagagaccatggcacagcatatatacgccaccggctgcggccgctgcgggtgcgcccgccccatcatccggacactactgcccgcgctgacccaccatctcgcctcctcgtctctgttgcggcgccggaaggctcccatgggcgccagcgatcacctgggcctggcggcggtggccgccgccaagccgcggaatggcaggacgtgcatggccgtgctgggcgagccactgccggctcttgacgaccccggcatcctcgtccaccccagcgccgacttcgccgcccaggcgctcgtctcgtccacgaaacagtaccgagatatgtaccaaaagtcgatcgacgacccagctggtttctggtcagaaatcgcagatgagttctactggaagcagaagtggagccctgataatgtttgcgctgagaaccttgacgtgaccaaggggccgatcatgattgaatggtttaaggggggaaagaccaacatatgctacaatgcagtggaccgcaatgtggaggcagggaatggggacaagatcgccatgtactgggaggggaatgagcccagtcaggatgggaagctcacctactctgaactgctggaaaaggtttgccagctgtcaaattacttgaaaagcgtcggcgtacgaaaaggtgatgccgtggtgatctacctaccaatgttgatggagctgccgattgcaatgcttgcttgtgcccgcattggtgctgttcactcggttgtgtttgctggcttctcagcagatgcactggcccaacgagtcattgattgcaagcctaaggttgttattacctgcaatgctgtgaaaagggggatgaaaatcatccatctcaaagatatagtagatgcatctctggatcaaagtgcaaagaatggagttgatgtaggcatttgcttgacatatgaaaatcagtccgctctgaataaagtagacactcgatggaaaacaggaagagatgtctggtggcaggatgttgtgcctgatttcccaactaaatgcgatgtggaatgggttgatgcagaggatccactgtttcttttgtacacaagtggcagcacaggaaagccaaagggtgtgttgcatacaactgggggatatatggtctactctgctacaacatttaagcatgcatttgactacaaaccaacagacatatactggtgcactgcagattgtggctggattactggacatagttatgtgacatatggtccactattgaatggagccacagttcttgttttcgaaggggccccaaattaccctgatcctggccgctgttgggacattgttgataaatatggagtgacaatattttatacagcaccaacacttatacgctcacttatgcgtgatggtactgagtatgttgctcggtactctcgcaagtctctccgagtacttggaagtgtgggtgagccaatcaaccccaccgcatggaggtggttgtatgatgttattggtgactcacgatgccccatatcagatacttggtggcagactgaaaccgggggattcatgatcactcctttacctggtgcttggcctcaaaagccaggatcagcaacgtttcctttcttcggtgtgcagccagtcattgttgacgagaaaggtcgggaaatggaaggagaatgcagtggatatctttgcataaagaaatcatggcctggggctttccggactctgtatggagataaagagagatatgagacgacatacttcaaaccatttgctggatattatttctcgggcgatggctgcagcagggataaagatggctaccactggctgactggaagagttgatgatgttatcaatgttagtggacaccggattgggacagcggaagttgagtctgctctggtttcacatccaaaatgtgctgaggctgctgttgttggtattgatcatgaggttaaaggccagggaatatatgcttttgtgactttggtggatggtgttccctacagcgatgatctacggaaaagcctcgttacgacggtccgcagtcagattggtgcgtttgctgctcctgacaagatccattgggcacctgggctccctaagacacgaagtgggaagatcatgcgaagaatcttaagaaaaatcgcatccaggcaactagatgagctcggcgacacgagcacgcttgctgaccctggtgttgtggaccagctgattgcactcagtgacagctaatctatcggctatgtgggagggggtgagacatgatcactgcctgcactatacttatgcaaaattcagctttatgatgcgaggtctgttgggcccagcgttctcttaattgcttcggtgtcatggggatgccaacaaaagagagatgctgcgaacttggggagatgcggacatatgcggggtgcgtctgtaaattgttggatcgcagtcactgatagttattgtacattggtaaataaggagatgaagtgtatatgcgagttttggctaaaatgtttaatgatagatctcgcattttatggttacgtacaggattcagccatggacattgaaggacaacgtgtttactaca

SEQ ID NO: 107381 - DNA, 1668 bp, Zea Mays
atgcccaaacgtgagcgaggatggagactaccaaaggttgggagcacaactatgagtagtactgaagctttgaaggcaggactacgtggcaaggctttaaagattttacattactacagggatatgttatggcaagtgtatactgatcagggctgggattcggctgatggtcgttatgtccctaatgaaggattttttgatgacattgttgttgaagatcctaatcctgtttcgacatctcaggctcctgattctgctgaagaacctgaagtcacgaatgatgatagtgttttggctgaagatgcaggagtcgatatttcagacaatcatggtacaaatcctggcatccagattgaagcagtggaagagataactgatgttgttaacgaactaaaacttcccgaagataaaactactgaacaagcacctgttgaaatggaacatcataatttgagaactgaggaaattgattctctcttggacaaatgccttctgcaagcgctatacacaagcataaaagaaaaagatattccaatgccaggaagtacactatgggcgaatcacatactaccgaacagacctcctggtgttactattgatatcaaaaagtcatcacacaaaaagttgtcgaagtggttacaatcaaaatcttcatctggccttatttcagcaaaggaggacaaatataagaaggaagttgtattgcttgctatcaatcacaagcatccagactacatggcctttagaccggaaaagagggtacaggagcttgttgaacatgaaaaggatgttgctgaaagtagtgtcactaagcaattggaggttgcagagatttataagccaagttctcatgttaaacccatatttgtggctgtcgaagctgacatggagaagtattacagtgcaccagaggcttcagatatagtcttcaggtacgtcgaaaaggaaaaattggttaaacctacagacaaggccaaggtgattcttgatgttacattatgtgatgcattgtacaaaggggctatcaaaaagggctcggcatacccaactgaaatccacaagaaagacttaggttcagcattcttaaaccgtatgcaagttcaccacaaggtatcgagaggaactcaggaggtcatacgcaagggtgccataagaactatccagatcatgacagaaagaagacagggcaacaagaagatgactcggctttcaggactcgagtgtaggttcggatgggagagccttcctagaaaatttatctccgactgcagacgacacagctcagaaaacaatttttttcccttctcaaaggcatggcaacaaacaaaaagtaactgcattgtgatagacatgtggccagttgtaatattgtacaacacttccaacaaatatgttcctgactcttccgaaccctccttcgccgaggacgctgtccggactgaagttcttggtggccgtcttgagctctatgaatgtgaaggtgcggaggttgggcacctcgaggatctggccgtcggagtacttggccccctcgtcaaacccgccgctggtgctgcggctgccagcggacgccatgaagctgctgcccacggaggaaagtttcctcgaccaggacaggccgccccagcctcaggatccatgaattggaagaatcggatgaaaagctag

SEQ ID NO: 107382 - DNA, 305 bp, Zea Mays
atggcgttggcatgcgtggtgagggtaccgtctctgcggtgggcgccatggtgtggctgggtgggctcgtgggtttcagtcctcccagcgaaatgcagcacattaggtaggttccagttgtggtaagtgtattcttgtgggaggccatatagctatgtagggagagtcgtgcacgacgtatgaatgggaacctgaaatgtgtgtgtgaggcctctatcgagtggtcaccaacacaactgatcttctgtgccttttgtggccttctcagtgggactgttggtggccttcttggatctggtggtggg

SEQ ID NO: 107383 - DNA, 102 bp, Zea Mays
tttacttttttttgtctgatactgtggtggcagtagttttaaccagggtgtcgctgtcattgatgcaccaaaaacgcaagaactggacgattagtgagtggc

SEQ ID NO: 107384 - DNA, 1454 bp, Zea Mays
cacacgaaaacaactgagcgacgtggcagcggctagcgggacgcctcactccagtcgtccggttctgttccagcagccccacaccccacgccaccggaccggaaacgcgaagcagccccacactgcccacgcggacacgctctgcaccaccacctgccggccgttcccggctcgccgctgccgttgcgccctcgcgctcacacctccgccagcccaggtccatcgagcggagaaacccatggccccctcgccgatcctcgtccggccgccggcgctggcgaattcaccccttccgcctccccgatgcgtggccgcggtagcagcggcgccggcggttcggacggctccagcggccccattctctaggctccgtaccaagtgtaggttcgccgcatcggatgtgagagaagactactcttccactccgatagatattgtcgctgatgttaagacggagaagattgtggtgttaggaggaagtggattcgttggttctgcgatttgcagagctgctgtatccaaaggcattgaggttgtgagcttcagcaggtcaggaagaccatcttactctgatccctgggttgatcaagtcaattggctgccaggagatgttttctatgcaagatgggatgaagtattggttggggctactgctgttgtgtctacccttggagggtttggcaatgaagaacaaatgaaaaggataaatggtgaggcaaatgtcatagcagtaaatgctgcaaaagaaaatggagtcccaaaattcattttaatctccgtccatgactacaaccttccatcctttcttcttacatcgggttacttcactggcaagagaaaggcagaatctgaagtcctttccaaatacccagcctcgggtgtcgtgttgaggccaggcttcatttacggtaaaaggaaagtaaatggcttcgaggtaccactcgacgctgtcggacaaccattggagaagttgctctcctctgtcgaaaacttcaccaagccgttgagctcgctgcctgcctctgacctaatccttgcaccccctgtgagcgtggatgatgttgcctatgctgtaatcaacggagtcatagacgacagcttctttggggtgttcacgattgaacagatcaaggaagccgcgtccaaggtacgagtgtgaacccggggtcttgttccacaatctctgaacgtgtgttgtaggtggaaagttcataaacttagcagtaactcattgatccttgtgttctttatttctcgctgaattttgaccatagtcaaccgttcaaaagtcagtgcagcattcttttttctgctggaatctcttgagaaaatatagtttccaaactagcccttaatgacttaaagagctagcaaaatatgtagtactgtgtgggtcaccgaactgttatgttggttcacaatctcgctggaggtgagcggcatgagctcacaac

SEQ ID NO: 107385 - DNA, 3354 bp, Zea Mays
ccttccctccctttcgcctccactcctatggcggtgccgctgcctcagcagccgggcccctacacctccggcagccttggctacttccacctccgtctcgtgggcccagcccccgcattactcctcgtgcgcaccgaccgcctctactcgctctcccactcccgccgctgtggctaccgcttccgcctccgcctcctcgccaatcctcaccgccggcgcgcccccgacctcctgctcagcacctacggctgcgaccttcgcctcacacaccgatctggcatcggctctccgagtgtcaatggccgtcccctccgcgcggggacccccaccgagctggccgttggcgacgaggtatcggtgctgcgctgcggcgccaggtacgggttcatcgtcgagaggttcgtctcatgcggaggatttgaggttgatgcggcttcaacggcggggtcctgcgctgagggtcttgtttttagggccgagtctctgcggaaacggctgagggcgatatctgagagcgaagatcctctttcgttattaagggattgttctggaattggcaacctggatgtggatattggacctaaaaaatggaggcaggatggtgctgctgaattgtgcctggacaatccaatcactcccgcttctaaggagaatgtgctgcaaggtgattgcaattttgagcgagacaaatttgaccacgactttgatgttgtaaatgatggcgacccagagctctttaatgggagtaaaggatgcagagatgacagttcagagaagccaggatgtggaagcggtaacgaagagcagtatcacagtgagggctgctactcagatgggagcacattcttcttgaatcgccttgcggatactgggtctaacacgcaaacggaaccacaaagtggtgtgacacttccacagcttctccatcctgttaacagtttggtacgagtgttcattgcaacattcaccttagatatttcctggtttctcaactattgcaagattccccagcatctaccagtgacaatagcatgccacaacaaggagagatgctggagtgcaagcagtgaaaatagaacagcagcgcctttcgaaagccatcctaagctgctactagttttcccccgattccctgaagatatagcatttggaaaggacaggaagaagcaaggagttgcttgccaccatccaaagctcatagtgttacagagggaagacagcatgcgtgttattgttacttcagctaacttagtaccgaggcagtggcatctcataacaaacactgtgtggtggcaagacttcccttgtagaacttctccggactatgcagcactttttagtgcagccaagaaacaaaaatctgattttgctgctcagttagtgtcattcatagcatccatggtcaatgaagtccgtagccaggcatattggataactgaggttgctaagtatgactttgaaggagctggtggctacctcattgcttcagtacctggaatacatgcacaaagtccttatttggagtccaattatttcctctcagctaaacataatgtacacacaaaatctgcacataggatgtcttttggctctgttcaaacgtctgtagttggcatatctcatcggtttcacatcccatcagatgctggcaaacaactgagagccttatctgcatttcttggaaaatgccgtgaaaatatgtatgggactactgaagtgatcctgaagaggaacaccaatatacctgcagatgctaatgctgtgagtgttcttgttgctgatctggataaattttctgaagaagattctgtccaacttggtttcttgcctagagaggttgctaagtgggtagctcccctcagtgactcaggattcttcgatttctctggatttatctaccctagggaagccctggaggctgcatttggagtaactaatactaaagtacagttgcttctatatgtatcaaagggtccagagttttctcaaatttcaaggctgataagcaatgaacattttccaccactctgctcactgatagcatccttgcagcggtgccttggactttggcggttagaagaggtattggcaaatattaagtggcctgaaacactcgaggctgattttatctacagtgcttcatcaattgggacttcaattaatccacagttcattgcaagctttgcttctgctgctggtaaacgacctcatcaagatttcgactctcaagaatctgatccagagtggggttgctggacagcaaaccatgagctgaagaagccatcaatcagtctgttgtttccaacaattgacagggtgaaaaaaggggcttgtggaattcaattgtgcaggaatttgctttctctacctgagaaaacatggcaaagactgagatctaccggtatatttcatgatgcaatcccgcaaccaaatgccaggatagggtatcctatgcatgttaaggttgctcaaagacgcttcaagtcttgttttggtgagcattcattcggctggacttattgtgggtctcataacttcagtccggctgcatggggacagccgctgtctcctccctccaaagcaaatcctagcaaagccagatcagcaccttctagtccaatgctacacatttgcaactatgagcttggcatcatactcattgctctgccaccaggcatgtcaaagcatgcaagtgaaagtaggcacaggatcgaggacatcgccctgccctttgttgtccctccaccgcgatataaggggagtgataagccagccactcggctagccatgcgagaggctgtggctgaggcttgtgttctgcagggtaacgatgttgtagatttgccagatgatactgacgaagatgtgccagatgaagacgatgagcaggtggttgagctatctgattgttctcaacaagagaaggaagaagagaagatttacgcagagacgttatgggggcaggtagattcttcacagagcctggaaaaggattaagtgaagctggcgtccagttcttggtgtagtcctatggatctatttcgccctgatagttcaatggagagggattataaaagagagtacagtacccaaggttgatatgacagtcatttttgaaaaggtgttggaagcttcggattcgcatattacaagcgaactgaactttgtgaaggactgttgtattgtctgtcgaccaggaagagaggcggccagagccacgattcttcgttgccccatttttaatgtttacatttatgttgtgtagatatcatgtaatgtttacatgcattctattttttaagaatctattcttgcattgaaaaatatggtttgctcattcaactaatgagagaa

SEQ ID NO: 107386 - DNA, 1040 bp, Zea Mays
gaacctgtgacctagtgacttagtgaaacaactctcaccactgcatcagccatcagacctgcccttccttttggctttctttagttcttcacaaactattgaatggtggttcaagttacacaatggcagacatgacatacacagcgtcgtttatctgactattattgttgaagacattgccacattggcaatgggttagaaacagctgactattgtatgcgtgttgtttaggtgaagattttagcgagaaaaggtccagttatagctttacaaaaaggaaattacttggtatttactctttctttgttttcaagtgctagctaatgctcttgattttcaccctttttggataagctatctaccatcaacttggatagacatgtcctatgtggtttgcttctgtttacctttgcgagtttgcgtcatcgttggctgatacagacactacctttaaaaaggatgaaatgttcaatgttctttactgaaatttagctatgatagtgacaaatttatcaatataccaggttgctcaaagacgcttcaagtcttgttttggtgagcattcattcggctggacttattgtgggtctcataacttcagtccggctgcatggggacagccgctgtctcctccctccaaagcaaatcctagcaaagccagatcagcaccttctagtccaatgctacacatttgcaactatgagcttggcatcatactcattgctctgccaccaggcatgtcaaagcatgcaagtgaaagtaggcacaggatcgaggacatcgccctgccctttgttgtccctccaccgcgatataaggggagtgataagccagccactcggctagccatgcgagaggctgtggctgaggcttgtgttctgcagggtaacgatgttgtagatttgccagatgatactgacgaagatgtgccagatgaagacgatgagcaggtggttgagctatctgattgttctcaacaagagaaggaagaagagaagatttacgcagagacgttatgggggcaggtagattcttcacag

SEQ ID NO: 107387 - DNA, 2475 bp, Zea Mays
ccttccctccctttcgcctccactcctatggcggtgccgctgcctcagcagccgggcccctacacctccggcagccttggctacttccacctccgtctcgtgggcccagcccccgcattactcctcgtgcgcaccgaccgcctctactcgctctcccactcccgccgctgtggctaccgcttccgcctccgcctcctcgccaatcctcaccgccggcgcgcccccgacctcctgctcagcacctacggctgcgaccttcgcctcacacaccgatctggcatcggctctccgagtgtcaatggccgtcccctccgcgcggggacccccaccgagctggccgttggcgacgaggtatcggtgctgcgctgcggcgccaggtacgggttcatcgtcgagaggttcgtctcatgcggaggatttgaggttgatgcggcttcaacggcggggtcctgcgctgagggtcttgtttttagggccgagtctctgcggaaacggctgagggcgatatctgagagcgaagatcctctttcgttattaagggattgttctggaattggcaacctggatgtggatattggacctaaaaaatggaggcaggatggtgctgctgaattgtgcctggacaatccaatcactcccgcttctaaggagaatgtgctgcaaggtgattgcaattttgagcgagacaaatttgaccacgactttgatgttgtaaatgatggcgacccagagctctttaatgggagtaaaggatgcagagatgacagttcagagaagccaggatgtggaagcggtaacgaagagcagtatcacagtgagggctgctactcagatgggagcacattcttcttgaatcgccttgcggatactgggtctaacacgcaaacggaaccacaaagtggtgtgacacttccacagcttctccatcctgttaacagtttggtacgagtgttcattgcaacattcaccttagatatttcctggtttctcaactattgcaagattccccagcatctaccagtgacaatagcatgccacaacaaggagagatgctggagtgcaagcagtgaaaatagaacagcagcgcctttcgaaagccatcctaagctgctactagttttcccccgattccctgaagatatagcatttggaaaggacaggaagaagcaaggagttgcttgccaccatccaaagctcatagtgttacagagggaagacagcatgcgtgttattgttacttcagctaacttagtaccgaggcagtggcatctcataacaaacactgtgtggtggcaagacttcccttgtagaacttctccggactatgcagcactttttagtgcagccaagaaacaaaaatctgattttgctgctcagttagtgtcattcatagcatccatggtcaatgaagtccgtagccaggcatattggataactgaggttgctaagtatgactttgaaggagctggtggctacctcattgcttcagtacctggaatacatgcacaaagtccttatttggagtccaattatttcctctcagctaaacataatgtacacacaaaatctgcacataggatgtcttttggctctgttcaaacgtctgtagttggcatatctcatcggtttcacatcccatcagatgctggcaaacaactgagagccttatctgcatttcttggaaaatgccgtgaaaatatgtatgggactactgaagtgatcctgaagaggaacaccaatatacctgcagatgctaatgctgtgagtgttcttgttgctgatctggataaattttctgaagaagattctgtccaacttggtttcttgcctagagaggttgctaagtgggtagctcccctcagtgactcaggattcttcgatttctctggatttatctaccctagggaagccctggaggctgcatttggagtaactaatactaaagtacagttgcttctatatgtatcaaagggtccagagttttctcaaatttcaaggctgataagcaatgaacattttccaccactctgctcactgatagcatccttgcagcggtgccttggactttggcggttagaagaggtattggcaaatattaagtggcctgaaacactcgaggctgattttatctacagtgcttcatcaattgggacttcaattaatccacagttcattgcaagctttgcttctgctgctggtaaacgacctcatcaagatttcgactctcaagaatctgatccagagtggggttgctggacagcaaaccatgagctgaagaagccatcaatcagtctgttgtttccaacaattgacagggtgaaaaaaggggcttgtggaattcaattgtgcaggaatttgctttctctacctgaggtggattttcttttgacaactctaaacctttcgaacaatttacaaataagagttcatggtatatttgcactatattcaatatggaaagttctgtgcatcgaa

SEQ ID NO: 107388 - DNA, 2111 bp, Zea Mays
cgccgagaaaactcaaatcgaatccccaaatccttcgccggcgattccactccaagtctcgatcggaaaagcgcagaagagcaacggaatcccaattcccaaagggacaaggcaaagctaacttctccttcttcccatccttcctcatcccgtcggatcaatgccagcgggagcaaattcgaagccgctgccgaaattgtggccggttgaccggtgtttccagcccatccccccgttgcacgcggcgaggtagaggagtttccgccgtcaactccatccgatcggcgtagggtcgcggggtgccgacaactttggtccccgctccccacttgggcgccacggtcgctgcgcatgccgcgggctcccgcgcccactggaccccggtaacaccgcacggcgcctcgctccgcgtgcccgcccgctgccagctccatgccaaccgccgcggctacataggtagctgcgcgctggctgaaggctcctgcagtgcgcgttgaaggctttcgctgcgtgttgtgcgttctgcttgaatttcggtctgagtttggatgggccagatgatttcgggtgataaatccgacgaacagacagcacgcgacgatggaatcatcaagaatggaagggaaatcctatttcaggcttttaactgggaatccaataagcacaactggtggagtattttggaggaaaaagtaaccgatcttgcggaatctgggtttacgtcagtgtggcttcctcctccaacacagtcattatctcgagaaggctatctaccacagaatctgtactgccttgactcatgttatggttccctccatgagctaaaattgttgcttcataaaatgagcgaacataatgtaagggctatggcagatgttgttatcaaccatcgaattggaactactcaaggatccaatggcatgtataatcgttatgatggcatcccagtatcatgggatgaacatgctgttacatcttgttctggcgggaagggaaacaagagcactggggataactttgatggggttcccaatatagatcatacacaaccatttgtacgcaaagatattatcgaatggttgatctggcttcgaaaatcagttggttttcaagattttcgctttgatttcacgaaaggttatgcagccaagtttgtaaaagaatacattgaggaatcaaaacctctttttgcagttggggaatactgggatagctgtgaatatagcccccctgactaccgactgaactataatcaagatatccataggcagaggattattaattggatagataacactggaggactttgtgccgcatttgatttcacgacaaagggcattcttcaggaagctgtcaaaggagagttgtggcgtttgcgagattcagaaggaaaaccacctggtgtgatgggatggtggccttcaagatcagttacatttattgaaaatcatgacactgggtccactcagggtcattggccttttccgtcagatcatattatggagggatatgcttatatactcacccaccctggcatccccacggtgttctatgatcacttctatgaccagggtgtgcctctccatgacgaaattgctaaactgatgcaaatcagaaaatgccaagatatacatagccgttcatcaatcaaaattctggaggttgggtcagatctgtactcagcaatcatcgacgataagttgtgcatgaagatcggggacggctcgtggtgcccaagtgatccagagtggaggctggcagtctctggtgacagatatgctgtgtggcacaagtgaagcatataagtgccctcgatacagtttatttctgctctcaggaacaggagtaattagcatgttagctgaataacagcacggtaaaacatgccaaaaatgaccctcttcgaggttttacctgtacaagaggagtgcctaaatgcaatgcttaattagaaatacgtgagatcgtgcggctggtcccgaggtgagacatacattttgctaatcgcaacaactatggattacctgcaaaagaaatatatatagggcatgtgatgtctctgtggaatattttatcctggaaccagaaatttgaattatttttataaaaaa

SEQ ID NO: 107389 - DNA, 1457 bp, Zea Mays
gcactacccagtacccagtagtcagtaaccacatctcctccccctctcccgcaaagacaaggccggtgtccatggccgtccaggcgcagcacctactcaaccccgccttcctgccccacgacatggggcacgccttcagggcactggagggcgccacggtcggcggcggcggctccgcgttcctcgacgagctcggcttcggcgggtgcgcgccggcgccggcgccggcgcccttcgaggtcgccgcgtttggcgacacccagccgcgcagcgagctcacctgcaacggcggcggcggcgacaacagcaacgtgtttctcccgaggaagcgtgcacgcgtcgcgcccgggttcctggatgatgcccaccagcaggggttggttctgccggtgccgcagggccaggtgttcgccggcgacgtgcagagcagggaggcagggtgcggcgcggcgtccaccagtggtcgggcggcggccaccaccaacggcgtcctgtcgctgctctaccgccagggcatggagatcgacgcgctggtgcggctcgagaccgagaggatgcgtgcggggctgcaggaggctcggcggaggcacgcgcgcgcggtggcggcggccgtgcagcgcgccgcggcggggcggctgcggctggcggaggccgagctggggcgcgcccgccgccgcaacgccgagctggaggagaggctccggcagctggccgccgaggggcaggcgtggctgggcgtcgcccggagccacgaggccgtcgccgcggggctccgcgccacgctggaccagctgctgcagcagcagcagcccggcgccggcgttggcggcggcgaggcggaggacgcgcggtcctgctgcttcgagacctccccgccgggccccgtcgccgacgactgcgacgccgcgtcccggggctcctcgccgccgtcgtgcaagtcctgcggaggcggcgacgcgtccgtgctgctgctcccgtgccgccacctctgcctgtgccgcgcgtgcgaggccgccgccgaggcgtgccccgtctgcggcgctagcaagaacgcctcgctccaggtcctgctgtgacgaggcgggaggggccctgccggcgtgttggtcccgcgcggtggcggcactcgttgtccaatgagatccgctggctcccggggtcaggcggcgagctttgttgagtagtaaatgtagagatgctccaagttgcagcatagtaggctaattttagacgcagttagctgtactactggtaattggcactaacttctgttctcccctggaatatctttctggtaccttgtttctcagatgtgctagtagtatttttttttggggtagtgttggcttgttgtattaatgaggagatcggccaaagcttagatacgaaaagctatggtattctactatacttggagcttccctcgacatgtattattgtttcagcgtgacgccaaa

SEQ ID NO: 107390 - DNA, 1018 bp, Zea Mays
gccgcctgcctgggcctttgccctgcctccctctcctcgtcaagataaacaaaaaaccggcagcttttgtctccttgcaggcgccccacacacccaacgtgtcttccccgccccgcccgaccccccgtatatataacttccctcccaccccttgcccttgcactacccagtacccagtagtcagtaaccacatctcctccccctctcccgcaaagacaaggccggtgtccatggccgtccaggcgcagcacctactcaaccccgccttcctgccccacgacatggggcacgccttcagggcactggagggcgccacggtcggcggcggcggctccgcgttcctcgacgagctcggcttcggcgggtgcgcgccggcgccggcgccggcgcccttcgaggtcgccgcgtttggcgacacccagccgcgcagcgagctcacctgcaacggcggcggcggcgacaacagcaacgtgtttctcccgaggaagcgtgcacgcgtcgcgcccgggttcctggatgatgcccaccagcaggggttggttctgccggtgccgcagggccaggtgttcgccggcgacgtgcagagcagggaggcagggtgcggcgcggcgtccaccagtggtcgggcggcggccaccaccaacggcgtcctgtcgctgctctaccgccagggcatggagatcgacgcgctggtgcggctcgaggtgcgtggtagtcagtcgttgccgtcttgacagatccggcgagctcccccacacgttgtctgactcttgctcgcgtggtcttgccgcagaccgagaggatgcgtgcggggctgcaggaggctcggcggaggcacgcgcgcgcggtggcggcggccgtgcagcgcgccgcggcggggcggctgcggctggcggaggccgagctggggcgcgcccgccgccgcaacgccgagctggaggagaggctccggcagctggccgccgaggggcaggcgtggctgggcgtcgcccggagccacgaggccgtcgccgcgggg

SEQ ID NO: 107391 - DNA, 150 bp, Zea Mays
atgggatcgaggaacgggaacgtggtacgtggaacgctacaaaaactaggatttaacactactggaacaagattgttcccacgttcccggaacggaacgaacgttcccggaacgaggaacgtggccaagttcccagtttccggttactaa

SEQ ID NO: 107392 - DNA, 94 bp, Zea Mays
ctacacatcttgcccggtcgaggtggctgtggagagattcggcttgacattgagctctggtgcatcggcaagcgggaggcgctcatagaacgcg

SEQ ID NO: 107393 - DNA, 1227 bp, Zea Mays
atataattttcagcctacactttgtggttctgttttcttccttgatatcgataattgtacaacacataaactgcatttccaattttttccctttaagatattaaatttctttcaactctttcggatcgtttttaatatattgagcgtatcaacattattataaaattcattatactgacaactactaggttggagatgacacatgtgtttccaagggaaggtgcctcatctagctcaacctcaatgagcagccagaggagtgaaactgatgatgataggatgattgcaatggttctctctgaagaatatgccaagttagatggtgctatggccaagcgtcttactaatttaacatcaattccccttgttccccggattaatacatacttcccgacatatagtgatgctactatggaccattatcgcctccttgacaggttaaatgcatacggcttgtttgaggtgagagtgtctggtgatggaaattgtcagtttcgtgcactctcagaccaactatatagatcacccgattatcacaagaatgttcgaaaggagattgtaaaacagctcaaggaatgtaactccttatatgaaggttacgttccaatgaaatataaacattattgcaagaaaatgaagaagtatggtgaatggggtgaccatgtcacgctacaagcagctgctgacaagtttgctgcaaagatatgtcttctaacatcattcagagatacctgttttgttgaaattgttccacaatatcaagctccacagagagagatttggctgagtttctggtccgaagttcactataactcactgtacgatgctcgagatctccctagcaaatacaagcctagaaagaagcattggttgttgttttgatatccacgcgggggtttgcttcttaatggtggaatcatattgcttgaccgcttcgaccaccggccgctggtggcagcctggtcatagctcattgtggctctatccactatatagctatgcatcaatgatccattgtattgctcggtacaactccatcacgatccaggcatacaacactagatacagttacaatgccgaacctgagccttgtgaatagatactcctttactgacatacaggttgattgtataccatgtcctatttgttcattgttatattctttatttatacagttacatattattaatcttcatcagttcattattcagttcatatttggaagaa

SEQ ID NO: 107394 - DNA, 1417 bp, Zea Mays
tcgggtgctggtggttgggcagtaggcaaaggcaaggccgtacgcggaagaaaccgccgcagcctgcccagcgcaagaaaaaggcagaacccagccgcggcgccctcttcgcagtcccaactcccaaccgagaggtgaaagcatccgtcccgtcccagtttcgccgccgaccctgcaaagcagaaggctctttgcgcgtcctcccctctttcctcccggactcgccggcgttcctgtctgttgctgccggtgggcggtggtggttggagatgacacatgtgtttccaagggaaggtgcctcatctagctcaacctcaatgagcagccagaggagtgaaactgatgatgataggatgattgcaatggttctctctgaagaatatgccaagttagatggtgctatggccaagcgtcttactaatttaacatcaattccccttgttccccggattaatacatacttcccgacatatagtgatgctactatggaccattatcgcctccttgacaggttaaatgcatacggcttgtttgaggtgagagtgtctggtgatggaaattgtcagtttcgtgcactctcagaccaactatatagatcacccgattatcacaagaatgttcgaaaggagattgtaaaacagctcaaggaatgtaactccttatatgaaggttacgttccaatgaaatataaacattattgcaagaaaatgaagaagtatggtgaatggggtgaccatgtcacgctacaagcagctgctgacaagtttgctgcaaagatatgtcttctaacatcattcagagatacctgttttgttgaaattgttccacaatatcaagctccacagagagagatttggctgagtttctggtccgaagttcactataactcactgtacgatgctcgaggtcagaaacacatatacttaatataacttgcttgtggcaagtctgaaatacgttaatatgaaattttgctatgtataaacatcttttaagaaaaggaattacatgttgttgtgcagatctccctagcaaatacaagcctagaaagaagcattggttgttgttttgatatccacgcgggggtttgcttcttaatggtggaatcatattgcttgaccgcttcgaccaccggccgctggtggcagcctggtcatagctcattgtggctctatccactatatagctatgcatcaatgatccattgtattgctcggtacaactccatcacgatccaggcatacaacactagatacagttacaatgccgaacctgagccttgtgaatagatactcctttactgacatacaggttgattgtataccatgtcctatttgttcattgttatattctttatttatacagttacatattattaatcttcatcagttcattattcagttcatatttggaagaa

SEQ ID NO: 107395 - DNA, 1301 bp, Zea Mays
tcgggtgctggtggttgggcagtaggcaaaggcaaggccgtacgcggaagaaaccgccgcagcctgcccagcgcaagaaaaaggcagaacccagccgcggcgccctcttcgcagtcccaactcccaaccgagaggtgaaagcatccgtcccgtcccagtttcgccgccgaccctgcaaagcagaaggctctttgcgcgtcctcccctctttcctcccggactcgccggcgttcctgtctgttgctgccggtgggcggtggtggttggagatgacacatgtgtttccaagggaaggtgcctcatctagctcaacctcaatgagcagccagaggagtgaaactgatgatgataggatgattgcaatggttctctctgaagaatatgccaagttagatggtgctatggccaagcgtcttactaatttaacatcaattccccttgttccccggattaatacatacttcccgacatatagtgatgctactatggaccattatcgcctccttgacaggttaaatgcatacggcttgtttgaggtgagagtgtctggtgatggaaattgtcagtttcgtgcactctcagaccaactatatagatcacccgattatcacaagaatgttcgaaaggagattgtaaaacagctcaaggaatgtaactccttatatgaaggttacgttccaatgaaatataaacattattgcaagaaaatgaagaagtatggtgaatggggtgaccatgtcacgctacaagcagctgctgacaagtttgctgcaaagatatgtcttctaacatcattcagagatacctgttttgttgaaattgttccacaatatcaagctccacagagagagatttggctgagtttctggtccgaagttcactataactcactgtacgatgctcgagatctccctagcaaatacaagcctagaaagaagcattggttgttgttttgatatccacgcgggggtttgcttcttaatggtggaatcatattgcttgaccgcttcgaccaccggccgctggtggcagcctggtcatagctcattgtggctctatccactatatagctatgcatcaatgatccattgtattgctcggtacaactccatcacgatccaggcatacaacactagatacagttacaatgccgaacctgagccttgtgaatagatactcctttactgacatacaggttgattgtataccatgtcctatttgttcattgttatattctttatttatacagttacatattattaatcttcatcagttcattattcagttcatatttggaagaa

SEQ ID NO: 107396 - DNA, 496 bp, Zea Mays
tcgggtgctggtggttgggcagtaggcaaaggcaaggccgtacgcggaagaaaccgccgcagcctgcccagcgcaagaaaaaggcagaacccagccgcggcgccctcttcgcagtcccaactcccaaccgagaggtgaaagcatccgtcccgtcccagtttcgccgccgaccctgcaaagcagaaggctctttgcgcgtcctcccctctttcctcccggactcgccggcgttcctgtctgttgctgccggtgggcggtggtggtacggctcatctcctttaccttttgatttgaaatcgttattgggatcctttttgggacttcaggcgttcgctattgggatcctttttggtacttcgggcgtttctctgtctcacagcgtcgtggggtttcgggcttcttttggcggacacggggtcgattgacgattgaagctaagccacccgggttgcttggggatcctggcttggtgattggccgagttgactgaatcagg

SEQ ID NO: 107397 - DNA, 991 bp, Zea Mays
gtcaaacgtcaggttttgtgttatcaagaaaataacatgttctatctacatcttgtacacaggatgttatcgagaagggagagaagcagcccaacatcactattggcattctggtctccgttgtcgtcgtgttcgttaccgttctcttcaagatcctgtttggaggcaagaagccggtggcacctgtgaaacctgcagctgaggcgaagaagcccaaggccacagtgaccgacggtgctggaagcagtggcgacaaggatgagaaagaggacgaaaaggaggagacagcaggcccacgtcggaggacccgaagggagacatagagacctatttttgatgtgtttggatgttctggcgcctgcttattttgaggactcttaatatttctgagtgtataataggaacttgtgtcacctctgcggcttccctgctgcttatttgtttttacatggttagaccaggaaccttcacgagctgtagaatttagttcttgttggtcatttgtgtgtgtgcctgacgggtataatcccttgttcaatcagatagaggtgatggttttttttctcgtagatcacaggaaggaatatttcataaagttctcgttaaattctggacgccttttgttttacacaattccttgtatcatagaatagtcagcgagcgtatattcttacaacagtttttgtccttcaatagaaaaattacagtttatttattatgaatacagtacatacaattatagtttgggacaattgtgattgtatccttttctgtactcccaacttttattttgcccctcgattcccgacttcgtgattttgcccattcgatttgaaatggaaactgccctttgcccctctctactaacagcgttaaggaaaatctgaattaatgattttaaaaaataaaaaatatggaaatacatgaatgtatatggaaatacatgaactgtctgaactaccttaccggtacacgtccaacaccaaaccct

SEQ ID NO: 107398 - DNA, 2362 bp, Zea Mays
gctacccaccgttccttttcctctctcctgatctcagccgtgtagcctctccaccgcgcccacttcttatactgccagcgtctgctccctctcgcggaggcctcgctctggttggaaggtttggagaaactccccggctcgaggagatcgtgacattgagaggacgatgggagggcgcgcgctcctcctcctcctcctggtctcggcgttggtctttcagatccacgcctccgacccgctgctgtacgagccgttcgatgaggactttgaggggagatgggtcgtctccaagaaggatgaataccaaggtgtgtggaggcatgccaagagtgatggtcatgaggactatggcctccttgttagtgagaaggcaaggaaatacgccataatcaaggagcttgatgagccagttaccttgaaggatgggacagtggtcctgcagtttgaagtgagacttcagaatggccttgaatgcggaggtgcctacattaagtacatccgccctcaggatgctggatgggatgccaaggagtttgataatgagactccatacactattatgtttggtccagataagtgtggatcaaccaacaaggttcatttcatccttaagcacaagaatcctaagactggaaagtatgttgagcatcatctcaaattcccaccatctgtcccatatgacaagctctctcatgtctacacggctatcttgaagccagacaatgaggtcaaaattttggtagatggggaagaaaagaagaaggcgaacttcctttctgctgatgattttgagccagcacttatcccatccaagaccattcctgaccctgatgacaagaagccggaggactgggatgagagagctaaaattcctgatccagatgcagtaaagcctgatgactgggatgaggatgccccgatggaaattgtggatgatgaagccaccaagcctgagggatggttggatgatgaacctgaggagattgatgatcctgaggcagccaagcctgaggactgggacgatgaggaggatggtgaatgggaggcgccaaagattgacaaccccaagtgtgaagaggcacctggatgtggcgagtggaagaggccaatgaagcagaatcctgcttacaagggcaagtggcatgcacctatgattgacaaccccaactacaagggaatctggaagcctcaggagatccccaaccctgagtactttgagcttgacaagcctgactttgatccaattgctgctattgggattgagatctggacaatgcaggatggcatcctgtttgacaatatcttgattgctgacgatgagaaggttgccacctccattctggagaagacctggaagcccaagtatgatgttgagaaggaaaaggagaaggctgaggaggaggctgctgctggtgcagatggtctttctgagttccagaagaagatttttgacgtcctgtacaagattgctgatgttccgttcttggcaccctacaaaaccaagatcattgatgttatcgagaagggagagaagcagcccaacatcactattggcattctggtctccgttgtcgtcgtgttcgttaccgttctcttcaagatcctgtttggaggcaagaagccggtggcacctgtgaaacctgcagctgaggcgaagaagcccaaggccacagtgaccgacggtgctggaagcagtggcgacaaggatgagaaagaggacgaaaaggaggagacagcaggcccacgtcggaggacccgaagggagacatagagacctatttttgatgtgtttggatgttctggcgcctgcttattttgaggactcttaatatttctgagtgtataataggaacttgtgtcacctctgcggcttccctgctgcttatttgtttttacatggttagaccaggaaccttcacgagctgtagaatttagttcttgttggtcatttgtgtgtgtgcctgacgggtataatcccttgttcaatcagatagaggtgatggttttttttctcgtagatcacaggaaggaatatttcataaagttctcgttaaattctggacgccttttgttttacacaattccttgtatcatagaatagtcagcgagcgtatattcttacaacagtttttgtccttcaatagaaaaattacagtttatttattatgaatacagtacatacaattatagtttgggacaattgtgattgtatccttttctgtactcccaacttttattttgcccctcgattcccgacttcgtgattttgcccattcgatttgaaatggaaactgccctttgcccctctctactaacagcgttaaggaaaatctgaattaatgattttaaaaaataaaaaata

SEQ ID NO: 107399 - DNA, 2346 bp, Zea Mays
tatgctatttatctgtgaatattggtgtcatttgttataatttgaatatgcatctatgcaacctttgtgcaccaaacacaccataattaatttgactaattgttagtcaaagtttgcaaagttacactttccgaaacaacatgttgcttgcatatgtggatgaagggagtagtatcctggttctgtaatgccattttaaacagtattgcaatccttattttaactgcttgttgcctgccactgtttgaacattgtagtcataatttctgttcttttttgtgtgtttcatagcttaatgcctacatactctgttttgtaggtgtgtggaggcatgccaagagtgatggtcatgaggactatggcctccttgttagtgagaaggcaaggaaatacgccataatcaaggagcttgatgagccagttaccttgaaggatgggacagtggtcctgcagtttgaagtgagacttcagaatggccttgaatgcggaggtgcctacattaagtacatccgccctcaggatgctggatgggatgccaaggagtttgataatgagactccatacactattatgtttggtccagataagtgtggatcaaccaacaaggttcatttcatccttaagcacaagaatcctaagactggaaagtatgttgagcatcatctcaaattcccaccatctgtcccatatgacaagctctctcatgtctacacggctatcttgaagccagacaatgaggtcaaaattttggtagatggggaagaaaagaagaaggcgaacttcctttctgctgatgattttgagccagcacttatcccatccaagaccattcctgaccctgatgacaagaagccggaggactgggatgagagagctaaaattcctgatccagatgcagtaaagcctgatgactgggatgaggatgccccgatggaaattgtggatgatgaagccaccaagcctgagggatggttggatgatgaacctgaggagattgatgatcctgaggcagccaagcctgaggactgggacgatgaggaggatggtgaatgggaggcgccaaagattgacaaccccaagtgtgaagaggcacctggatgtggcgagtggaagaggccaatgaagcagaatcctgcttacaagggcaagtggcatgcacctatgattgacaaccccaactacaagggaatctggaagcctcaggagatccccaaccctgagtactttgagcttgacaagcctgactttgatccaattgctgctattgggattgagatctggacaatgcaggatggcatcctgtttgacaatatcttgattgctgacgatgagaaggttgccacctccattctggagaagacctggaagcccaagtatgatgttgagaaggaaaaggagaaggctgaggaggaggctgctgctggtgcagatggtctttctgagttccaggtgatccatttttctgatcttttgcaaccataactgttatttctttcttcattagtcgtctttgttccatcttgtccctaatgggttttgcctctgcagaagaagatttttgacgtcctgtacaagattgctgatgttccgttcttggcaccctacaaaaccaagatcattgtgagttctggagatatttgctatcctctcctgtcaaacgtcaggttttgtgttatcaagaaaataacatgttctatctacatcttgtacacaggatgttatcgagaagggagagaagcagcccaacatcactattggcattctggtctccgttgtcgtcgtgttcgttaccgttctcttcaagatcctgtttggaggcaagaagccggtggtaagttattcccagccaatgttttactgctgccacggttctgaacttgaagagaatgcttgctcaacccactacatttacttgttccaggcacctgtgaaacctgcagctgaggcgaagaagcccaaggccacagtgaccgacggtgctggaagcagtggcgacaaggatgagaaagaggacgaaaaggaggagacagcaggcccacgtcggaggacccgaagggagacatagagacctatttttgatgtgtttggatgttctggcgcctgcttattttgaggactcttaatatttctgagtgtataataggaacttgtgtcacctctgcggcttccctgctgcttatttgtttttacatggttagaccaggaaccttcacgagctgtagaatttagttcttgttggtcatttgtgtgtgtgcctgacgggtataatcccttgttcaatcagatagaggtgatggttttttttctcgtagatcacaggaaggaatatttcataaagttctcgtt

SEQ ID NO: 107400 - DNA, 1160 bp, Zea Mays
ggaatttttttttccaggctttgctttatggtgttgcatgggcttcgtgggtatgtatccaatcaaatttactgaagtcatcaactgatttatattttcgttaacgaacctcaactaattgatgctctaagaaaaaaaatatcgcatcttgatggatttaccacttggtggtacagttacagaagctttgtccatttatctgctactatatcatgcaggttccatattttagctcttcattgggtatcatctatgttctggccaaaccagcaatatatgcgatgatttctggtgaagtactgtcaactgaccagggaaaagcgcaaggttttattgcaaccgtgcagtctgtagctatattgttggcaccacaatttatgagtccactgacatcttacttcatttcagaggaagcgcccttcgactgcaaaggtttcagctttattgtggcgagtttcttcttgggatttgccattggttcagctgctcttgtgtctctggcgctttttggtgccttcatcagcagagctggagtgaaggttgtccatgtcctctcccccaaggttttcattggtttgattgttggagccatgcttccctattggttctctgccatgaccatgaagagtgttggaagtgtcgccctaaagatggaggaggaggtccgcagacagttcaacaccattcctgggttgatggagggaactgccaagcctgactatgcaacctgtgtgaagatctccactgatgcttccatcaaggagatgattcctcctggtgctctggtcatgctcactcccctcattgttggaaccctcttcggtgttgagactctctctggtgttcttgctggtgccctggtttctgcaggatttatggatttctgcttgatgtttgccatctttgctcccaacaccggtggtgcatgggacaatgctaagaagtacattgaggctggtgccagcgagcatgccaggaccctcggccccaagggatctgactgccacaaggctgctgtgataggtgacaccattggtgaccccctgaaggacaccttgggcccgtccctcaacatcctgatcaagcttatggcggtggagtcccttgtgtttgaccccttcttcgccacccacggcggcctgttgttcaagtacctgtaa

SEQ ID NO: 107401 - DNA, 2100 bp, Zea Mays
tgcactcctcctctcttgcccaccagcgactcccgtagctggaactcgctcgtcaaaaggaaaagaaacacttcgcttcagctggttgacagacgactcagagcaaaatgggtatactggtgattacggtggacctagactgctgtcgctgcagagccaagatcaccaaggtcctggactgtctcaaaggtacatatttatcagcatgtacataaagatgggaatacttccatgatgcgattgtacatataatccagcaattcattcgaaaaaaccaaaagcgtattttaccccccaccccaagcacgaacagtccatgttcgaagaaactgatattgtcgaagctgtagcgcaacgtgtcttcgcaaaaagggaaaaattaaagaaagacaaaacattcggggttcccaatttttgcagaggaaagtatgaacaatactgaccaggtttgcaagattcttctgaaaccacgtcgacgagcttgtctggttcagcttatttttaatcacatgcggaagaagatgaatgcggcacgaaggagtcgtttagggtctagaaatgacaaattgctcctaccacaacgactcaacggactatgtgttcatattgattcggacgatttttaccaaaacgattctcatagagtttgggagtttagttgccagaagccgattccccgatggccagaatccaattttaagccgaaacaaacaccccgtcatcggcctgaatcggaaaacattttaaccaacatcatctaggcttcctgtgattaattaaataatcatagttagactatgttcagcagttcatagttagactggatgttttgtactgtagactactcgtaggagtttaaatatgggtattgggatgggtaagactgcaactgctagcttataagaggctgaattctaatatattcttgcaacagtaattatctttttctttttcaaaaattgatgcagaggagttctgcatcgagaaagtggagttcgatgacaagaaggagaagaaggtggtggtggtgcgtgggaagttcgacgccgagaagctctgcaagaaggtgtggtccaaggccgggaaaatcgtgaaggggattgtcatcgctgaggtgtggccaataccagccccgcccaaggagtgcaagcctgaggcaccgaaatgttgcgactgtgagaagtgcaagccgaagcctaagccggagccaccgaaatgttgcgactgtgagaagtgcaagcccaagcccaagcctgagccaccgaaatgttgccactgtgagaagtgcaagcccaagcctgagcctcccaaaccagagaaatgctgcagtgcctgttgtcactgcaagcctaagcctgatcccaaaccgctgatatgttgtgtctgttgccactgcaagccggagaagaaggaagagaagaaggaagaaaagaaggacgaaaagaagccggcgccggccaaaacggagtacaagtttgtgccctacccgtacccgctgccgaaccccgcgatgtgcccgagctggccgtggcagtgcccgcctcagcagcagtgccagtgctgccagaagcctccgcctccgccgcccaagtcgccgccgaagccgccgccgtgcacctgttcgagccacgccgcctgtgtctgcggcaagacaccgccggcggtctggccaccgatgccgccgccggtctggccgcccccgtggggcacctgcaacgtcgtcaccgaggagagcccgtgctccgtcatgtgacgctacgcgcttgctttgtcatgtactcgtcgctgttggcctgttgctgtgctgccatcggtactggacctcggtgctacttgggccggtgccattctgtgtagtgaaggtacagtgcatcgtctgcagatgtgcttgcctcctacagtctcttatacgaacgtgtcacgccttgttttattgcagtaattatgtagcttccagccataatttgctactctgtatatgtggtataagatgaattttcatagctcggctccatggaaattcaagaaatctgtcacatccgcatggaaatttaaggacaagttaaaacatggatataagctagttgttccgttggcaga

SEQ ID NO: 107402 - DNA, 1290 bp, Zea Mays
tgcactcctcctctcttgcccaccagcgactcccgtagctggaactcgctcgtcaaaaggaaaagaaacacttcgcttcagctggttgacagacgactcagagcaaaatgggtatactggtgattacggtggacctagactgctgtcgctgcagagccaagatcaccaaggtcctggactgtctcaaagaggagttctgcatcgagaaagtggagttcgatgacaagaaggagaagaaggtggtggtggtgcgtgggaagttcgacgccgagaagctctgcaagaaggtgtggtccaaggccgggaaaatcgtgaaggggattgtcatcgctgaggtgtggccaataccagccccgcccaaggagtgcaagcctgaggcaccgaaatgttgcgactgtgagaagtgcaagccgaagcctaagccggagccaccgaaatgttgcgactgtgagaagtgcaagcccaagcccaagcctgagccaccgaaatgttgccactgtgagaagtgcaagcccaagcctgagcctcccaaaccagagaaatgctgcagtgcctgttgtcactgcaagcctaagcctgatcccaaaccgctgatatgttgtgtctgttgccactgcaagccggagaagaaggaagagaagaaggaagaaaagaaggacgaaaagaagccggcgccggccaaaacggagtacaagtttgtgccctacccgtacccgctgccgaaccccgcgatgtgcccgagctggccgtggcagtgcccgcctcagcagcagtgccagtgctgccagaagcctccgcctccgccgcccaagtcgccgccgaagccgccgccgtgcacctgttcgagccacgccgcctgtgtctgcggcaagacaccgccggcggtctggccaccgatgccgccgccggtctggccgcccccgtggggcacctgcaacgtcgtcaccgaggagagcccgtgctccgtcatgtgacgctacgcgcttgctttgtcatgtactcgtcgctgttggcctgttgctgtgctgccatcggtactggacctcggtgctacttgggccggtgccattctgtgtagtgaaggtacagtgcatcgtctgcagatgtgcttgcctcctacagtctcttatacgaacgtgtcacgccttgttttattgcagtaattatgtagcttccagccataatttgctactctgtatatgtggtataagatgaattttcatagctcggctccatggaaattcaagaaatctgtcacatccgcatggaaatttaaggacaagttaaaac

SEQ ID NO: 107403 - DNA, 1085 bp, Zea Mays
tgcactcctcctctcttgcccaccagcgactcccgtagctggaactcgctcgtcaaaaggaaaagaaacacttcgcttcagctggttgacagacgactcagagcaaaatgggtatactggtgattacggtggacctagactgctgtcgctgcagagccaagatcaccaaggtcctggactgtctcaaagaggagttctgcatcgagaaagtggagttcgatgacaagaaggagaagaaggtggtggtggtgcgtgggaagttcgacgccgagaagctctgcaagaaggtgtggtccaaggccgggaaaatcgtgaaggggattgtcatcgctgaggtgtggccaataccagccccgcccaaggagtgcaagcctgaggcaccgaaatgttgcgactgtgagaagtgcaagcctaagcctgatcccaaaccgctgatatgttgtgtctgttgccactgcaagccggagaagaaggaagagaagaaggaagaaaagaaggacgaaaagaagccggcgccggccaaaacggagtacaagtttgtgccctacccgtacccgctgccgaaccccgcgatgtgcccgagctggccgtggcagtgcccgcctcagcagcagtgccagtgctgccagaagcctccgcctccgccgcccaagtcgccgccgaagccgccgccgtgcacctgttcgagccacgccgcctgtgtctgcggcaagacaccgccggcggtctggccaccgatgccgccgccggtctggccgcccccgtggggcacctgcaacgtcgtcaccgaggagagcccgtgctccgtcatgtgacgctacgcgcttgctttgtcatgtactcgtcgctgttggcctgttgctgtgctgccatcggtactggacctcggtgctacttgggccggtgccattctgtgtagtgaaggtacagtgcatcgtctgcagatgtgcttgcctcctacagtctcttatacgaacgtgtcacgccttgttttattgcagtaattatgtagcttccagccataatttgctactctgtatatgtggtataagatgaattttcatagctcggctccatggaaattc

SEQ ID NO: 107404 - DNA, 1105 bp, Zea Mays
tgctccttcatcttcttcctcccacacctcacctacaaactgctctatctcttgtgttgtgcatcgacatcattattcagggttagaagatggcaatactggtcatcaccatggtgaacgtgcagtgctgccactgcagagccagcatcaccaagatcctggaaagccacaaagaggagttttgcatcgagaagattgaattcgaggagaagctcaacaaggtgattgtacgcgggaagttcgacggcgagaagctcaagaaggcgatactagacaaggccggcgagaccgtgaagatcaaggagatagccctcgtcgacaagtggccacccccacccccaccttcgcctcccccgcccaaaccggaatgcaaggtggtgccgtacccttacccgtacccgtatccgccgtacccgtggtcgtgcccaccacctcgcccgccgtgccactgctgcaagccgccgacaccgtcgccgccgaaaccgccgccgccacagccgacgccgtgccagtgccactgctgcaagccgccgacaccgtcgccgccgaagccgccaccacagccgacgccgtgccagtgccactgctgtaagcctccggcaccatcgccgccgaagccgacgccgtgccagtgccactgctgtaagcctccggcaccgccgccgccgaagccgccgccacagccgacgccgtgctgcaagcagtgcgaggactcgcacgacaaggataaatgcaagcgttgcccaccatgcccgccgtgcccaccgtgcccgccgtgtccaccgtgcccgcccaactactggccgccacacccgtggccctgccagtgcccaccacaggacagccagtgcaccatcgtgtgatccaccgtccacgtacgcttcctttcttgcaatctgccgcctgctgcgatcgtcgtgtgatctgtcccaataatctcgccctagtcgtgtacttggttctcgcgttcgtttgtgtcgtttgggttgtgtggtgtgtgtcctgtcttgtcttgtcttgtaaaccattctctctttcagctgatgatgtgtttattcatttcatgttactttcttaatagcatcttcgagagcattgctaaaaa

SEQ ID NO: 107405 - DNA, 1366 bp, Zea Mays
accaccaacgcacctaccagctcaaccacctctgacctctttcggcatcatctctctctcctcagcttgcattgtcaacgacgacaaagcgagcgcagactcgcacaccactctctagctagctctcagcctgcgccctgtggtcggcggcagcatgaatttctcgtcgtatttcttctcctcgtcatcctcggacaagaagtcgtcgtccaagcgccagcagcagcaggcggcgcagccccagacggacgccaacacgacgcggtacctgggtgtgcggcgccggccgtggggccggtacgcggcggagatccgggacccggccactaaggagcggcactggctgggaaccttcgacacggccgaggaggccgccgtggcctacgaccgcgccgcgcgctccctccgcggcgcccgcgcgcgcaccaacttcgcctacccggacctcccgcctggctcctccgtcacgccctacctctccccggacctcacctcgggcgacaacgccacgcagctcctccagccattctacgccgccgacgcagccgccgcgtctctaccaccggcgctcccggccgcgaacggcgcggcgggctacggcgccgccgccggcgactacgcctcctacggctatagtgccgaggacatgtccgctctcatggacgacctcaccatacccgacgacctgaccgctgactacggcgcagaagacgccggcggctccgtggacatgtcctccatgtacggcggcggcggcagcagcgccaatgccagctccgccagcagcggcgggggcgggtggtgcgacgcgtcggagttcagcgcgtacggcgcgtcggccgcctcccacggggtctacttcgaggaagggtacgtgcacagcccgctcttctcgccgatgccggccgtcgacgacgcctgcgccgacggcttccagctcggcggctcctcgtcttcatactactactgagtactgatcctgatcgtccgtcccgctcggtgctgccttcccggatcgatcgtcgaccgcctctgcgcccgccggtggtggactgtggcgtggtgagttgctgggtgcggctagcagtttaattaattacagtcgtgtgataatactatatattaataatatactcctatgtactgtcactgtattttgttactttttgggcctccatctccattctctgggtgatcgatgggcctttcgtattgggctgtgtaacatgttctttttttatgctcctttctcatttgtttttttttggcgattgtatcagtcggcatgcactcgtgtgttgctggcgcttcagttcagtgtaatatcttttattacctgctattatatgtacatttgttttctagt

SEQ ID NO: 107406 - DNA, 2179 bp, Zea Mays
ttgtgcgcagatggatgggtttaccttgccaccatttgagtcaacctgcatctttagggacaacgatattataagggttaaacaaaaatcctgtacgaagcacatagagcacaatgatgtgcactgtattcaagatcatgagataatagagaagagatcacttccagttgatggcaaaatccttgcaatccaggataaggaggatgtctgtaaacaccaagaagaagaggcacatgacgatcaccagcttgaagaaaatgccactgctagccatagcacagaaaataatggtacaagtttgaagaggaagcggaatgatggggttgcagatatacctgagagctcaaagggacaaaggctgaaggtgacaaattctggaaagcatatagattacagcaagaaggaacaaaatggatctaaaaagttgaagctgtcagttattgatattgaagctaagaaagcaactccacaacatgaaactaccactaccttagtggagcagcaaaaatcagaggggaactatcaaactgagttgaaatgtgaggcaaaggtgacaaactatgatgctcaaagtgacacaaaaaagttggagagtcgaagtgctcgccgcaagaaaattaaaaggctaatgaaacaaagaggaaaattacaaatagaaaagaatgtgcatggagattcaccaatagctgctgattgtccatcatcaagcaatcaagatggcttgcctgtcccatcaagcaatcaaaatggatcacatgttcatttttcaagcctcaaagcagatgaggacgaatctgaaacgtcggatgagattgtcccagttgtggttcggcctggtcacattcgctttgagccagcaggcagagaacccgacaaatcgccagcaaaagaattacagggcacattccaatggagtggaacattgagcaaaaagaagggccagaagtggggaataaatagctcaaacaagaaaaatgccgatgtcggctatcatgcaggaatagctggaagcaacacagaagttaataatcttgtcatggacattaaggttactgaaaatggcttctgtgctgtcagtaatagaaggatcgatgaaggcagtaatgttgagatgtccagtgtgaaggctgttgctaatgaagaaaagtctagaggtgtaccttttgatttcgagagcttgtaccccctaacgcaacttccaaaggagggagatctgattgcataccgattggttgagctgtcttccatgttgtgtccggagctgtcttcgttccgtgttggaaaagttgtgttatatgatcccatatcattgcgtatcattctcttacccgttcaagagtatccaatcaccaccgaggaaaacgaagacaaggacgagccagatatgcttgtggacttgtcaccgtacaaggaagatggctccttggagatcgagtactcttcacttcttgatgtaaggctactgaagggtattgaaccagtccccggggctttcagtactcccttggcagaaacatgcaatgaagttggatcggcactggccaaaggaaggccagttaccttacacaaaaatgaaggcaatattgagagccagaaatcacccttggttgcaaacaacactaatggaaagtcagaaaagacggtttgggaaaaaaatgacgaacccggtgatgaggtcgatgttcagcaaaatggctggggaacatggaaacaaaatagtacgtcagcttggtcttatagagcccttaggagcagcgcccttggcccgacgatggcacttctacgagggaagaacaaccagaggggtaaaccaccctatcgaaagaagggcaagtaattgcctatgtgtttagtgtttaagttcaacgatacctatgtaatcctgtgttggtccaatcttttagcagttgatcttatttatgtaaaatttggcgaggaagagtgactgccgttgctgccctggtcattttgaagtctggccaagcgaattgttatcgtttgcaaaggatcgttatgatttgctccgacacttgtcaaatgctggttttagagttttgcatgtgcactaaaaatgttcataattccatatctgccacaaaaggttgtagcaccaaacgctccacctaaggccttgttcagttatttccattacatatgaattgggtgggattggaaaaaa

SEQ ID NO: 107407 - DNA, 2197 bp, Zea Mays
ttgtgcgcagatggatgggtttaccttgccaccatttgagtcaacctgcatctttagggacaacgatattataagggttaaacaaaaatcctgtacgaagcacatagagcacaatgatgtgcactgtattcaagatcatgagataatagagaagagatcacttccagttgatggcaaaatccttgcaatccaggataaggaggatgtctgtaaacaccaagaagaagaggcacatgacgatcaccagcttgaagaaaatgccactgctagccatagcacagaaaataatggtacaagtttgaagaggaagcggaatgatggggttgcagatatacctgagagctcaaagggacaaaggctgaaggtgacaaattctggaaagcatatagattacagcaagaaggaacaaaatggatctaaaaagttgaagctgtcagttattgatattgaagctaagaaagcaactccacaacatgaaactaccactaccttagtggagcagcaaaaatcagaggggaactatcaaactgagttgaaatgtgaggcaaaggtgacaaactatgatgctcaaagtgacacaaaaaagttggagagtcgaagtgctcgccgcaagaaaattaaaaggctaatgaaacaaagaggaaaattacaaatagaaaagaatgtgcatggagattcaccaatagctgctgattgtccatcatcaagcaatcaagatggcttgcctgtcccatcaagcaatcaaaatggatcacatgttcatttttcaagcctcaaagcagatgaggacgaatctgaaacgtcggatgagattgtcccagttgtggttcggcctggtcacattcgctttgagccagcaggcagagaacccgacaaatcgccagcaaaagaattacagggcacattccaatggagtggaacattgagcaaaaagaagggccagaagtggggaataaatagctcaaacaagaaaaatgccgatgtcggctatcatgcaggaatagctggaagcaacacagaagttaataatcttgtcatggacattaaggttactgaaaatggcttctgtgctgtcagtaatagaaggatcgatgaaggcagtaatgttgagatgtccagtgtgaaggctgttgctaatgaagaaaagtctagaggtgtaccttttgatttcgagagcttgtaccccctaacgcaacttccaaaggagggagatctgattgcataccgattggttgagctgtcttccatgttgtgtccggagctgtcttcgttccgtgttggaaaagttgtgttatatgatcccatatcattgcgtatcattctcttacccgttcaagagtatccaatcaccaccgaggaaaacgaagacaaggacgagccagatatgcttgtggacttgtcaccgtacaaggaagatggctccttggagatcgagtactcttcacttcttgatgtaaggctactgaagggtattgaaccagtccccggggctttcagtactcccttggcagaaacatgcaatgaagttggatcggcactggccaaaggaaggccagttaccttacacaaaaatgaaggcaatattgagagccagaaatcacccttggttgcaaacaacactaatggtaaagaacacaaactaggaaagtcagaaaagacggtttgggaaaaaaatgacgaacccggtgatgaggtcgatgttcagcaaaatggctggggaacatggaaacaaaatagtacgtcagcttggtcttatagagcccttaggagcagcgcccttggcccgacgatggcacttctacgagggaagaacaaccagaggggtaaaccaccctatcgaaagaagggcaagtaattgcctatgtgtttagtgtttaagttcaacgatacctatgtaatcctgtgttggtccaatcttttagcagttgatcttatttatgtaaaatttggcgaggaagagtgactgccgttgctgccctggtcattttgaagtctggccaagcgaattgttatcgtttgcaaaggatcgttatgatttgctccgacacttgtcaaatgctggttttagagttttgcatgtgcactaaaaatgttcataattccatatctgccacaaaaggttgtagcaccaaacgctccacctaaggccttgttcagttatttccattacatatgaattgggtgggattggaaaaaa

SEQ ID NO: 107408 - DNA, 623 bp, Zea Mays
ttgtgcgcagatggatgggtttaccttgccaccatttgagtcaacctgcatctttagggacaacgatattataagggttaaacaaaaatcctgtacgaagcacatagagcacaatgatgtgcactgtattcaagatcatgagataatagagaagagatcacttccagttgatggcaaaatccttgcaatccaggataaggaggatgtctgtaaacaccaagaagaagaggcacatgacgatcaccagcttgaagaaaatgccactgctagccatagcacagaaaataatggtacaagtttgaagaggaagcggaatgatggggttgcagatatacctgagagctcaaagggacaaaggctgaaggtgacaaattctggaaagcatatagattacagcaagaaggaacaaaatggatctaaaaagttgaagctgtcagttattgatattgaagctaagaaagcaactccacaacatgaaactaccactaccttagtggagcagcaaaaatcagaggggtattatctcaaggcatatgccagttactgcttttaagttttaaggcactctggtttgagaagtagttctagttttgttcccattgatcataaccagtttgaaatgt

SEQ ID NO: 107409 - DNA, 2350 bp, Zea Mays
cctaacaaaatctctccttagtttccccaacctgcttctgtttaccgaattcctaaatccaatccccttgccaagctctctctttgctgcgggaggtcgaggccggagaggtcttctgggatgggatcaagaaaggggtggttccccgtggccctcctgctgttggccgactctgccctctggccgccggtcgccgccgccgccgccggaggcggcgaggccgaacacgccgttcagcagcatagcgagcgcatctcagggagtgctggtgatgtgttagaagataatcctgtgggtaggttgaaggtcttcatttatgacttaccaaggaagtacaacaagaagatggtcaccaaggattcacggtgcctcagtcacatgtttgctgctgaaattttcatgcatcgtttcttgctctcgagtgctgtccggacactaaatcccaaggaagctgattggttctatacaccagtttacactacttgcgatttaactaacgctggactgcccttgccgtttaagtcaccacgggtgatgaggagcgcgatccaatatatttcaaacaaatggcccttctggaataggactgatggagcagatcatttcttcgttgttccgcatgattttgcagcatgcttccactatcaggaagaaaaagctatcgagcgtggaattcttccattgctgcgacgtgctacattggtccaaacctttggacaggagaatcatgtttgcctgaaggagggttccatcattattccaccctatgctcctccgcagaaaatgcaagctcacttgatttccccagacactccacgctcaatcttcgtttacttccggggacttttttatgacacggggaatgaccccgagggcggatactatgcaagaggtgcgcgagcttcgctatgggagaacttcaagagcaaccctctgtttgacatttccacagaccaccctgccacttactatgaagacatgcagcgcgctgtcttctgcctgtgcccattgggctgggcaccgtggagccctaggttggttgaggctgtggtctttggctgcattccagtcatcatagctgatgacatcgtgcttccatttgcggacgcgatcccatgggaggaaatcggcgtctttgtcgaggagaaggatgtcccaaagcttgacacgatcctcacgtcgatgcctatagatgacatcttaaggaagcaaaggttactcgcaaatccatcgatgaagcaggcaatgttgttcccacagccagcgcaaccaagggacgcgttccaccaaatcttgaacggccttgctcggaagctcccgcacccagagggtacgttcttacaacctggcgatcagcgcctcaactggaccgctggtcctgtgggagatctgaagccgtggtagagaagaatagctatcttcttctttgataatccaagctttgccacgagcaccccttaggactaatgcacgcttcatgagatgttatgtaatcaatatgctgtgcgtgctttaggtgcaaaatacaccttggccgtgcttagtccttatgaacgccatgtaacttattgatttcccatggaaatgaaatggtatatttatcttgctgtcagaaccgcaggtcattagattggttatttctgtcggcatgttttcattgtaatccaggtgaagaggatttgtggtttagtgccagccagtctgcgacgactgcggtcggtcgtcgacgacgtgctattacatatcgatcgtcgtcgtcgatgtgctattactgatcgtcgtcgtcgtccgagtccaactgtttgagcagcgaggcgcagatgggcagcggcacgtccttgaggtagccgagcgggttggcggggcgcaggttgtcgctgatgccgacgttcctggtgagcaggacgccggcgcggtccctgtccgcctgcacctggtcgcagtccttgcgcgggctctccaccaagaccacctcgcagatgtcctcctcgtggctgtccttgagctcgatcgtgtacgtgccgttcccgtcggtcaccccgtcgatggagcgctcgagcttgccggtgccgaagtgcttgcactccagcctcaccttggcgcccgcgatgtactcggtgacattggtcacgaacccggcgcggcaggtgtcgcaatagacgcggccctggatgacgtagtcggggaggtcgttgtcgacggcggtgccagccgcggcacagaagaggacggataagatgacggcgaaggtcgtcgccggaatcgaggccatggccgctgatttcctgtcccccctgtgaatgtcggaaaagggcgggaccttatttggtgagggaggcgtgaaggcggg

SEQ ID NO: 107410 - DNA, 1271 bp, Zea Mays
gggcagcgtagcccaccgcccccaatatttttctccgtccctcgttttcaccagtctctcttctctgtctgtcttcctccgtgcttcccggcgcgaaccctagccgagattagattggaggcgagcgccatcaccggaggaagagggcgacacgatgctgcgggttgcgggaagaaggctctcgtcttccgtctcctggcgccccgccgtggcggcggccaggggcccccttgccggtgctggcgcccccgaccgggacgacggctcggctcgcggccggagccagacgcggttctccatcgactcccccttctttgtcactgccaggggtttctcttcgactgaaacacttgtcccaggaaaccaagatgctggcctagctgacctcccagcaactgtggctgctgtgaagaatcctaaccctaaggtggtttatgatgagtacaatcatgaaagatatcctcctggagatcccagcaagcgtgcatttgcttactttgtcctgagtggtgggaggttcatatatgcatcactgttgcgtctcctcgtattgaagtttgtcctgagcatgtcagcaagtaaggacgtgcttgcccttgcttcactcgaggtggacctctccagcattgagccagggaccacggtgactgtgaagtggcgtggaaagccagtcttcatcagacgccggacggacgacgacatcaagcttgccaacagtgtggatgtggcatccctgcgccacccagagcaggatgcagagcgtgtgaagaatcccgagtggctggtggtcattggcgtgtgcactcacctcggctgcatcccactaccgaacgccggagactttggcggctggttctgcccatgccatggttcccactacgacatatccgggaggatccgcaagggccctgcgccgttcaacctcgaggtcccgacctacagtttcttggaggagaacaaactgctcataggttaagagctcaaaagctacctgtctatttatctacttcactcaggtgaatccctgctgtgctgttatattgtttcttctttttaccgtttggctattttttttgctccaagaagatcattgtcatgccaaagtgcgttttttaaagtacaaaataatgtggtactttgctgatgctaaaatgtaagtgtggagctcatttggaacatcggttttctggggtaccgcaggaagaacattgattatacatctttctggcacattctcatgtcaagaataagcacccgctattatttttcgc

SEQ ID NO: 107411 - DNA, 2574 bp, Zea Mays
gcacgagcatcgcggcggcggaggcgagggcacgcgcgggtatcgcgggagcggggcatggggaggcggagggagcgcgacggcagaaccgtgcactatagtcgaatatgaacgcctacgatacaaacataaggagtagtaaagataaagatgtagagagttttttccgatgacccatgccgcactcaccaaaaatatctgcgggccagcgcgcgtgcacattggacaagtggacaaccgaggtcaccgactagtgggccccacacgtcagcccctcgatccgcttcccatctgatgctcgtgctccgccgcgtctccttcctcctctcgtcgccctcccctcgcgcaccgctcgcaaaacctctcctgctcctacgcccgccccaaaccctagccccgacagcgcggcagctcgtggctatggccgcgtcagtcccgtcggcgggtggggcggggacgatgagccgcgacgcgttccgcgcggccgtgaccaacacgctggagcgccggctcttcttcgtgccctctttcaagatctacggcggcgtcgcggggctctacgactacggacccccaggttgcgctgtcaaagctaacgtcctcgcattctggcgccagcattttgtattggaggaagggatgcttgaggttgactgtccatgtgtgacgccagaagttgtcttgaaagcctctggacatgttgataaatttacagacttaatggttaaagatgaaaagacaggcaactgctaccgtgcggatcatttgctgaaggacttctgtaaggataagcttgagaaagatcacacattgtcaccagagatggcagaagaatacaatagagttcttgctatcctggatgatctcactgcagaacaattgggtgctaagattagggagtataagattgttgctccagacaccaagaactcattatcagatccatacccttttaatctcatgtttcaaacttccattggaccatcaggtttgagcccagggtatatgaggccagagacagctcagggtatatttgtgaacttcaaagacttgtattactacaatggcaataagctgccattcgctgcagcccaaattggtcaggccttcaggaatgagatatctccccgtcaaggccttttgagagtccgtgagtttactttagcggaaattgagcactttgtggacccagaggacaaatcccatccaaagtttggtgatgtttctgatctagagttctggatgtttccgagagaggatcaaatggcaggaaggtcagccacaagacttaaactcggaaattctatatctgagggaactgtgaacaatgagacccttggctacttcattggaagggtctaccttttcttgacacaacttgggattgacaaggatcgtctccgtttccgtcaacacctgccaaatgaaatggctcattatgctgctgattgttgggatgcagagattgaatgctcctatggttggattgagtgtgttggaattgctgataggtctgcctatgacttacgtgcccactcggataaaagcggcgagaaacttgaagcacatgagaagtttgctgaacccagagaagtggagaaattagttataacgccatcaaagaaggaacttggtcttgcattcaaagggaaccagaagttggttgttgagtcattggaagccatgaccgagaccgaggcactggacatgaaagccgcgttggaatccagaggggaagtcgagttcaaggtgtgtacccttgggaagaatgtcaccataaagaaaaacatggtttcaatcaacatcgagaagaaaaaggagcaccagaggaaatttactccttccgtcatagagccatcctttgggatcgggcgcatcatatactgcctttttgagcactgcttctaccaaaggcctggcaagaccgaggatgagcagctaaacgtgttcaggtttccccctctcgttgctccaataaagtgcaccgtctttccattggtcaagctcgagaaatttgaggctgttgccaagaagatctccaaggccctgacagcagctgggatttcacatatcatcgacatgacaggtaatacaataggaaaacggtacgcaaggacggatgagattggtgtccccctggcgatcacggttgatcacaccacgagcgtgacggtgcgcgatcgtgacagcaaggaccagatccgcgtggatgtggacgaggtggcctcggtggtgaaggaagtgacggacgggcagagcacctgggctgacatcatgtggaggtacccggctcacacggcctcggccgccgacgaggatggggcacagccctgaagaggcacagccacaacaccacccaacgatcgttggtctctgatagttccttcctgcgttccttaacagaaacagactgcattgttgtgtaagcctacagtagccagattcctgcacatttaaatttccacaaacaaatagtagcctctgtgttataaattctgctacaacatttcatcctgtttcacccttgaatggacctgtgatgtttgcctcgtcgtgatatgaaggaactagaaa

SEQ ID NO: 107412 - DNA, 828 bp, Zea Mays
aggacaattattttggtttcacttggtgtgcactgtgcgggcaagatgaggtttctagtcccttctgaagtaaggctacaccagtgacacattgcagcccatgtcagaagaggtcacaattggtccaaccgtccaagcaatgtccgaagtgagagcgtggaattccatggaccaaagtaaatgagcaaggtcactgtcacagtggactattcccaaatttagtgttaatgctaattctggttgcatcgatttcataggccaatagtggtcatcatatgaacggataggtaatataattattctaaataaatgtataatgaatgcttgtggtactagaattacgtcgtaaattttttgtatggctcgattgtggtactagaaatgtataataattgttctaaagaaatgctagaggataaagaagtaagttactaaagttttggaatgtattctttcattttcatctcacttatcctatttctttcaggaatcataaaagcatatggaggaactatgtataggctacaaagaagcactacaaagaagcataagaagcattttatagcagaagccaagtgttctgatgattttgttttttcaattgtgttttctgttattggttcagcatgcacatatattgacatgatttatggcttggcatctgccatctttgttatatttgtgacatcgttcttgattgatgtgtgcgacatgaatgatggatctttttaacatcctgaccatcattgtcactcattatcgtattttgtatatcatttataggttcacggatatgaaatgacaggtttcttatttttgagatctgaa

SEQ ID NO: 107413 - DNA, 1179 bp, Zea Mays
accatcgcaaatttctcctgttcgccacaacggcaaacaccgctccagccgccttcgctgctgctcgtgtgtctcgtggaagctccgcggctggaccatggacccggacctggacctcgacctagacatggatatggagacgctcgccggcgacagcggcggcgaggccgagcgcaacgaagccgccgaggccgaggctgaggtggagcggtacgaggccgccgaagccgaggccgacatcctccgcgaccgattccgcctcgccgtcatcagcatcgccaccgccgaaggaaagaaggccggaatgacggtcgccgaccccgttgtttcctgcatcgccgacttggcgttcaagagcgcagagcagctagcaaaggatgcagagttgtttgcacagcatgccggtcgcaaatccgtcaggatggatgatgtcatactcacagctcacaggaacgagcatcttatgggcctgctgcggaccttctctcaggagctgaagggaaaggagcctgccagtgagaggaagagaaagaaatcgtccaagaaggatgagacggtgatcgaggtctgatttcagatctgtcctctttttttttagagaggaaggcatgcatttttatctcgcgaggtcctcccggcttgtacagcttccttgtgtcgatactatcttccatgtcatttcgcagaacttttcttctacgaaccctttcatcctagtcagtttttctagtcagttattgatggtacttgagttgagcttgctttctcaactgcacatagcattagtactgagtccaggagctgtccctgttcatgtggagttgtggacaggaaagatgagctcgcgggcagcgtgtctcttctctcagtccgtcgataaaagttacattcaacaattggtccttttctaatactcttttcattctaatttataattgggtttactttttttatcccaagtttaatcagctcgtcttatttgaaaagtttcataatttttactgtagtatcgcttaacataacatagtatcgcttaacataacatattttaattgtgtcttagaatttttcatttttttacataaaatataagccggttaaacttgataaaaataggtaaacgaattataaattgagacgaaaaaaagtatatcttgtattactatcgatgggaacatt

SEQ ID NO: 107414 - DNA, 1625 bp, Zea Mays
caatccgtgaaatcaccatcgcagccgccgtcttctcctatcgccctctccttgtcggttcgcccgcaccgtttcccaaaccctccggactcgaacccaacccacgcacccacatcgggagacgagccaggccgagctctggaagagtctccggaaggcccgcaccgtcgatggcggccgagggcagcggcgtccaagagacgttcgaggcgcgggtgaagcgcctgttcgggtcccgcctcttcgacgccgtcccggactcctccttcccgacggcctcctggtccgtggccgcgggcgacgtcgagcgccaccgttggtcgaagccgtcggaggcccgcgacgcggaggaggaggcagcgggggaggccggccgcggggacacgccctgcgtctccgcgttctacgacgccaacgggtgccttcgtggccggaggcgcaggtccaggcaggaggagttcgaggggaacctcgacgacctagatgaagacgaggaggaggacagcgagagggagaggaatgcggcagaacaggacgaggaggagggggttagagttaacatcggcctcgaccccactctggatcgggaggaagaggaggacaagtatgacagagaggcctttggcagagaggaggctgctgaccgtgtgtacatgcatgatataatggatgccggcataaacatgagcatcaacagtatagtccctgacctccttgatgattccattgaagaggtgtaccgttttaggaaggatcctcgtgcagatatgagggcagcatctgcaagactcagagaagatggttctactaaagattgtgattctcactgtcccactcaagccaaggatttccccagtgtagttcatacaaagaaagctgtggaggaagacaatgtaaaacctatactgaagaggaaggagtcacaagctgatttaaaaccaaggaaacgtgtcaggtttgatgctaatgttaaggatagtgagttagatacgtttgaacatgacgaagattctccaacggttcctcaatccatggatgtaatcactgaggtggagagcacatctactttgtctgcatctcctggggtccctgactatgtaaggaacccttcaaagtacacccgatacaatctggatgtaccagagtctaatgatggctcgaacaggacagctcttgctgacatgcatgatctgttagcgagatcatacccaaacatgatacattctgagacgcctgttgagattcctagctcagtcacattcatccctcgcaagaagtcagtggataccatggcagtggatgagggccccagagctattgattctaactcctctgcaattggaatggtagcaggcgcctcagatgaacctgatcaatgtgagatggatgaagatgacagtaaatcaccgtcaatgccacagatgcatacaaactcaaaggcgagctcccggcgttacaggtcaagcagaacagatgatgatgagtgaaattgaggatcccagggtacccaatctgatgtttgtttctaagaaaattttgagtttcagaataccttatgtaaatcaggatatatgtgtgttcttgtgatttgagctaattaactatgttgaactacttttccccca

SEQ ID NO: 107415 - DNA, 989 bp, Zea Mays
gaattcatcctctcgttattgctcccacggtttgctaggccgatgctactgttattgatttgtttggtgcgcgtcatgaggagctaaatgttagtatgtgtgttcagcttctgtagtgtgtcaatcattgctacaaagtatgccatggatcgctgtgctacaactgtactgtgattgagaggctcgtagttacatcaatctggttcgatatcatgttgattgatggcctagtactgtttgttccaattgtttgcttcattgcgatccagatatccaatgacataattgttatggtttattcggtcagtcagtagtggaaataaatggttttgtgcttcgatttgcatgcggatggatcatatagctgcagattatgccaagatttggtaaaatattttagccttatttagacatgaattcattgtctggcgtgtaagtgttgcaccaaattccatatcttcctgtcaataatttactgttggtaccctgttattggtcaacttgtcttccttctgctggacatctcagtcggacgacattgcctatgttcaatcatgagatccaacatgtgattgacgttgagcagtccttgccactaatgctgttctttcctgctgaaaagagaggaggaaatcctctgtatatatatatatatatatatatatatatatatatatatatatatgcatgccttacgttcatttcttgtctacgcagactagacatcgaaggggacttccattggtgctgctgaagtgttgttgttctgcatgctgtcgatgtacctttttcaagcaacgcgagccatctatttcttttgtctagctatgttagtgatatcttgtgagagacctcaatgttaccaccgtatctttgtctttgttggatggagagatttaagcaccttaccacacctttgttctttgttggatggagagttttaagcatcacctgtttgaagttgaaaaccctaactcaaaaatcaaaaa

SEQ ID NO: 107416 - DNA, 501 bp, Zea Mays
atgccgcccaagctcgacccgtcgcaggtggtggaggtcttcgtccgggtgacgggcggcgaggtcggcgcggcgtcgtccctggcgcccaagatcggcccgctcggtctctccccgaagaagatcggcgaggacattgccaaggagacggccaaggactggaagggcctgcgcgtcaccgtcaagctcactgtccagaaccgccaggccaaggtctccgtcgtcccctccgccgccgcgctcgtcatcaaggcgctcaaggagcccgagagggacaggaagaaggtcaagaacatcaagcacagcggcaacatcggcctcgacgacgtcgtcgagatcgccaggaccatgaggaacaggtccatggccaaggagttggccggcaccgtcaaggagatcctcggcacctgcgtcagcgtcgggtgcaccgtcgacggcaaggaccccaaggacctgcagcaggagattgatgacggcgaggtcgagatcccgtccgcttga

SEQ ID NO: 107417 - DNA, 86 bp, Zea Mays
gccgacggtgcagcggcagccggcagcagcgcaccagcttgatgccgaggccgagctgattgcttggggtgcatgcaatggccagc

SEQ ID NO: 107418 - DNA, 947 bp, Zea Mays
gtggagatcacgtgccgagggcgacagctcccagcgttcctgaccctgcagcatgtccgggacggcatctggtgccagggcgacgctgctgccgcctcgccgtcggtggtgccggacatgtcagcagctaaccaccaccacctcatggttttgcagtacggcaggaggtcgtagcaggcagagacagacagagtaccacccgctcccccccaccgatgtccgatcgatgacactcagttgcaatgtagattctggcatcccctgcccggccctcctaaccctttttgtcggcacggccggcaataggcggcatgacggaacgaccacgagctcccgaccgccagcacgcgcgcacacctggacggcggatgaccggaggcggctgttctcttccacacaagtgctggagagaacataacagcttggaagttgcctggcagagagagagagagaaagaggggtcgtgtacgagtgctgatcgaagagtgggtgtggcgcgacttccaagccattttggccttcattcagctgacctgatctactaatccccagctgagctgagccgttacattttgttaatcaccagtcccttcccgctcccgcgacgataggccagctgctcgcttctcttctttgttgtggaagcagcaccttgtcccgctgttctttcagagggccaacttgacatcgattcatgacttgaccctagagaagctctttgtttctttcttcttttttttttctctttgcttcattcagcagttcagttgtagcgccttcttccattttcatgacatacaagatgtcggatgtgttcgcgacatttgccatccgcttatatctatttaatttatttatttatttggaactttagcaacttaagatgaaacaagctttcttcagcttttatttatttcaataaacagcagaataagatgaagaggtaa

SEQ ID NO: 107419 - DNA, 188 bp, Zea Mays
tttctttttatctttattttctattttcactttcccgtccatttaaatctttattttaaattcaaattcacactcggttttgaatccaaaatgcacaaccaattaagactcagcatgaaatgcatatttatttatttgttatttagataatttaatgccattagttgagtatgcaaagagaaaaaaat

SEQ ID NO: 107420 - DNA, 811 bp, Zea Mays
ctagcacgcaacgcaacctccctcaggtgtcgggtgccggcggccatgccgtcgacggcgcctgtagagctcgacttcctcggcctccgtcctgctgctgcggccgccgccgaagacgaccaccaccacggcagcagcaccacctccgccgccgcagctgcctcctcctccgtccgaggcatgaagacgagcgcgatagcgagcatcggggcgcacaagctgcgccgcgtcatcgccggcgacgaggcgaccaagcagcatcagcagcagcaggcccccatgacggtcttctacggcggcgccgtggccaccttcgacggcgtctcccaggacacggcggaggctataatgaagatggcgatggaggtcactgcttccagcggaggccgcatcgtccgccgcgacgcatttcgtggaaatttaaccaaagacatgccgctcacaagaaccaaatcgctgcagcagtttctacagaagcgaaaggagaggctgagtgggccgggtccttatctgccagcatcgggaggacgaagcagccgcgttggtgcagcgaccatgacgtttcatgtgaaggaggaagcagcttaataagcctatagctaccttacttggcttggagtccactgcagcaagctactaattcaaaaaggattctttgacagtattttctttattcgatagtataattgtatctacaatttttttaaaaaaaatccgcagggataagttcgtttcacaatttcattcatgattgtagataaggttaactctcgagttgatcatagccatatctatgcttgttatacatata

SEQ ID NO: 107421 - DNA, 1069 bp, Zea Mays
accgtcaacggcggccgcgcgctcacgtcccggcggccacgggccgtgacagactcgagcccgtccgccgccttcgccgcgccgcctccgcctcctccatcgcacgccgactccgctgcctacatccgcgcacgtccgcctccactgcctccatccgctcgggagccgccgccctccgcgctaggcctcgcctccgtctggtctggattcttcgacatctggccatctgggcgctccgcgtcgccgacttctcgcaggcagagaatataccatggagcgccctcgatttagtgatcatcttgaagcaatcaagtttatctgcaaagatttttggtcagagctgttcaagaagcagattgacaatctgaaaacaaatcacaggggtacctttgtccttcaagataaccgttttcggtggcttactcgtgtttctctagatccacgtacagagaacacagattcaactgaaaatgattctgcagcattgggtgatactgcagcccaaacgactaccatgcttctgtatttcccatgcgggttgataagaggtgccttgaccaacttaggaatttcgtgttctgtctctgctgacatgtcaaaccttccagcatgttcgtttgtggtgcgcataaagacatgaactgtgaggaatgatacaagtacagtacgaagattcgacagtatctgcttgtggttcaagccgggttgaacattgaagatagcagagtttgggcatgcattagatgtattgtggtactgcagaaatattctgtgtagctgttggtttctgtttccgtttcttccagcagttacctgttttcactacctcaattgtttccccacctcttcgtgaccgtattccagagtttaggttggccattcctgcactctaggtagccgccactggcaccatttgtgagagttaaactatggttgttggttgcattatctctgtggcctgtgatagcacccttaaagcatgattcttgccatgattcgtgtgctagtactcttctaagcatgatttttgctaccatgattaattgattgtgaagtgcaaattgaataa

SEQ ID NO: 107422 - DNA, 1233 bp, Zea Mays
accgtcaacggcggccgcgcgctcacgtcccggcggccacgggccgtgacagactcgagcccgtccgccgccttcgccgcgccgcctccgcctcctccatcgcacgccgactccgctgcctacatccgcgcacgtccgcctccactgcctccatccgctcgggagccgccgccctccgcgctaggcctcgcctccgtctggtctggattcttcgacatctggccatctgggcgctccgcgtcgccgacttctcgcaggcagagagcatccttgatagacctgatggctatcgcagagagctgtgttgatgcggtggtcatggagatggtggcagtctactgcggtggcctctacaccgccaaaccagagcttgctgcccgccgcatcgaggccatcggcttccaagtcgggcaccagctctctgagagatataccatggagcgccctcgatttagtgatcatcttgaagcaatcaagtttatctgcaaagatttttggtcagagctgttcaagaagcagattgacaatctgaaaacaaatcacaggggtacctttgtccttcaagataaccgttttcggtggcttactcgtgtttctctagatccacgtacagagaacacagattcaactgaaaatgattctgcagcattgggtgatactgcagcccaaacgactaccatgcttctgtatttcccatgcgggttgataagaggtgccttgaccaacttaggaatttcgtgttctgtctctgctgacatgtcaaaccttccagcatgttcgtttgtggtgcgcataaagacatgaactgtgaggaatgatacaagtacagtacgaagattcgacagtatctgcttgtggttcaagccgggttgaacattgaagatagcagagtttgggcatgcattagatgtattgtggtactgcagaaatattctgtgtagctgttggtttctgtttccgtttcttccagcagttacctgttttcactacctcaattgtttccccacctcttcgtgaccgtattccagagtttaggttggccattcctgcactctaggtagccgccactggcaccatttgtgagagttaaactatggttgttggttgcattatctctgtggcctgtgatagcacccttaaagcatgattcttgccatgattcgtgtgctagtactcttctaagcatgatttttgctaccatgattaattgattgtgaagtgcaaattgaataa

SEQ ID NO: 107423 - DNA, 1237 bp, Zea Mays
accgtcaacggcggccgcgcgctcacgtcccggcggccacgggccgtgacagactcgagcccgtccgccgccttcgccgcgccgcctccgcctcctccatcgcacgccgactccgctgcctacatccgcgcacgtccgcctccactgcctccatccgctcgggagccgccgccctccgcgctaggcctcgcctccgtctggtctggattcttcgacatctggccatctgggcgctccgcgtcgccgacttctcgcaggcagagagtgagcatccttgatagacctgatggctatcgcagagagctgtgttgatgcggtggtcatggagatggtggcagtctactgcggtggcctctacaccgccaaaccagagcttgctgcccgccgcatcgaggccatcggcttccaagtcgggcaccagctctctgagagatataccatggagcgccctcgatttagtgatcatcttgaagcaatcaagtttatctgcaaagatttttggtcagagctgttcaagaagcagattgacaatctgaaaacaaatcacaggggtacctttgtccttcaagataaccgttttcggtggcttactcgtgtttctctagatccacgtacagagaacacagattcaactgaaaatgattctgcagcattgggtgatactgcagcccaaacgactaccatgcttctgtatttcccatgcgggttgataagaggtgccttgaccaacttaggaatttcgtgttctgtctctgctgacatgtcaaaccttccagcatgttcgtttgtggtgcgcataaagacatgaactgtgaggaatgatacaagtacagtacgaagattcgacagtatctgcttgtggttcaagccgggttgaacattgaagatagcagagtttgggcatgcattagatgtattgtggtactgcagaaatattctgtgtagctgttggtttctgtttccgtttcttccagcagttacctgttttcactacctcaattgtttccccacctcttcgtgaccgtattccagagtttaggttggccattcctgcactctaggtagccgccactggcaccatttgtgagagttaaactatggttgttggttgcattatctctgtggcctgtgatagcacccttaaagcatgattcttgccatgattcgtgtgctagtactcttctaagcatgatttttgctaccatgattaattgattgtgaagtgcaaattgaataa

SEQ ID NO: 107424 - DNA, 246 bp, Zea Mays
cgaactgtctcacgacgttctgaacccagctcacgtaccgcattaatgggcgaacaacccaacccttggaaccacctacagctccaggtggcgaagagccgacatcgaggtgccaaaccttcccgtcgatgtggactcttggggaagatcagcctgttatccctagagtaacttttatccgttgagcgacgacccttccactcggcaccgtcggatcactaaggccgactttcgtctctgctcgac

SEQ ID NO: 107425 - DNA, 614 bp, Zea Mays
ctcgaccactcaattcatatacactacccaaatcatctatacttgataaatacctttaccaaaatactctaggcataatccacctacaagcatcatgcgtatctctaattagtttcataatacaagacatacatactcatgaaaataatttcattcacacaacacaaatcaatttaatagcacaagccttatatatccacacaactaatcattcatccgactaacaaaaacaatggatcgacttaccacgactaaactcgactcgactccgcgagatcgacaaccacatctggttgaggcgattcaccaagcccttggcaagcgcctcgctaaagctttcttctcatctaaatctcacaggatttacctccacgggctgaacaatgacgcgaggaaactacgtcgtgaatagaggctcgctggtttcccataaccacgagcaggtgacgtgcgcggtcgacgaccataccacgtggaggaactacagaggggatcgacgacgttcatggcgaggggaaaggagctgcttgctgctaggcggggagggcgagctactaaggtcggatgccaagcaggggacgacgacgcgcggtgctgggcgagcccaccacggc

SEQ ID NO: 107426 - DNA, 746 bp, Zea Mays
ttcctctttctcagccgcgtctacccgcgccgccagcgcgccctgccggtgtgcttggcagcacgccgcgccgagccgcctgaaccgtccgtgcccagcctctcgcctaccctgcgcccaaaaccaccggctgcgcccctccctctcctcttccaccactcactctcccttgatggagaaacaaccaccatcaatggctgtcgtgacctctttttttccccaccgaccctccctctccctagctctccctctccctatcctccctctataaaagctggccatgccgccggagcttcccccctccactcatccgagctctctctctctctcacacacgctcgcgtcctcgccataccgtccgtgtcgtgccccgcccgtgtgtgctatgccccctgctcgatcgcaccgtgcccctgctcctcggtcgcaccgtgcccctgctcccggccgcgcccgcgtcctcaccgccgaccgcctgcttgccgtggatgatcccctccattcttcgatttgtacctgcgcacagtccgagagcaaggtggaagagaacacaaatttttattaaaatttttaaagtcatgtttgaattagttcatgttttctataattatttgtttgaatttgtgaatattgtgaatatgaaatcatgtgtatgtaaacgattgattttaagtgtatgcgatgagttagtatattattatctgtaacacccctggtgttactggcactaaaacttgagcataaca

SEQ ID NO: 107427 - DNA, 122 bp, Zea Mays
ttgggatttttagcaatgattaaagggtcgacgcgctacacgactacacatattattttctcagattttgaaataggaaaccgaattggctagcaattgttccggtttcagtttatttaaac

SEQ ID NO: 107428 - DNA, 663 bp, Zea Mays
catttttttaagaaaatggtgtgttaatctgttttttccacaggcttaatgctatctggacgaggtggtgttatgaatcttgatttggtggctcggctatttcataggtctacacctagtcaaaatcccatcacatttgaagttattggaagaccttttgaaaactttggtgtttaatcgtagggcagcgcggttaaggctgtaaaaagaaaaaaaagagaatgtttaaagaaatatgggttcaaaagcatactggaagtggaggctttctcggtaaccaccgtctaatcatctcattgttcacggagactgagtggtgtaggttatttgtacacttcattttgggggcgcatcgtgctgaaagcagttggtaatatgctaattctgtagtttgtagctcctgctgaaatcagctttgtggattatgttgtgagcacgatgaacatcaaactctcgcaagtcccatcgaggcatcttgtcgaaaaacttctgctgtgcatactgaactaaattttgtgccggtgtatcatctgtcgactatcgtgttggtctatttagtatcccttgtgatcgtttaccttactgtgattctgatttccttttcatatatgtatgtgtatatctttatgttctccccacactcctgaataaaaaaataaagaa

SEQ ID NO: 107429 - DNA, 1310 bp, Zea Mays
tttctttctttttgttgcacaaaataacaaaataacttgtctttccttttgcacaaaataggcactcgaaggttgatatgttctcatgctgcattttgggttgatgtgtttgattacaagctgtttcattgtatttctgatgcatactgctttcatttacaggaatctgtcttggcagaccatttctcatcatttggggatctttcgtccttgtcctggaagatactgaagcccataaccttgatgcaaccctaaaaccttcgctgagttgctcagcttgtgtgacttacacaacacgacaatcagctgagaaagcatttattggtggtaaatcttgcaaaggacacacactacgatttatgtggttgacagcatctcctggctcaaataaccattataggcatcagaatacctcagttcatgtgaggccctctactatccctggccatactcaaagcatatcatctgagtcccccagccctgttgggaaagtatcatctcttgctacatctgttatggtagccattcctcataataaatccatctcaactgtggaaaatacaaagacttctccagcgggagtttccaaagtttcatgtggtagctcctctctatcatcaaatgataagtgtccttctgaatgtggttccacaaggaatgttatctcagattctgacgttccacaatgaggcttaatgctatctggacgaggtggtgttatgaatcttgatttggtggctcggctatttcataggtctacacctagtcaaaatcccatcacatttgaagttattggaagaccttttgaaaactttggtgtttaatcgtagggcagcgcggttaaggctgtaaaaagaaaaaaaagagaatgtttaaagaaatatgggttcaaaagcatactggaagtggaggctttctcggtaaccaccgtctaatcatctcattgttcacggagactgagtggtgtaggttatttgtacacttcattttgggggcgcatcgtgctgaaagcagttggtaatatgctaattctgtagtttgtagctcctgctgaaatcagctttgtggattatgttgtgagcacgatgaacatcaaactctcgcaagtcccatcgaggcatcttgtcgaaaaacttctgctgtgcatactgaactaaattttgtgccggtgtatcatctgtcgactatcgtgttggtctatttagtatcccttgtgatcgtttaccttactgtgattctgatttccttttcatatatgtatgtgtatatctttatgttctccccacactcctgaataaaaaaataaagaa

SEQ ID NO: 107430 - DNA, 384 bp, Zea Mays
atggcgcccagctgctttcctctctctcttgcgctcggcttctgtttttcctgcgcacgctgctttttctttcaccagccgttcactactaccgtgatgctgtctctgctcgccgtgctctggaccttgctccagctcgccggcagaagctccctgacgcgccctccttgctcctccctgctcggttccatggccggcggatcccctggacgtgtgcccctgcgcgcggtcgcatctccctgtgctcgcatagcccagccggcgctcctccagtcgctgctccctgtgtgctcggcctcaagtttctgtgcgcgcgaaactctctgctcgccaacgctccagctcgctgttgtcgccaagtccgaatatcacagctcgttttag

SEQ ID NO: 107431 - DNA, 100 bp, Zea Mays
catagtcgttcgctcgttctcatcgccctgagatttttcctgaagccaccgtcgtctagcctggagatttttctcactgctcgatgccactccttatccc

SEQ ID NO: 107432 - DNA, 384 bp, Zea Mays
atggcgcccagctgctttcctctctctcttgtgctcggcttctgtttttcctgcgcacgctgctttttctttccccagccgttcactactaccgtgatgctgtctctgctcgccgtgctctggaccttgctccagctcgccggcagaagctccctgacgcgccctccttgctcctccctgctcggttccatggccggcggatcccctggccgtgtgcccctgcgcgcggtcgcatctccctgtgctcgcctagcccagccggtgctcctccagtcgctgctccctgtgtgctcggcctcaagtttctgtgcgcgcgaaactctctgctcgccaacgctccagctcgctgttgtcgccaagtccgaatatcacagctcgttttag

SEQ ID NO: 107433 - DNA, 1364 bp, Zea Mays
atggcggcggtggggcgtttctccggcatttctccttcgtttgctctcccggtgttcagatctgagcgggtgcagccaggtgatggattggcggcatctgctggtggtggcggggctgcgccgtttcggcggcggacgcacggcgtggtgggtctagagctggctggcgggcgtgctcctcgtggtgttgggtttgtggcgtgtgggccggatctgccctcaacaactggcggccggtggcggctgcgtcgatggcggtttggggctcgagcaggcgctgtggtgcgacactctcttctttgccaccctcccttcccctcacggccttgtctactgctgtgggcggggcgtcagccgtgcgacggtgaggagcagaggatctggctcctcagtggtgatgtgtggtgtcggcatatgggcagcggcggccccggcggcatttgcggtggtgcgcatgccagcggatttggcgtgtcgcagcgactgctgccagggttggtctacgggaggtgcagcgcgtggtgctgccgctgctcggccgggaccgtgggcccagccggaggtggtggcggtccgcgctgctttgcgactgttgtggcaactagcgcgtcattggccctctggattggtttgtgtggattggttgggcggcggcggctgtggaggtgtgctttgtcccggggtcctggccggacgttgtgctgggggttttcttgggcgaaagccttagcgacgacgacgctcctgagcgccgcttcccctgttgagggcgtcgtgttccctagctttgtcttccgtgggcgaaagcccgacccacctcggaccggtgacgatggcgtcctcgacgtcactcccttcctgaaggcgtcgctactgaagttcgtctcggccacgtcgtcgcctttggtggttgctttcgtcttttgggtcccggtttgcgtgcggaggtggaggcttgcaccgtgaaatcgaagctgctacgtcaggggatgtggcttggcaacgatgacgtggagcgaccccccttcttcgtgggcttgtttgcttcgaagatgaggcatttggcggaggcagggcggtggatcaaggttttggaagtctcgctggtgaagaatcggagctgtctcgagtggggtatctcgtggcttggcaacgacgacgccccacagtcttccttctcttctgccggtgtttgtagtcatcgtcgtgtttccttcgaccttgtgctgcctgtcttggggagtcggagctgctcgtcacttgtgttgaactcggcaacgatgactcacgatgggtattgtgtgtgtggggttgttgttgtatggtttgtttgtcctatatgggttttgggcccggtttacctt

SEQ ID NO: 107434 - DNA, 758 bp, Zea Mays
tacctagaaaagccaaaacacaaaacagcctatagtttgggatggtgtatttactatgtatatcactgactgaaacttctccagggccttgtggtgcctgttatccgagatgctgataccatgaactttgctgacattgagaaagggataaacaaccttgcaaagaaggcaaatgagggggcgctctcgattgatgacatggcaggaggaacattcactatctccaatggtggtgtctatggaagcctcctcagcacacctatcatcaaccccccacagtcgtcaattctggggatgcattccattgtgcaacgccctgtggttgtgaatggtgacattctcgcaaggccaatgatgttccttgcgctgacatatgaccacaggctgatcgatggcagagaggctgtattcttcctccgtcgcatcaaggatgtcgttgaggaccccaggaggttgctgcttgacatataaagttacttaccagtgctttcccgccgactgttttgtgctttctggaaataataccatgcaaatttttgactgatgaaaaagaattgcttcctcggaaagacgaattctgagctgaggatacagtgaggtttttctctataatcgtagaagagagcagcaaactcaactcaatgtgaggtcatgtttcattttcgggtataagatgctccatttcgggatgcagttcccagtaattttatttgccatgcaagagcaatagaagctgctgcatttttgtttgttggttc

SEQ ID NO: 107435 - DNA, 1801 bp, Zea Mays
aaaccggagaacgggaagcgaccagagggcggccgcggcacgcgggtcgtccccattccagtcttttcagaacgagattgcatcgaggaaactacagaaaagggaccaaatcgaatccgtggtgcactgcccctccccctccctcacaagccgccgccgccgtgaggactccggcgaatggcgtcccgcgtcgcctcgggcctcctccgccgccgcgccgtcgccactctagggctactaaggagtcatacacatgtcagaaactacagcagtcaactttcagctttgattccagctacttctcaatgctcaaatctgacaagacgctattacttacctaatccatctctgtaccaagtttggagtaggtcatttgcctcagacagcggagacaagttcgaggctgttgtgcccttcatgggtgaatctgtaactgatggaactcttgctaacttcttaaagaagcctggagacagagtcgaggccgatgaacccatagcgcagattgaaactgataaggtcactatagatgtcgcaagtcctgaagctggtgttattgaaaagctcattgctagtgaaggcgacacagttactccaggcactaaagttgcaatcatatccaagtctgctcaacctgctgaaacacatgttgctccatctgaggaagcaacttcaaaagggtcttctccgccgaaagttgaagagaaatcaagggtagaggaaaaagccccgaaagtagaacctcccaagatgcaagcaccgaagccaactgcaccattaaaaacgtccccttcagaaccacaactccctccaaaagaacgggagcggcgggtgccgatgccaaggctcaggaagcgtattgcaaaccgtcttaaggattctcagaacacctttgcaatgctatctacatttaatgaagttgacatgaccaatttgatgaagcttcgttctgattataaagatgaatttgtcacaaagcatggtgtcaaattgggtcttatgtcttgctttgtcaggctgctgtttctgcacttcaaaaccagccaattgttaatgctgtcattgatggcgatgacatcatatacagagactacgtagacgtcagtgttgctgttggcacttccaagggccttgtggtgcctgttatccgagatgctgataccatgaactttgctgacattgagaaagggataaacaaccttgcaaagaaggcaaatgagggggcgctctcgattgatgacatggcaggaggaacattcactatctccaatggtggtgtctatggaagcctcctcagcacacctatcatcaaccccccacagtcgtcaattctggggatgcattccattgtgcaacgccctgtggttgtgaatggtgacattctcgcaaggccaatgatgttccttgcgctgacatatgaccacaggctgatcgatggcagagaggctgtattcttcctccgtcgcatcaaggatgtcgttgaggaccccaggaggttgctgcttgacatataaagttacttaccagtgctttcccgccgactgttttgtgctttctggaaataataccatgcaaatttttgactgatgaaaaagaattgcttcctcggaaagacgaattctgagctgaggatacagtgaggtttttctctataatcgtagaagagagcagcaaactcaactcaatgtgaggtcatgtttcattttcgggtataagatgctccatttcgggatgcagttcccagtaattttatttgccatgcaagagcaatagaagctgctgcatttttgtttgttggttc

SEQ ID NO: 107436 - DNA, 1805 bp, Zea Mays
aaaccggagaacgggaagcgaccagagggcggccgcggcacgcgggtcgtccccattccagtcttttcagaacgagattgcatcgaggaaactacagaaaagggaccaaatcgaatccgtggtgcactgcccctccccctccctcacaagccgccgccgccgtgaggactccggcgaatggcgtcccgcgtcgcctcgggcctcctccgccgccgcgccgtcgccactctagggctactaaggagtcatacacatgtcagaaactacagcagtcaactttcagctttgattccagctacttctcaatgctcaaatctgacaagaagacgctattacttacctaatccatctctgtaccaagtttggagtaggtcatttgcctcagacagcggagacaagttcgaggctgttgtgcccttcatgggtgaatctgtaactgatggaactcttgctaacttcttaaagaagcctggagacagagtcgaggccgatgaacccatagcgcagattgaaactgataaggtcactatagatgtcgcaagtcctgaagctggtgttattgaaaagctcattgctagtgaaggcgacacagttactccaggcactaaagttgcaatcatatccaagtctgctcaacctgctgaaacacatgttgctccatctgaggaagcaacttcaaaagggtcttctccgccgaaagttgaagagaaatcaagggtagaggaaaaagccccgaaagtagaacctcccaagatgcaagcaccgaagccaactgcaccattaaaaacgtccccttcagaaccacaactccctccaaaagaacgggagcggcgggtgccgatgccaaggctcaggaagcgtattgcaaaccgtcttaaggattctcagaacacctttgcaatgctatctacatttaatgaagttgacatgaccaatttgatgaagcttcgttctgattataaagatgaatttgtcacaaagcatggtgtcaaattgggtcttatgtcttgctttgtcaaggctgctgtttctgcacttcaaaaccagccaattgttaatgctgtcattgatggcgatgacatcatatacagagactacgtagacgtcagtgttgctgttggcacttccaagggccttgtggtgcctgttatccgagatgctgataccatgaactttgctgacattgagaaagggataaacaaccttgcaaagaaggcaaatgagggggcgctctcgattgatgacatggcaggaggaacattcactatctccaatggtggtgtctatggaagcctcctcagcacacctatcatcaaccccccacagtcgtcaattctggggatgcattccattgtgcaacgccctgtggttgtgaatggtgacattctcgcaaggccaatgatgttccttgcgctgacatatgaccacaggctgatcgatggcagagaggctgtattcttcctccgtcgcatcaaggatgtcgttgaggaccccaggaggttgctgcttgacatataaagttacttaccagtgctttcccgccgactgttttgtgctttctggaaataataccatgcaaatttttgactgatgaaaaagaattgcttcctcggaaagacgaattctgagctgaggatacagtgaggtttttctctataatcgtagaagagagcagcaaactcaactcaatgtgaggtcatgtttcattttcgggtataagatgctccatttcgggatgcagttcccagtaattttatttgccatgcaagagcaatagaagctgctgcatttttgtttgttggttc

SEQ ID NO: 107437 - DNA, 219 bp, Zea Mays
atggcgtccggggaggcgaggctggggatggcgtcggggaggtgctcccgaggctggacgttggcgtcgcggagagcaggggcctcagtgttggggaagatgctgccgaggccagggttggcggcgtcgcgggatcatcgaagagaatcatctggcctccggaggccagggttgttcccaaccagaaaaaggctccctggacgaaagcccgtcggatga

SEQ ID NO: 107438 - DNA, 353 bp, Zea Mays
ccacgaactgcgcaactcctaacagatcccggccgtgtttctcgccatccgtgcggactctacctgcccccgtgaccgtactatataatcccagcgctcgcccttgctcatcaatcgcctcacggttgggttggagtcttcgtcgccgtgtcctctcatctctcctccctccccatgcacgcgaacagccctctgctgctgcaaccaaagcggtggccgtggcgatgtgccgctactcggacaccagagtacggcaacagtggcaaatggtggtggtggccgcagagatgggcatggaccggctctacgtcatggacggaagcttctgcggtacgatatcaggtaagacagct

SEQ ID NO: 107439 - DNA, 1538 bp, Zea Mays
gctccgaagagtacctcccgtgtgtataaatagccagctgtcctcgctcggcgcctccacaaattagcaaagccgcgcgcattacattacattacatacaaacatacacagtttggccgttaattagccagcgctgacaaattaaccctcgtcttcgtcgcctgacccgccgccgaccgccgtacgtgaccaccaaccaggctatagagctacctccagccgccggcccgcgcgtcgtccgccgcggtgtacgtacgtctgccgcggagccacgcgcgcggacatggctcagctgaaggccgcgcgcgccaccgacgtcccgcccgccatgccggacccggacccggacgtcgtcgccgccgacctcggcgcgtgcgtacggcacgggcgcgttgacggtttggcagcaggaagcggcagggcggaggcgacggcgacggcgacgaccaccgcggcggcggccgatcagggacgacgacggccgccgctggtggtggtagggcaccgcggcaaggggatgaacgcgctggcgtcgccagacccgcggctgcgcggcgacatcagggagaacaccctccgcgccttcaacgccgccgccgccagccaccccgccgtcgcctacgtcgagttcgacgtccaggccggcaagccacttctccggaaactcaaggacgggaggatcctcaagtgggacgtgcagtccgaggacgcgctctgcacgctccgtgaggtcttcgagggcgtccaccggcgtgtcggcttcaacgtggagctcaagttcgatgacgacctcttctacacggaggagaggcttacctgcatcctaaaatccgttctcaaggttgtcttcgagcacgccaacgacaggcccatcatcttctccagcttccaacccgatgccgcgcagctcatccgcaagctgcaagacaaataccctgtgctcttcctgaccaacggagggacgcaggtgtacgccgacccgcgtcggaactcgctggaggaggccgtcaagctgtgcgtcgccggcgggctgcaggggatcgtgtcggaggtccgggcgatactcaggcagccgtcggcggtggccaagatcaaggaggccaacaaactgtcgctgatgacctacggtcagctcaacaacgtggcggaggtggtgtacgtgcagcacctgatgggggtggacggcgtcatcgtcgacctggtgcaggagatcgcggaggccgtgtcggcgttcacggtcgttacggccgtgcaggcgtcgggctcccaggacggcggcggcatcgtggtcggcgagaggatggagacggctgccgtggcggtggcagggacgccgagcttctcgccgcgggaggtgtccttcctcctgaggctcattcccgagctagtgcaatagcgcgttcttgctgctttgctggtggaatctcgcgacgagatcctctgtatccgtagagttaggtcactaacgtgtgaatccggcctttttgtttgtcaactgaaatcgaaaaaggttatgggttacattcgtagagactacc

SEQ ID NO: 107440 - DNA, 1679 bp, Zea Mays
gctccgaagagtacctcccgtgtgtataaatagccagctgtcctcgctcggcgcctccacaaattagcaaagccgcgcgcattacattacattacatacaaacatacacagtttggccgttaattagccagcgctgacaaattaaccctcgtcttcgtcgcctgacccgccgccgaccgccgtacgtgaccaccaaccaggctatagagctacctccagccgccggcccgcgcgtcgtccgccgcggtgtacgtacgtctgccgcggagccacgcgcgcggacatggctcagctgaaggccgcgcgcgccaccgacgtcccgcccgccatgccggacccggacccggacgtcgtcgccgccgacctcggcgcgtgcgtacggcacgggcgcgttgacggtttggcagcaggaagcggcagggcggaggcgacggcgacggcgacgaccaccgcggcggcggccgatcagggacgacgacggccgccgctggtggtggtagggcaccgcggcaaggggatgaacgcgctggcgtcgccagacccgcggctgcgcggcgacatcagggagaacaccctccgcgccttcaacgccgccgccgccagccaccccgccgtcgcctacgtcgagttcgacgtccaggtgaccagggacggctgccctgtcatcttccatgacaacttcatctacacgcaacaagacggccaagtctcagcgaagcgtgttaccgagctgaacctggacgagttcctgtcctacgggccgcaaagagaccaggggaaggccggcaagccacttctccggaaactcaaggacgggaggatcctcaagtgggacgtgcagtccgaggacgcgctctgcacgctccgtgaggtcttcgagggcgtccaccggcgtgtcggcttcaacgtggagctcaagttcgatgacgacctcttctacacggaggagaggcttacctgcatcctaaaatccgttctcaaggttgtcttcgagcacgccaacgacaggcccatcatcttctccagcttccaacccgatgccgcgcagctcatccgcaagctgcaagacaaataccctgtgctcttcctgaccaacggagggacgcaggtgtacgccgacccgcgtcggaactcgctggaggaggccgtcaagctgtgcgtcgccggcgggctgcaggggatcgtgtcggaggtccgggcgatactcaggcagccgtcggcggtggccaagatcaaggaggccaacaaactgtcgctgatgacctacggtcagctcaacaacgtggcggaggtggtgtacgtgcagcacctgatgggggtggacggcgtcatcgtcgacctggtgcaggagatcgcggaggccgtgtcggcgttcacggtcgttacggccgtgcaggcgtcgggctcccaggacggcggcggcatcgtggtcggcgagaggatggagacggctgccgtggcggtggcagggacgccgagcttctcgccgcgggaggtgtccttcctcctgaggctcattcccgagctagtgcaatagcgcgttcttgctgctttgctggtggaatctcgcgacgagatcctctgtatccgtagagttaggtcactaacgtgtgaatccggcctttttgtttgtcaactgaaatcgaaaaaggttatgggttacattcgtagagactacc

SEQ ID NO: 107441 - DNA, 1348 bp, Zea Mays
gtggcgtcggcgtttctcagcgctgtccactgggccgtgtactaggcccagttaggaaaaaggtggaccggggggccgcagtaggggagctggggaggggcaggcaagcagcagcgtcctgcctgctgcgtccagaaacatcaggaggacggtggtttcctctcctccgttctagagaaccgaacctccattctagatccctcgcacaacgaaccttcccttgtcggtgcgcatgagaacctgtgtgtccgagccctagacgcagagtttggtttgtcgccttggaggagctgactcgtccgtcaccaggtgaccagggacggctgccctgtcatcttccatgacaacttcatctacacgcaacaagacggccaagtctcagcgaagcgtgttaccgagctgaacctggacgagttcctgtcctacgggccgcaaagagaccaggggaaggccggcaagccacttctccggaaactcaaggacgggaggatcctcaagtgggacgtgcagtccgaggacgcgctctgcacgctccgtgaggtcttcgagggcgtccaccggcgtgtcggcttcaacgtggagctcaagttcgatgacgacctcttctacacggaggagaggcttacctgcatcctaaaatccgttctcaaggttgtcttcgagcacgccaacgacaggcccatcatcttctccagcttccaacccgatgccgcgcagctcatccgcaagctgcaagacaaataccctgtgctcttcctgaccaacggagggacgcaggtgtacgccgacccgcgtcggaactcgctggaggaggccgtcaagctgtgcgtcgccggcgggctgcaggggatcgtgtcggaggtccgggcgatactcaggcagccgtcggcggtggccaagatcaaggaggccaacaaactgtcgctgatgacctacggtcagctcaagtgagtcatcgatcagtcatcagtgttctcttcactatttgtccacagcctgcaacgccggccgccggcggataggaagtacttcataggaactgagggtgctctttgtttgcgccttgtgtctcggtctcgcagcaacgtggcggaggtggtgtacgtgcagcacctgatgggggtggacggcgtcatcgtcgacctggtgcaggagatcgcggaggccgtgtcggcgttcacggtcgttacggccgtgcaggcgtcgggctcccaggacggcggcggcatcgtggtcggcgagaggatggagacggctgccgtggcggtggcagggacgccgagcttctcgccgcgggaggtgtccttcctcctgaggctcattcccgagctagtgcaatagcgcgttc

SEQ ID NO: 107442 - DNA, 2071 bp, Zea Mays
cgctttcccgtttccgtcctaccaaccccatggagcctggaccttgagcccgagcatcctgccgtgcctgctctgctataagcagctgctgctgcccaaagcagccgacgccaccgcccacacgtctcctccacctcccaatccccacttgttcgcctccccccggcctccctgatccgtgccgccctcccccaccccgtcaaccaggagcgcagccgcttgtcggtgcggaaatgcgggttcgtcttgcggcgccgcggtgagctattgattgctggtggtagctcgccccgggcaccggcgatgggctgcttcccgtgcttcggctccacgcgcgaggaggagctcaagtactacggatccaagggccccggcggaggcaatggcggtggtgggcgagcgaccgcgtcctcgtcctcgtccgctgcagctggtggtggaggcggccgggtagaagaggccgtggtggcgccgccgcgtgctcagaggggccccgcaggggccgacaagacacgagctaaaggcaatgctggctcgaagaaggagctttcagtactcagggacgccagtggcaatgtcatctctgctcagaccttcaccttccgccagcttgcagccgcaacgaagaactttagagatgaatgcttcattggggagggagggtttgggcgcgtttacaagggccgccttgacatgggccaggttgttgctatcaaacagctgaatagggatggtaatcaaggaaacaaagaatttctagtggaagttctcatgcttagtttgctgcatcatcaaaaccttgtcaatttggttggttattgtgctgatggagatcaacgccttctcgtgtatgagtacatgccacttggatcattggaggaccatttgcatgatctccctcctgacaaggagcctttggattggaacactaggatgaaaattgctgcgggtgctgctaaagggctggagtacctgcatgacaaggcacagccaccagttatttacagggatttcaagtcatcaaatattctattgggcgagggcttccatccaaagctatcagacttcggtcttgctaagttgggtcctgttggtgacaagtctcatgtctcaacgcgtgttatgggaacatatggttattgtgctccagaatatgctatgacaggacaacttacagttaagtcagatgtttacagctttggagttgtcttgctcgagctgattactggccgaaaggccattgacagcaccagaccagcgtcagagcaaaaccttgtgtcatgggcacggccccttttcaatgacaggcgcaagctcccaaagatggctgacccgggcctggaggggcagtttcctacacggggactttaccaggcgcttgcggtggcatcaatgtgcatccagtcagaggctgcatcgcgcccactcatcgccgacgttgtgactgctctgtcataccttgcaaaccagatttatgatcctagcttagcgcacgcatccaagaaagcaggcggcagcgaccagcggaaccgggtcggtgacagtggaagggcgctttccaagaatgacgatgcaggcagctctggccacaggtcgccgagcaaggaccgggccgactcccccagagagcagttcccgggggctgcgaacaggggccaggacagggagcgaatggtggcagaggcaaagatgtggggcgagaactggcgggagaagcggcgagctgctcaggggagcctggattctccgaccggaggcgggtagcgtcagtcaccaaagactgtttcgcccgtgcgtgctctgtctcagactgttttttgcctttgtgtggtgaggatgaggattcccgtgtttgttaggtgtacatttgtaggtgtaaaacaacagaaaagggaacgttggggtgaaaatggagggaagagaaggatgcttgttctggatgtttatgagtggtgcctgtaaattatcggaaaattttgcaacggtgaaggactagccacgttggaagatgatctaagagttgcttggcgaggtgctgtttcgtgtttccaggtcacaagcaaacacggcc

SEQ ID NO: 107443 - DNA, 322 bp, Zea Mays
ggtgccctgccactcaatctcaacgatgctctgtttctctattgccgtgcgccgacgatcaccatcgtcggactgctgcatcatcgtcataaatccgccggtgcccgtcgccaaggcctcaccgtccctgctgcttgccggatacctgtccctcgacgccaacaaccgcgttcgactcctcgccgaccgtcgagtccctgttgtgccctcgtggagacattgcacgtgctcgttcagctcagccgtcgtgcgtcgctcactcgccgtcatcgagatctcgtcggtgtcttgctaccctgcgtccccatcggtcctgtgctcc

SEQ ID NO: 107444 - DNA, 1007 bp, Zea Mays
gcttgccagcccagccctcaagcaacacgacgcattgcactagctagaccttgggctcgcaaacctcacacacccttccgcttaacctgcagcccttcgatcatcatcagcactcagcagtagcataggcatcaaggtagagaccccgacaatgcagtacggcgcggcggcggcggagcaggcgtggtcgtacatgccggtggtggcaccgtcgtcggccgtggagacggcggcggagcgcgtggagcggctggcgtcggagagcgcggtggtggtgttcagcgtgagcacctgctgcatgtgccacgccgtgaagcgcctcttctgcggcatgggcgtgcacccgacggtgcacgagctggaccacgacccgcggggccgcgagctggagcgcgccctggcctgcctcctcggcgcctccggagcctcggcggcgggcgcgccggtcgtgcccgtcgtgttcatcggcggcaggctggtcggcgccatggaccgcgtcatggccgcgcacatcaacggcaccctcgtgccgctgctcaaggacgccggcgcgctctggctgtgatctcatcgccggccgctagctactagccattgccgccgttgcagctgttcgatcggggggctagctgatagtaaggcaggttacttattaattaatacacccaaagtagtgagttattaatcatagagtgcgtgcgcttgtgtgtttgtgtgtgtgttagtgggtgtgagagagagaggtcggtgattctttttactgatgctgcctccgtcttgtgtgtgggagctagctagttagatcgtgcttgcatgcccacgcgcgtatgtacgagtgtgtgtgcactgctactgctactgctagctaggtttggtcggtgctagaagagatcgatcggtttagtgttcttctcttccatgcatcttattaatcagtttggcttggggttccggcccctcgtctttgtgttttcatatcagagccatgcgtgcgtgcactggacaaa

SEQ ID NO: 107445 - DNA, 1349 bp, Zea Mays
agaccattggtagaccaagccctacggcagcagccgcaacaacggcgaccggcccgacccgccatgcagcagcagaagccgcagggcttcctcgtcgctggcggaataccgccggcgcagggatccggacgtatcgtcaccgcggtggcggcgcggacgcgcgcggcggaacagatggcatttgaagacgtatggaaggccctaaacccggacttcaggacgcccttcgcctccgttgaggacgccatcagcaggctgctgccctaccacatattcgcagactatgaagaagacgatgacgtagttgaccccatcagtggcatcagcagcagcatatgcaccacaacggagaagtcaagcgcccataattgggaggatggcatggttacacagatggaaggttttctcgagcacttcgagaagcaggtgctgaccttcaatgtcatgactcagcaacacgctgcaggcttcaaccgcgccgaggaacagctcattctgcagatgtctatggtcgaagacgagcggcggcagttggagctcctgcgcgcggccattgtgcagcaccagcagcaggaggccgcgcgcgcgcgcctagcactcgcgcagccgcaggcggcgctgcccgctgcgtcttgtcaggcgttggtggctgcaggacgcggcgaaggtgcctcccgcgggcaggccctggcgccttccttggtgatgcagcagcaggagacgatgatgaccgcgggcgcctggcaggcgctcgccgcggcggcgtcgcgcggccagggggcttccaatgagcaggctctgatgcaggccatcatggcgcagcacatgcaacggcagaggcagcaagagattatggcagcggcgtcacgcggcgacggtgcaacctgcgggcaggcggaggcgctgccactggccgcggtaacacagcttatgcagcaacgtaaccagcagcggcagcaggaggagatgacgacgaccgcgtttcggtgcgacgtggctcccggctacctggcgctggcgtcggccgggatgatgcggcagcaacaacagcaccagcaggaggtgatggcggccggcgggtggcaactggacctgggtttgcggcacacagacatagcgcctcgcgttgacggcagctcgagctctcaggcagcgttgcctcctgcgatgctgcagcagccaggacaggggcaggccagcaccgctgggagtgggatggcgctgccgtggcgtggcgtcgctgacggaagggagcagtagcgttgctggggatttgcgcgattcgtacgagcaaaaaacaagtcatgccgtttgcgtctattggattataatagcatttttttagtagt

SEQ ID NO: 107446 - DNA, 396 bp, Zea Mays
atggcggcggaaccaatcagaacagcgcttctcttcctcgtcctcctcgccctcgcctcctccgtggccgccgcatcgacggcaccagcaccagcgcgcgcgccaacagcgaccgggtgccggcgcggcgacctggtggtgcggcagcgcgcgacggggcgcgtggtggaggggaagcccgagtacgcggtggaggtgcggaacgcgtgccggtgcgcgcagtcccgcgtgctgctgcgctgctacgggctcagcagcgtgggaggccgtggacccgcgcgccatccgcgccgtggacgcccggcgctgccgccgcgcgggggcgccgtgcgcttcacctacgcctggatgacgccgcaggacttcccgctcctcagctcgcgcccgcactgctag

SEQ ID NO: 107447 - DNA, 834 bp, Zea Mays
actttatcctcctctccactccattttgtttctctctccctctagatgaagggggactctataccaagctgcttgttgcctacccttccacgcttacgctcctggcattctccggaagcctctaagaccactgcttcggccttcaaagggatggtggtggtggtgacctactcgacgtcacacaacctttctcctcatcggctgacgactgatggcaaccgagatccagtccatagacctagattaatctcccccatcctggttgctcgaccgagttgctcagatccatcgacgaagggagcgactacatcaccgccactgtcacttatccctatccacagacgcttcgtctcccaagcagtgtaggaaggggatatgtccatccgcaccgggatctctcgtaccctgttcgtctcccttcaatctgtaactcttgaggattacaacaccaaccagacgtttgaggactggtggaggaaggccaacaagagtacaatgaaggataagagaaaatgggttaactatgtcatcattttgggggattggtgcctctagatgcatagaaacagaatgttccttgatgggattagtccatccattcagagattgcagcagtatttcagtgatgagttctcctgttggctcatggcgggcgccaggagtttgggttagcttggtttccctagttccatgaggattatcggatccattccttttgatcctttgtaacctttttttgtttctgttttcttgcttggcttttgattattttctgatgttgtcttggttgtaagccctattttttcgctctctaatataaagatgtgtagctct

SEQ ID NO: 107448 - DNA, 1754 bp, Zea Mays
ttccggcagagaggagcgcatcgcatcagcgtcaccaataccacgcgagccgtccccccctccttgtccatccccggccggcacgacgaaccgcctgaggagggagcaatagctcggggctctcgctcttggctgcgtgtctgaagctgttgatgcgagtgaaggctcggtttccatggctctcatggcggcggggatggacgaccacgacgagtacgccaagctcgtcaggaggatgaacccgcccagggttgtgatcgacaacgaggcctccgacgacgccaccgtgattaaggtagacagcgtcaacagccacggcacgctgctcgccgtcgtccaggtcatcgccgacctcaacctcgtcatccggaaggcatacttctcctccgatggaaactggttcatggatgcgttcaatgtcaccgaccgtgacggcaacaaggttctggacgcctcaaccatctcctacatccagaagacgctggaggtggacgactggtactacccgggggcgcacaacacggtgggcatcgtgccgtcgggggactacacctccatcgagctcacgggcacggaccgcccgggcctgctctccgaggtgtgcgcggtgctcgcggccatgggctacgcggtccagagcgcggagctgtggacgcacaacacgcgcgtggccgccgttgtgcacgtcacggacgccgagactggcggcgccatcgaggactccgcccgcatcgccgacatcagcgcgcgcttgggcaacctgctgcgcgagcacagcgacgtgcgcgctggcggcggcgcgggcagcctggcactccacaaggagcggcggctgcaccagatgatgttcgacgatcggggagtggaaggccacgccgcggccgcgccgcccgacggctcgctgcggacggaggtgtccgtgacgcatgccgagcgcgggtacaccgccgttgtggtccggtgccgggaccggcccaagctgctgttcgacaccgtgtgcaccatcacggacatggagtacgtggtgcaccacggcaccgtgagcgcggagcccggcggcggcgcgtaccaggagtactacatccgccacgtcgacggccacgccatccggtgcgaggacgagcagcagcgcctcgtgcggtgcctggctgccgccatcgagcgacgcaccgccgacggacttgagctggaggtgcggacgggagaccgcgcgggcctgctctcggacatcacccgcatcttccgggagaacgggctcaccattcgccgcgccgagatctcgtcctccgacggcgaggccgtggacacgttctacctatccgacccgcaaggcctccccgtggagaccaagaccatcgaggccatccgtgcacaaatcggcgaggccacgctgagggtgaggaacaacccgttcggtaccggggacgacgccgacatggccggcgctggcacaacggcgttcatcttcgggaacctgtttaagttctacaggccgttccagagcttcagcctcatcaaactctactcgtgatgcgcacttgggtagcaattttttcacatgttttagatagtttttactgtggttagctgttctgctctggagattttccaatagtgtgtaaatatggctatggatgatgatggcgatatatacggatacagtccagtgtaagtataagtatatagttaggcaaggttatgtagctgcattgcatggttaggaagaatgatagttttattgtagctctatagct

SEQ ID NO: 107449 - DNA, 523 bp, Zea Mays
ttagggcccgtttggcacagctccagctcctgattctaagcgaggatctggaggagccgtgccaaacgggtatttttttaaactgattctcgtgtggagccgaaagatcgggagtcgtttttgtgaaaaaaggtgggatctaaaaaaacctgctccaccctcccttaaaacagctcctcaaccaaccaaatatggacctccccttaaagtttgatcgaaattacccgcaattgccattggacaaaaacataacgagccaatttatggattaaacatttgagaccattttatgcactattatgatgggaatattttatatgttattgtttcatatttttttcccgtatatgcatcctacttattggtttgtaataaagttgaactgcaaagagtaaaacagacaatcgccacagaccaccaactctcagaagacaagaatcagtttacttgccaaacggtcttaaaaatgattctgattttctaggagaatcaggaggatcagctcctcacgaggatcaggatc

SEQ ID NO: 107450 - DNA, 516 bp, Zea Mays
atgaccacagcatccttatcccccacagcaaaatcctccctcccagatgtttcggacccaggggcgggttttggtacggagttcatagccaggtttccactagaccttccagctgtccacaggttgacaaaatggatggccttcctcacagcagtgctcctaatgccaagaaaaaacagatatgttatgagaagcagagacacaggagcaatagcagaccgcacaatttgccaagagtttttttgcaggagttgcggtaaagggctgggaggggactggaacagggtgcatagctggggggcagtggcggagaacgccgaagaaacgagtcggctgctcgccactggccgctgcccgagccagccgctgggcgcttgccgccgggctgagctggcaggctggacactggccactggccctgcggccaatgcggatccaggatttagtgacgctccgggccgaattgcatacaatacatcattcgtgatccatagtactgtacctttcagcagttaa

SEQ ID NO: 107451 - DNA, 1257 bp, Zea Mays
ccacgctgtggcgagcttgcatcattgcgcacaccttgatgctgggcatgagcaggacggggttggccggagcggcgctgcgggtggcgctgacggcgctgctgccgctggtcctgccggcgtactacgtgtacaagctgaccacgtacctcctcggcgccgtcttccccgaggacgtcgccggcaaggtggtactcatcaccggcgcctcctccggcatcggcgagcacctggcctatgagtacgcgaagcggggagcctacctggcgctggtggcgaggagggaggcgagcctccgcgaggtcggcgacgtcgcgctggggctgggctcgccgggcgtcctcgtcctcccggctgacgtctccaagcctcgggactgcgagggcttcatcgacgacacgattagctacttcggtagactggatcacctggtgaacaacgcgtccatctggcaagtgtgcaagttcgaagagatccaggacgtcaggcacttgagagccctgatggacatcaacttctggggccacgtgtacccaacccggctcgccatccctcacctcaggagaagccgtggccggatcgtgggcgtcacctccaactcgtcctacatattcatcgggaggaacaccttctacaatgccagcaaggcggcggcgctcagcttctacgacaccctgaggatggagctgggcagcgacatccgcatcaccgaggtggtgccaggcgtggtggagtctgagatcaccaaggggaagatgctcaccaagggaggcgagatgaaggtggaccaggacgaaagagacgccatcctggggccgacgccggccgagcccgtgggcgacttcgccaggaccgtggtgcgcgacgtgtgccggggcgcgaggtacgtgttcgagcccaggtggtacatgggcgtctacttgctgcgggcctgcctcccggaagtcctggcctggaactcccgcctgctcactgtcgacacggtcggcgcgtccaccacggacacgctcggaaagtggctggtcgagctgcccggcgtgcgccgcgtcgtgcagccgccgtcgctccgctcgccggagatcaaggactagtgacggtgatcgtgtacgttctgtggccatggatagcactagctgtatgagaccgaagttcctttagacatcgacacgattaataaaggactcaattatcttaatgctactacaaattactccctctgttgtttttttatttgtcgcttttttccaaaaataaaat

SEQ ID NO: 107452 - DNA, 1387 bp, Zea Mays
ccacgctgtggcgagcttgcatcattgcgcacaccttgatgctgggcatgagcaggacggggttggccggagcggcgctgcgggtggcgctgacggcgctgctgccgctggtcctgccggcgtactacgtgtacaagctgaccacgtacctcctcggcgccgtcttccccgaggacgtcgccggcaaggtggtactcatcaccggcgcctcctccggcatcggcgagcacctggcctatgagtacgcgaagcggggagcctacctggcgctggtggcgaggagggaggcgagcctccgcgaggtcggcgacgtcgcgctggggctgggctcgccgggcgtcctcgtcctcccggctgacgtctccaagcctcgggactgcgagggcttcatcgacgacacgattagctacttcggtagacgtaagcctagcagctggccgggccagggtgtcgatctgtttaccactctgacgacacgacagtagggttaatatatatacattcttatttgcagtggatcacctggtgaacaacgcgtccatctggcaagtgtgcaagttcgaagagatccaggacgtcaggcacttgagagccctgatggacatcaacttctggggccacgtgtacccaacccggctcgccatccctcacctcaggagaagccgtggccggatcgtgggcgtcacctccaactcgtcctacatattcatcgggaggaacaccttctacaatgtcaagatcctctactctaccatgcactatgctgaacatagacgacgacgaaaccatgcatctgaaatttcctagatctctcctctcgcaggccagcaaggcggcggcgctcagcttctacgacaccctgaggatggagctgggcagcgacatccgcatcaccgaggtggtgccaggcgtggtggagtctgagatcaccaaggggaagatgctcaccaagggaggcgagatgaaggtggaccaggacgaaagagacgccatcctggggccgacgccggccgagcccgtgggcgacttcgccaggaccgtggtgcgcgacgtgtgccggggcgcgaggtacgtgttcgagcccaggtggtacatgggcgtctacttgctgcgggcctgcctcccggaagtcctggcctggaactcccgcctgctcactgtcgacacggtcggcgcgtccaccacggacacgctcggaaagtggctggtcgagctgcccggcgtgcgccgcgtcgtgcagccgccgtcgctccgctcgccggagatcaaggactagtgacggtgatcgtgtacgttctgtggccatggatagcactagctgtatgagaccgaagttcctttagacatcgacacgattaataaaggactcaattatcttaatgctact

SEQ ID NO: 107453 - DNA, 1016 bp, Zea Mays
cattttccttaataacaataacaacatcaccgacgacttcgattgcaaaaagggggattttgacttgcactaattgtgatgcgtaactcatggctaaacaaacgccaacatgctattgtgctttgccatgagctcgtagtcgtatctgtatgactgtatcccagcaaatagcttaccagtacgcaaagaaggtagcgagactggcgctagtggcgaggatggtgggaagcctgcatgatgtcgcggcgagagccagggatggcggctcgccagacgttctggttgttgccggggacgttgcgaaaccagaggattgccggaggtttgtgcaggccacagttgaacatttcggccgattggatcatcttgtgaacaacgctggtgtagcaaatgtctgctggtttgaggacgtaccggatgttgctgctttgaagcgagtcctggccgtgaacttctggggcgcagttcatgcgacccactgcgctcttccccatctgaagaagagcggcggtgggaaggtcttcgtcaactcctcggctgcggcggcgctggcaatgccaggaatgagcctctacaatgccagcgaggctgctgttctcaacttcttcgagaccctgcgggtcgagctccgcgacgaggtcggcatcaccatcgcgacttccgggtggatcgtgtcggagatgaccggagggaagcagctgtccaaggaagggacggtggaggtcgccgtgcggtgcgccgaggccaccgtggacgccatctgccgcggccggcgccacctcaccgtcccgctgtggtaccgggcgctgttcctgtggcgggcgctcgcgcccgaggtggtggagttcagccagagactgttgtgccgacggaccgcgggcggccgcggtcatcaggcgaagggcaagaggttgcaggaggtcaccggcgccgtccagccggcgccgctgcacagctcggacatcaaacgggagtagtcgtaggcttcggtaaggcagctggcagtgacatggtgc

SEQ ID NO: 107454 - DNA, 3326 bp, Zea Mays
tttactcacactagtctgctcctcaggttttgcagatttaacacttcttatcatggatggcaagtgcaaagtcaataaggaaatagatggcccccttggaccacctcctcggtaagggggacttaaattctcaccaaaagtacctcagaagaaacttgtcaaggttgtctttgatagggaaccagttgaggagagcaaggaagaagatgtggataaggagtaattgatgaaacttaagatgtcacagcttgcctcattttgcagaacaagtattcctctacaagaattaagtctgaggaaaaagcaaaaagcggtacaaaggttgcatttggacaaggaaactcttcttatgcaagatattttcccatgcccaaaaaggattcttcagcaggtggaacttcgaagttaccaaaagaatatgcagaaccatgggattatacccatgattatcatgttactctcccactactctggaaatcctggtatattttttttagtctttagtcgaaattgcaagacattttcttcaactaaccccaccattcctacatcactgacacagaagttctggatgaggaagagtttggagaatcctctgccagcaggactgaagatgacaaattgccctatgcagtactaaggaagtcacattaactaactgtgcaggtttcatttggctcgaactgcatgtttccccaggaggttgcagcaaccaacaccagagaaaaacattgctgtacggtggggggagagcagcaagcgtgcctgtcgtcgccccggatattgactccatgttgggttctgttgacaagatgaaagaatagtccattttgtattatgccattacaagagagttttgctcccttatagagatgtgcagctacatgctggatacccagtcaaacaagggacaccaacgaaaggatgtctccttggacaactacagcactcagagatggaataggcattctgatcgtagtagtcatcttggatgcgacgttgcaaaggatgggatagaagaatcgcacatctgacgggagaaaacgcgagcaagcccttgcttgaccagtctcaagaaagctcgtctacggctctgctcctcgccggcgatgacgcccgcggagacctccccgccggcgccacctccacgtgcttctcaccctgtctcctccccgctcctcctacaagaccccacaacccaggccacgtgcccttggagggagcagctcaccgtccgtggcgtcgccgtggctgcggcgctgggcgcgctgctctgcgtggtaatccaccgcctcaacctcaccgtcggggttataccggcgcttaacgtcgcgtcgggcctcctcgccttcttcctcgccgcggcgtggcgtgctgccgccgggtggctagggtttggccgcgggccgcccttcacgaggcaggagaacaccgtcatccagacgtgcgccatagcatgcgccggcctcgcgtttagcgggtgctccgcctcctacatctttgctatggacaggaagacttatgagctcgtgggaccagactatcccggtaatcgagccgaagatgttaaggatccttcacttggctggatgatcagtttcttgttcctcattgctctcgttgggccatttagcattgtcttgcttcgaaaggtaatggtgattgattacaagcttgcattccctggtggaacagctacagctttgatgatcaatagcttgcatgggaaaacggatggtgatcttgcagggaaaaagctgcactgccttgtaaaatacatgggcattagttttgtttggagcttctttaaatggttctttagtggtgttggtgactcttgtggttttgacaatttcccaacatttgggcttgaagcttttaaaagcacgttttatttcgacttcagtcctagttatgtcgggtttggttttatttcccctcatattgtaaactgctcagttttccttggatctgtcatatcttggggctttctttggccatttattagtgcacaagctggtcattggtacccagataaccttggtaacagtgatttcagaggcctatatggttataaggtcttcatagccatttcgattatacttggagatggcctatacaacttggttaagatatttattgtcattgctagagaattatgcagcatgcaatcgaaacaacatgagctgcctgttcaagctctggaagatgacgggagttgtgaacaactagcagatgagaaactacaaacagagatattcctcaaagatagtatatctccttggtttgctgcttctggttacattgtcctggcagcaatatccaccgccagtgtgcccgccatatttccccagctcaagtggtaccttgtcctcctgtgctacttcttcgctcccgtggttgcgttctgcaactcctacggaatgggcctcaccaacctgaaccttgccccgacctacggcaagatcgccctcttcgcgttggcctcgctcgtcggcagtgatggcggtggagtcatcgccggccttgcagcctgtggcatcgtaatgtccgttgcctgttccacagccgatctaatgcaggacttgaagagcgggtacctgaccctctcgtcgccgcggtcgatgttcactgcccagctgatcggcatcgcgctcgggtgcgtcatagctccgctcacgctgtggctcttctggacagccttcgacatcggcgaccctgacggggagtacaaggccccctttgccatcatgttccgggagatggccatcctcgggatggagggcttctccgcgctgccactgcactgccttgacatctgctatgccgccttcttcctcgccttggccaccagtctcctcaaggacgtggcgcccgcaaacgtgtccaggttcatccccataccgatcgctatggctgcgccgttctacgttggcgcctactttggcgtggacatgttcataggcacggcgatcttgtacgcctggcagaagctgaaccgggagcaggctgatggttacgcggtggctgtggcgtccgggctgatctgtggagatgggatctggagcatcccttctgctcttctgtccatcctgggagctgttccacccatctgcatgtcgttcgaggcttcctctgctcccaggtgagagatgaacaatacgcagaagtttttattactggccatatgtttgcgccattgatgaaaccatatggattgtaacacaaaggaggtgttagttgttcgtaatttgtacctccgatgattttatatgaaacaaaaacacgtctttgcatgtaatgtaaatacatacattctctggttt

SEQ ID NO: 107455 - DNA, 3277 bp, Zea Mays
tttactcacactagtctgctcctcaggttttgcagatttaacacttcttatcatggatggcaagtgcaaagtcaataaggaaatagatggcccccttggaccacctcctcggtaagggggacttaaattctcaccaaaagtacctcagaagaaacttgtcaaggttgtctttgatagggaaccagttgaggagagcaaggaagaagatgtggataaggagtaattgatgaaacttaagatgtcacagcttgcctcattttgcagaacaagtattcctctacaagaattaagtctgaggaaaaagcaaaaagcggtacaaaggttgcatttggacaaggaaactcttcttatgcaagatattttcccatgcccaaaaaggattcttcagcaggtggaacttcgaagttaccaaaagaatatgcagaaccatgggattatacccatgattatcatgttactctcccactactctggaaatcctggtatattttttttagtctttagtcgaaattgcaagacattttcttcaactaaccccaccattcctacatcactgacacagaagttctggatgaggaagagtttggagaatcctctgccagcaggactgaagatgacaaattgccctatgcagtactaaggaagtcacattaactaactgtgcaggtttcatttggctcgaactgcatgtttccccaggaggttgcagcaaccaacaccagagaaaaacattgctgtacggtggggggagagcagcaagcgtgcctgtcgtcgccccggatattgactccatgttgggttctgttgacaagatgaaagaatagtccattttgtattatgccattacaagagagttttgctcccttatagagatgtgcagctacatgctggatacccagtcaaacaagggacaccaacgaaaggatgtctccttggacaactacagcactcagagatggaataggcattctgatcgtagtagtcatcttggatgcgacgttgcaaaggatgggatagaagaatcgcacatctgacgggagaaaacgcgagcaagcccttgcttgaccagtctcaagaaagctcgtctacggctctgctcctcgccggcgatgacgcccgcggagacctccccgccggcgccacctccacgtgcttctcaccctgtctcctccccgctcctcctacaagaccccacaacccaggccacgtgcccttggagggagcagctcaccgtccgtggcgtcgccgtggctgcggcgctgggcgcgctgctctgcgtggtaatccaccgcctcaacctcaccgtcggggttataccggcgcttaacgtcgcgtcgggcctcctcgccttcttcctcgccgcggcgtggcgtgctgccgccgggtggctagggtttggccgcgggccgcccttcacgaggcaggagaacaccgtcatccagacgtgcgccatagcatgcgccggcctcgcgtttagcgggtgctccgcctcctacatctttgctatggacaggaagacttatgagctcgtgggaccagactatcccggtaatcgagccgaagatgttaaggatccttcacttggctggatgatcagtttcttgttcctcattgctctcgttgggccatttagcattgtcttgcttcgaaaggtaatggtgattgattacaagcttgcattccctggtggaacagctacagctttgatgatcaatagcttgcatgggaaaacggatggtgatcttgcagggtaaggcaacaggaaaaagctgcactgccttgtaaaatacatgggcattagttttgtttggagcttctttaaatggttctttagtggtgttggtgactcttgtggttttgacaatttcccaacatttgggcttgaagcttttaaaagcacgttttatttcgacttcagtcctagttatgtcgggtttggttttatttcccctcatattgtaaactgctcagttttccttggatctgtcatatcttggggctttctttggccatttattagtgcacaagctggtcattggtacccagataaccttggtaacagtgatttcagaggcctatatggttataaggtcttcatagccatttcgattatacttggagatggcctatacaacttggttaagatatttattgtcattgctagagaattatgcagcatgcaatcgaaacaacatgagctgcctgttcaagctctggaagatgacgggagttgtgaacaactagcagatgagaaactacaaacagagatattcctcaaagatagtatatctccttggtttgctgcttctggttacattgtcctggcagcaatatccaccgccagtgtgcccgccatatttccccagctcaagtggtaccttgtcctcctgtgctacttcttcgctcccgtggttgcgttctgcaactcctacggaatgggcctcaccaacctgaaccttgccccgacctacggcaagatcgccctcttcgcgttggcctcgctcgtcggcagtgatggcggtggagtcatcgccggccttgcagcctgtggcatcgtaatgtccgttgcctgttccacagccgatctaatgcaggacttgaagagcgggtacctgaccctctcgtcgccgcggtcgatgttcactgcccagctgatcggcatcgcgctcgggtgcgtcatagctccgctcacgctgtggctcttctggacagccttcgacatcggcgaccctgacggggagtacaaggccccctttgccatcatgttccgggagatggccatcctcgggatggagggcttctccgcgctgccactgcactgccttgacatctgctatgccgccttcttcctcgccttggccaccagtctcctcaaggacgtggcgcccgcaaacgtgtccaggttcatccccataccgatcgctatggctgcgccgttctacgttggcgcctactttggcgtggacatgttcataggcacggcgatcttgtacgcctggcagaagctgaaccgggagcaggctgatggttacgcggtggctgtggcgtccgggctgatctgtggagatgggatctggagcatcccttctgctcttctgtccatcctgggagctgttccacccatctgcatgtcgttcgaggcttcctctgctcccaggtgagagatgaacaatacgcagaagtttttattactggccatatgtttgcgccattgatgaaaccatatggattgtaacacaaaggaggtgttagttgttcgtaatttgtacctccgatg

SEQ ID NO: 107456 - DNA, 2301 bp, Zea Mays
attaatgcactcgcagttggcacgcaacctaccccgtcgaactcctcatcgcctcatcgtcatctacctcgctcgcaccacacgcgaaaccgaacaaactactcaggcattgccgatactcacgccggcgaccgatgggatcggagggtgagatcaccggcccgctcctcgcgtcgggcgccggcgcgccggcgccggaggcggtgcccccgtggcgggagcaggtgacggctcgggggctggcggtcagcgccgtcctgggggtgctcttctgcctcattacgcacaagctcaacctcaccgtcgggatcatcccctcgctcaacgtcgccgcggggctgctcggctacttcctggtccgcacctggacggcggcgctcgagaggttcggcgtcgtctccaagcccttcaccaagcaggagaacaccgtcattcagacatgcgtcgtcgcctgctacggcctcgccttcagcggggggtttggaagctatatgcttgcaatggaccagagaacctatgaacttatcgggccagattatcctggcaacagggccgtggatgtcaagactccttcactgggctggatgattggattcatgtttgttgttagcttccttgggctgtttagtcttgttgcactacgcaaggttatggtaattgattacaagctgacttatcccagtgggacagccacggctatgttgataaatagtttccacacaactactggagctgagcttgcagacaagcaagtcaggtgtcttgggaagtacttgagcattagttttatatggaactgctttaaatggttcttcagcggtgttggagattcttgtggtttcgataatttcccttctttgggacttgcagcatttaagaatacgttttattttgatttcagcccaacctatattggatgtggtcttatttgtccgcatattgttaattgttctacacttcttggtgccataatatcgtggggtattctttggccatatatctccacaaaagctggggactggtatccagctgaccttggaagcaatgacttcaaaggactctatggatacaaggtttttatatctgtatctgtgatacttggggatggtctttataacctcatcaagatcatttatgctactatcaaggaaataatgaatgcacgggctaagcaaggaagactgccactagcccaagttcaggatggcgatgaaggttcaaatttatcagctgaggaaaagcatctgaatgagacattcataaaggacagtatccctccctggttggcaggatctggttacattggccttgcagcaatatcgattgcaaccgtcccaatgatctttccgcagatcaagtggtaccttgtcctctcggcatacgttgttgctcccctcctcgctttctgcaactcatatggcactggactaacggactggaatcttgcgtctacatatggaaagatcggcctcttcatttttgcatcatgggttggtcagaatggcggtgtgattgctggcttagcagcctgcggtgttatgatgtccatcgtgtccactgcagccgatctcatgcaggacttcaagaccggttacctcacactctcttcccctaggtccatgttcgtgtcgcagttgatcgggaccgcccttggttgtgtcattgctccactcaccttttggctctactggtcggctttcgatattggtaaccctgacggcgcattcaaagctccatatgctgtaatcttccgtgagatgtcaattcttggcgtggaagggttttctgcactgcctcagcactgcctagcgatctgctcgtttttcttcattgcatctctagtgatcaacctcctcagggacgtcaccccaaagaatgtctccagattcatcccaatcccgatggctatggccattcccttctacatcggtgcgtacttcgccatcgacatgtttgttgggacagttatccttttcgtctgggagagggtgaaccgcaaggagtgtgatgacttcgcaggtgcggttgcctctggcttgatctgtggtgatgggatctggactgttccttctgcgatactgtcaatccttaggattgacccgccaatttgcatgtacttcaagccatcccttagcagctaaagttgggacaagtgttatccattttctgtatatcaaaataggacctaattgtgtatatctttaatttactacatgtaaactgttctaggaagaaaagctgtagcctaatgcaatctgttgattcttatttgcgtatgataatccagcattcgtttatcct

SEQ ID NO: 107457 - DNA, 2580 bp, Zea Mays
attaatgcactcgcagttggcacgcaacctaccccgtcgaactcctcatcgcctcatcgtcatctacctcgctcgcaccacacgcgaaaccgaacaaactactcaggcattgccgatactcacgccggcgaccgatgggatcggagggtgagatcaccggcccgctcctcgcgtcgggcgccggcgcgccggcgccggaggcggtgcccccgtggcgggagcaggtgacggctcgggggctggcggtcagcgccgtcctgggggtgctcttctgcctcattacgcacaagctcaacctcaccgtcgggatcatcccctcgctcaacgtcgccgcggggctgctcggctacttcctggtccgcacctggacggcggcgctcgagaggttcggcgtcgtctccaagcccttcaccaagcaggagaacaccgtcattcagacatgcgtcgtcgcctgctacggcctcgccttcagcggggggtttggaagctatatgcttgcaatggaccagagaacctatgaacttatcgggccagattatcctggcaacagggccgtggatgtcaagactccttcactgggctggatgattggattcatgtttgttgttagcttccttgggctgtttagtcttgttgcactacgcaaggttatggtaattgattacaagctgacttatcccagtgggacagccacggctatgttgataaatagtttccacacaactactggagctgagcttgcagacaagcaagtcaggtgtcttgggaagtacttgagcattagttttatatggaactgctttaaatggttcttcagcggtgttggagattcttgtggtttcgataatttcccttctttgggacttgcagcatttaagaatacgtaagtttgctatgactgttttgatattcctttatggctagtcggatgcccattccagtattccacatattgatttgaggggaatggggattgagtggtaattgcttcaccctagcccctcttgactccacaatcccttccaatccacaaggagattattttatccaaattagccctttgagtttacaagaaggatttaatgtcatgaaagtacacatccttcaagatgggataccattggcgtgttcttcaaaaaaaaacttgactcttcgactctgtgtaggttttattttgatttcagcccaacctatattggatgtggtcttatttgtccgcatattgttaattgttctacacttcttggtgccataatatcgtggggtattctttggccatatatctccacaaaagctggggactggtatccagctgaccttggaagcaatgacttcaaaggactctatggatacaaggtttttatatctgtatctgtgatacttggggatggtctttataacctcatcaagatcatttatgctactatcaaggaaataatgaatgcacgggctaagcaaggaagactgccactagcccaagttcaggatggcgatgaaggttcaaatttatcagctgaggaaaagcatctgaatgagacattcataaaggacagtatccctccctggttggcaggatctggttacattggccttgcagcaatatcgattgcaaccgtcccaatgatctttccgcagatcaagtggtaccttgtcctctcggcatacgttgttgctcccctcctcgctttctgcaactcatatggcactggactaacggactggaatcttgcgtctacatatggaaagatcggcctcttcatttttgcatcatgggttggtcagaatggcggtgtgattgctggcttagcagcctgcggtgttatgatgtccatcgtgtccactgcagccgatctcatgcaggacttcaagaccggttacctcacactctcttcccctaggtccatgttcgtgtcgcagttgatcgggaccgcccttggttgtgtcattgctccactcaccttttggctctactggtcggctttcgatattggtaaccctgacggcgcattcaaagctccatatgctgtaatcttccgtgagatgtcaattcttggcgtggaagggttttctgcactgcctcagcactgcctagcgatctgctcgtttttcttcattgcatctctagtgatcaacctcctcagggacgtcaccccaaagaatgtctccagattcatcccaatcccgatggctatggccattcccttctacatcggtgcgtacttcgccatcgacatgtttgttgggacagttatccttttcgtctgggagagggtgaaccgcaaggagtgtgatgacttcgcaggtgcggttgcctctggcttgatctgtggtgatgggatctggactgttccttctgcgatactgtcaatccttaggattgacccgccaatttgcatgtacttcaagccatcccttagcagctaaagttgggacaagtgttatccattttctgtatatcaaaataggacctaattgtgtatatctttaatttactacatgtaaactgttctaggaagaaaagctgtagcctaatgcaatctgttgattcttatttgcgtatgataatccagcattcgttta

SEQ ID NO: 107458 - DNA, 2359 bp, Zea Mays
attaatgcactcgcagttggcacgcaacctaccccgtcgaactcctcatcgcctcatcgtcatctacctcgctcgcaccacacgcgaaaccgaacaaactactcgtacaaactacaaagagaagagacaagtgtatttattttattaatcattagtactattgattagtattattgaaacagaggcattgccgatactcacgccggcgaccgatgggatcggagggtgagatcaccggcccgctcctcgcgtcgggcgccggcgcgccggcgccggaggcggtgcccccgtggcgggagcaggtgacggctcgggggctggcggtcagcgccgtcctgggggtgctcttctgcctcattacgcacaagctcaacctcaccgtcgggatcatcccctcgctcaacgtcgccgcggggctgctcggctacttcctggtccgcacctggacggcggcgctcgagaggttcggcgtcgtctccaagcccttcaccaagcaggagaacaccgtcattcagacatgcgtcgtcgcctgctacggcctcgccttcagcggggggtttggaagctatatgcttgcaatggaccagagaacctatgaacttatcgggccagattatcctggcaacagggccgtggatgtcaagactccttcactgggctggatgattggattcatgtttgttgttagcttccttgggctgtttagtcttgttgcactacgcaaggttatggtaattgattacaagctgacttatcccagtgggacagccacggctatgttgataaatagtttccacacaactactggagctgagcttgcagacaagcaagtcaggtgtcttgggaagtacttgagcattagttttatatggaactgctttaaatggttcttcagcggtgttggagattcttgtggtttcgataatttcccttctttgggacttgcagcatttaagaatacgttttattttgatttcagcccaacctatattggatgtggtcttatttgtccgcatattgttaattgttctacacttcttggtgccataatatcgtggggtattctttggccatatatctccacaaaagctggggactggtatccagctgaccttggaagcaatgacttcaaaggactctatggatacaaggtttttatatctgtatctgtgatacttggggatggtctttataacctcatcaagatcatttatgctactatcaaggaaataatgaatgcacgggctaagcaaggaagactgccactagcccaagttcaggatggcgatgaaggttcaaatttatcagctgaggaaaagcatctgaatgagacattcataaaggacagtatccctccctggttggcaggatctggttacattggccttgcagcaatatcgattgcaaccgtcccaatgatctttccgcagatcaagtggtaccttgtcctctcggcatacgttgttgctcccctcctcgctttctgcaactcatatggcactggactaacggactggaatcttgcgtctacatatggaaagatcggcctcttcatttttgcatcatgggttggtcagaatggcggtgtgattgctggcttagcagcctgcggtgttatgatgtccatcgtgtccactgcagccgatctcatgcaggacttcaagaccggttacctcacactctcttcccctaggtccatgttcgtgtcgcagttgatcgggaccgcccttggttgtgtcattgctccactcaccttttggctctactggtcggctttcgatattggtaaccctgacggcgcattcaaagctccatatgctgtaatcttccgtgagatgtcaattcttggcgtggaagggttttctgcactgcctcagcactgcctagcgatctgctcgtttttcttcattgcatctctagtgatcaacctcctcagggacgtcaccccaaagaatgtctccagattcatcccaatcccgatggctatggccattcccttctacatcggtgcgtacttcgccatcgacatgtttgttgggacagttatccttttcgtctgggagagggtgaaccgcaaggagtgtgatgacttcgcaggtgcggttgcctctggcttgatctgtggtgatgggatctggactgttccttctgcgatactgtcaatccttaggattgacccgccaatttgcatgtacttcaagccatcccttagcagctaaagttgggacaagtgttatccattttctgtatatcaaaataggacctaattgtgtatatctttaatttactacatgtaaactgttctaggaagaaaagctgtagcctaatgcaatctgttgattcttatttgcgtatgata

SEQ ID NO: 107459 - DNA, 429 bp, Zea Mays
ataggaacacacaaggaaataatacaattggccaaaatagataatgaagatcatctctatatcattttgcatttctcaacaaatataatatgtttggctattctaagtggttctttttttctgggtaaagaagaacttgccatttgaattcttgagtttaggatttttttctataacttaaatgattcaataaaagcttttttattcttttagttagtgattttttgttggatttcactttacccgctattgggaactactaatttgttgggtatacaacaattttggatgggctcttatcgagctaattttcactatttttgtttgtagttttcctgtgattctagacacgtgtttgaaattttgggtcttttttgtttaaaccacctacctccttcacttgtagtcatttatcattcaattagtgaa

SEQ ID NO: 107460 - DNA, 123 bp, Zea Mays
ccacattttggatctagggtttcaccatgtgttagagataaagtagttaggttgcctaatccaaccgcctatgacctttgttgtataaataccccttcatccttcccgacaaaaactgtgtag

SEQ ID NO: 107461 - DNA, 1771 bp, Zea Mays
atacatacccaccggccggcgtcacagacacgcgagcagagcacagacacagagcacacagcacagaggcagccaccaccacaggcactcacccgcaccgctcggtcaccgaggagtggaggagctttgcagtcgcagcagcagcagtacagtgtgtgagtgtgaagggactagagcagggcacacagcgcaggccgcatgggcgaggcggaggtggagaagcccaaggaggcggcagaggaggagaagaagaaggaagacaagcccatggacgccacggcggcggcggaggacaagcccaaggacgccgcggcggcggaggacaagcccaaggacggggaggagaagaaggacgacgcgccccctccccccccgccgccgccgccgcccgaggaggtcgagatgcgggtctacatgcactgcgagggatgcgcccgcaaggtcaagaagatcctcaagcgcttcgacggagtggaggacgtggtcgccgactccaagtcgcacaaggtggtggtgaaggggaagaaggcggccgccgaccccatgagggtggtggagcgcgtgcagaagaagaccggccgcaaggtggagttgctgtcgccgatcccgccgccaacgccgccggaggagaagaaggcagaggaggagcccgagccgccaaagccggaggagaagaaggagccgccggtgatcgccgtggtgctgaaggtgcacatgcactgcgaggcctgcgcccaggggatcaggaagaggatcctcaagatgaaaggcgtgcaatctgcagagccagacctcaaggcgtcggaggtggcagtgaagggcgtgttcgaggagtccaagctggcggagtacgtgtacaagcgcaccggcaagcacgcggccgtcgtcaagtccgagccggtcccggcgccaccgccggagagcggcgccggcgacaacacgggggccaaggaggaggagaaggggcaggaggaggagaaggagaaggaaggaggaggcgatggcggtggcgaggagaagaagaaggaagggggcaaggaggaagagaagaaggacggcgagaagcaggaggaggagaaggagggcggcggtggcggcgagaaggtggaggaaaaggagggagataaagacgctgccgctgccgccgccgccagcatgtacatgcactacccgaggttcccgttcccgggaggctactacgcgccgcctccggggtacgtctaccagccggtgtacccggcgccggcgtacgcggcgtacgcgccgccgcaccaccagcccatggcgccgcagatcttcagcgacgagaaccccaacgcatgctccgtcatgtaactaaaaaacagaaggagccttggcgagagagggggagaaaaggaaaaaaaaagaataataagaaggtgggaagagcgagggagctgcgtgcataagccagagccagaggtagggagggaggtcccctgagagaaatgcagcatccagcagtgtcccctgagcgaagcaaatgggcaactttgtttgaaacaaaacaaaaatacccagctttttcggggggggggggggggggaggaggggcgggtagatttcgctcttattttttttcttctttcttttgtaattttaacccttcctttcatcttttttttcctggtgtaaagtaagcgtggactttgtcggtttatggacgctagctatctttatgtaggatgatgccttggcatgtactgcttgcagcttcagacttcatatataaaactgtatgtattataaa

SEQ ID NO: 107462 - DNA, 2177 bp, Zea Mays
atacatacccaccggccggcgtcacagacacgcgagcagagcacagacacagagcacacagcacagaggcagccaccaccacaggcactcacccgcaccgctcggtcaccgaggagtggaggagctttgcagtcgcagcagcagcagtacagtgtgtgagtgtgaagggactagagcagggcacacagcgcaggccgcatgggcgaggcggaggtggagaagcccaaggaggcggcagaggaggagaagaagaaggaagacaagcccatggacgccacggcggcggcggaggacaagcccaaggacgccgcggcggcggaggacaagcccaaggacggggaggagaagaaggacgacgcgccccctccccccccgccgccgccgccgcccgaggaggtcgagatgcgggtctacatgcactgcgagggatgcgcccgcaaggtcaagaagatcctcaagcgcttcgacggagtggaggacgtggtcgccgactccaagtcgcacaaggtggtggtgaaggggaagaaggcggccgccgaccccatgagggtggtggagcgcgtgcagaagaagaccggccgcaaggtggagttgctgtcgccgatcccgccgccaacgccgccggaggagaagaaggcagaggaggagcccgagccgccaaagccggaggagaagaaggagccgccggtgatcgccgtggtgctgaaggtgcacatgcactgcgaggcctgcgcccaggggatcaggaagaggatcctcaagatgaaaggtcggtgctcccactgccatcattttttattttatttttggtatggtcgttttcatgcatttgtacccatatcattagtaccaccctgcatacatccacatgtcctgttctggagtagctataagtgtgacgattattcaggcattattcagctttgcccaaaccaccctctgctcgttttcttattgatgagttgaaatgattcggagcacatgcattaattgacgcatctttttcagagtggtgaatgaatggatgcatacaaacatacgagtttgtcgaggcatgaataaactcatccacccacccatacccaccccacccgttgtgaaccagctagaaacaatgatgcatcgtgttgttgtgtcgtcgtcgtcgttgatgcatgcatgggcgtggtgtgcaggcgtgcaatctgcagagccagacctcaaggcgtcggaggtggcagtgaagggcgtgttcgaggagtccaagctggcggagtacgtgtacaagcgcaccggcaagcacgcggccgtcgtcaagtccgagccggtcccggcgccaccgccggagagcggcgccggcgacaacacgggggccaaggaggaggagaaggggcaggaggaggagaaggagaaggaaggaggaggcgatggcggtggcgaggagaagaagaaggaagggggcaaggaggaagagaagaaggacggcgagaagcaggaggaggagaaggagggcggcggtggcggcgagaaggtggaggaaaaggagggagataaagacgctgccgctgccgccgccgccagcatgtacatgcactacccgaggttcccgttcccgggaggctactacgcgccgcctccggggtacgtctaccagccggtgtacccggcgccggcgtacgcggcgtacgcgccgccgcaccaccagcccatggcgccgcagatcttcagcgacgagaaccccaacgcatgctccgtcatgtaactaaaaaacagaaggagccttggcgagagagggggagaaaaggaaaaaaaaagaataataagaaggtgggaagagcgagggagctgcgtgcataagccagagccagaggtagggagggaggtcccctgagagaaatgcagcatccagcagtgtcccctgagcgaagcaaatgggcaactttgtttgaaacaaaacaaaaatacccagctttttcggggggggggggggggggaggaggggcgggtagatttcgctcttattttttttcttctttcttttgtaattttaacccttcctttcatcttttttttcctggtgtaaagtaagcgtggactttgtcggtttatggacgctagctatctttatgtaggatgatgccttggcatgtactgcttgcagcttcagacttcatatataaaactgtatgtattataaa

SEQ ID NO: 107463 - DNA, 3966 bp, Zea Mays
cgttcccatcctcctttcccgaacaaccggagcgcggcgcgagacaggcctctactccccgtctcccccgctccagctgacctcgcccactgtaagccccgcccgctcgttgcgccctccgtgccggattccgtcacgcggttttctgtcgtgatccgatcggttgtttgctgcggaatcagcttagtgattgttcttaattctctagggttgtggggagagatcgcgttcatcagtgccctgtacggagtgaccgatctcggatgaggaccgatatgccagttttgctgtgattattgatctgtgcggtgcgtaatcgatcgagatttagtttgatttgggaagcccagaagcagtacgtgcgaaattcagttcccttccacgagcccccttccactggaatttcggtgcctaatttgttgttgttcctgccgctctctatatagagatcttaatcaaatctcctgttctggtgcagagggggacgtgcgatcgatcacgtgcgcggcgactgatggcaggctagattccggcaatccacagtcagacacatacattttgcgatcgatttttggtgaagcgaccttgatctgaaaatggggctgttccgggcggcgtccggtctggctcgtttggcgctgcggcggaacctctcgcgcgccgcagcgagccccttcgccggcagcggtggcgccgtcccgggtgcaatgccggcgcggtacttccactccacacgcccgcgcaggttcgccgcgcccgcgccccgtgcggtgccgctctcgcgcctcaccgacagcttcctcgacgggaccagtagcgtctacctcgaggagctgcagcgagcatgggaggccgaccccaactccgtcgacgagtcctgggacaactttttccgcaacttcgtcggccaggctgccgccacctcgcctggcctctccgggcagaccatccaggagagcatgaggctgctgctgctcgtaagggcgtaccaggtgagcggccacctgaaggccaagctcgacccactggggcttgaggagcgcccagtcccggatgtgctggacccggggttctatggattctctgaggcagacttggaccgtgaattcttccttggggtgtggatgatggctgggttcttgtccgagaaccggccagtgcagacactgcgttccgtgctggagcggctcgagcaggcttactgcggcaccattgggtatgagtacatgcacatacctgacagggagaagtgcaactggctcagggataggatcgaaacagttaacccaagggagtacacttatgatcgtcgtcaggtcatgctggataggcttatctggagtacacagtttgagaatttcttggcgaccaagtggacgactgcaaaacggtttggtcttgaaggcgctgagactctgatccctggcatgaaggagatgtttgacagagcagctgatcttggtgtagagagtattgtcattgggatgccgcacagaggcaggttaaatgtcttgggaaatgttgtgaggaagcccttgcgacagatatttagtgagtttagtggtggtaccaagcctgtcaatgaaggggaggggttgtatacaggtactggtgatgtcaaataccatcttggaacttcatatgacaggcctaccaggggcgggaaacatatccatctgtcactggttgcgaacccaagtcatttggaagcagtcgatcctgttgttgctgggaagacaagagcgaaacagtactattccaatgaccgtgacaggaccaagaatttgggtgtgttgctgcatggtgatggtagtttctcagggcagggcgttgtgtatgagacactgcatctcagtgcccttgaaaactacaccactggtgggacaatacatatcgtggtcaacaatcaggttgctttcactactgatccaaggtcagggagatcctctcagtattgcacagatgtagcgaaagcattggatgcgccgatttttcatgttaatggtgatgatttggaggccgtggttcatgtctgtgagctcgctgcagaatggcgacagacatttcattcagatgtagtggtggacattgtatgctaccggcgatttggccataatgaaattgatgagccgtccttcacccaacctaagatgtacaaggtgattaggaaccatccaagtgcgcttgagatttatcaaagaaagttgttagagtctggaaagatctcaaaggaagatattgataagttaaacaagaaggtcagcactatacttaatgaggaattccagaacagcaaggactatgttcccaacaagagggactggctttcagcttactggactgggttcaagtcaccagagcagatttcgcgtatccaaaacactggagtcaagccagagattctaaaacgagttggagaagccatgactactctaccagaaaatttcaatcctcacagggctgtgaagaagattttttatcagaggcgtcagatgatcgagactggagaaggcattgattgggcagttggtgaagcacttgcttttgctactcttatcattgaggggaaccatgtcaggttaagtggtcaggatgttgagaggggtacatttagccaccgtcattctgtcctccatgaccaagaaactggagagcagtactgcccactggatcatcttgttatgaaccaagatgaggagctttttactgtgagcaacagttccctgtcagaatttgctgttttgggctttgaattgggttactctatggagaacccaaactcattggtcatatgggaagctcagtttggtgatttttccaatggagctcaagtgatatttgatcagttcctgagtagcggggagtcaaaatggctccgccagactggccttgtggtttgtcttcctcatggatatgatggccaggggcctgaacattctagtgcaagattggagcgctttcttcagatgagtgatgacaacccttatgttatacctgagatggatccaacactgcggaagcaaatccagcagtgcaattggcaagtcgttaatgtaacaactcctgcaaattatttccatgttctgcgtcgccagatacaccgggactttaggaaacctttgattgtgatgtccccaaagaacctccttcgccacaaggactgcaagtcgaacttatctgaatttgatgatcttgcgggccaccctggattcgacaagcaagggacacgcttcaagcggctcattaaagaccagaataatcacaaggacctcgaggagggaattaaccgtctagttctttgctctggaaaggtgtactacgaactggatgaagaaagaaggaagacggagcgcactgatgttgctatatgtagagttgagcagctctgcccattcccctatgacctcatccagcgcgagttgaagagatatccaaatgctgagatcgtgtggtgccaggaggagccgatgaacatgggagcgtacagctacatcaacccccggctgctgacggcaatgaaggctctgggccgtggtggcatcgaggacatcaagtacgtcggcagggccccgtcggctgctactgctacgggcttctactcggtgcacgtgcaggagcagacggagctggtgcaaaaggccctgcagcgcgaccccatcaactacccgttctgaaagaaacgagacccctgtaaattcttggaaaattgggcaccttttgattttgatatacctctatagagagagcaggccttaaggtatgcctgtgctgctgtgcagccatttgttgaaataatcgtttcggactctacagtaccgcattatatagtttataattccatgataaatattgtataagtaattattgattaattaatattatttacttcctccgtccacaaatgtttatcgttatgatattcgtgctagaagtttaactgaatttatagaatatataagtgatatt

SEQ ID NO: 107464 - DNA, 3434 bp, Zea Mays
cgttcccatcctcctttcccgaacaaccggagcgcggcgcgagacaggcctctactccccgtctcccccgctccagctgacctcgcccactggttgtggggagagatcgcgttcatcagtgccctgtacggagtgaccgatctcggatgaggaccgatatgccagttttgctgtgattattgatctgtgcggtgcgtaatcgatcgagatttagtttgatttgggaagcccagaagcaagggggacgtgcgatcgatcacgtgcgcggcgactgatggcaggctagattccggcaatccacagtcagacacatacattttgcgatcgatttttggtgaagcgaccttgatctgaaaatggggctgttccgggcggcgtccggtctggctcgtttggcgctgcggcggaacctctcgcgcgccgcagcgagccccttcgccggcagcggtggcgccgtcccgggtgcaatgccggcgcggtacttccactccacacgcccgcgcaggttcgccgcgcccgcgccccgtgcggtgccgctctcgcgcctcaccgacagcttcctcgacgggaccagtagcgtctacctcgaggagctgcagcgagcatgggaggccgaccccaactccgtcgacgagtcctgggacaactttttccgcaacttcgtcggccaggctgccgccacctcgcctggcctctccgggcagaccatccaggagagcatgaggctgctgctgctcgtaagggcgtaccaggtgagcggccacctgaaggccaagctcgacccactggggcttgaggagcgcccagtcccggatgtgctggacccggggttctatggattctctgaggcagacttggaccgtgaattcttccttggggtgtggatgatggctgggttcttgtccgagaaccggccagtgcagacactgcgttccgtgctggagcggctcgagcaggcttactgcggcaccattgggtatgagtacatgcacatacctgacagggagaagtgcaactggctcagggataggatcgaaacagttaacccaagggagtacacttatgatcgtcgtcaggtcatgctggataggcttatctggagtacacagtttgagaatttcttggcgaccaagtggacgactgcaaaacggtttggtcttgaaggcgctgagactctgatccctggcatgaaggagatgtttgacagagcagctgatcttggtgtagagagtattgtcattgggatgccgcacagaggcaggttaaatgtcttgggaaatgttgtgaggaagcccttgcgacagatatttagtgagtttagtggtggtaccaagcctgtcaatgaaggggaggggttgtatacaggtactggtgatgtcaaataccatcttggaacttcatatgacaggcctaccaggggcgggaaacatatccatctgtcactggttgcgaacccaagtcatttggaagcagtcgatcctgttgttgctgggaagacaagagcgaaacagtactattccaatgaccgtgacaggaccaagaatttgggtgtgttgctgcatggtgatggtagtttctcagggcagggcgttgtgtatgagacactgcatctcagtgcccttgaaaactacaccactggtgggacaatacatatcgtggtcaacaatcaggttgctttcactactgatccaaggtcagggagatcctctcagtattgcacagatgtagcgaaagcattggatgcgccgatttttcatgttaatggtgatgatttggaggccgtggttcatgtctgtgagctcgctgcagaatggcgacagacatttcattcagatgtagtggtggacattgtatgctaccggcgatttggccataatgaaattgatgagccgtccttcacccaacctaagatgtacaaggtgattaggaaccatccaagtgcgcttgagatttatcaaagaaagttgttagagtctggaaagatctcaaaggaagatattgataagttaaacaagaaggtcagcactatacttaatgaggaattccagaacagcaaggactatgttcccaacaagagggactggctttcagcttactggactgggttcaagtcaccagagcagatttcgcgtatccaaaacactggagtcaagccagagattctaaaacgagttggagaagccatgactactctaccagaaaatttcaatcctcacagggctgtgaagaagattttttatcagaggcgtcagatgatcgagactggagaaggcattgattgggcagttggtgaagcacttgcttttgctactcttatcattgaggggaaccatgtcaggttaagtggtcaggatgttgagaggggtacatttagccaccgtcattctgtcctccatgaccaagaaactggagagcagtactgcccactggatcatcttgttatgaaccaagatgaggagctttttactgtgagcaacagttccctgtcagaatttgctgttttgggctttgaattgggttactctatggagaacccaaactcattggtcatatgggaagctcagtttggtgatttttccaatggagctcaagtgatatttgatcagttcctgagtagcggggagtcaaaatggctccgccagactggccttgtggtttgtcttcctcatggatatgatggccaggggcctgaacattctagtgcaagattggagcgctttcttcagatgagtgatgacaacccttatgttatacctgagatggatccaacactgcggaagcaaatccagcagtgcaattggcaagtcgttaatgtaacaactcctgcaaattatttccatgttctgcgtcgccagatacaccgggactttaggaaacctttgattgtgatgtccccaaagaacctccttcgccacaaggactgcaagtcgaacttatctgaatttgatgatcttgcgggccaccctggattcgacaagcaagggacacgcttcaagcggctcattaaagaccagaataatcacaaggacctcgaggagggaattaaccgtctagttctttgctctggaaaggtgtactacgaactggatgaagaaagaaggaagacggagcgcactgatgttgctatatgtagagttgagcagctctgcccattcccctatgacctcatccagcgcgagttgaagagatatccaaatgctgagatcgtgtggtgccaggaggagccgatgaacatgggagcgtacagctacatcaacccccggctgctgacggcaatgaaggctctgggccgtggtggcatcgaggacatcaagtacgtcggcagggccccgtcggctgctactgctacgggcttctactcggtgcacgtgcaggagcagacggagctggtgcaaaaggccctgcagcgcgaccccatcaactacccgttctga

SEQ ID NO: 107465 - DNA, 2664 bp, Zea Mays
ccccatcccgcgcgtccatcttggtcaagaaaccccaacggcgcgtcgcccccaaaccttagaccccctgcggaaatctctagagccagggtctatccatgggccatcgctgtgcgccagctcttgctccatctctccgcggcggcagcgcaacagccgcccccatgaaagtcgccatcctcaccccccgcgagcctgccccatcccgcttagcgtcgtcccccgccgctgcgcagccgcgacccatctggataaggatgcatccgcttctcccatagccgccactacccctgcctgccctctgctacgaacacgaagataccctggatggaggtggagctctcagaggcttaagatctagaactctatcgcgtactacggattccacagggtgaggagagatacgagcaggtgtcccaccggcgatgcgggtccaatcttcggcattgggagcaatccgcctactcgaccacgaaggttctctgaggcggtgtagccagagatcatgcgggcaacagggaaggacgatagctacgcagcccacatcacgaaggcatataagtgggagttcgccgaaagggaaggtttgcaactggttgtgctaaatccagggactactctgggcccatttttcatgtcatcagtcaataccagcctgaataatctattgcaactcctaagagggtgggtctatcaaggaggacaaacaggttggttgatgagagcaaaggagctttccaagaagttgattgatctgggcatttgtttccttccgtttgatgtgaccatcagggagaccgtcgattgcttcagaagcaaagggctcatctagccctgtgaacatttccagatgtaccagggttactattgcttactagaatgaggcgagagctgcttagctcctttgacattccttctacttagtggcaattggtttggttacttgaacctatgctccatatgatccacgctgattgaattttggtttgttaatacattttgggcaagcagtgctatgagatggagatgatggttaggcatgatctttctataggttaaaagaacagattatccaacagctgatggaacctgcattagagatattatgttgatgtcacaaatttagttgatgctcatgtgaaagcgctcaacaaggcagacactagaaaagtcagtatttacaacgttggaacaggaagaggtttggtaacacgagaattgtttatttatttgtataactattatttattcatatggatagttgtaccctgcacaggttttaatcagtactttacttaatttacatggtaacaagatagagaggcccgcaaatagttaatctgggacaacatatctctgtactggccatagaggacaacaaaaaaatcaaaagttgaagaatcaccaacggtgcctcctttgcaccctccggctcaagaacctaggcccgagccagttcaacaagtcatgcccacagctgaagtgctgaaccaacagatttactgggaatcaatgaatcagcccgaggcacatctgaaatagatcaaaacaaggtagtcgccttggtcgtggttccacatgataatccgccaaaagcaccttcttctaccagtcctggaagcgtggtgactagctggagcaattcagattctgtgcgttgaaaaggaagtgaaagaggtatatcttgtttacattaaaatatcaaagtactttgcagattttatttcagctctgttgcatgatgcactcgcactactgtctactgcaagtaccatcaccataaactctgaacgctctatgttcggtttcatctttttctttaactagattcgctttcctgtttcttataggctattgttcaggtactaatttgccatagtgttggtctatgactgaatggtacaaaatgcatgcaatgaatggatgatactttccagttaaatcatgtaattggaatacagtggtgccgtcagtggtgcggattgggggcttctagagaaagggtctagcgtcgtgcccttcttgacgaacagtgtgttgatgtgtgccatcatcgcactgggaacgaacgtgatggctagcacggggagcatcttgagcatctgctttgtctccaccactcaccatgctctgagcctgtgttggtatgcagacttttccctttgtttcagaagaagatgcagttgcattgcacattgttagaacccacgatcaccacaaaattgagggaatatgtcataactcattagtcattaccttgtcaaggtttatgctttccatcacgaacggttggagttgcaacataacgatactttggtataccaaataaagttactctattcaccaaatcatgcagtgttagttttttgttgtgctaaatactgaatataatttgggtgtgttaatattttatttattgtctgcacatggttttctgatgatggctcatgaatcctgtaaaatacgtgttaggatttggagatccatgcgggcactaccacagtccatagggtgctcatctcttgtgttcttggctcttgcaagcattaggtcgtttctaaaatcacattggcacaatgaactctatggtgtttgaggttgctgaattggatggagcaacaatgatttgtcgcactaacagtaaaagaaacggttacttgttgg

SEQ ID NO: 107466 - DNA, 2217 bp, Zea Mays
ccccatcccgcgcgtccatcttggtcaagaaaccccaacggcgcgtcgcccccaaaccttagaccccctgcggaaatctctagagccagggtctatccatgggccatcgctgtgcgccagctcttgctccatctctccgcggcggcagcgcaacagccgcccccatgaaagtcgccatcctcaccccccgcgagcctgccccatcccgcttagcgtcgtcccccgccgctgcgcagccgcgacccatctggataaggatgcatccgcttctcccatagccgccactacccctgcctgccctctgctacgaacacgaagataccctggatggaggtggagctctcagaggcttaagatctagaactctatcgcgtactacggattccacagggtgaggagagatacgagcaggtgtcccaccggcgatgcgggtccaatcttcggcattgggagcaatccgcctactcgaccacgaaggttctctgaggcggtgtagccagagatcatgcgggcaacagggaaggacgatagctacgcagcccacatcacgaaggcatataagtgggagttcgccgaaagggaaggtttgcaactggttgtgctaaatccagggactactctgggcccatttttcatgtcatcagtcaataccagcctgaataatctattgcaactcctaagaggttgaaaattaaccaggccaacgtcttgagttggaccctgtcaacacagggtgggtctatcaaggaggacaaacaggttggttgatgagagcaaaggagctttccaagaagttgattgatctgggcatttgtttccttccgtttgatgtgaccatcagggagaccgtcgattgcttcagaagcaaagggctcatctagccctgtgaacatttccagatgtaccagggttactattgcttactagaatgaggcgagagctgcttagctcctttgacattccttctacttagtggcaattggtttggttacttgaacctatgctccatatgatccacgctgattgaattttggtttgttaatacattttgggcaagcagtgctatgagatggagatgatggttaggcatgatctttctataggttaaaagaacagattatccaacagctgatggaacctgcattagagatattatgttgatgtcacaaatttagttgatgctcatgtgaaagcgctcaacaaggcagacactagaaaagtcagtatttacaacgttggaacaggaagagatagagaggcccgcaaatagttaatctgggacaacatatctctgtactggccatagaggacaacaaaaaaatcaaaagttgaagaatcaccaacggtgcctcctttgcaccctccggctcaagaacctaggcccgagccagttcaacaagtcatgcccacagctgaagtgctgaaccaacagatttactgtagggaatcaatgaatcagcccgaggcacatctgaaatagatcaaaacaaggtagtcgccttggtcgtggttccacatgataatccgccaaaagcaccttcttctaccagtcctggaagcgtggtgactagctggagcaattcagattctgtgcgttgaaaaggaagtgaaagaggctattgttcaggtactaatttgccatagtgttggtctatgactgaatggtacaaaatgcatgcaatgaatggatgatactttccagttaaatcatgtaattggaatacagtggtgccgtcagtggtgcggattgggggcttctagagaaagggtctagcgtcgtgcccttcttgacgaacagtgtgttgatgtgtgccatcatcgcactgggaacgaacgtgatggctagcacggggagcatcttgagcatctgctttgtctccaccactcaccatgctctgagcctgtgttggtatgcagacttttccctttgtttcagaagaagatgcagttgcattgcacattgttagaacccacgatcaccacaaaattgagggaatatgtcataactcattagtcattaccttgtcaaggtttatgctttccatcacgaacggttggagttgcaacataacattcatggtagtaaattgggacagggctaatatagtgatgtatttccttccatagcaaacatcaatgatggcttatgggcttgtcttatgtagcgcttctgatttacaatgcatctgtctgaacttgtgtgctctaaaacataca

SEQ ID NO: 107467 - DNA, 2222 bp, Zea Mays
ccccatcccgcgcgtccatcttggtcaagaaaccccaacggcgcgtcgcccccaaaccttagaccccctgcggaaatctctagagccagggtctatccatgggccatcgctgtgcgccagctcttgctccatctctccgcggcggcagcgcaacagccgcccccatgaaagtcgccatcctcaccccccgcgagcctgccccatcccgcttagcgtcgtcccccgccgctgcgcagccgcgacccatctggataaggatgcatccgcttctcccatagccgccactacccctgcctgccctctgctacgaacacgaagataccctggatggaggtggagctctcagaggcttaagatctagaactctatcgcgtactacggattccacagggtgaggagagatacgagcaggtgtcccaccggcgatgcgggtccaatcttcggcattgggagcaatccgcctactcgaccacgaaggttctctgaggcggtgtagccagagatcatgcgggcaacagggaaggacgatagctacgcagcccacatcacgaaggcatataagtgggagttcgccgaaagggaaggtttgcaactggttgtgctaaatccagggactactctgggcccatttttcatgtcatcagtcaataccagcctgaataatctattgcaactcctaagagggtgggtctatcaaggaggacaaacaggttggttgatgagagcaaaggagctttccaagaagttgattgatctgggcatttgtttccttccgtttgatgtgaccatcagggagaccgtcgattgcttcagaagcaaagggctcatctagccctgtgaacatttccagatgtaccagggttactattgcttactagaatgaggcgagagctgcttagctcctttgacattccttctacttagtggcaattggtttggttacttgaacctatgctccatatgatccacgctgattgaattttggtttgttaatacattttgggcaagcagtgctatgagatggagatgatggttaggcatgatctttctataggttaaaagaacagattatccaacagctgatggaacctgcattagagatattatgttgatgtcacaaatttagttgatgctcatgtgaaagcgctcaacaaggcagacactagaaaagtcagtatttacaacgttggaacaggaagaggtttggtaacacgagaattgtttatttatttgtataactattatttattcatatggatagttgtaccctgcacaggttttaatcagtactttacttaatttacatggtaacaagatagagaggcccgcaaatagttaatctgggacaacatatctctgtactggccatagaggacaacaaaaaaatcaaaagttgaagaatcaccaacggtgcctcctttgcaccctccggctcaagaacctaggcccgagccagttcaacaagtcatgcccacagctgaagtgctgaaccaacagatttactgggaatcaatgaatcagcccgaggcacatctgaaatagatcaaaacaaggtagtcgccttggtcgtggttccacatgataatccgccaaaagcaccttcttctaccagtcctggaagcgtggtgactagctggagcaattcagattctgtgcgttgaaaaggaagtgaaagaggctattgttcaggtactaatttgccatagtgttggtctatgactgaatggtacaaaatgcatgcaatgaatggatgatactttccagttaaatcatgtaattggaatacagtggtgccgtcagtggtgcggattgggggcttctagagaaagggtctagcgtcgtgcccttcttgacgaacagtgtgttgatgtgtgccatcatcgcactgggaacgaacgtgatggctagcacggggagcatcttgagcatctgctttgtctccaccactcaccatgctctgagcctgtgttggtatgcagacttttccctttgtttcagaagaagatgcagttgcattgcacattgttagaacccacgatcaccacaaaattgagggaatatgtcataactcattagtcattaccttgtcaaggtttatgctttccatcacgaacggttggagttgcaacataacattcatggtagtaaattgggacagggctaatatagtgatgtatttccttccatagcaaacatcaatgatggcttatgggcttgtctta

SEQ ID NO: 107468 - DNA, 918 bp, Zea Mays
ccccatcccgcgcgtccatcttggtcaagaaaccccaacggcgcgtcgcccccaaaccttagaccccctgcggaaatctctagagccagggtctatccatgggccatcgctgtgcgccagctcttgctccatctctccgcggcggcagcgcaacagccgcccccatgaaagtcgccatcctcaccccccgcgagcctgccccatcccgcttagcgtcgtcccccgccgctgcgcagccgcgacccatctggataaggatgcatccgcttctcccatagccgccactacccctgcctgccctctgctacgaacacgaagataccctggatggaggtggagctctcagaggcttaagatctagaactctatcgcgtactacggattccacagggtgaggagagatacgagcaggtgtcccaccggcgatgcgggtccaatcttcggcattgggagcaatccgcctactcgaccacgaaggttctctgaggcggtgtagccagagatcatgcgggcaacagggaaggacgatagctacgcagcccacatcacgaaggcatataagtgggagttcgccgaaagggaaggtttgcaactggttgtgctaaatccagggactactctgggcccatttttcatgtcatcagtcaataccagcctgaataatctattgcaactcctaagaggttgaaaattaaccaggccaacgtcttgagttggaccctgtcaacacagggtgggtctatcaaggaggacaaacaggttggttgatgagagcaaaggagctttccaagaagttgattgatctgggcatttgtttccttccgtttgatgtgaccatcagggagaccgtcgattgcttcagaagcaaagggctcatctagccctgtgaacatttccagatgttaaaagaacagatta

SEQ ID NO: 107469 - DNA, 3009 bp, Zea Mays
cgcaattctgggggctggccccccgaattagcgcgcctcccggagatccggcgccggcccaggcagtgaagatttctaatctggatgtacttaactgcaggctaaggcaatgaagatttctaatctggatgcacacttaatcttgtccagttcttgatcttgggctttgctgcttcctctcaagttagtttgttggccaatcgagtccagaggcgcagatgagtgaggagtacaatatggatgtggccctaaaagccaaaaatgttgctgagaccaagttccatgcccgagacatcaggggtgctcggaagtatgcactcaaggcccagaatctctgcccaacacttgaaggcatattgcagatggtctcaacgcttgaagttcatcttgcagctgagtccaagattgatggagagagtgactggtataggatattgtgtctaggtgcctttgcagatgaagaggaggtgaggaagcaatataggaagctagctctgctgctgcacccagacaagaacaagtctgttggtgctgaggaggccttcaaactgatctctgaggcgtggagtgtgttgtcagatactagcaggaaggtagtttatgatgagaagcgaagaaatcattctgttgtcaatgtaaccaatggcatttatacctatgataagaaggcaaacaagagggctcgaaagaatgctgctgctgcagctgctgccgctgctgctgccgctgcagctgaggctactactcgtcctgttgggattgatacattttggacatcttgcaaccgctgccggatgcagtatgagtacttaaggatttatcttaatcataacctgttgtgcccaaattgccataatgcattcttggcagtggagactgggttcccttgcaatggaagcagctcatcattctcatggtcaaccaagcagcagccgcagcagaaccacaattcaaccaagcattcatatggctcaacaagcaggacttctagcatccctggtacagggaatggggggtaccagcaagataatacttatgattcttacaacaatcaaggcttccagtggaatcagtactccaagacaacaactgcagctgttactaatgcttatagtacacaggccttggagaaacagagaaggaagcatgacgagagctacagctacaactattctgaaagcggcaacacatatgttcatgagaaagctgcttcaaggcgcggtcgcttctcaaagcggagaaggcataactatgatgcttataccactgtggattatggtggcgataacaaagaaacagttgctgcaactgcaagcacagaaccaactgctgtttttactgatgtgggacgggtcaatggtacttcagtggaaaggtttaaatctgcagtgagtggaagaagagcaaatattctgggtgagattacccagattgatacacgaaatttacttcttgagaaagccaaggcaactgtctgtgaaaaattgcatgaattaaacatcacaccatcttcacgagctgcagatagaagaggatctgaaggaaagctgtatccttgtgacaacaacataaaggtcaacggtgtcctctctgacaaacctggcaagggagtcaagctatgcaactcaagaagcatggaaatccaagtgcctgctaccgatgacaaaaatccagagcaacgccgtgtgcctgtgtccatcgatgtcccagaccctgacttccatgatttcgataaagaccgaacggagaaggcttttgatactgatcaagtatgggctacctatgactgcgaggacggcatgccccgcctatatgtaatggttcagaaagttctttcaacgaggcccttccggatccgcatgagctttctcaactcgaagtcaaatatcgaactggcgcctataaactgggtcgcctctggtttccaaaagacatgtggtgacttcagggttgggagatatcaggtgagcgaaacggtgaacatattttcacatagagtgaggtggactaaaggtccccgtggcatcatcaggatcgttccccagaaaggggacacgtgggccttgtaccgtaactggtcccccgactggaacgagctgacgcctgatgacgtgatatacaagtacgagatagtggaagtcgctgatgatttcactgaggagcgagggctgactgtcatcccgttgctgaaggttgccggattcaaagccgtcttccacagacacgtggatcccgaggaggtgaggaggataccaaaggaagagctgttccggttctcgcaccgggttccttctcgtctcctgacgggcgaagagggcagcaatgccccgaaaggctgccatgagctggaccctgctgccactccagtggaccttctcaaggttatcacggagcacaaggaagacgcggtggcgcagagtcctaaataggagtgagcgactccgataacagcgaagataaggtagctggatgtctgagtgaccagatccccacttggttaatgacagcgtgccagcacatgatggtgtctaaagctctactacgccatcttattttcggctgatggcttggacaacacttccagggcaagcagcctgtgtgtgtgtgtgacggacttctgaccttgttaattcttaggcattcctaacatttgattctatcactacacaagccaaccgccacgtagattaaatggccattgggaggaggccggccgcgcacggcaccgagatgagatgaggaggttagtcacggaggtagggagggtgaagatgttacttgtttgtgttgctcactctgtaatgtaggaggcaggctcgagccgagggaaagagctgcttggctttgcttgcccatgtaccccgcatttctgtacctgtttttttacttatgatgatgatgatgtatttccttcttgttttatagtagtaagtaattcacggccagtaattgtagactctggtaaccgtttcggaaaatctagtgctttatctggtggatgattctgtc

SEQ ID NO: 107470 - DNA, 2501 bp, Zea Mays
ccctgtcccctggctcccatccctcgtcattcatccttgtgtttgttcagcgggaggtgtcctgttaccctgtccctgttcttctcgttcctgcctcttgcagaattttggaaacaggttgtggcggcgttcaagcctgtaaagctctcccttttccgatccacatcatctctgcattttgggaaacaggttgtttgcatttcataatcagagcccacccttttccagcggactaatccttccttgttttgcgctaaagcagtccagttagcattgctcactcataaagtctgttgaggcagcgttgagctctttctgcagtgtgtattccttgcttcccgcaatccaaagacgcctcctttcctcgtctccaaatccgcaaagttttcgtccatttggcaatctcgtcagtgcttgtcaagctctagaatcaaagcctgatcccaacttctgcgccaaaatcccatctttagtgattccgtccagtccgatggggacgctcggggacagactgcgggccttctcgacgaaccggtggctggtgttcgtcgccgcaatgtggctgcagtccatggccggcatcgggtacctctttggcaccatctcgccggtcatcaaggccgcgctgggctacaaccagcgccaggtggccgcgctcggcgtcgccaaggacctcggcgactgcgtcggcttcctcgccggctcgctctcggccgtgctgccgtcgtgggcgatgctgctcatcggctccgtgcagaacttcctcggctacggctggctctggctcatcgtcaccaggcaggcgccggcactgcccctctggatgatgtgtgttcttatctatgttgggaccaacggcgagacattcttcaacacaactgcacttgttacatgcatccagaacttccccaagagtagaggtcaaacagtgggtattatgaaaggatttgcgggccttagcagtgcaatcttgacacaactatatgccgtaatgcacacacccgaccatgcaacacttgtattcatggttgcagttggtccatcattggttgccattggtctgatgtttattattaggcccgttggaggtcaccgccaggtgcgtccatccgacaagaacagcttcttgttcatctacactatctgcttgctcctcgcctcatatcttgtcggcgtcatgctagtccaagatttcatgcaactgagtgacaatgtggttaattttctcactgtcattctactcatacttcttgttttaccaatcgtgatccctgtgaccttgacactgtcatccaaaacacaacatccaattgaagaggctctcctttctgatccatcaaaaggagagacaagcacttcacaagagaaagaggatcaaccagaggtcattttaagtgaggtggaagaggagaagcctaaggacattgattcattacctccatctgaaaggagaaagaggattgaagagttgcagaccaagttagtgcaagctgcagcaaggggtggggttagaattcggaggcagccacgccgaggtgaaaacttcaccctggtgcaggcattggtgaaggctgatttttggcttatttggtggtcgctcttacttggatcaggatcaggtctgacagtgatcgacaatatgggtcagatgagccaggctgttgggttcaaagatgggcatatttttgtgtcattgacgagcatatggaatttccttggtcgtgttggaggtggctacttctctgagattattgtcagggaacacacatacccaaggcacatagcgctggtaatttgtcagatcctgatggctgttgggcatttcctcttcgcaatggcttggcctggaactatgtacgttggaaccttcctggttggactcggatatggagctcattgggctattgtgccagctgctgtctctgaactttttggcgtaaaacacttcggtgcaatgtacaacttcctcacagtagctaaccccgcagggtcactcgtcttctcaggccttattgctagtaatttatatgactatgaagctgagaaacaagcgcagcgccgtcagataacatctctgacatctccaagattgtttcacagcatgggttttcttgcagatggaacactgaagtgtgaaggagctgtctgcttttttgtgagctcactgattatgtcagcgttctgtgttgttggagctggcttaagcctcatagttgtttacagaactagaagggtttatactcacctctatggttcaaaccgcacatgaaaattccacggagataggatatgccatttcctcttgttccatgtaccatagcttttgcatatatgtgtcatacatacacaaaattaaagtttgcctgtatattctctaaacatttgagaggttttaccacacgaactgctgttcccaaatagaaatttatacacgcctcatgtgtcggatagctagactgtagttcaagcttggaccatgaattctgtaataaaggctttgt

SEQ ID NO: 107471 - DNA, 230 bp, Zea Mays
cttgtgtgagttctcgccacgctagccctagattaggttgcaagccgcattgcattgcaggccctccttgtttcatcatctggcgcttacctatttcttataccagggaggtttgtgcccctgtgctctatagccgccgctacggttcctaccaatttgtgccatggaaaaccataacttgaggtaccttccataaaacgagcataacttttcgctcggtgctccgtttg

SEQ ID NO: 107472 - DNA, 312 bp, Zea Mays
cccatttgtcatgatggtcagatagttgttgtctttataaggattcaaacaggatttagtattgctcataagctatttctgacattggggtgtgaaacaaattgtgagggtattccacatcttttgcatgtattattgtaatatccttattcctgacaaaagaaaaaagctcagggaaagcatattcaggcactcggttgtctcactagtccaaccatagttgtttagtcctgtcgtcctctatcatcaccctatagaaccccttgaaagtgttcattgtctttaatacatatttccaccagaaagatcaca

SEQ ID NO: 107473 - DNA, 2502 bp, Zea Mays
gtgcgtcgcttgtttgtctaccgtacttgcgtgtgcgtctcttgtttgcctgcgattgaaagccttctctgacctgtctccaaattggcattcctgagcaaaaatcccctgcaacccgacccatggccatgggcaagctcgaggagaggacgcgtgcgttctggacgaaccgatggcttgtgttcgttggggccatgtggatgcagtccatggccggcaccacttacatcttcggcgccatctcgccggtggtcaaggccaggctgggctacgaccagccgcaggtggccgcgctgggtgtcgccaagaacgttggcggctgcctcggcctcctcgccggcgcgctctcggcgacgtggccgccgtgggcgctgctggccatcggcgccgcgcagaacttcctcggctacggctggctctggctcgtcgtctccgggaacgcgccggcgctgcccctctggctgatgtgtgttgttatctttattggaacaaatggccagacgtatttcatcacggcttcacttgttacaagcatccagaatttcccaaagagcaggggcccaacagtgggcatcctcaaaggatttatgggcctaactagcgccattctgacacaagtttatacagtgatgcacacaccagaccatgctgcgcttatcttcatggttgctgttggtccgtcgctggttgccattggcttgatgtttgttattaggcctgttggtggtcacaggcagatacggccatctgacaagaacagcttcatgttcatctacactgtatgcttgctcctcgcctcataccttgtcggtgctatgcttgtccaagatttcctgcaaccaagctatgatgtggttgtttttctgactgtgattctgttcgtcctccttatttcaccaatcgcaatccctgtgattgtgtcgttcatgccggaaaaagctcaacatctcatggaagatgctctcctatctgaaccattgacaggagaggcaagcagttcacgacaaaaggaggatcaaccagaggtcattttaagtgaggtagaagaggagaagtctaaggaaactgattcattgccgccatctgaaaggagaaagaggattgcggaattgcaggccaagctagtggaagcagcggcaagaggtggggttagaatcaaaagaaggccacaccgaggggataacttcaccctgatgcaggcattggtgaaggctgatttttggcttatttggctatcacttttgcttgggtcgggatcagggctgacagtgattgataacctgggtcagatgagccaggctattggttataaaaatgcacatatctttgtgtcactggtgagcatatggaactttcttggtcgtgttggaggtggctacttctctgagatcattgtcagggaacgtacatacccaaggcacatagcattggcagttgctcagatcgtgatggctgctgggcatttcctctttgctatggcttggcctggaactatgtacattgcgagcttgctggttggacttggatatggagctcactgggctattgtgccagctgctgtctccgagctttttggtgtaaaacactttggtgcgatgtacaattttctcatactagcgaaccccgcaggatccctcatcttctcagagctaattgtcagcaacctctatgaacatgaagctgagaaacaagctagccaacaccagatgtcagcattgctgtctccacgattgcttcgtgatactggctttcttgcagatgatgcactcaagtgtgaagggcctgcttgtttctttttcagctctctgattatgtcggtgttctgtgctgttgccgctgggttgagcctcctcgtcgttcaaaggaccagacaagtttatcctcgcctctacagttctgtccggacttgagattctccaattctgcatggatgggaagctcaaatcctcgtattctatgtccgtttattcttgcatacatatgcacaaagataagtatgtgaataaattctcaaatcttttcctaagctggtattgtaaaaacagatattcttgaatggattgtcccttgtgacttgcgtatggattctggcacttgctgtcctgaaaagaaactatccctctccttttttttgaagcaattactgtatggagttcctacaatatttttctattaaatatgggtatgtacaagtgtaagtattcaaattacaaggaaatcaactataaacatgatttaattttggctgctatttggggttttactctatgacaaagaatcatttcttttacaaacatttctttgcatattgtcgccatgggggtttattctcaaagatccatccatttctgcattttcatatgcaccaaaccatgatgatgataatctccatcctccaagttttcgttagttgcgcaggcatatgttgcacagctagaaattgattggaagtgcgcggtggtacaaccctatcagttgccagcatctttctgtataattgca

SEQ ID NO: 107474 - DNA, 2788 bp, Zea Mays
atgtccatatccattccacttccacccatccccgtggcttctgtctgctgcgaccctgctccactccgtctgcatcacctgtcacggttgtcacctccaccacggctccagctccacccgcgctggtttagggccgctgctgggcgggtgacgagcgcggctgtcggattccgccgagcctcagtatgcgggcagcgggcgcggcctccgcctccgccacaccagccctggcgttccccttgtcttcccctatatatacagatcggtctgattttactttttttgacatggctccatttatgcttactccctcacacccaaaattagtctccactctcgcattttgaaagaaaattgtatcaatatttctatcttcaaatagatttactacgaagattcatgacgtgattaatctaatgatgcttgtctgatatcataaatattactagtatgttttggtatagatttggccaaagttaatattgtttggcttatcgaagtgcgggatggagacttattttaggacaggacggagggagtacatcggagctgctcttgtgtcatgactgtgccacattatgccagaggggagtaaactatgcgagttttccattctgaaaacaagtgattcaacatatttcacgccacaccataaacggacacctcaaagttatgattttgctgtggatggctggcaactggtatcagcacaaaatctggttaccatcattatttgcatgtttccagctcaactgaaaatgatgtgcactgcatttgtttctgccttgtcttgctttattgtttttttccttttatcgtgttcctcttatttcaaggttaatgtacctactcttgcacgcccccccccctaacatcgctctggtttgattttagagaaataattaatgttaccatgaactcctcaagttaaaacttatcctatacatgccatgccagccatgagaccacaactgcaactcgtatgaataaaatggatatccttttacgttattctagtgttgtttttactcatccctcatattcaaatgaattgaacaaaagtacataactttattgtttattttctcaacctaacatgcaacatttcatcgttttcgtatccagatgtgtgttgttatctttattggaacaaatggccagacgtatttcatcacggcttcacttgttacaagcatccagaatttcccaaagagcaggggcccaacagtgggcatcctcaaaggatttatgggcctaactagcgccattctgacacaagtttatacagtgatgcacacaccagaccatgctgcgcttatcttcatggttgctgttggtccgtcgctggttgccattggcttgatgtttgttattaggcctgttggtggtcacaggcagatacggccatctgacaagaacagcttcatgttcatctacactgtatgcttgctcctcgcctcataccttgtcggtgctatgcttgtccaagatttcctgcaaccaagctatgatgtggttgtttttctgactgtgattctgttcgtcctccttatttcaccaatcgcaatccctgtgattgtgtcgttcatgccggaaaaagctcaacatctcatggaagatgctctcctatctgaaccattgacaggagaggcaagcagttcacgacaaaaggaggatcaaccagaggtcattttaagtgaggtagaagaggagaagtctaaggaaactgattcattgccgccatctgaaaggagaaagaggattgcggaattgcaggccaagctagtggaagcagcggcaagaggtggggttagaatcaaaagaaggccacaccgaggggataacttcaccctgatgcaggcattggtgaaggctgatttttggcttatttggctatcacttttgcttgggtcgggatcagggctgacagtgattgataacctgggtcagatgagccaggctattggttataaaaatgcacatatctttgtgtcactggtgagcatatggaactttcttggtcgtgttggaggtggctacttctctgagatcattgtcagggaacgtacatacccaaggcacatagcattggcagttgctcagatcgtgatggctgctgggcatttcctctttgctatggcttggcctggaactatgtacattgcgagcttgctggttggacttggatatggagctcactgggctattgtgccagctgctgtctccgagctttttggtgtaaaacactttggtgcgatgtacaattttctcatactagcgaaccccgcaggatccctcatcttctcagagctaattgtcagcaacctctatgaacatgaagctgagaaacaagctagccaacaccagatgtcagcattgctgtctccacgattgcttcgtgatactggctttcttgcagatgatgcactcaagtgtgaagggcctgcttgtttctttttcagctctctgattatgtcggtgttctgtgctgttgccgctgggttgagcctcctcgtcgttcaaaggaccagacaagtttatcctcgcctctacagttctgtccggacttgagattctccaattctgcatggatgggaagctcaaatcctcgtattctatgtccgtttattcttgcatacatatgcacaaagataagtatgtgaataaattctcaaatcttttcctaagctggtattgtaaaaacagatattcttgaatggattgtcccttgtgacttgcgtatggattctggcacttgctgtcctgaaaagaaactatccctctcctt

SEQ ID NO: 107475 - DNA, 621 bp, Zea Mays
atggccgtgggtgcggcggctccgcgacctggtacccgccggcctggtggacagagcggggagaaaggagttgtggtgcttcaatgtgttgttgatatgtatagtggcaaagcgaagatacaactgatagttttatgcagggtcacacttgctaatcagtcagtgtatgaagcgcaagttgttggatttgaccaggacaaggatgttgctgttttgcgtatcaaagcaccaaaggataaactaagacctatacctgttggtgtgtcagcagacctactggttggtcagaaagtatatgccattggaaacccagatgcaaacatacttgatgtgtttgtccgcagggtgcggcaaacatttgatacaagggaagaagcatacctcttttaccttgactatgcaaagttggctggttttagtgtcaggacaaagaggactagtaaagaaaccagacattgggtttgcaaccgtgaggggtttctgaagccaggtcaagagaaagaggggcgggggcggggaagtgaaaaggttctgtcgggagcgtgcgagagggacgaagacgaagcgtcgattcggcctaggtgtggcggttggctcggaccaggtggtcctggcgcgtag

SEQ ID NO: 107476 - DNA, 533 bp, Zea Mays
ggtgtctgatcattcatgcatgatcattaaggaaactaaagttgacaggaagtgtatagatgatttaggtttgccagtgcttctcatctaaggtatgtatcttttgttgtgcgcctaaagatatttctaggtatgtagcttttatttgtcttaactatattaagtatgtttatttcctggtttgaggtactaaaaacattttttgggttattattgatctgatacttttttcggtgaaacaaacctgcatttgaacatcatttgctatgtttctaacaaggttactcctctttttatgctatgtttgtaacatcatttgctctgctgaattttcatgcaacttaggttgccccttagatgggctcaaaataaggtggtttgaacgcatttgaatgttgaaactttgagttgggggaaccttccctttctccatcgacactcctatcaccattgattcttctaaaagagctagctaactgagtgtctccatcaaattcatttaaaccaccttaatatgatggaatacttattca

SEQ ID NO: 107477 - DNA, 1699 bp, Zea Mays
atggggaagctcgcggcgaggctgcgggccttctccaggaaccgatggctggtgctggtggccgcaatgtgggtgcagtccatggccggcatcggctacctcttcggcgccatctcgccggtgctcaaggcccgcctcgggtacaaccagcggcagctggccgcgctggccgtcgccaagaacgtcggcggctacgtcggcgtcgtcgctggcacgctctccgccgcgctgccggcgtgggcgatgctgctcatgggcgcggcgcagaacctcctcggctacggatggctctggctcatcgtcaccggacaggcgccgccgctgccgctctggatgatgtgcgtccttatattcgtcgggaacaacagcgccacgtacttcaacacggcgtcgctggtgacatgcgtccagaacttcccggcgagcaggggcccgatggtgggcatcctgaaggggttcctgggcctgacaagcgccatcctgacgcaagtctacgcggtgacgcgcgcgacagaccaggcctcgctcatcctgatcatcgccgtcggcccgtcgctggtcgccgttgccgtgatgctcgtcgtccggccggtcggaggccacctgcaggcgcgtgcatccgacagggtcagcttcgtgttcgtctacgccgtgtgcctgctcctcgcctcgtacctcgccggcgtcaagctggtccaagacttcctgcagctgtctgacggcgtggtcgtttctctcaccgtggttctgctcgtcctccttgtctcgccggttgcggtccctgtggccttgacgctgacgccggaagccgagtgtccgatccgggaggccctcctgtcgtcgtctgaaccactgacgggagaggggaacgcttcgcaagaatcgcctccatgcgcatctgagagcgggggcaggccggcaccgtacctgggggagaacttcaccatgatggaggcactggtgaaggctgacttttggctgatctgggtgtcgtttttgcttgggtcgggatcagggctgacggtgatggacaatctgggccagatgagccaggctcttgggttcgaggatgcgcatatcttcgtgtcgttgacgagcatatggaacttccttggtcgtattggaggtggctacttctctgagatcattgccacgcaacgagcatatccaaggcacatagcactggcatttgctcaggtgctgatcgccgctgcgcacttcctcttcgccatggcctggcctggaactatctacatcgggaccttcctagtcgggctcggatacggagctcactgggccatcgtgccggctgccgtctccgagcttttcggcataaagctagcacttcggcgccatgtacaatttcctcgctctagcaaaccccactggatcccttgtcttctccaacctcatcaccagtaccctgtatgattacgaagccgagaaacaggctcgccagcgtcgtcgtcgggtcatggcggaactgctggcgtcgtctccaagatcgcttcacagcgctggtctttctgctggtggtggaggaggaggaccactcatcaagtgcgaagggcctgcttgcttcttggtcagctctctgattatgtcggcgctgtgcgttgttggagccggcctgagcctcgtcactgttcacaggaccagacgggtttatgctcgtctgtatcggtccgtacgaacgtga

SEQ ID NO: 107478 - DNA, 3550 bp, Zea Mays
aaatcagcagaagcagctgatcgatttactcaccaatatgttctctccccctctcaccctagggtatgccctgtctgccctgctgtatcctcatctgcgctgcgggagccagtaaagggcacaggaggagttcttgtggcgtactgcagcttctcctcgtcctccctaactcttgtttgttagcggctaatttcagagcttttgttggcaactgggggaaccatagtgcgggggttcctcgcccccctctttccatgggagcttagaagctgttggatctctgcaagtgaccatgagccagagttttgacatcaacgtacttcgtgaagaagcaaggagtaggtggttaaagccttctgaagtgtactatatcttgcagaatcacgagaggttccctatcacccatgaggcaccaaagaagccacccagtggttccctattcctttacaatcgtcgtgtcaatcggtatttccggagagatggtcacacatggcggaggaagaaggatggaagaacagttggggaggctcatgaacgactgaaggttggaaatgttgattctttgagctgctattacgctcatggggagcaaaatccatgtttccagagacggtgtttctggatgttggaacctgcatatgaacacattgtgctggtacaatacagagaggttgctgagggcagatattattcatcacaactatcaaatggccccccagaacctctttcatccttgggatatccaaatgccatctgtggaaaccaataccacagatccacttctggcactagtgagggcagtgagtcccatcagagctattccaatttgagttctgtaactgaagtaagttcctattccggtaacaaggagtacaacaaaaatgatggcagtttactaagcataccagaggttggacacacttgtcaacaaaatcagactggtaatggtaactcaaaaaataaatctgagcttaatatggctttaaagaagatagctgagcagttaagtttgggtgaagatgatgatgatgactatatttactcaaatcaaactcattccatgggaggtgacaaccaaataaaacaaattcgacaagaaggaacacagaaaggtttgagtaggaatatagcaccatcatgggaagatgtactgcactccagttcaggtttaccaacttcatccatataccagcaatctgatgtcaagtatcagaaaaaatcagaataccagccaccggaaatcctggacagcagtgatttgcgcatacaactttctgctactaaaaggtttcttttaggaccagaagccagcattgactcaccatctttgaactctgtgctgagaaacagagtcaacagtgtaactgataccatttcagcttatgacagtagatttgaaagctctctgaacccagattggcaaacaaaaacagcattaacatttcaaagcaattctcagggctctgaaataacggagttgtttgaccatgatcattttgaaccctactccagagaagatacaacaatttccttaggacagacaaacaagtttaacattcgtgaggtctctccagaatgggcattttcctatgagatcaccaaggtcatcattacgggagattttctgtgtgatccatcgaatttgtgttgggctgtgatgtttggtgacaatgaggtacccgttgaaatagttcagccaggtgttctccgctgtcacacaccactgcacagcaatgggaatctcagaatctgcattacttcgggaaacagagaagtttgtagtgaattcaaagactttgagttccgctcaaaaccaacctcttctagtttcacagacattgcaccatcttctagacatctgaaatccagtgaagagttattacttcttgcaaaatttgctagaatgcttttgtctgggaatggaaaccgtgaagttccagatggtgatccccaatctggacagtgtccaaaacttaagacgaacgaagagctctgggataggttgattaacgaacttaaagtagggtgtgaaaatccattaagctcggttgattggattgtggagcaactgctgaaaagtaatctacaacagtggttatcagtgaagctcagaggattcaatggaacggattttttatccaagcaagagcagggtattatacacttaatctctgccctaggctatgagtgggcattgtctccagttctcagtgctggtgttggtctaaattttcgtgattcaaatggatggactgctcttcattgggctgcttattttggaagggaaaagatggttgctgcacttcttgctgctggtgcatcggcaacagcagttactgatcccactgcacaagacccagtgggtaaaacagcagctttcctggcttctgaacgagggcatacgggacttgcaggttatctttctgaagtgtcgctaactagctatcttgcatcactcactatagaagaaagtgatgtctcaaaaggatcagctgaagttgaagcagagagagctgtggaaggcatatctcagaggaatgcccaacggcatggtggcacagaagatgagctatcaatgaaggattctttggcggcagtgaggaatgcagctcaagcagcagctcgcatccagaatgctttccgtgccttctctttcaggaagagacagcagaagactgctcgacttagggatgtgtatggaatgacccaagaggatatagatgaacttgcagctgcatcaaggttgtaccaccaagctcatgcttcaagtggtcagttttatgatagagcagctgtttcgattcagaagaaatacaaaggatggaaaggtcgcaaacattttctcaacatgagaagaaatgcagttaaaatacaggctcatgtaagaggccatcaagtgagaaagaaatacagaacaattgtaagcactgtcagtgtgctagagaaagtaatacttcggtggcgccggaaaggtcatggcctacgtggcttccgagctgagcagcaaccaatggtcgaagcaatagaggaagatgatgaggaagacgacgatttcgatgatgatgaagcagtcaaggtcttccgtcggcagaaggtcgatcaagctgtaaaagaggctgtgtcaagggtgctgtccatggtagactctaccgaagcgaggatgcaatatcgacgaatgcttgaggagtttcgccaggcaactgcagaattggaaggatcaaatgaagtgacatcaatatttgacagtgacttagagttattagggatcaacaatttcatgtaaagagcatttcggtttcaagatctgagcaatgacataaattaagtatctacggaatgggtttcacctgctactaactaggacctgataatggtcgtcagtttatacagtgtttacgaaatggaaagtagattattgctgctatgatgtattgccactctatatttaggtgtattttcccagtggcagttcaatgaacactacattgtggtgtttgtaacttttaataccccgtttggatgtagatattagagtacaaaattgaaaatt

SEQ ID NO: 107479 - DNA, 1860 bp, Zea Mays
aaatcagcagaagcagctgatcgatttactcaccaatatgttctctccccctctcaccctagggtatgccctgtctgccctgctgtatcctcatctgcgctgcgggagccagtaaagggcacaggaggagttcttgtggcgtactgcagcttctcctcgtcctccctaactcttgtttgttagcggctaatttcagagcttttgttggcaactgggggaaccatagtgcgggggttcctcgcccccctctttccatgggagcttagaagctgttggatctctgcaagtgaccatgagccagagttttgacatcaacgtacttcgtgaagaagcaaggagtaggtggttaaagccttctgaagtgtactatatcttgcagaatcacgagaggttccctatcacccatgaggcaccaaagaagccacccagtggttccctattcctttacaatcgtcgtgtcaatcggtatttccggagagatggtcacacatggcggaggaagaaggatggaagaacagttggggaggctcatgaacgactgaaggttggaaatgttgattctttgagctgctattacgctcatggggagcaaaatccatgtttccagagacggtgtttctggatggaaaagatggttgctgcacttcttgctgctggtgcatcggcaacagcagttactgatcccactgcacaagacccagtgggtaaaacagcagctttcctggcttctgaacgagggcatacgggacttgcaggttatctttctgaagtgtcgctaactagctatcttgcatcactcactatagaagaaagtgatgtctcaaaaggatcagctgaagttgaagcagagagagctgtggaaggcatatctcagaggaatgcccaacggcatggtggcacagaagatgagctatcaatgaaggattctttggcggcagtgaggaatgcagctcaagcagcagctcgcatccagaatgctttccgtgccttctctttcaggaagagacagcagaagactgctcgacttagggatgtgtatggaatgacccaagaggatatagatgaacttgcagctgcatcaaggttgtaccaccaagctcatgcttcaagtggtcagttttatgatagagcagctgtttcgattcagaagaaatacaaaggatggaaaggtcgcaaacattttctcaacatgagaagaaatgcagttaaaatacaggctcatgtaagaggccatcaagtgagaaagaaatacagaacaattgtaagcactgtcagtgtgctagagaaagtaatacttcggtggcgccggaaaggtcatggcctacgtggcttccgagctgagcagcaaccaatggtcgaagcaatagaggaagatgatgaggaagacgacgatttcgatgatgatgaagcagtcaaggtcttccgtcggcagaaggtcgatcaagctgtaaaagaggctgtgtcaagggtgctgtccatggtagactctaccgaagcgaggatgcaatatcgacgaatgcttgaggagtttcgccaggcaactaattggaaggatcaaatgaagtgacatcaatatttgacagtgacttagagttattagggatcaacaatttcatgtaaagagcatttcggtttcaagatctgagcaatgacataaattaagtatctacggaatgggtttcacctgctactaactaggacctgataatggtcgtcagtttatacagtgtttacgaaatggaaagtagattattgctgctatgatgtattgccactctatatttaggtgtattttcccagtggcagttcaatgaacactacattgtggtgtttgtaacttttaataccccgtttggatgt

SEQ ID NO: 107480 - DNA, 405 bp, Zea Mays
atgggagaggtttgcgccagcgaggagaggagggtcgagctgctgctgctgtggaggagagggaggggcgctgctgttgggcgtccatggagcaggaaggtggaggtcggccgaaggtggaagaaggacgccgagcacagaggctttggatgccctggttgctggccgagcagggaagaacatgggaagtcgccatgggagaaacttgagcttgctgccatgggggaaagcttcagcgcgccgaggaagaaggagcgccctgctgcaggggcgtcgagcgcagggagcagagggctgaccatgggagaggggccagcgccctgggaggagctcggcggcatgggggcttggagctcggctccctgcctgctgccgtgtaggaggaatgggggagctgctgcgtga

SEQ ID NO: 107481 - DNA, 1164 bp, Zea Mays
atgcccgtcactcgtcttctccaactcgaagacaccggccgccaccgcctagcccgccccgccgtccaaccactccaccccgtcccaccccgccctatagttcagccaccatgcccgcccccgcccgctgcgccccgctctaccccaccggcgcgccttcagctcgccgcttgtcgcccgcctgtcgtgcacctgtccgccacgtctcccttcccgacctccttcgccgcaacagccacaacaccggcatcccagcttgacatcgaacggctccgtcagcgtcaaatatggttggtgaggaccgtcgatggatgtatgaagaaacattataagttgtctgaaggagatactcatacggaacacgcacactctgtgttccataggaatgcagcggatgttattggggatattatgtactatgctcaaatccaggtgattagtcaagctatgttgggcagtgaagggcgacgtccagacagtaagaacgaggcgacacggtatggacttgatattactgagcaacaatatcttgagccgccaatgatgctgcttgacgtgcgttatgctattactaggcttcggctgaattcgaggcaaagtctgtgcgacagttccaatcatggaaccgagtcgtatcacaggtatggaggtgataatcactttcatttggcaaaacaaatggcggtgtatgcaagtggtggaaaagcacatggaaggtacacaatgtttgctaacgtcatcgactcgagccaggtgagggttctgcgtggaggttcgtcgaggtctgctactcgtagctcccatcgctccactcaagatccagcagaagtggagcaactgcgagaagaacttaggcaacatcaggattacttgaggcaacaagctgcgcaacatgaatactatgctacacagattcaacaacagcaaacactcatacaacaactagcacagacccaagggatacacgtcccgatgccccccacctcccgtacattatccttggtcttcacctccacctacacctacatctccacctaccgaacatcagctaccttgtcgacgcaggaacgagaagacgggttagactttgtcgaagccctcttcgctagtggaggtatcgaccatcactcgtcactgtacccctatgatgatcgacgatcgtga

SEQ ID NO: 107482 - DNA, 772 bp, Zea Mays
tcccgatgcttttcctcctccgattcccctgctcgctttctcactctttggcgtcgattggttcagccaggcatgggtatctcgtcgacgtctcattcctccatgaatctccctcttttccgctccattattattgccccagtttccctctccctcctgctgctcctgcagtcctgctccacaaaatgcaagcgcgcacacacgtagtatgcatcgcggcaatacacacacccacgcgcacgcagcagtacaatacaagcctagcactacctagtctagactagtttttaggaccggccgggatgctggactgggcgcccgtggtggtgggcgtcgtgctcttcgtgctcctctcgccgggcctgctcatcgagctccccggcatgcaccgctgggtcgacttcggcagcctccgcgtcaccggcaaggccgccaccgtccacaccatcatcttcttcgtcctcttcctcattgtcaccatggcgtgcaaactccacatctacaccggcgcctagctgctgtacctcagctcgctacctgtgggcgactagctgagctccctagctaatcttcaccgcacgcaccgtacgtacctgttcgtcgtcgtctattcgtcaacccgttgttttgtattatatgctctctctcgtcatatatatcacacggtcgatcgcccggccatttcataggctgtacctgtattcctactttaacaagggtatacttgtatacgtacgtgatcttgttttagcatcatcctgatgcttcaaaa

SEQ ID NO: 107483 - DNA, 1303 bp, Zea Mays
cgtgagctcagtgcccctctccctggtccctgccatgaatgcgcgcgctgagctcctcgctcgggccgcgccctgcgcgccttcctctgcgtgcgctcagcgctctctcccacgatcccctaggcgtgccgcgccctggctcagatttcgctcggctgaccgcgcagctcctgcgcgtgctccctccctgctcctctctccttgtgtcgcggtgtccagctcccttgcaatccgtcttctctgagcgcatctctcccacgcgctccttctccttcctctgaaccgagcgtctctcccatggcagccgcttctccctctccatccctcccctctctcccctctgctcgcgacgcacgcccggcctgcttccatggcgcctgagctccttccctgttcgcctggccgcgcccctgctgctcgccggtgcttgccgcgcgtgctccgtctccctggcgctcgatgcccagcccagccgaagcttcctccctgcattgcgcgtctagctcgctctccctccaactcgacgcccagctccttctctgctcggccatggccaccgcgccgtggatcttcctgtgcgcgcgcgcctgctcctttgtccacccatggccgcacgtcggcgcccttctctgcacgcgacctgccttttccccgcgcgtagcccgtcccaatgccgagctcagtcctgccctctgctccagctcacagacgctgcattgccgagtccctggccgcgtctgcgtggttgtgttctttcgtgggaacgttcactttgccgtggtcttgcgctttctgcttggtccggcgtgggttttagttgacggtcaagcgcgcccctttttcccttgtcttgccggtcgtcgttcggtcaccccgtcttgatgtcggtccctacgtgatgcctccgagttggaattgcgctgacaaaagaaaccccaagagaagatgtccaaaagttggatggtggggtgcgtgaagttcggatagtatctgccaagcacttaacaaattgcctaagtcggagaatcattaccgatctcacggattcaagtcagttattggaacggtacgtgaattaaccacgtgatgcggagaaccagaactgagtcgaccacaagatatcgctacgcgtgagtttctccagaagatgaagctgatgaactaaactaaaagtggatagacaaaacaagtatcagaacaaaagatggtcatcaagtggacgtcgtctaacaacactaacctacatgctgtttggttcacgaaatgtaacgtaaatggtaatggtaatggtttacactcgatt

SEQ ID NO: 107484 - DNA, 213 bp, Zea Mays
atggccggccgagccatggagctcgcgcgcgcacaggaggcggcctggcgagcgcgctgggcgggggtgctggtgcggctgggccatgcccgcggccaagaagaagagggagagggcgagtggacacaggaaccggctgggtggcttttggtgatgtgggcagggtgggcgcgcgacgtgggcgaaactctcgacgtgcgggccatcgggtag

SEQ ID NO: 107485 - DNA, 869 bp, Zea Mays
acatatttttccttaaaactgcctcctcagttagaaaaagccacgcaactttgcaagtcacgacctcatggaagacgtgagccaccccgtgacggattgacaccaagtcagtctcactcaagtaaagtggacgccaagtcagtcacactcacaccaccgtagcacacaccagtacaccacacactcgcctttccgatcccatccctctccagccaccttcctccgctcgccgtgcttctgcttcctccgccaccaccgccggcatggctgcgcgctgcccctacttcgccgtcgaggagtcctcccgcggcatccgctcgggggagtccccggccgcggcgctccgccggatcctcgcgacgcctggtgcgcaccaggcgccctgctgctacgacgcgctcggcgcgcgcctcgtcgagcgcgcggggtttccgatcgggttcatgggcggtttctgtgtttctgccgcgcgacttggcttgcctgatgttggcctcatttcctatggagaaatggtagatcaagggcgtctcatcaatgaagctgtttcaatcccagtgattggtgatggagacaatggttacggaaactctatgaatatcaagagaaccataaaaggatatatcaatgctggttttgctggaattatgcttgaggatcaggtctggagaaacggttgttcatccctgaggagtcaaagctatcaggcccagtctctgcaaaattaaagcccaagcttgttgagcaaacacatacgagatgatgatgtgttggatattttcctccgcctgatcataaagcgggcacaccgctggatgaggaagccaagcttagtaagatgataatctttccaacacctgtttttgatg

SEQ ID NO: 107486 - DNA, 491 bp, Zea Mays
gcaacgcacgggcactgacctaccaccttcctccgctcgccgtgcttctgcttcctccgccaccaccgccggcatggctgcgcgctgcccctacttcgccgtcgaggagtcctcccgcggcatccgctcgggggagtccccggccgcggcgctccgccggatcctcgcgacgcctggtgcgcaccaggcgccctgctgctacgacgcgctcggcgcgcgcctcgtcgagcgcgcggggtttccgatcgggttcatgggcggtttctgtgtttctgccgcgcgacttggcttgcctgatgttggcctcatttcctatggagaaatggtagatcaagggcgtctcatcaatgaagctgtttcaatcccagtgattggtgatggagacaatggttacggaaactctatgaatatcaagagaaccataaaaggatatatcaatgctggttttgctggaattatgcttgaggatcaggtgcgttgtccaagccatg

SEQ ID NO: 107487 - DNA, 84 bp, Zea Mays
gtgaaaagtatacctttccttttcctatcctttcttctctactggctatcctatcctttccttgagtttgtttctttccgctgc

SEQ ID NO: 107488 - DNA, 231 bp, Zea Mays
agaaattctgggagtcttcctggccacacgtggagcaagcggcacctatctttctctatctatcttggcagggcttcaaaactagttcgagaaaagaaatgcgtctctcctataacggagaaatcactgaagcctatggcagcctctatctagtcgattgcttttggatcaagcccagtgcagtgtaaaaacgaaaccctatttgacctccggaaagcctattgacaattc

SEQ ID NO: 107489 - DNA, 1206 bp, Zea Mays
gctcgtcggccctccacgcaaacgaaatccagcagaccgacgcgaaccgagaaaaatcccacgaaatctcgtggccgcggcgaccggaagaagaggacgacgacggacggagcggcgatggcgtgccgcgcacttgccctccgctccctgctcctccccgacccgctacaccgcctcccggccgcggcgccacctgtttggagagcgtcccgcggtggccgccgtccgcacctccgctgctgctccggcggcgggggcggggagcccgggcagccgccgcaagaagctgtgctcgaggccatatccaagatagcaaggtctaaaggaagggttgcactcacaacaaatatggtcatgggtggtactgtgactgacgatgcaagtgatgaatggcttgttctggatcagaaggtaaattcctaccccacagatagaggatttacagcaattggcactggaggtgatgattttgtccagtcaatggtagttgctgttgaatctgttcttcaagaatcaattcccaagggccgggtatctcagaaattatcttcaagagggaaatatgtttctgtaaacattgggccaattcgtgttgtttctagtgagcaggtccaagctgtgtatcgtgccatgagaagagataacaggatgaaatacttcttatgaagtgcaatttcatgtcctggatgttccctagtccattccatgttgtatcctacgatgcattttcgccatatttgctggacctccggtgaattccaatgacttttatgtgccattcaagcccaaattgaagcttctctactacaaaacaatatgttgggtccagctacgttatttagtgcagggggcgtatatagctactatgtattccctttcttctataatgaataagattcaaaggttcacagtttgtcctaaaataaataatattttacacaaatatgaaagattgtctcctaatatggaagttaatcataggtgcttgcaagcaataactgtcaaatccaagagatatcctctacaaaaggaaaggagataaggatacagcttcttttgccaacgttcctaatatatctgaaaatttctaggaacttgtttattatgggacggatggagtatgttaaagatgtatgttagtgtttcatattacatgtgttttactattttataaacagtatgaatagtagtataagtgctcctaaa

SEQ ID NO: 107490 - DNA, 103 bp, Zea Mays
cacctattagaaggtaggaacgtagtgtacatgcattacatgtctatattaaactatactctgttatatatgttagaggatggaggaccgtgagtggatgtac

SEQ ID NO: 107491 - DNA, 781 bp, Zea Mays
aggtcctcccactcaaccgcagaggcagcaaagagaagccatagcacagctgcacaggagaggacgagcccaggcgccaagaaagcaccgcccgtcccggtctgtcggtatggtggcggcgatcgcggtggcgtcggcggggctcgggatgctggcgggcgtggccatggccaacaggtcgttgtcgtcgtcgtcgtccgacggcgccgcgcagtggaggcccgggggcccggcgctgcgctggggcggcggaggcgccccgcgctgcgaggcgtgcggcgggtcgggcaaggaggagtgccgcctgtgcgcgcgctggtccgacgccggggcccggggaaagaagcagagccgctccgggtgcggggcgtgcgcgggcacgcgccgcacgccgtgccggtgctgcggcgggtccggcaccggccgccgcgcccccgtgcggatcgccacgtccgcgcgcgccgcgctgaccgcccggactgccagatgaccaccggaccgtccgtccgtccgtccgacgcgccgacgccgtgtctcacttcgcctctcctcgaccggggctctcccgggtcatggacgaaggcggctctgtctgcggcgggcgacaagctggctcagcggattcacgggcgcggagctgttcgttgctgcttcttttttggatggacaaaaagaaaaaaattcgtagggactatagcggcatatgtttagccaactagatctagattgattagcaaatttgtcgggatatggtcaaatatttatttcgatttgctgtctt

SEQ ID NO: 107492 - DNA, 1014 bp, Zea Mays
attaactgcctctcctccctagcccatccgcgcgccgtcgtctcctccccagccgggcggccgcgtgccgtcccgtccccagcccatccgcgcgccgtcgtctcctccccagtcgaccggccacgcgccgtcccgtccccagccagccacgcgcgcagtccgtcgtcccgtccccagccacacgcgcgcagtctcctccccagccacacgcgcgcagtccgccgtcccgtccccagccacgcacgtctaatggttcagcaacaagttagtgcaagatttggtaaatgccttcttgaacttagcggaaacaatgccaccattgttatggatgatgcagatatccagctagatgtgcgatctgtcttgttcgctgctgttggtacagcaggacaacgctgcactacatgtcataggctgattcttcatgagaatatatatcaaaccttccttgatcagcttgttgaggtatacaaacaagtccgaattggggatccgttggagaaaggcaccttactgggaccactgcacactcctgcttcaaaagagaactttttaaaaggcattcagactatcaaatcttagggagggaaaatcctttttggaggatctgccattgaatcagaaggaaactttgtgcaaccaacaattatggaaattacacgttctgcaccagttgtgaaagaagaactctttggtcctgtcctttatgttatgaaatttcagaccttgaaggaagcaattgaaatcaataactctgttcctcaaggattgagcagttctatatttacaaagaggccaaatattatttttaagtggctcgggccccatggtagtgattgtggtatagtgaatgtgaacatacctactaatggtgctgaaattggtggagcatttggtggagaaaaagcagctggtggtggacgagaagcagggagtgattcctggaagcagtacatgaggagggcgacttggagggaggtcctagaggtagtaagtcacttgtttactccatga

SEQ ID NO: 107493 - DNA, 897 bp, Zea Mays
attaactgcctctcctccctagcccatccgcgcgccgtcgtctcctccccagccgggcggccgcgtgccgtcccgtccccagcccatccgcgcgccgtcgtctcctccccagtcgaccggccacgcgccgtcccgtccccagccagccacgcgcgcagtccgtcgtcccgtccccagccacacgcgcgcagtctcctccccagccacacgcgcgcagtccgccgtcccgtccccagccacgcacgtctaatggttcagcaacaagttagtgcaagatttggtaaatgccttcttgaacttagcggaaacaatgccaccattgttatggatgatgcagatatccagctagatgtgcgatctgtcttgttcgctgctgttggtacagcaggacaacgctgcactacatgtcataggctgattcttcatgagaatatatatcaaaccttccttgatcagcttgttgagggagggaaaatcctttttggaggatctgccattgaatcagaaggaaactttgtgcaaccaacaattatggaaattacacgttctgcaccagttgtgaaagaagaactctttggtcctgtcctttatgttatgaaatttcagaccttgaaggaagcaattgaaatcaataactctgttcctcaaggattgagcagttctatatttacaaagaggccaaatattatttttaagtggctcgggccccatggtagtgattgtggtatagtgaatgtgaacatacctactaatggtgctgaaattggtggagcatttggtggagaaaaagcagctggtggtggacgagaagcagggagtgattcctggaagcagtacatgaggagggcgacttggagggaggtcctagaggtagtaagtcacttgtttactccatga

SEQ ID NO: 107494 - DNA, 3370 bp, Zea Mays
cccttcagaaaacagagcgagtccaattcgagacggctctccccacatcaccacagcgcagccgcaaccatggcttccgccgaaaccctagcccgctccccctcacgcgagccctcttccgacctgacccgcgccgactcttccgagccccaccacaacatcgatggctccggcgcgggcgccggagactcatcccgccgccgccgccgctcccgctgggagcagtctaacgacgactccgccgccaacaactccggcggcgagggcgggaccgggggccggaagcgcaagacgcggtgggccgaggaggagccgcgcccggcgatcgcgctcccggacttcatgaaggacttcgccgccgagatggaccccgaggtgcacgccctaaacgcgcgcctcctcgagatctcgcgtctgctgcaatcgggcctcccgctcgacgatcgccccgagggggcgcgctcgccctcccctgagcctgtctacgacaacctcggcatccgcatcaacacccgcgaataccgcgctagggagcgcctcaaccgcgagaggcaggagatcatctcgcagcttatccgccgcaaccccgccttcaagcccccctccgactaccgcccacccaagctccagaagaagctctacatccccatgaaggagtacccaggctacaactttatcggcctcatcattggccctcgtggcaacacgcagaagcgcatggagaaggagactggtgccaagattgtcatcagggggaagggtagtgtcaaggaagggaagctgctccagaagagggacctcaagccagatcccagcgagaacgaagacctccacgtgcttgttgaggcagatacacaggaggcactggatgcagctgctggtatggtggagaagctgctcaccccggtggatgaggtgctcaatgagcacaagcggcagcagctccgggagcttgccgcgcttaatggaacaattagggacgatgaattttgtaggacatgtggtgaggctggtcacaggcagtatgcttgccccaacaagatgaacacatttaagagtgatgttcagtgcaagatctgcggggacggtgggcacccaactattgattgtccggtcaagggcacttctgggaagaagatggatgatgaataccagaacttcctggctgagcttggtggtgggagtgcacctgagtccatgaacaaatctggtggtccgatgttggctcttacaggaagtggtggtagcggtggtgcttctactggaactgggagtaacccgccttggtcggccggtggtggtgccgcttccactgggctcaatggtatcaagaaagattatgacgagacaaatctttatattggatacctgccacctacaatggacgatgcaggtttagtcagtctgttttcgcagtttggggagattgtcatggctaaggtgatcaaggatcgaaacactggacagagcaaaggatatggatttgtcaagtattcagatgtgtcacaggccaatgcagcgattgctgcaatgaatggtcaccatcttgaagggcgagttattgcggttagagttgcaggaaagccgccacagacagcaccagcagtgtcagcacccccatcatatcctcctccggatcctacttcaggtggctattcctcccagtcctacatgggggcaccaccacctcctcctccagggagttatgctccagttccttgggggcagccgccaccatatgcttcatatcctccgccaccaccaggctctggtgtctacagtcctgcaccccctgcaccaggtcaagctgccccacctccgtatgggatgcaatatccaccaccaccaccacccccagcagctccaatccctccaccaggcactgctccatcaagtgatggagctcagaactatccacctggtgtaacaccaccaagttctggctcatccactcaccctgttgcaacatcagtatatgcatcatctggtgcaccaaatgcaccatcgatataccctccaccaccttatagttattcctcatactaccctccaccatttcagccaccacctccaccaccaccaccaccggctagtgttgatccctctcagagtattgcaactgcaccttggctaacccacagtgtggtggtgccaccaccacccacgagtgttgatccttctcagagtatttcaactgcaccttggttaacccacagcgcagtgccgccaccaccaccacctttgtcctccacaaccgaccagtctactgcttcctatggtgccgatgcagagtatgacaagtttatgtcagagatgaagtgatacgagcgaagctggatgattcttccaatgaagggcaaaaggcttgatctttcttggagcttataccaacctgatttatttcttgttggaagtttcggactcacatcttaaccttgctgtgtgctgttgtgaccgttgcagaggttgcatgcttaagaaggcatcaagtattactggctcagctggcatcagaatatttgctcatcttcttggaactattttaaggaatcttttactaatgcttttgttgtgatgtctattcttgttattatttgagattactctgtgttttcactttaatgctctgttctttgtgacatgtgttaatctcactttattattcatatatattattcttcatcttgatttggtagtgctagcactcctctccatctggagcagaaaagcctgctgctccgtgctggttggtataacttcaaaaatttaaatgcttgtttggtatcttctgataatctgtcatgcatttctttcttacgtcttcacctaagttgtttggcagttgtcgtgacagcttggcacaggcagccagagtttttagcacgtgatgaatgaatatcaggtataatggaggtgctgtgaattgttctgtgaacccaatgttttcatttggtttctgcacaattttctactgacaaacagtaacgagtttcccatttggtagttgatgtgtgtgcattagggtaaccaagcatgcacgcatgctggaaaaaaatctttgatgaagagcttacatatatattttgcattgctaatgctcttttaacatcattggaatttttgtttgcggttcaagtaggacatgctggcgtgcagatctagtctggagtcctatgctcaaggtgcatactgtcacaatgatatttgtgagatgaactgaaggtttggaggttggctcagattagtttttgctaagtaaagtaggatattaccataatcttgtcctagtgaaataatgcgatagtcagtccacaaccagcattaagtacctttatcacgttgcatatatatcagtttgatgtgacctcgt

SEQ ID NO: 107495 - DNA, 1539 bp, Zea Mays
atggttgtggtcagcaacaccaaggactcgctggagttcgccagtgcgcgaagagtcgagatccgcacacgcgtgaccgtggcatgcgaggactgggtggtggaccacaacgtggatgccatgacggtggccgacatggcgcacctcgcacacgactacttcacgcttccacttgaggacaagcctccgctcggcccctacatcgacacggctccatctccaacttcctttctcccgcagttgatggagaccgaggaagaggatgaggttttccacacctcacccagcacgtgttcgatgatggtccccaaccgtgatgccaccaccagcatgctcgccatggtcgaggccacctggagcgacgagtacgcgctcgtggacctgcagtccgtctgctactactccatgttcaacgccaagcccacgctcaatatcctcgacgaggtcgatccgaagctgctcaagaccttcatcccgctcaccgagcagaagcacctctccgacgtcgccatcgacgccgtcatcgactccgcctccatcaccatcacccaccatgaggcgctgatggccaagggtgtcatcttctgctccatccccaagtccatatgtgagtacccagaccttgtcaggcactacctgggcagcatcgtactgccaggcgacaactactatgccgccctcaattcagcggtgttcagcgatgggtccttttgcttcgttcccaaggacacaatctgccccatggaaatctcgacctactttaggatcaacaacaaggagaccaaccagttcgagaggactctgattgtggccgttgagagatgcacctatgtcttgctcattgagttgtgtcttcaggttgatggtgttaaagttcggcttccgccttggccaccacctgtttggacattctggttgccatatgatgtgtgcagcggcatgcattgcaactgcagagactgtgcctggttcaaggctgaattttccagttcatataatggtgaagatggtgctactttactgatgtataaacattatgctgcaactgctatttccaaaggaatccattgcttgtctctgcgccttactgatgaatactcctcaaatgcccatgcacggaaccagttactgccaccagaactgttatttttgctctctgataattccttacaacattacattctagccagtgataacattcttgccgctttagttgttgtgagctcaactgttcgatcttcctcagtgcctgagaaagtagtcttccctattattacagatacgaaaacatcagtggctgacttgtctcccctttgggctatcaatcttgaagggaaggtaaatggagctgtggaaacatgcagaagggaagacaactgggtgatgtgtaagcgtttcaggacatatttcaacttctcacataccatgatagctcagagacttgacccagatgaatgtgattgggcatatggtacgaatataattgatcggcagtttggaggaagacaagcatcagggatacataccatttatggttga

SEQ ID NO: 107496 - DNA, 459 bp, Zea Mays
atgcggatcaggacgacgaagcagaccctgatcagagccggagtgttccagcagcgcctgatcccactgcttgttcatcttgcgaagctcgagtttgacgtcgttcagagccgcatccacagacggccgccatttctcgacgtcggaacatgtctgttccagcacgacgagacgctcatccctggagcgcttgaagtcgacgaagcgctgatcccacttgaggtccatcgccgtcagcttcttctcgatctcatcaagcaaaagcttggaggacggatccatgacaccacgacgccgctggagcctggtgaagtagccgtggtcggcttgcggttccagatcggcgtgcccaaggaatcgacgatctctgataccaaatgtaacagtaagcgtggagaaggggtagagaggaggaaggcagaagaagataggaggcggcagggaatattatttaggtag

SEQ ID NO: 107497 - DNA, 2393 bp, Zea Mays
cctcgcccaccccacgccacgacgcgacgaccatgttgtgcagttgtgctcctctccttgcctgccttgggcttcctatcctatactatatataactgtcctcctccggcaccttcgccataacagatacaggcaccccctcctctcctctcctctcctctctctccctctcatcaccaaagaactgcaactaggaacggttcgccacaaaaaaagaacgtacggctatgaagacgaggcgcggtgcctgccacgcggcggcggcggccacggcgccgggcgaggggccggaggcgcaacgccggaagcggcgcaggacggcggcggccgaggggtcgccagcggcggccggcactccaggtgtccgcccggtgggcagagacatgttcgaagagctgcctgacgatctcgtcgtctccatactacgggacgtcgccgcgtccgccagttcgccggccgatctcgccggcgccatgctcacgtgcaagaggttcagggagctcgggcagagcaaggtggtgctggcgcgggcgtcgccgcggtgcctggcggtgcgcgccaaggcctggtcggaggaggcgcaccggttcctgcagcgctgcgccgacgcgggcagcctggaagcgtgctacctccttggcatgattcggttctactgcctggggatccgcggctcgggcgcggcgctgatggcggcggcggcggtgggcgggcaccgcgaggcgctctactcgctggccgtggtccagttcaacggcagcggcgggggcaaggacgaccgcgacctccgcgccggagccgcgctgtgcgcgcgcgcggcgtcgctgggccacgtgggcgcgctccgcgagctggggcactgcctccaggacggctacggcgtgcggcggtccgtgctggacgggcggcgcctcctgatccaggcgaacgcgcgcgagctcgcggcggtcgccgcctcgccgccgccgcagctgctcggcaaggcggcgccccacccgactcggcgtcactcgtgcctcctgagcgacttcggggtgccgcgccgcggccggggagccgcacgcggccaaccggttcctggcggactggtggttcgcgtcgcggcgctgggtacggcggcggcggtggcggtgggagtcgagcggctcctcgcccgaggaggacggcgccggcgcgctgcggctgtgctcgcaggcgctgtgcgggcggcccgagacgcggcggcacgagttcaggcggtgctccgtgtgcggcctggtgaactactgctcccgcgcgtgccaggcgctgcactggaagatggcgcacaaggcggagtgcacgcccatggaccggtggctcgacgtggtcggcgtcggcggcggcgcggcgccgcagccccacgctaatgccgacggcgccgcggcggccccggcgccgtgacgcgctggcggtcgtccgtttcttgtcacttgtcagttagcgtccgcaacgtcagtttttactccttttttttttctgtccgtttctcgccctccatttgtcctctgtactacggcacctgtggttatagttggcaattggcatggcatgctgaggtaacattattattggcataaagcgagcgacggagcgagggcaagcacggcatatctagttctagccttctaggtagtgaaaaaaaaattcaccgttggtctggtagtaaaagtagcggaagcagcacggctggtcggctctgccgtgtcctgttcacggagcgcggcgagagcgagacgtgacgtgaggtcgagacccccccgcttcgctttctgctgcaaaaggcggagcgagagccgagagaggcgacgtggtgcggcggtgctgggcggtcagccagacaggcacacagggccggggcctgtcacggtgtccgtctcggcccatcctgcgcggccacgcgtttggagagaaggcgacaaaagccgttacagcccacgggaaaaagcagcgtgccctcccagtcccagtccgcggtgcctgccatgccatgcaatgccacgctgccgatcgaggaaatattgtggagcagacgagcagttgatttgcgtgcagttcaggcggtgtggatccggtgctgcatacctttggtgtggcttcctccgtctcggtacgcagactggtgcaggtgctctgggtcgcttcgtggcttgcgtttgtgagccgggacaaggaagggccccgcggcccacgccaacgttgctacccgcggggatgtgaactgtgcgtccgtcattggttgcatatctctgtttttttttttgcttttttgcctagaaacttggttgcatatcatccgtgaccgtacgtccagatttggtcgaaaacggattatctgtatgagccacatatgctaccagcgcgaggttttcttc

SEQ ID NO: 107498 - DNA, 1161 bp, Zea Mays
atgaagacgaggcgcggtgcctgccacgcggcggcggcggccacggcgccgggcgaggggccggaggcgcaacgccggaagcggcgcaggacggcggcggccgaggggtcgccagcggcggccggcactccaggtgtccgcccggtgggcagagacatgttcgaagagctgcctgacgatctcgtcgtctccatactacgggacgtcgccgcgtccgccagttcgccggccgatctcgccggcgccatgctcacgtgcaagaggttcagggagctcgggcagagcaaggtggtgctggcgcgggcgtcgccgcggtgcctggcggtgcgcgccaaggcctggtcggaggaggcgcaccggttcctgcagcgctgcgccgacgcgggcagcctggaagcgtgctacctccttggcatgattcggttctactgcctggggatccgcggctcgggcgcggcgctgatggcggcggcggcggtgggcgggcaccgcgaggcgctctactcgctggccgtggtccagttcaacggcagcggcgggggcaaggacgaccgcgacctccgcgccggagccgcgctgtgcgcgcgcgcggcgtcgctgggccacgtgggcgcgctccgcgagctggggcactgcctccaggacggctacggcgtgcggcggtccgtgctggacgggcggcgcctcctgatccaggcgaacgcgcgcgagctcgcggcggtcgccgcctcgccgccgccgcagctgctcggcaaggcggcgccccacccgactcggcgtcactcgtgcctcctgagcgacttcggggtgccgcgccgcggccggggagccgcacgcggccaaccggttcctggcggactggtggttcgcgtcgcggcgctgggtacggcggcggcggtggcggtgggagtcgagcggctcctcgcccgaggaggacggcgccggcgcgctgcggctgtgctcgcaggcgctgtgcgggcggcccgagacgcggcggcacgagttcaggcggtgctccgtgtgcggcctggtgaactactgctcccgcgcgtgccaggcgctgcactggaagatggcgcacaaggcggagtgcacgcccatggaccggtggctcgacgtggtcggcgtcggcggcggcgcggcgccgcagccccacgctaa

SEQ ID NO: 107499 - DNA, 100 bp, Zea Mays
caacttgcataaacttcagttctcagtccaacacactacaactaaaaacagaactcagagtgtccacagttatgtctgttgctaactcattcaagatcac

SEQ ID NO: 107500 - DNA, 2506 bp, Zea Mays
ctcgcttccccagacccctcaccggcgggcgtagctagcgtacgtccatccatccgtccatgctccaccgccaccagcccgccgttccgacaagctccaatcatacgcaccaccggaccaccctcggcaaggagggacaagctcacgcgcctcgcgccctgcccggcccgacctcgagcagatcgacacatgcacgcacgacgtagacgatacacaacagtacgcgggggcgcactgacacacgcccgcactatcatccctgtcccccgtccgtccatctccccactcgtgcgagttgcgaatttgcgatgcgccgcctgagcagaagctccaaagcctcatgatggcagcacgggccagagccagcactcgcagcagctgatccgagctcgtacaggcgcgccaggcagcacatcaatgggcacaccactccttgaccgcatcagtgaccggtgggactgagcactgactgcagtcgcgttgctctgcgcttcttcctggctggtgtcggcgaacagcaggaggaggaggcgagaagaatcttgggagcttagcttgcaatgccgaggctgtattcggaggaaggagcaggtgctgacgaggctaccgccgctgcgacagtgaggctggccaacaagatccggaagcgccgcgcggtgtcgtcgtcggggggctcggacccggcggcggtggggaggaggctgcggtccaggcggcccgcggtgcggctgccgcggcaccggaccagcgcgggcggggacatgtcggagtcgtcccggagccggcattgccgtggcagcggcaaccgtgtcgccgaagggacgctgccgtccgcgtctgcgaggaggctcgtcgacgcgttctggcagaacatgggcagcggtggtctgcttgacggggacgcggcggcggcgcgccggagcctggtcctgtggagcggcgcctccacgaaggtgtccaagaggtcgagaagtaagagcaaggtcttggaggctgatggtaagggaagtcggcgcaacggccatcctcggtggttttcagcagatctgatgagtaacggtagtgcaatggagtgcattgcgagctatggcgatactttgaacgccttttgccaacgtagtacacaaggtggtttccatgagcttgatatggttggtaccttttctcaagacgatgtttcaagatgtcctgaaaagacagtgaacctagatgatctgcagaacagcttgattgcagctaaggagctggtaaaagtacttgcccacatatggggacctggagagctgaatccgtcaagtgcatcactcatttctgctctacgttcagagcttgatgttgcccgttctcatgttagaaagctaatcaaagaacagaaatctgatgcctttgaaattgaggacttaaagttgcaacttacagaagaattggaatcgtggaaggtcaaacaaaaggagaaggttggaaatgctctccgatttgtagtttcagagctagacactgagaagaagtcaaggaaaagagcagagaagacaaataagaagttgagcattgccttagcaaacactgaagcctctttgcaggcagtgacgaaagaacttgaaagggagaggaagtataaaagaagagttgagaagatctgcaacgagcttatcagaggcattgatgaggacaaagctgaggtgcaggcactgaagagggaaactgagaaggcacaagaagagctccagaaagagcgtgaaatgcttcaacttgcagatgagtggcgtgaacaaagggttcagatgaagcttttagaagcacgggttcaatttgaggagaaaaatgcagctgttaatcagctgcgcgatgaactccaagcttatctggatactaagaaagagcaggaaccgttgaatgatccaatggaactgtcccatgcatctgaaattggcaacactgcagctgatttagttcctgacagaaatggtggaaacatcagcgaagacgcctcagaaggcagtgatatacactccattgagctaaacgtcgatggcatcaacaggacctacacctggagctacactccttcctcaaaaggcaggcagaggagcccatcaaggcatgaaccgttttcggatagagggatggatggagtgaactcgtggcgtttagagcaaagttttcgggacatggatgaagaactggagggagactgggcagaagggtgcagcaacggaatgctgaacttggatcatgacgaggagaggtatctggctatcaagaatctgagagagcagatgttggccgggtcggggttcatcctgtcacaaggtagagaaaatgctaaaagagagtattgtggcttgtaagataaactgaacaagaaaaattaaaagtaatgtgccgtatgaatcgctgcttgatgctagatccaactgttcaaggatatatatagtgatggttctctgtggattactttccccttgtaaatatcttgagctcttgaaaggttaggttacagggctgg

SEQ ID NO: 107501 - DNA, 99 bp, Zea Mays
gtgacccaaaggcgcctggtggtacacctataatgcagcaacgtgctccaaaattttctgcatcaattgggcttcccaacagtgagccaaaccatatat

SEQ ID NO: 107502 - DNA, 173 bp, Zea Mays
aacctactgtgtgtacccagaaatcattgatgtccagcaaacaacatttctcacatgcattccatcaaataccttgtgggcgtcctcaaccaatccacagttcgcatacatacctgcgcatgtccctggccatgagcccgtgcagcgagttctgtgcgtagttgatgaggatc

SEQ ID NO: 107503 - DNA, 388 bp, Zea Mays
ttttgctttcaatcataatactgataagaagttaagaaccaagagcacttggcacgccctgattgtttctaacctattcatccaaaatccacgactctaaaaaaactcatggtgcctcagaaatggggtggccagacaatagttgcatgaatcctaacttcaacccctccagcacgaatgtgtgatgcacgagttttgtcagatttaataaatgaagttcaacatggagattgactcgatgtctcgtggttacactagtatcttcacattctcattggtgacaaaattgataactagggcaaattggtatgttggatatagccctatacaactaccttgttgcccatattcactaccgcattgatgtcggctgtgacaatttcaagaa

SEQ ID NO: 107504 - DNA, 1274 bp, Zea Mays
acagacgacgaggaggagaatgctccgtctccgcacgcaccacgcgatgcttcgaattcgacaattccttccgtggccctgctccttcccttccctccctccctccttccattccaccgcagctggccaccaccacacaaaaacggcaaaaacacacaccgcgggcaagcaccgccaatctctccacacaaaaaatccatcaactactcaaccccctcctccagcctctgctcgccgcgcgcggcgctgtagcattctgccgtccatcgtcgccccggctccccatccctgctcctggcgtcaacatcccaaccatccccggagcgcgccaggggtggcggcgacacgaggctgcttacgatcgtcggcgacagcgcctcctcccactccatgccgtcggcggtggcggagcctttgccggatggcaagtacgaaacggatcgtgccggggcggtaaccgtcgtcggggcaggcgcagatcacagcatcgacggagcggttaatggaagcaaagacgagtcgttcttcgaagcgaggccctggctagattccgacagcgaagacgatttctacagcgtcagaggagatttcactccgtcaagaggcagcacacccgttcatccgagattaacgccctcaagtgggcggatgctggcagacaggtcgggtccttctctggtaaaaaagaagcagagactcctcgagcttcttcaggaggagcagcattatgacgacgaggatgacagcgtcaccgatgctagcaatgatctggaaagtagcgcagttcatgccatagaagaagaagaagaacacacgaggactcgtcgcagaagtgagaaatcgaagaagtcatcggggtcaggctgccttccaaccttcatctggaagcgtagcttcacagcctgcaggaagaagaaaaaagaaaaaggagcagaaggataaagcgaccaagcattacggtgccaagttatgattttgtaaagaagaggagaacagattttaataggctgcggaggtgcgtgtacatatacgttttgagcggtgtactctgctaaagaaaaaaggttaaaggaaagatgatgtagggtaaaaatatacaggactggtttgacaaaggtgcattgcagactttcagctctggacattgcagagaaaacatttagattccccgagagggaagctataggtgtcgtatagtcttagagcaactccaacagtcctgctctctaaattatagatttaataagttgctaaataaatttggaagtaaaaaa

SEQ ID NO: 107505 - DNA, 1577 bp, Zea Mays
tttccttctcccctccgtttcgaaaaccaaatctctctgtctactaggcgggagagtgagacggccatggcggaggcgcaagccctagtaccggcgcaaggtcccgacgaggcgcccctcgatgcgtccgccattcatagccgggtggagcagctctcattgaaaaggctggaggtggagccggaggcggaggtggcggaggatgaggtggcactaggtttggactccacgcacaaggcggctcaggatgcgatggatgagtgggactcggccactgctgcggtttcaattgatgatttggatgcatacctggaacaactgagaaaggatgtagccatggcagagcaggggaatcagaaggtatctgatatgattcaattggatgttggtattgaaatgctggagtctttgatttcgaatcttggtccaaaggctttgaaccattttgatgaaagttctgttctggggctgtcagactcaactgattcatgcagaaatcgaagcattgctgacaaggactacatatatgagttggaacttgatcaccaaatagaaaaaagtacgatggaacttgaaattttacaacatctacaaagggatgatgaaatgtttcaacttgaatctaagttattgccatttggagcgaagatcttagactttaaagacgactgtctcaggatgttcctcaaggcaccaatattgacctcagattgtgaaatttatggacagaagtttaattgttctattgattcatttatttcagaccatgagctgctgatagaaattgataaaataaatatggaaccaaagaaagtacagatcattcctgatgacatgtctgtagatatactgattgagaggatggagtcctccagagatacagtttgttctccaaccttgatatggctaattcagcaatgccaacaccagtctataatcaatgctttgagacgatcattggtgaatgatgctaatagttcgaggcattgttttgagtacttaaacaaaaaggagatgattgttgctcacttagatcgtggtattgatgtctccatcaagatgtcttcagattggcctctttgttcctatggcctgaagctaatttcgatccgcaatgcaggggatcgtccaacaaatattgcttcaactatactttgtaagaccaaggaactggccaacgaattggagccgcagattcggcaacatcttctaacgcttgtggatgctgttgaagatattatcattcgagagctgcggtctcgttaggaccacgctgtcgacaggaatagctttgggggataatagacagcctctactggctcgtggatcaatgtttcactttcacattttgtacagaagcgactctatcaccgttacgcatctacggctgatttttttagtgtctggcgcgttgccagaaaagagaatcttgttcaactttattaagtttgaaccgtagcaaatttgaccagtcatgcctgattcctatacttgccttcatccttttttggcggcatgtattattacgagaatacactcgtttccattgcaaaaatgtactggggcaatgttaggtc

SEQ ID NO: 107506 - DNA, 1569 bp, Zea Mays
ctgtctcacgttagtcacgtgctcgctttccttctcccctccgtttcgaaaaccaaatctctctgtctactaggcgggagagtgagacggccatggcggaggcgcaagccctagtaccggcgcaaggtcccgacgaggcgcccctcgatgcgtccgccattcatagccgggtggagcagctctcattgaaaaggctggaggtggagccggaggcggaggtggcggaggatgaggtggcactaggtttggactccacgcacaaggcggctcaggatgcgatggatgagtgggactcggccactgctgcggtttcaattgatgatttggatgcatacctggaacaactgagaaaggatgtagccatggcagagcaggggaatcagaaggtatctggtgagattagtgtcactgcagagacaacattcaatgatatgattcaattggatgttggtattgaaatgctggagtctttgatttcgaatcttggtccaaaggctttgaaccattttgatgaaagttctgttctggggctgtcagactcaactgattcatgcagaaatcgaagcattgctgacaaggactacatatatgagttggaacttgatcaccaaatagaaaaaagtacgatggaacttgaaattttacaacatctacaaagggatgatgaaatgtttcaacttgaatctaagttattgccatttggagcgaagatcttagactttaaagacgactgtctcaggatgttcctcaaggcaccaatattgacctcagattgtgaaatttatggacagaagtttaattgttctattgattcatttatttcagaccatgagctgctgatagaaattgataaaataaatatggaaccaaagaaagtacagatcattcctgatgacatgtctgtagatatactgattgagaggatggagtcctccagagatacagtttgttctccaaccttgatatggctaattcagcaatgccaacaccagtctataatcaatgctttgagacgatcattggtgaatgatgctaatagttcgaggcattgttttgagtacttaaacaaaaaggagatgattgttgctcacttagatcgtggtattgatgtctccatcaagatgtcttcagattggcctctttgttcctatggcctgaagctaatttcgatccgcaatgcaggggatcgtccaacaaatattgcttcaactatactttgtaagaccaaggaactggccaacgaattggagccgcagattcggcaacatcttctaacgcttgtggatgctgttgaagatattatcattcgagagctgcggtctcgttaggaccacgctgtcgacaggaatagctttgggggataatagacagcctctactggctcgtggatcaatgtttcactttcacattttgtacagaagcgactctatcaccgttacgcatctacggctgatttttttagtgtctggcgcgttgccagaaaagagaatcttgttcaactttattaagtttgaaccgtagcaaatttgaccagtcatgcctgattcctatacttgccttcatcctttt

SEQ ID NO: 107507 - DNA, 1979 bp, Zea Mays
aagagaaaaatggaagcttccaaggctttcgaactgacaagcaaaacggcgctcactctctcgtcaacgcctttgtcttctttctcggcttctcgcttccttctccttttcttcctctcctccccactctcaattccttcctcgttcggttgttccttcccacttcctctctctcgcgcgcctgtactacttttgaagccgcaaggtcagaagagaggatccacctctcagttcgattttcggtggctgaagtccttctacctcggggggtttgagcgttttccttgataaatttgtgtttcttcgagagtttattttttgtgttttctcttgagagattcgtgcgaaggacgtcgtcttcggtccattttcttgggtagtcgaattgctcttatacagcgtcaaagcatccaactttgacttctccgtggtggcttcttctactactctgtgttgtcgaggagacaatttaatctttatttaattgggttggatgcttgttcaagttgcagttgaaagggtagcagaagacaccattaatcctggtgattttggtgcttatctgctgaataattgagggtcaaagtaaccatttgcagttcttacttctcgttttcttgggaagatttggtgaatttcgttgcaggacagagcttccttcaatcctccctccttgtttttatgcatttgggtggttggggatatcttcactttatcctcgctgcaaaaagactataaacttgggagttcctatgatatccatttcttgtgaggatttgatcttgattctgttggttcttggtgaggtggttgagatgaaaggagtactatgctaactcatcgaggaaagaacagcacagtcagtactgttctaaggaaaagctgacatttctgtgcttttctttggaggactgcggtctgttcctgcaagaatttgtgtaaaaagggtggtaattctagatttctacaatttttgcacaggagaagctcgattccaccttgcagatccaatggcgcaacctgaaattcctgcatttggggattgggaaaccactggaaacacaccttacacacaaaagttcgaggatgcacggaagaacaagaaaacaggaattcttgcacaaccaaatgatccaaggagggatctggaacctcctcgcaagtcgcctttgcacccaacggtctacaaaactaatcctcaagaccaaggtccaaggaacccaccacatcgaccaagacctgaacttgacaaccaacgacactctgaccggcctactcaccgtgagtctgcaccacgaagacattcaaatcttcagagagaacaagggagtaatgctgggacaccaagaagcccctacagaacagctgctgggtctgcttcaccaatgcagccaaacaaccaatcaaagccaaagcacaggtcaactggaatgcagactccagagaggagggcatcttcagaggggcttggccagcatacacctggaaggagcaggatgaagccgggtggctatgagcctgaagaagtggctgtaccaccctttggcgaatgggatgatgcaaatgcagcatcaggtgaaaagtacactggtatcttcaacagggtgagggatgataggttgtcacctacctcttctgctaggcaaccgtctactactcgtagtgaagagaataaggtgcaacagaaatgttcttgctgcatactttgagaaaataaggacaggatctcgaagagttctagacaacttcctatgctgctcctgtgatgagatccctatcttgtaactcttcctgtgctagttgtcatgtttgttattgttggtgtgattatgtatctgtagatggattgtttcatttgagctcttcaattattacaaggaacatatatatgatacctagaattgtaaagtatggagtgagcaatttctttgcaacaataaaaggtttatcgaatgggctctggaattccatagttagtt

SEQ ID NO: 107508 - DNA, 831 bp, Zea Mays
tcgtcccctatcctagctttgcctgagagcggtaagcgtttcacagtttatacggatgcttcgcgtatcggtcttggctgtgtgctgatgcaggaaggcagagtgattgcttatggttcaaggcagttgaggaagcatgaggggaattatccaactcatgatctggaattggctgcggtggtttttgctctaaagtcgtggaggcattacctttatggcgaggcttgtgacattttcaccgatcacaaaagtctcaagtatatttttactcagaaggagctgaatttgaggcaacgtcggtggctagaattgattaaagactatgatttgtccattcattatcacccggggaaggctaatgtggtggcggatgcccttagcaggtctggggttccaaaggtggccttgccgttggtcgctgatctggaccgtttggggatcgctttgtgttatgtcggcaccgctagcgaggagacgcagatgcttattcaatcctctcttatggagagagtgcgtgcggctcagctgcaggatcgtcttttgcaggaagctcgaaagagggttggtgatggtaaaccgcgggagttcaccattgatgagaatggtttggttcgtttcaggggccgtctttgtgtgcctcagaaatcagaggtgaagctggatatcctgcgagaagctcataaaatgccttacaccgtccatcctggcgaaaccaaaatgtaccgagatttgaagcaaaacttctggtggaagcggatgaaggttgacatttctaagtatgtggccgcctgtgaagtatgtcagcgcgtgaaggccgaacataagcggcct

SEQ ID NO: 107509 - DNA, 1116 bp, Zea Mays
gagcattatttcaattatctcaaacctgtgcgtctgcccctttccagctttcctctcaaacggagagatgtactcggatcagatctccaccgggcgcaagcgctccatccatgaccgccttgacggcgacctccctgccggcacgggcgccggcggccgtgtccgtcacacggtgtccaagaggcaacgacagatagatgaaaaatggaagcatgatctgtatcgggaagatgatgaaccagcttcaaatccgaaggatttgcgattgaagcttcagaggcgaagttttcaacaagattttaccagcacaagaagttctggtgtgcgtgatctacgtgagaagctatctggtataatgaacccacagccatcaaatgctgacccaccaaagccaaagccaaagccagtatcggaggttgttaacatctcaaggcgtcaaattgctgatgaaatgcatgcacgccaaaataagaaaccaccaaagcagacttcatcgaagaagacatctcagccaaaggctgaaagtccactcgacagtttcctgagttcccttgggcttgagaagtactcaattaccttccaggcagaagaggttgacatggcagccctaaggcatatgacggacagtgatctaaaagctttgggcattccaatgggtcctcggaagaagattatccttgccttggaatcgagagcataagggaatgacaagggagtacagtgtaggaaggtgggggatatgctaggcatgctcgtgtgcaagttcgacaaaaactttgtatccacatatcttggaaagggtacaacaacaatgattttatgggtctcttgtaacgcataccctgtcctgttgagcatgttcagcgaagtttaggattgctagaaggcaggccacggcgtctattgctgtaacttgtttccgtgttaattaagtggtgcggtatacatgttgaggcagttgggttcgtcttggaatgctatatcctataactacttgggtgtttggttcgaagaatgagatattacatcatcttctcacttttcactatttgtttggtttgtggaatggaatgagtttatccatcactccttactaactcattccttagttagtac

SEQ ID NO: 107510 - DNA, 1121 bp, Zea Mays
ttgaactgggccaataggacacgtttggggaaccaaaactttctctatttgtagttgcaaaatttctagaaaagctttcctctcaaacggagagatgtactcggatcagatctccaccgggcgcaagcgctccatccatgaccgccttgacggcgacctccctgccggcacgggcgccggcggccgtgtccgtcacacggtgtccaagaggcaacgacagatagatgaaaaatggaagcatgatctgtatcgggaagatgatgaaccagcttcaaaatcaacagatccgaaggatttgcgattgaagcttcagaggcgaagttttcaacaagattttaccagcacaagaagttctggtgtgcgtgatctacgtgagaagctatctggtataatgaacccacagccatcaaatgctgacccaccaaagccaaagccaaagccagtatcggaggttgttaacatctcaaggcgtcaaattgctgatgaaatgcatgcacgccaaaataagaaaccaccaaagcagacttcatcgaagaagacatctcagccaaaggctgaaagtccactcgacagtttcctgagttcccttgggcttgagaagtactcaattaccttccaggcagaagaggttgacatggcagccctaaggcatatgacggacagtgatctaaaagctttgggcattccaatgggtcctcggaagaagattatccttgccttggaatcgagagcataagggaatgacaagggagtacagtgtaggaaggtgggggatatgctaggcatgctcgtgtgcaagttcgacaaaaactttgtatccacatatcttggaaagggtacaacaacaatgattttatgggtctcttgtaacgcataccctgtcctgttgagcatgttcagcgaagtttaggattgctagaaggcaggccacggcgtctattgctgtaacttgtttccgtgttaattaagtggtgcggtatacatgttgaggcagttgggttcgtcttggaatgctatatcctataactacttgggtgtttggttcgaagaatgagatattacatcatcttctcacttttcactatttgtttggtttgtggaatggaatgagtttatccatc

SEQ ID NO: 107511 - DNA, 1474 bp, Zea Mays
gccctgccttagctgtgcgcgcttttcctgtagtctttaatcgtcagaataggcgtgtccgtccgtaatcgagtgaaggatccgttttcgtgcggtggcgtgtgctttaatcggaagaaggcggtgccttaagcttggttcctcagttccagcttcaacgtgcgcacgtgctgtgtcgataggttatttgtgttgttgtctgagtgggggaaaagggtactgtggttcccttgaagatgataattttgttgcagtttgtgatgttaagtttggagtttactgctgatgcttaacataggaatcagcagttttgcttttgaagcagctgggacatgaacttccgtgaatatccctttaggagctgcagatctaggaaatgattcatgtctgtgctgactagtgaaatttttgaacgtaagttgttcggggaaggacatgaaccgtggattaatctgttaactgttaaccagtcacttatactttttttgccttttatatttggtaagatgtgcgtttgcttctatatgaaagaagaattcctttctgccaattttctatcaatgtaaaaacttgtggcactcatattatcgttttcctgtaggcaacgacagatagatgaaaaatggaagcatgatctgtatcgggaagatgatgaaccagcttcaaaatcaacagatccgaaggatttgcgattgaagcttcagaggcgaagttttcaacaagattttaccagcacaagaagttctggtgtgcgtgatctacgtgagaagctatctggtataatgaacccacagccatcaaatgctgacccaccaaagccaaagccaaagccagtatcggaggttgttaacatctcaaggcgtcaaattgctgatgaaatgcatgcacgccaaaataagaaaccaccaaagcagacttcatcgaagaagacatctcagccaaaggctgaaagtccactcgacagtttcctgagttcccttgggcttgagaagtactcaattaccttccaggcagaagaggttgacatggcagccctaaggcatatgacggacagtgatctaaaagctttgggcattccaatgggtcctcggaagaagattatccttgccttggaatcgagagcataagggaatgacaagggagtacagtgtaggaaggtgggggatatgctaggcatgctcgtgtgcaagttcgacaaaaactttgtatccacatatcttggaaagggtacaacaacaatgattttatgggtctcttgtaacgcataccctgtcctgttgagcatgttcagcgaagtttaggattgctagaaggcaggccacggcgtctattgctgtaacttgtttccgtgttaattaagtggtgcggtatacatgttgaggcagttgggttcgtcttggaatgctatatcctataactacttgggtgtttggttcgaagaatgagatattacatcatcttctcacttttcact

SEQ ID NO: 107512 - DNA, 1056 bp, Zea Mays
gagcattatttcaattatctcaaacctgtgcgtctgcccctttccagctttcctctcaaacggagagatgtactcggatcagatctccaccgggcgcaagcgctccatccatgaccgccttgacggcgacctccctgccggcacgggcgccggcggccgtgtccgtcacacggtgtccaagaggcaacgacagatagatgaaaaatggaagcatgatctgtatcgggaagatgatgaaccagcttcaaaatcaacagatccgaaggatttgcgattgaagcttcagaggcgaagttttcaacaagattttaccagcacaagaagttctggtgtgcgtgatctacgtgagaagctatctggtataatgaacccacagccatcaaatgctgacccaccaaagccaaagccaaagccagtatcggaggttgttaacatctcaaggcgtcaaattgctgatgaaatgcatgcacgccaaaataagaaaccaccaaagcagacttcatcgaagaagacatctcagccaaaggctgaaagtccactcgacagtttcctgagttcccttgggcttgagaagtactcaattaccttccaggcagaagaggttgacatggcagccctaaggcatatgacggacagtgatctaaaagctttgggcattccaatgggtcctcggaagaagattatccttgccttggaatcgagagcataagggaatgacaagggagtacagtgtaggaaggtgggggatatgctaggcatgctcgtgtgcaagttcgacaaaaactttgtatccacatatcttggaaagggtacaacaacaatgattttatgggtctcttgtaacgcataccctgtcctgttgagcatgttcagcgaagtttaggattgctagaaggcaggccacggcgtctattgctgtaacttgtttccgtgttaattaagtggtgcggtatacatgttgaggcagttgggttcgtcttggaatgctatatcctataactacttgggtgtttggttcgaagaatgagatattacatcatcttctcacttttcact

SEQ ID NO: 107513 - DNA, 420 bp, Zea Mays
cgtttgcttgtcatattgggaaaggggaaaattttttcaggtagagggaaaaatcaagaaaccaacctagcacgacctggggatactcgatggggttcacatcataaaactttatgtcgtattgttctcatgtgggatgctattctagaggtactagagattgtagctgatgatggctctagtggggatacgaaatatatgacttctggtttgttgaaacaaatggagagctttgaatttgtgcttattctacatctcatgatgaggttattagacaagactaatgatttgtcacaatgtttgcaaagaaaagattagaatattttccttgctgttggattgattggagccacattgcagaatattagtgaagtacgtgatagtggattggaagaattgtttgaggaggtaaagatcttt

SEQ ID NO: 107514 - DNA, 1367 bp, Zea Mays
aaccaaaaaatataactactaaaagggaatatcattgacttaatcatataatttaacctactttcgcgttactaactcatcatacctcacataggtttatccatatattcctcgcataataaatatttaaacctaaccctcccattattaattcgatcattcatcggatacaaatcaccgatttaatcttctcacataacctatgtcgttaatcctaaacttagctacgcagcacgacgacttcgcaatcgtggacacaattgtcatgctacctgtagccccgtattcctacaagcgttatataaatacgtgcttagctacaagcaggatattcatcgcgacgtacacacctatcaattcatccatcaaaccagtcaataaaatagcaaattagctcaccatttcaatatttgactcgaatccgcgaggttggtaatgattttccgatccagacaatttgtcgagcacttggcagctactatacgaacttcacgcacatcttcatccgacgctcagcaagtttctccataaccggctaggaccttttttacgtatctccccgtcatacaccacatgacgaactctcaacaccggtcgaaagtaatccgagtaacccgccgaaaccaaactcaactcacagccggcgtggtcaactgaaacgacaacgccggggttagagaaacccgcgcgacatgggtaggggcaagctgggctgaatccgagctggagctcgcggcaacagggagcagggcgctggttccagggagtctattggtgttgccaagctgggctaaactcgaggacgcggctgcgcgcagacagcggggaaacgtagccatggaggaaccttgggcacggcgaggaagcaacctagaggctgagccgcaacagggaggaagctccactggcgagaagggaagacgccgagcagaggagcacggactcgaccgagacacagagacaatcgtagagagaatggacgcagcatgaccagagaaggacctcaatcccggattgaagaaaagggagattgggcgagctcaaccaggggcttggacgccaagtgccatgggagatctgagcgagctggagagagccgcgtacggggaggaagaagaacgcagagagcagggagacgcgcggctggagatatagccggtagtgcagaaatatccaagggacagagagggaagcgtacaggagctgctgaccgtggaacagatcaggaagagggaggtcttcggcggctgggcggtcgtctgggataggaacggctaacacagagagataagaattcgtgggatatttttctttttagatttttctgtattccgaaaatcgctgatattttggatcaagatttctaa

SEQ ID NO: 107515 - DNA, 249 bp, Zea Mays
atggaggtttgggaggtcgcatggaagggacgagaggatagggatggcagggacacaaaggatcaaggacgcaataagggagaattagggtttggaggcgatggttctcagggttgtgaagccaaccataaaaccctagcagacaggcccaactatgacaggttaaggcaacaactaattctaggaaatttcattgtcagtctgctcaggagacagtcccacccagtggcggatacaggatccttttag

SEQ ID NO: 107516 - DNA, 99 bp, Zea Mays
gatcttaagttacaagaaggtatacaaatgcaacacgacatgtgtactctgcacacaaaccagaacaaattagaacatggcatgctaatcctaagaacc

SEQ ID NO: 107517 - DNA, 296 bp, Zea Mays
gagggtgttctgcaaggtaggaatgggacagtgttctgctatggagctacaggggctggcaagacctacaccatgcttgggacaatgaaaaaccctggggtaatggtgcttgcaatgaatgatttgttctccaaggtgacgcagaagaaccactcaattaagctgtcatacctcagatatacaatgagacggtgagggatttgctgtctcctggtagcccccttaacctgagagaagataagcagggaattgttgctgctggtcttacccaaagaagtgtatactccacggatgag

SEQ ID NO: 107518 - DNA, 501 bp, Zea Mays
cctgttagtttttcatcacagcgaggtaggcaagtccattggatctgtccttagctccactcctatacttaagtgctggtctctgctaattccgagctctagccaaaaacctctacaaagatgttggagacctggtgttcatgctgatgttaactctccccagcccctcccaagttggcactgtccaaagcttgcacgccgtgacctaccagtagtgaccatgccggtcagtttggccatctcgccgtggccaggacaactcagcaaagtacacgatcatgctatgtttgttctgtgatcaccttgtcatggccagaacggagtcacgtcatcgtggaactagcgctgcgggcagcctcaccgtggaccgatcgactggagtcatccctggtcaatctcgcgcacgcaccgagactttggaagaacacctagaagaagtggtgtttgaaggagtcaactccagtggttgctgatcaagtggaggagccatctaactgtgta

SEQ ID NO: 107519 - DNA, 368 bp, Zea Mays
catcacagcgaggtaggcaagtccattggatctgtccttagctccactcctatacttaagtgctggtctctgctaattccgagctctagccaaaaacctctacaaagatgttggagacctggtgttcatgctgatgttaactctccccagcccctcccaagttggcactgtccaaagcttgcacgccgtgacctaccagtagtgaccatgccggtcagtttggccatctcgccgtggcgaggacaactcagcaaggtacacaatcatgctatgtttgttctgtgatcaccttgtcgtggccagaacggagtcacgtcatcgtggaactggcgccgcgggcagcctcaccgtggaccgatcgactggag

SEQ ID NO: 107520 - DNA, 145 bp, Zea Mays
acttctcacatattttacatgtcaacaattactcaaacatttctttatcataaatacatacacatctttataagtgagtaaaatattttatcatcacacaggcctactaatattctactcggtacactaattcaactaattaacc

SEQ ID NO: 107521 - DNA, 1665 bp, Zea Mays
agccactttggtctatcagaggcaaatgttgaatcggcatgtgcttcacttgatatggaacagctgaagaagctctgtgatggaatggatggtaaggatgcagcgggaaaggcctggttgctgagcaatgtacttcccaatgaaagttcctcaaaggaagcaaagaaaattgaagggaatggtgtggagccttctgccccaaaatccaactctacaggaggtagagcgacagaaggcagtagcagcatattgaacagctatgagaaaaaagagagaccatggggaaaggaagagattgagatgcttaggaaagcaatccaaaagtatcctaagggaacttcgaggagatgggaggttgtttctgaatttattgggactagcagatcggttgaggaaattctcaaggccaccaagactgttcttctgcagaagccagactcatcgaaagctttcgactctttccttgagaagcggaaaccgacacaatctattgcttcgcctctttcgacccgagatgaaattagttcaactgagggagctgggactgcatcgtcaaagtctgcagcacaatctgcgagtagccagacagccaatgagaaagctgctgctgatcctgtcacggatggaggaccatccgtatcagatccagatgcctggacggatgcacaggtcctggctctagtccaagctttgaaggcttttcccaaggatgcaagccaaagatgggagcgtgtggctgctgctgtcccagcacgtccagcagcatttaacagtatcgcgcatccgtcttttggctcgcctccacttctgtattttgcaaggctggagaaacgacgccgaattgccgccaccacccgcctagaacaatccaggcagagtttcctccgaagacccaatagagcaacgatgatcgccaacaccatgaagaatgttgcagggacaaccaccgccgatgccaccccaccaagcctccgcgcgttgccacctttcgatgatcgacacaccaacccagtaggtccccaacaccagagctcctacaccagccggccagctagtgcgaaaccccaagatggccgaggcgaggaggcctacatggagggtggaggatatccatggacgacacccttaatagggtcagagttacatccgacaaggcaaaaccagtggcgtgaggccaaggggcgcgaaaggccccaccatcacccaccggctgaacgggaggtgttcacaaccgttgtcattaattatcaagatcttgatgagaacttaggtggtctccaccagaaaacttcatccgacaattgcagaaaaatagttgaacaacccagatggcctaacagttggggaacacgtggtgagatatggtggaaaatagttgaggaagacgtggtgagtagcttcagaacgatgttggcttgtttgggatctggttcaagtgcagttagtttcgctgggcttggtgcaaaagctcttctttgcatacaagtggttatagattccattaaaaagggcgactatgcaattgcttgtcgaccactgctctttcaactatttgggggtatggtgacgagaaggttccttggtggagttatatgtactggctatttggccccaaaagggcgatcccttcttactgttgtcgtcaacagggtctacggagtgtag

SEQ ID NO: 107522 - DNA, 624 bp, Zea Mays
atggcgtcccagaagagttgtcttctgatcactttctcccaggagattgtagatggggtgcctctgtttgtttcatcaaactgccttcctgtaaaagctttgaaatatgaacctgctggttattcgttccatgctgcggcaatgaagctgcttggtcttgcggagcatgaagatatagaaactgatgatcacagcgtttcatcggatgacaaaagccaagattttaatactgcttctgatacctttagcagcaaagggaagaagaagtcatctggcagtcaacagcaggaccactatgctttgcttgggttggggcacttgaggttcttggccactgaagatcaaattcggaaaagttaccgtgagatggctctcaaacatcatccagataagcaggctgccctgattcttgcagagacaacagaggaggcaaaacaagcaaaaaaggatgagatagaaagccatttcaagtccatccaagaggcctatgaagttctcatagaccctacaaagaggaggatttatgactctacagatgagtttgatgatgatgtcccaacagactgtgccccacaagacttcttcaaagtttttggcccagcctttcatgagaaatggacgctg

SEQ ID NO: 107523 - DNA, 125 bp, Zea Mays
tttgcaacttgctactttagaccttgtacaattttcttacacgcaaaaatatttattttcctcttttgtttttgtttatttttcccatttgatgattaaaaattttcatggacatcaactaatgc

SEQ ID NO: 107524 - DNA, 312 bp, Zea Mays
atgcttcctttccctccttctgttctgattcttgtcttgttaatcactggcttgccagagaatgctgaagttccaaggatctctggggccttcttaggaggacggattcgccgatttatatcctgcaaggtaacatcgccttcttgccaggatggtttgatgagagtaaaaggatatgctactgaggtagttaagttgtccttcgtaactagtgacgagcttgctcctatggagactttgagtgtagaaagcttcctagtttcctgcattatgaaactttctgtcattggtgcaatctcacttgttcctgta

SEQ ID NO: 107525 - DNA, 829 bp, Zea Mays
tcatttctaaattagttctcttacaccttttcaaattttagcctcgatctcgagctgatatttacgtttatatttaaattttcgagtaaaaaagaaaatatccagccgttcctcccgccgttctctctcctccgatttttataccccgtcgttctcatccgctcgcgcagcaagaagaaaaatctggccgccgctcattaggtggattttttccacgtaacgtccatgtactatgtgcttatcccccatcatgatagcctccaggagttgacacccacagccacgtgagttgtccttccggtgttgccaggtctcggaagacacgctgtcttcatcttccatggagctggttgtgagctccgcgtacggctccggccatcactcctctggttgtgtctctccagcatcacgactccatcccttcatgctcgtatctggagctcgctcggcctacagctcgcttgtaccccggccgccgtgttgttcctgttcgtcttcagcgccggtcgagcatcgccgcttgggaatggcgcacggccatcccgtctcgacctcctccagctcctccatcccttgttccttggcgctcgccaagggcctctccttcatcttttgtcgcgtctcaactcccatggccgcctctacgcacgagctcgccggacgccgcagcatatgctccctgctcggcctccccggcgtgctgctccctcgccttggcgcccctgcgagctccttctccctcgcccggtttccagctcgagcctcgccggatgccgacgctgcttctctgacctcgtctcgacactcaatcgctgcagcacgccatatc

SEQ ID NO: 107526 - DNA, 974 bp, Zea Mays
ggagctcgctcggcctacagctcgcttgtacccggccgccgtgttgttcctgttcgtcttcagcgcctgccgagcaccgccgcttggccatggcgcacggccatcccgtctggacctcctccagctcctccatcccctgttccttggcgctcgccgagggcctctccttcatcttctgtcgcgtctcaactcccatggccgcctctatgcacgagctcgccggacgccgcagcatatactccctgctcggcctccccggcgtgctgctccctcgccttggcgcccctgcgagttccttctccctcgctcggtttctaactcgggcctcaccggatgccgacactgcttctctgacctcgcctcgacactcaatcactgcagcacgccatgctgtgtgtgctacactatcatcgctcgctttcctcgtcctcgccaattttcttcgtcgtttctcggctacaacctcgtcagctcctgtgagtcgtgcgcgtcttgtgttcgggtcgagcccaaggattttgagaaaaaggaagctccagtgcttcggccggtgaaatgaataaaatggtggtagtcatggtccttgcgaaatccgagatcgacttagtcactgttgggtctatgcttcgtcgccgaaggtcttctaggaagaagcggctttcggctgaagctgtttgtatgagatggccgaaggttcctcttcatgaagcttcggtattacaaaccgacttaaagatagaatgaccttttagtccataaaggtctgagtcaatgttgtaaatttttatgaggggcataattgtaattcctcacagactgtgtcctgtgcctataaatagtgaacagtattcctttactgttcacgcattctggtgattgtaatcgcatctttcgggaacctgtctttgccaaggcagaggtataattgtattcaacaattcaatatatcaaataaatataatttaattcgttta

SEQ ID NO: 107527 - DNA, 405 bp, Zea Mays
atggcaacggcaggatggggagtggtgggtggcacgccgagggaggtgctactgtatacggcagcagcaaggtcgagaggagcggtggtggctgtcgaggacagcgaggagagcattgaggggaggcccaaggccgaggatgaaggaggcacgacgccgcaagaggtcagcacgggccgggccagtgggagctgggcgggtgccataccgctggagggccaggggatagcttccggcagtgggggaaggagaccgagccctgcagggggcagagcggtcgcaccagaggtggtgggagggaccgttggagctcggcgtgctgctgttggcgcgaccaggacgcgcttgagctccatgggagcaggctctgtgtgccgggagatctcgggtgccggtgttgagtag

SEQ ID NO: 107528 - DNA, 1038 bp, Zea Mays
ttagaatgaatttctctgattttatttgcagtctggactgcgcgcagaatatataaagagtgcaggggctccggtataaacatccacaagactcaaagtacaaccgcgagggacggcgggttgattcaaatgtttgtcaaggtctctttagcaatttctctgcggcgaagcgttaccgcacagatctagccgtccgatcccaaacgaagtgccaagattagactacaaaggcaacgaggctatacgtattctgggccctcggattgttaaccagtggtccacaacgatcgataacgcggagaaatcagagccgttcaaccgcagatcgacgccctgagccaattacgtcgaaccggtacgcctgctatgcgatcgtggccctacgattcacatctaacgaccaatgatcatcgtttccttggataaatctcacacactccttcaggatccaacgacggacgcgtcgtcgtcaacctccagtcgttccatggcggagcgagcaccccagacccgtacgctcggctcgccggcgatcctggcaaatgcgccagcccctccgcagccctaagcgcgacacgctaatctagaaaggactgagatgtgagcccgagctcgacaccgcacgacgccgaagtggcaacccgcgtcgttccaatttgtcgcgcccccaactcgaggctacgctgaggaggagcgaagattcgtaggggaaacttaccgagttacgccgcacaagttctaccgaagcgcgccgccgacttcctgggctcgagatgcgactccagtctttcaccacttcgagcacgccctggtctgcgacccaaccggacgacggcgcccgcgcagtcctcaacgcccggcgaggaggcccagaacgctccacgccgcaagcacaggaaagtccctggacgtccagggtgcggcaccgttgaacaccctcccggcaacgctcccgttctctctctgctcttcctttcttctctctcgactgcgcgaatacatcgtcagcgcatactcgttggttttttttctcttctg

SEQ ID NO: 107529 - DNA, 320 bp, Zea Mays
gtgctatataaaagttgtattcaacttagatgtctagctgtcacacccgggttttaggggtccaaagcccgggcgcgaacataatcaccaggtgtgctgggaccaagtctcacacatatgatgaatcatggcacaggatcgaatgtcacatctttactacataacaggagttctataaaaaataaataaataattacattataaggagacaacggtccagcaacccaaagttgactgggagacgacggcctagatctctctcacgaactcatcgcagcatccttcatgcgcctcatcctgcggtacctgttcttgacctg

SEQ ID NO: 107530 - DNA, 1098 bp, Zea Mays
ggtcgctatagagcaaggatcactatcaaatcttatagcctaaacttacctgtagatgttagtgactaaaaattaattaaaacaagtaaacattgatcgctaaattgtgtggtgatttatttctttttaatattgcttgtttgtttatttcatggtttgtttatgtatgaacatgactatagtatgcaactgtgttttttgtgcttatacgatattagttattacgataaatagggtaataaatttttattcaaatgtttattatttatttgcattcgtaataatttattcaaatgtttattatttatttggtaaatttttatgaatttttgagcaattaaaaaatgtatttcgaaataaataataaaaaagaaaaccctccctaaccctaaggcccactaggggcctatctaactaaccctagcagccgcgcgctccccggcttctctcccagccgccgccgcctctatctctcccttccctcttctctctcccctcacctctctcctcccttccctcgcctttgagagagccagacagatagacaggcagcagcacaccaccaacgacgagctggagaagacgtggtgcatcgccaagccgtcggcgtcgaacgagatcctggcgcagaacctggactacgagtgctccgaggtgagctgcgccgtgatccagaagggtgggccgtgctactacccggacagccctgtgtcccgcgccgccgtcgccatgaacctgtactacgcctacagcggcaggcaccccctggaactgctgcttcaacaactccgcgctcgtcgtgcagtccgacccaagctatggctcctgcacgtactactgaggagtggagagacaagacgaggagagagatccattatgccgggcggctccattgcgtccgtatgcagagtgttggttttctagtctagactgccaatttaccaaatgcacattgttgtgtacccgtgctgtagctgacatttggagatctggcagcgaactcgtggatactccgtttcgcattcatgtgattatgtgtataaaaattggtgatttgtgatgcttttgtatatataacagttgttgaatgctaattaa

SEQ ID NO: 107531 - DNA, 661 bp, Zea Mays
ttttttttggagaaatttgagcttgatccaaactcattcttttgcaactgtgtaatccagtttgagtcgctactattttttgtctttaagatacttgaatgtatgctcttaaataaatgttttttactcttaaataaatgtatgctcagaatatactagtaaatttacattcacttatttcccttgcaggtacttgaatgctatacagacaaatgcacaccatcttattaggtatctagctactgcagttgttgtcaacaaaaggagaaggaatatgcttaaagagttgattaaggtcattcaacaggagcaccatagctacaattatcctgtaactgaatttctggaatgcttatatgttaactgtgattttgatggtgctcaagagaaactcatagagtgtgagcaggtaactctggagcagctagagtgatgtagttgtgggcttttgaacaatagctggagtgatatgaaacattagtgatgtagttgtggtcttttgaactgcttcaagctggagtgatgtcgttgtggtgcttttgtgactgatcatctctggagcttttgtgaatgatctagctagctatctgtaaatgatctagttgtgaatgttattataattatgatgcttttgtgaatatataattgtggtgcttttgtg

SEQ ID NO: 107532 - DNA, 396 bp, Zea Mays
aaaaccgccgccggcgtcacgaggatggctgctcctaccgatgaggctgccggctcagggacgccgggatctaccgattcgttcctcgccgactggagggaacggatcattctgccggccgtcgcggctggtgtgcttggagccgcgttcgggctgctgtcgcggcaccgggcgcgccttggcgccgcccgcgccgctgtcacctacgccgcgaacctcgccatcgttgctggatgctacggaggcttgctggctgctggacgtatttctgggtactatggcatagctagatttgtgaaagttaaattggttggtgttcgtttactcaaaatgaccaaagaagtcatgcaattgctggtgacttgtttttcaggcatagctagatctatgaggtag

SEQ ID NO: 107533 - DNA, 387 bp, Zea Mays
atggggaaatacttctcacgcttcttttccctctcggtcttcaaggagagctggtgcttggtgaggcgcctgcggatggcgcgggtcttcttggggcggaggtcgagcgggagcagcttcttcttcttgtacgcctcacgcagcgccgacttctgcttctgcgagatgacggtcagcacgcgcgcgatggaggtgcgcacaaccttgctcttggagagcttgttgggagccccgccggtgaccttggctacgcgtagcagggagagctccgacttaaactccttaagctgcgcttgcagatccgccttgctcttcccccgcagctcgtgcaccttgatccgggccatcgcgatggggcgagggacgagcggcggcggcggcgagtga

SEQ ID NO: 107534 - DNA, 564 bp, Zea Mays
atggaacctgtcaaacgtgacgtgcgcgacatgttgcacgtccgtgggcagcccaatctccatcccgccgccgccgtgttcgccttcaccgccgccgcccaccgtcctgcacccgagcagcgacttctgcaacagctcgaagagcagtgccaagaacgaccaccgctcctcttcctcctccacggcctcttgcccatgctgttcaaggagtcgccggctcctagcagatcccgcagtgcgctcggggggtggaagcgaggttggtcgggccccggaggagcgccacctccgtcattgcttcctccttttcgaattctcactggaatcatgagatgtgatctggtgcggtgtaggaccgattttggggggcgattcgggatgggtaaatttcgctggtggtggagggggggggggccaaatgcaccaagaaatgtccgccgagggggaggccaccggcgggtgaggagcgatcgatggggcggtggaggcttaccggcggaggagagtggaggctcgccggcggggatgaggccaccgcgcggtgaaaactgcctgcgggtatga

SEQ ID NO: 107535 - DNA, 915 bp, Zea Mays
aggacagaattgaaaaacatctgtcctaagtattgagagggcagaattgaaaaacaagctcatggattcagaaactaccacgacatatcttaccaacacgcagaaagaattggaagcagctcttgtggagaaagagagccatatcaaccaaatgaaagagaacgcaattgcttcaaacccagatcagacgacaactataaaggaactcctgcagcagaaagaagctgagcctgatcttgacaaatccaaaaattccagtgatcccattcctgctacagtagaagataattcggacaatactataatatcagagagcacccacaatgatgagagcattgtagtgggagcaaacaccgaaaatgcaacttctgaaaccgtggtaggcaaatctgaaaactccaacgattccatgcctgctccagaaaaaaaattcaagcaacactaatgcatcagatagcagccaccagaatgagaacattatagtggaagcaaaagaagataatgcaacttctgaccttgtggtactcgacaaatctgaaagcaccaatggttctgtacctgttactgcagaagaataaaattcctacaacaccactgcatgggagagcaaccaacaagataacagttcctaacaagaaaagttcttaacgttaacaaccaacatagaagatgtccagtttcaacagaacaaaggtgatgccaatgagcaaccagatgatgcttcatagggaagccattcagatagatctgagcttcagcgggggaaccaaaaactgattggcaaccaggaagaatggcgagaatcacggagcagatgggtaggacatcgttgatggcggccgcgcacctcctccccacgccctcaacacgcgcgccatcgatttcgtggggcaggagcgcgtttatggtagccgc

SEQ ID NO: 107536 - DNA, 2102 bp, Zea Mays
gtcttgtcagagcctcctcgtcgtgggcgtaaaagccgccgcctccaacccttgtaaaagtttcttggatagtccgtagccgcttgccctgttcgcatcttcgcgcgtggcgcacaccgctccagctctccttcgacgggcacggccgagccgccttcgtcttggccgcagcggtgcgcgctctccatggcgtcctaattagcctagccgcaacgccgcgcccgtgcctgcgaagtagggtgtaaagttttgtatatgatgccaggcatggatgaaccccttcttggcaatggtcttaagaccagcgggaaaagagagagcctggtagtggccgaggtcagaaaacagatgtaccttgctgggccactcatcgctgcatggatcctacagaacattgtccagatgatatctatcatgtttgtcggtcaccttggtgagcttgccctctccagtgcctccatcgccacctcctttgcaggcgttactggcttcagcttattgtctggcatggcgagcagcttggacacactgtgtgggcaatcgttcggggcaaagcagtactatcttcttggcatctacaagcagagggcaatccttgtgctcactctagtcagccttgtggttgcgattatctggtcatacactggacagatccttctactctttggtcaggatccagagattgcagctggggcagggagctatatccggtggatgattcctgcgctatttgtgtatggtccactacagtgccatgtccggtttctgcaaacgcagaacatagtcctcccagtgatgctgagctcaggtgccacagcactgaaccatctgctggtgtgctggctgctggtgtacaagattggtatgggcaacaagggtgctgccttggccaatgccatctcatactttaccaatgtatcaatcctggcaatttacgtcaggcttgcaccagcctgtagaaacacctggagagggttctcaaaggaggcttttcatgacataaccagcttcttgaggcttggtattccatctgcgctgatggtttgcttggagtggtggtcatttgagctcctggtacttctttctggacttctccccaatccaaagcttgagacatcggttttgtccatttccttaaacacaggctctttagcgtttatgatcccttttgggcttagcgcagccataagcacccgtgtttcaaatgaacttggtgctgggcgaccccatgctgcccatctggctacccgtgtggtcatggtgctggccatcgtggttggcgtattaatcggactagctatgattttggtgcgcaatatctgggggtatgcatacagtaatgagaaggaggtggtcaaatacatctccaaaatgatgccgatcctagccgtgtcattcttgttcgattgcgtgcagtgtgttctttcaggtgttgctaggggctgtggatggcaaaagattggggcttgtgttaatcttggtgcatactaccttataggaattccagctgccttctgtttcgcctttatgtaccatctaggtggaatgggactttggttgggaataatctgcgcactcgtcatacagatgctattgcttctcacaattaccttgtgcagcaactgggagaaagaagctttgaaggcaaaggacagagtatttagtacatccgtaccagctgacatgatgacatgatatttctgaagatatttttttgaaggaaatgcccatgaaactttgccaaggaacatactaagaattggttgttcagattcaaggcctttctccatgccatcagaatgatgcttgggtctagtaatagctcctgagcagtctgttttttacttttggtcaatactcaatacatggaagatgtttggtttgaagaaccacgccatcctagatgaggtggtatattataagttgatataacggctccatactagttattgaggaatgagacgatgattatctcatgtaataataatgcttttccccctctagttattgatgtaagacaattgaggcaaatgaacaaaatgtcacatttgattaaataagttgcattgtctatttgtgcagttgtttgggaaataattaaa

SEQ ID NO: 107537 - DNA, 2069 bp, Zea Mays
gtcttgtcagagcctcctcgtcgtgggcgtaaaagccgccgcctccaacccttgtaaaagtttcttggatagtccgtagccgcttgccctgttcgcatcttcgcgcgtggcgcacaccgctccagctctccttcgacgggcacggccgagccgccttcgtcttggccgcagcggtgcgcgctctccatggcgtcctaattagcctagccgcaacgccgcgcccgtgcctgcggcatggatgaaccccttcttggcaatggtcttaagaccagcgggaaaagagagagcctggtagtggccgaggtcagaaaacagatgtaccttgctgggccactcatcgctgcatggatcctacagaacattgtccagatgatatctatcatgtttgtcggtcaccttggtgagcttgccctctccagtgcctccatcgccacctcctttgcaggcgttactggcttcagcttattgtctggcatggcgagcagcttggacacactgtgtgggcaatcgttcggggcaaagcagtactatcttcttggcatctacaagcagagggcaatccttgtgctcactctagtcagccttgtggttgcgattatctggtcatacactggacagatccttctactctttggtcaggatccagagattgcagctggggcagggagctatatccggtggatgattcctgcgctatttgtgtatggtccactacagtgccatgtccggtttctgcaaacgcagaacatagtcctcccagtgatgctgagctcaggtgccacagcactgaaccatctgctggtgtgctggctgctggtgtacaagattggtatgggcaacaagggtgctgccttggccaatgccatctcatactttaccaatgtatcaatcctggcaatttacgtcaggcttgcaccagcctgtagaaacacctggagagggttctcaaaggaggcttttcatgacataaccagcttcttgaggcttggtattccatctgcgctgatggtttgcttggagtggtggtcatttgagctcctggtacttctttctggacttctccccaatccaaagcttgagacatcggttttgtccatttccttaaacacaggctctttagcgtttatgatcccttttgggcttagcgcagccataagcacccgtgtttcaaatgaacttggtgctgggcgaccccatgctgcccatctggctacccgtgtggtcatggtgctggccatcgtggttggcgtattaatcggactagctatgattttggtgcgcaatatctgggggtatgcatacagtaatgagaaggaggtggtcaaatacatctccaaaatgatgccgatcctagccgtgtcattcttgttcgattgcgtgcagtgtgttctttcaggtgttgctaggggctgtggatggcaaaagattggggcttgtgttaatcttggtgcatactaccttataggaattccagctgccttctgtttcgcctttatgtaccatctaggtggaatgggactttggttgggaataatctgcgcactcgtcatacagatgctattgcttctcacaattaccttgtgcagcaactgggagaaagaagctttgaaggcaaaggacagagtatttagtacatccgtaccagctgacatgatgacatgatatttctgaagatatttttttgaaggaaatgcccatgaaactttgccaaggaacatactaagaattggttgttcagattcaaggcctttctccatgccatcagaatgatgcttgggtctagtaatagctcctgagcagtctgttttttacttttggtcaatactcaatacatggaagatgtttggtttgaagaaccacgccatcctagatgaggtggtatattataagttgatataacggctccatactagttattgaggaatgagacgatgattatctcatgtaataataatgcttttccccctctagttattgatgtaagacaattgaggcaaatgaacaaaatgtcacatttgattaaataagttgcattgtctatttgtgcagttgtttgggaaataattaaa

SEQ ID NO: 107538 - DNA, 905 bp, Zea Mays
gtcttgtcagagcctcctcgtcgtgggcgtaaaagccgccgcctccaacccttgtaaaagtttcttggatagtccgtagccgcttgccctgttcgcatcttcgcgcgtggcgcacaccgctccagctctccttcgacgggcacggccgagccgccttcgtcttggccgcagcggtgcgcgctctccatggcgtcctaattagcctagccgcaacgccgcgcccgtgcctgcggtgttgctaggggctgtggatggcaaaagattggggcttgtgttaatcttggtgcatactaccttataggaattccagctgccttctgtttcgcctttatgtaccatctaggtggaatgggactttggttgggaataatctgcgcactcgtcatacagatgctattgcttctcacaattaccttgtgcagcaactgggagaaagaagctttgaaggcaaaggacagagtatttagtacatccgtaccagctgacatgatgacatgatatttctgaagatatttttttgaaggaaatgcccatgaaactttgccaaggaacatactaagaattggttgttcagattcaaggcctttctccatgccatcagaatgatgcttgggtctagtaatagctcctgagcagtctgttttttacttttggtcaatactcaatacatggaagatgtttggtttgaagaaccacgccatcctagatgaggtggtatattataagttgatataacggctccatactagttattgaggaatgagacgatgattatctcatgtaataataatgcttttccccctctagttattgatgtaagacaattgaggcaaatgaacaaaatgtcacatttgattaaataagttgcattgtctatttgtgcagttgtttgggaaataattaaa

SEQ ID NO: 107539 - DNA, 595 bp, Zea Mays
ggaatattttcaggaaactagactcgaactgaaccatagcccggcaccctcgaaacgatggattgcttttgagaaaaccgcatctcactcaaaagtagcctaccccattttcccgagggaatacgcaaatccggagtgggagaaggctaaacccatttctgttctgatccgccagatcatgtcatgtcttgtgtcaaatagatattgtcgtatggtatggagtgagaatcgagatgactatggccagtagaaagaaagagagaaagaggtaacgacatctgattaccgcttttagcatggaatttggtaccagatcgtttcgaaaacgagtccctaaagtctgttttcatttcaatggcaggctcaaggagtggaaagtgagtccattccttggtaaaaaaaatgaagtaatgctgcttccttcttagacttagagaagggcccctattttttattttagtctaagtagcctatagtggttgtttccacttaaataaagggcgggtaggctagggagggaatgtttacttttcttatttgcggggaaaagagttgatgccgctagcagctcagcttaggccgtacctacatgggc

SEQ ID NO: 107540 - DNA, 116 bp, Zea Mays
tggaagtagaggaaaagattaggcgaaagaaatcgacatccggcttcttttacttatctatctgtataaaaatacgactcttgacatgttttggctggctgctttttaccccgctc

SEQ ID NO: 107541 - DNA, 110 bp, Zea Mays
ttttttattcaattgtgtactcgttcctgttgttgtgccattagtgacttgagaagactgtgtgaaagagagcaagaagccgacgcgaggagatcaagatcacagttgtg

SEQ ID NO: 107542 - DNA, 1992 bp, Zea Mays
tctttccaagttgtcaaacttcagttagatgcttactcttcgccctgtgcctctagagtgccggtggtatagtcagagattgccgtggagatcaaaggatctatgtataaccttggttcaaggtctgccttatgtgctgaattatgggcagggactgaaacagctttggtagcctagctcccatcccaagaaaagaagtgtttcaacagcctttaatacttgattttggtttgattgctgcaatgcaagacaaacaattgctttggccctttcttccattctttgtatttccttatttagtcttacatagagaaggaaaggggtagtgagcggtctataacaataaaagcgtcggaaaaggggatgtgaccatgaagaggttgggctggtctgagcttaaatgcctaactaatggtagtgggcaggacggaaataaaaagcatggtcttagggctagcctgacctgaatagctatgtgccagagcatcccgcaaccgaaaaaaggcagtgggcactttactttggccatccatcaactgaggcaagtaggcgcgaagcgtcgctaggagaaggagagcattcgtatgagtctactagtcatagttttctattttgttagttctaccggagataagtatggaaggtactatgagtatatatcctggtatgcttctaacttacctttcttcctcgggggttggctttgtaatggaacatgaaaacaccttttttgcttcgcccatctctatatgccacggcgaatcgatcggttgaatccactgcaagcccatcttcaaaatccccacatagtaggaaactaaaggagctactaagcgaggaagcccgatttctagaggactagagaggaaggactaattcggagataaatcattcaatagcggataagaatcgggttcatagaatctattttgggtaatgcataggactactattcatatcatatcatatcatatcatatcatatggtgaaaagacaggatgtattccgacgaaattggatgtgatcgacaagagaaagatggaattttatataaggaaggaaatcaaacgcgttgtttgagagggtaactagagaaaaatgaaaaataggctgtccctggactctacgcaggacttctttctaagccttacataatttgaatttctctgacattccatgtttccgaaacggatcctataaaatatttcactttttctatgatcatctctattttaggtattcggggaatcctccttaatagacgaaatattcttattatgtcaatgccaattgaatcaatgttattagctgtcaatttgaactttttggtattttccgtttctttggatgatatgatgggtcaatcatttgcttcattagttccaacagtggcagctgcggaatctgctattggattagccattttcgttattacttttagagtccgagggactattgctgtcgaatttataaattgcattcaaggttaaacataactacaggagagttaccaaatacaaagttatgttctcctttcgttctcttctttcttttctttttattttatcaatatttgagaactctttctcaccataactgtactcctgttgttttgtttcattaaggcgggggcgtatgtgtctttcctctgcctgatctgcagttttccttcttcgcgatccttctcttacttctaccggaaggtggctggaagaagccgtgggtggagttggcccatgcccatcttgcctcccttcatcatcctctggtaagtgaggagatgggatctcttggatgggcgagagggtgttccagtcgtcgtcgtccatatggacgctggtctcttcctcctgaagacagagtttcgggtgagctagcaaagaaagcagcagtgccacctaatactcgtagactaaagtacttctttttatatctaggaacaagcgtcggagtaaatatcaaagtagcagcggaagctgtccagccgaaaga

SEQ ID NO: 107543 - DNA, 1242 bp, Zea Mays
tctgttaatacaatcgcaagttctgtcagtattagaacgatgactgatggatctaatacaagtaatgctaatggtgttccgattccgggggcggggggttcaactgggatttatgaggaccacccaggtctgaacccgaccgatgaaatggtggtggaatatcaagccggtataagggagcaaatgagtgaattaatgaggatggacggggagcaccccgaagttgtggctgccgccgaacgtgtgcatggagaaagcgataatatcgcatttttgcaagggcagctcgaggatttaagggcgcatggaagagaaagtgaagctttcaagtacggagtgtcgaatgacgcggatcttcctggaggaggaaacccagcgggaagctcaggaggagttgacctagcgaatggaaatgaggcggggagttccgcaggagttgacctgatgaatgtggatgatgctgcaggttttgcagcagagagccccctggatcaatttggaattcacccaattctggatctgaatattaatattggtgagtactatgtctcattcacaaatctatccttgtctatgctactcactctcggtttggtcttacttctgactttagtatttatggaattgtccggccagaaacggggaagagcccatgctgtcgtagaggcctcgtcgagtgcttccgctatgcctaattctgaggatgacgataagcggaaaaaagtgtcccgccaagacgccaatggcaaagagtcagagccgcccataaatggggcgcaacctgaagtaccatccatttcgttcttaaagaaaagaattaaaacagttctaaggtcctgtcgagataggaaccctagggagagcacattacgctctacttacgaggatcttcaccttgaaacggcgagcgccgagaagcgggtaaaaatcgcccaggccctagaaaatctgtacaggcgaagccaatatttccggagtaacaaaaggcagcagccccataccgacttgattattcaaatctgcgattgggagcgggatcacctacgaaaaagaaattcactggtgtaggcataggaaaccgaggccccccaaacccatctactatacggttgaggtgaggggggaaagaagagtgggcatgtgggcttctttcactgtgtcttttgtgaagcaaaggcatcgcggcgtatcaacaccagactagttgctgattcaatagctgacttcctttcaaatatgata

SEQ ID NO: 107544 - DNA, 98 bp, Zea Mays
tccctgatccgctattcttttccagttggtggatttgctgctcgccgtggggagatccacttttatcatctcataagaaagccagtggtggagttagc

SEQ ID NO: 107545 - DNA, 737 bp, Zea Mays
ttctttcttatttatgctcctaagttagctatcgtcctgttcgcccacataagcctgagactcatccacctaggaacccggaaatgcttagagcaatagccagcgaactaatttcacttgctgagaggatgaaaggtgcctcaacaatcctcatgtccaatatctgctgccgagagaatctctgcggctctatctcgaccgtacagaagtaagttagttgcttttattttagcagaaaagcggcacggcaggtcgtgcctgtcagatttgattcgatcagatagggaatccccacttttccaagacaactacatttccatttccgttacagcgagaaaaaagatagtgtgccaccttgagtcaaggtatattccttcttttgcttctttttcagaacgaagggctccatccttctttctaattcggcccccggggctataatatggcgaggagacaacactttttcagatatgaacgaacctttactcgtacctctaacagaaatgtggaggagttgatttccgatctttaaccggaagacgagtcaataagtcaacaaaaggggttactcccaccttagagcaccactacatttacttactacgcgcctatccctatcacattcatttcttttactttcctgtctatcattacagaccggggctttactttcctacaaggattccagatactctacatggtctccgcattcattcctgtctgcgaatctctattcc

SEQ ID NO: 107546 - DNA, 106 bp, Zea Mays
ctcgcatcaaaggggtatgggcaatcgccgctatccgtggacatgacttgggaagtctttagttgccacaggtacgggtccgttcgaggcagactgagaagcggtc

SEQ ID NO: 107547 - DNA, 339 bp, Zea Mays
atgacccatgacgagcacgctgacgccgccacagagcgattcctgcgcgtccaccgccttgatctccgcccggtcgatacccatggacacgatcttgtcgttaatcgcgtccatggtggtgaccgtgtccatgccgtcggcaccggtgccggcggggcgcccgaggcagctggcctcctggtagaagcggtagacgagctccggcgactggtgcaagatgttgtagtactgatgcacgaaggcgttgcccaccacttgtgccggcggcggagctccagatgccgcggctgcggcagggggcggcggctgcgacgccatcttgggagatcgaggggttag

SEQ ID NO: 107548 - DNA, 1455 bp, Zea Mays
tgtccaagcatgtcttgtctccgcatccttctcctggtaccgctgttcctctcgtcgggaatgtccggctgcttggcgtcctcatcgtcagcttcatcaggatgtagctgcggcgacagcacggcccacgatttatcttccttcaccagtgactctgctgctgagctggtgctcctcaaggacgccgggatcagcaatggcgtcctccatctcacggcagacagctcgaggaaccgcaacaggtccggtgccgcgctcatgccaggtccggtgacgctgtggtgccaagaccccgacgacgacgcggaggcgaagcaagacgcgtcctttgaagcctccttcaccatgggcatcgtcagcaatccatcaccggacgaggaaggtgccgtgcagaggaaaggagatgccggcggcggcggcggcggcctcgcgctcgtcatggttgcctccctcaacagcccagcgctcggcatcctcggcctcagcaacaacccttccgatcaggtgtcctcttcctccgccagcagcggctttgtcaccttcacgttcaacacggtgaagctgaagcaatccaatggtgaccccgacgacagcaacggcaccgtcatcaacctagacgttgttgtctccgtctccggtgccgtttttgcgcgctcaccacctctgactatcaccaccgccaccgcgacgaataatcaggtcgctatgaagaactgtaccgtgtggattgactacaataatggtcgcgtatcgatatatgtggacgtccaagggcggccgaagccggacaaagccgccattgatggtgtggccctcaacctcagtgaccacctcccgcagagagccttcgtcggattactggcgtcaacagacacgagcaccgagctccactccgtcctcagctggaacctgcaagtcagtctccccggcgatggcccgagcatggactggaaggtgatactgccggcggttttgggcgggatcaccttcacgggaatcatgaaccttctcgttgccgtgttctacttcaactccaagtacaataagctcaagatggagctggtcttgtctgagactctccggcggctgcccggcatgccgagggagttcaagcacgccacgatgaggaaggccaccgacaacttccacgaggcgaggaggctgggcaagggcgggttcggcgcggtgtacaggggcacgctgcgatccgcagggaagaacgacggcgtgacgacgtgcgtggaggtcgccgtgaagaagttcacccgggacgagaaccggtgctacgacgacttcctcgccgaggtcgacatcatcaaccgactccgtcatcggaacatcgtcccgctcgttgggagcgagaactcagtagtaatttttacgtatggtcatggaggagaattgcaggttttactggttcctaacaaggtcattgtcaaccagttctcgatctaa

SEQ ID NO: 107549 - DNA, 112 bp, Zea Mays
ctgttctgtaatttccgttctcctttctgtatctaccttcctgtatccactttccctttctctcctcatgcaataaaatactgtaggccctccctacagtaatttaagtttc

SEQ ID NO: 107550 - DNA, 79 bp, Zea Mays
cggcgaggtaagtcacgaccaatgtcgctgacacgagtccttgcatcgcttgaggtgagacgatggcttctgtgccacc

SEQ ID NO: 107551 - DNA, 2395 bp, Zea Mays
ggaatttctggccatatccgaagcatataacttccttatctttatagatcctgtacgcggccagcggcggaaatctctccgagagccctcgcgaattgaagctgctgggcacggctatctagctgtatcgctcgtcgagtcaactccccgcgcgcgtcgtctcgttcgagttctctcgcatctcgatcgggtgcgctacacgtagacgtagcgtccgctgatacataaaccgcacggcggaagctgctcggtgctctccctactagttccaaaaggaagcaaggaagatagcatcatcgatcgtgtcatgagaccggcggaaggcgcggcgcggttggtttgcctgctcctgctcgccgccgtggccgcggggcacgccggcgtgcagccgctggcgcgcatcgccatccaccgcgcccgcttcgcgctcgacgcgtccgccgccgtgcgggcctcgccggagctgctgggaaccaagggcgaagatactgcctgggtgaaggtagaccttgttactccccatccaagtgccgatgattgggtcggcgtgttttctccttcgaagttcaacgcgtccacatgccttggttctcacggatctggcccaggccctgtgatatgctcggctccaataaagtatcagttcgccaactattcgtcgggctacggggagtccgggaaaggcgcgctgcagtttcagctgatcaaccagcggcaggacttctcgttcgcgctgttcactggcggactctcgaatcctaagcttatcgcagtatcgaacgccattgctttcgcgaacccaaaggctccagtctacccacgcctggcgcaagggaaatcctggaacgagatgactgtgacgtggacaagtggctacgagagcgacgaggcgtacccgtttgtggagtggggaatgaaatggagccccccggtgcgcagcgcagctggcaccgtcacttttgaccgtgaaagcgtctgtggagagcctgcccggtctgtcggctggagagatcctgggttcatacacacagccttcctcacagacttgtggccgaacaaagagtactactacaagatcggccatatgctgccagatgggagcgttgtttggggcaagctatcttccttcaaagcgcctccgtttcctggccagaagtcactgcagcgcgtcgtcatcttcggagatatggggaaggccgagagggacgggagcaacgagtacagcaactaccagcccggatcactcaacaccaccgacacccttgtcaaggacctggacaacattgacatggtgttccacatcggtgacatcacctacgccaacgggtacatctcgcagtgggatcagttcacgcagcaagtggaggagatcacctcgcgggtcccttacatggttgccagcgggaaccatgagcgggactggcccaacagcgggtccttcttcaacggcaccgactctggaggggagtgtggcgtggtcgctgagaccatgtactacacacccacagagaaccgagcaaactactggtactcggcagactacggcatgttccggttctgcgtggcggacagcgagcacgactggcgggaaggcacggagcagtacgagttcatcgagagctgcctcgccacggtcgaccggaagaagcagccgtggctggtgttcatcgcgcaccgcgtcctcggctactcctccggcttcttctacggcgtcgacggctcgttcgcggagcccatgtcccggcagagcctccagaagctctggcagaagtaccgggtggacctggcgttctacggccacgtccacaactacgagaggacatgcccggtctacgaggaacaatgcatgagctcggagaaatcccactactcgggcaccatgaacggcaccatccacgtcgtggtcgggggcggcggcagccacctcagcaacttcaccgcccaggtcccgccgtggagcgtgtacagggagatggactacggcttcgtcaagctcacggcgttcaactactcgtccctcctctacgagtacaagcgctccagcgacggccaggtgtacgacagcttcacgatgcacagggagtacagggacttgctggcgtgcgtcaaggacagctgccctccgacttcgccagcgacgtgacatgcattgcagccgcgcgtgaggagcagaggggggacaggggtcgcttctgtgacagtgggttaggttccacttcggcgtgtaactgtaactgtttaattaggtggtcgagcgagacccacattataaatcctacactcaataaagagcatgttgaccctgattagttggcttacaggtaaggagctaagagcagccctgtcacatcagcaatttggtgatatggcaataaaattaacgaggaagaggagg

SEQ ID NO: 107552 - DNA, 1948 bp, Zea Mays
aaaccagtcaccgcctaccaccgttttataatccacccctcccactccccctgttttttcttcttccgctgttctactccggcgtgttggtcgacggcggcgcagatgacgaccctcgatctgatgggagggtacgggcgggtggacgagcaggtggccatccaggaggccgccacggcggggctgcgcgggatggagcgtctcatcttgcagctctcccaggctggcaccggggagcggtcgttgtccccaccggcggtacaggcgcagcgccagcagcagaagcagctggagcagatccagcagcaggttgactgccgggagctcacggacatgacggtgtccaagttcaagaaggtgatctccatcctgaaccgcacggggcacgcgcggttccggcgtggccccgtggcggcgcggtcgcagtcgcagtcgcagggacctgcctcccccgagcccgcgcaatcggcgccggctcccgccgcgaggcccctgacgctggacttcaccaagtcggtgtccggttacagcagggactccgggttcagcgtgtccggcgcgagctcgtcgttcctgtcgtcggtgacgaccggggacgggagcgtgtcgaacgggcgcgcgggaggctcgtcgttcctcatgttcccaccggcgcccggcgcggccagctgcgcgaagccgccgcccgccggtgcggcgcagaagcgcaagtgccacgaccacgcgcactcggagaacgtcgccggcggcaagtacggggctaacggcgggcgctgccactgctcgaagcgcaggaagcaccgtgtgaagcgcacgatccgcgtgccggcgatcagccccaaagtggcggacatccccgccgacgagtactcgtggcgcaagtacggccagaaacccatcaaggggtcgccctacccacgcggctactacaagtgcagcacggtgcgcggctgccccgcccggaagcatgtggagcgcgaccccgccgacccgtcgatgctgatcgtcacctacgagggcgagcaccgccacagccccgcctccggccaggacccgccgccgccgtcgctcgcgccgctgccggagctgcccagccattgatttggcttcctgcctgctctgtcctgtcaattactagtagctgttgtcataagttataaaatcaaaatcgccagttcagttttagcagctccgttttccgatttttttctcttctgtcgttcgcgttagcagctttgtgaaaggattaggaaagtgttagcatcagacttggagaagggaaaagaaaacaaaaggtaatgctcttgttattagtattatttttttgtatacagcaaacaaaagcatccgcagagaaagttgtggatggtgtagtcggtcggaattttgaccgggcttggggtgttccagagccggattgaatattgaattctgagctccgccagatttgggcgatgcgggcggggtggggctgagaggagtcaaaagccggtgggtcccagtggttgaacaacgggctttggtcccggtggggagcgcgagtggggacacacacagacggaggacgtgatcgcgtgcttggacgaggtcaagaaacgcggcaggtgtggggcccgcgactccggggcgcgcgccgctgcctctggcgtcgttgacccgtgtcagcctgggcgccgttgtctttgttggcttgccattgcccatttgcgcggtggttgggtcagtgggtgtgcggcggggctacgtccacacggcggtgggtgtcgccttcggggccaaaatgctagtagtcgcgtcttggctggcgtggttgaatggcgcggggccagcctgccttttgactgcttgattggatggatggtaggacatctacacattagagccttttgatcaagtttctatgtacaagaaatatctaagaaactatattatataataaggtgttttt

SEQ ID NO: 107553 - DNA, 1861 bp, Zea Mays
cacttaaccgtgggtccatctatctaaaagcagtcccacatgtcattaatagcagtagtaaacgcggcggtacacgtacacccattactgaaacgggtcgtccgtcctgtggttggttggaaccaactagacccgtagcccacagcttccccctcggtgcgtggccgctgttccatggtcaactctcttctccatcccagccgtccgtcgccatccaatggcgtacaccaaaccaccacgcatcattggatagcccttggcccttccagcgggtcagcacttgctcgtgaccgtgtgatccataacttgtttgaccatgtagtgtagcccgtttaatacgaggcctggcctaccacctgcgacaaaccagtcaccgcctaccaccgttttataatccacccctcccactccccctgttttttcttcttccgctgttctactccggcgtgttggtcgacggcggcgcagatgacgaccctcgatctgatgggagggtacgggcgggtggacgagcaggtggccatccaggaggccgccacggcggggctgcgcgggatggagcgtctcatcttgcagctctcccaggctggcaccggggagcggtcgttgtccccaccggcggtacaggcgcagcgccagcagcagaagcagctggagcagatccagcagcaggttgactgccgggagctcacggacatgacggtgtccaagttcaagaaggtgatctccatcctgaaccgcacggggcacgcgcggttccggcgtggccccgtggcggcgcggtcgcagtcgcagtcgcagggacctgcctcccccgagcccgcgcaatcggcgccggctcccgccgcgaggcccctgacgctggacttcaccaagtcggtgtccggttacagcagggactccgggttcagcgtgtccggcgcgagctcgtcgttcctgtcgtcggtgacgaccggggacgggagcgtgtcgaacgggcgcgcgggaggctcgtcgttcctcatgttcccaccggcgcccggcgcggccagctgcgcgaagccgccgcccgccggtgcggcgcagaagcgcaagtgccacgaccacgcgcactcggagaacgtcgccggcggcaagtacggggctaacggcgggcgctgccactgctcgaagcgcaggtctgtatctcttctcttgccttggtggtgccttggtggcttgtttctctgctgctgaatgaatcggatcgagctccaacctgactggtatgcgcaggaagcaccgtgtgaagcgcacgatccgcgtgccggcgatcagccccaaagtggcggacatccccgccgacgagtactcgtggcgcaagtacggccagaaacccatcaaggggtcgccctacccacggtgagttgaggatgctgcgttactctatctaacccagtccgattgcagcatgctaatccagttgctgtgggcatttgcatctgcagcggctactacaagtgcagcacggtgcgcggctgccccgcccggaagcatgtggagcgcgaccccgccgacccgtcgatgctgatcgtcacctacgagggcgagcaccgccacagccccgcctccggccaggacccgccgccgccgtcgctcgcgccgctgccggagctgcccagccattgatttggcttcctgcctgctctgtcctgtcaattactagtagctgttgtcataagttataaaatcaaaatcgccagttcagttttagcagctccgttttccgatttttttctcttctgtcgttcgcgttagcagctttgtgaaaggattaggaaagtgttagcatcagacttggagaagggaaaagaaaacaaaaggtaatgctcttgttattagt

SEQ ID NO: 107554 - DNA, 1363 bp, Zea Mays
tccacccctcccactccccctgttttttcttcttccgctgttctactccggcgtgttggtcgacggcggcgcagatgacgaccctcgatctgatgggagggtacgggcgggtggacgagcaggtggccatccaggaggccgccacggcggggctgcgcgggatggagcgtctcatcttgcagctctcccaggctggcaccggggagcggtcgttgtccccaccggcggtacaggcgcagcgccagcagcagaagcagctggagcagatccagcagcaggttgactgccgggagctcacggacatgacggtgtccaagttcaagaaggtgatctccatcctgaaccgcacggggcacgcgcggttccggcgtggccccgtggcggcgcggtcgcagtcgcagtcgcagggacctgcctcccccgagcccgcgcaatcggcgccggctcccgccgcgaggcccctgacgctggacttcaccaagtcggtgtccggttacagcagggactccgggttcagcgtgtccggcgcgagctcgtcgttcctgtcgtcggtgacgaccggggacgggagcgtgtcgaacgggcgcgcgggaggctcgtcgttcctcatgttcccaccggcgcccggcgcggccagctgcgcgaagccgccgcccgccggtgcggcgcagaagcgcaagtgccacgaccacgcgcactcggagaacgtcgccggcggcaagtacggggctaacggcgggcgctgccactgctcgaagcgcaggtctgtatctcttctcttgccttggtggtgccttggtggcttgtttctctgctgctgaatgaatcggatcgagctccaacctgactggtatgcgcaggaagcaccgtgtgaagcgcacgatccgcgtgccggcgatcagccccaaagtggcggacatccccgccgacgagtactcgtggcgcaagtacggccagaaacccatcaaggggtcgccctacccacgcggctactacaagtgcagcacggtgcgcggctgccccgcccggaagcatgtggagcgcgaccccgccgacccgtcgatgctgatcgtcacctacgagggcgagcaccgccacagccccgcctccggccaggacccgccgccgccgtcgctcgcgccgctgccggagctgcccagccattgatttggcttcctgcctgctctgtcctgtcaattactagtagctgttgtcataagttataaaatcaaaatcgccagttcagttttagcagctccgttttccgatttttttctcttctgtcgttcgcgttagcagctttgtgaaaggattaggaaagtgttagcatcagacttggagaagggaaaagaaaacaaaaggt

SEQ ID NO: 107555 - DNA, 425 bp, Zea Mays
gcttgttaggttacttgttgtggaatagacaactaaattatttattgttggtcatgatttatattcaaaattgtaatgccctaaatccatcaattaaaagcgatccagttttatttattagtttcaatagaatggaaaatatttacgttctcaaataacagaaaggtaatataaatcaattgaacaatttcttcaatagataaaaaaatttaccaattgcttgatgtattcatgttgaggcataatttttgtttgctaatggattgtaaagattttattttttttatattcccttttatgaatcctaatttatttaataatataaatttgcgtaaaatttatttattggaatgttattattataattttcgaaatattttaaaacatatatttatctatatataacttacgttaaaaatgaaaag

SEQ ID NO: 107556 - DNA, 1291 bp, Zea Mays
acatctagagcggaacaggcccaaagcccgcagctcgggctaaaaccctaacgacctggcctcgccaagacgccaacacaccggaacccccaaaatggcaccggcgccggaaccgaccgcagcggccgccggccgcaagcgcaagaaaccgcacgggccctccaaaatcatcgcgaagaaatccgcggatcccaaacgggcatacgcgaagaagaagaaagagaagcataagcaaaaggagaagaagtcgcggctaaaacccgccgagccggaccaaatcgccgccaccatcggagatggcgtcgcaggggcaacggtcctactgtcggcattgatgcagccgtcgcggcagctcgagtttctcctccgtagcttcgagcgcgcctctaagatgcgcctctctcctctcgaactcgattcctactcagagggctgcatggtgcagcttgcggagggagcagcccaggacgtcgagagcttcggtgatcatgtaaaaggggtgttcggctcttcgtggaaggaagagctctgtgagggaaatcacatcgatggtgagatcgccgtgggcagcccaacacttctggttatcagctcatctgctttgcgatctttagacctactgaggggtttgaagatgtttactaaagaatgccgaccagtaaagctctttgccaaacacttgaaagtggaggagcaggtggcgatgcttaatgctcgagtaaatattgcctgtggtacaccgagcaggatcaaaaaactaattgacatggaagctttgtccttgtcacgcttgaaactagtggtacttgacatgcagaaggatgcaaagtccttcaccttgtttacattaccacaagtcagcaatgagttctgggacctgtacaaaggttacctagatccaaagatccgagaagggaacatgaagatatgtttttatggtgccgtgtccgagagagacatcaccaaaacattttcactagctgagtaaatgcctgtatgagttcattgtattctgcagattaatttaacctttttggagctgatttttgatgatgctgaaaaatgagaaattttcggtgcattcttttactgaactgtttatatattcatctgtcaactgagtgtcctatttgcggtaatgcaattttcttctatatagagcaaaactaagcgtccaacgtgtccacgtcgccgttttgattttcagccgtccgatcgtgtaaaaacgcccacaatcatgaggacggacatggggcttagtttgcatggttggctcagaaatgtagtacat

SEQ ID NO: 107557 - DNA, 498 bp, Zea Mays
atggccggatgctcgacgcccctgtccttcgagctcgagttatcctctgctcggttctcctatcacaccgaccatggtggccgccatatttgctcccatccggattcacgccagcaacgggctctcaggtgtcggttcggaacctcaccaggtcaccagggaggcgctcagggccgtgccaagtcaggaggatggctggttgaagtagatttcctcgccggagttactgggcaccgctatggaccaccttgtgtcattggcagccctcctgtgctggcgaatctcggtgaggaccccgctgctagtctctcccttatctctatatcgtgtagcagttcctacttgaagcttgattactgcgtggatcgggccgaatcgcggcaatggcgctccgccgtggggaggtaccgtcgccgtcgctgtctggggggagcgccgggcgtgtgtggggtagaggagaaaggactagccgtagatctaggatcgtggggtcattaa

SEQ ID NO: 107558 - DNA, 1608 bp, Zea Mays
atgcgtcgtcccctcgcctctgcggccctccgcctccgcttcttctcttccacctcccctgcccgccttctctcgccctgcccattccttctatcccgccgtgacgacgacggcggccgcgaggcctcctcgtcgccgctgcccccgctcccgccttctggctcggctttctccccacgcccgctcctcttctctgcatcagctgccgcgggcctcttcagcctccatggcgggtggtggaggcaggctcttcctcctgcagcgtcgcggcccctcggctccgtctctgacgcagctcccgtccggctcaccatctcccgcagttattctctgcgtgtggccaagggcaagaagaaagcacattttgacgatgaacacagccatcgagcggttaacatggcactatggtgcaacttcctcgttttctccctaaagtttggagtgtggatttcaacttcaagtcatgttatgctagctgagcttgtgcattctgttgcagactttgctaaccaggctcttcttgcttatggtttgagcagctcaagacgtgctccagatgctctacacccctatggttattctaaggaaagatttgtatggtctctcatatctgcagttggaatattttgcttgggttccggtgctacaattgtgcatggagttcaaaatttatggaattctcatcctccagagaatattcactgggctgcattagtgattggtgggtccttcctaattgaaggtgcttcactgcttgttgctataaaggctgttaggaaaggtgcagaagcagagggaatgagtatctgggactatatctggcgtggtcatgatccaacttccgttgctgttatgactgaagatggtgctgctgttacaggccttgctattgctgcagcatctttggtagctgttcaaatgacaggaaatgctatgtatgatccaattggctcaatcattgttggcaatttactggggatggttgctatttttctcattcagaggaataggcatgctttaattggccgggccattgatgatcatgacatgcaacgagtccttgaatttctgaagtctgatccggttgtagatgctctttatgattgcaaaagtgaggtgattgggccaggtttttttagattcaaggctgaaattgatttcaatggagttgttctggtacaaaattatttggaaaggactggacgtgggagttgggcaaaacagttccgggaagctgcaatgtccaaggatgatacggaattgctaagggtcatggccaactacggggaggatgtagttgaagctctgggatatgaagtggatcggctggagtctgagatccaaaagcttgtgcctgggattaaacatgttgacatcgaggcacacaatcccgaaggacttgctcttagagcagaagttttgtagattacctgtgtacattgcatttgattaacactgttgctggtcgctgccagtttgatttgggtccaccaccattcgataagattgtcttccattggcaatgtaagaatcagatggctgttgttgcgtagcgaggcggtttttttatttggaagaagacgtggtcgcgcctgacatggaaggctt

SEQ ID NO: 107559 - DNA, 219 bp, Zea Mays
caaagtatcaagaaagtggagaagagtctaagaaaaggtcttaattccttgatcattttggttgcttgggagatttggaagcaccgtaatgcttgtgtttttaggggggttgtgccctgcacccagcgagtctagagtgctgtgattgaggagggcagcgtttggtgcttggctggtgcattagctctgcaggacctcctcctgcaccagctccctacg

SEQ ID NO: 107560 - DNA, 3380 bp, Zea Mays
gggatgcgggcgggggcatacaccatccaccagtcgctcaacgccgaggcggccgctgtgctgaagctcgcgctcgcgctcgcgcgcaggcgcggccatgcgcaggtcactccgctgcacgtcgcgttcgcgctgctgaccggccccgccgctgccgccgcgtgcatgcagcctctcgcggccttctactcgcccgcgtctctggcggcgccgtacggcctgctcaagcgtgcctgcctgcgctcgcacccggcgcccggcgcggcgtcgtctcacggcgcgccccagcacccactccagtgccgcgcgctcgagctgtgcttcaacgtcgcgctcaatcgcctgcccgcgtccggcccgcactcgccgccctcctcgatgacggcgccgttcacgtcgccgcttatccagcccagccccacgctctctaacgctctcgtcgccgccctcaagcgcgcgcaggccaaccagcgacgcgggtgcgttgagctcccgcagccaccgccgccagcaaatgcgccgcagccgcagccactgctcgccatcaaggtggagctggagcagctggtcatctccatcctcgacgaccccagcgtcagccgcgtcatgcgggaagccggcttctccagcgccaccgtcaagaacaacctcgaggaggagagcgcgctcatgccgccaccttcctcatcgtccccgccaccgccgcctccgcccatccctccccacttcttcatcgactccagcatttcctccggcggcaaaagcggtgaccgcttcgggctgtggccagcgcagttcttggcagcgccgggccctggggcctgcagcgccgacgtccgcgcggtcctggaggtgatggtgcggaaggagggacgtcgaagcaaccccgttgtggttggtgactcggtgtccatggccgaggccgtggccggtgagctcctgcggtgcctcgagcgcggcgacgtccccgaagcactcgccggcgctcacctcctaaagctgcagctctcctacgtgcacgttcgcctcatgagccgcgccgacgtgaacgcccgggcgtccgagctccgccgtagcgtggacgccgtgcagctccagcgcggcggcgggctcgtcgtctgcgtgggcgacctgcggtgggcgctcgatgaggaagcgaacgacaaccacgctgtctcgtcgtacagccccgtggagcacatggtcgccgagctcggacgcctcctcgatgacctccgagcctcccgcgtccgcgcctggctcgtggccaccgccagctatcagacgtacatgaggtggcagcagcggcgccggcggccgctggagtccgcctgggcgctgcaggctgtggtggtccccaccggcagcggcagcggcctgtccctcaacatcctgcattccacatcgtcttctacctccctcccaagtgccagtgcaggggtgcctccggcaacggcggcatcacagcagcttgggcagaatcctttcgcgatggcgggatcggcgactgagtttgcaggcagagatgagcaggatgagatgcagctggtgctctgcaccgagtgcaccaggaactacgagagcgaggcgtcgctcgtgaaggcagaggatgatgtggagggcccacgtgccagcctcgcgggctggctggtgttggacgggccatcggcagcccaaacaccacacaagcagaagtatctgatcgagctgaagaggaaatggagccggctgtgcgggaagcttcacctctgctccgatccatgctcccctccgtgtccatggtggtccggttctggcttgctaccggtcagccagagcaagccaagcgtggcggggttcttgggcttggatggcttgatagagcaacaacgcaagagcagaacaggacggtggttcccgccctcaccgtcaaggggtccccctcgttggtgcctgagtccaccgacgagggaagcatgtcagggcgtgggaaccacgcttgctctcggcagccacctgctctcggactcggcgacatctcaaagccgcgcctcgggaggcggtgacggttccgcggcggtggtgcgcgagctggggcagaggctgcgcaggaacatcccgtggcagcccggagccgtcgtcgcggagattgccaaggcggtggttgctagtagccgccgagagcgcgacggcacgctgggctcgtggctgtacgtgaagggcagagaccacagcgccacgcggcgcgctgtcacggtgatcgcagagacgtgctgcggctcggctggtcgcgtggtccgcaccgacccgagcaagtacagctgcgcggaggagctgtgctcagatgttgtatccagggcgtctgagatgggcggcgagatggtggtggtggtagtcgtggacggtgtcgagaacgcgccgtgcgacgtggccgactgcctggtcgccgcgtcgaagagcggttccctgaaggatgccgaatccggacaagtgctgcgtctctccggctgcatcgtgatcctggtagcatcgaagttgcctggcggcgccagcgacccaatcaacctgcgcctgtggtcggaggacgaggcgtcgtccgacggcgctctcaagaggaagacggagtcaccgcagggcgagggcgagggcgagggcaagcgggcacggcacgacgccgggctgggcaggcttgatctcaacctctgcgccggggatgacgacccaggcgaagacgacgaagccgtccccagcgacataaccgacgaaggcggctcgagcgagcacgggcagccgccccacggcatcctcggtgccctgacggcggcccgcgtggtcaccctcgacagggaaggcggcggcgacgccacgacctccatccgcgcaaggctcgccagggccatcggccaaggaggggcgcgtgtggaggaggcggcggtacaggcgctcgcggcggcgtctggacagtttcttgaggaggagcttgagaggtggacggtggaggtgcttgaaccggcggtggcggtagcaacggtcaaaaatggcgggaaggggaaggtgctagtgcttggattggggcccggcggcgggagccgggagacacaagggttcatgggctcggtccttccaagtagggtccaggtggactgagctgtgcatttttttgggatgtctctctctctcacacacattttggagactgggacgttgtttttgtatgtattgtacgtaaatggttggattgggggcctggaaatggagagtttgggatgagctgagtttataagtatccatcaaatgccgtactattcttttatgtgtgggtgtggattgctcaacttgaaaacttggatatactagtgagcatatctccacagattttgtggctaaagattcacatgatt

SEQ ID NO: 107561 - DNA, 1468 bp, Zea Mays
attggtatcgatcctgccaagtgccgtagcccgcagccacccagagcctcttatcggcgttcccttcgttctactccgatcccctctccaagcggcacatctacatccttccagcgcaccaaatgctttggattgcgttgcttagcactaaagactagatgcccttatgcgattatatatgctcaaaagcctgtggtgatagctcaagccacatgaatgtattagatcaggtgaaagggcaagagtttcgatcagtgggcaggccgcaggcgcaaacaaacagttgacagggtagactcaaggcaatagtgaggaagtggccgatctgttgaggccgatggaggcagatagcatggtggccatgggctgcggaggtttctactggcagtcgcctccgcgcttcctccttgaacccctcgacctagccgacatcgtcgacagcagcatgtacgtgccgacgaacgaggctgatgagcccgtatccgggctctgctcatcgaaccggccggcggaggattactccagttcggccgagggcgccaactcctgttccgcggcggtggttccgtcgccgccgccgcctccgggcgtgacgacgacgacgacgaggaacatggacatggagaggacccgccgcaggaagctcaacgagaggctctacgcgctccggagcgtcgtgcccaacatcaccaagatggacaaggcgtccatagtcagggacgccatcgcccacatcgagcatctgcaggagcaggagcgccgactgctcgccgagatatccgttctccagtcttctgacgacggcaccgccgccgccgccgccgtcaagacggaggacgctgccgccactgggggtgctgcgtacgacgtcgacagcgtcccctggaggaagaagccgagggcggtgccactgccgtccgtgtatttcaccgacaacccgacgagctccatctcgtcatctccgccagtccgaatcctggagcaggtgcaggtctcgcaggcaggggagagggtggcggtggtgagcctctggtgcagcaggggcagggacgccgtgggcaagatttgcctcgcactggagccgctgcgcctccgggtcgtcacggccaccatcaccgcgcgcggcgacactgtcttccacacactgttcgtggagacaggagaaacaggtggcgctcggctaaaggaggcgatactggctgctctcgctcggctcaacgtcctcgctaacgctgaccaagtcgtccatgagttactgggatgattgatgcggtggcatcttggacagcaacacctggtgttgttgtcgttgtcagcactctcgactgtccgattcaataatgatgtacctcaggaatgtttgaatatgatatcattgccatttcttggcctgaagtacaataggagtcacattatatttacatatattacctccattcacaaatatataatactacttattttttct

SEQ ID NO: 107562 - DNA, 1162 bp, Zea Mays
attggtatcgatcctgccaagtgccgtagcccgcagccacccagagcctcttatcggcgttcccttcgttctactccgatcccctctccaagcggcacatctacatccttccagcgcaccaaatgctttggattgcgttgcttagcactaaagactagatgcccttatgcgattatatatgctcaaaagcctgtggtgatagctcaagccacatgaatgtattagatcaggtgaaagggcaagagtttcgatcagtgggcaggccgcaggcgcaaacaaacagttgacagggtagactcaaggcaatagtgaggaagtggccgatctgttgaggccgatggaggcagatagcatggtggccatgggctgcggaggtttctactggcagtcgcctccgcgcttcctccttgaacccctcgacctagccgacatcgtcgacagcatgtacgtgccgacgaacgaggctgatgagcccgtatccgggctctgctcatcgaaccggccggcggaggattactccagttcggccgagggcgccaactcctgttccgcggcggtggttccgtcgccgccgccgcctccgggcgtgacgacgacgacgacgaggaacatggacatggagaggacccgccgcaggaagctcaacgagaggctctacgcgctccggagcgtcgtgcccaacatcaccaagatggacaaggcgtccatagtcagggacgccatcgcccacatcgagcatctgcaggagcaggagcgccgactgctcgccgagatatccgttctccagtcttctgacgacggcaccgccgccgccgccgccgtcaagacggaggacgctgccgccactgggggtgctgcgtacgacgtcgacagcgtcccctggaggaagaagccgagggcggtgccactgccgtccgtgtatttcaccgacaacccgacgagctccatctcgtcatctccgccagtccgaatcctggaggtgcaggtctcgcaggcaggggagagggtggcggtggtgagcctctggtgcagcaggggcagggacgccgtgggcaagatttgcctcgcactggagccgctgcgcctccgggtcgtcacggccaccatcaccgcgcgcggcgacactgtcttccacacactgttcgtggagctattaaactga

SEQ ID NO: 107563 - DNA, 1497 bp, Zea Mays
cccagagcctcttatcggcgttcccttcgttctactccgatcccctctccaagcggcacatctacatccttccagcgcaccaaatgctttggattgcgttgcttagcactaaagactagatgcccttatgcgattatatatgctcaaaagcctgtggtgatagctcaagccacatgaatgtattagatcaggtgaaagggcaagagtttcgatcagtgggcaggccgcaggcgcaaacaaacagttgacagggtagactcaaggcaatagtgaggaagtggccgatctgttgaggccgatggaggcagatagcatggtggccatgggctgcggaggtttctactggcagtcgcctccgcgcttcctccttgaacccctcgacctagccgacatcgtcgacagcagcatgtacgtgccgacgaacgaggctgatgagcccgtatccgggctctgctcatcgaaccggccggcggaggattactccagttcggccgagggcgccaactcctgttccgcggcggtggttccgtcgccgccgccgcctccgggcgtgacgacgacgacgacgaggaacatggacatggagaggacccgccgcaggaagctcaacgagaggctctacgcgctccggagcgtcgtgcccaacatcaccaagatggacaaggcgtccatagtcagggacgccatcgcccacatcgagcatctgcaggagcaggagcgccgactgctcgccgagatatccgttctccagtcttctgacgacggcaccgccgccgccgccgccgtcaagacggaggacgctgccgccactgggggtgctgcgtacgacgtcgacagcgtcccctggaggaagaagccgagggcggtgccactgccgtccgtgtatttcaccgacaacccgacgagctccatctcgtcatctccgccagtccgaatcctggaggtgcaggtctcgcaggcaggggagagggtggcggtggtgagcctctggtgcagcaggggcagggacgccgtgggcaagatttgcctcgcactggagccgctgcgcctccgggtcgtcacggccaccatcaccgcgcgcggcgacactgtcttccacacactgttcgtggaggtaattaagcagcctgctaactacagcttgccgcacgacggaaattactgtggttgcccttgtacgtgtgcgtgcctacctgagaagtcagcttcggcactcgcgaaccgatggcgtcaccggggtgacgtcgcgcgggatgacgtacggaatggtgctccgttgtggttgtcgtcgtcgtcctttcggcaaaaattaggagccggagtagatgttggtctcgaggtttcatcagtgctggccgatcgacgactagtaaagtacgtcaagtttctgcgtgggaaacgggcgcgcgacattttatattttgttctactgacggtgaaggattgaagaagccttcgtgtcagtgatagcactgaagaattaataaatcggttttt

SEQ ID NO: 107564 - DNA, 653 bp, Zea Mays
gaatctttttggacgcacaagtagttctatagagtttactacatcctttgatgttttaatccatgaaatacagacctgtatctatttgttttggactgcgttccggagaaagaaatgcagtttggttatgtggttttacagacctgtatctatttgtgtaatgcatttgcctgtatatgtgcagcttatgtccataattcttcaagtctgcatatgactgcatcattcttcagccttctagactccttccacttctgccccctcggatacaaggacttcccagacttaggtaacacaacctcttctcttctttcaacatgttgtcatgtggtgcttgagttatggtacaactagagttgggtgaaagcgacatggagccttgaagtggagagttgagctcatgaagcaggacaagagagccaaggtgttgtgccttcatggcttctgcacgagcgagagttttttgaagagtagatcaacaactggcactcttccactcgttatggatatgggtattgcgatgaggcctcatgagctatttgaaaacatttatgtatagttgtatactaatttatgttttatagttgaggctatctaatatattgaaatggctgaatgctctggaatctggattaagttctgcactttcctga

SEQ ID NO: 107565 - DNA, 446 bp, Zea Mays
aggaacttgcactttgacattttcatttcaaggatttaggtggcgttaatcttttggctgttgacatgtagtgaacaagtcaagtacaagtagcaattgacaagatcacaagaaccttttggctctcatgaacacttgatatggatcttttggttctcatgtttttactcaatggtgaacttgtaatgaacttgtaacagatgtgcttttgggagcggtttgcacatctgttgatgcgcacctatgttgtaagcacattgtatgtgttaatttggaaatttggatgtttaatgtggtgaactagtggcgccatgctaggggtggtggacactaactggatattaatctagctgtgaacatctgatgtctgatgtgatcaatggtgttatgatttgtgaaacacttaacattgaccactctatcagtcttattgttgatgtttctta

SEQ ID NO: 107566 - DNA, 809 bp, Zea Mays
gtccaaccatttgtggcggctgccgcaacaggctcaacgctcacgcgcacacacaatccatagccgcctcccacatctcactctcgttccgagcttccggccatggcggtgacctccggcgcccccaacgacaacggccgggacgctggcgccgctgcgactgacgatgagcaccgcgtggatctggaagttaggcacaaggacgccggcactagggactcgccagcaccgatagcggcagctgcgcctgcgtcccaatcccgagtggctggaaagcttggcccctcagatccaaagcacctcatctatgcgggatccaaattaaagcatattaaagctgcacctgctgcaccagacaagaatcgccgaccacctttgtctccaccagcacctgccgtcaatcgtggtcgtggatctgtgcgcacacctttgggtgaacaagtcaagtacaagtagcaattgacaagatcacaagaaccttttggctctcatgaacacttgatatggatcttttggttctcatgtttttactcaatggtgaacttgtaatgaacttgtaacagatgtgcttttgggagcggtttgcacatctgttgatgcgcacctatgttgtaagcacattgtatgtgttaatttggaaatttggatgtttaatgtggtgaactagtggcgccatgctaggggtggtggacactaactggatattaatctagctgtgaacatctgatgtctgatgtgatcaatggtgttatgatttgtgaaacacttaacattgaccactctatcagtcttattgttgatgtttctta

SEQ ID NO: 107567 - DNA, 1523 bp, Zea Mays
gtccaaccatttgtggcggctgccgcaacaggctcaacgctcacgcgcacacacaatccatagccgcctcccacatctcactctcgttccgagcttccggccatggcggtgacctccggcgcccccaacgacaacggccggtgatgcttctcctcctcctcctcctcctttgtccataactgtttttttgcagttgcgcatcagtgcacttagatctaactcccagaagtattggtactgagtactgacccatcgagccgtcccgaagggacgctggcgccgctgcgactgacgatgagcaccgcgtggatctggaagttaggcacaaggacgccggcactagggactcgccagcaccgatagcggcagctgcgcctgcgtcccaatcccgagtggctggaaagcttggcccctcagatccaaagcacctcatctatgcgggatccaaattaaagcatattaaagctgcacctgctgcaccagacaagaatcgccgaccacctttgtctccaccagcacctgccgtcaatcgtggtcgtggatctgtgcgcacacctttgggattaaaaaaatgtctaccgaaagtggcagtcaatccccattatctcaagcatcacaagcaccgatgtctccatctcatgaacctgaatcgtctcgtcctgagtcagataatgactcgatgccaatttaaatagatgacaatgacaacattgaagtagaagaggaagaatacgacgctgaagctggttctaagagaaagctcacctcaactgtttggaaagagttcaagagagtgaagttcaatggcacagtccgggcaaagtgcaactattgcttcaagcaactttctgcgtcaagtaataatgggacaaaacatcttcatgttcatttaaaaagttgtgtgcaaaggaagattaagttgaacgggaagacattggcacaagcttctttgagatttggtagaacggatggtggaacagtttcaatagagaattacacatttgatcaagaaatagctagaaatgaacttgctgcgatgatagttctgcatgaataccccttaagcatggttgatcatgtgggtttccgaagatttgttggtgctcttcaaccacttttcaagatcggaaccagaaacatgataagatctgatattatgaagcattatgaggtggagaagaaaaaagccattgaatacatggctggaatccagtccagggtagcggtcaccacagatttgtggacgtctgacaaccaaaaaagaggttacatggccataacagctcactttattgatgaatcctggactcttagaaatattataatgaggtttatctatgttcctgctcctcatactgctgacgtcattggtgaagaattgtatgagtcattggttgaatggaatcttgatgagaaaatatcttctgtgactcttgacaactgcacaactaatgatgcggtaatctcttctcttgtgaggaatattggaaagcacaaacttatgaatgatggaaaattgctac

SEQ ID NO: 107568 - DNA, 320 bp, Zea Mays
gtccagcatatggttgggatcgcaatcgtttaacagagataatcacagcttgcatcatcatgcacaatatgattgtggaagacgaaggcccttttgctgctaatactgatttcggagataacacttcaggcatagacgcatctcaaataattggagaaggaagggcgtaatgggtcattaaccactttgatcttcgtcgccaagataggtcgtgctcactccaaaatgatcttgtcgagcatttgtgggctcggcgtggcagcatgtaaacatgtcgtttcattcgtacgttgtttcaacttgaaataagttattgtaat

SEQ ID NO: 107569 - DNA, 4256 bp, Zea Mays
ctccgaccccgtaccagcggcggcggccgaacctccccttgaaaccctccgacgaccggatcgactccgctccgctcaaatggagccgctgcctatccctcatcctccagcaccgcctcctgctctcacgtccgccctcgcccacctacgctcccttctctccgccgcatcctctgccctcgccgctctaccctctcctctccaaccgcacccgatcactcccatcgcttgtatcccttcacctcagtctaccaccacaaaacctccactcccgccgccggtcaccgctatcaacctcccgctcccagctgccccagctccctactccgactgccctgccgtcgtccgtttaaggccttccccaacctccacggccatctccctccccgccttcctcgctgccgtatgcgcagatttctcctcttccactaccggcccgagcccctcccatccgccccgcatcctgccatcggagctaagcctcctgcgccgggagttggactcctgggctacgggaggccaccacctcccggggtcgtactcctacgctgtagcccgggtaggggcctcgttctgctcggatgtgatgccacggtgggaggccgagctgcggcagtgggtgcttgagaactcaccgaggtacggggtcaaggtcaatgtcacggatgcggaccatatcttggtgctattatgtctcttgttgaaggcgatggcactggaggccaggtacttgctggaggggatgcagaatgtcgacaacgaggggctaggctttgatcccagggccatgaggtttgagtgccctaggctggtcgagggcgtctcgtggttaggcgcacagcttggggttctgtatggtgaaagcaatgggaaactatttatgcttgcatctgtgaaggaggctgtgctacagatggcatattgcttggctctctgtgcaggagatggtgctgcaagtgtaggagggagtgatgctggagatgttgtggcaggccctgtttttctttctcaggttgctgcttccattgtggcattgcatgagaggttctacttggagaagaccaaggcgttgcaagctcaacgcccgtcaaaatatcagctattacttgagtattcacaagcactggaacgagggattttggagcgatcaaacagaccaaactacagggctgttctggagtatgatgggattctgtcacggcgagtagagaacaaggaatctgctagagccaagacaaaggaggaacttttagctgaagaacgtgattacaaacggagaagaacatcttaccgtggcaagaaagtgaatagaaaccctacagagatactaagagacataattgatgaacatatggaggaaatcagacaggcaggtggcattggttgtcttgtggaagctcctgctgatattgcttggaatgagctgaagggcaactctcacagcggtgcatatcatggaagttatgattttgcaagcagctcttctcatgataagacagctttggcttctcggtcatctaactgtgacaactcatgtgctgaatctttgggaagattttcatcaaggagcagtgacacaagagattcatacaataactcagggtgcgaaactcatagaaaccattaccagtatatatctgagaaggaaatgggtggaatatagggtcagaaggtgaagtagatcaaatttactcttacccgcaagagaattacacacccaatggctataagtttaagaaggatgtctcaaaccaccgtgatgaatcaaatgattgtacatggccaatacagtcacaaagatcccctgtgacagaatattctcacttgccaggagaagggtgctttgatagaagtagagctagtcagaactcagaagtgacataaatcattatctataactcaagattaattcagtgatagatatgatccccaaagcgcatattctgatggagatcatccgacaaccatgcttggtgatgctactaaaggaaagcatgagatataccatgatgaagtacattgacatgcacattatgaaaggaagcgtgattataatcactgcagggcaatacagattattgttgcttcatatccagtagctaaataataagggctctgtggtattagccttccgccgtatccttttacgtatccttattcagctttatgatgtccttgcattcggagttaatacctgttacagttggatctgttaggttaatttttttttcttgctataccaattcatttacaatgatccaggttcttgctgtgctgatattttagccatttcaccgttaatgttttggaaacactttcagctagcattcaagtttttttaaaaataatttattcttgatttttactcagtacgaactgacagaaatttcagcggtctgttcgcttcaatcgatcacattgagttcttttttctgcagttctactttttttatttgtgcaattttaccctcatgtgttggcctgctttgtcactcggcgtgtatcaccacatgtccacaccctcgcacacactctggatgttgaagcgtagatatttggactggaccggactggcagctggaccggtgaaagactgaattagaaacgcttgcttcacttaaaagactgttcgtgcaattgaaccctagagcgtctccaatagttttttttcttctaaatttcgctctaaactatcatttagagtcatttgtataaaaaccactttttatatcttctcaatatccaatagcctttctataggttgtttgccctctagagagtcatttacattttctatatttggctagcgagaaacccggaatagaatatgactataattgatagccatttagataaattgttgaagggtattttttttaaaatctctatttatatagattaagaagaatatagagagccttttggagttgctcaagcttgtttgagagcaaagggattggagattagtcccttcatggcttattcggttattggtgaattgagtgggattggagtggattaaatcctctcctatacaaatttaaatatgaggagatttaatcctctcaatccatctcaaaccgaacatgcccttagggttgatttggtgaccagggaaattgagatttatggtggagaaattcacttgctagtcaattttgaataagaagggtattccttctccatgaaaccacttttatttccctggtcatcaaactagctctcaatctccaatcctcttgcttccaaatatgtcctaatagcttatttgggagcaagaataccggaggggttaaatccttttgctattcaaaatttagtccctcaaatccttttgctattcaagttaggaaatccaaatttccttcgaaattgaagtggaatgggtgggaaattagtttatttttctctcaatcctttataattttaagtgaattagagtttctaaactagccttaaaaacctgtcacgtcccaggaaaaaaatggtggcagttgactgcatagaagcggccctacagtctgctttgattggcgacacatgcttagactatccgcaaccgttccccctaaatttttctccctaaatgttactatgcagccacgtcagcaagattctctgccctatattcactcgtcccgcaaccgttccccctaaattttcccctatatatccctctactcattaaatatacatttccatataactaacataaccaactttattttgtatttattttatatgttttcatacgtccggcattgtgcgctcgttttataaaaatgaaaaaaatatttttatttgtttgttttcaataacggaaaatatgtaatacaacatttcagtttaaaattaatttcgtaatggaaaactttacttctcaatagtactccgtcataacaattttacaaatatttgtacgcaatatgatttaaccacgcttatggttcaatcatactcgttcagtcgtacacagcaagccatgcttgtcttcgaccgaaagccacgtttcacttatgttgtaagccaaggctggcttccgatgtaagccattgcttctccctgaagccaaatttctctcgtctatatatatgcaatgtttctcttcaaatatgtacttacatataccacttgttccacaagtaagccgttgctccaaatatctcccagtcgtagggaacatgattccgattcaagtgatagtgacgacgaaacacttctgcttgtcaatcttcttaccctcaacattgaggcta

SEQ ID NO: 107570 - DNA, 2745 bp, Zea Mays
ccagcggcggcggccgaacctccccttgaaaccctccgacgaccggatcgactccgctccgctcaaatggagccgctgcctatccctcatcctccagcaccgcctcctgctctcacgtccgccctcgcccacctacgctcccttctctccgccgcatcctctgccctcgccgctctaccctctcctctccaaccgcacccgatcactcccatcgcttgtatcccttcacctcagtctaccaccacaaaacctccactcccgccgccggtcaccgctatcaacctcccgctcccagctgccccagctccctactccgactgccctgccgtcgtccgtttaaggccttccccaacctccacggccatctccctccccgccttcctcgctgccgtatgcgcagatttctcctcttccactaccggcccgagcccctcccatccgccccgcatcctgccatcggagctaagcctcctgcgccgggagttggactcctgggctacgggaggccaccacctcccggggtcgtactcctacgctgtagcccgggtaggggcctcgttctgctcggatgtgatgccacggtgggaggccgagctgcggcagtgggtgcttgagaactcaccgaggtacggggtcaaggtcaatgtcacggatgcggaccatatcttggtgctattatgtctcttgttgaaggcgatggcactggaggccaggtacttgctggaggggatgcagaatgtcgacaacgaggggctaggctttgatcccagggccatgaggtttgagtgccctaggctggtcgagggcgtctcgtggttaggcgcacagcttggggttctgtatggtgaaagcaatgggaaactatttatgcttgcatctgtgaaggaggctgtgctacagatggcatattgcttggctctctgtgcaggagatggtgctgcaagtgtaggagggagtgatgctggagatgttgtggcaggccctgtttttctttctcaggttgctgcttccattgtggcattgcatgagaggttctacttggagaagaccaaggcgttgcaagctcaacgcccgtcaaaatatcagctattacttgagtattcacaagcactggaacgagggattttggagcgatcaaacagaccaaactacagggctgttctggagtatgatgggattctgtcacggcgagtagagaacaaggaatctgctagagccaagacaaaggaggaacttttagctgaagaacgtgattacaaacggagaagaacatcttaccgtggcaagaaagtgaatagaaaccctacagagatactaagagacataattgatgaacatatggaggaaatcagacaggcaggtggcattggttgtcttgtggaagctcctgctgatattgcttggaatgagctgaagggcaactctcacagcggtgcatatcatggaagttatgattttgcaagcagctcttctcatgataagacagctttggcttctcggtcatctaactgtgacaactcatgtgctgaatctttgggaagattttcatcaaggagcagtgacacaagagattcatacaataactcagggtgcgaaactcatagaaaccattaccagtatatatctgagaaggaaatgggtggaatatagggtcagaaggtgaagtagatcaaatttactcttacccgcaagagaattacacacccaatggctataagtttaagaaggatgtctcaaaccaccgtgatgaatcaaatgattgtacatggccaatacagtcacaaagatcccctgtgacagaatattctcacttgccaggagaagggtgctttgatagaagtagagctagtcagaactcagaagtgacataaatcattatctataactcaagattaattcagtgatagatatgatccccaaagcgcatattctgatggagatcatccgacaaccatgcttggtgatgctactaaaggaaagcatgagatataccatgatgaagtacattgacatgcacattatgaaaggaagcgtgattataatcactgcagggcaatacagattattgttgcttcatatccagtagctaaataataagggctctgtggtattagccttccgccgtatccttttacgtatccttattcagctttatgatgtccttgcattcggagttaatacctgttacagttggatctgttaggttaatttttttttcttgctataccaattcatttacaatgatccaggttcttgctgtgctgatattttagccatttcaccgttaatgttttggaaacactttcagctagcattcaagtttttttaaaaataatttattcttgatttttactcagtacgaactgacagaaatttcagcggtctgttcgcttcaatcgatcacattgagttcttttttctgcagttctactttttttatttgtgcaattttaccctcatgtgttggcctgctttgtcactcggcgtgtatcaccacatgtccacaccctcgcacacactctggatgttgaagcgtagatatttggactggaccggactggcagctggaccggtgaaagactgaattagaaacgcttgcttcacttaaaagactgttcgtgcaattgaaccctagagcgtctccaatagttttttttcttctaaatttcgctctaaactatcatttagagtcatttgtataaaaaccactttttatatcttctcaatatccaatagcctttctat

SEQ ID NO: 107571 - DNA, 1308 bp, Zea Mays
atgggcactcaaatagtaagggaacaaacgagtggtagcctcactgccattgttgtggacgaaaatctatgccatgccagggctgcaagctgcatgcttgccaacctccagtgtaaagtgattgtgtatgcgagtcctgttgatgcgctcaagtttcttaaggatcaccaaagagatactgattttgcgttagtggaagtcaacatgaaagagatgcatggttttcagttccttgacatgtccaggaagttgcacaaaagccttcaagtgatcatgatgtcagctgatacgacatggcccacgatgaagagaagtgtcgagcttggtgcacgtttcttgattaaaaagcctcttgatgcaaatacgatgaataacctgtggcagcatcttgacctaaaatttcaacggaccgacaagatcaaggccttattcccaggtattgaagggaaaacggggaatgcatttgaggaagggaccaacaagcagaagggaactcacctgatgtggactccattcctgcagaggaagtttttgcaagctgttgaactacttggggaagacgcatctccgaagaagatacagttgctcatgaatgtgaactccgttagtcgcaaacagatctctgctcatcttcagaaacaccgaaagaaggtcgagaaagaactacgtaattcaaatgcaaacaactccagccatggcattggcggcgcctcgaattcacggccttcgaggatttttgaaataagccatggcagattccagtacaatcgtcccgacgtccaaccagaacatagatctgatgaatccgtatccgtggagcagacagaaaccatcgaggaaacacaaagcaacaggttgtatgaagcgatgcgaagagccttgcagcttgggagtgttttcgaggaaccacagttgcccaatgatcctcctgctggtaaagatgcaagagaagttgaagaagtcgaaatgacgatgagggatggtaattatcgagatgctggcacagatgcatttggtgataagaatgaggcatctggaactcacagttcagatggtaataacgcgaaggtcaagagcaaggatgattctgctgacaagctggtttcttgtcacgatgagctgcgaccagttgtgacgcttgtgacctattcagactcggaagatggtgaaacgctctaggttaactgagcaacggattgcgtaggtggaggtacttgtaaactgccagcagaaatgatgccagcatgaatggatgcccatgaatagacagtttttgtatcttcttaataactaagttcagtacatcaa

SEQ ID NO: 107572 - DNA, 204 bp, Zea Mays
atggccagggaggcaaggtccgagcataggggcgagctcggggcggccgacgatgtaagctctgggaggtgcgatggcgcgacagccagggccatagcgtgcgcgaccatcgaaaagacagggagccatggagctgctgaagcttatgcagccagcggctttcagaaaaatcagagtgacgatggagataaggccaagcgatag

SEQ ID NO: 107573 - DNA, 168 bp, Zea Mays
atggccagggaggaaaggtccgagcataggggcgagctcggggaagccgacgaagtgagctctgagaggcgtaagggcgtgacagccagggccatagcgcgtgcgaacgtcgaaaagacagggagccaggcaactgctgaagcttgtgcggccatgtcagcaacctga

SEQ ID NO: 107574 - DNA, 636 bp, Zea Mays
atgctaaaagccaagcaacttttgcgcaaaaaatacttccctaaaaaaagaagctgcgcaaatttgaaggcgaagtttgaagtgagacttcagaatggccttgaatgcacatgtgcctacattaagtacatacgccctcacgatgctggatgggatgtcaaggagtttgataatgagactccatacactattatgtttggtctagataagtgtggatcaacgaacaaggttcatttcatccttaagcacaagaatcctaagactggaaagtatgttgagcatcatctcaaattcccaccatttgtcccatatgataagctctctcatgtctacacggctatcttgaagccagacaatgaggtcagaattttggtagatggggaagaaaagaagaaggcgaacttcctttctgctgatgattttgagccaccacttatcccatccaagaccattcctgaccctgatgacaagaagctggaggactgggatgagagagctaaaattcctgatccagatgcagtaaagcctgatgactgggatgagagagctaaaattccagaacaccattttgtcacgatccagacaaacactaatcttagttactttatgaaatacaaattttggcttagccaatga

SEQ ID NO: 107575 - DNA, 801 bp, Zea Mays
atggtgagcgcgagcgtacgcgggggctttccaaaaacacgaagacaatggcgtgttgcgcacatgacgcaaagagaaacgaccgcaactccacggcagcttcacggacgcggcgcggacgcagggcgttgcgactgttcttcggtgacgagaatactagaattggatgctaatggtccggacagaagagcatggctgcgcgcggggagcacggttgggcgctcacacgagggagataggcacgagcaggaagaaaacgctgggagagaaagagcggcgcagggaaggggcctcggctgggcgtcgagcacaggggcgccagagagcgagcttgagggcgaacaccatgggaagcaggggagctcggcgctgcaaaattcgagcagaggccagggcggctgggcaagacgaagcaccagcggcgcagacaaatccgagggagagagagagaagcagggagggagccgagggaggtcgaggagcaggaatggagcaccaggtgttgagaacgacggtggagagctcgggtgtttacagcgagcagaggaagggcgtgacacactgaagaagaggagcggtcggcgctgctgccaggagccggaagcgagatccgtagccaaagccttggggagattcagcgtccaacaagcaagcaggagctggaaccaacaagctacggtggtttggggaagaagcctgcgcgcggaaataaggcagtggggaggaaaatatcgaagagaagagcggccgggagtaggcctgggcaaaaagaaccggaaccgaggaaccgaaccgaaataa

SEQ ID NO: 107576 - DNA, 959 bp, Zea Mays
attgcaggctgctgaagaaactggtcgcaaattaaaagtatatgatgttgaaaaaaatcctaacgctgttattactcttcatagtttgatcaaattggagggttgcgaaagcctggttactgtaatttctactagtgacatgcggtgttgggacgcccctgaaaaggcagatgttttggtatggtgatatttctttcttggaaatggtcatgctatacctttccaacctgttagattttaaaaacctcttacaaacctatatgaatcaggtcgtgaattgattgggtcctttggtgacaatgaactatctcctgagtgtcttgatggtgctcagagattcttgaagcctgatgggatttccattccttcatcgcctttgcctcttagtttgtctattgctgcaacaagttggggctggatagttccaaagtaaatgtaaatggaggcgcgattgcccttggacaccctctgggtgcaacaggtgcccggtgcgtggctactcttctaaatgaaatgaagcgtcggagcagagactgcagatttggtgttgtcaccatgtgtatcggatctggaatgggggcagcagctgtgttcgagctatgttcggcccaactggaggtatcgaccatcactcgtcactataacccgatggtgatcggcgaccgtgagcttccatgttattgcgttctgatacttgagatttttattatgattatgtatgagatattgtctcttattagtactgcatgatgagatgtgtcttattatgactatggatgagacttttgtgatgtaattgatgagacaattgatgagacaatggatgagaatttttgtgatgtaattgatgagactatgaatttaaatattgttatgtgattgtgtgtgagatgttttatgtgaaaatatgttgtgctatatagctgttgatatatttgttatgttgtggaatgtggtgt

SEQ ID NO: 107577 - DNA, 447 bp, Zea Mays
atggccgagctcgcccctgatgtcgtgtcttgctccctggcgcagcaagctcgccgcgccctaaactccctggccgcggctttctctcctactccatctcccaggcgcgctcatcccctctactcccctgcgcgccgacttcctctgctcgctcgtgcccggccgagttcactggccactgcgccctgccgaggtccctccatggtcgagtgctccttctccatgcgttcagccagcgtctggtgcctctcccttcctaactgcggccacacttggagctcgtcggtgtggtctgccgcggagctcgcccttgtctccctgctggtgatcctgctcgcgagttgttcctggcgtgttgttcctggccgatcaagtctctcctctgccgtgagctcacctctctcggcctcttctcttctaagtccggcgtgccgcttggtcgtgtag

SEQ ID NO: 107578 - DNA, 1137 bp, Zea Mays
atctcttttccgttcgccaattcgaaatcgaatccgttccccaattcgaaatcgaatggggtcggtcttgtcgtgcgtgcgtggctgcgcgagcgacttgactgcacccgacccccctcctctcagtgcccacacactgcgcgccgccgccgggtcctcctagtgtttcgccgcgatgtcgctccggccgagcgagcgggagcagatgcgaaagggcaactacaagcagacggtggacgcggaggagagccgccaccgccgcgagggccagatgatggacatgcgcaaggccaagtgcgaggaaagtctccagaagaagcgccgcgatgggtttcccgcctccgccgccggtatgccgccgatggtccactccaccgcgctccagcagaaggtgcggtgcccccctcccttgttcttcctggccccgatctgatccgctctctgcgttagggtatgggtgacgtggtggcactccatttgctgggttcggatctgactttcttggtgacgggatggctttccggcgatggcgcatgctgtccactccaacgacccctccgtgcagcttgaggccaccacacagttcaggaagctgctttctatagtccccccaatcgaagaggtgatcagcacaggagtggtgccgcgattcattgagtttcttacacgtgaggaccatccccaactccagtttgaggctgcatgggcactcaccaacattgcatcaggcacatcagagaacactaaggtggtcgttgagagtggtgctgtgcccatctttgtcaagctactcaactccctcaagcgaggatgttcgtgaataggcatgcactaaattacaagagatgtgtcttattatgacccggggcagatccagaatttttctatgacccaagccaaatctaccaaattttcttctttttattttatcttaactattttgtaccatattaaatagagacttatatagagttacatggatcaagccctgggccacagatcgggtggcctggggtgtagatccgccactgattatgactatggatgagacttttgtgatgtaattgatgagactatagatttaaatattgttatgtgattgtgtgtgagatgttttatgtgaaaatatgttgtgct

SEQ ID NO: 107579 - DNA, 820 bp, Zea Mays
ctgcacccgacccccctcctctcagtgcccacacactgcgcgccgccgccgggtcctcctagtgtttcgccgcgatgtcgctccggccgagcgagcgggagcagatgcgaaagggcaactacaagcagacggtggacgcggaggagagccgccaccgccgcgagggccagatgatggacatgcgcaaggccaagtgcgaggaaagtctccagaagaagcgccgcgatgggtttcccgcctccgccgccgggtatgggtgacgtggtggcactccatttgctgggttcggatctgactttcttggtgacgggatggctttccggcgatggcgcatgctgtccactccaacgacccctccgtgcagcttgaggccaccacacagttcaggaagctgctttctataggtgagattgggatcttatgtgcagttagcattccggatggatagagtttaggggttgagatttgggccatgctcgaggtattaggccatacccaaacgtgagggtatggtcagttgtagctgtttcgtgtaattgttgtatacaggacttgacttgtggattgcgagctatcaaaattagtcgttgcaccctctcattttcagattacttaatttactgtctcctcagaaaaaaacaaaccctatcctatggcctctgcaacatgcatatgaccatgtatgcccaaaagttctgaaaaaagttatactcctgaaagcatttgatttcatgaaccactattctattttttccagtagtgttctgcttgcagctggggcaattatcattgcatccatgtgtgtgttatacattgtttt

SEQ ID NO: 107580 - DNA, 714 bp, Zea Mays
gttgagatcttccgcccacatgacccagacgggactgattacgaggaggcgaagcatggcaaggcgcgtattggaagagctattgagattaaagacgacgacacgcgtcatgacgaggtggcatatggacggctgccgcgacgcgcacgacgtcgccacgccacagcaccaccacggccaggaacagatgcacgcacagggagccttacggcgctggaaactgactcgcgcaacagagagaagcgctggcgagcgaggcctcgacacaggacgagcgcgcatcagggagaatccacggcgagggagcccggctggattgttgatggagcagacagatgggcgctgagctggggaatggacagagaagcgcggccatggaaagcggactgtggccgggcgagactggcgtccaggaaggagcagaagatgactggcaaacagacggcgctggggaagaaactcgtcagcaggattcggagccggccatggacgacgctgccgcgaccagggcgagcacggccggacttgaggaagaggagggaggccggggagcaaggcgagctcactgcagaggagagacttgaccggccaggaacaacacgcccaggaacaactcgcgagcagggagacaatggcgagctctgcggcagagcacgccgacgagctccaattgtggccgcagttaggaagggagaggcaccagacgctggctga

SEQ ID NO: 107581 - DNA, 155 bp, Zea Mays
cctcttttttgtctttttttttttttttttctttttttttattttttttttttttttttttcttttgatttttggttttttttgcgtgggggtaatttttttttttttttttttatttatttttttttttttttttttttttttttttttttttt

SEQ ID NO: 107582 - DNA, 2375 bp, Zea Mays
ctaccgcctacaggctacagcccaccgcggcaccgctgaagacaccccaaaacctatcccaatcggccgcgcctccgtccgtggctccgcctgccggcgacccctcagatccgcgcgccccgtaccacctcccgccgcctcactgccagatccggccctggctccgcaaaatcctgcgacatcgcagacgagccgggcgggagagcggagatatccaacttctccacgtgcagtaacctaaccatccttctgctctggattgttatgatattcctggtttactacataaagcttgttagccgtgaggtccaagtttttgagcctttcagtattcttggactggaagctggggcatctgaatctgatatcaagaaatcatataggagactttctattcagtaccatcctgataaaaatcctgatccagaggctcataaatacttcattgaatatatatccaaggcatatcaagcattaactgatcctatatctcgtgagaattatgagaaatatggtcaccctgatgggcggcaggggctgcaaatgggcattgctttgcccaagtttttactaaatattgatggtgcatctggtgggataatgcttcttggaatagtcggattttgtatattattgcctttgatgatagctgttatttatttgtcaagatcatcaaaatatactggaaactatgtcatgcatcaaactttgtccacttactactactttatgaagccatctcttgctccaagcaaagttatagatgtcttcatcaaggctgcagaatatatggagatgccagttcgacgcagtgatgatgaacccctgcaaaaattgtttgtagctgttagaagcgagttaaatctggacttaaagaacattaagacagaacaagcaaagttctggaagcagcatccatcactagtaaagatggaactgctgattcaggcgcatctcacttgtgagtcattcgctttgacgccagcacttcttaaagattacagacacatgcttgaacttgcacctcgtcttctggaagaactcgttaagattgcagttttaccaaggaatccccatggttttggatggctccggcctgcactcagtgttattgagctttctcaaaatattatccaggctgtaccattaagtgcacgaaaagctagtggtgctaactcggaaggaatagcgcctttcttgcagctgccacatttcacagaagcaaccgtgaaaaagattgctcgcaagaaaatccgtgcattccaagaactttgtgacatgcctgtggaagatcgtgctgcattgctcacacaagttgctgggctttctgaagaacaagctcgggatgtagagtttgtactggagatgattccttctattgaagtagacatgaaatgtgagactgaaggtgaagagggcattcaagagggtgatgtcgtgaccatgtatgcttgggtctcgctacaacggcgcaatggactgactgctgctcttcctcattgtcccaacttcctgttccacaaggaagaaaacttctggctgcttctagccaacgtggcatctaatgatgtctggttgtcacagaaagtcagcttcatggatgaggccacggccataactgcagcatcaaaagctatacaagagacccaggaagcactaggtgcaagtgcaaaggaaataggaaatgcagttagggaggcagttgacagggtgaagaaaggcagtaggctggtaatgggcaagttccaagccccagcagagggtactcacaacctcacctcttttgtttgtgcgacgcttggataggctgtgacacgaagaccagcttcaagctcaaggtcctgaagcgcagccgtgctggaacaagaggccatgtgcctgaagaagggccagtggctgctgcagaggatggtattgaggaggaagaggaggaagaggaagaggagtatgatgactatgagagcgagtacagtgatgacgaggaggacgcgaagaacaagggggaagggaaggggaaggttgtgaacggatcggcccatcaaggggctgaatctgatattgattcaggcagcgatgagtaattctatactgtgttatgttgagaaaggaacgtagaggttgacaccatctgtttttttttttaaaattgaacgtatcccctccattttatagatggtcatagttactcagttttgtttactaataagttgagattgattggttacaaaagagccgagcaaaactagcttactatctcgagttgacctgaagactgcatggtcattctccaaagtgcaagcgtttcacccatgcctatcacctgtgtggtgtatgttcctcacatttattccgaatggcactgctgatttcttaaa

SEQ ID NO: 107583 - DNA, 2262 bp, Zea Mays
ctaccgcctacaggctacagcccaccgcggcaccgctgaagacaccccaaaacctatcccaatcggccgcgcctccgtccgtggctccgcctgccggcgacccctcagatccgcgcgccccgtaccacctcccgccgcctcactgccagatccggccctggctccgcaaaatcctgcgacatcgcagacgagccgggcgggagagcggagatatccaacttctccacgtgcagtaacctaaccatccttctgctctggattgttatgatattcctggtttactacataaagcttgttagccgtgaggtccaagtttttgagcctttcagtattcttggactggaagctggggcatctgaatctgatatcaagaaatcatataggagactttctattcagtaccatcctgataaaaatcctgatccagaggctcataaatacttcattgaatatatatccaaggcatatcaagcattaactgatcctatatctcgtgagaattatgagaaatatggtcaccctgatgggcggcaggggctgcaaatgggcattgctttgcccaagtttttactaaatattgatggtgcatctggtgggataatgcttcttggaatagtcggattttgtatattattgcctttgatgatagctgttatttatttgtcaagatcatcaaaatatactggaaactatgtcatgcatcaaactttgtccacttactactactttatgaagccatctcttgctccaagcaaagttatagatgtcttcatcaaggctgcagaatatatggagatgccagttcgacgcagtgatgatgaacccctgcaaaaattgtttgtagctgttagaagcgagttaaatctggacttaaagaacattaagacagaacaagcaaagttctggaagcagcatccatcactagtaaagatggaactgctgattcaggcgcatctcacttgtgagtcattcgctttgacgccagcacttcttaaagattacagacacatgcttgaacttgcacctcgtcttctggaagaactcgttaaggtacttttttaccaaggaatccccatggttttggatggctccggcctgcactcagtgttattgagctttctcaaaatattatccaggctgtaccattaagtgcacgaaaagctagtggtgctaactcggaaggaatagcgcctttcttgcagctgccacatttcacagaagcaaccgtgaaaaagattgctcgcaagaaaatccgtgcattccaagaactttgtgacatgcctgtggaagatcgtgctgcattgctcacacaagttgctgggctttctgaagaacaagctcgggatgtagagtttgtactggagatgattccttctattgaagtagacatgaaatgtgagactgaaggtgaagagggcattcaagagggtgatgtcgtgaccatgtatgcttgggtctcgctacaacggcgcaatggactgactgctgctcttcctcattgtcccaacttcctgttccacaaggaagaaaacttctggctgcttctagccaacgtggcatctaatgatgtctggttgtcacagaaagtcagcttcatggatgaggccacggccataactgcagcatcaaaagctatacaagagacccaggaagcactaggtgcaagtgcaaaggaaataggaaatgcagttagggaggcagttgacagggtgaagaaaggcagtaggctggtaatgggcaagttccaagccccagcagagggtactcacaacctcacctcttttgtttgtgcgacgcttggataggctgtgacacgaagaccagcttcaagctcaaggtcctgaagcgcagccgtgctggaacaagaggccatgtgcctgaagaagggccagtggctgctgcagaggatggtattgaggaggaagaggaggaagaggaagaggagtatgatgactatgagagcgagtacagtgatgacgaggaggacgcgaagaacaagggggaagggaaggggaaggttgtgaacggatcggcccatcaaggggctgaatctgatattgattcaggcagcgatgagtaattctatactgtgttatgttgagaaaggaacgtagaggttgacaccatctgtttttttttttaaaattgaacgtatcccctccattttatagatggtcatagttactcagttttgtttactaataagttgagattgattggttacaaaagagccgagcaaaactagcttactatctcgagttg

SEQ ID NO: 107584 - DNA, 1933 bp, Zea Mays
agcacagccagttgactcaagcgccatacctctgctccatagtgggcacccgtgtgtcacgggcacgacgagattcggcggggatggcgcggtggcgggcgcggcgcctgctgcctctggccaccttcgtcacactcggcatgatccttggatctttgcttcagttagcacttcttcatcgactagatggctattcagtgcatgcagatagtgatccagaggctgttcttcttcgccttggatatgtgaagcctgaagttatcagctggacgccaaggataattgttttccataattttcttagttcagaggagtgtgattacctaatggcaattgctagaccaagactccaaatatccactgtagtggatgttgcaacaggaaagggtgtaaaaagtgatgttcggacgagttctggtatgtttgtgaattctgaagaaagaaaatctccagtcgttcaggctatagagaagcgaatatctgtgttctctcaaatacctaaagaaaatggggagctcattcaagtattgaggtatgaagctagtcagtattatagaccacatcatgattacttctctgacactgtaagttgaccatctctaagtttaaccttaagcgcggagggcagcgtgttgctacaatgcttatgtatttgacagatggcgttgtaggtggtgaaactcactttccgcaggttagctgatattttacaagttaataaactgttatcatatcatatactgtacataccatgccatttgtgtcagcttgtttctgtcccaggcaggagatggagagtgcagctgtggaggaaacgtggtcaaaggattgtgtgttaagccaaacaaaggggacgctgttctcttctggagcatgggattggatggtaacacagacccaaacagtatccacagcgggtgccctgttctgaaaggagagaaatggtccgcgacgaaatggatgaggcagaagatgactttctgattagagctggtttggtgggtacagggagagttggtcccactccaggggtaacacctgcaagatgtctcattatagcaatgcatacagcaacacatggatttcgcagggtcagacctgtgcaatcgctgttaacgcttcgtcgttcaatcacagggttggcgaggtctttgatactgcccttcgattgccctttccactctcgactgtttggattccagagcatagacgttttccggcgcttgggttcgacagctaacacctgggattcctcacatgggctagtttggaacccgatttctattttctcaatgaaatttagtttattttctcttgagaaaatataaatcacttaaaaatagagtttctgaaaatagaagaaaattggaaaaaaaatccactcctactgggatttgcaaacttaacatcgtcatcgcaggcttcacaaaatcatcatccactggatggagtcttggcatcccatctcattccacaaattttcattaacccctcacaaggtatcgaggtcagagccaagctcggacgaggcgaaagtcttcccgaggatggttgagtccttcctgacgtgtgccacagttaacagagtggtcgtctgcggggttcgcggtggtgcaggtagccgaggcctagctcgagcaaggtggaggcggtgcccgagggcaagctcagcgtcgggcgaggcggagatggtgcccaagggcaagcccagcgttgggcgaggcggagttttgcgcctgaggcccggtctgctcttccgtcgtgtttgatgttccatccaggtatggcaggcggcgtgtacgcatagtggcgcatgcgtaatcatgatgttgcgcctgaacgcgactgctgtcttgttgttgttgttgtgctcatgtgtcactgtgtagggtaggtatgcacattaaatgcgagtgttcctcgctggccttca

SEQ ID NO: 107585 - DNA, 1820 bp, Zea Mays
agcacagccagttgactcaagcgccatacctctgctccatagtgggcacccgtgtgtcacgggcacgacgagattcggcggggatggcgcggtggcgggcgcggcgcctgctgcctctggccaccttcgtcacactcggcatgatccttggatctttgcttcagttagcacttcttcatcgactagatggctattcagtgcatgcagatagtgatccagaggctgttcttcttcgccttggatatgtgaagcctgaagttatcagctggacgccaaggataattgttttccataattttcttagttcagaggagtgtgattacctaatggcaattgctagaccaagactccaaatatccactgtagtggatgttgcaacaggaaagggtgtaaaaagtgatgttcggacgagttctggtatgtttgtgaattctgaagaaagaaaatctccagtcgttcaggctatagagaagcgaatatctgtgttctctcaaatacctaaagaaaatggggagctcattcaagtattgaggtatgaagctagtcagtattatagaccacatcatgattacttctctgacacttttaaccttaagcgcggagggcagcgtgttgctacaatgcttatgtatttgacagatggcgttgtaggtggtgaaactcactttccgcaggagatggagagtgcagctgtggaggaaacgtggtcaaaggattgtgtgttaagccaaacaaaggggacgctgttctcttctggagcatgggattggatggtaacacagacccaaacagtatccacagcgggtgccctgttctgaaaggagagaaatggtccgcgacgaaatggatgaggcagaagatgactttctgattagagctggtttggtgggtacagggagagttggtcccactccaggggtaacacctgcaagatgtctcattatagcaatgcatacagcaacacatggatttcgcagggtcagacctgtgcaatcgctgttaacgcttcgtcgttcaatcacagggttggcgaggtctttgatactgcccttcgattgccctttccactctcgactgtttggattccagagcatagacgttttccggcgcttgggttcgacagctaacacctgggattcctcacatgggctagtttggaacccgatttctattttctcaatgaaatttagtttattttctcttgagaaaatataaatcacttaaaaatagagtttctgaaaatagaagaaaattggaaaaaaaatccactcctactgggatttgcaaacttaacatcgtcatcgcaggcttcacaaaatcatcatccactggatggagtcttggcatcccatctcattccacaaattttcattaacccctcacaaggtatcgaggtcagagccaagctcggacgaggcgaaagtcttcccgaggatggttgagtccttcctgacgtgtgccacagttaacagagtggtcgtctgcggggttcgcggtggtgcaggtagccgaggcctagctcgagcaaggtggaggcggtgcccgagggcaagctcagcgtcgggcgaggcggagatggtgcccaagggcaagcccagcgttgggcgaggcggagttttgcgcctgaggcccggtctgctcttccgtcgtgtttgatgttccatccaggtatggcaggcggcgtgtacgcatagtggcgcatgcgtaatcatgatgttgcgcctgaacgcgactgctgtcttgttgttgttgttgtgctcatgtgtcactgtgtagggtaggtatgcacattaaatgcgagtgttcctcgctggccttca

SEQ ID NO: 107586 - DNA, 1824 bp, Zea Mays
agcacagccagttgactcaagcgccatacctctgctccatagtgggcacccgtgtgtcacgggcacgacgagattcggcggggatggcgcggtggcgggcgcggcgcctgctgcctctggccaccttcgtcacactcggcatgatccttggatctttgcttcagttagcacttcttcatcgactagatggctattcagtgcatgcagatagtgatccagaggctgttcttcttcgccttggatatgtgaagcctgaagttatcagctggacgccaaggataattgttttccataattttcttagttcagaggagtgtgattacctaatggcaattgctagaccaagactccaaatatccactgtagtggatgttgcaacaggaaagggtgtaaaaagtgatgttcggacgagttctggtatgtttgtgaattctgaagaaagaaaatctccagtcgttcaggctatagagaagcgaatatctgtgttctctcaaatacctaaagaaaatggggagctcattcaagtattgaggtatgaagctagtcagtattatagaccacatcatgattacttctctgacacttttaaccttaagcgcggagggcagcgtgttgctacaatgcttatgtatttgacagatggcgttgtaggtggtgaaactcactttccgcaggcaggagatggagagtgcagctgtggaggaaacgtggtcaaaggattgtgtgttaagccaaacaaaggggacgctgttctcttctggagcatgggattggatggtaacacagacccaaacagtatccacagcgggtgccctgttctgaaaggagagaaatggtccgcgacgaaatggatgaggcagaagatgactttctgattagagctggtttggtgggtacagggagagttggtcccactccaggggtaacacctgcaagatgtctcattatagcaatgcatacagcaacacatggatttcgcagggtcagacctgtgcaatcgctgttaacgcttcgtcgttcaatcacagggttggcgaggtctttgatactgcccttcgattgccctttccactctcgactgtttggattccagagcatagacgttttccggcgcttgggttcgacagctaacacctgggattcctcacatgggctagtttggaacccgatttctattttctcaatgaaatttagtttattttctcttgagaaaatataaatcacttaaaaatagagtttctgaaaatagaagaaaattggaaaaaaaatccactcctactgggatttgcaaacttaacatcgtcatcgcaggcttcacaaaatcatcatccactggatggagtcttggcatcccatctcattccacaaattttcattaacccctcacaaggtatcgaggtcagagccaagctcggacgaggcgaaagtcttcccgaggatggttgagtccttcctgacgtgtgccacagttaacagagtggtcgtctgcggggttcgcggtggtgcaggtagccgaggcctagctcgagcaaggtggaggcggtgcccgagggcaagctcagcgtcgggcgaggcggagatggtgcccaagggcaagcccagcgttgggcgaggcggagttttgcgcctgaggcccggtctgctcttccgtcgtgtttgatgttccatccaggtatggcaggcggcgtgtacgcatagtggcgcatgcgtaatcatgatgttgcgcctgaacgcgactgctgtcttgttgttgttgttgtgctcatgtgtcactgtgtagggtaggtatgcacattaaatgcgagtgttcctcgctggccttca

SEQ ID NO: 107587 - DNA, 324 bp, Zea Mays
atggtccagcagggagataatacccctcttcttccccaccatgttctccctttcctgctggcgcagcagctcttctcagttgttttgcgcgaccaacgctactggatgcgggacgcgaagagattggggagaagaagggggacctgctgggctgctggagcagcggagggagcgcggggatgggttcacgggatggcgaagagatggggtcgtgggattggggacggttgtgccgcgcatgaagatgagggttgggtgaaggcaggccgcacggtgggctgcacgctgggacagtgggctacacgatgggacgatgggccttag

SEQ ID NO: 107588 - DNA, 584 bp, Zea Mays
cggggtgcgggttcagactcgcgctgtacaccatgagctctgtcctcgtcttcgccacgtgggcgctggtcggcgcggtgccgtgccaggacctggcgtccgcggccaccggccccccgtcgcgccgccgaagtaggcgcagtgggcggcgcccatgtccgcgctccaggagcggatcgcggaggagtgtaggcgcaaggaaaagaagggatcttgctctggctccgcgaccaagtcggggctcctcgcggagatgcaggtcgtggagcgtgccgcgcgcgagctcaacagcgtgctcgaggagatcgccgaggaggaagaggaggaggacgacgacgaggggcggcgatggcaggggatcgtggacgaggagcgcgcgagggacgtgacaaagcgcgccgaggagctggcggtggcttgccggacgctcgaggagaccggcagcgccctgtggagaccgacgctgtgcggcccctgctggacctcatggccgacccggagggagcgcgggattcgagggtgggggatccgcgaggatggaagggagcgttggggatccgcccgtcaaagctaaaaatggaagg

SEQ ID NO: 107589 - DNA, 923 bp, Zea Mays
tctcttgggtgctgcagctcgccccccccctctgctcaccatctcctccctcgttcccatggcgccctccccttcttggtggctgacgcccctccctccatggagctcgcctctgccatgaccgccctctgcccccttccttgctgttcttattgcagcccctctccatgccaagctcgccctccttctgtgcccagccctagctcgccccagcccctctccctggctgcccttgctctgttttcccccagccctagccgagctcgcccctgccctaagttctcaaggcagcccctctgtttttccatggtcggcaccctccccatcttttgtagattggaagaaaggattcttgtgagtgtgagaagaagcaaatcccagcataacgcatgctaggtgttcgacgaaatgttcgaattgggattgtcgttgatattgtggatctgagtcgcgctttgtattggttctgcacaacaggacttcctagcgatgtcaaggatatgtctttccaccttcacaagttccctttactttcaaaaagtgcctttcttgaacggtcaattgaagaaaattctgaccaagaagaatgcatcatcaaactaaatgacattcctgggggtgccaagtcatttgagctagttgcaaggttctgctatggtgtgaaaataaagatttcacctgcaaatgctgtctacctacggtgtgcctcaaagcatctagaaatgactgaagaagtagctgaggaaaacctgattttgtgaatatataattgtgatgcttttgtgaatatataattgtggtgcttttgtgtttatgtgatggatctatgactgtggtatactgattaactgtgtatgtctttatgatttgtgtataaaaatatgtgatttgtggtgcttaattaaatgtatattattattaat

SEQ ID NO: 107590 - DNA, 750 bp, Zea Mays
aaaagacaaaaaccagcccatcagtgaaaaaaccaggcagctaggtgcctctgatggttgcggcaagaaaggagagacccttagctcctgccatttcccacaacaattgcataagatccaagtatatcatacactatttggttaaatagtttgaatgtttgctaccttctcagaaaattacatgcaccacttagcacaacggcgtatttgtagttattttcagttagttgtttggagtaacatctcgtggatcttctcatggttcatttgttgatggtatctccacaaggaagctggtgctggtagttgggctcgatttctactattctgatagacgtgactgtagatttggcgatcttcaatcagagatggcaaatatgaatacatttctggcgctttctgaagctatcaattggcccagtggttcctactctgcaactagcatgcactagcagcaaggacattgttgtttggactagaagaactatcctagcatgcactaccagcaaggacattgttgtttggaccggaagccccatcacatctttgtgtttcagctatacgtacacaccttttcaaatctgtgatgaatgtttcgtattaaaagtactgagttcctcgatgattcttttgacatcggtgataaatcactggaaacaaatcaaaatagaaacatctaatttttttcctaattttgtgtttgagctatatgtacacaactttttaaatctatgatggatgttttctgtt

SEQ ID NO: 107591 - DNA, 779 bp, Zea Mays
gccttggctgcgcctgtcgtcgcgccgtgtcctggagtgtctcccgcgtcaccgctgttgtcctggatcctcgctggcttccgctccctccccgagtcgccctcggcacgcagtgacgacggcggcgcaatcccagactccacgtctgcctcgcgacaccccccactcccgcgtctctccaatcgcctcgcaacctcgcctcctgtcatctgcacatcggccactgactctgcagcttcgacgccgttggcagtggtagcggcagtgtctattgtgagtgaaggttacttgactatacaaatttccgtgcactacatcatttctatagtgctatgctacatgtgctaccaacacaggtcagtaaatccttttcatatattgtgtgtgctgattccatgaattctagttgctccttcagaacaggctatgttgagctcgttggcttctgctcacttcaaactgactgctcaagtgggcactcagactctccccaaagggtctgtatatggtcatgtccggtaagtttagcagatacagacgttcgctgtgcctccaggctccagcaatgaccggtaaatggcactctaaattttacgtcgccttccatcctctaaatttggcggactctatgcgtccgctacacatcggtcgctggtgaatcccgcgctgacgcggaggtttccctctccattcgcatggcaaccatttcccccagcgccgccgaaacgctcgtgacaagctttgtcggtgctagacgcgaagctaggcactaggctacc

SEQ ID NO: 107592 - DNA, 598 bp, Zea Mays
ttgtccatcgtgcaccgagcaccatctcgtgtggagggagaaactgagagagatggggaggtgagatgtgcggccgccatcatgggtgggtgcttgcaccactctctggggccctctgtcgggttggggggggggggactcgccctatgctagcggacgtttccacggcaccaccgggcggactgggtcacctactccgaccgaatcgctcgccggagaatcaaacccaccgcggttcgtcctacgcgcgtgggcagtgtcatccatgtcgctagcgccgcggcaggagagttgttttcgtcgtctgctgttcgtcggcggggcgtcatgatcatgggctcccctccaccgtgtggcgccatcaggtaaggaagaagcacctaggagcattgattccacgaatggacggccgagattgaagtagtgtattggttcatggtggttgcggctccgccgttggatcgtagatgtgggggcgagatcaaatcccgcgcgcattaaactgtgacccttgatcgcagatccgatggacctggttgcgtaccggttcgccgaaagctagatttaatttcgaccgtttgatcgggatccatcgatc

SEQ ID NO: 107593 - DNA, 1323 bp, Zea Mays
atgccctcaccaccatgtgcgagctacaccaagctaggtcaatgttgcgctagacaacttcagttacgtgtagctgacacattgttcaatagctcgaacacaaggagtgcatttaaagttgggaagctggccaatttgctcttgtgtttggtttctacagtttctgggaaattagattttgcaccaaatccaatgcaaatgatatttcactatttcttcctacaagagttcaagttgatcgaaagcgtagagctggctcctctcaggaagctgatcgatcccctgacaggggttcaaattgatcgaaagcatagatctggctcctctcaaggagctgatcgatcctctgacagattgatcgaggctttgatgatagtactaaatgacaaggaaaatcttagtgcacttggtaagcacaagaatgagaatcattctggtggcagtgagtcaattgagcatatattgcagatgcttcgccagttgccaaccaaaaatatatctgataagataagccatgatgagattacaaatgattctatctccaatgtcaataattcctttgctgatagaaaggcactgcatgtgaagcggaccaaaaatggcttgagtaaacaactacttgctattcattcatctgagaaggtaaggaacgcagtggttagtggtgtaaaagggcttttgtctagttgcagttctacattaaaaagaaccaagatgctacttttggaatgtttatgtgttctggcatgtgatgatgctgcagctgtgtctgaggctgcacaagatgctcttgatcatcttttcaaccaaggccacaatctcgtaacagaaaatgagatttctgatacctttactaggctggttgaaaggctaccacaagtggtacttggaagcgaggagacaaccacactttcacatgctaggatgttgttggctctgaccttttatgctggtcatagctcacagttttctggttccatggacaagctaattgtatcaaagccactatctattgggtatctttattcagttgctgagttgaagagtggcgcctattctaaagatacaactaacatatctctgcatgccacgtcaacatttgcagcctccaaaatatctgttatccatgataatgctttgccaattgcattacttggtacagttgaatatgagttgccccatgtgcctccatggttttttcatgctggtagccagaagctttatggggttcttgctggaataattagacttgttggcctatcaacagtgtcagttgatgggttcgattccttaaagctaacagtagtggtcactagcccttga

SEQ ID NO: 107594 - DNA, 1435 bp, Zea Mays
acttaatttcgaccgttgtgaagcgacaacccccgttttaaaggtctctttccccgattccatctcatccaagtcctttctccaccgaacctcaggaactagccgttgcccgcacctctccacgtcgcgcttcccatggactccgccaccgtggcgctcgccagccccgcctccgacgaccgacggttctgggaccgcctccgcacccgcgtcgacaccatcctcgaggaccgccgtggcctcccgccagccgccgccgccggtgcccccatgcgcggggtggaatctgagcgggggaagcggctccgggaggactccctgatgctcgtccgtggcctcgactctgtggcggagtctctggcacagctctccgacaccctcaccgccgcgcagaagggagtgagtgctctcgcgacctgctcttcgcaggcgaggggatgcgaaggcggcgcctgcccctgccccgaggaggtgaaggcagaggaggaggagcccagggcgaagcggatgtgtggcggctccacggaagattctccacggaacggcctggacagcaattctccggccgctggagaggaaacggcggctggtcctgatggtctggggaaggggaatgtccaggcctctgctgagatcgcacagagcactaacctgaagcgggccagaagtctggcggtgtcaatggcaagcagagccgctgcactcgctagggagctcaagaacatcaagtcagagctgcacttcatgcaggagaggtgcggtttgctagaggaggagaacaagaggctcagagaggggtgtgacaatggagttgcccctgaagaagatgacttggtgaggctgcaactggaggctctgcttgcagagaagtcgcgtctggcgcaagagaacgccaacctgacgagagagaaccagggcctgatgcagctggttgagtatcaccagttggcatcccaggatctggatgagtcctatgaggatgttatgcaggggatacggcttgacttctcgtcaccgctggggaagatcagcgacgatgaagaaggcgagcgcgacgatgaagttccggtcaccccagctgaggtgccatgctcccccgacgagtaggcaggcgaacgggaggaataagatgggttttccatcgatggaattcctttgtaccaggtgccaacagtaggcagttttttttcctatgtgatcactaccggtggccagtttttgatgtttctatgatttatataaaaacttctatgtgtagcaattttatatgatgcatcttgcacacgacaagttcgcagaaacagattctggttacagataaaatctgagatacccttttgagtgaaaacaagacgggggaatggttgtacaatgagccataaaaaatcggcatcacaagtatctctattacaggacgtgtaaccactaaacaata

SEQ ID NO: 107595 - DNA, 863 bp, Zea Mays
atccaagtcctttctccaccgaacctcaggaactagccgttgcccgcacctctccacggaacggcctggacagcaattctccggccgctggagaggaaacggcggctggtcctgatggtctggggaaggggaatgtccaggcctctgctgagatcgcacagagcactaacctgaagcgggccagaagtctggcggtgtcaatggcaagcagagccgctgcactcgctagggagctcaagaacatcaagtcagagctgcacttcatgcaggagaggtgcggtttgctagaggaggagaacaagaggctcagagaggggtgtgacaatggagttgcccctgaagaagatgacttggtgaggctgcaactggaggctctgcttgcagagaagtcgcgtctggcgcaagagaacgccaacctgacgagagagaaccagggcctgatgcagctggttgagtatcaccagttggcatcccaggatctggatgagtcctatgaggatgttatgcaggggatacggcttgacttctcgtcaccgctggggaagatcagcgacgatgaagaaggcgagcgcgacgatgaagttccggtcaccccagctgaggtgccatgctcccccgacgagtaggcaggcgaacgggaggaataagatgggttttccatcgatggaattcctttgtaccaggtgccaacagtaggcagttttttttcctatgtgatcactaccggtggccagtttttgatgtttctatgatttatataaaaacttctatgtgtagcaattttatatgatgcatcttgcacacgacaagttcgcagaaacagattctggttacagataaaatctgagatacccttttgagtg

SEQ ID NO: 107596 - DNA, 1010 bp, Zea Mays
gtcggggcggcactggacgcgggcggtgccgaagatgcctatatttatcgatcggtctgggtgcgtgggaagaaggcaccaccaccagctagctctctgtctgctgctcctctcaaaagagtcgcagttcactttgttgtactagagcgctgagcagatctttccttgtttctccattccggtacgaaggggtggggtccaagtgaagggaagggaagggaagggaagagaaggcctgctgcgagcgatgggcatcgtcgacgtcgtctccgagttctgctccttgccgaggactcgccggcatctcaagaagaggaagcagttccagacggtggagatgaaggtgcgcatcgactgcgaagggtgcgagcgcaaggtgaagaaggcggtggagggcatgaagggcgtgagctccgtggaggtggcggccaagcagaacaaggtgacggtcacgggctacgtggacgccgccaaggtcatgcgccgcgtcgcctacaagacaggcaagcgggtggagccctggccctacgtgccctacgagatggtgcagcacccctacgcgccgggcgcctacgacaagaaggcccccgccggctacgtccgcaacgtcgtcgccgaccccaccgccgcgccgctcgccagggcctcctccaccgaggtccgctacaccgccgccttcagcgacgagaaccccaacgcctgctccgtcatgtagtagacccacccacacaccgaccgaccgacccacttgttttctagctattagttactagtagtatagtaggtgcttgcttgggagagttgctcttggaggaggttttgctcttcctgtttttctttttctttttttcgttttccggtttcatgtagatgtagtgtgcgttttgatatttgtgaaaaaaaataaaccagtttgtaacggtagaccacttgtgcaaactatgatcagaaaaaaaaaatcagttcgtccttgcaaacaatgattgattccaaagggaaaatatcctgcc

SEQ ID NO: 107597 - DNA, 5806 bp, Zea Mays
atggaaacgcgcagccgcaagcgggcggaggcctcttcttcttccgcgacctcctcctcccgctcctccaagcgctcgcgacacaaccctaaccctaatcctcccgccggcccctcccccgcccccaaactcgtcccgttgccaccacgcacccgccgctcgaccgctgtcaatcccctccccccgatggattcctcgggcgacaacaactccaatcccgtcccgccgccgcggcgccgcggtcgcccctccaacacagataagggtaaggagcagcagcagccggagccgtctcacagctcccgagtgcgcgaggccgagcgcctgctgggtctaggtttcgagggcattgatgatgatgaagattcagggttcggggctggggccatcccccacagcctgacttccgcgagcaccgcgctccagggtcttcttaggaagcttggtgctggcctggacgatatactgccatcgtcggcactgtcagctgcagctgcagccgcgtcatcgtcatcagcatccgggcagctgagtgggaggttgaagaatattcttgcaggtttgcgtgctgatggggaggatggaaggcaggtcgaggcgttaacacaactctgtgagatgctgtccattggcacagaagagtctcttggggcattctcggtggactcatttgtacctgtcctggtcggtctgctcaatcatgagagcaacccagacatcatgttgctcgcagcacgagccctaactcacctctgtgatgtgctgccgtcttcttgttctgcagttgtgcattatggtgctgtgccttgcttttgtgcccggcttctcaccattgaatacatggacttggcggagcagtcattgcaagctcttaaaaaaatatccctggagcatccaactgcgtgcttgcgagctggtgcactaatggcagtcctatcataccttgactttttctccacaggtgttcagagagttgcattatctacagctgctaatatgtgtaggaaacttccttctgatgcatcagattttgtaatggaagcggttccacttcttactaatctactgaactaccatgattcaaaagtactggagcatgcttctgtctgccttacccgtattgcggaatctttttcaccatttccagaaaaattggatgagttgtgcagtcatggattggttgcacaagctgctagcttagtgtctgttagcaactcagcaggacaggcatccttgagtacatcaacatatacgggtgtgattcgtcttctctcaatatgcgcaagtggatcacctctggcagctaaaacacttctccttcttggaattagtggcatacttaaagatatcctttcaggctctgggttggttgctggcacgactgtgtcccctgctttaacaagaccagctgatcagatgaatgagattgtgaagcttgcagatgagttacttccttctctgcctgttgggaccatttctttaccagtgtattctggtgttcacatgaaaggttgttctgtaaagaaatccacttctagtaagcagggtgaacatggttcaacagcaaatgaactatcaggtcgggagaagttattgcgtgatcagcctgaacttctgcagcaatttggcatggacctgttacctaccatgacacaggtgtatggctctagtgtaagtggaccaatacggcacaggtgcttatctgtcattgggaaattaatgtactatagctcagctgagatgatccagtctctccttagcacaacaaacatttccagctttttggctggcattttagcttggaaagatccacaagtgttgatccctgctcttcagatagcagaagttttaatggaaaaacttccagagatttttttgaagatgtttgtgagggaaggcgttgttcatgctgttgagtcacttatatgcccagaattatctggtcaggtgactcctcatgtggattccattacatcttcacataataggcgcaaccgccgtagaaataatgctgtgaacactggaaataacttgcctgatggaccaaaaggttccaattctatgattgccaattcacccccaagcatggctgaagttccaaataatagtcttcgtgctttagttagtaatcatgcaaagtcatttaaggataaatatttcccttccgagcctggctcaagtgacattgcagttaccgatgaccttcttaaactgagggcactttgtgcaaaactgaatacaacagctgacactatcaaaacaaaagctaaaggaaaatcaaaggtagtgtctgacaatagttttgatgtcttgtgcaatattgaggagcaattggatgatataatagctgaaatgttgtctgagcttagcaagggtgatggtgtttcgacatttgagttcatcggaagtggagttgttacggctttgctaacctatctgtcatgtggaacatttgggagggaaaaggtgtctgaggcaaacataccaaatttgcgtcatcaggcagtcagacgatacaaaacatttatatcttttgcacttccaaatgataaagatgggaataaaactcctatggcattcctagtccataaactgcaaagtgccctatcttcgttggaacgtttcccagttgtgctcagccattctggaagggcatcgactttgggaggatcccgcctgacaacaggtttaggatctctgtcgcagcccatcaaattgcgtctttgtcgagcgcctggtgagaagtcacttaaggatttttcgtccaatgttgttcttattgactcattagctagtctggcagctgttgaagattttctttggcctagagtccagcgcactgaaccagtattgaagcctccaatgtcatctgcaaataattctggatctggagcagcaagctccacagcttgtgcgccttcaattccatcagaaactcaatctgtccgtcgcacatcgttaagatcaaagtcatcagctgccaccagtggtgcaattaagaaggattatcaggagggaagcataaacacctcaaagggaaaaggaaaagctgttcttaaattgagtttggatgaacctaaaggcccacatactaggaatgctgcgcgcagaaaagctacttcagagaaagatgttgaactgaagccatcacatggtcacatcacttcagaggatgaagatcttgatgcttctcctgttgagattgatgatgctttaattcttgatgatgatgacgaggatgtcccagatgatgaagatgatgatcatgaggcggttctccgaggttctcttccttcctgtgttcctgagagagtgcatgatgtgaaattaggagatgctgatgattctagtgttgcctcattggcaaatgataaccaggcacagccctcatctggttctagtacaaaaaatacttctagcaggggattggacactgctgaatttagaagtccagccacatttggttcacgaggtgcaatgtcgtttgctgcagctgcaatggctggattaactccagtaggtggtcgtggaattagaggtagccgagatcggaatggccttccattgggtgctcgtgcaactgagcattacaacaaattgatatttacagctgctgggaagcagctgaacaaacatttgactgtatatcaagctgttcaaagacaagtagttcatgccgaggatgatgaagatcgattcggtggatctgatttacctgatgatggtaaccacttctgggatgatataaggggtgatgtgttcactataacgtatcagaaggctgataacacagcggagaaggggtctgttggaggttcagcttcagtgccaaaatcttccaaatcagattcttgcagaactttgtctgaaaaacagtgtacttctcttcttgatagtattttgcaaggagagcttccctgtgatttagagaaatcaaaccaaacctacaatatcttatcactattacatgtgttggagggtttgaatcagttatcacctcgtctgagactgcagtcagcctgtgatgattttgctgaaggaaaagttgctacattaaatgggctatacgatgttggagctaaggtaccctcaaaggagtttatcaacagtaagatgaccccaaaacttgctcggcaaattcaggatgttcttgcactgtgtagtggcagtttaccatcttggtgttatcagctgacgaaagcttgtccttttctgtttcctttcgaaacacgaaggcaatacttctattccacagcttttgggttgtctcgtgcacttcatcgtcttcagcaacaaccgggcaatgataataacactgcttttgaaagagaagtcaggattggtagattgcaacgccagaaagtccgtgtttctcgtaaccgtatcttggattctgcagctaaagttatggagatgttctctaatcaaaaggctgtcctagaagttgaatactttggtgaagttggaactggtcttggtccaactttggagttttatactctcttaagccgtgagctgcaaagggttgacttaggattgtggagatctcattcttcagataattctgggatgcaaattgatgcgaatgctgatgatttaataagaagtaaaaatcatgaatcagaatcacttactgagagcaggaacatagtacaatcacctcttggattatttcctcagccttggccacctactgctgctgcatcagaaggtagcaaattcttcaaagttgtcgagtatttccgcttagttggtcgagtgatggcaaaagcattgcaagatggaaggcttctcgatttgcctttgtcgacagcattttacaaacttttgcttggacaagaacttgatttatatgatatattatcttttgataccgagttcggaaagacattgcaagaattgcaaattctcgttgcacgtaaacaatttttggactcctgctctagtgagagccaaaagatagatctatgtttccgtggtgctcccgttgaagatttatatttggacttcactcttccgggctatcctgaatatgttctcaaggaaggtggagagaatgcagaggtcaacatttgtaacttagaagagtatatttctttggttgtggatgctactgttaagaccggcataatgcggcaagtagaggcatttaaggcaggattcaatcaggtgtttgacatatcatcactgcaaatattttctcctcaagaacttgattatctgatttgtggtcgctgtgaactttgggagccggaaacactgcctgaacatataaaattcgaccatggttatacctctaagagtcctgcaattattaattttcttgagatcatggcagaatttactcctgagcagcaacatgctttctgccagtttgtgaccggtgctcctcggcttccacctgggggtttggctgctctaaatcctaagttgaccattgttaggaagcactcttctgtggcaaataataattcaaatgcaactggagcgacagagtctgcagatgatgatttgcctagtgtcatgacttgcgccaactatcttaaactaccaccatactccaccaaggctatcatgctaaagaaactgctttatgcgatcaacgaaggccaagggtcatttgatctttcgtgaatctcaacactaacataggttaaactcagctctccggagtcccaccgaaggtttggagcccgtacctttgggtgtggatgtctatactctcttttcttcttggttgtatattcttgcggatctttatagtgaataatagtaataaattgttttgcgcttcttactatgctaa

SEQ ID NO: 107598 - DNA, 6055 bp, Zea Mays
gcgcaggcgcagccatccccatccttcctcaaattcccaaccccacccaagccagatctcaccccctccccgatcgctacacctccgatgttcccgcctctttcgcctatcccttcatagccgcgtcgccaccggcgccgctgcgaggcggccgctgcctttctccgctccctttgtatggaaacgcgcagccgcaagcgggcggaggcctcttcttcttccgcgacctcctcctcccgctcctccaagcgctcgcgacacaaccctaaccctaatcctcccgccggcccctcccccgcccccaaactcgtcccgttgccaccacgcacccgccgctcgaccgctgtcaatcccctccccccgatggattcctcgggcgacaacaactccaatcccgtcccgccgccgcggcgccgcggtcgcccctccaacacagataagggtaaggagcagcagcagccggagccgtctcacagctcccgagtgcgcgaggccgagcgcctgctgggtctaggtttcgagggcattgatgatgatgaagattcagggttcggggctggggccatcccccacagcctgacttccgcgagcaccgcgctccagggtcttcttaggaagcttggtgctggcctggacgatatactgccatcgtcggcactgtcagctgcagctgcagccgcgtcatcgtcatcagcatccgggcagctgagtgggaggttgaagaatattcttgcaggtttgcgtgctgatggggaggatggaaggcaggtcgaggcgttaacacaactctgtgagatgctgtccattggcacagaagagtctcttggggcattctcggtggactcatttgtacctgtcctggtcggtctgctcaatcatgagagcaacccagacatcatgttgctcgcagcacgagccctaactcacctctgtgatgtgctgccgtcttcttgttctgcagttgtgcattatggtgctgtgccttgcttttgtgcccggcttctcaccattgaatacatggacttggcggagcagtcattgcaagctcttaaaaaaatatccctggagcatccaactgcgtgcttgcgagctggtgcactaatggcagtcctatcataccttgactttttctccacaggtgttcagagagttgcattatctacagctgctaatatgtgtaggaaacttccttctgatgcatcagattttgtaatggaagcggttccacttcttactaatctactgaactaccatgattcaaaagtactggagcatgcttctgtctgccttacccgtattgcggaatctttttcaccatttccagaaaaattggatgagttgtgcagtcatggattggttgcacaagctgctagcttagtgtctgttagcaactcagcaggacaggcatccttgagtacatcaacatatacgggtgtgattcgtcttctctcaatatgcgcaagtggatcacctctggcagctaaaacacttctccttcttggaattagtggcatacttaaagatatcctttcaggctctgggttggttgctggcacgactgtgtcccctgctttaacaagaccagctgatcagatgaatgagattgtgaagcttgcagatgagttacttccttctctgcctgttgggaccatttctttaccagtgtattctggtgttcacatgaaaggttgttctgtaaagaaatccacttctagtaagcagggtgaacatggttcaacagcaaatgaactatcaggtcgggagaagttattgcgtgatcagcctgaacttctgcagcaatttggcatggacctgttacctaccatgacacaggtgtatggctctagtgtaagtggaccaatacggcacaggtgcttatctgtcattgggaaattaatgtactatagctcagctgagatgatccagtctctccttagcacaacaaacatttccagctttttggctggcattttagcttggaaagatccacaagtgttgatccctgctcttcagatagcagaagttttaatggaaaaacttccagagatttttttgaagatgtttgtgagggaaggcgttgttcatgctgttgagtcacttatatgcccagaattatctggtcaggtgactcctcatgtggattccattacatcttcacataataggcgcaaccgccgtagaaataatgctgtgaacactggaaataacttgcctgatggaccaaaaggttccaattctatgattgccaattcacccccaagcatggctgaagttccaaataatagtcttcgtgctttagttagtaatcatgcaaagtcatttaaggataaatatttcccttccgagcctggctcaagtgacattgcagttaccgatgaccttcttaaactgagggcactttgtgcaaaactgaatacaacagctgacactatcaaaacaaaagctaaaggaaaatcaaaggtagtgtctgacaatagttttgatgtcttgtgcaatattgaggagcaattggatgatataatagctgaaatgttgtctgagcttagcaagggtgatggtgtttcgacatttgagttcatcggaagtggagttgttacggctttgctaacctatctgtcatgtggaacatttgggagggaaaaggtgtctgaggcaaacataccaaatttgcgtcatcaggcagtcagacgatacaaaacatttatatcttttgcacttccaaatgataaagatgggaataaaactcctatggcattcctagtccataaactgcaaagtgccctatcttcgttggaacgtttcccagttgtgctcagccattctggaagggcatcgactttgggaggatcccgcctgacaacaggtttaggatctctgtcgcagcccatcaaattgcgtctttgtcgagcgcctggtgagaagtcacttaaggatttttcgtccaatgttgttcttattgactcattagctagtctggcagctgttgaagattttctttggcctagagtccagcgcactgaaccagtattgaagcctccaatgtcatctgcaaataattctggatctggagcagcaagctccacagcttgtgcgccttcaattccatcagaaactcaatctgtccgtcgcacatcgttaagatcaaagtcatcagctgccaccagtggtgcaattaagaaggattatcaggagggaagcataaacacctcaaagggaaaaggaaaagctgttcttaaattgagtttggatgaacctaaaggcccacatactaggaatgctgcgcgcagaaaagctacttcagagaaagatgttgaactgaagccatcacatggtcacatcacttcagaggatgaagatcttgatgcttctcctgttgagattgatgatgctttaattcttgatgatgatgacgaggatgtcccagatgatgaagatgatgatcatgaggcggttctccgaggttctcttccttcctgtgttcctgagagagtgcatgatgtgaaattaggagatgctgatgattctagtgttgcctcattggcaaatgataaccaggcacagccctcatctggttctagtacaaaaaatacttctagcaggggattggacactgctgaatttagaagtccagccacatttggttcacgaggtgcaatgtcgtttgctgcagctgcaatggctggattaactccagtaggtggtcgtggaattagaggtagccgagatcggaatggccttccattgggtgctcgtgcaactgagcattacaacaaattgatatttacagctgctgggaagcagctgaacaaacatttgactgtatatcaagctgttcaaagacaagtagttcatgccgaggatgatgaagatcgattcggtggatctgatttacctgatgatggtaaccacttctgggatgatataaggggtgatgtgttcactataacgtatcagaaggctgataacacagcggagaaggggtctgttggaggttcagcttcagtgccaaaatcttccaaatcagattcttgcagaactttgtctgaaaaacagtgtacttctcttcttgatagtattttgcaaggagagcttccctgtgatttagagaaatcaaaccaaacctacaatatcttatcactattacatgtgttggagggtttgaatcagttatcacctcgtctgagactgcagtcagcctgtgatgattttgctgaaggaaaagttgctacattaaatgggctatacgatgttggagctaaggtaccctcaaaggagtttatcaacagtaagatgaccccaaaacttgctcggcaaattcaggatgttcttgcactgtgtagtggcagtttaccatcttggtgttatcagctgacgaaagcttgtccttttctgtttcctttcgaaacacgaaggcaatacttctattccacagcttttgggttgtctcgtgcacttcatcgtcttcagcaacaaccgggcaatgataataacactgcttttgaaagagaagtcaggattggtagattgcaacgccagaaagtccgtgtttctcgtaaccgtatcttggattctgcagctaaagttatggagatgttctctaatcaaaaggctgtcctagaagttgaatactttggtgaagttggaactggtcttggtccaactttggagttttatactctcttaagccgtgagctgcaaagggttgacttaggattgtggagatctcattcttcagataattctgggatgcaaattgatgcgaatgctgatgatttaataagaagtaaaaatcatgaatcagaatcacttactgagagcaggaacatagtacaatcacctcttggattatttcctcagccttggccacctactgctgctgcatcagaaggtagcaaattcttcaaagttgtcgagtatttccgcttagttggtcgagtgatggcaaaagcattgcaagatggaaggcttctcgatttgcctttgtcgacagcattttacaaacttttgcttggacaagaacttgatttatatgatatattatcttttgataccgagttcggaaagacattgcaagaattgcaaattctcgttgcacgtaaacaatttttggactcctgctctagtgagagccaaaagatagatctatgtttccgtggtgctcccgttgaagatttatatttggacttcactcttccgggctatcctgaatatgttctcaaggaaggtggagagaatgcagaggtcaacatttgtaacttagaagagtatatttctttggttgtggatgctactgttaagaccggcataatgcggcaagtagaggcatttaaggcaggattcaatcaggtgtttgacatatcatcactgcaaatattttctcctcaagaacttgattatctgatttgtggtcgctgtgaactttgggagccggaaacactgcctgaacatataaaattcgaccatggttatacctctaagagtcctgcaattattaattttcttgagatcatggcagaatttactcctgagcagcaacatgctttctgccagtttgtgaccggtgctcctcggcttccacctgggggtttggctgctctaaatcctaagttgaccattgttaggaagcactcttctgtggcaaataataattcaaatgcaactggagcgacagagtctgcagatgatgatttgcctagtgtcatgacttgcgccaactatcttaaactaccaccatactccaccaaggctatcatgctaaagaaactgctttatgcgatcaacgaaggccaagggtcatttgatctttcgtgaatctcaacactaacataggtattggtccacctagaaatctgcgtcattgttacccagagttagtttctacctcattcatgtatgacataggttaaactcagctctccggagtcccaccgaaggtttggagcccgtacctttgggtgtggatgtctatactctcttttcttcttggttgtatattcttgcggatctttatagtgaataatagtaataaattgttttgcgcttcttactatgctaa

SEQ ID NO: 107599 - DNA, 1247 bp, Zea Mays
atcggttagcttgtttcggcgtttcgttggatcagcagagcgttaaaccctatccgttggatgtagcactacaggcgtcgagcactggtaatcctgcaaccttcgtcatggcgcatgcggcggcggccgccgccgtgccgttacgtcgtccgctcctcttcctcaaggaggctcgactcctgtccacactcgcgacccccttacctgggctccgccacccgcgcgccctccgacccacaggccccttgccctccgatgccgaggacaccgacgatccagacgccggcgacggcgccgccgtgtccttcaagaagagccgcaacgaactgaagcgggaggcccgccgcgccgtgaagtggggaatggacctcgccaagttctccccacctcagatcaagcgcatcctcagtgccgcgtcgctggagcgcgaggtgttcgacgcgctaatgctcgtgaagaagtttgggccggatgtgcgggaaggaaggaggagacagttcaattacatcggaagtcttttgcgcgatgcacaaccagaattgatggatactctaatacaagcttctaaggatggagatgagaggaagttatataccttacttagtgaaggtaaactgttggtggaagaagaggaagaggaggaagaggacctacctgatggagaagaggagaatcaagagtatatgaaaattgcagatagatggtttgacggcctcctctgcaaagacatttcagttactaatgaagtttactctgtccatagtgttgaatttgatcgtcaggagctgcggaagcttgtgaagagagcccacatgttccaagaaagcacacaaaataaagatggggaagaatctaatgcgaagctttctggagcaaagaaaccacttatgaggttccttcgttcccttgcaaaggaggcttatgctccataggcgagctacaagctatcctgttaacttcttgtatccttatgtatgaaattgtaaaaattatcactatatttagggttgaaacaggaccggaaagtcttgtcctggtccgaatactgttttttcccgttcacttcagttatttttcggtttcggaacgaaaacaagtaggcagtgtttgaaaacgttttaactgatttttcgtttgttcttgcggttcctgttttttcggtgcagagactgttgccgcggcaagtgtgacatgtgtgtagtgtaatataatttctaactcaaataatgtcactatgtgttaatgtt

SEQ ID NO: 107600 - DNA, 1128 bp, Zea Mays
atcggttagcttgtttcggcgtttcgttggatcagcagagcgttaaaccctatccgttggatgtagcactacaggcgtcgagcactggtaatcctgcaaccttcgtcatggcgcatgcggcggcggccgccgccgtgccgttacgtcgtccgctcctcttcctcaaggaggctcgactcctgtccacactcgcgacccccttacctgggctccgccacccgcgcgccctccgacccacaggccccttgccctccgatgccgaggacaccgacgatccagacgccggcgacggcgccgccgtgtccttcaagaagagccgcaacgaactgaagcgggaggcccgccgcgccgtgaagtggggaatggacctcgccaagttctccccacctcagatcaagcgcatcctcagtgccgcgtcgctggagcgcgaggtgttcgacgcgctaatgctcgtgaagaagtttgggccggatgtgcgggaaggaaggaggagacagttcaattacatcggaagtcttttgcgcgatgcacaaccagaattgatggatactctaatacaagcttctaaggatggagatgagaggaagttatataccttacttagtgaaggtaaactgttggtggaagaagaggaagaggaggaagaggacctacctgatggagaagaggagaatcaagagtatatgaaaattgcagatagatggtttgacggcctcctctgcaaagacatttcagttactaatgaagtttactctgtccatagtgttgaatttgatcgtcagcttgtgaagagagcccacatgttccaagaaagcacacaaaataaagatggggaagaatctaatgcgaagctttctggagcaaagaaaccacttatgaggttccttcgttcccttgcaaaggaggcttatgctccataggcgagctacaagctatcctgttaacttcttgtatccttatgtatgaaattgtaaaaattatcactatatttagggttgaaacaggaccggaaagtcttgtcctggtccgaatactgttttttcccgttcacttcagttatttttcggtttcggaacgaaaacaagtaggcagtgtttgaaaacgttttaactgatttttcgtttgttc

SEQ ID NO: 107601 - DNA, 278 bp, Zea Mays
cgcgaggagacgtccagctgtcccgcaatacacatacgaaagtaaccgaaaatgaaataaagactagtcagttgcccatgcgttgcgacggcttacaacaatacccgcgtaaactgtccatcaaaaaaattcaagattttttattgattgtctccgctctctgtataatattttttgatttggctaactgatgttattgtttaaacacgagcaatgaagtgagcgattagaagaaagttcataacgactgactgaacgaacagagattataaaatgac

SEQ ID NO: 107602 - DNA, 776 bp, Zea Mays
gctaattaaattacagtaacatgtggtggtgacatggcacaacaagaacttgaagaagtagacatgttgttgctgcctgtagggtgacgtctatggtgttgtgctgcgggaaggcccacacaatgtgatcgggttgcacgccaatgttcaacatgtgccccagccagaacgtgtatgctactactaatataacattcgtcattggttggttcaccctaagaggtttgctgcatgttcatggagctggtggataagaagttttcgttgttctttttgtggtttattagatgacatcaattagtgttgaattgagccttagagtaggatgaatacaactgtcttaagtttctttgttccaacagattgtttgggggcaaggttacctatgaacttcaggaatcagtcttatgatattgttagtttgtacaacttagtgttaggttgctcgacttcttcatgaatgaggtgatagacattggtcgatcatgcagggttgaaggtgcttcatataactaaatctaccatagctttctaggaaaagatggaatagaactcaatttttggtggtcgcacaagtgtggaaacttgaattcatatatacttacactcaacattagcgcaaacagatgaccaagtttttcaattagtattttagtttggatttagtgtacaataatgtatgagttatttaacaatgcttatttatgacatattgaatgatacttatatttattatatcaactatgatgttattaaatatatgtgtgcatgtataa

SEQ ID NO: 107603 - DNA, 886 bp, Zea Mays
gcttctcatgttgtacatgccctaaaactgattgcacatcggtcgttgaataaaagggcaatcatctcagcgcagagctcgagcccgcagcctgccatcacctaccaaatccggcgggcgtccagcggatctccatctggtcggcgtggatcggatcttcggtggtgtttctcgtcttcacggcgattagtggcggcgagccgaccacgtccccgcagcagcagtcagcggcggcttgacgcggtcggacgggtacctctagttggcatcagcgagtgggcgcggggcgccgcaagtctcaccgtccgctggtgtagaggccccgagtctcggcgctatggagtgtaggccgcgtgtctccgcttagggagggccaggggtcaacaaagggacttgtcaagtgacaacatcgcggccttcgggtgttggaggtgtccggcctgttggtgccgtaccacaggattggttcattatttgtgggagatctatatttgtcttaccattctgttcccgcttctagtccccaaatcttcacgggctttgccagatcgctggccatctccttggcagccgcttccgctgtcgccagccatcaccaacctgcgcctcatagtggagcccaggaaaggcggtgggactgagcgagggaagaggagatgactagcttgtcgatcacggtgatgacgctgaacctgcatgaaggcgaacagccgagcgagagccccaacagctgggagaagcgccgggacatctgcgtcagcgtcatcaccagctactctcccaccatcctttgcacccagcaaggcttaagatggcaactggactacctacaacagtgcttgccgggttagacctatccagatctactcggaaccagccaagctaa

SEQ ID NO: 107604 - DNA, 92 bp, Zea Mays
tcatgcaagtcatccacatcaacacccatgcaagtcgtccacatcatcatccactaagtgcaaaagctatccaccatcatgtccactaagtg

SEQ ID NO: 107605 - DNA, 192 bp, Zea Mays
gatattgcccatgttgcaatgcagggtgcctttgctccccatgaaatgcttcctggaaccgatggtgattccgacaaccaaaaagtgccaccttcaagatgtgaaaccttctccttttcatagaatattgtgcagtattcatcagtgttgtcctgtgagccttttcttgagattccaaactgttcataacct

SEQ ID NO: 107606 - DNA, 1586 bp, Zea Mays
gtttcattctctcaacaatatgcattttttttgtgtgtaatgccatgttgctgtaggctatttcagtactgtaccaaccaccaagcactgacctattacaatagctgacattctttcattgccctaataggtgaaaaactttgttttatttggtgatattcacaaaagcatatattttcttagttggaaggaacaaggttctcaattgagtctgctggcaaaagattttggttcacttgattgttttgcaactgagttcttaattgatggaagcaccttgagccttgtagtttcagattctgacaagaacgtgcagattttctattatgcccccaaaatggtggagagctggaaggggcaaaagctcctttccagagcagaatttcatgttggagcccatgtgtcgaagtttctgagattacagatgttgcctacacaaggattagcatctgagaagacaaatcgttttgctcttgtatttggaacgttggatggtggaatcggatgcattgcacctgttgatgaattgacatttcgacggctccagagcttgcaaaggaagctcgtagatgccataccccatgtctgtggattgaatccaagatcgttcaggcatttcaagtcaaatggcaaggcacatcgtcctggaccagataacatcattgactttgagcttctttctcactatgagatgatgtctttagaagagcagctcgagattgcgcagcagattggaactacccgctctcagattctttctaactttagtgacttttcactgggcactagtttcttgtaagtggtaacctgtggctaagtaacaccatgcttctgatgaaagtggtgcttgccattcattagccacgtcaagaattaggcccaattccatcaacatggtcacttccaccagttttattgtaaagatggctgctgtaatttagatattaatggtgtaactggaagttgggcgcttggcaactgattgcaaccatatttgtttcgttggactgaagtagtattggaaactgcactgaaaatgaactatctgaagagtttctcgacaacgtctcagcataataaggggatgtttgaatgcactagaactaatagttagttggctaaaagttggtagtagaattagttagctaataaataactatctaactattaactaatttatcaaaaatagctaatagttgaactattagttaagttgtttggatgtgtcaactaattttatacattaactaaaagctatagtgcattcaaacactccctaagtcatgtttggcttagcttttagctaaacaacgaagaccctgtttggaagcaatattatttttaagttaggagaggctaccttggtttttaagaaactgagaatcaaatttttataaactgagtaataaaacttatgtttagaaccatctcaatttctataaactagtgtgttaaaaattggatggtttctataaactgagtcataaagtttatataataaagtttatatgaaaagcatggttttttgagtttggaaaactaatagtatcatcgaaaatctaccattagcttctcaaaataaaaaa

SEQ ID NO: 107607 - DNA, 1449 bp, Zea Mays
atgactgtgctgctgctggcctcgcagagcaccaacgcagacccatggtctggagagtgtggaaagtgtagttgcgctgcttgctcccctggtgctgctgatccttcaacctgtactatttctataaatgctcctgccatattcgcaagctcaagtgagcggatatcagcatgtacactatactgtgacagaggacctgagccatggcttagaaagacccatactgatgcatggttatccactgatgttggagaggctattgatgataatgacaattcttctcacgacctgtctgatatatattgcataatttgttatgaaagcggtaaactggaaatttttgaagtacccagttttaaacgtgtgttctctgtggataattttgtttctggaccagctatcttgtttgatgtgttttctcgtaattctactaaggattctggaataggggatcgagatgcttctaaagtttctgtgaagaaagaggaagcagcaaacattaagatagttgagcttgcaatgcatagatggtctgggcagttcagccggccattcctctttggattattgaatgatgggacattgttgtgttatcacgcatattattttgaaggctcagaaagcaatgtgcaatgtgctcctttctcacctcatggtggttcaccggatattggcaatgccactgattcaagactcagaaatttgagattttgtcgagtttcaatagatatctcatcacgagatgacatatcatgtcttgtacgaccaagaataacaattttcaacaatgttggaggttacgagggattatttcttggtggcccaaggccaacctgggtttttgtttgtcgacagcgatttcgggtgcatccacagttatgcgacggtccaattgtagcctttactgttctccacaatgtcaattgttgccgtggccttatttatgtgacatctcagggttttctgaagatatgtcagttgccatctgcatataactatgacaactactggcctgttcaaaaggtccccttgcatggcactccacatcaggtcacatattatggagagcagtcactttatccgcttattgtgtcagttcctcaggttcgccccttaaatcaagttctttcttctatggctgatcaagaattgggtctgcacatggagaacgatgttacaagtggtggtgacctccaagaggtctatactgttgatgaatttgaagttcgtattatggagttgggaaaatccaatggacgttgggagacaaggtccaccattccgatgcaatcatttgaaaacgctttaacagtgcgcatcgttaccttgcaaaacacatctacgaaggaaaatgaaaccctgatggccattggaactgcttatgttcaaggggaggatgttgctgctagaggacgggtgcttctgttctctttcagtaaaagtgaaaat

SEQ ID NO: 107608 - DNA, 122 bp, Zea Mays
gtgtatgtgggtttgtgtagagttgtatgaggtttcttttacctcacctattcttattaatataatgatacacaactctcctacgttttcgaaaaaaatgctccctgaacgctagtttaaac

SEQ ID NO: 107609 - DNA, 294 bp, Zea Mays
atgaaatctgtcgggttgcagcaccttgcttctaaccttgagaactcttcctttgaggattggtgggaaggagttgacgtagtttctgttgattcagcatataatgggctgcacaagggcttgaattctttgatcatacttggagcttgggccatctggaatcaccgcaaccgttgtgtatttaatggtgtgcaacctagttccagcatggtcatcaattgggtcaaggaggagtctcacctctggtgtagggttggaaccagtgatttatccagcatccttatgctccagtga

SEQ ID NO: 107610 - DNA, 492 bp, Zea Mays
tttgctatctactagtattttacttatgtttgttcatgacttgtctaggtggaactaccaagttgcacaggtatttggacagtttactacaagagttctcgtggaaatacaactgacaataatgaatatcatgcttatttgataataagcctagaaagccgcacaatggtgcttcagacaggtgatgatcttggagaggtcactgaaacagttgactataatgttcaagggagcacaattgctgctggtaacttgtttgggaggtgtcgcgtcatacaggtatatgccaagggtgctcgtgtgcttgatggttccttcatgacacaagagctaaacttttctatgcatacttccgaatcgtcattgaattctgagcctcttgcagctgcatctgcttcaattgcagatccatatgttctcttgaaaatgagtgatggatccattcgacttctcataggaggtatggttcatctatatccagtttgcctctga

SEQ ID NO: 107611 - DNA, 669 bp, Zea Mays
atggctgtggatatcccatagtgggatttggatgctattgataaattagaaggggttttctatggagaggccacaaagtagaggtggtcattgtcttgttgcttagggaaaagtctgccgtcccctggagtttggtgggcttggtatttctagttttccagaattatgttgggcacttcgaatgagatagctttggctacaaaagactgatcattctcgcccctggtttggccttcacatacaagttcctaaaaaggctagagtttttcttttctgaagtggtgatcactgaagtaggggatggaacaaataccaaattttggaaaggataaaatggctgcatggaaaaagaattgcagatctgtttcccaaggttgttttgcaattgttagcaccaaatggatttctgatatcaaaggagctttgtcagtgggtgtttttacagattaccttcagctttgggatctgatttctggttttgagctgcagcctgaggttgaggataagcatattttcagtattgctccaaatggtgcatactcagccaaatctacatatgaaggtttgttcctgggatctgtgacatttggtcattataaaagaatttggaagtcttgagcctttccaaaatgtcgttttttcatatggtttgttgcccaaaagtggtgt

SEQ ID NO: 107612 - DNA, 81 bp, Zea Mays
gtgtgttgttctgggcatggaaaaaatggaacgctctcggcccttcaacaatctatccgtccagatttaattaccgaggtg

SEQ ID NO: 107613 - DNA, 1722 bp, Zea Mays
atgagctacgcggcgtacaagatgatgcatttgcccaccggaatcgaccattgcgctgccggcttcatcacccactcccccgccgacgctgccgccttctccacgcccgcgcccgcgcccaccgccgccgctggacccgacggcgatattgactccactgcggctagggcaccccggcgagtgggtcctacccccaacctggttgtgtcggcggctaacgtgctcgaggtgtatgccgtgagggccgaggtcgcgactggggccgaggatgcgggtaattcttcgtctaccggcaccatcctggatggtatctccggggctcgactggaacttgtgtgccattacaggtgcaaacaaatggctcttgcctctttgcattcacttttagctgtaaatttcaggcttcacggtaacattgaatcgatggctgtgttgtccgatggcacagagaataggcgagactccattgcagttacgtttaacgatgcaaaaataacatgtctggagtttgatgacagcatcaatggcctgcggacaagctcaatgcattgttttgaaggccctgaatggttccatctgaaaaggggcagggaatcatttgcctggggtcctatcataaaaggggatcctcaaggcagatgtggtgctgtacttgtttatggattacagataataattttgaaagcagctcaggttgggcagagcttagtaggagaggatgaacctacacgcgtgttgagttccactgctgttcggattgaatcttcgtatgtgattgatttacgtgatctagaaatgaatcacatcaaagactttacatttgtgcatggttatattgagcctgtgttggtcatacttcatgagcgagagcctacatgggctgggcgtatctcatcgaagagccaaacatgcatgctatctgcgtttagtataagcatgggtttaaagcaacatccgatgatatggtctgctgctaaacttccacatgatgcatatcaacttcttgcagtgccccctcctataagtggcattcttgtgatctgtgcaaattcaatccattatcatagtcagtccacttcttgttcacttgccttgaacagtttctcatcacagcctgacggaagcccagagattcttaaaacaagttttcatgttgagcttgatgtagctaaagcaacatggttatcccatgacattgtgatgttttcatcaaagaatggagaaatactattactaacagtggtttatgatgggcgagctgtgcaaagattagatcttatgaaatccaaagcatctgttcttagttcgggtgctacaactcttggaagttcgttcatatttcttggcagtcgtcttgcagatagccttcttgtgcaattttcatgtggcatgccaacatcggttctgcctgatctaacagatgagcctgctgatattgaaagtgatctgcctttctcaaagcgcctaaagaggattccctctgatgttctacaagatgttactagtgttgaggaactttcttttcataataaggcagtgccaaatattgtagattcagcagagaagatctcatttgttgtgagagatgctctgatcaatgttggtcctctgaaagattttgcatatggtttaagaactaattctgatcccaacgcagcaggcattgcgaagcaaagcaattatgagctgtttctgaaatcaagggaagctattgaaaaataa

SEQ ID NO: 107614 - DNA, 525 bp, Zea Mays
atggcactgcctctctcccatggcgcctccacctccctgtgtgctctctgctccttgctccacggccagcagaggccagcggcacccttccttccctctgctatccaaggcgcggacaccccttctcccatggccgagcagcagctctgcacgcccctcccatggcgtgcaggccctcttcttccatgggcgtgggcctccacctccctacttagacgctggccgagctcctgcccatggcgtcccttccctccagcgcctccccctactccacggccagcagtagcgaggggcctcaccaaccttgccatggcgctgctcgccgaggatcccctgcagggcgccatcatggcctcgccagactcctgctcgtcggcgagctcatgttgctcatggcgcctttccctgcctgctcgttgtccccatgaccagcagccctcgcccactctgccctcccccaaaacagcaagcccacagcagccccggattccctccgtgtcgcttgcatcgacccgatctgcgtag

SEQ ID NO: 107615 - DNA, 2583 bp, Zea Mays
caaaaccccacaccacaccgtctggtcgtccatggagaaaactcgttgagcagattccttgttcctgcagtaaccctgtccaacccccgcagcggcggcaaccacagaaacactgcctgtaaattccattcctccgcgttcggcctccctcatcgcgcgaccgttccctctgctcgaatcggcaagcccgcatttcgagccccggaggtggccgcgaaccctaaccctacagcgaggcgtcgccggagttgtgggggctccgttggccatgtcgatggactcggacagctcgtcgcacagcggcgccgactacaggagtttccgccagatcacccgagaccgtttgttagttgaaatgctgagatcgactcgaaagagctcaaaatcatcatggaaggttctaatcatggacaaacttactgtcaagataatgtcattttcatgcaagatggcagatatcacagaagaaggggtttcattggttgaagacctatacaaacggaggcagccattgccttcaatggatgcaatttattttatgcagcctactaaagaaaatgttgacatattcatgtcggacatgtcaggaaaaaattcattgtacaagaaagcttatgtatttttcagttctcctgtacagagggagttggtagctcatataaaaaaggattcgactgtgctaacacgcatcagtgcacttagtgagatgaacttagaatactttgctattgacagtcagggcttcataactgaccatgacaaggccttggaggagttgtttagtgaagatgcagaaggctcacacaagtacaatgcatgccttaacacaatggctacaagaattgctacagtgtttgcatcattgagggaatttcctcgtgtgcactatcgtgtagccaggacaatcgatgcatctactctgacgacactacgagatttggtcccaacaaagcttgctgcttccctgtggaattcccttgtcagatttaagtcaacgatacctgaatttccacaaacagaaacatgtgaactacttattgttgaccggtcaatagatcagattgcaccaattattcatgagtggacgtatgatgctatgtgccatgatctattgtgtatggatggcaacaagtacgtgcaagaggttccaagtaagaatggttcagcaaatgagaaaaaggaggttttgttggaggatcatgatccagtatggcttgagctgcggcatgcacatatagctcatgttaatgaaacgctacatgaaaagatgaccagttttgtatcaaagaacaaagcagctcaactacagcaggcaagatctggtggagagttatctaccaagcagttgcagaaaatggttcaagctcttccacaatacagtgatcaaattgacaagctcacccttcatgttgagattgcaggaaaactcaataacataatcaaagaacaccaccttaaagatgttggacagctagagcaagatcttgtgtttggtgatgctgggacaaaagaactaatcagtttcttacgaacccgcatggatgtaagtcgtgaacataagctgcgtttgctgatgatttatgcttccataaacccagagaaatttttcgaaagtgagaaaggtgcaaagctgatgcagcttgcaggattatctgctgatgatatgattgtagtaaataatatgcgctgcttacgtggagctgattctaagaagtcttcagttggggcttttactttgaaatttgatcttcagaagaaaaagcctggtatcaggaaggagcggactggagaagagtcaacatggatgctatctcgattttatcccatcctggaggacttgattgagaaacttagtaagggtgagctaccaaaagatgagtaccactgcatgaatgatcctagtcctagtttccgtggaattccagggagcacatctgctcgaacgagcccagctcatcagccagcccaatccatgagatctagacgaataggtggcacatgggctagacctcggaactccgatgatggttattcgagtgactctgtactgaagcatgcatcaagtgacttcagaaagttgggccagcgcctatttatctttgtaattggaggtgctactcggtctgagttgcgtgttgcccataagctgtcaggcaaactgaagagagaaattatccttggctcctctagtcttgatgacccaccgcagttcatcactaaactgaagatgttatcaaccgaggaactgtcgcttgatgatttgcaaatataacaattccaaggacgattgtccgtggcattctacactgtaattatttatttatttgcatctctacaacgggtttagttttactcccttaaccgaaccacaggtgctcttacacaggctagaggggcatgatattcattcggtagccaatgtcagttacaatcgagtgtacacacatggcagcgaccagagactgtaatataggtggcgtctttattagattggtggatcagtgaagttcaatgttccgaggacttctatttgtcctcagattgctgctattttgtggggaaagtgtatattttttcctcaaa

SEQ ID NO: 107616 - DNA, 118 bp, Zea Mays
ttttttaaagatttttttgttatcagtttcttactcaatcgttcagcattttctgttaagggtgtcttcatatgtaccgttctgggcaaccgacatacatttctcgtattgttaaatc

SEQ ID NO: 107617 - DNA, 276 bp, Zea Mays
ttgctagaccagcggcagagcatgaacatatggcgctttgtacatacaatgaatacgtatgtacacatttcacttctatatattaggatgattatgcagtggaaaaacttgatattgaggagatatgacttgactaaacatctaaagaagctccagtgtagaacattgatttttgtcagcgagaattctcaattaaactctgagaccgttcacttgacatcgaagctcgacatgagatattgtgctctagttgagccttacacagacctgttttga

SEQ ID NO: 107618 - DNA, 922 bp, Zea Mays
atgccttcttcctgcctccgcggaccgtcgtcacaccatgaatgcgaagctcttcgccatcgaggcctccgtcttcaagaaggaaaaggtctccctggccatgaggagaatggaggagacggaggcatcaagcagcagtacgacttccggccaattgagcccatcaggtttagtggcgctgttagagacgacgccgtcgtcgacatcccactcaagaacatggggagcaaggcgggggagctctcgttgtgggaatcagatttgaagcggcgagaggcggatatcaagaggaggaaagaggctctgaagaatggtgcagatccacatttgtttttgcataattgctgccatagctccaccaattgtatttcatgagaaaccattaatgtaagtttgccactccttttatctaaagtaatcaaagtcgccagtgatgttggctgctggaaaaggagaaatcaatgaattatagattggtacaatagaacttcagagaggaaactaggttgattgttcaatattttttaagaacacttagtatcctggataatatgtgaaacaaacaatatgatttaccccttaacttgtaatagcctgttcaatgtaaaaataagtatttaaccagccgcatagaagcatgtttgctttgtgaccctagaaaccagctaggcacaagcagcacctcggccccctcctcggcgagacggctactgtctcgaggcgtacaatgaccgctcacctcgcgggcgtgcctagctcgtcatcggtctccaatgccacgttcgtgctactactccaatcgttgctgacccgtgtgatctccactgacttccgcaaggagtgcgggcaccttcggtcccatccgctgttaaggagagcacacgcttatggtgttccacagagtgacattttattcattcat

SEQ ID NO: 107619 - DNA, 2259 bp, Zea Mays
atgtcggccgaggagggcgcgtcggcggcggcgtccgcgccgccggaggcggaagcgcccgcggcgggggcaatgggggccgaggcggcggcagccaggaagcgctacgagtcgctggtgcaggtgcgcgccaaggccatcaagggcaagggcgcctggtactgggcgcacctggagcccgtgctcgtgccgccgcccgcctccgggcagcagcccaagttagcgcgcctgcgctgcacgctctgcgccgccacgttctccgcctccaacccgtcgcgcaccgcctccgagcacctcaagcgcggcgcctgccccaacttcgcgtcgccgctggccgcctccgcgcctgtctccacggcgccgccgctagccatcgccgcggcgtcctccgtcgtgcccatctcctccttcccgccgtcgtcgcagcggcgccactccaccggcggcggcggtcgcaagcgccacgtgctggcagcggcgtacgcagccgtcgacgcggcctcctcgcaccacatggtcctctcgggcggccgcggtgacctgactgcgctagcgcgcctcgaggacagcgtcaagcggctcaagtcgcccgtcacgtcaccggggtccatgctgccgcggcaccaggccgaggcggcgctcgcgctgctcgcggactggttcctcgagtcgtccgggaccgtctccctggccgcggcggagcacccgaagctcaaggctttcctgcgccaagtcggccttccggagctgtcgcgcgccgacctaacccgaggacgcctcgacgcgcgcttcgccgaggcccgcgccgacgccgccgcgcgcgtccgggacgcacgattcttccagctcgccgcggacgggtggcgcgaccaggtagtcacgctcgccgtcaacctccccaacggcacgtccgtcttccaccacgccgttcccatgccggcgccgccgtcgtcaggctacgccgaggaggtgttgctggacgccgtgtcgtccgtcgcagcatccgccgacgtccgtcattgcgccggcatcgtcgctgaccgcttcggctccaaggctctgcgcgatctcgagagcaagcacccgtggatggtgaacctgtcgtgccaagcccattgcttggcacgcctagcgaaagacctggtgcgggagctccctgtggtccactccgccgccaccaattgtgccaagatggccgcctacttcaacgccactcgagccgtgcgcgcgctgctgcagcgacaccaggtccaggagcttggccacgcggggctcctccgcgtcgccgctccgccgtcgactggcgacaacgaaaccagcgcagtattcgcgatgctcgatgacgtgctgacctgtgcaaggccgctccagctctccgtgctcgaggagcccttcaagctgctctgcattgacgactctaccgctcgggagatcgtggacatggtgcacagcgcggcgttctgggcggaggtggaggcggcgcactcgctggtgaagatgatcaccgacatggtgaaggagatggagaccgaacggcctctcgtcgggcaatgcctcccgctctgggaggacctgcgtggcaaggtcaggggctggtgccgcaagttcaacgtggacgaagccatcgccatgagcgtgctggagaggaggttcaggaggagctaccacccggcgtggtcggcggcattcatcctggacccgctgtatcttatcaaggacgtcagcgggcggtacctcccgccattcaagtacctgacgccggagcatgagaaggacgtggacaggctgatcacgaggctggtgtcgccggaggaggcgcacctggcgatgatggagcttatgaagtggcggtcggagggcctggacccgctgtacgcgcaggcggtgcaggtccggcagcccgacccgacgacggggaagatgaagatcgccaacaagcagagcagccggctcgtctgggagacgtgcctcagcgagttcaagtcgctaggcaaggtggccgtgcggctcatcttcctccacgcgacagcaagggggttcaggtgcacgccgacgatggcgcggtggctgaccgcgcccggtacctcatcgcggggcatcgcccgcgcgcaacggctggtgttcgtggtggccaactcgaagctggagcggaaggacttgcggaacgacgacgacagggacgcggagctgctcatggagggagacgacgacatgctgacggatccgaccaccgccattgtggttccctcgtcggtgtaa

SEQ ID NO: 107620 - DNA, 101 bp, Zea Mays
aagtatggttgtgcacatgctcagttaaatagaaaccaagcatataggagaattatttccataaaatgtgccaccccaaatccataagtatgggttgcccc

SEQ ID NO: 107621 - DNA, 564 bp, Zea Mays
ttattgtagattcagagaatcatgctgtctgaaaagcagatttgggaagaaggactttacaaacagtttatccagtcttcaataaaagcaatggcatctggagctggattaccgataagcttggtatgagaaaagaagctactccaactattcaagattttcatgcagactccatgccacttccatggcatttgatacaaatttcagaggacatcttattaggtaggcatcttatagtcgtagtgaacgggcataagccaagctaggaacaaacaaatagttttagatattagttgaaaatagaatggtatgtaaatttctgaattgtccatcattatcgagtccccttgaattattcaaggaaatgcatgtcgaagaagcaggttccggtgcttttattgtttccctagattgataggttactcatactaggcccaaaataatattcgattttattgtgttgatctcaggactagcacttcttaatacccttgaatttctacatatttttatagaacaaaaaatgtatcaggatgaccctattatttaattgactactttgag

SEQ ID NO: 107622 - DNA, 475 bp, Zea Mays
ctccccctgtcttgccccgaaacacagccgtcaacgccgccccagaccacagcagcgcggcgcaaccccaatcagagccggagccagcgaagcgagcgcctcgcttccacaagtcgctagctgcatctggagcgccgacggcccgaccaacgcccgagccagccgtgggcgttcggccgccgattcctctgggctctggtggatggtgatccctctcctcatcgtattgtttctgttggtcctgtgcgatgtaattggtatgatgcaaagtagtgcttatctgcatatggatacatatgatggcatttttgggttgcacataataggttgactacatttttaccttccattttgatatgttgcttcctttacttctttcttttatggccttggagatcttttcaactcaacacattggaaatatgcatcttcacatgtatacatcgaattacttaaaattattgtcttgcaatcc

SEQ ID NO: 107623 - DNA, 1652 bp, Zea Mays
atgcacagggatgcgcgcgtgtgggaggaaccggaaaggttctccccggagaggttcgagggcgggaatagcgacggcaaatggatgcttccgttcggcatgggccggcggcggtgccccggcgaaggccttgccgtgaagatggtcggtctcgcgctgggtacgcttctgcagtgcttcgagtggagaaggaccggagatgaggaggtcgacatgacggaagcgtccgggctgaccatgcccaagtctgtgccgttggaggcgttctattggccgctgccgcgagctgacctccacgaggaccgaaacaattatcgccagattggccgcttcacctcgacagccacgccaccaccactgcgggtctgcggcagtcggcacatggagctcctgcgggacagcatctccatggtgtccctggctgtcctggtgaccgcggtgtgcgcgcgcgccgcgtcctcgtggctccgccccggtctccctcgcctggcgtcgttgctcccgatggtcgcctttcttgccgcggctcccctggctttctcctctgcaatcatccggggacttgcaggcttcttcctcgggtggctcggcgtgttcaaggtcgtcctcctggccgtcggccgcggcccgcttgaccccgccctccccgttctcccgttcgtcttcaccacagcgcttcccgttaagctcagatgcagcagcaccggcgctgcagcagcgtgcagggccaaatcggtctccctcgtctcgtgcgcggtcaaggtcgcggtcatagccgccatcctccatgtgtaccagtacacggaccagctgcatctctacactcgcctcgctctgtacagcgtccacatctactgcttcttggacttcctcctcccgtgcatcgcggcggctggcggcgccctcggcatggatatggagccgcagttcgacaagccgtacctggcgtcgtccctacgcgacttctggggccggcggtggaacctcgtggtgtcggacatcctccggccgtctgtctacggccccgtgcgcgcgcgcgccgggaaggcaccggccgtcctggccacgttcctcgtgtccgggctgatgcacgaggtcatgatttactacctcaccctgcgatcacccaccggtgagatgacggccttcttcctgctccatggcgtctgctgtattgccgaggagtcgtgcgcgcggcggtggatgcagtggggttggaggccgccgccgcgacccgtggctacgctgctcgtggtggtgttcgtggccggcaccgcattctggctcttcttcccgcaaatttgcagggaaggaatggaggagttactgctcgaggagtgggcagcggtaggggcgttcttcaacgacgccgcccgaaagctgctccagatgttcacgtgaagacttgaaagtcggcagtcggcaccagcagactcgttccaatcctctagagataattagtagctatggttttagctgtgttcacagagctaacaacaatagcaatagctatttgagaaacatatagtgtgtttggtttgagaaacgaagtggtgtatctctttctcacttttcacttttttatttggtttgtgaattttatttggtttgtgaaatagaataaattgatccatcatcacctcattcctcat

SEQ ID NO: 107624 - DNA, 1660 bp, Zea Mays
caggacggtcaccgacagctaaaactcctggcccctgggttcctctttttcctccagagatttccgtcccgtccacccagctccaagagtccaagatcccaaccatggtggccgcgacggcactctccttctcctttctgtcactagcaacgacactcttccttctcctcctgcgcagcctcatcaacaacaagaagcgccactgtcgcctcccaccgagcccgccgtcgtccctgcccgtcatcggccacctgcaccttttgaagaagccgctccaccgaacgctgtctgctcttgcggcgcagcacggccctgttctcctcttccgattcggctcccgccgcgttgtccacgtcgccgaccctgccgtcgccgcggagtgtttgagcacccacgacgtcaccttcgccaaccgcccgcggcttccctccgcccgctacctctccaacgactacaccacgttgggctcctcaagctacgggcccaactggcgcaacctccgccgcatcgccaccgtcgacgtcttctcctcgcatcgcgtcctctgctccgcggatgtccgcgccagcgaggtccgtaacatggcgcgccagctcttcaaggccgccgccggggccgacgcctccaggcccgcgcgctgcgacgtgaaggcacgcgcgttcgagatcgcgctgaacaccgtggcgagggtaatcgccgggaagcggtactacggcgacggctcggtggcgtcggaggaggccgagcggttccgtgccatggtccgcgagtacttagcgatgcacggggcatcgaacctgcaggacttcgtgcccgtacttgcactggtggacatcggcggcgtgaacaagcgcgcaataaggctgtccaaggcgcgcaacgagtgggcgcagcggcttatcgacgagcaccgggcggccgccgcggccgggagggagcaggggaagacgatggtcggcgatttgctggagaagcaggcatctgaccccgagacgtacagcgacaaggtcatcagagcgctctgcttgtccatcttgcaagctggaactgacacctcgtcgtccaccatcgagtggggcatggcgctgctactgaatcatcccgccgccatggccaaggccaaagccgagatcgacgaggtcatcggcacagcgcgcatcctggaggaagccgacctgccaaaccttccctacctcggctgcatcatcaaggaaaccctgcgcctccaccccgtcggaccgctcctagcgccgcacgaatcggcctccgactgctcggtcggcggctacgacatccccgcagggacgatgctcctcgtcaatgtgcacgccatgcacagggatgcgcgcgtgtgggaggaaccggaaaggttctccccggagaggttcgagggcgggaatagcgacggcaaatggatgcttccgttcggcatgggccggcggcggtgccccggcgaaggccttgccgtgaagatggtcggtctcgcgctgggtacgcttctgcagtgcttcgagtggagaaggaccggagatgaggaggtcgacatgacggaagcgtccgggctgaccatgcccaagtctgtgccgttggaggcgttctattggccgcgtacggagatgatgtcaccgctaacggcacttcacggatgttgagattttga

SEQ ID NO: 107625 - DNA, 617 bp, Zea Mays
aactgcaacatgtaagagatttagttttaagtggagaagggaggagattgaagattgaacaatgtacttggattttgaaatttaagtcatatgggattaggaagcagctttagctatttggttaactgatcaagcagcaacctgggttagaaaggataccaaagttagctcagaggagtttagctactcatatttcacacatgttataagggtttatctattaagatgtgtaatccaaaagccgaaactggtatagtactgatggttaacaaaaagcggaaactgatatagcactgatggttaactaatagtttatgaaaacaattcatttcaagcaatgatatatttagttttacattccaaatttatggaaaaatgtggaacattgcacaaaagacacattgcacaaaagatagaagaaaatcaatttcttatttagacaggtttaaagcattaaccactaccacaaacaatgcccatcctattagcattatagaaaatggcatgttgtccataatttgaatcatcgcattatagaacataaataaatgtgaccaacccacgagaaatgagatgatttaactaaggaaatatgcacataaatttaagctgagaaa

SEQ ID NO: 107626 - DNA, 1079 bp, Zea Mays
atccgttgaaaaaaatccggcacctccatcaaatcagatctcacgcccctgcagccaaaacaaaatcagcatccggatctccacattccccaccaaaaatcatcctccggacgaaatcagcggcggcggagatgggagcggagtgccggtacgaggtggcgcaggcggcgtacatcaagctggcgctgcacgcactgaagcacccggcgaccgccgtcaacggcctcctcgtcggtcgcctcgtcgagccttcgtcctcaccggccgtcgtctcggtcattgacgccgtgccgctttctcaccacccgcaccatctgccgctgctccccacgctcgagctcgcgctcaccctcgtcgaggaccacttcgcaacccagggcgaaggcctcgccgtcgtcgggtactatcacgccaacccgcgctgcgacgacaccgagctcccgccagtcgccaagcgcgtcggagaccacatcttccgatacttcccccgctccgcggtgttgttggtcgataacaagaagcttgaggaggccgtcaaggggaagttttctgatgcggtgattcagttacacaccagggattcatcaaaaagttggcgtcaggctggatcagatggaagcagtcagctgattctaaaagaaccttctaccaatgttgtcctagctgatcatgttacaacaaagaaatgggagaaaattgttgatttcgatgaccaccttgatgatattagcaaggattggtcgaacccaggcctccttgactgaattttcatgattgatctcgctatactgttttggaacttcgctagaaatgaggtggtgaagctcgtcctgctgtgctatggatttctctcagtcgcaacgagttgtaagcactaagcacggatttcattttaatgtaaatgagtgattttgtaacaattacagttcaaaatgctaaaattatgcagagaccatgagattgtttcaaggtcatgacaattattacgagttgtcacaaacaatttttgttcgtacatgactcttattttaaagaatgaaagttcacataaatttaagtgaaatgttgtagacgaaggg

SEQ ID NO: 107627 - DNA, 1371 bp, Zea Mays
atggtcgaggagacggttgtgggggatggcgaggcgagcacgagcgccgcttcggcccacgccagcatcgcggcgcgggcgggtgacggcgggacgcggagggcttggggcagcgaagagcgaaggcctggagccggcgacggcgagcagagcaggtatgctcctcttgatagttgtcttttcacaactgccattaccacttcagatgaaagatataattggcctgttccatggcctgaaagacttgatgttagctatgcaagtgtacctgatgattctgcttctaacaaagagaagtttgaagctgatacaaagtattggaaacagctcatttcagaactctgccgagcatatgttgataaagcagggtgctgcctttcaatcatgttggcgtgggccgaagctatatctggagcaccaggagtccagcctctgctatgccctcaaggtggccctcttcttcgaaaggaagttattgggggagataggaagcaccaaagcagattggatgagaacaagggctctattattcttaatttcaccaatttgtgtgcaatgtggaattatgctaatgtgcaatggccccattctgtagggtgcttgtcatgcctacaaagatctgccttagttcagtgcacaatacaaagggggtccttcattcaagcattgcaacttcataacaaagggcctgacagttacctgttcgaaaaggggaggagaagcatacttacccaaccactccaatattccaaacatgattggagactccatgatatgtgtcccataagtcttgataaacctgatattcacaaggtccaagtcaacaagagtgactatgacaatgtgaaggttgtcctctacctcaaaaaagtggaacaagaggagctggagaagctcgcacgcaaggcgcagttgctgccctgggtggcctgggttggtatcacgatgttgctggagaaaggcgctgacgttaacgcgcgcaactactgcggccaggtcttgagttctaagcagcctctccgcatttgtggggaaggcctatctcggtttatcccttctacagaccccacttatgttggagcctctgacactgggtttgccctctttttggttactagggcagattacttgagtggtcgaacatcactgcattttgctacacatgatggatttgttcggtgtattaggcttttagttgcagactttgtcccgagtgtggccttggaggatattgcttcttctgtggtggatggtggtgattgccagacaaacagtgggagcagtcctaattcatcgtcggggcagaagtttaatgaatcgtatgtgttgtcaatgaatctcattttattatttgaaacaatcacgatttaa

SEQ ID NO: 107628 - DNA, 1643 bp, Zea Mays
gaatccaaagatccaaccactatggttggtaccgagcaccccgtgcacgttgtcctgttcccgttcatggcgcagggccacgtcgcgccgttccgcttcctcgccgagctcgtccgccgagcccgaccagacgccagcatcaccatagtcgcaactccctgggtgtccgagtcactccgggccactctcgcggcgagcaacgtcgacgtccacgccctgccgttcaacccagccgaccatggtctcccggccgacgcccacaactcggcaagcatcggccccgatcagctcggcagcctcttcgccgcctctgagtccctcggcccagcgttctgtcgcttcgtcgccggcctcagggccaccgaccctgccgctcatgtacatatcatggcggacatgttcttgggctggacggtgggcgtcgcccgcgacgacgccggcgtgtcccactccatcgtcttcacctgcggcagctacggggcggcggtttacttctcgctatggaacagcgtcccgctcggcgcattcagcgcggggtcaaccgacgacgccttcgtgttgccgcagttcccgcagattagcgtccggcgctcgcagctcagcgaccaacttgccgcggccgacggcaaggacaccaggtctactttcatccgcaagcagatcgccttcttctcccgtgccgacgcgctgattgtcaacaccgcagagaacctggaacccaaggggctgacgatgctccagcaatggttcaacgtaccagcgtacccagttgggccactcctccgtaccacggtggcagcgtcgtcgtcagaaacgaaggatactagcagcacaatcttcgcctggctcgacaagcagctgccgggttccgttctgtacgtgtcgttcgggtcacagttcaacatcaacgccacacagatggtggagctagcgattgggctcgagcagagcgcccacaagttcgtgtgggtgatccggccgccgtctgggttcgacgacaaccgcgagtgctggtccgagtggctgccggacgggttcagtgagagactagtggtcacagggcagggccttgtggtaccgtgctgggcgccgcaagtggaaatccttgcgcatgcagctaatggagccttcctgacgcactgcggatggaactcggtgcaggagagtctcgcccatggcgtgccactgatagggtggccgctctcggcggagcagttctacaatgccaagatgctggtggaggagatgggggtgtgcgtggaagtggctcgcgggagcgacggcgtgagaagggagaggatcaccgaggtggtggcaatggtgcttggcgataccttggagcttgcagcgctgagacggaatgcggcggccgaggcggagaagttgattcgcgcagcaggggagaacgaccgcaacgggtcgtcggtgaaagtgatgcagatgttcttcaacgaaatgtctcatctcttctaacgattattacggtcgttgagcaaaggctgcaaattgtagtttctttttttttaatttatatttgacgcttattacgatcgttgagtgatgacagcaaactgtagtttttgtaatttctgtttgtgtttctttagaacaacaaaagcaatggtgacaaatatataaagcac

SEQ ID NO: 107629 - DNA, 2295 bp, Zea Mays
accgccgacagaataatcactcagatccgagcgacatcgccgcggccgctgcctgctccccaactcgcaacccttccttcccatctgatggccttggccgcggacaagcgcctcgccgccgcggctccgtacctaccggcggagctcataccggatatcgcgcggcacttgacgacgctccaagacttcttcgccctccgcgccgcctgccgctcctaccgcaccgcgctgccaccctcccgcgccgtcctcgcgtcccagccgccgcaccttctcgtgccccaccacgcctcctccccgtgctcgctggccctcatccaccccttgtgtcgccgcctcctccgcttccgtgcgccctcgccccctttccccagcgctgtcgttgcatccgacggcgcccgcgtcgtcacctttgaccactttgcccgcgagctctccatcatccacctcctttccggcgatcgggttcgcgtccccgacgctcccttcctattctcccgcgcagtccttgccggcgacctcgtcctcctcatcgcacccgggtgggttcagtattgccgcctgggggacggtcgatggcgggaggcgtattgccggctcgggggctgcggcggcagcctcttcggtggcctgtacatgatggtcggcatgctcgctgtcaatggcgtcctatatgcgctcctcaacacctgccaactcgcagtggcagagctgatggacaataaggtcgaattaaagctgcttggaggggaagtgggtgaccatgtcagagatgcttggatggaaagcaaggatttcatgcttggggcgtgtgctggtgtgcccatactcatcttcaaggtatcagtcaagcctgagtacaaggttttccgctgggaacctgcagagcaaaggtgggtgagagctatgaccctgggaaggcggactcttttcatgtctggcaatggctttgatgcttgggttggtccagattcacctggaattcgaggggattgcatatatgaggctctgccacgggcagcaggttggagtgagtactcattagttgatgacacttatgaactcgtcactattgactaccaaggtgcaccagatctagatgccttaaggaagcaggtttgggtgcttccgagcttgtgctaatattggaatatgaagattaaattctgatgttgaatccatcgacatcacctaaagattatatggcagatgaatgagctacatttagtggtgtgggatctttctgtttattcttgataattgcaggatgcttgctacttgccaattcagggatgagctactgcaagattctggcttgatttacagattttgttgctttgaattggtcttttccacatctcttttcttttggagaaaaaaatgaaagctttaggcgctccagtttctgttgcaaaccaaatggttcattgacacatgttattgaagctttggctcagcttacaaatctgagtatgctcgaggccttcactttgttaagattacaaggatagttgggtcctatatatgaaataaaattctttgctaaacagtcctacaaaatattgttgggatctttacatggctgatccagactttgcttggtcatttaatcctgttgccatggcaagggcaagttcttgtttttgacttcttttgaaagatagattgaacatgctcaagttgcttatcactaaaaacgtctacctggacaaatttgtaacacctgcagtcctgcactctatctcaagaaggttcctgtgttcatctctccttcccatgctctttcagcaggaattgttggtgcttcaggacctgtgacctatatctatactctctctttgacatgttggctgagggccagggccttggactgtgcacatcatcaggaaggtttgatcacatattggtcaatctgtttaaagcaagaaattgtttccaccaatgtatactggccttccaacattggaagaagggtttgaaggaaactcaatattatagattggtcaatctgttcagagcatgttatcatttccaccaatgcatcctggccttctaacattggaagaagggtttaaaggaaaacttcaatattggctagagtcatgctctctgtaaacagtgtaatatccctctttggacctaagtccacccatttacatgtactttttttccttattaacgcaaaaacataatatgcgactcgtgcaaaacactgttttatattgtagactgcactattcgtagagtgaagtttgaaatagagatgatataagagataggatgggtaaactgctg

SEQ ID NO: 107630 - DNA, 1695 bp, Zea Mays
accgccgacagaataatcactcagatccgagcgacatcgccgcggccgctgcctgctccccaactcgcaacccttccttcccatctgatggccttggccgcggacaagcgcctcgccgccgcggctccgtacctaccggcggagctcataccggatatcgcgcggcacttgacgacgctccaagacttcttcgccctccgcgccgcctgccgctcctaccgcaccgcgctgccaccctcccgcgccgtcctcgcgtcccagccgccgcaccttctcgtgccccaccacgcctcctccccgtgctcgctggccctcatccaccccttgtgtcgccgcctcctccgcttccgtgcgccctcgccccctttccccagcgctgtcgttgcatccgacggcgcccgcgtcgtcacctttgaccactttgcccgcgagctctccatcatccacctcctttccggcgatcgggttcgcgtccccgacgctcccttcctattctcccgcgcagtccttgccggcgacctcgtcctcctcatcgcacccgggtgggttcagtattgccgcctgggggacggtcgatggcgggaggcgtattgccggctcgggggctgcggcggcagcctcttcggtggcctgtacatgatggtcggcatgctcgctgtcaatggcgtcctatatgcgctcctcaacacctgccaactcgcagtggcagagctgatggacaataaggtcgaattaaagctgcttggaggggaagtgggtgaccatgtcagagatgcttggatggaaagcaaggatttcatgcttggggcgtgtgctggtgtgcccatactcatcttcaaggtatcagtcaagcctgagtacaaggttttccgctgggaacctgcagagcaaaggtgggtgagagctatgaccctgggaaggcggactcttttcatgtctggcaatggctttgatgcttgggttggtccagattcacctggaattcgaggggattgcatatatgaggctctgccacgggcagcaggttggagtgagtactcattagttgatgacacttatgaactcgtcactattgactaccaaggtgcaccagatctagatgccttaaggaagcaggtttgggtgcttccgagcttgtgctaatattggaatatgaagattaaattctgatgttgaatccatcgacatcacctaaagcaggaattgttggtgcttcaggacctgtgacctatatctatactctctctttgacatgttggctgagggccagggccttggactgtgcacatcatcaggaaggtttgatcacatattggtcaatctgtttaaagcaagaaattgtttccaccaatgtatactggccttccaacattggaagaagggtttgaaggaaactcaatattatagattggtcaatctgttcagagcatgttatcatttccaccaatgcatcctggccttctaacattggaagaagggtttaaaggaaaacttcaatattggctagagtcatgctctctgtaaacagtgtaatatccctctttggacctaagtccacccatttacatgtactttttttccttattaacgcaaaaacataatatgcgactcgtgcaaaacactgttttatattgtagactgcactattcgtagagtgaagtttgaaatagagatgatataagagataggatgggt

SEQ ID NO: 107631 - DNA, 1692 bp, Zea Mays
accgccgacagaataatcactcagatccgagcgacatcgccgcggccgctgcctgctccccaactcgcaacccttccttcccatctgatggccttggccgcggacaagcgcctcgccgccgcggctccgtacctaccggcggagctcataccggatatcgcgcggcacttgacgacgctccaagacttcttcgccctccgcgccgcctgccgctcctaccgcaccgcgctgccaccctcccgcgccgtcctcgcgtcccagccgccgcaccttctcgtgccccaccacgcctcctccccgtgctcgctggccctcatccaccccttgtgtcgccgcctcctccgcttccgtgcgccctcgccccctttccccagcgctgtcgttgcatccgacggcgcccgcgtcgtcacctttgaccactttgcccgcgagctctccatcatccacctcctttccggcgatcgggttcgcgtccccgacgctcccttcctattctcccgcgcagtccttgccggcgacctcgtcctcctcatcgcacccgggtgggttcagtattgccgcctgggggacggtcgatggcgggaggcgtattgccggctcgggggctgcggcggcagcctcttcggtggcctgtacatgatggtcggcatgctcgctgtcaatggcgtcctatatgcgctcctcaacacctgccaactcgcagtggcagagctgatggacaataaggtcgaattaaagctgcttggaggggaagtgggtgaccatgtcagagatgcttggatggaaagcaaggatttcatgcttggggcgtgtgctggtgtgcccatactcatcttcaaggtatcagtcaagcctgagtacaaggttttccgctgggaacctgcagagcaaaggtgggtgagagctatgaccctgggaaggcggactcttttcatgtctggcaatggctttgatgcttgggttggtccagattcacctggaattcgaggggattgcatatatgaggctctgccacgggcagcaggttggagtgagtactcattagttgatgacacttatgaactcgtcactattgactaccaaggtgcaccagatctagatgccttaaggaagcaggtttgggtgcttccgagcttgtgctaatattggaatatgaagattaaattctgatgttgaatccatcgacatcacctaaaggaattgttggtgcttcaggacctgtgacctatatctatactctctctttgacatgttggctgagggccagggccttggactgtgcacatcatcaggaaggtttgatcacatattggtcaatctgtttaaagcaagaaattgtttccaccaatgtatactggccttccaacattggaagaagggtttgaaggaaactcaatattatagattggtcaatctgttcagagcatgttatcatttccaccaatgcatcctggccttctaacattggaagaagggtttaaaggaaaacttcaatattggctagagtcatgctctctgtaaacagtgtaatatccctctttggacctaagtccacccatttacatgtactttttttccttattaacgcaaaaacataatatgcgactcgtgcaaaacactgttttatattgtagactgcactattcgtagagtgaagtttgaaatagagatgatataagagataggatgggt

SEQ ID NO: 107632 - DNA, 1605 bp, Zea Mays
accgccgacagaataatcactcagatccgagcgacatcgccgcggccgctgcctgctccccaactcgcaacccttccttcccatctgatggccttggccgcggacaagcgcctcgccgccgcggctccgtacctaccggcggagctcataccggatatcgcgcggcacttgacgacgctccaagacttcttcgccctccgcgccgcctgccgctcctaccgcaccgcgctgccaccctcccgcgccgtcctcgcgtcccagccgccgcaccttctcgtgccccaccacgcctcctccccgtgctcgctggccctcatccaccccttgtgtcgccgcctcctccgcttccgtgcgccctcgccccctttccccagcgctgtcgttgcatccgacggcgcccgcgtcgtcacctttgaccactttgcccgcgagctctccatcatccacctcctttccggcgatcgggttcgcgtccccgacgctcccttcctattctcccgcgcagtccttgccggcgacctcgtcctcctcatcgcacccgggtgggttcagtattgccgcctgggggacggtcgatggcgggaggcgtattgccggctcgggggctgcggcggcagcctcttcggtggcctgtacatgatggtcggcatgctcgctgtcaatggcgtcctatatgcgctcctcaacacctgccaactcgcagtggcagagctgatggacaataaggtcgaattaaagctgcttggaggggaagtgggtgaccatgtcagagatgcttggatggaaagcaaggatttcatgcttggggcgtgtgctggtgtgcccatactcatcttcaaggtatcagtcaagcctgagtacaaggttttccgctgggaacctgcagagcaaaggtgggtgagagctatgaccctgggaaggcggactcttttcatgtctggcaatggctttgatgcttgggttggtccagattcacctggaattcgaggggattgcatatatgaggctctgccacgggcagcaggttggagtgagtactcattagttgatgacacttatgaactcgtcactattgactaccaaggtgcaccagatctagatgccttaaggaagcaggtttgggtgcttccgagcttgtgctaatattggaatatgaagattaaattctgatgttgaatccatcgacatcacctaaagattatatggcagatgaatgagctacatttagtggtgtgggatctttctgtttattcttgataattgcaggatgcttgctacttgccaattcagggatgagctactgcaagattctggcttgatttacagattttgttgctttgaattggtcttttccacatctcttttcttttggagaaaaaaatgaaagctttaggcgctccagtttctgttgcaaaccaaatggttcattgacacatgttattgaagctttggctcagcttacaaatctgagtatgctcgaggccttcactttgttaagattacaaggatagttgggtcctatatatgaaataaaattctttgctaaacagtcctacaaaatattgttgggatctttacatggctgatccagactttgcttggtca

SEQ ID NO: 107633 - DNA, 2229 bp, Zea Mays
ccattttgcccctgggcccacatgtcggggctcagtatccttgtatgtgtcccccccttaagctataaaagggagggcacaccacgttacaagacaggcacaagctcacttagactctcaaactcacaagttcatacaagctctcaagctcaatacagcacacagtggagtagggtattacgctccggtggcccgaaccactctaaaccattgtgtgttcttgtgttcatcccgaatccatctagcagacaaaacgcttaggccccctcctcatctaaggatttagggcaggtgcgttccgccacccgaccggagaatttcctctccgacagtacccgtatccaatggataattatccgcggttatttacccatacccgtaccaattaccatccctactctgtaccatttgttgtcgataatattagtgaacggagcagacttcgtcatggttcaacataacatattgtgaattgttgtcaccatgtggtatttggatcacatgtacaacattctgaattataataagcctgaatacaaaaccacatgcttattatggtagtaaaatcagaaatgctcatgtttgctgactagttctttgaacttcaactccagattttgtagtcatagggttgcagaaaacaccaccctaaccaaattgtaggccatgggatccaaaaatctcttggctcatgatcctctctattctttagattggttcattgaaatcatttgtttctcaaatacataggagagaagtatacctttgtactaagagagggaaaaacggtaccttacaagataaaaacaaacctcctcactctagaccgagccataaggaggctttgatgttacatgattaagaaaaaaaataaaaatacaaaagatcggacctaaccatgccacaacaccttcacctatggtttcgagaccttgcactctcgtgaagcaccaaaggtgatgttcatgttcttctccgaatgattgaagagtaacactcaaatttgtgctggatccttaaaaaatcaatggagtttctatgctttcaatgtagctaagctcataaaacaaccaccatgttgatgccctcccttttctcctttgaaactcgtttgttgatattatgccaccaatctagaaagtttgctcattactattcagcacacatgtctcaaaacccaatgactccacaactctgaaccaaaaatcctgaggaaacacatatgaggttagtaggtgttggatgttgttggataattgatttcaatcccctgaaggtgttgagaatcaaggcaacacaagttaggaatgaggacattcgtcatgagtttaacacttctttagagtgttaacgcgaaggatgaaggtcttcgggtaaaaatgtaaatagaaatgatgtgtaatggaataacacagtacaatggtgtatgcgaacttatctcctttgccttagcattttcattatgcctcccattacaccaaataaatttacaagcatacatttgactccttgacaaagggtggtacgaaggttcttcgaaggttgagcgacacgaagctacgatcctcgaaaaggttgcacttgcatctgggaataaaaggaacattgaaaaagtcagaaatgctcaatttagtgttaatttgcccaatgttgtaactgtggatccgatgggtatggcactgaatgaagacaagttgcatcttaccaccgagtcacaagtaaaacttggcaaaatgctggcagaagcgtacattttgaacttctctacatcaacttgttaggtgaatacaagtgtctcaagatcttcaatccacaacaagtatatttgataaggtcgcctagtgacaagattactatgtgctcaagcacttaatcaatcgaagacattgtatctatcttatgtccgagaatacgctaaagtgcctcaattcttgtatagcatttcaaactcgcttcataacatttctttcatattgtaataatggttgcagcctatgttttctggtcgctcgactagctagtcgaacttagggaacgaccagatgactaatctcgattagtcgccgactaggtcgactaatcgacctctggttgacctggttgtcgtcctgttcattcaggtcattcaggacgtatatactatatagtatatgattatataactatatatgaatgatagggtaaacatgacatgaattctgcaatattgaatattgatttaagaaactg

SEQ ID NO: 107634 - DNA, 1366 bp, Zea Mays
aaaaaaaaatgatataaggagaattttagagcgagccgatgggggtagtgttacgccactcattccaagaggcagccgcggtctcctctccaccccggccgccggccgcccccacagtgccgtaccccgaccagccatgcgcatcttcgtgctgtccgggcagagtaacatggccggccgcggcggcgtacaccacaagcactgggacggcgtggtgcccccagaatgcgcgccggatccgtccatcctccgcctttcctcggcgcagcagtgggaggaagcccgcgagccgctccacgccgacatcgacacaaccaagacctgtggcatcgggcccgggatggcattcgcccgcgctgtgctctcgagcctgcaggaggacacccctggcgcggcggcccagatcgggctcgtgccgtgcgccgttggcgggacggccatccgggagtggtccctcgggaaacatctgtacgagcagatggtatcccgggcgcgcgtcgcgaccttgtacggcgagatcgaggccatcctatggtaccagggagagagcgacgccgaatccgatgccgacacgagtgcctacttggagaacgtcgagaggctcatctgtaatgtcagggcagatcttgggatgccgcagttaccctttattcagggtggtacgaaggttcttcgaaggttgagcgacacgaagctacgatcctcgaaaaggttgcacttgcatctgggaataaaaggaacattgaaaaagtcagaaatgctcaatttagtgttaatttgcccaatgttgtaactgtggatccgatgggtatggcactgaatgaagacaagttgcatcttaccaccgagtcacaagtaaaacttggcaaaatgctggcagaagcgtacattttgaacttctctacatcaacttgttaggtgaatacaagtgtctcaagatcttcaatccacaacaagtatatttgataaggtcgcctagtgacaagattactatgtgctcaagcacttaatcaatcgaagacattgtatctatcttatgtccgagaatacgctaaagtgcctcaattcttgtatagcatttcaaactcgcttcataacatttctttcatattgtaataatggttgcagcctatgttttctggtcgctcgactagctagtcgaacttagggaacgaccagatgactaatctcgattagtcgccgactaggtcgactaatcgacctctggttgacctggttgtcgtcctgttcattcaggtcattcaggacgtatatactatatagtatatgattatataactatatatgaatgatagggtaaacatgacatgaattctgcaatattgaatattgatttaagaaactg

SEQ ID NO: 107635 - DNA, 1310 bp, Zea Mays
aaaaaaaaatgatataaggagaattttagagcgagccgatgggggtagtgttacgccactcattccaagaggcagccgcggtctcctctccaccccggccgccggccgcccccacagtgccgtaccccgaccagccatgcgcatcttcgtgctgtccgggcagagtaacatggccggccgcggcggcgtacaccacaagcactgggacggcgtggtgcccccagaatgcgcgccggatccgtccatcctccgcctttcctcggcgcagcagtgggaggaagcccgcgagccgctccacgccgacatcgacacaaccaagacctgtggcatcgggcccgggatggcattcgcccgcgctgtgctctcgagcctgcaggaggacacccctggcgcggcggcccagatcgggctcgtgccgtgcgccgttggcgggacggccatccgggagtggtccctcgggaaacatctgtacgagcagatggtatcccgggcgcgcgtcgcgaccttgtacggcgagatcgaggccatcctatggtaccagggagagagcgacgccgaatccgatgccgacacgagtgcctacttggagaacgtcgagaggctcatctgtaatgtcagggcagatcttgggatgccgcagttaccctttattcaggttgcacttgcatctgggaataaaaggaacattgaaaaagtcagaaatgctcaatttagtgttaatttgcccaatgttgtaactgtggatccgatgggtatggcactgaatgaagacaagttgcatcttaccaccgagtcacaagtaaaacttggcaaaatgctggcagaagcgtacattttgaacttctctacatcaacttgttaggtgaatacaagtgtctcaagatcttcaatccacaacaagtatatttgataaggtcgcctagtgacaagattactatgtgctcaagcacttaatcaatcgaagacattgtatctatcttatgtccgagaatacgctaaagtgcctcaattcttgtatagcatttcaaactcgcttcataacatttctttcatattgtaataatggttgcagcctatgttttctggtcgctcgactagctagtcgaacttagggaacgaccagatgactaatctcgattagtcgccgactaggtcgactaatcgacctctggttgacctggttgtcgtcctgttcattcaggtcattcaggacgtatatactatatagtatatgattatataactatatatgaatgatagggtaaacatgacatgaattctgcaatattgaatattgatttaagaaactg

SEQ ID NO: 107636 - DNA, 697 bp, Zea Mays
tcttcacggctaagaatcctgatgaaaaaaatgggtacatgttccatgcaagcatgagcaaggattttaccgcaaagtcaaaatggttatgtctacagctattgatataccccgacgtggcgacgtatatgtgttacaacaattacatagatcattttcacagccccccctgcgtgggcactgccccgtgcgacagggcccacgcgcagtgacccaactacaccctgcagtaccgcaggcaatccgcttcccgacacgctgttcaagtggatgcggctacaagtctttcatgcatcggtgtcgtgtattttggtggcaacagagaatcgacactagcaaaatattcttcgtcactggatggttccctgtttactggcttgtcaagaacgctgtccgatattgcgtcaagagtctcctccaagaaagttttcactgtctgcacaaagaacatcacacagttaatgctttaccatttacgagcttctgtcttgagaaaaaaaaacttgaaatatacaagagttgaattttgctcattttcatttcaacgtcaaaatgagccttaaaactaatagtatgccatttgttgtttgagtggcgcaaattttagtgagtggatgtgtcgggaaggttttttgagcctccatttgggagttcttttcctttcttacagaaaggcgaaagggcctctagcctggtg

SEQ ID NO: 107637 - DNA, 1215 bp, Zea Mays
ccgccctccttccatctcctcctctctcaatccttgcagccacaccaccataccctagcccccccccccccaaatctcctcctcccaaggtgccaaaccttgccgctcggatcatcgtcacgtggtacgaatcttcaatcgttttggtggagggaagaagggaggaaggaaagggggagaatccaaggtggtggacttccagatcgttcttagggatttgcccaaacttccggtgaaggcaagtaaaactgtgatggttattccgtctgtcagatgaggagtcctatacttgattatgttgtgctattgtgttcatattcatattttcttttgagtaccatcatttgaaaatgttcatgtttcatggatttcatatgttgagtttgaggtttgattatgttactcaagtggttattatgtggaatgggtggaagtaaatgtctagcacctttttatttgggaagaactcatgatgttgtcatgcataatgcactcatcatccattgcattgaagtttcgtcgcgatcttatggtccgaccgtactggtacattgagcatcatatgttgcccgagaaggggtatggtgcagcttcatatccttagagatatggaggcagaagtcattattgcatttgtagccatgtgcattcatgggagaggtgtggaaactattatgtggatgtggataatttggacttatgcatggtgattctacttggcattgagtttttagttacttgtttgcttgctgcaatttactgttcaaaagaaaaagaaagaagttctgaaccacgtggttgtgtatgcacagttgatttacaatgtcctatttattgttgttatgtttacttgctgagatgtgttatctcacatcttgcattgtttgatgcaggcacctaatttctgctttgggaatagagggatgtagcagcacagccactacacctttaataaaggaaccaccatttaataatgttgttaattagagttggtcaagtctagtgaattgctttgttcttggttgagcgtttattttggggtgggctgagtttcttaccccatttatttcacttcagttggggcataaatgagctttaccactttgcatctagtttctgctatgtgaattatatgtctttatatcctgtatgaacttcatgttttccctccttgttatgttagtttcaaaggaggtgctgccggattttgctata

SEQ ID NO: 107638 - DNA, 552 bp, Zea Mays
atgggattaggtataaggtatgaatccactcaatccagacccagattaaatctatggtggggtttaatcccttgcaaccgagtaagacctaagttgctaaggcaacaaatctggaatgcccatccaccagactggggggaccttgtcatcagagtggagagtagaaaggctttcatgctttctgccaataagccaattggaggttatgtcgctccaagctacaagttgaggacaactcttcttgtgcaagagaggacacgtgtggagagaatgttgcagcccatgaaggaaactttgagctctaaagaagatagcccaatgtttcttagagcgatcaccactgaaggaatatccaagaccgagcatatttcagagaagatgttagcagtaattgatgatgttggggcacaaaatgttgtgcaagtgatcactgacaacgctgccaattgcagagctgctggcatcaaagttgagcagaagcaccctcattttttggatcccttgtgttgtgcatactttgaatcttgctttaaggaacatatgtgctcctag

SEQ ID NO: 107639 - DNA, 339 bp, Zea Mays
atgccactccccgccccaccggtcacgccccaccctgccggtcgcgcccggcccaccacaccactctccatctccttcaccgtcatctccatgctaacgggggtcacgacgctctacaacaccggcctggccttcggtgggcccgccatcatgacgctcgactggttcatcgcgggcgccttcaccatggccatcggcctctccaaggccgagatctgctccgccttcccgacctccggttcaactactactatgttgggcagtgaagggcgacgtccagacagtaagaacgaggtgacacaatatggactcgatatgactgagcaacaatatcttgag

SEQ ID NO: 107640 - DNA, 1337 bp, Zea Mays
aacctagtaaaataggcatgcatgccgccaggccatgggacaggctacacacctctatttggggggtttcttccccctcggtcactttgatattgggggagtttcacctcccctgccttctcttgtcgacgtctccttctccctccttcctccagcacgagcggcagctgtcggagcacgacagttgcagcgtccttcaggggaggaagaaaggggacgacggcacgagtttaaaccaacaatctctcgtcatatatatcataatagagagtaggacgacaaaagccatgggcagtaatggcagagatcataggcgcggagtcccacgcccgccacctttaccactttacagggattgggaggaggaagaggtcgtcaaggctggtcgacgtcggcagtcgccgttggcgcagtcgtcaacgtcacccgcggccgcagccggcgtcgccaacaagaagaggctgtcgaagcagctgtccatgaaggagaccaccagggaggtcaagtgggagaagcggaagcggcagatacaacggcagaggagcagcatgcgcctgagcgaagccgacgacagggcaggtggcagcactgctgtctgtcctgttgacggcgaggcgagctcgagcgcggagcgggtggccactggtataaccgacggggacctggatgagctgaggggatccatggatctcggcttcaggttcgacgagcagaagggcggccaggacctctgcgacaccctccccgccctcgacttctatttcgccgtcaaccggcaggtgtcggagcccaggatgtcgtttcccacgagcacgagctcagggccgtctctgtcggccaccaagtcctcgcccaacctctgcggcacgcccagcccaggtagccctggtgcgcactctagtaacgccttggagtcatggaagatttgcaacccaggagataaccctctgcttgtgaagacaaggctcaggcactgggctcaagtagtggcttgttcagtgaagcactcgagctgatcctcgtcagtgttttattcacgctcttcttccatacataatacccgtacaagtggttgcgatggcgatgaattagtcgtgtccgagtgaaactagatcaattgaccttgttgctcgatctaatgtcgtcccaggtcacattgttgtggacagatttaattagcgtcgggttggcaaattaaaaaatgtatatgcaaagtactgttaaaggttggcatggtgtaaaaggtgtgagctatctccctaaatcattatgtcacagatttgaaacagtctttccgtatctgcgaaaaaaaacttgtctcgttttatctcttctcc

SEQ ID NO: 107641 - DNA, 1156 bp, Zea Mays
aacctagtaaaataggcatgcatgccgccaggccatgggacaggctacacacctctatttggggggtttcttccccctcggtcactttgatattgggggagtttcacctcccctgccttctcttgtcgacgtctccttctccctccttcctccagcacgagcggcagctgtcggagcacgacagttgcagcgtccttcaggggaggaagaaaggggacgacggcacgagtttaaaccaacaatctctcgtcatatatatcataatagagagtaggacgacaaaagccatgggcagtaatggcagagatcataggcgcggagtcccacgcccgccacctttaccactttacagggattgggaggaggaagaggtcgtcaaggctggtcgacgtcggcagtcgccgttggcgcagtcgtcaacgtcacccgcggccgcagccggcgtcgccaacaagaagaggctgtcgaagcagctgtccatgaaggagaccaccagggaggtcaagtgggagaagcggaagcggcagatacaacggcagaggagcagcatgcgcctgagcgaagccgacgacagggcaggtggcagcactgctgtctgtcctgttgacggcgaggcgagctcgagcgcggagcgggtggccactggtataaccgacggggacctggatgagctgaggggatccatggatctcggcttcaggttcgacgagcagaagggcggccaggacctctgcgacaccctccccgccctcgacttctatttcgccgtcaaccggcaggtgtcggagcccaggatgtcgtttcccacgagcacgagctcagggccgtctctgtcggccaccaagtcctcgcccaacctctgcggcacgcccagcccaggtagccctggtgcgcactctagtaacgccttggagtcatggaagatttgcaacccaggtaatttgagttgcagaatttttttccatgatcttgttaacgttctgcagtttcttatgttgggaagaacggtgtgttttggcatagagtttttgtctttcttctcatctcttttgtcggttcttgatgtaataggagataaccctctgcttgtgaagacaaggctcaggcactgggctcaagtagtggcttgttcagtgaagcactcgagctgatcctc

SEQ ID NO: 107642 - DNA, 745 bp, Zea Mays
atatataatgagataaatcatttggccttacgatatgtgtaagaaataatgctttgataattggcagcctatcaagagtttcattagtgtagaacaatttttttggctgttaacatagtgtataacatttgatgtcgtaatttgttttggaagaaaatttaatctcaacttagaattttttaccgacaggtttatggtcttttaatatctacaggttgtagaaactgaggtcattgtaactcaaatgagagcttgacacttagcatatagacgccactagaaccaatctagaattactgtgaggaaaaacggatatagagtgataaaaggcattaatcgaattgtgtatgcaactactgtggcatatcagtgaccttccgagaagatacaatggcgttcttagtagtaacactgcttgatttctatagttggagtcatcaaacagctaacatttacacttgaactgtttggtgaaatgcttgggagaaagaggtcagcaagaatggagtcatggaacatcggcaggaggggtgcagcagcggcaactgatgtatcccttgaacaatctggttttgacaagatgcaaatcaatctagtgtacactgtattctacacttgcacaaattgtttggctaattacaagattatcttagtgttttggtttggatttaagagtatacttatgtatgaaatattgactggtactcatctatattatattaattatattattattaaatatata

SEQ ID NO: 107643 - DNA, 342 bp, Zea Mays
agtacccctgaagaaaaagcaacacttgaagcccgtttcatccgagaagtaaatatgatgtgtaaagtgaaacatgagaatcttgtcaagtttactggagcttgcaaagaatcattgatggtgatcgttagtgagctactaccagggatgtcactgaaaagttacctgcatagcatccggcctagccaactagatacacacactgcaataagctatgcactggacatagctcatgcaatggactgtttacatgccaatggcataatacatagagacctgaaacctggtgtttattctgataaacattcgagggacgcactggtatcttgtcgtttgatcaaa

SEQ ID NO: 107644 - DNA, 445 bp, Zea Mays
atggcgcgcgtgttgagggcgtggggaggagagagtgctgatgtcatcattattgatgacagcttctccgctattgtcgtcactgttgcaagatggggtcgatcagtatacatcaacattcagaagtttgtgcagtttcagctcactgtcaatgtgggaaagtggctatttggaatcaagggcgataactctgatctactcttgaacacactgatcttcactgcttcatattctgccagacagaagcttcagcagtttgtagctgatggagagccgagcaagaaggaagtggaagctctgatggcattccaagtgcgtctttgcatccctcaagaaactgtggacgcacatactgagatttgtgggcaactgttcgaaaaggttcttgacagctcacaaaacctattgcctccagatgagctccgtaaacggtttgagcaagaag

SEQ ID NO: 107645 - DNA, 267 bp, Zea Mays
gtgctcgccgagtgttgtcggttgtaccttagcactcgtgcttgccgctggctcgagttaacgctcgcgtgcctgctcgttgtcactacatcgcactctctcttcgttcatcaggcttcacgtgtgctcgcgtttgtcatcgagctgttgaacctgtcctcccttgctcgtgacttcattgtcgccagagccctcactggattcgtgtcctcgccagctcgctccagaatcgatctcgtcgtcgttccgtgcgtcatcaagaaatcc

SEQ ID NO: 107646 - DNA, 534 bp, Zea Mays
atgttggagaagttagccacgcatgacgtggagattgtctccacactcttcgctctggccgacaagtgcgccagatccgccaagggccgggcatggcactcggcaccacaaaccggggctgcccagacgggtggctcgggtgccgtcccccgggacggtaaaaagaaaaagaagggtcgcggccacgagaagccgcagtccaccgctctagtcgtcgcagctgcgactgggggccggggcgaccacaacaagcgcccacagccgcagaggggtaacagtggctcatgccctgtacaccccaacagtcgccatagcgctgaggagtgtcgcgagatcatcgagctcgtgaagcgcgtcagcgggcggcgcgagcagtcttccaaggacagctccccacctcgccgccgacctggcaaggaaagggtcgacgacggcgaggtggctgcggctgaacaggaccttgggtatcaatcacccgagggggacctgaaggatgttttcgccggaggctctgtctccggtgatgacagctag

SEQ ID NO: 107647 - DNA, 2068 bp, Zea Mays
cgcagcactaacacccagcccaacccaacagcagccagcaacctcgcaggctcgcaccaccacctcgtccgtcgcagcatcaggccagcagccggcggcgccgggcgccgtcgtgaattaccccaggacttgtcccctccagcaaacggagcgttcagtagagcacgcctcggcgatatcgcggcgacatctgctgcagcccgtggagcccaacgagagcagcatcagcagcagctcccgatcgctcctgctacccacggcctcgcccacgcctgcgtgcgcagcagcagaagcaaagtgattaaccatgattggcagtatagtatcagattcagagttcttcgtggcattctactctgcagctcatttgtagatatatggaattccttccctgagaaatgccgtcctctacaccaccatcagtacaacccacaccaagccttcaaccgttaccatctcctgcagtaagccagagtactcgtattgatgttcgtgagatcaagtccaagatttttaagacgattgggcctgaacgagcaaagaaatactttcagcacctggaaaggttcttatcttcaaaactgagcaagaatgaatttgagaagctttgtcttgttgcacttggccgtgataacctcccattgcacaaccaccttatccgttccatcctacataatgccagtcgagcttgtggcccacctgtaattaatgatcctaggctggtcagaggtgccaccacttctggccatgtgattgttcctcctgtctgggacaatggtggtccgttgaacctaaatgtcaaagagaacagaccattaagcagaagggaaaatctactaacccaaaagccatcactgaatcattgtgacgctattatgctggagaatggtgttcatcatttgagtgatctgaagagatgtacacaatttcaaaacagtgaccatgtggagccacttttcaagcgaccgcgaatggagaaggaaccattcagtttacataattctctgcagagcaatgggtctgctaaggcttcaagagaaaacctgggacaagaaattatacaccaacccgaaggtccagtgcaagcaccacttggcattcagttacgtcctggcaattttggtgtggcccgaatacccctttcttctgtgagttcaaaggatacctctgacacttgtatcgaagttggtgaactctgtgatactttgtcagtgaagaagaggttggacaaaatggcaggagcatctgggttggaaggggtctcgatagagtgtgccaatttgttgaataatggcattgatgttttcatgaagcagttgattggatcttgtgttgaattagttagagcaaggtctcgacatggcaaactaagacatgatgcattgaagcagcagatgtgccgaaaactaataaatggtgtatcagtacatacccatgtttctgggcagagttctattatacctccagagacaaattccatctccatgcaggacttaaaggcagtgatagagttaaacccttgtttgcttgggattaatgcatcactgttactagaaaagatcaattcatatgactagttggatggagctagttgtattcatctcatcacaagatcctatgaccttgatggtctgtcttgtttcatggctgttgtaatcaggccataattttactgacgggtagtggtgaaggcaggtgcattctgtgcagtaccctgattgtttttcatctcatctctggtacaatcttccagaataaacaaatatctgtattttctgggtgcagtactaaactcatttatttcctgcacctaaggaccactattgggctaaagtgcttcagagataactatgttgctggactccaaacaaattgagccatatcacagatttgatctgtaagtttatcacaactaatatgtgcttgcacatttcaacttttttacatttgtagcatagatacagctgttggtagttatttatttgcagtcatttttgtttcaatgtcacaagaaatagaaactatttataaggcatttatcgaggactctagtagtgttgttgtatga

SEQ ID NO: 107648 - DNA, 405 bp, Zea Mays
ggtggacttccggatcattcttagggattttgcccgaacttcggtaaaggcacctgatctttgctttgggagaagggatgtagcagcacggccaccacacttttaaataaaggaataactgattattaatgatgttaaacaggaagggtcgagtctagggaattattacattctaatctttcatggtagttgaactgtttagtttggtgggctgagatgactatcttttgtctggtcatgaatgttcttttctaccgttgcatttcgattatactatgtcaattatctttcttttatatcctgtataaactatatgctttccttgttatgctactttcaagggaggtgctgccggattttgcaatactttctttctctatgtgttgcataagttttgtaaaaagg

SEQ ID NO: 107649 - DNA, 712 bp, Zea Mays
atacggtacacgttggtccaactaactgaaatgagcactacaaagagcagaaacaaggcaagggctggggaccatcgaatactcagaatacaccactcgtatcatctactccttcctatggcggttaggcgtctctcctcatcccgctgagatgtgcttctgatgcttcttaacctctcgatgcggacgtaggcgcgcgcagggaagactccacttgaggagaagcagaggaggcgcgcgttccacgatagaagcttcggttgggcgctgcagggaggagatccgagcagggacgccgcggtagcttgggattgagctcggcaagcaccacggagcagggaaccgacgcgccgtgggagccgtgcgcgcgtaggagatcggctgggaagagacatgcgaagaagaaagagcagagaagatagacatgcgcgctggagaagataaggagagcgcgtagggaaatatctggttcacgggcggcagaaaaatctcaatcggatgagatcgtgcgtgcacaaaaatctaggcgccgtgaagaagataggctgggcacgcgtagataaagcagcggtgaaaaatatcagagagcaaagcggcgtggggataagctcctggaatattttcttttctttttcagatttttagagattcacagatatttttgaatcgggatttttagccacgaacaaagagtcgatgcgtgatacgacaa

SEQ ID NO: 107650 - DNA, 866 bp, Zea Mays
gggggaatgttaggaacctgacctatacggtacacgttggtccaactaactgaaatgagcactacaaagagcagaaacaaggcaagggctggggaccatcgaatactcagaatacaccactcgtatcatctactccttcctatggcggttaggcgtctctcctcatcccgctgagatgtgcttctgatgcttcttaacctctcgatgcggttcatcttcttcccttccctgcttgctacttcccaaactccatctctgtactagtgtatgcatgtatcagatttatacccttgctttggtggtggctattgtgttcatgtgattggaggttgctaacaacaggggagttcgcggcgcaggacgtaggcgcgcgcagggaagactccacttgaggagaagcagaggaggcgcgcgttccacgatagaagcttcggttgggcgctgcagggaggagatccgagcagggacgccgcggtagcttgggattgagctcggcaagcaccacggagcagggaaccgacgcgccgtgggagccgtgcgcgcgtaggagatcggctgggaagagacatgcgaagaagaaagagcagagaagatagacatgcgcgctggagaagataaggagagcgcgtagggaaatatctggttcacgggcggcagaaaaatctcaatcggatgagatcgtgcgtgcacaaaaatctaggcgccgtgaagaagataggctgggcacgcgtagataaagcagcggtgaaaaatatcagagagcaaagcggcgtggggataagctcctggaatattttcttttctttttcagatttttagagattcacagatatttttgaatcgggatttttagccacgaacaaaga

SEQ ID NO: 107651 - DNA, 795 bp, Zea Mays
atgccactgctcctatgggcggcagtgcccgcgctacagcaccgggttactgcaaataacaaagaaagtggcctatttatactctttttgcttttctttgcaatcattgcgtccggttatgtgcttgtgaagggattagatgacccaacaaggagcagatataaacttttattgagtttttcgttgattattacttctgtgataccaccggaattactaatggagctctccatagcagtcaatacatctttaattgcattggctcggcatggtattttctggcacagagccattcataataccatttgctgggaggattactttttaagagctctctttgatcaggttgacatatgctgctttgataagatagggactctgacatcagatgatatggaatttcaaggtattgttacatcggaaggtgatgacttaatatctgatgcaaataagctgcctctccgaactcaagaagtgctttccagttgccatgcattggtatttgttgacaacaagctgggtgcactagagaccatccaagagaaattagttgatttacctgctgcatatgtggagacatataagaaatacacacggcaaggttctcgggtcttgtctcttgcatataaattgcttcctgagatgcctcaactagcacaggcccaagggatacatgtcccggtgccccccacctcctgttcattatccttggtcttcacctccacctatacctacatctccatctaccgaacatcagctattgatatatttgttatgttgtggaatgtggtgtaa

SEQ ID NO: 107652 - DNA, 972 bp, Zea Mays
acaaatgcacttacatcaggtaacaaaggaaaatctgttgaactttaaactaagaaaatgttatccccgttcgtttacaggtggtaccattatttatttattccaaccatgggagcatgggacaaactgatgcccttcctagcccatgcctgtgaagaatccagataactttgcctagtatccaggtgcccacaaatggtgctgccgatatttcagacgaacgcaaagttggagatttttccacagcaaaactaaggaatgaatacagatgagttaaacgaattgccaccagactggtgcttaaggtgaaataatatttacctctctgcaggctaggtggcgtgcctcgtactgtcgctgcctcacgcggtctgttgtctctcggccactggcttcttcccctagaagtatgggtacaggagtaagaggcccgtgatggcagcaccgtcgtctagcctgccttctacgctcgccgtcccgtagtctcccctcggcttcttccctcggaagtaggggtccaggaccaggaggcttgtgatggccatgtcgccgacctccacttgttcctctcaaatccactcaaatcctcgccatataggggccccaaatcactcccgaattcgcaagaaaatgtcgggaatcaaacccacgcgctagccacgggtgacggaggagtaagatgatggcagcgccatcgagcccgaggaggtcaccacggcgatggaggagtaagcagcggcgtcgagggactcaatggtcggatctgggtgtcgtctccatggaggcccactcgacatcgggaggggcatgtttttttcctttctccgtgtgtgccatggtgggcgcgcaggggcggtggcgagggcaggagagctagtgtgggttgctgcgacgacgggaggggattgcgggcacggattgcggcggcggaggcacggattgcggcgacgggagctgcggcacggacgagcg

SEQ ID NO: 107653 - DNA, 105 bp, Zea Mays
gaacttatgaagttagaaggtattcgagtttggatctttagtccatcaagcaagcatattcaatacctacacaagattccttacagtaatcagtcaaacaacatt

SEQ ID NO: 107654 - DNA, 454 bp, Zea Mays
ctgccaagttattacatgggctctatgaagctgccaaaacaatcattaaaaaattgacaaataccgaaagaattgtctatggagaggatgagatatcaatgcaaggaagtctacaatggcagcttggtccatgtttacaaagccaaaatctgaaggggggcttggaattttgaagatacaagtgcgaaatgatgctcttctcatgtggcatttggataagttatttaacaagacatatataccatgggtcactctgatatgggatgactattatcataatggtaggctaccaggagatcatagaaagggttcattctagtggaaagatattgtgaagttgattgatgggtataaaggtcttgcaatagtaaaagttggaggagggcagaccgtaaagcactgaggagatatttggaatagtcagttaccaaaactcacttacccagaattattc

SEQ ID NO: 107655 - DNA, 816 bp, Zea Mays
agagagcaaatcaacaagttgaaacaaaacgcacaaagagaaccaagatggccccagcacgaaaatcgcccaatacacctaccagcccctccaatttataagtgcccccgctaggtggaagacgtccaatacgcatccaaggcactaggcagcaccaactttcctagctaatttgcaaatcgcgtggaagagggagaaagagagatcagcgaccgagcatggacaagagggcgtcgtccacctccttgctcgtgctcatcagcatcctactcgctctggcagaccccgtcgcagcggggatgaaggccacgttcgcggcgggggtgggcgtcgccgccgacacggcggtgctgcggcatctgatgacgacgaggctggaggacggcgtggcgccggagctcacggtggatgtggagcttcaccgccgcgtcctggccggcggcttcgtgaaatcaaacgtgctgaatccagacaaggcggcctgcataaagtcgtgcccagcgcgcgggcggccgtacaccggccggggctgcagtaacatataccagtgcccccactgagctagcagctccacaagtgattgctctgcccacgggtactacacgcatgcgtgattgttgatcggttgtgttgtgcatttgctggttggttcgaccatcgagatcttggttgctagctagtagcatgtcttgaaataattatgggattatttacttgattgtgtcagctaattgattctgttattgaagtatatggcatcttgcgaagaccttgcaaagctgatatataaactgaatgatttctcttgcttcttaa

SEQ ID NO: 107656 - DNA, 244 bp, Zea Mays
gctttaagatttatttagggttagatgttgttggaaggcagttgagattaacgatttggtctctcgaacgaatccatcattttctatgcatatgttatgtattagtaatatataatgatagagagccgacagtctgtctttttcacacactagattttagggttttcttatgaggctatgaaaaaaccctttatgtgaggaaaaaatatttcatgagtaagcatgccatgtcaactaaatcgag

SEQ ID NO: 107657 - DNA, 426 bp, Zea Mays
atgcagcggagggcgtcgccgctgctgctcgtgcggggacgtagaccagcggaggagcacatgaggaggagctcggcgagcacagtacaggcgctgcttgagctcggaccagagaaggtccctgcgtgccaggtgctgggaggaggggagctcgttgcggccaccaagaagagacccggcagggaggcaagctacaagaaaaagggaaacaccatggtcattcaaggcaccatgggggctcccgcgccgaacagggaactaggtggaggggcgctcggtagagaggagcagggggcgtcgaccacgacttgggagaggcagccagctgcagtttgtgatcgagatggacgagaaagctcaaattttggcagaaagatcggatcaacgtcgtcttacaaaatttcttgcgccctgtttgcaaaataa

SEQ ID NO: 107658 - DNA, 121 bp, Zea Mays
cttaataatatattttttatagggtctatttatttacattttatagaaagattttccccaaataccagtagtgggatattagggtgttatagcccagcgagagaggactcgcgaacgggcg

SEQ ID NO: 107659 - DNA, 792 bp, Zea Mays
atggcatggcaccctccctgttcctcctggcgagcggctgggacagggggccttcttccccaacgccacctctgctccagccagggcgcgacatctcctctggtgctcgacctctccttcaacgccttcgacagcgccatccccggcgcgctcgccaacctcacctgcctcgtcacgctcgctgtagtgctctcgctggcaagatgccctcttaatgtagtgttgtaccttcttcttagtatttcgaacaatctggatgtttccaaaaaggtgtctggatctgatggggtttccgctaagagatctactagatcgaggtttagccaggatcatgctgccaaatcaaaagcaaagctcaagggcgctttctctttacttggactgaacaatgacaccttcaaaggacctcgtacctccaaaaggtttcagttgaaggacatgtcctggagatcaaaggattaccatgcccaaaatggtgaggatactactgtcaatgggaaagagaaccatgataaagagacagtgcatgaggagaataccaagtcctgtgaacatgaatatgggagttactgcctctggtctactgaacacagggaagtaatgaaggatgccaatgtcaagaagcttaaagatcaactttttatggcaagagctcattatcctagcattgcaaaattgaagcagcatgaagcatttacacgtgaactgaagcaaaacatccaagaacatgaacgcatgctaagtgacaccatcacagatgttgatcttccaccattgttagtcttgtcttaa

SEQ ID NO: 107660 - DNA, 763 bp, Zea Mays
tgatggagctcgggttgtgggtaatatatgcatccagtcagatcgtgttcacttggggaagggtacatggattttgtgctgaacacaaacttacaaaggcacatgtcttaactcttaatacaagttttgcttaatgacttcatggacatggaatggagaagatctaccccctcctgatactaaagctattagggatatctgtgtactgcctggtgggcatgttgttattgcatcactaagcaggaagttcccatttcaggtctataaagaaactggtgcacccataaggagagggcatctatcacaaaagtctgtcatgaagcgaaagagatctttcaagagacaaaaagccaagttggtcatagaaagcttgaaattttattgcatgacaatgatgaagaggaggcagcattgcagagagttgcccaagctgaacgtgcggcaaaataggctatacaaagagctattcgactgcgcaacaaggtccaattctcatgacaaacacagagctcacaacatacaaatttatcatggctctcaggattaccgaggctgctaggatatcagactcgtcccaagatattatttgtattatcctcgactaaagaataatatgggttgttcattatttttgtgaggagcatgggaaacactcttcgtaccatgatattggctttttgatgagttgttcgttgtttttaagaatatactgccttgtaagtcattttgtttaaatcttaataggatggtttccaaaatgtac

SEQ ID NO: 107661 - DNA, 1148 bp, Zea Mays
agggagcacccccaccactccccaaacacaccactccacacaaatccagacattggagattctacctgcgtgctatggaaactggcagatgagcagagtttgaacgtgagcagagccttggaggtgagggcgagcttggctgtggagggtgccggcgttgggcagaggacaggagcgagctcgccacctgggggcaaagaaagggaggccatggagaaaactaggaagcaagggcacgacggccatgggcgagctgagcttggaggagcagagggaggaagcttgggcgcgacgcagtgagctccggcaaggagaacaaaggagctggacgcgccgagggaaagacgccatggggggctcgcggcagccatttttggagcagagaaactccagcgcgcacagggaggagctctggagagggagtccgcggctggggaaaggggcatcccggcgagctgcgcgcaggggcaagctcgcgcgcgctagggagagagcagaggaactcggcgagctgcggcagaagagggaggccgaggagcaaggcaggggcgcttggttgagagcagaatatggacaccgatgggatttttatccagggtggccgagtggatgggaacgaggcaacgacggtgagaaaaatcttgagcagagcgtcggctgcgaggataagcacggccaccggcggacagatttttgttcccagcaaccggagcggatgaggacgaccgggtgaaggaagcagaggtgagcgctcgggaagaacagctgtagagattttttttttattttcttttctcctttttttacagaaaatcatagatatttttgtgtctggatttttagcaatgcacactggatcgatacactattcaactacgcatcccatttcccgaatcttgaaatggaaatccgaggactaacgacttgatttagcgaattctctgaactcggacaaaatcgtgttgttaattcatttttgacgatttagatcaagacaaaaagcaacggaccgaattaaacatatttcgacgttggtattttaatttacgactgattccgttgaagttaaccaattagaaattattcgagtccggcttcgcgattttaatttgctctgcgcgattcgaccgaaatcagccgaaaccaga

SEQ ID NO: 107662 - DNA, 1147 bp, Zea Mays
agggagcacccccaccactccccaaacacaccactccacacaaatccagacattggagattctacctgcgtgctatggaaactggcagatgagcagagtttgaacgtgagcagagccttggaggtgagggcgagcttggctgtggagggtgccggcgttgggcagaggacaggagcgagctcgccatctgggggcaaagaaagggcggccatggtgaaaactgggaagcaagggcgcgacggccatgggcgagctgagcttggaggagcagagggaggaagcttgggcgcgacgcagtgagctccggcaaggagaacaaaggagctggacgcgccgagggaaagacgccatcgggggctcgcggcagccatttttggagcagagaaactccagcgcgcacagggatgagctctggagagggagtccgcggctggggaaaggggcatcccggcgagctgcgcgcaggggcaagctcgcgcgcgccagggagagagcagaggaactcggcgagctgcggcagaagagggaggccgaggagcaaggcaggggcgcttggttgagagcagaagatggacaccgatgggatttttatccagggtggccgagcggatgggaacgaggcaacggcggtgagaaaaatcttgagcagagcggcggctgcgaggataagcacggccaccggtggacagatttttgttcccaacaaccgaagcggatgaggacgaccgggtgaaggaagcagaggtgagcgctcgggaagaacagctgtagagatttttttttattttattttctcctttttttacagaaaatcatagatatttttgtgtccggatttttagcaatgcacactggatcgatacactattcaactacgcatcccatttcccgaatcttgaaatggaaattcgaggactaacgacttgatttagcgaattctttgaactcggacaaaatcgtgttgttaattcatttttgacgatttagattgagacaaaaagcaacggaccgaattaaacatatttcgacgttggtattttaatttacgactaattccgttgaagttaaccgattagaaattattcgagtccggcttcgcgattttaatttgctctgcgcgattcgaccgaaatcagccgaaaccaga

SEQ ID NO: 107663 - DNA, 654 bp, Zea Mays
gtgtgcagcgatctccatttggtcttggatgttatcgccggccgccgcttcctctcccagctgcagcatctgagagccagcttgagcaattgcccagttggtttctttggccaggtccctgcagacgggtccagtacggtgttcacggcatgcatcttcaccgccactcgcacctgctcgacgatgttgaggtcgtcaagccccgtgaggagctgcaggatgaccacgccgaacgcgtacacgtctgacgccgtggtgagcttgcctgtcatcaagaacacggggtctatgtatcccatggtgcccatcggaaccgtgcgccggatgatggtctcctcttccagcggcttcactggcactacccgtgctgtcccgaaatctcccaaccgactcacgtcgccggcgtcgagtaggatgttgttcagcttcagatcggcatggatgatggcgttagggcggctggagtggaggtacaccagcgcagacctctgctcggtgaggatcctgatacggtcctcccattggagccccccctgcttgagcctgtccaggagggtgccattgcagaggtgctcgtacacaaggctgcatgactccgggcaaacaccaatcagttttacaatgtgtgggtgctccagtctgctcagcaccacc

SEQ ID NO: 107664 - DNA, 1070 bp, Zea Mays
acacccttctctaggaagttagccgccccttctaacttcctacggcctactctaggaagttagcttttagcttttgaccagtcaaacgagccgctaacttcctagagtacatgtcaacctctaggaagttaagtaacttcctacgactttactctaggaagtattattttttatcctaatctacgaatctaacgttatctttccatcattcatcctttcttctccaacacccatcactctcttctccaactcgaagatgtcggccgccaccgccctgcttcatcgaggcccaagacccaatttccgtttttgataaagaaaccaaacagcaacctagcagtcttccttcacttctctgcttccgagctcgtagcgaatcagatcggcgggctagggttccggtgcgcctctacaaccggacacgaggctaggctgggcatggaggggatcgtcacggcctgaaagaggtcccggccagagacggcgaatggggctgctgccgccgggaagcgctacaaagtgtggacgcctctctggccggtggcataatcgacaagggtggggtcaacactaagcagagttacaggcgtcaagctatccatccgcgaccacgagtctaaccctaaccaaaagaacatcgagctggaaggcaattttgaccagatcaagcaagccagcgacttggtgcgtgatctcatcgcaaccatcagcgcaagcatgccagcaaaaaatccatcttctgctatggcgccagcaggaggaggccgaggcagtggtccggggggcacgagcagcaactacaagaagaagctgtgcgagaacttcttgaagctatgcgagaacttccaacatgactatgtatgagatattgtctcttattatgactggatgagatgtgtcttatggctatagatgagacttttgtggtgtaattgatgagactatggatttaaatattgttatgtgattgcgtgtgagatgttttatgtgaaaatatgttgtgctatagttgttgatatatttgttatgttgtggaatgtggtgtaaaataaaaataaaagcatttgtaa

SEQ ID NO: 107665 - DNA, 947 bp, Zea Mays
attaagttttttttgggtagaaaagaactcaaccaaaagtgagtcgccccacatgaatcggcggtaaaaattggttggcagatgtttgtactatacgctcatccgtcaaaagtcgcaagacaaaaggttagcatgcatgtttttgcctgctacgacctgatgcttcccaaccgcgcgccaccgaattgaactcctgcatctgtaattaatgggccaatggcctcagcaagagagagcctcctataagttgcgcttgacaagccattggcatagcatctatatccaccagcatgcacgcgtctcctatccatgttcgtcgacgacacgcgagcatggacagcatggtctgcgtcattcatctggtgctcgctgtttcgctcgcactggccggccccatcatcgccggcggcagcacggaggaggttgggctagcccgcaagcaggccgacgaggcgtatgccgcacggcagatgacggctcaagcgacgacgacggcgtcgacgatgggaaaggaggtgcaccgccgcgtcctcggcagcatcaatccgtccacactcgatcctgacaagccagcctgcctcggatcgtgcccagctgccggtagaccgtacaccggccgcggctgccagaaggcgtaccagtgctctagctgaacacccacggacacatgcgtcgttcgtccctactccaatcaggcatcctgtccagtgcattcgattttttattttgtcattgtttttaattaccatccttatagagccaacgcatgatgtgtaccgttgctgtaaactggaccagcgctacttgtccaaaacctaaacaccattggttattgacattgttctgttgcaaatgggcttcctaagctccttgaaatgtacggtgtcgaatcatcaaaccaaacagattaggacagcaaatgaacaaggaaaggtcaggacgatcaa

SEQ ID NO: 107666 - DNA, 456 bp, Zea Mays
gaggacaggcgaacttcacaggggggttgtgacgagccgaccaccgcgtctcgcagtaccgcaacgtttattggcatagaagcttctaaaagtatttacgagagcataatttctacctactgtaaactgggattcccagaaacagcacacggggtaattataattgaagcatatgggaagataaagctctggcagcaagcagaaatcttggtgaaagggctgaggcaagcatcagagagtggactttatgaaaaagcaagggcagtctttgataatatgattaaaacatgtcctctgccaactgttgattcagttaatggaatgataagggcattgattgttgatggcagattggatgagttgtatgtcgttgtagaagagcttcaagatatgaactttaagatcagcaaaagtacagtgctccttttgcaaaagctggggatgtattcgaggtaa

SEQ ID NO: 107667 - DNA, 1869 bp, Zea Mays
caagtggagcaaatcaccaattctagcaaggcagctcagcagcttttgtagcgagcttcttggagccttgaaatgagtagtagtggtagcctagccaccaccagtagcaagtaggcactataagcactaggaagtagctaaagcagtcataaccatgggttcgctgccgccggtggacgggcagagacgccccccacacgttgtgatgatcccgtacccggcgcagggccacatcacgccgatgctgcagtttgccaagctcctccatactcgcggcttccacgtcaccttcgtcaacaacgagttcaatcatcgacgccacctgcgtgcgcgagggcccaacgcgctcgacggcacggatgggtttcgcttcaccgccatcgacgacggtctcccgctctttgaagcggacgccacccaggacatccccgcgctctgccactccaccttgaccacctgcctgccccggtttaaggatctcatcgccaggattaacgccgaggctgaggccgagggacaacccaccgtgacatgcgtcgtcggcgacagcaccatgaccttcgcgctccgcgccgcgcgagagctcggcctccgctgcgctacactctggaccgccagcgcctgcggcttcatcggctacttccactaccgccacctcgtcgagcgtggtatggtccccctcaagaacgaggagcagctcacggacgggtacctagacaccatcgtcgactggatcccgggcgcgcccaaggacctgcggctccgggacttcccgagcttcgtgcgcaccacggatccgaacgacgtcatgctcaacttcttcatccacgagacggagggcatgtcgcaggcgtcggcggtggtcatcaacaccttcgacgagctcgacgcgacgctgctcgctgccatggcgaagctcctgccgcccatctacaccgtgggcccgctccagctgacggtgcggaacaacgtgcaggcgaacagtcctgtcgctgctattgggtccaacctgtggaaggagcaggaggcgccgctccggtggctcaacggccgtgcgccgcgctccgttgtgtatgtcaacttcgggagcatcacggtgatgtccaacgagcagctggtcgagttcgcgtgggggctggccaacaccggctactacttcctatggaacgtacgcccggacctcgtcaagagtggcgactccgccgggctgccgccagagttctcagctgcgacagagggacgaagcatgctgtctacgtggtgcccgcaggcagctgtgctggagcatgatgccgtgggggtgttcctgacgcactccgggtggaactccacgctggagagtatttgcggcggcgttcccatgctgtgctggcccttcttcgccgagcagcagaccaactgccgatacaagtgcaccgagtggggcatcggaaaagagatcggtgacgatgtacagcggggcgaggtagagtcgctcatacgggaggccatggagggggagaaagggcaagagatgctccggcgcgtgactgaactcagggacagcgccgtggccgctgcagggcctgacggacggtctatgcgcaacgtagacaggctcatcgaagaggtgctcctagcctagattgagcactggtgaacatcatagcagtcatgtgtcttcgcgtctggcactccaatcgattcaaatcctttgtgttttgatgtcaagcgtttactttcggtacccataaaagtattttctcgtacaaggtggtgattacacgcaaagcacattgttataagttcagtttgtaagatctatgggtaaaaccaagcgttttgtataattaaggaccgtttgagagggctacgactcctttaaaaaca

SEQ ID NO: 107668 - DNA, 495 bp, Zea Mays
atggggcacgctggagttggccgagaaggagaagtccaagcgccgtccatggaagaaacctcggctgggcatgcgctgggcatacaggaagctcgactcaggacagaaccgcgctgggatcgagcagggagggagcacgtgcgctatgaggagctcggcgctgcaaaaattcgagcagaggctagagcggctgggcacacggcggccatggctgtgatgtgcagagagcagggggcgtcgagcaggaaatcatggcgcgcaggaacgctcggccggatgcagcaagcagagagggggatgcgcgccggcgagggagatccgagccggggaaacaccgagccgaggctagagcagggactgagctcgacgcagggagttccatggcgcgcgacgagcttgatgctgggaccagggtcacgcttcggctgggcgtgggaggacgcgcagagggaaagaaaaatagggacacggcgtgggcagggagcttcaagctga

SEQ ID NO: 107669 - DNA, 161 bp, Zea Mays
atttagcattacgcatcatgggtaagagaatagcatagtcaataaaccaaaatgaacttatgcatacatgttggtatattttgtgtgtgcattttaactttgataatgactcatgaatttgaaattaaatattagaaatttcgaaattagaaaagaaatac

SEQ ID NO: 107670 - DNA, 1147 bp, Zea Mays
gatttttttggccgtagccctatctccttcgcttgggatttttcagccgtcgttctcatccgcgtcgcacagcagctggggaaaaaatcctgccactcagccgccgccctccctctgatatttctcagccatcgttatctcctagcgcgcgctccttgtcttctcccagcgctctccttcactgccgcgccgccctcctcccttctccctgctccttcccatggtgcgcagggcgtcctcccctcgatttcctccgtgcctccttccagtcagcgacgaacgaggttctaggcggccacgtcgttgtccggcacctcgtctgtgtttttctctgtgccacggtcgagctcgccgcgtccctttgtttgagtccgtcaacctccatctcgccccgagctccttccatggctgtcgtcgcctccaagcctggggtattgccgagctcgcccagcccttccccatcacacgccggcggtcctccattcccagccacgccgctctctgctcactggtgctcgcccctgccctctgtctagcgccctccctgctccacctcttcccatggccgcctgcagctctcgtcctccctcaagccctagtcgagcttttctatggcgccctggatgccagcccctttactcgatgcccctactaggttcctggcatgttcgccgagccatcgcccaagctcagcttatccatggcgcagggaacaacaacccctttctgttgatggcatgctgcagccccctccatcacgctatctcctgttctccatttttgctgcagcaagtggacgcccccagccctccattatttgcccatcttccccatggtgccagcagcatgccaacggttcaacgataggtgcagcagtctgcgcgtcgtcaatctcctcacatcaggtcgtgtccctctctgtccttgcatgttctagtttcatttcactttgttgtccatgtcgtgacgcttgtgttatctctggtttatttttgtgtatggtgaggaagagaattctaggaaaaatcgatgaagaaaacatgtttcagttcggtgcgctctaggtgtttgacgaaatgggagcaccagggaacaatcgtcgttcttgcataaaccaagtcgatttgactgtggtgaggcaatttga

SEQ ID NO: 107671 - DNA, 369 bp, Zea Mays
atggggttcctgcgcgctccctctgctcaccctgtcgtctccatccatggccgatgcgtgcccctgcactatatcttccttggccacgctgaagtctgcaccgcatggggcctgcacactctctcctctgttcgtgagaacagggcggcgtacgcgcaggctggaggccgcggcagatgcgctgctggccatcctcttagcggaggcctcgcaggagccagcagtagccgtggaggcgtttcagaccatctcgccagacctatagctctatatacgtcaccctcacgtatcgtcatcgagcccgtcgaaccccgttcttccctgctcgacatcgtcgaaccccgaatcccggacgttgggcaaatgtaa

SEQ ID NO: 107672 - DNA, 204 bp, Zea Mays
atggcgacgacgatgaagactgccaaggtggtgttgctagtcatcttcttggtgcaagttttgagtgtcctcgccgctgcggccaggcctctggcggagggggacgccggcaccgacagctggctagagagcggcgtcgggatgctcacgcagttgttgcttggtgctaaatcggggtccaacccgcgcacgcactgctgctga

SEQ ID NO: 107673 - DNA, 835 bp, Zea Mays
cgatctccttttgaggacttatatggttatgcacctcgccatttctgtattacttcatgtgatggtccctcagctggcctaaatgcattcttgcaagacaaactggttatgaccaaactgttacagcaacatcttttgcgcgccaagcaacagatgaagtctatggatgataagcaccgcactgagtgtgaatttgctgttggagatctgaaggtcgtgggtgtgctaacgtcctggtatctccgttgctgcctgccactgactctgcttggcacattcatgaacagatattggagcggcatctggtcgtcccaaccttcctcgttggcaacatgggaagacttggaagcactcaagcacacctttcctcaggctccagcttgggggcaagctggttctcatggaggagggaatgtcagtatcccttcatcagtcactggaggtcaggcagagcatgttcgaggagatgcagcagataatgaagctacaagactcgcaggccaagcaccaaggtttataggccagaatgggctaaatagttgctaggccggcctgtgtgccggagtataatatataagccaaacttagggcagagaaggggcatgaaatgaaccagaatctgaattctactatctactatcgtctccctgttcttcacctctattcatcttctctgtgttgtctgtctgtatctctccactcctgctattctattagtgatctattaggatagctaacagagaagtctggtgcgcggtcggaaattgagaaattgagatgagacagggaagctagtgtttgtctgaattagaatggcaattgtgggttcggggtc

SEQ ID NO: 107674 - DNA, 1245 bp, Zea Mays
atggcgtcttcttcaccggtccatactcagctcattcaagcgttggagcttcagacgcgcgccctcctctcggagttagacaagcgtctcgactccaagtgggtgaccaaatgggaatcccgtgttggagcgatcgaatcgcgttccgccgattcgactcgcgccatgtccgatttctcctctgctcttcactccgacgtggaagcgcacctcacagcagctgacgccgccaccgactccaaccttctccagatcgaagccgagctggacccccgcgtgtcggcgctcgaatcctcagtgcacgccctcgatctgtggtgtcctcgcgtggattcatcgatcgaggggctccacgcgtcggtggatttcatcagcaccgaagtgtccaagatggggattctatggaaccaagacgtgctcgaccaaatgtccaagagcgcaagagccgacgatctagtggtgaacccgttcgaggagctggaaagcggctcgatggcacttctcgcggaggtgacgggcgaaaaggtgatcgtcgttgggtctgtcttgctatgccgctcaccaagtctctaccctcaatccatgtcgtgtgacacgaggcgatgcatggcgtggctggatgccaaggcgcccaagtctgtggtgtacgtgagcttcggcagtgccaaatgcatgccacccattcagctcaggcagctcggcatggcgtttgcctcatgcccctcgcctgtgctctggctcatcaaggacgctgactccctgcccaacaacatcaaggatttgctacacgagaacactgttgcagacgatgtcgcaggaagcaagtgcctggtggtgcgcggttgggcgctacatgtggccatcctggcccatcctgccagtgacggcttcatggcgctctgtggatggggctccactctggaggttgttgcagccggtctgcccatggctgcctggccctttttcgccgaacaatttatcaacgagcagctcatcatggacgtgcttggtattggattgtctgtcgctgtgatgaagccaattgaaaatgttttgattgccagtaacatgggtggtgctgttgtgatgatatatgctcctgttttttggtcttgcctgacaagcttcacacttggaatccatggtcagatagttggggttctatttttgccatttttggtaattcaactgaatatcagtatagctgtccagcaaaggttcttgtgggatccaggtggtgattag

SEQ ID NO: 107675 - DNA, 471 bp, Zea Mays
atggcaagcagacagagagcgtcgcgagctggaactgggggatggagaggacgcagggaatccgaccaggaactcgcgagcaagatccccaagccggccatgggaagggagaacaaggagccgagcgccggatccgagccaggagcgatctccatggccggacagagagcagggcgagcaaggaggaggaacggctgggcgcgacgcatggaggagcagaggtccgcgcgaacacgacggggcacagggaggagcgccggcgagcccgcggcgcagaaaagcaccagggagaggaacgtcgcgatggagctgctcggcagcatcacctcggcgtcagcctgcaccgccgccagctgcatttcccacacggcggccgcagcaggaacaaggagaagcgaggaacaggggctgggcaccatgggcgagcgcaggggattcaacgagctggagctggaggaacgcgcggcatag

SEQ ID NO: 107676 - DNA, 531 bp, Zea Mays
atggagaggacgcagggaatccgaccaggaactcgcgagcaagatccccaagccggccatgggaagggagaagaaggagccgagcgccggatccgagccaggagcgatctccatggccggacagagagcagggcgagcaaggaggaggaacggctgggcgcgacgtatggaggtgcagaggtccgcgcgaacacggtgggggcacagggaagagcgccggtgagcctgcggcgccagagagcagggcgcggcgcagaaaagcaccagggagaggagcgtcgcgatggagctgctcggcagcatcacctcggcgtcagcctgcaccgccgccagctgcatcttccacacggcggccgcagcaggaacaaggagaagcgaggaacaggggctgggcaccatgggcgagcgcaggggattcaacgagctggagctggaggaacgcgcggcataggagcaggcgtgcgcacggagcttgcagggagcacgcagcgaatgtgcgtcgggagcatggctggcgatgtggagcgctga

SEQ ID NO: 107677 - DNA, 2088 bp, Zea Mays
cgttgtcttctctagcgacggcgaggcttgagcgctcacgtcccggcgttcccgtgccggtggccaagccagcggccgacgagatggactacctcaggacggtggttccgtcacaactcttggcagagcgcggctccaatcttgtcgtcatcaacccaggatcgggaaatgtgcgaatggggtttgctagtcaggatgtgccattcaatataccacattgcattgcccgacacatcaatccacaagagggcgaagaaccaagattctctgtgcgcgatcagatgctcaactgccatgctacttcatcgcagaatgcagagcgggagagtgcatatgatattattgcagcactgatgaaaatcccatttttggacgatgaagaaatgccttcaccgaaccaaccccttcctccaaagatgggacgtgttgatggcttctcttcgcagcaaaacagagacgataataaattcacttggacagatgtgtcagagagaattattaagccatccacaccattcgataggtcagtatacaaggatgctgaggaagatactctgccaagcacatctgatgatgataatggacaggactttaaagagaataagtataaagaaatgatatttggagaagatgctctgaaaatccctccttcagagtcatactgtctgagtcgcccaattaggagaggccattttaatgtgtcccataattattcagtgcatcaggttttagaagatttacgcactatttggaactggatactgacagaaaagttgcatatcaacccaagagacagaggtctatattctgcaattcttgttcttggggagacatttgacaaccgagaaataaaagagatgctgtctattgtccttcatgatttggggttcagcactgcagttgtacatcaggaagctctatctgcagcgtttggaaatggtttatctacaacttgtgttgtcaacattggtgctcaagttacacaagtagtttgtgttgaggatggagtagctttgccccacacagctctggcgcttccatatggtggagatactgggagcattgatgcagctgtccttgttcattcatatgataatgaaaggtctggtggacatcagaagacaagactatcagcaattaatgttcctcctatgggtcttctttacccaagggttcttgttccagaagagtaccctccacctcctcgatcttggttccaagactatgatgacatgctggaggatacctggcaaacaagtgatggtctttaccctagtgggaatggtgggtttggcatgtgggacagttatccgatgtttcccactagattaaagaaatttgataacattggcctcgtagaggccattattagtagtgtactttcaacaggacgtgttgaccttcaaaagaagctgtttggtagcattcagttggttggtggtgcagcttctacagctggccttgcacaagtgctggagcaaagggttcgcactaaaatttcagcaaaccaatctattgagaaagttgaggtgttgcaatctaggacttatccattatttgttccatggaaaggtggagtggatgcgtggattcatagagaagattggattaaaaatggtgtccacatcgggagtggcagaaaatataaggattcctattttcttcaggcgcaagtaatgtgctactacaacgtataacagtatcttatttccgagctacacacgaagacttgcacttatacaggttgttcgaccgtccaaaccatcctagaatatgattggtggactgcgattaaattgcgtacatgatgcatcagttctatgcatgctcgctgctgtctgttcggaggtcatcaactcgggacctggactaagggccttgtcgttcgctcaacccctatgaaaaagtttggctttctaaagatgtagtagaagtactcatttattccctgccaattgaacatttcaaatcttcgtatggtgttaatgaaaaatctgatgtttggattcgtatttatttccaatgataatgtatatgtgcattctcgactgttttggaaagaatgaaaaatcctcgtccgtttgcgta

SEQ ID NO: 107678 - DNA, 2115 bp, Zea Mays
cgttgtcttctctagcgacggcgaggcttgagcgctcacgtcccggcgttcccgtgccggtggccaagccagcggccgacgagatggactacctcaggacggtggttccgtcacaactcttggcagagcgcggctccaatcttgtcgtcatcaacccaggatcgggaaatgtgcgaatggggtttgctagtcaggatgtgccattcaatataccacattgcattgcccgacacatcaatccacaagagggcgaagaaccaagattctctgtgcgcgatcagatgctcaactgccatgctacttcatcgcagaatgcagagcgggagagtgcatatgatattattgcagcactgatgaaaatcccatttttggacgatgaagaaatgccttcaccgaaccaaccccttcctccaaagatgggacgtgttgatggcttctcttcgcagcaaaacagagacgataataaattcacttggacagatgtgtcagagagaattattaagccatccacaccattcgataggtcagtatacaaggatgctgaggaagatactctgccaagcacatctgatgatgataatggacaggactttaaagagaataagtataaagaaatgatatttggagaagatgctctgaaaatccctccttcagagtcatactgtctgagtcgcccaattaggagaggccattttaatgtgtcccataattattcagtgcatcaggttttagaagatttacgcactatttggaactggatactgacagaaaagttgcatatcaacccaagagacagaggtctatattctgcaattcttgttcttggggagacatttgacaaccgagaaataaaagagatgctgtctattgtccttcatgatttggggttcagcactgcagttgtacatcaggaagctctatctgcagcgtttggaaatggtttatctacaacttgtgttgtcaacattggtgctcaagttacacaagtagtttgtgttgaggatggagtagctttgccccacacagctctggcgcttccatatggtggagatactgggagcattgatgcagctgtccttgttcattcatatgataatgaaaggtctggtggacatcagaagacaagactatcagcaattaatgttcctcctatgggtcttctttacccaagggttcttgttccagaagagtaccctccacctcctcgatcttggttccaagactatgatgacatgctggaggatacctggcaaacaagtgatggtctttaccctagtgggaatggtgggtttggcatgtgggacagttatccgatgtttcccactagattaaagaaatttgataacattggcctcgtagaggccattattagtagtgtactttcaacaggacgtgttgaccttcaaaagaagctgtttggtagcattcagttggttggtggtgcagcttctacagctggccttgcacaagtgctggagcaaagggttcgcactaaaatttcagcaaaccaatctattgagaaagttgaggtgttgcaatctaggacttatccattatttgttccatggaaaggtggagtgattttgggcgtccttgatattggtaaggatgcgtggattcatagagaagattggattaaaaatggtgtccacatcgggagtggcagaaaatataaggattcctattttcttcaggcgcaagtaatgtgctactacaacgtataacagtatcttatttccgagctacacacgaagacttgcacttatacaggttgttcgaccgtccaaaccatcctagaatatgattggtggactgcgattaaattgcgtacatgatgcatcagttctatgcatgctcgctgctgtctgttcggaggtcatcaactcgggacctggactaagggccttgtcgttcgctcaacccctatgaaaaagtttggctttctaaagatgtagtagaagtactcatttattccctgccaattgaacatttcaaatcttcgtatggtgttaatgaaaaatctgatgtttggattcgtatttatttccaatgataatgtatatgtgcattctcgactgttttggaaagaatgaaaaatcctcgtccgtttgcgta

SEQ ID NO: 107679 - DNA, 342 bp, Zea Mays
gtcagcattacgttcgtgcattacctccataccaagattagcacggttgatgatatcagcccaagtattaataacgcgaccttggctatcaactacagattggttgaaattgaaaccatttaggttgaatgccatagtactaatacctaaagcagtgaaccagatccctactacaggccaagcaaccaagaagaagtgtaaagaatgagaattgttgaaactagcatattggaagattaatcgaccaaaataaccgtgagcagccacaatattataagtctcttcttcctgaccaaatttgtaaccctcattagcagactaattttcagtggtttccctgat

SEQ ID NO: 107680 - DNA, 1438 bp, Zea Mays
attgtatcaagaactatatacaaaagaataggaaaaaaggctcgaatagaaaaatggaatcagactcaagttctgaagtaattacacatatagaaattcaaaaagaaattgatacaatccacatcataatccatattggattcgccaacttattaaaggaaaagggagcaatcgaagaattagagaaagatctccaaaaggaagttaattctgtaaaccagagacttaatattgctatcgaaaaggttaaagaaccttatagacaacctaatattcttgcggaatatatagctttccaattaaaaaatagagtttcattccgaaaagcaatgaaaaaagctattgaattaactaaaaaagcggatataaagggaataaaaatccaaattgcgggtcgtctagcaggaaaagaaattgcacgggccgaatgcataaaaaaggatagactacccctccaaacaattcgctctaaaattgattattgctgctatccaattcgaactatctatggagtattaggtgtcaaaatttggatatccgtagaagaagaataactaaccatgtcttcccattccgcccagtgatagaataaaaaagacaagaaccttgtttttccaaaaatccctaaaaaaagaagaaagtatccctctttgtataagatttaatgaaaattaagaaatcttttaatataattgctatgcttagtgtgtgactcgttagtttttttctttagggtcaaaaatggaaaaaaacttagtaatgatagaaaattaactaataaccaacctattgcttcgtattgtcgagatcctaactaagaaacagtcactatgtaaataaatacatctatcaaaatgagtagatctatcatatagttgtagcaactacatttttttctctacaaaagaaacctgattctaggctgtgaagcaaaactaaagggatgtggataaaaggagagatgatagatagaaggaagaagaacaagaaagatataggattcccatatgtatggtctatgaattacatcataaaaaaaggcaatgtgataaagcatcaatataataaaattctcaaaaaaagagagaattcgaaatcgtaacttgacttttgaaacaacaaataaaaatataaagtaataaataaagagcagcccggttaataaaactgagaaaattgactcgggaaaaaaattggaagctccattgcaggattcaaacctaaccattaaaggagaagttgtgggaaagacaaaacctatgactacataggattttattgaaaagaatcctaacacttcattgggtgggatggcggaacaaaccaaaaaaattgctttatttgatatggttctaaattaacaaataagacaggaaagagtaaatattcgcccgcgaaatccttattggattagaatactttaccacgattcaaacaa

SEQ ID NO: 107681 - DNA, 270 bp, Zea Mays
aaaacgaatccttttgtagctcgtcatttattggcaaaaatcgaaaatgtcaatatgaaggaggagaaagaaataatagtaacgttgtcccgggcatctagcattctacccgcaatcgttggccatacaatcgcgattcataatggaaacgaacatatacctatttacataacaaatcctatggtaggtcgcaaattgggggaattcgtgcctacttggcattttacgagttatgaaagtacaagaaaggatactaaatctcgtcgttaa

SEQ ID NO: 107682 - DNA, 612 bp, Zea Mays
atgcggatccgagtgagcaccaacaaggagcaggcacaggtgaggtcgcaaggtaggataaatgggaaggaggcgacgcactctggcgaattggcggcgggaggagacaacgccgagggagatcgacagccgacgttgaggagcgctagggaggcacggcgatttggcagacggggaggaaactgtggccatggcgaggggccaaggatcaagctgctgggcgtggccgagcaggggaggatggggttcgacggcgcccgcggccggagcgagctggaggacagcgagcagggccttgagctcgacacggccagcagcaccgagcgattctccacaccagtgcgcgaaccaggggacgacacaggaagtcgccgccacgccacaggtaagtcgacgtcggatgctgcatcagctagagacggcgataggagaagacgagctgcaggacggcggcactcggcgaactccacggtggacgccatgtgcatgagcaggggtggcgagttgggggtcacggcgaccggagatggggaagagacgaggacgacctcggatccggctagcagagcacgcggtcgtcggcaacaggggaggtggaggcgagctgggtga

SEQ ID NO: 107683 - DNA, 117 bp, Zea Mays
ggggaagggtatctttaagcgttaagccttacccgcataatatttgcttccggttacagacggtaggctctaccgctgcaccaggcccgcccttcaactgtcggagacagtctgaac

SEQ ID NO: 107684 - DNA, 501 bp, Zea Mays
atggacttcatggtgtctgaggttgctgaattggatggagcaataatgatttgtcacactaacagtaaaatgaaagaggtaattgatagctatataggtcatccagatctgtatccggtatcttcagaacaccatgatatccgaatattcaattcgttcaatatccaaaccatccaccacaataacgagaaatggaagctaacatgtcttaatccagaaaatgatccaaaactccaaaacatcacacaactcgaaatcatttcattggaaggccttttctggacaactgccatctattttggagtgatgaggaaagtcgtacggcatctgttcagctttgaaaccagcatttctcaatgcttcgacaacctccttgtggacaactgcgtttccttcctgtgtcagatgcagaccgtcactgcaggatcaaaacgtcactgcaggatcagaacagaatcatttcaccatggtaccaggttctggctaggtgtctgctggtaa

SEQ ID NO: 107685 - DNA, 360 bp, Zea Mays
atgtcatgtgctacaatcgttaggactattaatagatgttgctcactgcttgcattgaaaatgtcatgtgctacattgaaaatgtcatgtgaaatgctcactgtttttctattggtttgtgtgcagttcaagctctgcaaggtgaggtctattcagttttgccaaaaaggcatcccctacctgaacacctacgacggccgcaccatccgctaccccgacccgctcatcaaggccaacgacaccatcaagatcgatctagagaccaacaagatcatggacttcatcaagtttgacatcggcaacgtggtcatggtgactggcgggaggaacaccgggcgtgtaggagtcatcaagaactag

SEQ ID NO: 107686 - DNA, 510 bp, Zea Mays
atgacgacgtggcacggcaagctggaacagggacgcatcaacatggggctggattcggcgagcagcgacgcggagagcaaagcgaggttgcggccgggcgggctcagaagcaaacacacgcaacgactacatcacgtccatcatgcgcgcgtcacggacaagctgaaaaggattctgagcgggagctcgacgtacgtagatttttgtttcgttgctccacgcatgatgcatggacaggtagcaagcagggacgcgtgtgggagcaggggcctcggcagagcgcggcgagctgagggagctccggcagtccggctgggctcgcggcaccagagcagagcgctcgggcgcggcgaacagcaaagaaatgagagggagagggtgagggcgagcagggagggcaccgagcagggagctccgggccagggcgcggcacagggcttagcgtgcggcaagaaccgagcagtagccagggcgcagcggccatgggagcaggcgcgcagcgagaaatga

SEQ ID NO: 107687 - DNA, 110 bp, Zea Mays
ggaaggaagctaaatgttttcactatctatatctaagaacaacactctacatgtgaattcacggtcaggtttcaaggtgagactttttgattttattcaactgaacttat

SEQ ID NO: 107688 - DNA, 345 bp, Zea Mays
atggggagctcggccggcagggagagcagaggagcacggcgcgccatgggcgagctggccgagcaccagggagatggggcgcacgtactagaggaagagttgcggccgccgcggaagcagcaacagagcgaccgagctggtgcctgggcaagcagagagatgcgcgctgcaagggagagaggagtggctgggcgtgcgcagggaagcttggccgggcgcggtgagctccaggacgcgcggcacggccatagaactggagggcgcgcggccatggagatgggcgatcgacgctggggcagagccgggctgtggaagagccgcggcaaggaagctcggcaaggttga

SEQ ID NO: 107689 - DNA, 1806 bp, Zea Mays
ctcctgtttcatttccatataacaaaacgcgtgggagctattgagatcgtgcgtgctgtacgtgcatcctccatatgtcgcttagaactactgcttggctatcggccaggccagggcaccaccagccggtgcagtgtttgtcgtcgccggagaaaccacgccgccggtcggcgaactaccagcccacgtcttgggactacgacgctcttctgtcacttgattctggcagacctggtgatcaggtccatccttctagttattataagatgaagagaaggataagagatatgttgctcaagaaagtagaaccatcttctaaacttcagactattgatgcaatgcaacgacttggaatctcttaccactttgaggatgagattagtaacatcctatactccatctccaatgagagtaccaaagctcagtacacatatgacaacattgctttcacagccttaaaattccggttacttagagaaaatggtttcccaacaatcctaggaccattaggctaccataattatgaaaaattcatcacaaagacaccaagtctggaggacgcaaacacacttctattactatacgaggcctcatatctggcatttggagatgaggaaaaattggatgtagcaaggacattttcagctaaagcacttaagcaacttatgccattcatgctaccacacttaagggagggtgtggcacattctttagaacttccactgcattggagagcttcaagactagaaacaagatggttcattgattactatgctagagacagaaacatgtgccccttgctactccaatttgctgaacttgacttcaaccaggttcaatatgaacatcaaaaagatcttgcagtagtgacacggtggtggaagaaaattgggcttggtgaaaagttgccatttgcaagggatcgtctgatggagtgtttccattatgctaatggaattgtttgggatccaaagcttggaacatgtcgtcaaatgcttgctaaagtttccaatctaattgtttacttggatgatctttatgatgtatatggaaccatagaagaacttgtactcttcacaaatgcaattgcaaggtgggatgcgataccaaatgagacacttccagagtacatgaaagcactttattctattatatatgacacatcaaatgaagttgctgaacacgctttgaagaaacatggttgtagtatgcattatcttctacaaaaatcgtggtatgacatatgcctggcatttttggtggaggcgaaatggcaccatggaaactatagaccaagcattcaaaagtatctagagaatggatgggtatcatcttcagcaccattgttgttgttacatgccttcgcaatgcttgattcagttgtcaacatgagtacgatatcccctttgcaaaccaaactgagattagttcaacatgtttccttaattttgcgtctctgcaatgactctgcaacacacttagatgagttgggaagaggagatgctccatctttcatagctttacacatgatcgagaatggtggtaatgagaatgattctcgtaaggccatgcaagagcatatcttgaagtcatggaaagtaattaatgaggaggcatttgatagttgccagtattctatgccctttaataaagcttgtattgacttggctcgcatttcacattgtgtttatcaaggtggagatggttttggtacaccaaatggtctaaagaagaaacaaattagagatttgttcttggatcccattgatatatgtaataaacaataatatataaagatttattgag

SEQ ID NO: 107690 - DNA, 537 bp, Zea Mays
ctcctgtttcatttccatataacaaaacgcgtgggagctattgagatcgtgcgtgctgtacgtgcatcctccatatgtcgcttagaactactgcttggctatcggccaggccagggcaccaccagccggtgcagtgtttgtcgtcgccggagaaaccacgccgccggtcggcgaactaccagcccacgtcttgggactacgacgctcttctgtcacttgattctggcagacctggtgatcaggtaagttcataaaatctttctaattaagtcctagtttgggaacctgatttatgatctgattaattaatatatagcagtggatcatagtagtaagttttattaccttcctccatcgaaattatagcacaatatatgtgacagagcaaaaatatggtggtctctgtctgatctggtcacactttgtccgtgtttctggtcagactccacatgcgtgcatgccttgacaagtagacgtgggtgtaaagtcgtgacctgaaatgcacaccccttcttctgaacaataaagtcaagtttc

SEQ ID NO: 107691 - DNA, 101 bp, Zea Mays
cgaaattataaattcgaacttccgaaatcgcattcacgctctcgaccagtctaaacagcactggacttatcatttcaggcgattatttaactatgaatttc

SEQ ID NO: 107692 - DNA, 3611 bp, Zea Mays
catcaatagatacgtggatccaacattgaagtatcacagaacaggtcgacatcaatagtttcagcggagtaaaccaacagagattggtggcggaaacaactaatagagttgctaaacaacaaataaaatgataataacaaagcaacacaagtgacgtttaactaaactaggttgtggatctaggacgatgcaactcggggtagtttctgagaacaatacttgctttttactctataatctttcttcgtaactccaatttaaagaaccaggtttctcaactcaatatccatttccttctacaacgactaatcctgaaattggcattggagttgcctatggctcctgtagcaataggagaatggatggcatcagcctgcatcgccaagatggttagcaaagtgtgctcttacctagaagaccagtatgaataccaaagggatgatgcaaaggataaactaaccaagctcaagaataatctctggaagataccattcgtgctggacaaagcttcaagcttgcaaaccaaagatcccagtatgaaaagttggcaagggagtataaaagatgctgcttaccaggctgtggatgttcttgatttatttgactatcgcttttttgaagcaaaagctgaagacatagaaaaggtgctggccgagtcatctgattatgctactgttaactcttcatcctccgcaacaaccaacaccactgcctctaccagcagcagctcaacagtaaaacggtcagttcgtgttctgaagcgtgtccttttttctgatgaagaccttaataagttaattgcaattttggaaaagtttgataagatttctagtgagatgcaaacattcttagagcttgttaacccaaggaataagaagccaggaaaggcacttcagtggcgcagaacaacctctatgctagctgacttgaacagcatcagtaacttagatctagttcagagaatacttgagaaaaagctaaatgggagcaaggttttggtagtactcgatgatgtttggaacgaaatgagcagcaaatgggaaacattgtgcaagcccctccagtttgctagtatgggcagcaaagtggtgcttactactcgaagtgaaaaggttgcaaagataaatggagcaacagagataatacatttagatgggttgaaaggcaaagagtatttggatcatttccagcaatgcgcgtttgacaacgcaacaccgtcagattttccaagattggtgcaaattggtgaacaattggcaatgaaattggctggttcaccactagcagctaagacggtaggagctgaactgaaactgaagctacaggaagaccactggaaggctgtccttcagctcaaattgtggcagattgaacagacagcagatgatattatgccagcattacgattgagctatgagcatcttccagatcacttgaagcagtgctttgtttactttgcattgtttcctaagaactaccaacatcgggatgatgtgctcatacagatgtggcgagcccatggttacattcaaaaggaaacatcagatgaaaatgcatatcgttatattaatgatctcttacagctttcattcattaagaaagcagccaatctagataaccattatgttgttcatgacttgctacatgatttggcagaatcaatctccaatggagaacactttcgaattgaagatgattttcatgttagtattccaagaaatgtgcggcacctatatgtcaatgcaagcaatatttctaaggtgtgcatgagtttggttgaatcccaggagggattggcagaatccccggatttgaagaaaaatctaaggagcctaataatatgcaagcaccatgctcctggagaaagaatccctccagataacttcaacgatgttcttaaagaaacgctgcatgatctaaggagcttacgtgtgctcgtactacaacatccagatggtattctgccagataatattgaacatctagtccaccttaggtatctcgacataagtgaaagcaagatattcaccagtatcccaaaatcattattcagattataccatttacaggggtttattctccagtcatattgtcagcataatctagggaaagaactgcagaagcacattagtaggctgacagctgagccagttaaaatacttagccccatccagaagtcgaggcatcaaaatgataggccaaaggagattggaggtctaggaataacagacctggataaatttggcagagccctccgactacagtggttacaatcacaacaagattggttggaccaaaccaagccttgggcaggaatcgaggttgcctgcaacaagttagaccagcttctcttcagtaccaccaccgtaatcatggttggaaatgggaagaaagtgcggttctggcaccataattggctcgatggtgaggcccctagaaggctagaaacctggcacaactctattcaagtttgcaaaaagggaaaataaaatggtccatcagcagctccacaacaatgcttggatccaatcaattcttgacaacgccacaacaaccacacacgtggaagaactcgtctcattctgttaggattcagaacatacaactaaagcccaagatgcaagattccaaagtgtggaagtggacagccaatggtccacactccaatcgcttggctaaccgggttcagttcgaaggatcatatgggacatacagaacgagccaaatctggaaagcatatacagaaaataaatgctgagttttcacctggattctcatgcagaacaaaattctcatggcggacgactcacaattgacaggatgtccgtatccagaaaactgcagcatgtgcaacaagcgtctggagatgggattacacctagtgtttggtttgaggaatcactccatccaaaaagaagtggagcgacctcgttattcatattagtactaactaactattatgctttctctaccctttcgacaaatcggtttggaaccaagtctagcttccttcacacattaagattctttaatgtttccctcaacatggtacttactgaccataagtcagtgattttgcatcaaatattaatgattaaaacgattccatcacagtctcagttttaccatttctgataatgcagactagatttcaagtagttacagaaagaattgtagtgggccgtggtgtgcaacaagctgctgcacggttctaaaacctattgcctggttcttggcactagcggagtacataaagcattactagtcccacaagggtgaggattttccgccggtctgagttaccagaatcgcagtacatacggccacaagggagaccagatcgatgaaattctaggagcggccacacgaagcgacacaatatttcaccgggaccaatgcaaaaattgcagaggtcaacccggaacaatgagcgagcgattcacatcgatggcgaaaggaactgggatctgcaaggagagagctcttactgggccgaggatggcgaggagacaggcgtctgtatgctctccagtccagagccagcggagccagcaagggaaccagctgatggccgccagagaagacggattagtggctagaatagaaaggaa

SEQ ID NO: 107693 - DNA, 2154 bp, Zea Mays
atggctcctgtagcaataggagaatggatggcatcagcctgcatcgccaagatggttagcaaagtgtgctcttacctagaagaccagtatgaataccaaagggatgatgcaaaggataaactaaccaagctcaagaataatctctggaagataccattcgtgctggacaaagcttcaagcttgcaaaccaaagatcccagtatgaaaagttggcaagggagtataaaagatgctgcttaccaggctgtggatgttcttgatttatttgactatcgcttttttgaagcaaaagctgaagacatagaaaaggtgctggccgagtcatctgattatgctactgttaactcttcatcctccgcaacaaccaacaccactgcctctaccagcagcagctcaacagtaaaacggtcagttcgtgttctgaagcgtgtccttttttctgatgaagaccttaataagttaattgcaattttggaaaagtttgataagatttctagtgagatgcaaacattcttagagcttgttaacccaaggaataagaagccaggaaaggcacttcagtggcgcagaacaacctctatgctagctgacttgaacagcatcagtaacttagatctagttcagagaatacttgagaaaaagctaaatgggagcaaggttttggtagtactcgatgatgtttggaacgaaatgagcagcaaatgggaaacattgtgcaagcccctccagtttgctagtatgggcagcaaagtggtgcttactactcgaagtgaaaaggttgcaaagataaatggagcaacagagataatacatttagatgggttgaaaggcaaagagtatttggatcatttccagcaatgcgcgtttgacaacgcaacaccgtcagattttccaagattggtgcaaattggtgaacaattggcaatgaaattggctggttcaccactagcagctaagacggtaggagctgaactgaaactgaagctacaggaagaccactggaaggctgtccttcagctcaaattgtggcagattgaacagacagcagatgatattatgccagcattacgattgagctatgagcatcttccagatcacttgaagcagtgctttgtttactttgcattgtttcctaagaactaccaacatcgggatgatgtgctcatacagatgtggcgagcccatggttacattcaaaaggaaacatcagatgaaaatgcatatcgttatattaatgatctcttacagctttcattcattaagaaagcagccaatctagataaccattatgttgttcatgacttgctacatgatttggcagaatcaatctccaatggagaacactttcgaattgaagatgattttcatgttagtattccaagaaatgtgcggcacctatatgtcaatgcaagcaatatttctaaggtgtgcatgagtttggttgaatcccaggagggattggcagaatccccggatttgaagaaaaatctaaggagcctaataatatgcaagcaccatgctcctggagaaagaatccctccagataacttcaacgatgttcttaaagaaacgctgcatgatctaaggagcttacgtgtgctcgtactacaacatccagatggtattctgccagataatattgaacatctagtccaccttaggtatctcgacataagtgaaagcaagatattcaccagtatcccaaaatcattattcagattataccatttacaggggtttattctccagtcatattgtcagcataatctagggaaagaactgcagaagcacattagtaggctgacagctgagccagttaaaatacttagccccatccagaagtcgaggcatcaaaatgataggccaaaggagattggaggtctaggaataacagacctggataaatttggcagagccctccgactacagtggttacaatcacaacaagattggttggaccaaaccaagccttgggcaggaatcgaggttgcctgcaacaagttagaccagcttctcttcagtaccaccaccgtaatcatggttggaaatgggaagaaagtgcggttctggcaccataattggctcgatggtgaggcccctagaaggctagaaacctggcacaactctattcaagtttgcaaaaagggaaaataa

SEQ ID NO: 107694 - DNA, 715 bp, Zea Mays
actccttctcaagagggggaggctaatgaggacatgcctaacattcactcatcttcaaatgaaactccacttgatatagctggtccaattacaaggagtagagctaaacaattgcagaaggaaattcattctcaggtgaacgctaaccttatatttaataatcagtctatgttgaatgagcctatgcttttgagttcttgtttcaatgtcctcaggaatggagtgtatgaaccagcatgggatcaagatggattcaagcctctggacatctgaaccaagaagcctatggtgtgcatgaataaaatggtggttcatcaccttagcatgggaatgcaaccagaagctagatgactgacacgtggtacgaattccaagcatcactacagacagaatacaaggagttagatggtgttctataagtggatggaagtgtcttcaagtctatttttcagcccatcaaacggttcattatttggacgttccaataaggagttatgctcattttagtaactgctgccagaagctgaaaagacgcgcgaaccggccactaaatccactagagcatgcgcatgcaaccatttaatcaaagctgaacgcccctatctctatatatatcttgtactaggcaatgaaaggacatatatcttatgttttttaattcagaatacacaaactcgtggagttttgtttatgcgtgagtcttgagaggcttgca

SEQ ID NO: 107695 - DNA, 102 bp, Zea Mays
atggccagctttggagctctttgctgctctatccatagagttatagcttatggccactataacaaagttgtagatctgttattggagcacaagtttgagtaa

SEQ ID NO: 107696 - DNA, 1051 bp, Zea Mays
ccgcgacgcccggctctagctcgctggacctccctgcccagctcgcgctaagcttctccctggtcgccccttcggccgagcgtcctcctggccggagctccctgctcggttcctcctgccacacccagaactttctccccgcgcccggcctcggctcgtcggcgctcggactgaagctcaccctgcgcgcccatcccctactctctctctctctctagctcgcggagctcccttctctgctcccatggcactctctgctcgctcggcctcggtctcgtcccggcagccgcgcccagccgaagcccctttcccgcgagcgcctccctgctggccgaagccgtagaatttccttgccgtgcctagccaagccgtcccagatctcgcccgcgccctggccctggccggttgtcaatctcctatttgccttggacagtgcctcgatgccccatcacagcagtgcttcgaggaactctagtgtttgatgtcgttgttcggttaccctatctcgatgccagtccctacgtgacatctccgacttgtgttcacaccgacaaaagaatcccaataagatgtagagaaacaagctcctggtcgatgcccaagtgctcggcgaaaggccagaacaagaatcatcgccatttatacggagttctagttaatatggagagattccgagaattgtggatggaagagaaagtgaagctccgttctatactcgtcagcggtttgatcgaagacttcaattgaagactgtcgtcgttttcgcaaatattgaatcgagttgattatggtgagccaaatcactatttttactattgattttatgatcgtgaaataagacgcttagtttgcgtatgaaatttaagttagaaataccagtgttgcgaggtgtgcttcgaggagtttagttgtcgagtatattcgaactagttctattttgcagagtgtagtatttcggtgatgcgtaggttaaatttagtattttatgcaattatcaataaatctgtcgatgctaattgtgttcagtgcacgtaagatgaagtcgatgtcc

SEQ ID NO: 107697 - DNA, 1526 bp, Zea Mays
tggcccggctacggctgctcctgctcgcggccgtcctcgcgctcaccgccggcacctgccgcagcttcgagttccaggaggccaccctggacgccatccacctggggttcaagaacggcagcctgacgtcgatggcactcgtccagcactacctgggccagatcagccgcctcaacccgctgctgcacgccgtcatcgaggtcaacccggacgcgctcaggcaggcggcgcgggcagacgccgagcggcggtcgtccggtgacggtcgggtcggcgggctgcacggcgtgcccgtgctgctcaaggacaacatcgggacccgcgatgtgctcaacacgacggccgggtccctggcgctgctggggtcggtggtcaggcgtgatgctggcgtggtgaccaggctacgccgcgcgggcgccgtcgtgctcgggaaggccaacatggacgagtgggccaacttccgcagcgccatcggcaccggcgggtggagcgcgcgcggcgggcagggcaagaatccgtatgttctgtcctcgcccccctgtggatcaagcacaggcccggcaatcgcagcggcggcgaacatggcggcagtgacgctaggaacagaaaccgacgggtccatactctgcccatcctcgttgaactccgtggtaggaatcaagccgacggtgggactcacgagccgggccggcgtcatccccgtctctccgcggcaggacacagtcgggccgatctgccgcacagtggctgacgccgtccacgtgctcgatgcgatcgtgggctacgacgaacctgacgcggtggctacgggagcagcggccaaatacatccctgacggtggatacgcgcagttcctcaagatggatgggttgcggggcaagcgaattggcgtcccagctgggttcttcggcttcccagatggatccgtcaggcagatggtgtaccagcagcacctcgacacgctcaggcgacatggagcggtggtgacagaggacctttcgattgcgaacctggatgtgatacagaacgccactgtgagtggggagctggcagctctagcagcagagttcaagatcgccctgaacgcatatctgtcgtccgatctgtcacgctcccccgtggcctccctggctgaactaatagtgttcaacaatgcgcacccggatgaggagatgctcaaacagttcgggcaactcatcttcttggtggcccagaacaccaccggcatcggcgcggcagagacggcggcgatccagcagctggacgatctgacggcgggtggcgtggagaaggtgatgcggcagcaccagctggatgccatcgtggcgccagactcgagctcggccacggtcctcgccatcggtggcctccctgggatcgccgttccggctggctacgatgagctgggagcaccctttggtatcaccttcggcgggctcaagggctatgagtcaaggctgattgagatcgcgtatgcgtttgagcaggctactaaggcaaggaagcctcccatgttcaagaactag

SEQ ID NO: 107698 - DNA, 734 bp, Zea Mays
gcaacaatcgtgcccacgtcgtccaaatcccaggaaaaaacggcttcccctctctcccctgctcatcccaacgcttctctctcgcacgacgtcgcgcaggaagaaaccgtgttgccggcttggagctcgcgcggagctcaacggcgcccgtcgaggtgaaccctccttctccttcccttccccgccctcccttcttcttcgttgcgatgcgcgtctgggcgtccgtcgcggtccgcggctcgcccatggcggccagcatgaccagtgcggtccgtggctcacccatggcggcccggcgtgcccgagccttggcgcggcctcgccctggtcttggcctcccccgcgcggtgcgctgcacgcagtggtggcctagtcccctcggcgtggccatggagcccagcgcagcctctgcccggcgtgccgccgctgcgcaccgctctggtgagcctcgccggcgagtgaccaccacatccccatggctgagccccccccgacgagccccaaggtgcggccaggaggccatttgtggcgcgcaggcgagcccggccctccccaggcgcagtctccatggccggcgagatttcctgctggccggtttcatctccttccgtccgtctctgtgttcgtctgtggaagaagaaaaggcagttgttcgttcgtgcaaaaaccagggaaaaaaggaaaccgcccgtgggccctacccacatgcatgcacctttgcctccgtgattcct

SEQ ID NO: 107699 - DNA, 488 bp, Zea Mays
atgaggaacaacaaaatgttgatcaaccttgctatagctggattaacatcacttactcgatcaaggaatacaaggaagaactctagcacttgtgaagactttgatccattgtatgaatctcatcataatgaggacaatgttcatcatgtggccgataaggctgtacctttcaactgtcaaagaaggaacacccacatgtgtactagttctggaggaacaaaaggatccaagaaagtgctagcacctaatgcagaagaccaagttggtagaataactacgtagaagacaaaggaactatccttagctgagaaagatctacatggttcaactacaaatatagaagagcacacattgatttttgccaattatcctgcacaacatgatgacgagattcaaatctgtgttgaaggccaaacagatgccatgatagataaatggataaggggaaaaagtatgggcatgcaattggaacggataagccgaggctt

SEQ ID NO: 107700 - DNA, 483 bp, Zea Mays
atcctctccttccctgttccccaaaccctaaactagatcgtcgtcatcgagtggaagccgcttgccagcacgcgacggagctacttctccggccattgccacctcgtcgttgccccgatctccgtagatatgtgctgggtgtctaccgcccgtctctgagtggcatgtgtgactcacgctttcataacatggaccaccaccacggtaattgctcaccggcgagcaggaaccaccgtggaccgcctcttcccgtggtttgagccctgagccgtgtaatcgttggtacgtaccctaccaatcgatccgctttcgactctgcattgtgtagctctagtttccgttaaggttagcgcagcataatgttattggcactgctccaacaatgtcgccgccgcgattcgatgggcggcgccgctagtggcgatctggggagaccgactcgtactgagccgtcgatggcgcaatctgcggtttagattagag

SEQ ID NO: 107701 - DNA, 698 bp, Zea Mays
atggcagaggagaaccatgttgttgccggcgccggccagaagctctactggtcccggcaaaccagagccactgcggttcaacgcctgcgtttcgcggctcattgctgcctgcacgctctgacatgtaccctcccaaaaaagagggatgaaaacaaccacacactgtgggactcctgaagacgacatttgggttgatggtgaattcagttgtatgagccagagaaccaaacattatgggaggagaaccagtttctaaaaatggtatctaaaaggatgactcgggtgagttgatttattcatggctattttgatctcctagttagaagccagttttattaaaaacaacttttatttggaattttaggagaaaaatatggtggttgtggttagtttattgattcatgtttaaatttttctttgtttggtatggaggcaacatgtcaggcgattaggcatgtgtgctatatggggctgagtgttggcctactaagagacgacatatccaacaactaagtgcttaccctaacttgcttgggactaaaagactatgttgatattgatgttgtgatggtgtggaggcaacacaacaagagtggacccaacatatgactttagtgatgtttgtttagtggccagaagactgtgcaggtctatattccttgttgataagttcccttctgtgaagcagactgatctat

SEQ ID NO: 107702 - DNA, 730 bp, Zea Mays
gacttttgttagttggtttgtatagagtttgaacgggtaagtcgccttatttagagtccttaaaagatacgcctagaagcgtggcgtcatcgcttttttagaaagaaccttgtgtatttttaaaatgaaccagcagtctagatggcctcggacgcggcctccagctccacgcactccgacctcctccaggtacgcccgccaggccccatcctcctaacccgatcgctactctcctgaaccctgtgtcgtcacaagagcgcgaggaggtcgtggcggagcgcgctctacactgtgtgtatgcggaggcggtggccatggcagaggagaaccatgttgttgccggcgccggccagaagctctactggtcccggcaaaccagagccactgcggttcaacgcctgcgtttcgcggctcattgctgcctgcacgctctgacatgtaccctcccagtaagtttctatggcctaggcatccttgtttgtgaacaagcgtctagctgtgaaaagttttagaaatttagcagtatagcagttacagttttaccttaattcctatgccactgagagctacaaactcaaagatacatcacctactgtatatttgagaattctcaatggtaacttttgatgtttcagctacggagaaacatgtttattgacaaatattctataccttgatttatcgcattatagggtagcataaagcatggaaaagaaatatgaaaaaacaa

SEQ ID NO: 107703 - DNA, 1809 bp, Zea Mays
accatacatttttacactccccagccatatacatcatatttttatctgaggaggtttgcaacaagagctagcggaagaagcgagcgctgaatgctcatcgagagccgccaaatggttcgcaggcagctgagagtgctgtccgctctggatgtggccaggacgcagctctaccatttcatggcgatcgtaatcgccggcatgggtttcttcaccgacgcgtacgacttcttctccatctcccttgtcatcgacctgatctcgttccagtactacgatggacacatgcggagcgctgtcaaagccgccatcaacggcatcgccctgtgcggcgccttgccggggcagctcgtcttcggctggctcggagacaagatgggccgcaagcgcatctacggcgtcacgctggtgctcatggtggtcacctccctcgcgtccggcctctccttcagcaagcgccgtgggaagaacgtggtcaccgtgctctgcttcttccgtttctggctcggcgtcagcatcggcggcgattacccgctctcggccaccatcatgtccgagtacgccaacaagaggaggcgcggcgccttcatcgccgctgtgttcgccatgcagggttttggcaacctcgcagcagggatcgtaggcatggtggtgtcggccgcttttacgaacagtgctccatccaacgccgacttcgtctggcgaatagttctcatgttcggcgccgtaccggctaccctcacctactactggcgcatgaaaatgcccgagacggcgcggtacactgccctagtcgccaaggacgccaagaaggtagcctccgacatgtccgccgtcctcaacatgcacatcgtcccggaggacgaagcagtgtacgagctcgcccggcacgatcagtacggtctgttctcggcggagttcctacgacgccatggcgcccacctcgtcggcaccagcatgtgctggcttgctctggacatcaccttctactcgctcaacctgttcatgaaggacttcttcaccaaggttcggttgcttggagctccgcaccagggcgacgagccgttcaagagaatggttcatacaactgcaatgcatacgatcctcgtgctctccttctcgctaccggggtatttcttctccgttgcgttcgtcgaccgcattggccgtgtcaggatccagctgctagggtttgccatgatgtctgccttcatactctgcctcgctatcccttatgatcactggactgatgataaaaacaataagtacggattcgctgtaatgtacggcctcaccagcttcttcgccaatttcggtcccaacaccacgacattcataatcccagcggagatcttcccggcacggctacgttcgacatgccacggcatatctggggcattcggtaagctcggcgccataattggcgtgtttgccttcgtttacgccgaaaaacataacaacaaccgaagcatgctgttcgccttggttgggtgcaaccttgttggccttgtgtttacgctcctcttgccggagtccaaggggaaggcactggaggagatcagcggagagatggaggaacagcacccggaacaggacgcggcagctgttgctgcggcggagtatgtaaatgtggtgcctgtttagtagtcaagatgtgtacagtgtaggtttatggtgtgctactcctctttttttgtcggtgtgtggtactaccttagcttgttgacttaggtcttcattttttgttctcttgaaaatatattcatatatgtatttagtatgtgagttgggaacaaaatatttcacaacttc

SEQ ID NO: 107704 - DNA, 481 bp, Zea Mays
gtgcacaagcgaagttttcaagcagaggcatttagaagttcctcaccgactatttaaagcccgggccggtcaacagagaaaatgcaaatgaagatcaaagtgtttgtgatcatcggaattattattaccatcaattcatgtagttgtatttcaaagaaaatagaaggagatggaatgtacaacgatatgcatggcaaggagggtcgcaaactcataaatactgatggaaggacggccccagccggtgactccatagatcatgtgtgtcctcttgggagctatccttgccggtctttgatttacagttctcatgatactacacaggatcctggtggacactaaaagtctatcagaatgcatgcaaatcagaacatgaagtgtcactgtaaccttttgtatctgtgaactgttattatgcgtgttgctggtagtttgtcactgaattgtgtatttgatgtttgtgttgtgtacttaagatcaa

SEQ ID NO: 107705 - DNA, 191 bp, Zea Mays
ccagatccccaaggaagaagaagatccggtcagatatatgtcgatgctcatcccaacgtacataagctatcaatggtattatgtgttcccgttgcaacgcacgggcacacaactagttaaaatataaaacctgggcatgtgaaatttatacattggtcatgatttgttattacctatgcatcataaaaatt

SEQ ID NO: 107706 - DNA, 160 bp, Zea Mays
aacaagggttttctttttttttcttctattatgtagtggtctgtgttcgttcctgtttttgtaacttagctgatagtttgctttgttattcttttgaaagtggttctctataagtagctttccccctctttatcacctattttgtcagacatatgttctg

SEQ ID NO: 107707 - DNA, 624 bp, Zea Mays
tcactcaaagaacagtgatttgaaataattgggaataaatagttcgtgaatccctgaagcgtgcatatatatattcctgccaagataaaggtaatggagtcgtcacgcaggttccagccggccgtcatcctgcttctcctgctcattgtgtccaccgatatggcacaggcaagggaatgcgagaagtacagtgagcgatttgttggggcatgcatgatcgcagacaactgcgccaatgtgtgccgcggtgagggcttcttggccggcaggtgcagcaccttccgccgccgctgcatctgcactaggcagtgctaaacaagatcgctcgatcgttcgccatgcatcgacaacctattcttaataacgttcattatctcgttcttatttatgacgaatgtcatgtatgttctggtgactgtcatgtatattctgatgactgtcatgtatcttgttcatgtatgctcaaggttcattatcttgttcatgtattaagtatgttatgaataactcaatatttattattttgttcatgtatgaattatcttctaatgagctcaaggttcattatcttgttcatgtactcaaggttcattattttattcatgtatgcagtatattcacatt

SEQ ID NO: 107708 - DNA, 613 bp, Zea Mays
tcactcaaagaacagtgatttgaaataattgggaataaatagttcgtgaatccctgaagcgtgcatatatatattcctgccaagataaaggtaatggagtcgtcacgcaggttccagccggccgtcatcctgcttctcctgctcattgtgtccaccggcaagggaatgcgagaagtacagtgagcgatttgttggggcatgcatgatcgcagacaactgcgccaatgtgtgccgcggtgagggcttcttggccggcaggtgcagcaccttccgccgccgctgcatctgcactaggcagtgctaaacaagatcgctcgatcgttcgccatgcatcgacaacctattcttaataacgttcattatctcgttcttatttatgacgaatgtcatgtatgttctggtgactgtcatgtatattctgatgactgtcatgtatcttgttcatgtatgctcaaggttcattatcttgttcatgtattaagtatgttatgaataactcaatatttattattttgttcatgtatgaattatcttctaatgagctcaaggttcattatcttgttcatgtactcaaggttcattattttattcatgtatgcagtatattcacatt

SEQ ID NO: 107709 - DNA, 643 bp, Zea Mays
atcaacaatagaagtttcaactaatcagcttactaggatgaagcctgcaacggtggcactgctcattttgttgaacatgatgtgcatagttgcatactttgatcatggaacgatggctgaagaaaccaccttgctggcaaattcgtatggaagaaatgaaggaaccaagggcatacatcatggaagaaagctgatggacaatagtattggttcaaaccgtgagtattcaatcgatgatatgtctcatccaaaggcaccacatactgagctcaagcaaccctcatacttagctcctggttgctcaagcaaccctctcaagcaaccctcatacttagctcctggttgcattccctaaagttcatgcatacatatatagccttccactcatcatatgctggtatccgatctatatatagacacatatgatatgttgcatatcgccaggttctcagatcaagtcccttgtgtagtatgagtggaaacctatctaaataatgtgtgtggcttctgaaatatgtggtgttattgtactgagctatgctcaatagtaaacaacaaattattgaaatatgtcacgtgtgcgataataaagtgacttcgacagacccatagctctttatgtgatgtattttcaaatatgaaa

SEQ ID NO: 107710 - DNA, 597 bp, Zea Mays
atggccgaagaaaccaccttgctggcaaattcgtatggaagaaatgaaggaaccaagggcatacatcgtggaagaaagctgatggacgccggcttatggaagtggtcatattgctcgtctatcttactagatgactattgtggcttgtttggcttatggaaccaagtccccctatgggcctgtttggttgcctgcatggctgagcctggctcgtatctagtgagcctggctctgactggtgtggctggacatatacaacttcttgtgttcgcattgccaggcgagtatcttcgattatcaacaacacaaaccttcactaatcagctaactgggatgaagcctgcaacggtggcactgctcattttgaacatgatgtgcatagttgcatactttgatcatgggagttttcttgtaacgatggcagaagaaaccacctcgctagcaaattcatatgcaagaaacgaaggaggaaccagcagctttaccaaggacatacatcctggaagaaagctgatggacgtcggtactgaatcacaccgcacgtctcgtatcattgatatccgtaatttaaagagcccgagggctcctcatcgttaa

SEQ ID NO: 107711 - DNA, 648 bp, Zea Mays
atcagcttactagggtgagtccttttctttttgtgagctacaccagttttctttagtagtaggattcaatatattttccatgtactaattatgttacaaaataatagcatatataacgcgtagatatatatccaatatatacagatgaagcctggaacggtggcactgctcattttgttgaacatgatgtgcatagttgcatactttgatcatggaagctttcctggaacgatggccgaagaaaccaccttgctggcaaattcgtatggaagaaatgaaggaaccaagggcatacatcgtggaagaaagctgatggacgccggtactgattcaaaccgtgggttttctatcagtgatatgcgtcacataatgagctcaggcaaccctcatccttagctccagctggttgcattccctaaagttcgtacatgtatagccttccactcatcatatgctgggtatccgacctatagacacatacggtatgttgcagatcgatcgccaggttctcagatcaagtcccttgtattgtatatgagtggaaacctatctaaataatgtgtgtggcttctaaaatatgtggtgttattgtactgagctatgctcaatactaaacaataaattattgaaatatgtcccgtgtgcgat

SEQ ID NO: 107712 - DNA, 353 bp, Zea Mays
gtggtctcctgcaatgttgtggacggtagtgcagcagacatgaggcatgcaacgcttccacgcaaaggtctaaaggaagacatcaagctcgccatcaatggagtgaattctccggttagcagtatatctggacaggcatctagcaactctgaaaccggcacagacaacgatatgtcaagcgctacagcctttacctcaaaggtgaccactacccaaggtagccaccgtggctacgagatccacgggttccaaggcagtaagatcagccccccatgatgatcgagtgattcatattagggcaatcaaatcatcagttattaatgaacaataggtatctataagggaaccaacta

SEQ ID NO: 107713 - DNA, 323 bp, Zea Mays
tcccccactgttagcatgagggtagaagctatgcgcacgacatcgcagatatggaagaccttgagtaacatatactctcggaagggaaatgtgatgatgatgatggaaatccagagcaaggcagatgccgtgaaacagatggggaaaccagtggaacaatatgctagtgagcttcagtacttgtggggggaactagatcactatgctctcctccaaatatttgtccacaggatgcacaaagtgttcataagtgggtaaatgacagaagagtgacccacttcttgaagaatctggatcctgagtttgagagcaggagagctacc

SEQ ID NO: 107714 - DNA, 808 bp, Zea Mays
gtacaagtaccagatcaccccgaactcgacgaacggttgcggaggcgctgacatgtgggccgatatccagagcaccgaagagatcttctgcccggctggttaccactgtccgagcacaacaaggaaggacaactgcagcactgggcactattgtaggctcggttccaccgctcaagagaagtgcataataaagggctcctgcgatgagaacacggagaacgaaaacgtcaagatccttggagcttgcatagtgggtgctctgtgcctgctgctactggtcatatacaactgctcggacaagttcctcagcatccgcgagcggaggaaagcgaggtcgagggagaacgccatccagctggcccggcagcagctgaaggcgcaggaggggtggagggcggcgaaacagtttgcgaggaggcatgtgagcggcatgcagggccatctctcgcgcacgttctcgagacgggtgtcgtttcggcagccggtggacccgcacagctccagccgcagggtgcaggaggcgccgctgatgacgcaggagatgtcagactctgccgtgtttgcgtccgagagcaggagcgagatcacggaggtggtgatgccgtcggttgttgtcgacgtcagcgacggcggagaggtcgtcgtggtggacacgaaggaggacaagcctgcgcccaagggaaagcacaggtccacccatacacaggtgttcaagtacgcgtacggcgagatcgagaaggagaagttccagcagcagcaggagagcaggaacctgaccttcaccggggtggttgccatggccaaggat

SEQ ID NO: 107715 - DNA, 480 bp, Zea Mays
cgcgtgcagccatctctgcccctcgccgcgccgtctaggtgcatcacccatagtcgctcggtacaccgtcgtctccgtctccttccccgcgcactttcatccagcgcgcacccgtagccgatatccacgacgaatttgtcctccctctcgccaaattgtttgcctactacaggatttggagacaagagtgaccaagagaagcacctgcccctgcatgcacaagaaatcggaaccgatcggccaggatgcgccgacgaaccgcttcagcctcacgtggatcccaatccgcggtgtcggcgctcaggatgctctgcttctcgaaggaagaggttgacgcactggtggagcatatgaatggcgatatgcgcgtcagatttgttggtgttcctgtggcgctgaacaaggcatgcatgttcattgactgcatgagacatatcaaggtaatccgtaagtaggagttgaattgtttgttctctacca

SEQ ID NO: 107716 - DNA, 2633 bp, Zea Mays
atggctccgttcggcgacggcggctggggtggcgacggaggggaggcgctgctggggcgggacccgctgcgcagtggcagcgcgccgccgacgatggaggccggcgcggaggcagcggtggcggcggagagggtgtttggcagcgttggtggcggcgcctcgttcttctccggtatcgacgggcgcgggttgggcgcgaggatggacgaggaacattttggcaattctgcatctttatctgttagaccacatggccaacagtttaatggtacaggagacttggatgaacagcagtttggactgagcagagttcatagtggtggtgttatggcaaactactctgcatctgacatgggtcccctttggacagatatgaatccagacaatgttgactattgcagaaatatccagaatcgctccatgtcaaacattggaaagatgaatgcttatggcaatagggatcttagtgcttcctacatgtttgattctaatcttttagatgctttatctgggctgaggctgtctaatagtctagtaatggaccaatggaatcatggggaagggcaactagacgaaatactcgagtgtcaaagagatttctcaaaaattggtgatgaaaatcgatcacctttggttggtaatgtttttcgtgcatctaggtcggatgtgcatccactgccaatatatggacatggcatttcacagaggcagaccagtgcattagatggttccaatgtttcaaggttcagtcgccatcacataaagggtgttgatcacttatctttggctgctgaacgggtagctgcaatgcaatcaggcaacctgcgtagaggaaccaatctttctcgcaatgcgtatatgactaatatggtcaaccccatgagcaacagatactacagtaatacagacttggatttggttagtagtcgaagggcgttccttgatgatctacttgcacaacagtatctgcaggaggataatctgtcatatgatgatagtaggatctatcatggcgagcctcgtttttcctcttcaagaatgcaaagacctggatctcatttttatccaaattcgaggaacattctatcccatggtgatcggcaatcacggttcttctccctcaatagaaaggcaatgggtagaaatattggatcacaggtctatcatgacaatgcattagcaaactacctggatgtgccttctttggataatgcagatagaaatggagctgattcagtggagttaattgatgtagtgggccacgttaaggaagttagtatggatcaatatggaagccggtttattcaacaaaaacttgaaattgcatcaccggatgaccgggaaaaaatatttccagagatattatccaacgtcattgttctaacaactgatgtttttggcaattatgttatccagaagtttttcgagttcgccacagaaagtcagttaatccaattggcagatcaactcaaaggtcgaattttggaacttagcctccagatgtatggttgcagggtagttcagaaggttttggaggtagttggtatggatcaaaaggtcgacattgttcatgagctcaagaattatattctgaaatgtattggcgatcaaaatggtaaccatgtgattcagaaatgcattgagtgtgttcctgaagaccgcattccatttgttattgatcctatactttcacaaatccttgttctgtgtacccatcaatatggctgcagagttattcagagagttctggagcattgccatgatcctgtgactcaaagtgctattatgaatgaaattatgcagcagaccttccatttgacagatgataagtttgggaactatgttgttcaacatgtgttggaacacggaaagccagaagagcgttccgtcatcattcaaaagctgtctgggcaagtggtcaccttgagcaagcaaaagtttgcttctaatgtcattgagaaatgtttggaatttggaactcctgaagaacgtgatagccttattggggaaatcatttcttctggtcaaacatttcaggagctgatgaaggatcagtttggtaactatgttgtacagaaagtccttgagacatgtgacgacaaatacctagagatgatcctctcgagcatcaaattgcacttgaatgaactgaagaactacacgtacgggaagcacatcgtagcacgtgtggagaagctaatcgttacaggagagaatcgagcaaggatggcgtccatgagtggccagcatcagcagcagcaacctaacaactgtacagctgtagacgaacactagtcctgtgtatgcgttggcgtcaaatacggactgcacactaatcccttgttaggcattggcgtcagatacgacgagcaggtggtataagtgactccggaggaatctggtttttaatacatggtttatttaatagggtacttgcagataaccagggatttatgttacctgtatctaaccaggcgtggtgtttttcgggaactcaggttgttagatgagagcagctgtaaatccttctggccatgtacaagtttattacagtggataatagatgtacattgtgctggagcattagcttttggtagtaggtgagatcggtgctgtgtaatatgtttctgttc

SEQ ID NO: 107717 - DNA, 2168 bp, Zea Mays
ccgcgctctctgctcccatccccgcctcgtccgttaccataaatctagcttgggctctaatctaaccgagggaacaggtgggatatgaggaactcggtgtcggagcggagcttcctcatcgagagcgacgatgacgacgatgccgccgtggaggacgggaagcggcgcggccttggcggcggcggcggcggcgacgacgacgacgacgggtccgactcctcgtcgccgtgcgacagcccgcgggtggtggcggcgcggtgcagccagccgagttcgtacacgcagcaatggccgcagagctacaggcaatccattgacatgtacagcagtgtgcactctcccaacctgagcttcttgggcacgccatcactgagccggttgtccaactcgttcctcacaaactcattccgggggaagccacctgagatcatctccagcttaatcaagccattactgccgacaagcattgcttccgccagcgatgaccagcagcagcagcagcatgaggacgtccggaagagctcccattacctgccaccatcacgcaaggcgtcgtcgctgcagaggatccccgaggaccagagacctatggttgggggccatgaggtgggtccctaccggcagtgctcctatacccaaggggtcatgaacggagtgaatgtcttatgtggtgtggggatcctgtcaacaccttatgctgtcaagcagggtggctggcttggactggtgatactagcggtattgggtgcactggcttggtacactggcatacttctgcgccgttgcctggacagcaaggatgggctcgagacttaccctgacatcggacatgctgcctttggtactgctggccgtatcatcatctcgataatactgtatatggaactatatgcatgttgcattgagtatttgatcttagagagcgataacttatcaaagttgttcccaaatgcacacctaaccatgggtaacttgactctggattcacatatgctatttgccatcttgactgctcttgtcgtcatgcctaccacttggcttcgtgatctcagctgcctcagcttcatttcagctggtggagtcattgcatctatcgtcattgtctcctgcttgttctgggtgggacttgttgatcacgttggcacagtcgagagtgaagggacggcactgaaccttcctggaatccccattgccatcgggttgtatgggtattgctactcaggccatggagtgttcccaaacatctactcttctctgaagaaaagcaaccagttccctgctgttcttttcacctgtatcgctctgtctactgttctgttcgctgctgctgcaatcatgggatacattatgttcggtgaatctacagagtcccaattcacactgaacttacccccaaatcttgtggcttccaagattgcggtctggactacggtgacgaatccaataaccaaatatgcgctgaccatgactcctctagccctgagtttggaggaactgctacctccaaataagcagacatacccgaacataatgatgcttagatccgctctggtggtatcttcccttattattgctctgtccgttccattttttggacttgtcatgtcactggtcgggtcttttctcaccatgtttgtggcctatattctaccatgtgcctgctttttgtctatcctcaggagtaaagtgacctggtatcaggtagtactgtgtgtgttcatcattgtcgttggactttgctgtgttggtgttggcacgtactcttctctttctaagataatacaaaagtaccaatgaattgtgccctagaattatgtatgatgtgtccatgtgttttcgaatagccagttttcttttctgggatggtggcgctggtctggaagggggagggggatgtcattctttgtaaattttttgttggcatgagaggaagtggaggaatttgataaaatagggcaggttgtgttatcgaaggagtattttgtctgaaattgttctcgtgacggtaggtgctgctgggaacgaccttctgttgacgctgccattttcgtttgacccatattgtctcttgtcttattttctcgcatgctggtgggggtgggctatttgtttgatggagccatatatgaataatacaataagtttcgaatacaaaaaaatataacaaa

SEQ ID NO: 107718 - DNA, 2088 bp, Zea Mays
ccgcgctctctgctcccatccccgcctcgtccgttaccataaatctagcttgggctctaatctaaccgagggaacaggtgggatatgaggaactcggtgtcggagcggagcttcctcatcgagagcgacgatgacgacgatgccgccgtggaggacgggaagcggcgcggccttggcggcggcggcggcggcgacgacgacgacgacgggtccgactcctcgtcgccgtgcgacagcccgcgggtggtggcggcgcggtgcagccagccgagttcgtacacgcagcaatggccgcagagctacaggcaatccattgacatgtacagcagtgtgcactctcccaacctgagcttcttgggcacgccatcactgagccggttgtccaactcgttcctcacaaactcattccgggggaagccacctgagatcatctccagcttaatcaagccattactgccgacaagcattgcttccgccagcgatgaccagcagcagcagcagcatgaggacgtccggaagagctcccattacctgccaccatcacgcaaggcgtcgtcgctgcagaggatccccgaggaccagagacctatggttgggggccatgaggtgggtccctaccggcagtgctcctatacccaaggggtcatgaacggagtgaatgtcttatgtggtgtggggatcctgtcaacaccttatgctgtcaagcagggtggctggcttggactggtgatactagcggtattgggtgcactggcttggtacactggcatacttctgcgccgttgcctggacagcaaggatgggctcgagacttaccctgacatcggacatgctgcctttggtactgctggccgtatcatcatctcgataatactgtatatggaactatatgcatgttgcattgagtatttgatcttagagagcgataacttatcaaagttgttcccaaatgcacacctaaccatgggtaacttgactctggattcacatatgctatttgccatcttgactgctcttgtcgtcatgcctaccacttggcttcgtgatctcagctgcctcagcttcatttcagctggtggagtcattgcatctatcgtcattgtctcctgcttgttctgggtgggacttgttgatcacgttggcacagtcgagagtgaagggacggcactgaaccttcctggaatccccattgccatcgggttgtatgggtattgctactcaggccatggagtgttcccaaacatctactcttctctgaagaaaagcaaccagttccctgctgttcttttcacctgtatcgctctgtctactgttctgttcgctgctgctgcaatcatgggatacattatgttcggtgaatctacagagtcccaattcacactgaacttacccccaaatcttgtggcttccaagattgcggtctggactacggtgacgaatccaataaccaaatatgcgctgaccatgactcctctagccctgagtttggaggaactgctacctccaaataagcagacatacccgaacataatgatgcttagatccgctctggtggtatcttcccttattattgctctgtccgttccattttttgccttttcaggacttgtcatgtcactggtcgggtcttttctcaccatgtttgtggcctatattctaccatgtgcctgctttttgtctatcctcaggagtaaagtgacctggtatcaggtagtactgtgtgtgttcatcattgtcgttggactttgctgtgttggtgttggcacgtactcttctctttctaagataatacaaaagtaccaatgaattgtgccctagaattatgtatgatgtgtccatgtgttttcgaatagccagttttcttttctgggatggtggcgctggtctggaagggggagggggatgtcattctttgtaaattttttgttggcatgagaggaagtggaggaatttgataaaatagggcaggttgtgttatcgaaggagtattttgtctgaaattgttctcgtgacggtaggtgctgctgggaacgaccttctgttgacgctgccattttcgtttgacccatattgtctcttgtcttattt

SEQ ID NO: 107719 - DNA, 2055 bp, Zea Mays
ccgcgctctctgctcccatccccgcctcgtccgttaccataaatctagcttgggctctaatctaaccgagggaacaggtgggatatgaggaactcggtgtcggagcggagcttcctcatcgagagcgacgatgacgacgatgccgccgtggaggacgggaagcggcgcggccttggcggcggcggcggcggcgacgacgacgacgacgggtccgactcctcgtcgccgtgcgacagcccgcgggtggtggcggcgcggtgcagccagccgagttcgtacacgcagcaatggccgcagagctacaggcaatccattgacatgtacagcagtgtgcactctcccaacctgagcttcttgggcacgccatcactgagccggttgtccaactcgttcctcacaaactcattccgggggaagccacctgagatcatctccagcttaatcaagccattactgccgacaagcattgcttccgccagcgatgaccagcagcagcagcagcatgaggacgtccggaagagctcccattacctgccaccatcacgcaaggcgtcgtcgctgcagaggatccccgaggaccagagacctatggttgggggccatgaggtgggtccctaccggcagtgctcctatacccaaggggtcatgaacggagtgaatgtcttatgtggtgtggggatcctgtcaacaccttatgctgtcaagcagggtggctggcttggactggtgatactagcggtattgggtgcactggcttggtacactggcatacttctgcgccgttgcctggacagcaaggatgggctcgagacttaccctgacatcggacatgctgcctttggtactgctggccgtatcatcatctcggcatgttgcattgagtatttgatcttagagagcgataacttatcaaagttgttcccaaatgcacacctaaccatgggtaacttgactctggattcacatatgctatttgccatcttgactgctcttgtcgtcatgcctaccacttggcttcgtgatctcagctgcctcagcttcatttcagctggtggagtcattgcatctatcgtcattgtctcctgcttgttctgggtgggacttgttgatcacgttggcacagtcgagagtgaagggacggcactgaaccttcctggaatccccattgccatcgggttgtatgggtattgctactcaggccatggagtgttcccaaacatctactcttctctgaagaaaagcaaccagttccctgctgttcttttcacctgtatcgctctgtctactgttctgttcgctgctgctgcaatcatgggatacattatgttcggtgaatctacagagtcccaattcacactgaacttacccccaaatcttgtggcttccaagattgcggtctggactacggtgacgaatccaataaccaaatatgcgctgaccatgactcctctagccctgagtttggaggaactgctacctccaaataagcagacatacccgaacataatgatgcttagatccgctctggtggtatcttcccttattattgctctgtccgttccattttttggacttgtcatgtcactggtcgggtcttttctcaccatgtttgtggcctatattctaccatgtgcctgctttttgtctatcctcaggagtaaagtgacctggtatcaggtagtactgtgtgtgttcatcattgtcgttggactttgctgtgttggtgttggcacgtactcttctctttctaagataatacaaaagtaccaatgaattgtgccctagaattatgtatgatgtgtccatgtgttttcgaatagccagttttcttttctgggatggtggcgctggtctggaagggggagggggatgtcattctttgtaaattttttgttggcatgagaggaagtggaggaatttgataaaatagggcaggttgtgttatcgaaggagtattttgtctgaaattgttctcgtgacggtaggtgctgctgggaacgaccttctgttgacgctgccattttcgtttgacccatattgtctcttgtcttattt

SEQ ID NO: 107720 - DNA, 828 bp, Zea Mays
ccttaagcggccttcttcttcagccaaccgcgcaacttcctcgcgctccttccagccgcgttgagatcctcatggcgcgcccctccctgctctcagctcggcttctgcttctcctcccctccttgcgcgcctatctccctcatccattcgcggtgctgctctctctctggtgctcagctctccaccgcgccctgccctctgctcgctcctctctgccggcgcccaagccccatgctcgaccgtgctctcccctgcctatccgagttcactactccccatggccactgcagcggctccctgctcgacgctcattttcatgtgctcaatctcctgctcggctactcggtgcccatctccctggccatgccctgctctgttgctgcacgccggagttccagccatggtcgtcgagcttggtccctgctcctccctgcgcgcaccccggccctgctcggatcctcgccgtcgattccgcctgaactccctccaccctgctcgcatggccgcgccggctccctctagtcgaccgcacgcccagccagagtccctggctagctcgcgccctgctcggttttcaggtgcacgcgcggttcgtcggtcgccccgcgttcatcctcgacctcgtcgcacgccactctttggtctaggactagttgtcgtgcgtatgctactgggatgggtgacagttgttgccatcgtggtgtcgattttccctgtcgaccttgccgtcatccatggtcgcgacctcgtcaaatgtgttcgtcgcttggccctgtgtcgttaggctcgtcgaccgtgtccgctaccgcgtgcgcatgttcctaatgc

SEQ ID NO: 107721 - DNA, 95 bp, Zea Mays
ccgagtgtttttttggcactcggcaaaaaaagtatttgccgagtgtcacataaaaaaccctcggtaaaagaaaacactcgacaaagaagctcttt

SEQ ID NO: 107722 - DNA, 1430 bp, Zea Mays
gaagcagagcatagagctagcaatacatcgctagctcacttgatatacatattgcatctatcggcataaaaactgaatttaccatggcccacttgatctcttctgcaatcgcaggcgcgggcaacttggtcgctgatggaatcagtggtgtcactggcgtagcgtcgcaggttgtagaaggcgtagaggacactttaggcagtatcgtagaagcaatcgaccaaggagtcaaggatgaggaccaactggatttgcccaagtacgtgtgtttcaagggagataacggtctgtacctgagtgctcgaacggttgaaggccatccctacctgcagtttgcatcggaagacattggtgacccaagtgtgaggttcatcacctacaaccacaaggtgaacggcaaacgggtggtgcgcttcaagtcgaaccatctcggcaagttctggaggcggagccccaactggatctgggccgacaccgacgacaccagcaccaagaactccgacaccctgttcgaggtcatcaagatcgacgaggacggtgtgtacgcgctccggaacctcggcaacaaccacttctgccacaggctgacctacgacggcaaggagagctgcctgaatgccacaattccgaccatcaggaaggaggcgcacatcaagatcgaagaagccgtcctctcccggaagatctccaacatcgagtaccacctcaagggcgccaagatcttcgacaagaaggccaagaccctcatcactcgagaggcggtgaacggcaccagcacggacagcaagaccaccatcaccctcaagtatagcgtcatcaagggaaagctatgggattcgagcaagtccatgaaactgggggtcaccaccacaattgaagctggggttcctgtggtcttacccgcaaccattgaggtccagagcgagttcaactccacctacagctggggcgagtccatcatcgagaaagaagagtactccaacgcctacgaggtcgttgtgcctgcatactccgtcgtcacggtcagcgtactcgccacacagggcatctgccaagtccccttctcttatactcaggaggacgttttgactactggagagaggaaggttttcaagtttgatgacggcatcttccgtggtgtcaatagctttggtttcaagtccgaggtcacggaaaggaagctctccaaggacgacgactgagcgatatatcatccatagtctctcgataaacttcgatctgtgtgatttataaataagccatattaatgtaataatgctttaataagcagttcagtatatgtgtgtcgtcaaaatcacgtttttatactactactatgtgtgcatgcacactttatgtgtaatgctttacttgtaatttattgagaataaacagagagagtccttcaccacttgttatcaattacaata

SEQ ID NO: 107723 - DNA, 102 bp, Zea Mays
tcatgcataaaatatgtcatcaaacaaaaccaattgcaataccaaaattatataatttccaagtataacatccgtccaaaatttcatcgagcacaagtattt

SEQ ID NO: 107724 - DNA, 1433 bp, Zea Mays
gcgaagagcatagagctagcaatacatcgctagctcacttgatatacatattgcatcggcataaaaactgaatttatcatggcccacttgatctcttctgcaatcgcaggcgcgggcaacttagtcgctgatggaatcagtggtgtcactggcgtagcgtcgcaggttgtagaaggcgtagaggacactttaggcagtatcgtagaagcaattgaccaaggagtcaaggatgaggaccaactggacttgcccaagtacgtgtgtttcaagggagataacggtctgtaccttagtgctcggaaggttgaaggccatccctacctacaatttgcatcgggagacattggcgacccaagtgtgaggttcatcacctacaaccacaaggtgaacggcaaacgggtggtgcgcttcaagtccaaccatctcggcaagttctggcggcgaagccctaactggatctgggccgacaccgacgacaccagcaccaacaactccgacaccttgttcgagctcatcaagatcggcgaggatggcgtgtacgcgcttcggaacctcggcaacaactacttctgccaccggctgacctacgagggcaaggaggactgcctgaacgccatgattccgaccatcaggaaggaggcgtacctcaagattgaagaagccgtcctctcccggaagatctccaacatcgagtaccacctcaagggcgccaagattttcgacaagaaggctaagaccctcatcactcgagaggcggtgaacggcaccagcacggatagcaagaccaccatcaccctcaagtacagcgtcatcaagggcaagctatgggattccagcaagtccatgaagctgggggtcaccaccaccattgaagctggggttcctgtggtcttacccgcaaccattgaggtccagagcgagttcaactccacctacagctggggcgagtccatcatcgagaaagaagagtactccaacgcctacgaggtcgttgtgcctgcatactccgtcgtcacggtcagcgtgctcgctacacagggcatctgccaagtccccttctcttatactcaggaggacgttttgactaccggagagaggaaggttttcaagtttgatgacggcatcttccgtggtgttaatagcttcggtttcaagtccgaggtcacggaaaggaagctctccaaggatgacgactgagcgatatatcgtccatatagtctctcgatataaacttcgagcggtgtgatttataaataagccatattaatgtaataatgctttaataagcagttcatatgtgtgtcgaaaatacgttttaattttatactactactacgtgtgcatgcactcttcatgtgtaatgctttacttgtaatttattgcgaataaataaagagagtatgtctccaccacttgttatcaattataataaa

SEQ ID NO: 107725 - DNA, 538 bp, Zea Mays
tccgcggccgccaccattctcttcccctcgcgcaccgctcctgtccaccttgccaccgccgcccaaccgcctagccgcagcaactgtcaccgtcgctatggcccatatcaaggtgcacgagctccgggggaagagcaagacggacctccaggcgcagctcaaggagctgaagtctgagctctccctcctccgcgtagccaaggtcactagcgacgcgcccaacaagctctccaagatcaagctggtgcgcacctctatctcgcgcgtgctcacaatgatcttgcagaagcagaagtcggcattgcgggaggcgtacaagaagaagaacctgctccccctcgacctccgccctaagaagacccgtgccatccgccgccgtctgaccaagcaccaggatactcctacgactaccatcgccgtctgaccaagaaccttgtctagtctgctgtgaactaagtttagtgttgtccacttagtttgtatgctcactggaatactagttgtattcatctacggaatatggaattgtctgctcatt

SEQ ID NO: 107726 - DNA, 1214 bp, Zea Mays
actcagaacctctccttttttctcacaaaattcctaccaaatcaagggtaggcttctgctttcgctccatccccattccccatccctccaacacgattgcttttgcttccccacctagctaggcttagctaagctatatagccagccaatcaaacggcggcctctcatcactaggctgcaaccatcgctcatcagccatccaagcacctcctcttcctctcgagtctcctccccctgccctctaggcgaacgcgcggtggcgccatggacattaggctgctggtatccgccgacgccaacctcgccgccgctctgtcgcgctcccgctcttccaagtccgcgttccagcgccaggttgtcccgagcagccgggcgtcgtcgtgcaggtccgtccgcgcgcgctccgccgcagccgccgcgccggctgcgggaggcatctccgggcatagcaattacacggttggtgacttcatgacaagaagggacaatctccatgttgtccaacctactacaccagttgaccaagccctggagctgctggtgcaacacaggatctctggcttccctgtggttgacgatgactggaacttggttggggttgtatcagattatgatctcctagctttggattcgatgtcaggaaatgaattggccgatacaagtacaaacatgtttcctgatgtggatagcacatggaagacattccacgagctacagaggatattaagcaaaactaatgggaaggtcattggtgatgtaatgacctcttcacctttagcggtgcgtataaatactaatcttgatgctgctacaaggttgctacttgaaactaaataccggagactacctgtagttgatagcatggggaaattagttgggatgattacaaggggaaatgtcgtcagtgctgccctcaaaataaagaagaaaactgaagaaggtgcttgaactagactgctcgtcactgcttgcttggggttaatcatgcagccatttggcattgaattcattgaagcattgattggtgatgttcaaagtgtagctacagaattttgttctcaatactaggtagcatactagtgtagcagtgtgtaggttcatattcactgtttttcatcgtatccatgaacatttttattgatttgcataatggaatcaagagcttgtgatacgataaaaaccttgaattgatggaaacgatgacttgccctaaa

SEQ ID NO: 107727 - DNA, 1121 bp, Zea Mays
actcagaacctctccttttttctcacaaaattcctaccaaatcaagggtaggcttctgctttcgctccatccccattccccatccctccaacacgattgcttttgcttccccacctagctaggcttagctaagctatatagccagccaatcaaacggcggcctctcatcactaggctgcaaccatcgctcatcagccatccaagcacctcctcttcctctcgagtctcctccccctgccctctaggcgaacgcgcggtggcgccatggacattaggctgctggtatccgccgacgccaacctcgccgccgctctgtcgcgctcccgctcttccaagtccgcgttccagcgccaggttgtcccgagcagccgggcgtcgtcgtgcaggtccgtccgcgcgcgctccgccgcagccgccgcgccggctgcgggaggcatctccgggcatagcaattacacggttggtgacttcatgacaagaagggacaatctccatgttgtccaacctactacaccagttgaccaagccctggagctgctggtgcaacacaggatctctggcttccctgtggttgacgatgactggaacttggttggggttgtatcagattatgatctcctagctttggattcgatgtcaggaaatgaattggccgatacaagtacaaacatgtttcctgatgtggatagcacatggaagacattccacgagctacagaggatattaagcaaaactaatgggaaggtcattggtgatgtaatgacctcttcacctttagcggttgggatgattacaaggggaaatgtcgtcagtgctgccctcaaaataaagaagaaaactgaagaaggtgcttgaactagactgctcgtcactgcttgcttggggttaatcatgcagccatttggcattgaattcattgaagcattgattggtgatgttcaaagtgtagctacagaattttgttctcaatactaggtagcatactagtgtagcagtgtgtaggttcatattcactgtttttcatcgtatccatgaacatttttattgatttgcataatggaatcaagagcttgtgatacgataaaaaccttgaattgatggaaacgatgacttgccctaaa

SEQ ID NO: 107728 - DNA, 587 bp, Zea Mays
gattactaatgctcctccgacaacaagcgacaaaatccttacggctattaacgcctcttcgaaaaagtgaaaaaacccctagtaacgcttcactttaaaatcaaacgactaaaaccatttatggttgttgatgctcctccgacagcaagcgacaaaatccttacgactatcgctccttcgatagcaagtgacaaaatccttacgattattaacacgtcttcgaaaaaacaaaaaaactactaacgattcactttaaaatcaaacggctcaaaccttttattatggtcctccgacaacaagcggaaaaatctttactgttattaacgtctcttcaaaaaaacaagaaaccctactaacatttcattttaaagtcaaacagctaaaaccatttatagttactaacgctctccgacaccaaacgacaaaatccttacgacaattaacacctcttcggaaaagaaaaaatagccctactgatgtttcactataaaatcgaacgactaaaaactcttatggttactaatgctccttcgacaacaagcgacaaaatcgttacgactattaacacatctttgaaaaagaaaaaa

SEQ ID NO: 107729 - DNA, 653 bp, Zea Mays
gcttactgtcacgcttctggttttgcttcctgctgagttttcattttgggggaattttttggggactgtttgatcagcttggagggtggagattagggattttttgagctattgcgggttgagaaatgcgagcatcgggtagcagatgggctcattcggctaattcggctgccgcgacaatggagtgcgcgatgggacaaacagtggtgggcccatccgtgatccggcaaagcagtggttgcacgactgagaacagagctgaggatggggttaggctcgacgccgccatccgtgcactcgaggtggaggccagggatgccaagatgaggctggttgtgaccgcccagctcccacgaagaacccggaggatgttggggttttgccgtggtggcttgctggatttgccgcatctccgtcttgctagatgtgccgcctctccatcttgctggatctgccgcctctccgtctcgttctcttcatctgccggtaattcctttgtgtgtgtgtatgctacatatatattctttagtaaatccagactatacaagtccaacatgttgcctaagtccctttgaagcaataagaaatgccttgcaagaaaaatatttgaattccctcccactgattacttagcaagaactcgtcttggagta

SEQ ID NO: 107730 - DNA, 3685 bp, Zea Mays
atggaggccccaccctccgccctcccgtggtggctcgccaccactgcctgctccgcgccgccgacgcccgccgcgtcctccgtcgccggccgcctcgccttcctcttcctctccccctgcctgcagcgcgcgctgctcgccgcgatcgacctcctattcctcgtcgttgcgctcgccgtcatcctacgcgcccgcctcgcccggagcaacgatggcctgagcctcggcctcgaccaccgcgagcgggagcccctcctcgccaagccggccaccacggaccaggcgccgcctcccctccgccgtagctggagcttccagcacggcctagcgctcgcgacttccgcggtccaagcggcggccgcccttgtgcttctacttctcctcgcgttgctgcgccgcagcgggaggaccacggggctgcttgcggcggagtgcgcgttcctcgccgcgcacgccgtcgcgcacctcgcggccgcatgggttgtcgcggtggagaagaacacggcagggacgtcacccgcgcgactccacccactccacctcaggttcttctggctcgccacggccgctttcgccgcgctctacgccgggtgcgcggctgcgcggtacgccgccgccgagccgctcgtccccgatgacccgcttgcgttcgcgtggctggctctctcgctcccgctactctatttctcggccaccggctccaccggcctcgtcgtcgattccaatggtggtggtcgtgccgccgccgccacggaggagacgtacgccacggcgtcgtggttctcgctagccacgttcggatggatcaacccgctcatcgccaagggctccagagcgacgctcgcggccgaccaagtcccgcccgtggcgccgcccgacaccgccgaggcggcgtacgtgctcttcacctccaactggcccgcgccggcgccaggttcgtccaaggctcagcgcccggtgctcaccgcgctgctgcgctccttctggccgcagttccttctcaccgccgtgctcggcgtcgcgcacctctcggtcatgtacatcggcccgtcgcttgtggaccggttcgtcgaattcgtgcgacgcggcggggagttcacggaggggctgcagctcgtcgctgtcctcctcgttggcaaggcggccgagacgctggcgtcgcaccactacgagttccagggccagaagctgggcatgcgcatcaacgccgcgctgctcgccgctgtgtaccggaagtctctgcggctgtccacgggcgcgcgccgggcgcacggcgccggtgcgatcgtgaactacatggaggtggacgcccaagaggtggctgacgtcacgcaccagctccacaacctttggctcatgccactggagatcgccgtcgctcttgcccttctctacacccacctcggccccgccgtgctcactgcggtcgctgctatcgccgtggtcaccgtggtcgtggcctttgccaacaagctcaacatcgagtaccagttcaagttcctcgccaagcgcgacgagcgcatgaaggccatcaccgagctgcttaactacatcggcgtcatcaagctgcaggcgtgggaggagacgttcgggaacaagatccgcaagctccgggaagaagagctcgggtggctagccaagtccatgtacttcatgtgtgctaacaccgtcgtgctctggagcggccctctcgccatgaccgtgcttgtgttcggcacgtgcgtgttgactggcatccagctcgatgccgggaaggtcttcacggcgaccgcattcttccgaatgctggacggacctatgcagagcttccccgaggcgatcgctgctgtgacgcaggcaaccgtgtctgttggcaggcttgatagataccttcttgatgcagagcttgatgactcggcagtggagcaggtggacggcaccggcattgacactagcgcggtggtcgtggaggtgtgtgacggtgtttttgcgtgggacatgaggggaaacaagcagaggaaagaaagtgaggatggtgaaagcgaggaggagaaagatgtggaggggacaccggtactggagacggtgctgaaggggatcaatgttgaggtaaggaagggtgaacttgtggcagtggttgggatggtaggatctggcaagtcatcactgctttcttgcatcatgggggagatggagaagatctccggcacggttagagtatgtgggagcactgcatatgtttcacagactgcttggatccaaaatgggaccattcaagagaatatcttatttggacagccgatgtatgctgaaagatataaagaagtcattcattcttgctgcctggaaaaagattttgaaatgatggaatttggagaccagactgaaataggagagcgaggaatcaatctcagtggtgggcagaaacagcgtattcagctcgccagagcagtctaccaacattgtgatatatatcttcttgatgatgtctttagtgctgttgatgcacacactggttcaaatatctttaaggagtgtctaagggggacacttaaggggaagaccgtcatacttgttacacaccaaatggatttcttgcacaatgtggaaaacatatttgtcatgagagatggtatgattgcacaatcaggaaagtatgatgaattaatagaagcagattctgattttgccgatcttgttgctgctcatgacagttcaatggaactggtggagcaacgttgtcaagtagagaaacctgaacattttcagcctactacagtagttagaatcccttctctacgctctagatccattggaaagggtgagaaggtggttgttgcaccagaaatagaagcagccacttctaagattataaaagaagaggaaagggagagtggtcaagtaagttggcgagtgtacaagctgtatatgacagaggcctggggctggtggggagttatgggcatggtttcctttgcagtcgtgtggcagtgctctgatatggctagtgactattggctatcatatgaaacgtcaggcggcattcaatttaacccatcgttgttcattggagtgtatgtggccatagctgctttttcaatggtccttcaagtaatcaagactcttcttgagacagttttgggtcttcaaacagctcagatatttttcgagaagatgtttgacagcattctgcatgcccctatgtcatttttcgataccactccttcaggaaggattctcagtcgggcatcgtctgaccaaacgaccattgatgttgtgctggcatttttcattggtctgacaatttcaatgtacatttcagtattgagcaccattattgtcacttgtcaggttgcctggccatcagttgtagctgtaattccacttctattattgaacatttggtacaggaatctctatcttgcaacctcacgggagttaactcgacttgaaggagtgacaaaggcaccggttattgatcacttgtctgaaactgttcttggtgtcacaactataagatgtttcaaaaaggagaaagaatttttccatgagaatttagacaaaattaattcaagtttgcgcatgtacttccacaactatgccgcaaatgaatggcttggtttccgactggagctaattggaacacttctattgtcaataactgcatttctcatgatcagcctgcccagtaattttatcaagaaag

SEQ ID NO: 107731 - DNA, 1351 bp, Zea Mays
caacggtgcacgacctcacctcttctgccatggcgctctcccaaccccttgttgccgctccctccatggccgctctccccctgctcgacgtacttgcatctacaggagctcgcctagccccactctctagccagctcgaaccgacgtcgggctctggctgtcaatcgtgtcaccagggctgtcctcttccgctgccactcgttggaccttgcccctgctgtgccgccggcagcccccctcgccctctcctccctagcgttcgtccttgtctcccatgaccgagctcgtcctggcactagacctctccacctctgtggcaccagcgccctcaagtcctatgccaatgcccccatctccttccccatgccaagtcccatggctgctgtcctccaaccccatgctatgacgcgccctgcaggtgttcgatggaatggccgtaaggagctttgtgttgtgtgtagccccatttgcgacaccgtcgacccctgatgaggttctgttctcgccctatcgttttagagcttgacctcgattactaatgtgtgaattgtgtgtatgtgtgtgttgatgaggagtgaaatccctgtggttggatgttagtgtgggaagtctggttacgtcgctcaccaggtgctcggcgaagggcatgaaccagggatcatcgctgtgtctatggtagccgagtcaaaaatttcgttatggtgaactgatttgtttcttgcgctatccgttggaaaaattggttagacattgtaggggtgttatttatcttgtcaatagcaggtgtgttgtgggtcgacctccaaatgcttttaccggtatattgctctatggcggcattagggaagaatctttcctcttgtttactttgttgtatgatgatatttggatgaatggcacttggatggatatgtagttgcatagtgtgattaagttgactcttcatttgcgtgatgtgagagataggtttataacactagattaagagaagtgaatgtattcgtggttatgaagccgcgtttcttgcattgatgtgattgtgataatttgtatgaagtgattgtgtcatgtgaagcttaagtttaaaatgattattatgataggagtacttaggtgaatatatcggcgaagcatgagcgaatagacgttatgtttgtaaactacaatttattagcaatgtaatttatgatactcatattgtcttcttaaccacctatgtttaacatttaaacactataggccttttgcttataaaagtagagttaatagtgctatacaatgtctagtaatactctacttattaaatcagaggtagtgactttcctgtctagttaatatatggctagaccta

SEQ ID NO: 107732 - DNA, 1071 bp, Zea Mays
cctcacacacgtattcttttctctcagttattgttccagcagccgttcgcccaaatccattgccgctcctgccccaacgacgcacgccctcacctcttctgccatggcgctctcccaaccccttgttgccgctccctccacggccgctctccccctgctcggcgtacttgcatctgcaggagcccgcccagcccctctctctggcgagcttgacccggcgtcgggccctggctgtcagctgtgtcaccagggttgtcctcctccgctgccactcgttggaccttgcccctgctgcgccgctggtagctcccctcgccctctcctccctggcgctcgtcctcgtctcccatgaacaagctcgtcctggcactagccctctccagctttgtgacactagcgccctcaagtcctatgccaacgcccccatcccctcccatctccttccccacgctaagtcccatggctgctgtcctccagccccatgctgtgacgcgccctgcaggtgttcgatggaatggccgtaaggagctttgtgttgtgtgcagcccctctgcgacactatcgacccccgatgaggtcctgttctcgccctgtcattttagcgctcgacctcgattactaatgtgtgaattgtgtgtatgtgtgtgttgatgaggagtgaaatccctgtggttggatgttagtctgggaagtctggttaggtcgctcaccaggtgctcggcgaagggcgtgaaccagggatcatcgctgtgtctatggttgccgagtcaaaaaaattgttatggtgagctgatttgtttcttgcgctatctgttggataaattggttagacatagtagggggagttatttctcttgtaaatagcaggcgtgttgtgggtcgacctccaaatccttgttaccggtttattgctctatggcggcattagggaagactctttcctcttgtttactttgttgtatgatgatattaggatgaatggcgcttggatggatatgtagttgcatagtgtgattagagttaggtttataacactagattacgcgaggtgaatgtatttgtggttatgaa

SEQ ID NO: 107733 - DNA, 284 bp, Zea Mays
attcgccgccaagtattcatcaagttagctgccaaacaaattttttatgtatctacaagagcctattttcacggcccagaatctgcgtcatataagttagcagctttaccgctgcactcccgcctttgaaaccttgtcataagttagttgtcataggttagtactccaataaaaataatatatatatatatatatatatatatatatatatatatatatatatatataatatatataataccgttatgcagcctttgaaacgttgtaagcatacagaattgcac

SEQ ID NO: 107734 - DNA, 1596 bp, Zea Mays
cttggagccaggaaagaaaggaagaaaaggcaggacagacaactccatcaaccaaaaaaaacacagcaaaccatggggtgcacaaccacgagcgccacctcgtcttcctcctctgctgccagcggcggcggtgcacacgtgctgctcccgccgtaccctggcgcgcagggccacacaaacccgctgctccagttcggccgccgcctcgcctaccacggcttccgccccacgcttgtcacctcccggtacgtactctccaccacgccgcccccaggggaacccttcagggtggcagccatctccgacggcttcgacggcggcggcgcggccgcgtgccccgacatcgctgagtactatcgccagctcgaggccgtgggttcggagacgctggcggagctgatccagacggaggccgccgagggccggcccgtgcgcgtggtggtttacgacccgcacctgccgtgggcgcgctgggtggcgcaggcggccggggtggcggcggcggcgttcctgtcgcaaccgtgctccgtcgacgtcatctacggggaggtgtgggcggggcggctgccgctgccgctgccggtggtggacgggaaggagctgttcgcgcgcgggctgctggatgtcgacctcgggcgcgacgacgtgccgccgttcgcggccaggccagactggtgccccgtgttccttcgggcgacggtgcggcagttcgaggggctggaggacgccgacgacgtgctcgtaaactcattccgcgacatcgaacccaaggaggcagattatatgtccctaacatggcgcgcgaagacaataggcccaacgttgccatcattgtaccttgacgatgaccgcttgccgttgaacaaggcctacgggttcaacctcttcagcagcagcgactcatgtctgccttggcttgacaagcagcgtccgcgttctgtagtcctggtatcctatggaactgtttcagattacgacgaaacgcagctagaagagcttggcaacgggctgtacagttctggcaaaccattcatttgggttgtgaggtcgaatgaagaacacaagctgtccgatgagcttcgcgacaagtgcaaggagcgcggccttgttgtctcttggtgcccacagctcgaagttctagcacataaagctacaggttgtttctacacgcactgtggatggaactcgacactggaagcgattgttaatggcgtgccaatggtggcagtaccacactgggctgaccagccgaccatatcgaaatacatggagagcgtgtgggccttgggtgtcaaggtgcgcaaggatgagaacggcttggtgacgagagacgaggtggagaggtgcatcaaggatgtcatggatggggatagaaaagatgagtacaggatgaatgccactgtgtggatgaaaaaggccaaggaagctgcacagtacggagggagctcggacaagaatattgttgaactagttatgtgcccgtgcgttgcgacggcatacaaattattcgatacaaagttagtgtataataattacatgaaaacaatcaatatatattataaacaactacaaacttatctattggcacgaacatta

SEQ ID NO: 107735 - DNA, 672 bp, Zea Mays
atggcgtccacagttggatggcacacggttctgccaactctggatgcgcccatccccgccctgactgtcgcgccgcaaatcgcggccgccgtcttctctccccctgcgtggtggacagtcatccccttccaatcctcgtcccttgcctgcccacctgctggtgtccctttcttctccccgtgtggcggctcgtacccggtggcggacgtggactgcgcggcgtggagcaacaaccctgacctgctctgctacgcctgtgcctcatgcaaggccggcgtgctgggcggcctgcgcgaacagtggcgcagggccactgtcgcgctcatcttcgtctacgtcgtcggctgcagccgttccgtaacgcgcagaccgaggaccccttccgccgctacaaatggggaaattattaacgatctctcccactgatctactgcgtacgtacgtacacgccgacttggatcgggtgagttgcgctttctgtttccgactgtctttttttattttgcgaaatcgatctattcccggtgctcttggcacagtggttagtgctgtagaatgtggacaacagctagtatgctagatgttaattctataggagcttatttatgtatctattctatctctatttgctatatctgaagcttcggtaacatagattgttccatgagacat

SEQ ID NO: 107736 - DNA, 137 bp, Zea Mays
ccggtggcggacgcggactgcacggcatggagcaacgaccctggcctgctctgctacgcctgcgcctcatgcaaggccagcgtgctgggcggcctgcgcgagcagtggcgcagggccaccgtcgcgctcatcttcgt

SEQ ID NO: 107737 - DNA, 1538 bp, Zea Mays
tcactattgcttggttatctattgttattactataccttgaatcacacagctcttttattatattgctgttgaacccctgtgggtggtcgttgtcactggtgcagcaaagcgtacgtctcaattctcatgcagaagagttctaaacaatttgggcggaacttgacgggtacgcacaccacacaggtaaattaattaattaattaggtacgtcgtcgtacaagcaccgtatatatactactacattaacgcgtgccatcaactatatataatacccctcatacaacccggttccagccatcaaaccaaagcagagtcgtcaacaacagcaggaaacataactgaaagagctagcactacctgatcgagcaccatgggcatccccaaggctttgcttcttgccatcctcggctgcggcgtctgcttgtgcagcgctgctgtccttgcagctcgcgagctggggggcgacgacgagctggccatggtggcgaggcacgagcagtggatggtccagcacgggcgcgtctacaaggatgaaaccgacaaggcacaccggttcctagtgttcaaggccaacgtcaagttcatcgagtcgttcaacgctgccgccgccgccggcaaccgcaagttctggctgggtgtgaaccagttcgccgacctcaccaacgacgaattcagagcaaccaagaccaacaagggatttaacccaaatgtggtgaaggttcccacgggattccggtaccagaatcttagcatcgatgcacttccgcaaaccgtggactggaggaccaagggtgctgtcacgcccatcaaggaccaaggccagtgcggctgctgttgggcgttctcagcggtggctgccacggagggcatcgtcaagataagcaccggcaagctaacctcactctcggagcaagaactagtggactgtgacgtccacggtgaggaccagggctgcaacggcggcgagatggacgacgccttcaagttcatcatcaagaacggtggccttaccaccgagtcgaactacccttacaccgcgcaagacggccagtgcaagtccggatccaacggcgccgcaaccatcaaggggtacgaggatgtgcctgccaacgacgaggccgccctcatgaaggcggtagctagccagccagtctctgtggcggtggacggcggcgacatgacatttcagttctactctggaggcgtgatgacgggatcttgcggcactgacctcgaccatggtattgcagctattggttatggaaagaccagtgatggcaccaagtactggctgatgaagaactcgtggggcacaacttggggagagaatggatttctgagaatggagaaggatattgctgacaagaaggggatgtgtggccttgccatgcaaccatcctaccctactgcgtaggctaagcttcgaatgatatcgcttccgtacattaatacttgtggtctgtatattgtgtcatattgtgtcatatgaatatatatgtgttctgtatattgtgtcatatggatatatattatatgt

SEQ ID NO: 107738 - DNA, 504 bp, Zea Mays
gtgcctgtcgagcgacttgcggatctcctgtgtgagcatacgcacatgccagctcgcctcttctttcattttcatcatccccacctcccggtccagctcacgtgccttgttcaccaggaagttttccctgaccttcaccctcaggagctgcggtatcagtgtcagcagcgtgatggctgtggcgaaggagactagtgccgtcatgaacttggcgacggtgagggcgagcacgaggtggaaggagtgcgggtcgtaggtgaacacggtgatgaggtgcgtgaggccgcagagcacgatgaaggcgccgaactgcagcacgatccatttgagggggaaaaggtcggagcaggtggcgaagtagagcagctcgagcgggatggagaagtaggccgcggcgatgaggaagtcgctgaccttctggcattgcaggatgttgtaggtgctcgagagggcgccgtcgtcggcgtcgtcgcagccgcagtggccgaaatcgacggacgccgc

SEQ ID NO: 107739 - DNA, 104 bp, Zea Mays
cccaattcttgtacattctacaactccaattatttaggtattacagatatactggcccaaggctcaatagaattaatagagtatccataccaataaggtgcatc

SEQ ID NO: 107740 - DNA, 1594 bp, Zea Mays
caccgggcccgggccgggccgggccgggcggcccgtttggccatctctagttcagtatctggaggaccggcgttcagtttctgggggaccacgctcgctagatccaggtgctgctcgtccgcccatcaatcagccgctatataactccacgcgagcaagccgagaagaccacaaacaaaccgcaaagcaagcacacgagaaaaaaaaaatcacaatgagctcatgggttaccaagtcgctgccttttctcgtggctccggcagtggcctcgcccactgccgccctccagctcacctccatggacagagctctggtttccctgcccgtgtcagcgatgttcgtctacgagaaccccatcgatcgtccggccgagaccattagaagagctctgtcccgtgcgcttgttccctactacccaatggccggccgcctcgccgtcactggggaccagctgaagctcgcgtgcaccggcgagggcgtagcgttcgtcggtgcgtcggcgagctgcaccctgcaggacgccaggctctgcgaccggcgtcccgtggtcagtgtcgaggacctcagtatcagctatgccggccagtacagcgaggaccctccacttctgctggtgcaggtgaccgagttttcctgtggcggcttcgttgtcggggtgacgtggaaccacgtcctcacggacggcgccggcatggcgcagttcttgaaggccgtcggcgagtttgcccgaggttccccttccccttccgtcttgccgatgagggtggacgacaccctctctgaactccccccgccaataaccaccatgactaaggcactcgtcagcagcaagcccagagacatgccgtcctcctacatcacagttcccctgagcttcgtcgaccgcatcaagggcgagttccgtcgtcgcagctacggcagcggcagcggccaggtgtcgacgtgcactgcgttcgacgtgttcaccgccgccatatggaagtgccgtgcccgcgcgacgatcggcagcgccgccagcccggacgcccccacggcgctcgccttcacggtgaacgtgaggaagccggccaaggccaaggacggctactacggcaacgtcttcgccttcggcctcgctgcctcgacgctgcgcgaggtcgcggacggcgacatcctggaccttgtgacgctggtcagggacgccaaggcacgggtcccgttcacgttcgctgacggagccgcgcacatcgccgacgagatgggcggtcggctcaagggcctcgacggctacgacaccctgtacgtcacgagctggtggaacctcggcttggacgacgttgacttcggcagcggcggcgctgagcgcgtcatcgggtgcatggagcgcaaggtggtgccgggctgcttcctgtgcgggaaaaaggacaaggccgagggcgtcgccgccatggcgctctgcgtcaagcaggagcacgctgaggctttccatgcggagctacgaagcctcaagtgacgcggagaccttacatgtttgtccgtgtttcaattttaataagagcactttaaactcgtgcgttacaataaaaatatataatactacgataatttatatgtc

SEQ ID NO: 107741 - DNA, 877 bp, Zea Mays
gccgctcccatggatggcgcccaagccttcttccccagcgcagggagctcggcccccttcctccctctctctgctgtacatggcgcccctgctccttcctcgcgcagggcagcagcacctccattccccgcggattcatggcgctcggcagcagggtgtctccatggtcggcccagcaacctcgctggtcgagctccccagcgtttccccctgctatccacagcgtgggcgagctccctccctctccttgcccatggcgtcccttccctccagcgcctccctttgccccctgtgctcggcgcccctgcagcagcacgcgcgcatgagcagggccttcatgggcgcgagtccctctgctcctccatgggctcgacccccctgcacctctccttagctccccatggcgcccagaaaatagcagctcggctcctctgctcttcttccccgtggtcgcgattctgcgcagagctgcgagcaggagcatgccatggccggatctgccccctccatggacgccccttgctgttccctgcgcctagctctctctatccagcgcgccccattttcttccatggaaaaccaacagcgagcccccttcctcgctgttcgttgtggtgcccgccggctgttcgtcaaaatgcgcagcaagccgcgcgctgccggctcgctgtttcgtgaagcccagtggacagcacgccgtcgacgcccgccgtgtgctcgctgttttgcgcagcccatctgcgacgccgtcgaaaaccgtgctagtggtcgacgtcgtgccttgcccgttcgacgaaataccgagccatgtggacagccatgcgtctagtcacgacccattcaggttgattgatttatagtttacaatacgtatgtt

SEQ ID NO: 107742 - DNA, 98 bp, Zea Mays
cccaagtatgtaccagtagcttcatatgcatcagtgctgactgctgaagaacattcagacatctatggattcagccattcaggccgattgctacgctt

SEQ ID NO: 107743 - DNA, 1510 bp, Zea Mays
gagagatcagagagggagagatatggagcggggagggaaatgagagggaggaggttaggaggattacttggtggtggtggtggtcccactccaatggatgtaagtacaactgttcaggagatatctaacactgatgttactgttttggaaggacacagttcagaggtttttgcttgtgcgtggagtccaactagttctcttctagcttctggatcaggagactcaactgctagaatctggacaattccatatggtccatgtggttccgacatgcaaccatattctcctggtgttcatgttttgaaacattttaaaggtcggaccaatgaaaagagcaaggatgtcaccacgcttgactggaatggtgaaggtacactactcgctacgggctcctacgatggacaggcaagaatatggagtagagatggagacctgaagcagacactgttcaaacataagggacccatattttcattgaaatggaataagaaaggagattttctcctaagtggaagtgttgataaaactgctattgtttgggatacaaagacatgggaatgcaagcagcagtttgaatttcattcagctccaacactagatgttgattggagaaataataactcctttgcaacatgttcaaccgataacatgatctatgtttgcaagattggggaacagcgtccaattaaagcattcagtggtcatcagagtgaagttaatgctataaagtgggatccgactggttcttttttggcttcatgttctgatgattggacagcaaagatatggagtatgaaacaagacaaatgtatatttgatttcaaggagcataccaaggaaatatacactattcggtggagcccaacaggcccaggaacaaacaatcctaatcagcagttgcttttggctagcgcatcttttgattcaaccatcaagctttgggaagttgagcagggacgccttctgtacagcttgtccggtcataggcaaccagtgtattctgttgcatttagccctgacggcgagtacttagcgagtgggtccctggatcagtgcctacacatctggtctgtgaaagaaggcagggtcctgaagacctacagaggtactgggggcatattcgaagtgtgctggaacatagaaggcaccaagattgctgcctgtttctccaacaacaccgtctgcgtcatggatttccggatgtagcccaaccagtaggggtagcgacgtagtgcagatcaagcctaaaacaagtctggatcacaagcccttcccatggaaacgtgtgaagagagcggaattgttagcagaatgcagatcttaggtggtggtttttttttttgcccatgtacagttcttttttcctaggttatactgtagcgatgcgttagtagcatggaaatgttttggtggcaatcctcctaatttctgaatgcaatcttaccatatttaaactcttaagtattccatcgttttatatagtcgagaaatacaaatttccattattgac

SEQ ID NO: 107744 - DNA, 2136 bp, Zea Mays
aaacgcaacaacacgactcactttagagagcggtaatgttgagggagacaaatctctctccaccatcgcaccgcgccgtcctcgccctcgccgctgcgcccctcccgcgtcttccgcctgctccggcggcgctctcgcctgcgccgcctgctatggggctgctcacgtcggcggagctcaactacctcgtcttccgctacctccaggagtcaggttttattcatgctgcatttactctaggttatgaagctgggatccataagtgtggcattgatggtaatgcagtcccacctggtgctcttatcactattgtgcagaaaggcctccaatacattgaactggaagcaagtagcgatgagaattatgatgaagttgagagggattttgcgcttttggagccacttgaaatcatcacaaaagatgttgaagagttgcaacagattgtgaaaaggaggaaaattgagagatctcaaactgaacttgagaaggataagggaaaagagaaagaacgtaacgaggagcatgaacgacgtccttgtggcgaaagggagagggaacaacatgaaaaagaaaaagagcaagtcagggacaaggacaaatctgaaaaagatagggaccatgataaagagaaggagaaagagagagaaaggcagcatgcagagcgtactgataaggttaaacacgaggatgattctcttgttggtgcaggtcccactccaatggatgtaagtacaactgttcaggagatatctaacactgatgttactgttttggaaggacacagttcagaggtttttgcttgtgcgtggagtccaactagttctcttctagcttctggatcaggagactcaactgctagaatctggacaattccatatggtccatgtggttccgacatgcaaccatattctcctggtgttcatgttttgaaacattttaaaggtcggaccaatgaaaagagcaaggatgtcaccacgcttgactggaatggtgaaggtacactactcgctacgggctcctacgatggacaggcaagaatatggagtagagatggagacctgaagcagacactgttcaaacataagggacccatattttcattgaaatggaataagaaaggagattttctcctaagtggaagtgttgataaaactgctattgtttgggatacaaagacatgggaatgcaagcagcagtttgaatttcattcagctccaacactagatgttgattggagaaataataactcctttgcaacatgttcaaccgataacatgatctatgtttgcaagattggggaacagcgtccaattaaagcattcagtggtcatcagagtgaagttaatgctataaagtgggatccgactggttcttttttggcttcatgttctgatgattggacagcaaagatatggagtatgaaacaagacaaatgtatatttgatttcaaggagcataccaaggaaatatacactattcggtggagcccaacaggcccaggaacaaacaatcctaatcagcagttgcttttggctagcgcatcttttgattcaaccatcaagctttgggaagttgagcagggacgccttctgtacagcttgtccggtcataggcaaccagtgtattctgttgcatttagccctgacggcgagtacttagcgagtgggtccctggatcagtgcctacacatctggtctgtgaaagaaggcagggtcctgaagacctacagaggtactgggggcatattcgaagtgtgctggaacatagaaggcaccaagattgctgcctgtttctccaacaacaccgtctgcgtcatggatttccggatgtagcccaaccagtaggggtagcgacgtagtgcagatcaagcctaaaacaagtctggatcacaagcccttcccatggaaacgtgtgaagagagcggaattgttagcagaatgcagatcttaggtggtggtttttttttttgcccatgtacagttcttttttcctaggttatactgtagcgatgcgttagtagcatggaaatgttttggtggcaatcctcctaatttctgaatgcaatcttaccatatttaaactcttaagtattccatcgttttatatagtcgagaaatacaaatttccattattgac

SEQ ID NO: 107745 - DNA, 591 bp, Zea Mays
attacagcatgtgacttcgatctgaattttatatttatttcatgtgggtgggaaggctcagccttagatgcaggggtccttcgatccgctatcagtaaagggttctgtgtgccagaaggaaaattttatcttgtggatggtgggtatgcaaatacatcatcctttattgccccataccgaggagttaggtatcacctcagcgagtttagaaggcgtcgttcatcacaagctagttatatgaactacaaagagctattcaaccatcgtcatgccattcttcgcaaccacatcgaaagagccattggtgttctgaagaaaaggtttccaattctcaaagtaggcacatttcatcctatccaaaatcaaatcaagatagcagcagtagctgttgattttcacaacataattaaagggcaaaacggtgatgaaggttggcttgaccaccaaccagatcatatatctccaagccagtatgttgaagtcccagagggagacaacaactaccccaatgatatggactcaagtgatggaagcaacctgagagatcagattgctctccaaatgtgggttgcctataatagttagtttagg

SEQ ID NO: 107746 - DNA, 1290 bp, Zea Mays
ggtttagaaagttagctaggtttcactgctcgtgcctcgagcaccacggcggcggcggcagcgggactgttctggccgacgacggcatcgatgacgacgaggttcgtctccctctgcgaccgctcgtagcccgtgatgtaggggtcgtagcaccacgactgctcgtagcccgctgcggacccggccagctcggtgcctgtcaggcggagggacacctcggcgccccggagcagctccatgtgctcctcgcgagggtatccctccacgtactccttgaggatcacccaccggttcgtcgccgccgtgcgtttcttccggggcagccattgccccatcccttgagcaaggtgtgtgcaccgctcaatagaggcggcttgggccccttgcgtctttgttgggaatggctttgcagaatggactgcctcgagggtctgggttgctttgcccaccgctcaggaggccatgctcaagacatcggtctcatttgtggtcgacggtggctccagatcttgcttgggcgctgatgagcttctgtttctagcttgcttgctgcttcttgcttcataattattatctatttcattatctatttattatatatttcatgattagccgcatcgcatgattagccgcatcacattgttttttcttgttgcttcttttagtttttgctacttcttttagtcattttacctcccctggccctggcgagttgcacagccttcaacgggccaagcgcaggcactggcgtcgcaccaaacttggattctgagcggtggaagaaatggtggctaacgacgcctcgggggtatagggctctgcaagctaggaagctcttgtttatttttttcttgtgttatttgtcattgtattaccatgttttgtctgatggttaaagaaccgcctttatgctatggtgaatttatttaaccttgcagcgccttaatcagttgatctctagccaattatataatctgcctagattatataatccatttgccatagattcatttgcaggagtgttaaaacagctcgttgttttgggatttgccgcctcaagtttcatctagctacctccaacaaacccttcaatctccatggctacatcgatatcaactcaatatactaacgaggaggaaattaaaaggaagagaaagaagcgaaagagagttgttgtattagcctagtgtacaataaagaccaagcaaatggagagggtgctaaaacagcagctgaaagttcaaaggaaatgggaaaagagaatgatatcggaggcaaggatgctccata

SEQ ID NO: 107747 - DNA, 759 bp, Zea Mays
gttcatcatgccagatatatatttttcctgaaatgtcttatttctcatgttaggtcttatattttgtatggagaggaatactttcgttgattgctttttttgttctacctgagatgcactgtctcttgttagcaacacatcaatcatagaggaggttatttgttcttaggaaaaccgtttgcgccaagagatagaagacctggagaaagatacagggtacaaactgcgagttcttgcacaaaattatcctgatacacctggattggctatcaaagatttttggcaggttgatgagcgtactattgtttttgttgctgatccaacctttggtaacataataaattttaacattggtccattagttgatttagacgtccctcggagcttttggagtcaggtttcagggaagtatgggaacatgttctactggaaagaaaagggagaggacgcctcaatcgaagctgctgtgacggcaatatctcgatgtctaaggaaccccgccgggacaaataactgttcggaggtattatagaaagtgatgagttatgccgcacaaaggaacatggaaatgacagatgcatgtgtacagaagtgaaatactagaacaacatagaggctaaagatgtctcatggtctccagagaactaaggcttcactctttgaaatcgagagcttttatctggtcgtgaatatggatagttttacaatgtgactggattttaaaatgtctaaataagagagaaatttgagatcttcaaa

SEQ ID NO: 107748 - DNA, 1125 bp, Zea Mays
atcgcaagaaaaaggaaatcaaaacaaagtaaagtggggggaaaagcatggcgatagctcttctcccatccgttcgtcttcttccacaaagtctctccagaaggccaccaccaacctcgtcgccattatccgttcgccgcccacggccaagagcccttcccctccctcgcgtccactgccgcgccggccggaccccggaccccctcaccgctgctagggaggctgctgccttttgggctgggaagctcgccggcgctgtgccatggaaggccgcggtctccggcgtggtcgccctcgccgtctccttcacctgccttgttggtttggccaatgccagaactggggtaaacaaaccagaattgcttcctaaagaatttactaccgtcatcgatgttgctggttttctctcgtcaggccaggtcttatattttgtatggagaggaatactttcgttgattgctttttttgttctacctgagatgcactgtctcttgttagcaacacatcaatcatagaggaggttatttgttcttaggaaaaccgtttgcgccaagagatagaagacctggagaaagatacagggtacaaactgcgagttcttgcacaaaattatcctgatacacctggattggctatcaaagatttttggcaggttgatgagcgtactattgtttttgttgctgatccaacctttggtaacataataaattttaacattggtccattagttgatttagacgtccctcggagcttttggagtcaggtttcagggaagtatgggaacatgttctactggaaagaaaagggagaggacgcctcaatcgaagctgctgtgacggcaatatctcgatgtctaaggaaccccgccgggacaaataactgttcggaggtattatagaaagtgatgagttatgccgcacaaaggaacatggaaatgacagatgcatgtgtacagaagtgaaatactagaacaacatagaggctaaagatgtctcatggtctccagagaactaaggcttcactctttgaaatcgagagcttttatctggtcgtgaatatggatagttttacaatgtgactggattttaaaatgtctaaataagagagaaatttgagatcttcaaa

SEQ ID NO: 107749 - DNA, 1016 bp, Zea Mays
atctcccatcgcaagaaaaaggaaatcaaaacaaagtaaagtggggggaaaagcatggcgatagctcttctcccatccgttcgtcttcttccacaaagtctctccagaaggccaccaccaacctcgtcgccattatccgttcgccgcccacggccaagagcccttcccctccctcgcgtccactgccgcgccggccggaccccggaccccctcaccgctgctagggaggctgctgccttttgggctgggaagctcgccggcgctgtgccatggaaggccgcggtctccggcgtggtcgccctcgccgtctccttcacctgccttgttggtttggccaatgccagaactggggtaaacaaaccagaattgcttcctaaagaatttactaccgtcatcgatgttgctggttttctctcgtcaggccaggaaaaccgtttgcgccaagagatagaagacctggagaaagatacagggtacaaactgcgagttcttgcacaaaattatcctgatacacctggattggctatcaaagatttttggcaggttgatgagcgtactattgtttttgttgctgatccaacctttggtaacataataaattttaacattggtccattagttgatttagacgtccctcggagcttttggagtcaggtttcagggaagtatgggaacatgttctactggaaagaaaagggagaggacgcctcaatcgaagctgctgtgacggcaatatctcgatgtctaaggaaccccgccgggacaaataactgttcggaggtattatagaaagtgatgagttatgccgcacaaaggaacatggaaatgacagatgcatgtgtacagaagtgaaatactagaacaacatagaggctaaagatgtctcatggtctccagagaactaaggcttcactctttgaaatcgagagcttttatctggtcgtgaatatggatagttttacaatgtgactggattttaaaatgtctaaataagagagaaatttgagatcttcaaa

SEQ ID NO: 107750 - DNA, 914 bp, Zea Mays
atctcccatcgcaagaaaaaggaaatcaaaacaaagtaaagtggggggaaaagcatggcgatagctcttctcccatccgttcgtcttcttccacaaagtctctccagaaggccaccaccaacctcgtcgccattatccgttcgccgcccacggccaagagcccttcccctccctcgcgtccactgccgcgccggccggaccccggaccccctcaccgctgctagggaggctgctgccttttgggctgggaagctcgccggcgctgtgccatggaaggccgcggtctccggcgtggtcgccctcgccgtctccttcacctgccttgttggtttggccaatgccagaactggggtaaacaaaccagaattgcttcctaaagaatttactaccgtcatcgatgttgctggttttctctcgtcaggccaggaaaaccgtttgcgccaagagatagaagacctggagaaagatacagggtacaaactgcgagttcttgcacaaaattatcctgatacacctgttgatttagacgtccctcggagcttttggagtcaggtttcagggaagtatgggaacatgttctactggaaagaaaagggagaggacgcctcaatcgaagctgctgtgacggcaatatctcgatgtctaaggaaccccgccgggacaaataactgttcggaggtattatagaaagtgatgagttatgccgcacaaaggaacatggaaatgacagatgcatgtgtacagaagtgaaatactagaacaacatagaggctaaagatgtctcatggtctccagagaactaaggcttcactctttgaaatcgagagcttttatctggtcgtgaatatggatagttttacaatgtgactggattttaaaatgtctaaataagagagaaatttgagatcttcaaa

SEQ ID NO: 107751 - DNA, 2965 bp, Zea Mays
gatctgacacccctcccacccaaccttgcttcgctcccgcgcctcccagatccgatcttcccatgcctcacttccgctgatcccactgccgccgcggaccgccgcgatggcgtcgcgcccgcctctccgcaccacctccgtcgcctccgtctcatcctccaccgagtcccccacctccaccggcccccccggcggcgtcccgcagtccatcaccgcgctcctcaacaacccgctcccctccgccgccgcctcctcgtactcctggttgtcctggccgcctcccaccatcacgctacccgatgcggctccaccaccgccgtcgcatccctgcgaggtcactcgcgccgacttcgcgccctaccttgccgctgtctccgaccccttcgcgcgcttcgccgacatccgcctccacgccagcgccgagctcgccgccgcctctgacgccgagggcgccccagcggtctcctctggcctcgccgcctgcctccgcgaggtgcccgcgctcttcttcaaggaggacttcgcgctcgaggacgggcccaccttccaggtcgcctgcccgctcgatgatgaagcgctgcaggagcgcctcggacagcaccttgacgtcgttgaagcccaccttgtgcgggagatagcgctccggtccgagtccttctacgaagcgcagggccggctgcgcgggcttgatggggagatagtcacgactgtagggaggatccgcgagctcagagaggtggtccgggttctcacgggggacctcgtcggggcagcgaggcaggtgcaagagctcaatgctacccgaggcaaccttgtgacgctgcagcagaagctaactgtcatcctgtatgtcagccaggcgcttaccgcgctcaagctgcttgtcgcagcagcagattgtgctggtgccctcgatgtcattgataacttgcaaaatctgctagatactgatgaacttgctgggctttattgcttttggcatattcgagatcagctgggaacatcactagattcagtgaacagcattctttcagcagaatttgtgcatgctgctgttcctgatggaaaagctgtagatgttatgattttatcaactgtgaaaagaaaggcttccagcccattgaatgggacggaccatgagggtaatgtagatgaggaggaaagttttattctcagggatcgactcctccccctcattatttgcctactgaggacggacaaacttcctgctgttctcagaatttaccgggatacacttataactgttatgaaagcttcaatcaaaaccacagtaggagagttactcccagttttaactgccagaccaatagattctgactcagtaactggagacagagctaccgatgctgatgctggaggccagtccttagcaaataagttgcggagtctttcatctgaaggatttgttcaacttttatctgccattttcaggatagtacaggtacatttacagcaagcagctgaagtgaaaagaatagttgagtgggtcatgggaaaccttgatggaacgttaggtgttgatgctagtaatcctacgttacaacatggtggtacagttattcctgatacccaagaaaatgactcttcaagaggctctaatactcttacacggagtacttccaagatcccatttgtccaaggaaaaacaaatgatttttccattataaattcgttaaagaatgttcgggctgatgtcttgagagagaacactgaagcagttttcgcggcttgtgatgctgcccatggacggtgggctaagctgctaggtgttcgttctgctttacatcccaggttaaggcttcaagaattcttgatcatctacaacataacagaagaatttatagctgctacagaaaagattggaggcaggttgggttacaacattcgtggaatcctacatcaacaatcgaagcaattcgttgattatcagcataatgttcggatgacaaaaatcaaggcagttctagatcaagagacgtgggttgctgtggatgttcctgaagagtttcaagcaatcgttctttcactttcatccacttattcttctgttaatggcatggagatgcctagcactgatgataactcaaagtttagtgatcatcggtctacaagtcaagaaccgacatattcagctaaaaatattgctgataatggcaaagtaacatccgggactggtgaaaacaaggttgaattcacttcacagactgaaaataatgttgccgggaatctaaagtccaccttgcaaacgattgtacatggaggtgttggctatcatatggtaaactgtggtttaatactgttgaagatgttatccgaatacgttgacatcagtaaatgtttaccatcactatctttggaggtggtccaacgtgttgtggaaatattaaagcttttcaacactaggacttgccaacttgttctcggtgcaggagccatgcaggtgtctggacttaaatcaattacgtccaaacatttagctttggcgagtcaaatcattagttttatgcattctttaattccagatatcaggcgagtacttttcctgaaaatacctgaagcgcgcaaacatctgttaatgtctgagctggatagagtagctcaggactacaagatccatcgagatgaaattcacaacaaacttgtccagataatgagagagaggttgcttgcaaatcttagaaaattaccccaaattgtggaaggctggaatggcccagaggataatgacgtgcagccgagtcaatttgctaaagctgttacaaaggaagttacctatttgcatcgcattctttcccaaacattgcttgaggttgaggtgcaaacaatattcaggcaagtggttcaaatattccattcacatattacagaagcattttcaaaattggaagtcaatactccctctggcaaagaataggtatgctgcttatttgtgcatcttttagca

SEQ ID NO: 107752 - DNA, 377 bp, Zea Mays
tgtaattaatggaacaagcttctaatgttctgtatttttagatgggtcgtaacaaaaaatcaacattgacccaaggttctacagcaggagaacttattcggtgatcttttggcccatctttgctcatactgacaaagtacgcatgctgctgttgtcaagggaagaggtgctggaagcaaggatcagagtgcttgaagtgtgtgaaaaaatgattactcgcatgcacgctagccgttggcgtaacacccagctgatggagagattttagtttgctagatgaatctttagactttgcatgtaatagaactgaaagatcacttcagaatttagaaaacatgtatgctattatttttatatgttcatcacacaaatcgtgt

SEQ ID NO: 107753 - DNA, 387 bp, Zea Mays
ttatattttagatcttttgtttagcattttttaatccacatgtatttctctatcatataaaactctatattgattctttaaaataatttatatgaatttgataatgtttgtcacaactcacacgaattctgtataccataatgaattgatggttgagagactatgcacgaggcatgcaaattaacaagactcatacaagcgtcgaacagtgtgctgatgatgatcaaagacacaagggcagcacatgatcaggtcttaacatgtttggcttctgaacaggcttttctccagatccccaaggtagaagaagatccggtcagatatatgtcgatgctcatcccaacgtacataagctatcaatggtattatatgttcccgttgcaacgc

SEQ ID NO: 107754 - DNA, 1427 bp, Zea Mays
aattcacaaccccaaggaaagggagaaagaaccgaggaagctccgactgcgccggtgggggaccgcgcaccccagcggcgccaggcgtccacgggatggtggttcttgtggctactgccgctcggtggcccgggggaagcacggctgcccgggcgcgcccgccggctgcgaggggcagggcccccctccgcgtcgccgccgagcccgagcacaaggcggccacggtcaggtttgaaaaatatagattgttatcatggatgaaaccaataaggcatgacgtcagggcccaaatgtccaatgtaaatgttggtgccggaagttatggaggagatgaagcaaatggccatggagaacatttggatacctctgctaccggagaccccaacaaattagcaaaacaactttcaggatctcgttacctgcaacccgttggtgtcgtgctatttctgtgtgccctggcaactagttttttcgttttctttaaaggacaatcatctgcagttgtagctatgctggcaaaatcaggtttcacggcggcatttacactgatttttgtatctgagattggagataagacgtttttcattgctgcactactcgcgatgcagtatcaaagagcactggttttacttgggtcaatggctgctctctccctgatgactattgtgagtgttataattggacggattttccagtctgtgccagcacagttccaaacaacgctacccataggagagtattctgcagttgctctgctggcattctttggtttcaagtcaataaaagatgcattagcacttcctgataatgccaacgggaaccttcaagggaattcagaaagtggagaactggctgaggccgaggagcttgtcaaggaaaaggtctctaaaaatctcaccagccctcttgaagtcctttggaagtccttcagtcttgttttctttgctgagtggggagatcgctctatgcttgctacaattgctttgggtgctgctcagtctcctttgggcgttgctagtggagccattgctggacacttgattgcaacagcctttgctattcttggaggagcattcctggccaactacttgtccgagaagctggttggcttgttaggaggagtattatttttgctctttgctgctgcaacgctttttggtgtattctaatctatctgaagaatttgctgttaggggaaagacctcgcagttccagtttggtcttagattttgaagatgaggggcaaacccaagtaggcttggcacatgctgtatgtagatagacgttatccttatcagagatgatttcgatgtgcccaaaattctaccagacagactggaaactgcatcacatggacagcttacagaagttaccattcaaataatttgattagatttgtttaataagaagttactgttttgtgctaa

SEQ ID NO: 107755 - DNA, 1534 bp, Zea Mays
aattcacaaccccaaggaaagggagaaagaaccgaggaaggtactgggcacttgggcaggctgctccgactggaccactgctatcctcagtgctctctctctcctactcctgtgattctcctcttcagctcttctcgcccattccagctccgactgcgccggtgggggaccgcgcaccccagcggcgccaggcgtccacgggatggtggttcttgtggctactgccgctcggtggcccgggggaagcacggctgcccgggcgcgcccgccggctgcgaggggcagggcccccctccgcgtcgccgccgagcccgagcacaaggcggccacggtcaggtttgaaaaatatagattgttatcatggatgaaaccaataaggcatgacgtcagggcccaaatgtccaatgtaaatgttggtgccggaagttatggaggagatgaagcaaatggccatggagaacatttggatacctctgctaccggagaccccaacaaattagcaaaacaactttcaggatctcgttacctgcaacccgttggtgtcgtgctatttctgtgtgccctggcaactagttttttcgttttctttaaaggacaatcatctgcagttgtagctatgctggcaaaatcaggtttcacggcggcatttacactgatttttgtatctgagattggagataagacgtttttcattgctgcactactcgcgatgcagtatcaaagagcactggttttacttgggtcaatggctgctctctccctgatgactattgtgagtgttataattggacggattttccagtctgtgccagcacagttccaaacaacgctacccataggagagtattctgcagttgctctgctggcattctttggtttcaagtcaataaaagatgcattagcacttcctgataatgccaacgggaaccttcaagggaattcagaaagtggagaactggctgaggccgaggagcttgtcaaggaaaaggtctctaaaaatctcaccagccctcttgaagtcctttggaagtccttcagtcttgttttctttgctgagtggggagatcgctctatgcttgctacaattgctttgggtgctgctcagtctcctttgggcgttgctagtggagccattgctggacacttgattgcaacagcctttgctattcttggaggagcattcctggccaactacttgtccgagaagctggttggcttgttaggaggagtattatttttgctctttgctgctgcaacgctttttggtgtattctaatctatctgaagaatttgctgttaggggaaagacctcgcagttccagtttggtcttagattttgaagatgaggggcaaacccaagtaggcttggcacatgctgtatgtagatagacgttatccttatcagagatgatttcgatgtgcccaaaattctaccagacagactggaaactgcatcacatggacagcttacagaagttaccattcaaataatttgattagatttgtttaataagaagttactgttttgtgctaa

SEQ ID NO: 107756 - DNA, 115 bp, Zea Mays
cacaattggttgtaacactttacgttacattaactggagtattcaggcattcggtcaaatttggattcaaaagtgagttaaattcaaagtattcaaaaaaattatagttgaactc

SEQ ID NO: 107757 - DNA, 496 bp, Zea Mays
gtacatgtgacattttctcatacatcatagacaatgaatactaagaagaatgttgttctctgctgccttcttttcgtactcgttctgcatgtagatcacgctctagccaagtgtggttatacaactcctattattccattctgcaaagcgtggatgtgcaaggcggagtgttggacggaggccaagttaactggaggcaaagtcacacaatacaagtgcatgagaggcgggatcaagggctggtgttactgcgaattctgcatttaattttgccaaggagaaggatcgccacgtcttttcttggtcttgccttggtcaacaacttgctgtaataatactagttaagtctctaagcagactaggctagattgagttgtttgttgttggtaggcattgctagcgtgtgcaattgttttcagaccttttattgttagttgaacaattatgttaatatctatcagtcagagattagtttttttgctcgttgacatatatt

SEQ ID NO: 107758 - DNA, 726 bp, Zea Mays
atacttgtgacagtttctcatacatcacagacaatgaataccaagaagaatgttgttctttgctgccttcttttcgtgctcgttctgcatgcagatcacgctctagccaagtgtggctatacaactcctttaattccattctgcaaagcgtggatgtgcaaggcggagtgttggacggaggctaagttaactggaggcaaagtcacgcaacagaagtgcatgagaggtgggatcaagggctggtgttactgcgaattctgcatttaattttgcaaaggagaaggatcaccatttctttgcttggtcttgccttggtcaataacttagtgtaataatgctagttaagtctctaggcagactaggctagatcgagttgtttgttgttggtagctaggcattgctagcgtctgctattgttttaagatattttattgttagttgaacaattatgtcaatgtccatctgtcagagattagtttctttgctcgttgatagatattattattatatcctcatttttttcatgtgacatgtgcattttagattgttgggcaacaataacgcaagagcaagaaactagagtaggaaatgtacctcgtagaaatactgcagccaatttatagatgcaggtagaataatctgcgcatggtacgtaccagacaacagtctccaagatagtttatatatgcccatgaagcatcccttctagacccgtgaaaaacaaaa

SEQ ID NO: 107759 - DNA, 956 bp, Zea Mays
tatgtgatgatactacggctcagcccaacgatttccttttgcaaaccctgctccaactccgattcgtcactccaccctcgtcgcgccgccgcctgccgcgtccccggccagcctcgcagccccgtggtctgctagcggctagccacagcggagagaccaggagccatggtgatccctccaccagcaagggcagctagagtcacccgtttcctcaagccctacctgttgaggatgcatttctcaaacaagtatgtatctgctcaggtcgtccacaccccaacagcaactgttgcatgttctgcaagctcgcaggagaagctgttgagaccaaacatggagtcgacccgcgacgtcgcagcagctgcaaagattggaaagttgctcggcgagcgcctgctcctcaagggaatacctgcagtgtccatccacatgaagagagaacaaaagtaccatgggaaagtgaaggccgttatagattcagtcagagaagctggagtcaaactgttgtgattgcgatgttgaaaacattggacttagcatttgtgcaatggctgagctgtaatttttaagtgtttatcaatgcaaaatggctggacgttgctgttctgaaattctgggccaattgttactcaggtcaataaaggactttgtttggacttgatgcattgtttcctttgtgtatttgcgtgcggcatggaccaggaatgttatacatatgaatatatcgctgttttcattttttaggcagtaatgaaagatagtgcaggagcatagccccctgttgctgctatgtttggagatgtcatattttgttatatgcaattgttactttacttaatgatgcttttgtcgagctaatggaccaatggtcatgctaaggccacaaatctagttttctgtatcgttggtacttgtgtgttaactattgtgattaccctagtatgttgtcagaatta

SEQ ID NO: 107760 - DNA, 662 bp, Zea Mays
gcaaaccctgctccaactccgattcgtcactccaccctcgtcgcgccgccgcctgccgcgtccccggccagcctcgcagccccgtggtctgctagcggctagccacagaatccgtgatgatgtgttacgaatttactgcttcgagactgcggagagaccaggagccatggtgatccctccaccagcaagggcagctagagtcacccgtttcctcaagccctacctgttgaggatgcatttctcaaacaagtatgtatctgctcaggtcgtccacaccccaacagcaactgttgcatgttctgcaagctcgcaggagaagctgttgagaccaaacatggagtcgacccgcgacgtcgcagcagctgcaaagattggaaagttgctcggcgagcgcctgctcctcaagggaatacctgcagtgtccatccacatgaagagagaacaaaagtaccatgggaaagtgaaggccgttatagattcagtcagagaagctggagtcaaactgttgtgattgcgatgttgaaaacattggacttagcatttgtgcaatggctgagctgtaatttttaagtgtttatcaatgcaaaatggctggacgttgctgttctgaaattctgggccaattgttactcaggtcaataaaggactttgtttggacttga

SEQ ID NO: 107761 - DNA, 1380 bp, Zea Mays
atgttggcaatatccatcttcaagtgacggacgcaatactgcaggaagtcttccaaagcattggtccagtagaagggtgcaagctcatcagaaaagaaaaggtggatctttctttattttaatttaaaaatgtctatagatagcttgtaacagataaatccataccccacctatccccaacacccactcgcccactcacctgtaaaattgtggctgccttttcagattgctctttgcatctgatttttggctttgctttccctgtatgtctcaagtctagttaccatttatggctttcgcacctgtaaacatttatggtttcttatgttgattcatactagcatctatgttaattttttaatgcacggccttaatgctacttttaggtgtatttatgatcaatcaccatgtattttacgctcttcagtttgtatgtcaaaaatgggtttttacactgatttatatgtgtgcctatgctgcaacacatacaattctaactaaatatgcataaagaatttgctgaatagcagcagcacgccaacacctcatattttattctcattgtttctacttcgttaattcattgacccatgtctctgtcttggtatattctggagacagacccccacgtccagagttacaagaagatcaagctttagcgatggctgctgctgtgttgcctcctcttgttggaccgaagagaagggaggggagaagcagctggcgtgcagacttctactcaggtggtcttttattctctatggggcttctaggatacatcttctccagaagcaccataagtcttgtcttgggcattacaccagggctagccactctgctacttggcactctcagtctgaagttctagaggagcgacagatctagcttcctgcttatcttggctcaggcagaggtgatgctgatgtgcaagcatcttcaccttgagttctgccttgccagaatgaatcaagtttattttcccatcctgctccatttgaggcaaattgaacagggatttgtttggcttccaaatggtttgttggtcctaaaatagtcagaatcacatgacatctgtgctatagatatggacctcggtggttttctccacattaggaaagctggaaaagccttttgaacttagttttttttgctaatagtggtgttatggtgaaacagagttttgtgtgtatgtaccaacagctaaaatgtaaacacgacattatcatagttgagtacaggaataattatctcttatatcttattgcaaaatctgaaacagttctcctgtagatggttagcttgcattttacgctacaattacctcagatcacttgttgtatcttacaccaatttacgaaatttcttgatgcgttttatgac

SEQ ID NO: 107762 - DNA, 1279 bp, Zea Mays
atgttggcaatatccatcttcaagtgacggacgcaatactgcaggaagtcttccaaagcattggtccagtagaagggtgcaagctcatcagaaaagaaaaggtggatctttctttattttaatttaaaaatgtctatagatagcttgtaacagataaatccataccccacctatccccaacacccactcgcccactcacctgtaaaattgtggctgccttttcagattgctctttgcatctgatttttggctttgctttccctgtatgtctcaagtctagttaccatttatggctttcgcacctgtaaacatttatggtttcttatgttgattcatactagcatctatgttaattttttaatgcacggccttaatgctacttttaggtgtatttatgatcaatcaccatgtattttacgctcttcagtttgtatgtcaaaaatgggtttttacactgatttatatgtgtgcctatgctgcaacacatacaattctaactaaatatgcataaagaatttgctgaatagcagcagcacgccaacacctcatattttattctcattgtttctacttcgttaattcattgacccatgtctctgtcttggtatattctggagacagacccccacgtccagagttacaagaagatcaagctttagcgatggctgctgctgtgttgcctcctcttgttggaccgaagagaagggaggggagaagcagctggcgtgcagacttctactcaggtggtcttttattctctatggggcttctaggatacatcttctccagaagcaccataagtcttgtcttgggcattacaccagggctagccactctgctacttggcactctcagtctgaagttctagaggagcgacagatctagcttcctgcttatcttggctcaggcagggatttgtttggcttccaaatggtttgttggtcctaaaatagtcagaatcacatgacatctgtgctatagatatggacctcggtggttttctccacattaggaaagctggaaaagccttttgaacttagttttttttgctaatagtggtgttatggtgaaacagagttttgtgtgtatgtaccaacagctaaaatgtaaacacgacattatcatagttgagtacaggaataattatctcttatatcttattgcaaaatctgaaacagttctcctgtagatggttagcttgcattttacgctacaattacctcagatcacttgttgtatcttacaccaatttacgaaatttcttgatgcgttttatgac

SEQ ID NO: 107763 - DNA, 1263 bp, Zea Mays
accgaactcgcagtcgcaacaggtcagccctcaccgcccccccggtcgtcccaggcatggccccagcgagagcgctgcccgcccctctggttgtccatggccgccgccgccagctacgtcgtcggagaaagtactgcaagttgtgctatctgaagggcagttccatggtccccactatccaagcccagggcgacgtcgggctgctggaccgccgctgcctcgccggctacgacttctcccgcggcgacgtcgttgttttcaggttgtcgacggatcatgggatgaagatggtccagaggatgatcgcgctgccaggggattggatccagatcccggagaagcgggacatccggcaggtccccagcggccactgttgggtggaaggggacaatgccggcaacagctgggactcgagacactatggccccgtaagggcattctccctaacaatcattcttagcagattttcgtcaatctgttcagtttctttcttaaacaagaactggtaactttcacagtttaattatcagcacaacaggtaataatgttattaggaaagacaaaatgtggtactaatcaaatatgtttgtagccatctgtacgtaggttcggtatatacgttctaactttgcaagcttcaggttcctctggacctgatggaagggaagatcacacacataatctggccaccccatagagtgcgtcgggtggacaggatggtgccggaaggcaggattatgcctctgtcagcgactccaaggaggaagcaacaatagtctcaatcgacggcgtcgaaggcgtcaacaattggaagaacttgatgggaagacaactcgagcgcgagaacaacatctaatggcgtgtttagtttgcaggttggactgcttccagagtcatccgaacctacgtccgagcctatattatcatttggtttgaatcgcggaacgatgtcgtccgtcactacgttgttctaataatatactaacacgtgggatcagctcactccgcaagaaagtgcaagaccacttcgtccggagccaggccacgatggatgagccaaaccatcaaaccaaacacgctgtaaatgtcaagtacagcgggccacaatgagctgggtaaccacgagtgggctgtgcgttgagaaagacgtgttgtgcaggcgctgaccggtcgtctatagtacttaagcaacaatcagaactttgtatcggcatcgaagaattaatgaatagaacaaaaacgctagttctcagccttgtcttc

SEQ ID NO: 107764 - DNA, 1060 bp, Zea Mays
aaaggcctaaaccgaactcgcagtcgcaacaggtcagccctcaccgcccccccggtcgtcccaggcatggccccagcgagagcgctgcccgcccctctggttgtccatggccgccgccgccagctacgtcgtcggagaaagtactgcaagttgtgctatctgaagggcagttccatggtccccactatccaagcccagggcgacgtcgggctgctggaccgccgctgcctcgccggctacgacttctcccgcggcgacgtcgttgttttcaggttgtcgacggatcatgggatgaagatggtccagaggatgatcgcgctgccaggggattggatccagatcccggagaagcgggacatccggcaggtccccagcggccactgttgggtggaaggggacaatgccggcaacagctgggactcgagacactatggccccgttcctctggacctgatggaagggaagatcacacacataatctggccaccccatagagtgcgtcgggtggacaggatggtgccggaaggcaggattatgcctctgtcagcgactccaaggaggaagcaacaatagtctcaatcgacggcgtcgaaggcgtcaacaattggaagaacttgatgggaagacaactcgagcgcgagaacaacatctaatggcgtgtttagtttgcaggttggactgcttccagagtcatccgaacctacgtccgagcctatattatcatttggtttgaatcgcggaacgatgtcgtccgtcactacgttgttctaataatatactaacacgtgggatcagctcactccgcaagaaagtgcaagaccacttcgtccggagccaggccacgatggatgagccaaaccatcaaaccaaacacgctgtaaatgtcaagtacagcgggccacaatgagctgggtaaccacgagtgggctgtgcgttgagaaagacgtgttgtgcaggcgctgaccggtcgtctatagtacttaagcaacaatcagaactttgtatcggcatcgaagaattaatgaatagaacaaaaacgctagttctcagccttgtcttc

SEQ ID NO: 107765 - DNA, 1440 bp, Zea Mays
aggatcttgattgcgttgcttcactatggaggagttaaggcagaatattttatggaacttctacataatgcaattgaaggggttaataatgctcgttatagtttcagacacgcgctgaagcttgcatatggatatgctaatatggaggattcaatgttagaacgcatgattcattctggaattccactagaagaaccatacttgctatctaggctgagttttatggccaaacaggaaatgaaagtattcagagaaggaaagctaccaattgatgaatgctattatttgatgggtacaacagatcctacaggaacgctgaaaccaaatgaagtttgtgtgatacttgacagcggacaatactctggagatgttcttgtgtttaaacatcctgggctacattttggcgatatacatatcttaactgcaaggcaaattgatggactagagaagaattttattggatattcaaaaaatgcaatactttttcctacttctggacaaagatcattggctgatgagatggccaatagtgattttgatggtgacgagttctgggtctcaagaaacaatatgttactaaagactttcgagaagcgaagtgagccatgggttgaactattaaaactgaaggagacccagcacaggcttagcaaacctggggatttaaatgaattgattctcgaaagagtgctatttaatgaatgcttgacgactatgtttatacccaattacacaaaaggtttagcgcctgactgttggttagcacatatggaccgattattaacagaaggagtcgatcaagatgagaagaagtcaatcgtggaaaacatgattaaattagttgacctttattatgcggctctggatgggcacaaggtagatgttgatcgccatctgagagtaaaagcatatccacacttcatggagaagaaaggatttgaatcctaccattcttcatctattttgggcagaatctacgatgagactgaggaaataatagcgcagcaatgtgacgaacagatccagataacgacactgccgtgcttcagtgaggtggaggcaaccccggaatgcacctccctatgggaacaccggtaccaggagtacttgacaaagagcaggggccttttcgatctgggcaaggaagaaaagaacgacgagttccagaaactctaccaacactacaaacatctgctatacgacgccgacgaactggaggagacctcgcgggacctctcagacgtgttcatggaggcctgcgcgatatacaggatcgtgtacgagcgagcatggtgtaccaggagcgtcagcaggtgccgtttcgtgtggaacgtggctggagcggcgctgtgccacctccacgcgaccaagtacgcggcgcagcgcggggagaaaaccgcgctctgcccgctctcagttatccgccagctttacatctga

SEQ ID NO: 107766 - DNA, 1032 bp, Zea Mays
atggacgccagagattgggtttatgagggtggacctcaccgagtacaaaagaactgcgccctgccaactgcccgaatgatgatgggcgtcagacttcttcgattatgcggcgacttgggccgtcctcgtaagtgtcgaggttggagcttggctggtggtcgacgatggcaacctcgtacgccacgaggctcgactgatgatcatcgtggtggaccacacagatcttggcgctgcgcttgcaaccacttgcacgcccgatgtcgacgagctatcacggatgttgtcggagtggacgaggcggggttcgctggtggccaaaatcacgtggattgggagccgaaggtccctgcgcgcgggggtagaagccaggtggtggcggtggcggttacacgcgccaagacatggctggccgttgcggtttacaaggatccaggaaaagagacgaaaaagaaagacagtgaacagggggatatcaagaaatgcacttcgcctgtaagatgctattttatttgcactaagtctgggtggaggggggatgaggcttatattccaattgacaagtgccgcaaactgttcatgcatatccatactgctcccaccattgcaaattatatgaaaaggtttcatttgatactttccaaaactctaacactggatgttgatttatcgacaattgacgttatactgattgatgatgaaccttgtcgggacgagcatgggaacattgttatgctagatgggaagcgtttgatccatactgatgggactggcttcatatctgaaaatttggctaagaaatgccctagcagaataatcaaaggaaagaagtcaaaagtttatatgcatcaaggtgaaacaacggtccgtcttttttataatggatatgctgtaaagggaactctgctagttgacaaaaggatctatctatctatcaacagagatccttacataatagagatcgatctatctgttaacggagatcctagccatataggcatgctatacagggattctaacaccccctcagtttga

SEQ ID NO: 107767 - DNA, 1560 bp, Zea Mays
atgcagcctcccggcccgcctctggcgacgccgcagccgctgccgccggcggtggcggcggagctcgcgcagcttgagtcgaggctgggccaggtcgccggagagcccgcgcgccacgagctcgcggagctaggcgaagtcgccgcggttcgcgtgctacgtaggatcgcgaggtctcaagagcaggtccggacgctcactggctacatcgtctcggctgcggtgcaggagacgttcgcgctcaatgcgcaggccgtccccaccgccgagagccgcgcctgcaactcctccgctccttccctaagtgatggatctgtacaagggccgcagtgcgccagtgaacttcgaatggaagaagtaactgcgggcctctcaaactatcgcatggcaatatgcgagggtcaaggtcaggaggatcatgcagtgatgatggcaattgacaacccacctgactgcatccccccctggggttgggaccaagattgcattgaagttgataaccttgtgccaggaattgcttctcaggcaaaccagatgcctatgcagtatggcgaccgcgaccgtatccaagaactagtttctattgtaccacatggtgttcgtatgctggctgaaagtcttgaaaatggcagagcatctgagttgcagaactatgtacaaaatggcattcccgaacagtggatggttccagcagatcaaagaatggaatccacctcgagccgcctgcaacatgttttaaaatgtcttcagggagttggaccctttggacaccatctcggtccggaatgtgcaataatgataccaaagcctgagccaaatgttgttgtcgaaaatttgttcagggagatagcaagccctcatatcacagacaacaaattgaggaatacagcgagccctcagatgtgtgcgttggaggatttagagttcagcaagagatttttgatactctcttatctttgtcggaataacctggaagatgaagttgtactgactgtggactatattaaatcgttgaagtttctgtccatggttcattttgagtcccaaatttggaggaaatttggtcagaagaattttcaggcatccaatagagctgcaacagatagggcaaagaatttcgattcagacccaactacaacaaaattataccattgcaatatcgagataagaggggagtccatattctttgttttgaaggggccatatatggagaataagaggacttatctacaaaaagttcttggtgatgataatgttcttctagtaaagtttatggtttcttcagacaagagcactgatttctaccgccaacattaccatagggttgttgaagatggtattgttttgggtctgcgacgatataattttttcggcttgttcggcggggacttggttggtaaatgggccagagagaggtttatgggccttgccttgggtaacccgttcctaggtacccgacaacagcccccgagcctttgtgcgactccttggagtcggtcagaggcttacttgccggggatcaaaagcccaagtgcgcgcaagcgcatcagtatgatgtag

SEQ ID NO: 107768 - DNA, 325 bp, Zea Mays
gtgaaatgtaataaaatgggatagatgaataatatatgagaacttatctctattgccttagcattctcagtatgtctctcgttacattagataaacttataaacataccttcggctcctgaacaatgggatgcacgaaggttcttcgaaggctaagcactatgaagttatggcccttgtaaaaggtatcttatgtaggacattgttcatctatttataggggagatgaaccgccttagtatagatttacaataattcccatcagtttttacataagtcgtttacaaatgacatcagaacagtaatgtattttctttgttctcagc

SEQ ID NO: 107769 - DNA, 728 bp, Zea Mays
aaaagctaaaccaaactcgcaagtcgcaacaggtcagccctcaccccccgtcgtcccaggcatggccccaacgagagcgctgcccgccctctggttgtccatggccgccgccgccagctatgtcgtcggagaaaagtactgcaggttgtgctatctgaagggcagttccatggtccccactatccaagcccagggcgacgtcgggctgctggaccgccgctgccttgccggctacgacttctcccacggcgacgtcgttgttttcaggtcagctgctgcgcgcagccggactctccttggcgtttcttcggttggatgggtcggccggcccgctgatgccatcccgttcgcatcgcaggttgtcgacggatcatgggatgaagatggtccagaggctgatcgcgctgccgggggattggattcagatcccggagaagcgggacatccggcaggtccccagcggccactgttgggtggaaggggacaatgccggcaacagctgggactcgagacactatggccccgtaagggcattctccctaacaatcattcttagcagattttcgtcaatctgttcagtttctttctttaacaagaactggtaagtttcacagtttaattatcagcacagcaggtaataatgttattaggaaagacaaaatgtggtactaatcaaatttgtttgtagccatctatacgtaggttcggtatatacgttctaactttgc

SEQ ID NO: 107770 - DNA, 177 bp, Zea Mays
tcatttaagtctagaattaaataaaggaatggaaataaatagtaatattaaagttagtaggatttatatccacattagaattatgtttggaaatggaagtctgaaattcaaacagaaagttgaatcaggtttgaatttgaaataggaattgaaagtttgaaagaaattaaaaataaa

SEQ ID NO: 107771 - DNA, 330 bp, Zea Mays
cagcttgttgtcctcgagggagtaggccgtgatgttgtcggggccagcgaggtgcagcagcaggaacggcgcccagaaggcgaccagccggtgctgccgcagcgtgctgctgagggagaggttgcccagggcgtacattgccgtgctgtccgccagctggtatgccagccagagaaggagcctcttggggctgcggccttgacgccggcgagtcccggagaagaagagcaggaccccctgctgcaggaggctcaggattaccaggatctccgttgcccatgcgttccagaagtccagcagccatccggcggcgactcttggctccaccac

SEQ ID NO: 107772 - DNA, 335 bp, Zea Mays
ttttgtttttgtgatcccgacccaagtatctagaaggcaaactagattttgatgtctacatattaaaattgttgatatcaaataaatcgtccatgagttgtcctagagtttccagtgtgaaggatatgaattgaatcagttttctatgtttttcagaatgatggacaaggtacaccatgacagtagaaatttatttacatcctggttatcttgttttaattcatcctttctgtgctccaattattttggtgaatcttagcatagaacttgaccttctattattttgtatgtttggtttgcatgggataatctggcatgggatatatttatgaaca

SEQ ID NO: 107773 - DNA, 291 bp, Zea Mays
gacggttctatttcggctttcttccatctcgggatagaatggaggaagggtaggagaggatggccatggccatggccctgctcgaccgagccaagggagtcgtgcgaaggtggggctgcgcgcgttgaggaagctcgctggagggcgagatctgcaggggctcaccggggaagagcagaggaggccggacgagcgagcgtggctagaaagctgagggcggacgtgcaaggagcagctctacagcgtggccccgagcgcagcggctgctcccaacctccatgccggaccgag

SEQ ID NO: 107774 - DNA, 940 bp, Zea Mays
cagcaactatatgttgattcattggttcgtatatggtatcttgttcagtggcaaaactgtaccatcataaatatggttgattcatttcaacaacaacaaaatcccaaacaagtttacctagtctagggttgaactcaacagaagacgcaagtcaagatttagtcacgtggataactgttttccatgtacttatgttcaaagccaaatctttggaaatatttcatcctttcgagccttctttcaccgtatgtttgcagtcatctaaggtgcccttgtccttttgagtcttatttaatctcgtggtaacaaaatagagattttggttgtattttctgatctggtgtatctctcccttattttgtacagttatatggtgagtcatgtcaaaggcacgtaatgctgtagttgccactggattgctgctcttcgctggtgctggcttatcatttccgttccttttcgtgaaatcaaagaacaagcctattattgattcgacaaaacctctgccaccacaggctacttttcgaggaccatacgtgaatacgggttcacgtgatatcggacctgatcctaccaactatcccaagaagtgatttgaatcttccatgacatttcggagtcccatttcactcgactccactgctgtgaaattgttcgttttggggccatcttactgtgcacgtgccttgatattgcaaaaaaataaaataaataacaatacctaaataaagggtggttattgaagctcctccattctccttgctcccaaacaaattccccttgcttccaaataaatcctagtgtaaagtttcccaatattgtatgggaatatctattttttacagatccatatatgattagttgaatttcatataggcgtattttgttttgtagataagactttattacaaaaaaagagttttaggcttgcgaaatttgg

SEQ ID NO: 107775 - DNA, 353 bp, Zea Mays
tcatcaccgctgcggccgtgcgtggaggcgtgaggccgatcaaatcggcggcgaatccccaaccctagcagcagtgggcggccggaccgggacgggcggtagacggctccagcacgcaacgctgacaggtttggccgtgcgaggcgcgagggctagacaggtgtcgcggcgccaggcatccagttccagggctgcgtgggctcgaccagagcgagtctgcaatccgcccgtccttgtccccgtcggcggccgttcaccagtgtcaggtgcggaggtgacaacatttctgaaagaagtaagcaagcactaggtataaaacttcagcgtcctgttaactcttgttttggtatcgt

SEQ ID NO: 107776 - DNA, 286 bp, Zea Mays
aggacctaaccagcaaaagcaagttccttattgcaaactacacaaccagttaggctattttcgttgtcttgatgttctagttcagctcctaaagtacttcagctcgtgtttccttaacatgtgtcacacagggtcggcatttttttccgtgccggtatgataagtgtgaatggcatagtaagtatctgtaatggcttctcccatgcctcagctaatctgtgcaaacagggagttgttttttgtatgcaaaaagatgattacactaaagaacagtgaccatttattt

SEQ ID NO: 107777 - DNA, 522 bp, Zea Mays
atggagcagggaactcgaccaggaaagggactcggaaccgggcgcggcggctggacacagggcgagccatggagatgggcgccgagctccatggatgcagggaggagggaggagctcacatgctggctggggatggaggaggagaaatccacgcgcgccatagaagggcttcgacagggacagggcgctgctgggaaatggagggagagaagcaagggggcagctaggctcttggccgaccggagttggaggaggaagccgtggcctgaacaccggcgagccaggcgcggccatggctggggaagaggaacagcaggcgatttggagcgcagcgtgcttgaagatggagcagaggaagcagtgcagaaaaggaacgcggggcgtagggagagagaaacgggcgtggaggagctgcgcgacgacgatgacgacgaccgacggcagccgcgaccagataaagctcccgcgcgcgtaagtgataaggaagaaggagacttagagcggtgggatttttcaggctga

SEQ ID NO: 107778 - DNA, 458 bp, Zea Mays
catgtacaacaatgtcaccgatcgtgccttcgcatgctttgacgcgtcgagctccttcccgttgtgactcacgtgccatctattcgtcaaaatggaatactaatgagcttctcctcgcgacgcagtttctctgtgtcgttgttcacgctagaagacaaaaggaaaaccgccaatgcaacgcttgtcaggtgttcggtgttatgcgcggaccagatagcataactgatatcacagcctcaagtcggatttaattatggtacgttaattaatcatgcgatgtggaggaccagagttgagtcgaccacaagacatcgttaagtgtgagcttctacgcaaagtgatactactgaaagaacttgaagactgggtgatcagataaaacaccaggatgtgagatgctcgtcaagtgaacgtctaacaaacactaacatagtgtttattctaggcaagccccagtg

SEQ ID NO: 107779 - DNA, 453 bp, Zea Mays
catgtacagcaacatcaccaatcgtgccttcgcatgcttggacgtgtcgagatccttccagttgtgactagcgcgccatctattcgtcaaaatggaatactaatgagcttcctcgcgacacagtttctctgtgtcgttgttcgcgccagaagacaaaaggaaaaccgccaatgcaatgctagttaggtgttcggtgttatgcgcggaccagatagcatcattgatatcacagcctcaagtcagatttaattatggtacgttaattaatcatgtgatgtggaggaccagagctgagtcgaccacaagacatcgttaagtgtgagcttcttcgcaaagtgatactactgaaagaacttgaagactgggtgatcggatcaagcaccaggatgtgaggtgctcgtcaagtggacgtctaacaaacactaacgtagtgtttattccaggcaagccctg

SEQ ID NO: 107780 - DNA, 429 bp, Zea Mays
atggatcaattgtggaagactgggcgcagccctagcaggagcagacgcactggcaccaaggtctactaccactacctccgcctacaatgtaatctgatttgttcttgccgacatcaccacccgatttatcttccaaccaatcaaccccgtctgagttgtttccttcattatgagaacaaatatcccatggcttatcatacgctgagacgctggagccactggacgcctcgacgtgatgtggctgagacgctgagggcgatatggctggaccgctggagcgcgcggcctggaactcgacgcctggacggcgcgcggcctggagcgcgtggcgtgtctggacgctggagcgcgcggcctagggagctggacgcctggacagcgcacggcctggagcgcgaggcgtggcgcggcctggagctcgacgcctag

SEQ ID NO: 107781 - DNA, 993 bp, Zea Mays
atgtgtgtcaaatcacaattgatccttaatataatatacgtatacatattcgcaaatgaaaactcggtctcgaaagttaccgcagcggaagccactgccaaggagattgaaagtcaggcggccgctcaagtattccgaggctgcacttggatatttagaaggggatgcatgctcatatccctagattcaaattctgcattagtgatttgtttggatattgaccgtaagcaccttctcatccagattgagccaaagggtgtgaactcatctcgctggaacaagagcacgcgtgctcatcctgtagttctattcccacgaatcagcagttggagaaatcttcggctggagttagagagggggtgcatgctcatatccctagattcaaattctgcattagtgatttgtttggatattgaccgtaagcaccttctcatccagattgagccaaagggtgtgaactcatctcggtccattgacatcgatcagcaatcggagaagcacaagagtatgtcaagagtgtcagcttcagtggagagagagcttgttcatgaacaacccactgacgacgatgcgtctgcgctggcgtatttggttcgacgtcggtgtccaaacacgtatctctttttttatggacatgcactggaggaccgtgttgttcggatgacttttatagctaagccgacctattccagtaggagaaaatacctcaatgacttgctagatgctgatcttgtgagcctgagtcgaggtgacaggaaaagatggcataacatgcgggctgctgctgaggctgctgctgaggcagctgctcaggctgcgaggctgctgctcaggctgagcctgctgaccatgcaggccatgaagactaaacctgatggtgctgccggttctgtctgtagtttagagctgcagtcgcttatctactttctactaattctagatcttgtgaacttaggacattgtgcttatcatgccgaatgtttggtgttctaa

SEQ ID NO: 107782 - DNA, 4477 bp, Zea Mays
atgttgctccacgccggtccctcgttcctgctcgcaccacctccgcgctttgccgccgctccgtcgtcagcttcgccgaggcgatccaggacaccgcaatcctcgccgccgacgtcgcatttcgcgcgccccgctgatcccgtggcccaaagggtgcgtcccgtcgcgccgaggccccccatggcgacggcggaggagggcgccagctctgacgtcggcgtcgccgtcgccgagtccgcacaggggttcttgttggatgcgagggcttactgggtgacaaaatccttgattgcatggaatatcagtgatcagaaaacttctctcttcttatatgcaagcagaaatgctacaatgtgcatgtcgagtcaggatatgaaaggttatgattccaaagttgagctgcaaccagaaaatgatggacttccatccagtgtgacccagaaattcccttttatcagctcttatagagccttcagaattccgagctccgttgatgttgccaccttggtgaaatgtcaacttgctgttgcttcatttgatgctcatgggaacaggcaagatgttactgggttgcaactacctggagtattggatgacatgttcgcctacactggaccgcttggtactatttttagtgaagaagctgtgagtatgtacctatgggctcctacagcacaggatgtaagtgtgagcttctatgatggtccagctggccctttactggaaacagttcaactcaacgagttaaatggtgtttggagtgttactggtccaaggaactgggagaaccggtattatctatatgaagtcacagtatatcatcaaactacaggaaacattgagaaatgtttagccgctgatccttatgctagagggctttctgcaaatagcacacgaacttggttggttgatattaataatgaaacattaaagccacttgcctgggatggattggcggctgaaaagccaaggcttgattccttctctgacataagcatatatgaattgcacattcgtgatttcagtgcccatgatagcacagtggactgtcctttccgaggaggtttctgtgcatttacatttcaggattctgtaggcatagaacacctaaagaaactatctgatgccggtttgactcatgtccatttgttgccaagctttcaatttggtggtgttgatgacataaagagcaattggaaatgtgttgatgagattgaactgtcaaaactccctccagggtcagatttgcaacaagctgcaattgtggctattcaggaagaggacccttataattgggggtataaccctgtggtttggggcgttccaaaaggaagctatgcaagtaacccagatggtccaagtcgtatcattgagtaccggctgatggtgcaggccttgaatcgcttaggtcttcgagttgtcatggatgttgtatacaatcatctatactcaagtggcccttttgccatcacttccgtgcttgacaagattgtacctggatactacctcagaagggactctaatggtcagactgagaacagcgcggctgtgaacaatacagcaagtgagcatttcatggttgatagattaatcgtggatgaccttctgaattgggcagtaaattacaaagttgacgggttcagatttgatctaatgggacatatcatgaaaaagacaatgattagagcaaaatcggctcttcaaagccttacaattgatgaacatggagtagatggttcaaagatatacttgtatggtgaaggatggaacttcggtgaagttgcggaaaatcaacgtgggataaatggatcccagctaaatatgagtggcactgggattggtagtttcaacgatagaatccgtgatgctataaatggtggcagtccgtttgggaatccactgcaacaaggtttctctactggattgttcttagagccaaatggattttatcagggcaatgaaacagagacaaggctcacgcttgctacatacgctgaccatatacagattggattagctggcaatttgaaggactatgtagttatatctcatactggagaagctagaaaaggatctgaaattcgcaccttcgatggctcaccagttggctatgcttcatcccctatagaaacaataaactacgcctctgctcatgacaatgaaacactatttgatattattagtctaaagactccgatggacctctcaattgacgagcgatgcaggataaatcatttgtccacaagcatgattgcattatcccagggaataccattttttcatgctggtgatgagatactacgatctaagtcgcttgatcgagattcatatgactctggattgattttacctatgaaacaaacaattggggtgttgggcttccaccaagagaaaagaacgaagggagctggcctttgatgaagccaagattggagaacccgtcgttcaaacctgcaaaacatgacattattgctgccttagacaaatttattgatatcctcaagatcagatactcatcacctctctttcgcctaactacagcaagtgatattgtgcaaagggttcactttcacaacacagggccctccttggttccaggagttattgtcatgagcatcgaagatgcacgaaatgataggcatgatatggcccagatagatgaaacattctcttgtgtcgttacagtcttcaatgtatgtccgtacgaagtgtctatagaaatccctgatcttgcatcactgcggcttcagttgcatccagtgcaggtgaattcatcggatgcgttagccaggcagtctgcgtacgacaccgccacaggtcgattcaccgtgccgaaaaggacagcagcagtgttcgtggaacccaggtgctgatggatgcctttcgctagcgagcaagtgcattcggcatccaagtcgaagcaaacgaatgaaataagagaaggccatcgaataaaacgaagtatataaatagattgaataagacgttgcccaagttgccaaggcacgctttgccatatgtatgcgttgaaaaataaataaataaataaataaatgatgttatagaggtacaaaagcattggaacatttctttatagaggtgaaccaccctattttccagtttccatgtgtgaattgtgattagcatatgtatggaataataatataaattaattttatgcatttgtgtgttgtgtcgtggatgacaacatcaacatattgcttctacttgatctctctataattttttttgaagaaatacctagtctagatgtaatatcgtaattccctagctactatatgatatcagggcgttcattagttcgcagggcagaaggtgacgtcatagctggaaggtccggagcaggtgaaggtgctggtggcgtcgtcgtaggcgtagctgtaggccgacgggcatgcgctcttgaacacctgcgagtagttggtcgggccgcacatcgccggcgtgccgtactgcccggtgcagcagtagcgcgcgctgccgtaggcgatgcacgcgctcttgcacgctacgacgccgccgccggacgatgcgacgacgcggaggtccccggggcacacggcgtttacgtcgcccgcgcaagccgcggggcggcagtcgccgccgccgcccgagggcgccacgcgcaccggcacgttgaagccgtcgacgaggctgacgtcgtagaagtccggcctgccgctgcccggcgcggcgagcgtgacctcgacgagcgagaccggaggcgccggcccgcggccctggcacgcgacgtcgcccgtgccgcagtcggccgtggcgcaggagaagcgcccggtggcggggtcggccacgcagcccgtgcgcgcccacaacgtgccggaccatgtccccgacgacggcgcgtccatgctggacgtggcggacggcgccaggtagaagcccgaccgcgcgagcggcggcgagctggcgccgtggagcgcgcccacccacaccgcgtgcttgcaggcgttggtgaagatgaacgacgccgctccatccacgcctagcgctgaatcagttatggaacaaagaacttgatgtgtatccaatttgccacacagaccacaagtccagaaccgatgatgaattaatcagatttctcagcagagacgctgaaccagtttaagattaaaaaaatagcaccaaacagagaaacacacaaacaacgtgggaatgaaaaagaatgccaccgcacccgtcaagagaaaaagctgaagaatcaagagaatggccattctgttcctgctagctccattgccttcggcggagagctgaggaagaaggtgagctactgccatggccatggcggcacgcacaagaaacctcggtggatcgatgtcgatctcagatcgacgctggtatctgtctgtacgtgtatttatagcaagtaaaatcaagaagctagctaggcccagcatgtacggtggttgtagctttagtagatatttagatagac

SEQ ID NO: 107783 - DNA, 4493 bp, Zea Mays
atgttgctccacgccggtccctcgttcctgctcgcaccacctccgcgctttgccgccgctccgtcgtcagcttcgccgaggcgatccaggacaccgcaatcctcgccgccgacgtcgcatttcgcgcgccccgctgatcccgtggcccaaagggtgcgtcccgtcgcgccgaggccccccatggcgacggcggaggagggcgccagctctgacgtcggcgtcgccgtcgccgagtccgcacaggggttcttgttggatgcgagggcttactgggtgacaaaatccttgattgcatggaatatcagtgatcagaaaacttctctcttcttatatgcaagcagaaatgctacaatgtgcatgtcgagtcaggatatgaaaggttatgattccaaagttgagctgcaaccagaaaatgatggacttccatccagtgtgacccagaaattcccttttatcagctcttatagagccttcagaattccgagctccgttgatgttgccaccttggtgaaatgtcaacttgctgttgcttcatttgatgctcatgggaacaggcaagatgttactgggttgcaactacctggagtattggatgacatgttcgcctacactggaccgcttggtactatttttagtgaagaagctgtgagtatgtacctatgggctcctacagcacaggatgtaagtgtgagcttctatgatggtccagctggccctttactggaaacagttcaactcaacgagttaaatggtgtttggagtgttactggtccaaggaactgggagaaccggtattatctatatgaagtcacagtatatcatcaaactacaggaaacattgagaaatgtttagccgctgatccttatgctagagggctttctgcaaatagcacacgaacttggttggttgatattaataatgaaacattaaagccacttgcctgggatggattggcggctgaaaagccaaggcttgattccttctctgacataagcatatatgaattgcacattcgtgatttcagtgcccatgatagcacagtggactgtcctttccgaggaggtttctgtgcatttacatttcaggattctgtaggcatagaacacctaaagaaactatctgatgccggtttgactcatgtccatttgttgccaagctttcaatttggtggtgttgatgacataaagagcaattggaaatgtgttgatgagattgaactgtcaaaactccctccagggtcagatttgcaacaagctgcaattgtggctattcaggaagaggacccttataattgggggtataaccctgtggtttggggcgttccaaaaggaagctatgcaagtaacccagatggtccaagtcgtatcattgagtaccggctgatggtgcaggccttgaatcgcttaggtcttcgagttgtcatggatgttgtatacaatcatctatactcaagtggcccttttgccatcacttccgtgcttgacaagattgtacctggatactacctcagaagggactctaatggtcagactgagaacagcgcggctgtgaacaatacagcaagtgagcatttcatggttgatagattaatcgtggatgaccttctgaattgggcagtaaattacaaagttgacgggttcagatttgatctaatgggacatatcatgaaaaagacaatgattagagcaaaatcggctcttcaaagccttacaattgatgaacatggagtagatggttcaaagatatacttgtatggtgaaggatggaacttcggtgaagttgcggaaaatcaacgtgggataaatggatcccagctaaatatgagtggcactgggattggtagtttcaacgatagaatccgtgatgctataaatggtggcagtccgtttgggaatccactgcaacaaggtttctctactggattgttcttagagccaaatggattttatcagggcaatgaaacagagacaaggctcacgcttgctacatacgctgaccatatacagattggattagctggcaatttgaaggactatgtagttatatctcatactggagaagctagaaaaggatctgaaattcgcaccttcgatggctcaccagttggctatgcttcatcccctatagaaacaataaactacgcctctgctcatgacaatgaaacactatttgatattattagtctaaagactccgatggacctctcaattgacgagcgatgcaggataaatcatttgtccacaagcatgattgcattatcccagggaataccattttttcatgctggtgatgagatactacgatctaagtcgcttgatcgagattcatatgactctggtgattggtttaacaagattgattttacctatgaaacaaacaattggggtgttgggcttccaccaagagaaaagaacgaagggagctggcctttgatgaagccaagattggagaacccgtcgttcaaacctgcaaaacatgacattattgctgccttagacaaatttattgatatcctcaagatcagatactcatcacctctctttcgcctaactacagcaagtgatattgtgcaaagggttcactttcacaacacagggccctccttggttccaggagttattgtcatgagcatcgaagatgcacgaaatgataggcatgatatggcccagatagatgaaacattctcttgtgtcgttacagtcttcaatgtatgtccgtacgaagtgtctatagaaatccctgatcttgcatcactgcggcttcagttgcatccagtgcaggtgaattcatcggatgcgttagccaggcagtctgcgtacgacaccgccacaggtcgattcaccgtgccgaaaaggacagcagcagtgttcgtggaacccaggtgctgatggatgcctttcgctagcgagcaagtgcattcggcatccaagtcgaagcaaacgaatgaaataagagaaggccatcgaataaaacgaagtatataaatagattgaataagacgttgcccaagttgccaaggcacgctttgccatatgtatgcgttgaaaaataaataaataaataaataaatgatgttatagaggtacaaaagcattggaacatttctttatagaggtgaaccaccctattttccagtttccatgtgtgaattgtgattagcatatgtatggaataataatataaattaattttatgcatttgtgtgttgtgtcgtggatgacaacatcaacatattgcttctacttgatctctctataattttttttgaagaaatacctagtctagatgtaatatcgtaattccctagctactatatgatatcagggcgttcattagttcgcagggcagaaggtgacgtcatagctggaaggtccggagcaggtgaaggtgctggtggcgtcgtcgtaggcgtagctgtaggccgacgggcatgcgctcttgaacacctgcgagtagttggtcgggccgcacatcgccggcgtgccgtactgcccggtgcagcagtagcgcgcgctgccgtaggcgatgcacgcgctcttgcacgctacgacgccgccgccggacgatgcgacgacgcggaggtccccggggcacacggcgtttacgtcgcccgcgcaagccgcggggcggcagtcgccgccgccgcccgagggcgccacgcgcaccggcacgttgaagccgtcgacgaggctgacgtcgtagaagtccggcctgccgctgcccggcgcggcgagcgtgacctcgacgagcgagaccggaggcgccggcccgcggccctggcacgcgacgtcgcccgtgccgcagtcggccgtggcgcaggagaagcgcccggtggcggggtcggccacgcagcccgtgcgcgcccacaacgtgccggaccatgtccccgacgacggcgcgtccatgctggacgtggcggacggcgccaggtagaagcccgaccgcgcgagcggcggcgagctggcgccgtggagcgcgcccacccacaccgcgtgcttgcaggcgttggtgaagatgaacgacgccgctccatccacgcctagcgctgaatcagttatggaacaaagaacttgatgtgtatccaatttgccacacagaccacaagtccagaaccgatgatgaattaatcagatttctcagcagagacgctgaaccagtttaagattaaaaaaatagcaccaaacagagaaacacacaaacaacgtgggaatgaaaaagaatgccaccgcacccgtcaagagaaaaagctgaagaatcaagagaatggccattctgttcctgctagctccattgccttcggcggagagctgaggaagaaggtgagctactgccatggccatggcggcacgcacaagaaacctcggtggatcgatgtcgatctcagatcgacgctggtatctgtctgtacgtgtatttatagcaagtaaaatcaagaagctagctaggcccagcatgtacggtggttgtagctttagtagatatttagatagac

SEQ ID NO: 107784 - DNA, 4717 bp, Zea Mays
atgttgctccacgccggtccctcgttcctgctcgcaccacctccgcgctttgccgccgctccgtcgtcagcttcgccgaggcgatccaggacaccgcaatcctcgccgccgacgtcgcatttcgcgcgccccgctgatcccgtggcccaaagggtgcgtcccgtcgcgccgaggccccccatggcgacggcggaggagggcgccagctctgacgtcggcgtcgccgtcgccgagtccgcacaggggttcttgttggatgcgagggcttactgggtgacaaaatccttgattgcatggaatatcagtgatcagaaaacttctctcttcttatatgcaagcagaaatgctacaatgtgcatgtcgagtcaggatatgaaaggttatgattccaaagttgagctgcaaccagaaaatgatggacttccatccagtgtgacccagaaattcccttttatcagctcttatagagccttcagaattccgagctccgttgatgttgccaccttggtgaaatgtcaacttgctgttgcttcatttgatgctcatgggaacaggcaagatgttactgggttgcaactacctggagtattggatgacatgttcgcctacactggaccgcttggtactatttttagtgaagaagctgtgagtatgtacctatgggctcctacagcacaggatgtaagtgtgagcttctatgatggtccagctggccctttactggaaacagttcaactcaacgagttaaatggtgtttggagtgttactggtccaaggaactgggagaaccggtattatctatatgaagtcacagtatatcatcaaactacaggaaacattgagaaatgtttagccgctgatccttatgctagagggctttctgcaaatagcacacgaacttggttggttgatattaataatgaaacattaaagccacttgcctgggatggattggcggctgaaaagccaaggcttgattccttctctgacataagcatatatgaattgcacattcgtgatttcagtgcccatgatagcacagtggactgtcctttccgaggaggtttctgtgcatttacatttcaggattctgtaggcatagaacacctaaagaaactatctgatgccggtttgactcatgtccatttgttgccaagctttcaatttggtggtgttgatgacataaagagcaattggaaatgtgttgatgagattgaactgtcaaaactccctccagggtcagatttgcaacaagctgcaattgtggctattcaggaagaggacccttataattgggggtataaccctgtggtttggggcgttccaaaaggaagctatgcaagtaacccagatggtccaagtcgtatcattgagtaccggctgatggtgcaggccttgaatcgcttaggtcttcgagttgtcatggatgttgtatacaatcatctatactcaagtggcccttttgccatcacttccgtgcttgacaagattgtacctggatactacctcagaagggactctaatggtcagactgagaacagcgcggctgtgaacaatacagcaagtgagcatttcatggttgatagattaatcgtggatgaccttctgaattgggcagtaaattacaaagttgacgggttcagatttgatctaatgggacatatcatgaaaaagacaatgattagagcaaaatcggctcttcaaagccttacaattgatgaacatggagtagatggttcaaagatatacttgtatggtgaaggatggaacttcggtgaagttgcggaaaatcaacgtgggataaatggatcccagctaaatatgagtggcactgggattggtagtttcaacgatagaatccgtgatgctataaatggtggcagtccgtttgggaatccactgcaacaaggtttctctactggattgttcttagagccaaatggattttatcagggcaatgaaacagagacaaggctcacgcttgctacatacgctgaccatatacagattggattagctggcaatttgaaggactatgtagttatatctcatactggagaagctagaaaaggatctgaaattcgcaccttcgatggctcaccagttggctatgcttcatcccctatagaaacaataaactacgcctctgctcatgacaatgaaacactatttgatattattagtctaaagactccgatggacctctcaattgacgagcgatgcaggataaatcatttgtccacaagcatgattgcattatcccagggaataccattttttcatgctggtgatgagatactacgatctaagtcgcttgatcgagattcatatgactctggtgattggtttaacaagtattactctatcctttggatcttgatgcaaacaccagttaccagctagcaacaactgaattgctttcaaggatgatagttttaagttaaacatttacaattgcttgctattatcataacttctcaatttttatcctatatgaaaaactgtttcaagttgaacaaacgcttcccaatcatgttagaatgtaaacagggtaaatgttctgttctgttgtttgaaggattgattttacctatgaaacaaacaattggggtgttgggcttccaccaagagaaaagaacgaagggagctggcctttgatgaagccaagattggagaacccgtcgttcaaacctgcaaaacatgacattattgctgccttagacaaatttattgatatcctcaagatcagatactcatcacctctctttcgcctaactacagcaagtgatattgtgcaaagggttcactttcacaacacagggccctccttggttccaggagttattgtcatgagcatcgaagatgcacgaaatgataggcatgatatggcccagatagatgaaacattctcttgtgtcgttacagtcttcaatgtatgtccgtacgaagtgtctatagaaatccctgatcttgcatcactgcggcttcagttgcatccagtgcaggtgaattcatcggatgcgttagccaggcagtctgcgtacgacaccgccacaggtcgattcaccgtgccgaaaaggacagcagcagtgttcgtggaacccaggtgctgatggatgcctttcgctagcgagcaagtgcattcggcatccaagtcgaagcaaacgaatgaaataagagaaggccatcgaataaaacgaagtatataaatagattgaataagacgttgcccaagttgccaaggcacgctttgccatatgtatgcgttgaaaaataaataaataaataaataaatgatgttatagaggtacaaaagcattggaacatttctttatagaggtgaaccaccctattttccagtttccatgtgtgaattgtgattagcatatgtatggaataataatataaattaattttatgcatttgtgtgttgtgtcgtggatgacaacatcaacatattgcttctacttgatctctctataattttttttgaagaaatacctagtctagatgtaatatcgtaattccctagctactatatgatatcagggcgttcattagttcgcagggcagaaggtgacgtcatagctggaaggtccggagcaggtgaaggtgctggtggcgtcgtcgtaggcgtagctgtaggccgacgggcatgcgctcttgaacacctgcgagtagttggtcgggccgcacatcgccggcgtgccgtactgcccggtgcagcagtagcgcgcgctgccgtaggcgatgcacgcgctcttgcacgctacgacgccgccgccggacgatgcgacgacgcggaggtccccggggcacacggcgtttacgtcgcccgcgcaagccgcggggcggcagtcgccgccgccgcccgagggcgccacgcgcaccggcacgttgaagccgtcgacgaggctgacgtcgtagaagtccggcctgccgctgcccggcgcggcgagcgtgacctcgacgagcgagaccggaggcgccggcccgcggccctggcacgcgacgtcgcccgtgccgcagtcggccgtggcgcaggagaagcgcccggtggcggggtcggccacgcagcccgtgcgcgcccacaacgtgccggaccatgtccccgacgacggcgcgtccatgctggacgtggcggacggcgccaggtagaagcccgaccgcgcgagcggcggcgagctggcgccgtggagcgcgcccacccacaccgcgtgcttgcaggcgttggtgaagatgaacgacgccgctccatccacgcctagcgctgaatcagttatggaacaaagaacttgatgtgtatccaatttgccacacagaccacaagtccagaaccgatgatgaattaatcagatttctcagcagagacgctgaaccagtttaagattaaaaaaatagcaccaaacagagaaacacacaaacaacgtgggaatgaaaaagaatgccaccgcacccgtcaagagaaaaagctgaagaatcaagagaatggccattctgttcctgctagctccattgccttcggcggagagctgaggaagaaggtgagctactgccatggccatggcggcacgcacaagaaacctcggtggatcgatgtcgatctcagatcgacgctggtatctgtctgtacgtgtatttatagcaagtaaaatcaagaagctagctaggcccagcatgtacggtggttgtagctttagtagatatttagatagac

SEQ ID NO: 107785 - DNA, 1447 bp, Zea Mays
gcagagcggcattcgcagctgcagcacctgccatcccttcccttctcctcaagcatcaccagctaagcttcgtccccccatctcgacgttgcctccgtccatcctctcctgtccctcctccggtccgaccctggtcgatcgaggtcggggcgcgcgcgccatgggcggcgtccaagagaaggaggccggcatgccgcccgccatggcggtgccgccggtgctcgtcaagggcaagcgcagcaagaggcagcgcgtgcacgcgccgccggtcgtggccgtggccgtggcggcggcggcggagtggtcgtcgtcgtccgcggcgtcgccagccggcggcgacgactcggggtcagggaccgccacgtcgccgtccgccgcggacgacgccgaggccgaggccgcgtccgccgggtgctgcctgctcaccgaggaggacgaggacatggcgctctgcctcatgctcctcgcgcacggcgagccggccagggacgacggtggtggcggcaacggcaagacagcggccaaggaggccagcagcaggttcaggagccggcgcccggctgcggccggcgacggcgagtacgtgtacgagtgcaagacgtgcaacaagtgcttcccgtcgttccaggcgctcggcggccaccgcaccagccacaagaagccacgcctgctgctgctcccgccggtgccatcccagccgacccaggaaaaggacctggggctggtgccgactcctaaccctgcagccgcggagacagctgaggcgtcgccgccaccggcggctccggcagaagcggccgccgatgccaccgcgctcgcgatcccagttgccgcggcgccaaagcaagaaggacaggccgccgccgccgtggccacgagcagcacgagcaacagcagcagcggcggcgccaagcagcctcatcatcggccgcgcgtccacgagtgctccatctgcggcgccgagttcgggtccgggcaggcgctgggcggccacatgcggcggcaccggccgctggtgccggcgggcgcgcgggagcgggacgacgcgcacgcgcccagcaggaaggagaagagcctcctggagctggacctcaacatgcccgcgccctgcgacgaggccgaggccgatgccccggcggtcacgtccccacgcttcgctttcgccgtcgcggagcgtcctccggcgccgctgctcttcccgccggccacgccgtccgccctggttgactgccattactagttaaacacaggagagtacacgacacaccgattacctccctcctctgcgggcttcaacatcatacataacgtctactgcacacacaaacacacaaacacacacactacacgccacttggattcgatcttctcgctgtcaaatactttttgtttcgttataccatttgttcatgttgattaagttgattgggaatttggagatgtgaat

SEQ ID NO: 107786 - DNA, 1419 bp, Zea Mays
cgcgcgcggctactgcagcttccattccatcacagccaactaaagagaaggagagcgtgtgttcgtttcgaggacgcacacacagacgccatggaggtgacaccaaaccacaccctgaccgtgaccgggtgggcggccatgaacgagtccgccggcaaggtggagcccttcgtcttcaagagaagggagaacggccctgacgacgtgacgatcaaggtgcagtactgcggcatgtgccacacggacctgcacttcatcaacaacgactggggcatcaccacgtacccgctggtcccggggcacgagatcacgggcgtggtcaccaaggccgggcgcaacgtcacgggcttccgcgtcggcgaccgcgtcggcgtgggctgcatcgccgcctcctgcctggactgcgaccactgccgccgctccgaggagaactactgcgaccgtgtggcgctcacctacaacggcgtcttctgggacggcagcgtcacgtacggcggctactcgcgcgcgctggtggcggacaagcgcttcgtggtgcgcgtccccgacgcgctgccgctggacgccgccgcgccgctgctgtgcgcgggcgtcacggtgtacagccccatgaagcaccacggcatgctggggcaccccggcgccagcctcggcgtcgtcgggctcggcggcctcggccacgtcgccgtcaagctcgccaaggcgttcggcctccgcgtcaccgtcgtcagcacgtcgccggccaaggaggccgaggccagggcccggctcggcgccgaccgcttcgtcgtcagcaccgacgacgcgcagatgcgggacgcggccaggtccctcgactacgtcatcgacaccgtctccgccaagcactcgctcggacccatcctggacctgctcaaggtcagcggcaagctcgtgctcgtcgccgcgccggaccagcccgtcgagctcccctccttcccgctcatcttcgggaagaggaccgtcagcgggagcatgacgggagggatcagggagacgcaggagatgctcgacctctgcgcccgccacaacatcacctgcgacatcgagctcgtctccacggacgggatcaacgccgcgctcgcgcgcctcgcgcgcaacgacgtccgataccgcttcgtcatcgacatcgccggcgactccacctcaaaactatagttcattcaattcgttgcattaccattatgggcaccaaacctattatcatctatcaatatcgtcaccagtggcaggcatggcctctggttgcttgcattttgctctctatccatatcaagtgtgtgtcagcatgggccagcgtgcatattgcgccattgcttgcagcaaataaacgttcatatatacacatgtgctcgatattttcaagagaattgcttagagcaaataaacgtttcaaatttt

SEQ ID NO: 107787 - DNA, 1215 bp, Zea Mays
ataaagaatacgaccacagcagcactcgtcaaccgcgtggtctctttaaataacccgcgcgcggctactgcagcttccattccatcacagccaactaaagagaaggagagcgacgcacacacagacgccatggaggtgacaccaaaccacaccctgaccgtgaccgggtgggcggccatgaacgagtccgccggcaaggtggagcccttcgtcttcaagagaagggagaacggccctgacgacgtgacgatcaaggtgcagtactgcggcatgtgccacacggacctgcacttcatcaacaacgactggggcatcaccacgtacccgctggtcccggggcacgagatcacgggcgtggtcaccaaggccgggcgcaacgtcacgggcttccgcgtcggcgaccgcgtcggcgtgggctgcatcgccgcctcctgcctggactgcgaccactgccgccgctccgaggagaactactgcgaccgtgtggcgctcacctacaacggcgtcttctgggacggcagcgtcacgtacggcggctactcgcgcgcgctggtggcggacaagcgcttcgtggtgcgcgtccccgacgcgctgccgctggacgccgccgcgccgctgctgtgcgcgggcgtcacggtgtacagccccatgaagcaccacggcatgctggggcaccccggcgccagcctcggcgtcgtcgggctcggcggcctcggccacgtcgccgtcaagctcgccaaggcgttcggcctccgcgtcaccgtcgtcagcacgtcgccggccaaggaggccgaggccagggcccggctcggcgccgaccgcttcgtcgtcagcaccgacgacgcgcagatgcgggacgcggccaggtccctcgactacgtcatcgacaccgtctccgccaagcactcgctcggacccatcctggacctgctcaaggtcagcggcaagctcgtgctcgtcgccgcgccggaccagcccgtcgagctcccctccttcccgctcatcttcgggaagaggaccgtcagcgggagcatgacgggagggatcagggagacgcaggagatgctcgacctctgcgcccgccacaacatcacctgcgacatcgagctcgtctccacggacgggatcaacgccgcgctcgcgcgcctcgcgcgcaacgacgtccgataccgcttcgtcatcgacatcgccggcgactccacctcaaaactatag

SEQ ID NO: 107788 - DNA, 276 bp, Zea Mays
atggaggggggaggggcgccgccaccggggaaggtgaggggagagtgggagaggctctgcacggacgggaaaacgaagaaacgaagaaaccctaggtgcaataatggaggtttctcaccggggaagaagaccctcgccggagccgaggagaaatctgtcgattgccggagattcggggatccaatcgatgaaccgaacgcgctgcgacaaagccttcgacgagacgaatgcagcggtaccctcggattccgcggacgatgcacggattgggagtaa

SEQ ID NO: 107789 - DNA, 769 bp, Zea Mays
aggcaaaacagccccagaccgcgtgcgtttcgcttctgcccctgctgtttctgtttcttggcgtccatcccctctttctctcgtggcgacgacggcgaccgtcacaccccccctatgtgctaggtgccagggtccgtcgggtccttcgctggcgacgagcaactaccaggcgacccagtggtgtgttcgggaacgtttccgcgggcgggcggcggcccccagtggcgaagatgatctgactaccgacgtacgcagcacgaggcgttcgttgccatcttcttctcctttgagtatatgatactagcaacatccacggtatcaacattcgtgaagtatatattctatgttagtgacatgctaatggaaggtcaatgggagaaaaaggcagtgtatacattttacttggagctcataagtgaccttgtgcacttgtcattatacatgctcttcttcatagttatcttcctgtaagatctcttattatggtagtttgatactataatgtaaagttgtaaactatggttattgattcgttatgtgataccaggaactatggtgatcggcgaccgtgatcttccatgttattatgttctgatacttgagacttttattatgactatgtatgagatattgtctcttattagtactggttgatgagatgtgtcttattatgactatggatgagacttttgtgatgtaattgataagactatggatgagacttttgtgatgtaatcgatgagactatggatttaaatattgttatgtg

SEQ ID NO: 107790 - DNA, 720 bp, Zea Mays
aggcaaaacagccccagaccgcgtgcgtttcgcttctgcccctgctgtttctgtttcttggcgtccatcccctctttctctcgtggcgacgacggcgaccgtcacaccccccctatgtgctaggtgccagggtccgtcgggtccttcgctggcgacgagcaactaccaggcgacccagtggtgtgttcgggaacgtttccgcgggcgggcggcggcccccagtggcgaagatgatctgactaccgacgtacgcagcacgaggcgttcgttgccatcttcttctcctttgagtaagctcaattttattttcttaattttgcttaaatgcctttttcggtgcatggaaaatctgcactctctgttttcattttatcactgtatcaatgtggcaagctgcaatattttgttctctttcacaatgttattagagtatggatagagaactagaaattaattaaattgtagtctctttgatatggcatctcccaagataatgggcaaatatttgcaaaacgaagtactacatattaggtctatatatcaagcgagtgtctttttttagttgcacaggaccatgcctttcacggatgtcttaattcttcagtaatgtaatatctttccattttgtgtgtcgtcctttgcacttccatatactacatgaataatgccagctttgcagttattttttttatttgctcgacttatatatgctttgctaag

SEQ ID NO: 107791 - DNA, 2163 bp, Zea Mays
ctcctcgcttccaccaccgtcctccgcctccgcctccgccccgcgcccagcactcgtcccttgctttctccctctctctctctctctctctctctctccgcgcgcgcacccacgcacgcagtttgagagggtgtgcggcgctcgaggggcgaggagcggggtgggtcatggcagaggcagactgttccgcggcgaggaccaggacggcggggctcgccgccgccgccgccgcggcggcgttcctcgtgctcgtggtggtcgccggcagcgcggtgctccctggcgcgcgggtgagggtcctcgacggcctccggcacaggagcacggccgtggcggcgggcggcgcgaggcggtggctgcgggactcctcctggccggcgccggtggcggcgacgacgacgacgaggggcagggccgacgacggcgacgccggcgggccatcgagggccgtcaccggcgcggtggaggatccggaggccgtggccaacgacgtgcacgtgtccatcaggaacagcacggcccggcgaaacctcgggtacctgtcgtgcgggacaggcaacccgatcgacgactgctggcgctgcgactcggactggcacagcaaccggcagcggctggccgactgcggcatcgggttcggccgcaacgccatcggcggccgcgacggcaaggtgtacgtggtgacggacccgagcgacgacgatcccgtgaacccgcgcgagggcaccctccggcacgccgtcatccaggaggagccgctgtggatcatcttcaagcgggacatggtgatcacgctgagggaggagctcatcatgaacagcttcaagaccatcgacgggcgcggcgccaacgtgcacatcgccaacggcgcctgcgtcaccatccagtacgtgaccaacgtcatcatccacgggctccacatccacgactgcaggcccacggggaacgccatggtgcgcagctccccgagccactacggctggcgcaccatggccgacggggacggcgtgtccatcttcggttccagccacgtctgggtggaccactgctcgctctccaactgcgccgacggcctcatcgacgccatcatgggatccacggccatcactctgtccaacaactacttcacccaccacaacgaggtgatgctcctgggccacagtgactcctatgtgaaggacaaggcgatgcaggtcacgatagccttcaaccatttcggcgaaggcctcattcagagaatgccaaggtgccggcacggctacttccacgttgtgaacaacgactacacccactgggagatgtacgccattgggggcagcgcggagccaaccatcaacagccagggcaaccgctaccttgctccgacgaacccgttcgccaaggaggtgaccaagagggtggagactgcccagaccgtgtggaagagctggaactggaggtcagagggcgacctgctgctgaacggcgcctacttcaccccgtccggcgcgggcgcctcggccagctactcgcgcgcgtccagcctcggcgccaagtcgtcgtccatggtcggcaccatcacctcggacgccggcgcactgtcgtgccgcaagggcgcggcctgctagcgcggatcgcgctccctctccagcaacaggaaaagaaacaggacaacaggaaactaagccacctcaacaccaccaccaccatggttacagtttcttcttcccttctttttaggggtcgcttttgacaagggttatattatatatatatatgatggtcctccttgatattttcaccatttgctcaacctcccccctgctcccgacatggaaagctacctggagcagcaggcgtgaagcgttgctgattggtcgctcggtctctctattagtcgtctgatctgagtgttgcgtgttgttccctctgcctacaagcaagtggtgtatgttgagggcagggggtgcgtgcgtgcgtgttgtgtgtgatacttactcacttggttgttgtgttgagaaaaaaagggtcagattgttagtagtggtagtactacatgttacgcctggacagactgggatggaatggatgtacaagacatggaggaatacccatgttcttaactcttcttcttcttcagtgaaaaaagctaaaacgttacagtttagctgaatattttgatct

SEQ ID NO: 107792 - DNA, 1874 bp, Zea Mays
gtcatggcagaggcagactgttccgcggcgaggaccaggacggcggggctcgccgccgccgccgccgcggcggcgttcctcgtgctcgtggtggtcgccggcagcgcggtgctccctggcgcgcgggtgagggtcctcgacggcctccggcacaggagcacggccgtggcggcgggcggcgcgaggcggtggctgcgggactcctcctggccggcgccggggcagggccgacgacggcgacgccggcgggccatcgagggccgtcaccggcgcggtggaggatccggaggccgtggccaacgacgtgcacgtgtccatcaggaacagcacggcccggcgaaacctcgggtacctgtcgtgcgggacaggcaacccgatcgacgactgctggcgctgcgactcggactggcacagcaaccggcagcggctggccgactgcggcatcgggttcggccgcaacgccatcggcggccgcgacggcaaggtgtacgtggtgacggacccgagcgacgacgatcccgtgaacccgcgcgagggcaccctccggcacgccgtcatccaggaggagccgctgtggatcatcttcaagcgggacatggtgatcacgctgagggaggagctcatcatgaacagcttcaagaccatcgacgggcgcggcgccaacgtgcacatcgccaacggcgcctgcgtcaccatccagtacgtgaccaacgtcatcatccacgggctccacatccacgactgcaggcccacggggaacgccatggtgcgcagctccccgagccactacggctggcgcaccatggccgacggggacggcgtgtccatcttcggttccagccacgtctgggtggaccactgctcgctctccaactgcgccgacggcctcatcgacgccatcatgggatccacggccatcactctgtccaacaactacttcacccaccacaacgaggtgatgctcctgggccacagtgactcctatgtgaaggacaaggcgatgcaggtcacgatagccttcaaccatttcggcgaaggcctcattcagagaatgccaaggtgccggcacggctacttccacgttgtgaacaacgactacacccactgggagatgtacgccattgggggcagcgcggagccaaccatcaacagccagggcaaccgctaccttgctccgacgaacccgttcgccaaggaggtgaccaagagggtggagactgcccagaccgtgtggaagagctggaactggaggtcagagggcgacctgctgctgaacggcgcctacttcaccccgtccggcgcgggcgcctcggccagctactcgcgcgcgtccagcctcggcgccaagtcgtcgtccatggtcggcaccatcacctcggacgccggcgcactgtcgtgccgcaagggcgcggcctgctagcgcggatcgcgctccctctccagcaacaggaaaagaaacaggacaacaggaaactaagccacctcaacaccaccaccaccatggttacagtttcttcttcccttctttttaggggtcgcttttgacaagggttatattatatatatatatgatggtcctccttgatattttcaccatttgctcaacctcccccctgctcccgacatggaaagctacctggagcagcaggcgtgaagcgttgctgattggtcgctcggtctctctattagtcgtctgatctgagtgttgcgtgttgttccctctgcctacaagcaagtggtgtatgttgagggcagggggtgcgtgcgtgcgtgttgtgtgtgatacttactcacttggttgttgtgttgagaaaaaaagggtcagattgttagtagtggtagtactacatgttacgcctggacagactgggatg

SEQ ID NO: 107793 - DNA, 535 bp, Zea Mays
cctgctcctttttttcctagcctccatggacgccaacagccgatcccatggcgtgctgcccccagcccggggtcctgctcctccatgggcgctccctgttttcttccacgcgcagcagcaggaagctcaactcagctccctcccttccctgctcgccccagccataaaccatcgcgcagagcgccgtcggcctgttgagcgcgctctccactgccctggcgtttccccctgctagctcctcccatggacgcccagaaattccagcagcgagcccccttcctcgctgttcgtcgttgtgcccgccggttgttcgataaaatgcgcagcaagccgcgcgctgcagcagccctcccgttcgatctccactcccctcgtcgcgtgtcgtcgctctcgtgctcgctgcgcagccccatccgcgacgccgtaagtcctcgctaggcgttgccgcggagccgcgcgcgatgcctgtttcggtgaagcccctaaaccgtggacgcatgtgcaacccgaatccgagtttgacaggttgatagat

SEQ ID NO: 107794 - DNA, 1322 bp, Zea Mays
aaaggatgctgagggctcatctcgctgcttctgaacagtgacactgcaagtggatggaagtcggcccctgcacaagaaaactaccttccacctgaaagaggttagaggtcctaatcactcgcaaagtctcaacaactacgcacggcctcctctccctccgccggccggcacgatggcgtcaggcggcgagcccgcggctccgaaggtcgtcctcctcctcgtcccccacgtggacgagtccttccacgccgctctgcggtcgcgcttccgcgtcctcgacttcttcgcctccccctcctcaggtgagccgctgccagccttcctcgccgcggcggcggccgctccggagccccctcgcgccgccgtcgtggtgggcgcgggcccggcccgcgtggacgccgcgttcctcgacgccgtgccgtcgctccgctgcgtcttgtccctggcggcgggcgtggacttcatcgacctcggcgagtgcgcgcgccgcggcgtggccgtcgccaactccggcagcgtgttctcggccgacgtcgccgaccacgccgtcggcctgctcatcgacgtgctccgccgcgtgtcggccgccgagcggttcgtccgccgcggcctctggccggtgcagggtgaccacccactcggctccaaggtcggtggcaggcgtgtgggcgtcgttggcttggggaacatcggctcgcagatcgcaaagaggctccaggctctcggctgcaccgtctgctaccactctagaacgcccagggactcggtcccttacagatacttcgccaacgtccgcgacctcgcggcggattccgacgtgctcgtcgtggcgtgcgcgctgaacgaggcgacgcggcacatcgtcggcagggacgtcctggaggcgctagggacggacggggtcgtcgtgaacatcagcaggggcgccaacgtcgacgaggccgagctggtcagggcgctcaaggagggcaggatcgccggcgccggcctcgatgtcttcgagagcgagcccggagcgcgccgcgagttcttctccatggacaacgtggtcatgacgcctcatgtggcggttttcacggcggagtccatgtcggacctgcgagaccacgccatcgccaacctcgaagcattcttctccggtcagccgttgcttacgccggtgcctccctactcaccggtcaagtaggctgccaacgtgattgaagccagcggattattggctctgtttgtaacttcgcatcgtttaaaatgtctcgtataatacttgatttgttttttactgtcaatagatcgaaggtgaaaattttggttatggttgtaca

SEQ ID NO: 107795 - DNA, 298 bp, Zea Mays
ctgtttaaagatgtagataattaagggggtgtttggtttctagggattaatgtttagtccctacattttattccattttagttccaaaattaccaaatatagaaactaaaactttattttagtttctatattagcaatttatagactaaaaaagaataaaacgaagggactaaacattagtccctagaaaccaaacaccccctaagtctcgcttgtttagtgcatgttattgcatctttatgtaatatgcctaatactaagggctagtttggaaattccattttcccaagttattttt

SEQ ID NO: 107796 - DNA, 1464 bp, Zea Mays
aagaagactatgggcttctagcaattcacgtggttgaagacgtcttgtcccgttccagaacactcgcgctctcgcacgacggcacgagcgcgctactgccatagtgccatggcgagcggcggcggtgctgcggcgcggatggacccggaggtagcaacagagctggtgcggaagggtgccaccctcctcctcctcgatgtcccccagcgcaccctcttcggaatcgatacccagatgttctctgttggacccaagttcaaagggatgaagatggtgccaccgggagcccatttcgtctactactgctccccaaacaggcatgggaatgagtttgcacctactgtcgggttctttcttactacacaccaatctgaggtgattgttcgaaagtgggatgtgcaagaggaacgattaatcaaattatcagaagaagaggatatcagatactcagaagctgtaagacattttgaatttgatgatcaacttggaccatacaatttagattcttatggagattggaaacaactttcggactacttgtcaccgaatgtcattgagcgtcttgaaccaattggaggagaaatcacaattgcgtgggagtcatcatggatggataaagctccccaaagtgacatggagagacgtttggtggaacaactaagagaaggaaagtttgcaaagaatgctcctgtacagtctgggcggagaggatgctactacacaagtatccctgcttcagttaagcataaggacatctctgggggtgacttgacagccctaaacttggacaaaacaagtttgctggagactattttggccaaaaattatgaaggtcaagaagatctattcttgggggagcttcagtttgctttcatagcttttatgatgggtcaatcactagaggcttttatgcagtggaaagcactagtcagccttcttttgagctgcagtgatgctccccttcatacaaggactaacatgtttataaagtttataaggacattatactatcaactcaagcatggttttcaacatacccaagattccaaaagtggggatatgggcaattctctgtgtttggatgaaacatggttttcaagagacatattcctgtaccgtctttcaaaggatttctttacagttgtatttgaagccccagtcgtggatggagaccttctgtcatgggctaggaaactaaaatcgcttctggagactacgtttgggtgggatcttgaggacgacgcagtgaaccttattgatgaagatgacgagtttgctcctgtcgttgtggagatggatggatcataagctaatgaagccagattccatgcagagaagtcagcagttgttcagcgtttctaccttttggtacagtggtgcgctgacttgtatgaagttttactgcttgtgctgacattgaatatacgtgctaattatcgacttggtttccacttgactgtttaa

SEQ ID NO: 107797 - DNA, 1532 bp, Zea Mays
acgtggttgaagacgtcttgtcccgttccagaacactcgcgctctcgcacgacggcacgagcgcgctactgccatagtgccatggcgagcggcggcggtgctgcggcgcggatggacccggaggtagcaacagagctggtgcggaagggtgccaccctcctcctcctcgatgtcccccagcgcaccctcttcggaatcgatacccagatgttctctgttggacccaagttcaaagggatgaagatggtgccaccgggagcccatttcgtctactactgctccccaaacaggcatgggaatgagtttgcacctactgtcgggttctttcttactacacaccaatctgaggtgattgttcgaaagtgggatgtgcaagaggaacgattaatcaaattatcagaagaagaggatatcagatactcagaagctgtaagacattttgaatttgatgatcaacttggaccatacaatttagattcttatggagattggaaacaactttcggactacttgtcaccgaatgtcattgagcgtcttgaaccaattggaggagaaatcacaattgcgtgggagtcatcatggatggataaagctccccaaagtgacatggagagacgtttggtggaacaactaagagaaggaaagtttgcaaagaatgctcctgtacagtctgggcggagaggatgctactacacaagtatccctgcttcagttaagcataaggacatctctgggggtgacttgacagccctaaacttggacaaaacaagtttgctggagactattttggccaaaaattatgaaggtcaagaagatctattcttgggggagcttcagtttgctttcatagcttttatgatgggtcaatcactagaggcttttatgcagtggaaagcactagtcagccttcttttgagctgcagtgatgctccccttcatacaaggactaacatgtttataaagtttataaggacattatactatcaactcaagcatggttttcaacatacccaagattccaaaagtggggatatgggcaattctctgtgtttggatgaaacatggttttcaagagacatattcctgtaccgtctttcaaaggatttctttacagttgtatttgaagccccagtcgtggatggagaccttctgtcatgggctaggaaactaaaatcgcttctggagactacgtttgggtgggatcttgaggacgacgcagtgaaccttattgatgaagatgacgagtttgctcctgtcgttgtggagatggatggatcataagctaatgaagccagattccatgcagagaagtcagcagttgttcagcgtttctaccttttggtcggtacattatgccatgcacagtagtactagagaactgatgttttacgctgatcttgctgttagaatcttacgctgtctacttattatgatctaggtacagtggtgcgctgacttgtatgaagttttactgcttgtgctgacattgaatatacgtgctaattatcgacttggtttccacttgactgttt

SEQ ID NO: 107798 - DNA, 1494 bp, Zea Mays
aagaagactatgggcttctagcaattcacgtggttgaagacgtcttgtcccgttccagaacactcgcgctctcgcacgacggcacgagcgcgctactgccatagtgccatggcgagcggcggcggtgctgcggcgcggatggacccggaggtagcaacagagctggtgcggaagggtgccaccctcctcctcctcgatgtcccccagcgcaccctcttcggaatcgatacccagatgttctctgttggacccaagttcaaagggatgaagatggtgccaccgggagcccatttcgtctactactgctccccaaacaggcatgggaatgagtttgcacctactgtcgggttctttcttactacacaccaatctgaggtgattgttcgaaagtgggatgtgcaagaggaacgattaatcaaattatcagaagaagaggatatcagatactcagaagctgtaagacattttgaatttgatgatcaacttggaccatacaatttagattcttatggagattggaaacaactttcggactacttgtcaccgaatgtcattgagcgtcttgaaccaattggaggagaaatcacaattgcgtgggagtcatcatggatggataaagctccccaaagtgacatggagagacgtttggtggaacaactaagagaaggaaagtttgcaaagaatgctcctgtacagtctgggcggagaggatgctactacacaagtatccctgcttcaacaagtttgctggagactattttggccaaaaattatgaaggtcaagaagatctattcttgggggagcttcagtttgctttcatagcttttatgatgggtcaatcactagaggcttttatgcagtggaaagcactagtcagccttcttttgagctgcagtgatgctccccttcatacaaggactaacatgtttataaagtttataaggacattatactatcaactcaagcatggttttcaacatacccaagattccaaaagtggggatatgggcaattctctgtgtttggatgaaacatggttttcaagagacatattcctgtaccgtctttcaaaggatttctttacagttgtatttgaagccccagtcgtggatggagaccttctgtcatgggctaggaaactaaaatcgcttctggagactacgtttgggtgggatcttgaggacgacgcagtgaaccttattgatgaagatgacgagtttgctcctgtcgttgtggagatggatggatcataagctaatgaagccagattccatgcagagaagtcagcagttgttcagcgtttctaccttttggtcggtacattatgccatgcacagtagtactagagaactgatgttttacgctgatcttgctgttagaatcttacgctgtctacttattatgatctaggtacagtggtgcgctgacttgtatgaagttttactgcttgtgctgacattgaatatacgtgctaattatcgacttggtttcca

SEQ ID NO: 107799 - DNA, 363 bp, Zea Mays
ggtacaaaattgacaactcacaaggatgaaatatcagtaattttctatttactggtggatcccatcttttacggaatcaattccttttttgaataaaaattttgggagctcagcatgtctggaagcacgggagaacgttcttttgatgatattattaccagtattcgatactgggttattcatagcattactataccttccctattcattgcgggttggttatttgtcagtacgggtttagcttatgatgtgtttagaagtcctcgaccaaacgagtatttcacggaaagccgataaggaattccattaataaccgaccgttttgattctttagaacaactagatgaatttagtaaatccttt

SEQ ID NO: 107800 - DNA, 216 bp, Zea Mays
tcagccatgcgtgctcccgttggcactccccggtgggctgggctccgagccaaacacgtagcgagcccactccccggcctgcgcgtccgcctgcgccatggccgcgcgcacgccttctccgtctgcccacgccgacgcgatcaccgcggcgacgatggccaccacaagcagaggcgccagcagggtgagtagctgcgccgcgtcctccaccgccat

SEQ ID NO: 107801 - DNA, 919 bp, Zea Mays
ctattgggcttgtcgtttatttccccttccgcaaaccaaaatgttggcggctcgccggctgtccgccgccacctctccgctcctcctccgccgcctttccgcacagacccaccccacggcatcgtcggcgcagcccccgccggaggtgaccgattcgggtccgggagcgtgggccggccgcgcggtgacgctctcgctgctgggtctgacgggcgccgtcgcagccagtgctgtcagcgacctctccgtcttcctctcatgctccagccaggcaatagagaaggccacccagaaccagcagatagtcaatgctatcggtaaaccaatcatgcggggaccctggtacagtgcttccattgctgtgaatcacgcgaagcattctgtctcctgcactttcccggtgtcaggaccccaaggaaatggtctgctcaagctcaaagctgtgcgcttgggagatgaatcttggtattcgtatgtgcagcccaccgagtgggagatactgataatggatgccatccttgatgtccatacggaagatggtaagcacacgacaatgcgggtaacaattccagacaacacacctgctccgccaccagcagactgcaccgcgtgcaagtcccatgcagcggagaagtgaatccattgacagatgttctttccacagtttcttacgaaaataatttattcacacatttctgatgcaaccggctattatcggaaaataattcttagcgattcctaaggtcgacatggggtcctcgatttatttattcacattataaatcgaggactccaggtcgaccttaggaatcggtaagagttattttctgatgctagccagaaatccctaaatcggtaagaataaagtgcttgcaacgatgttggacagttggttggatctataatatttgatccatgt

SEQ ID NO: 107802 - DNA, 3745 bp, Zea Mays
taccctcgcttcgcgtcgcgtcttccttctccctcctccgcatccggctgctgcccctgagcctgcccccaccccctcggcgcccccgccggagcgccgcctctacccttcgatcccggtacgtcctctccccgaacctcaccgctccgccagatccggccgcagcggaaggatccgatcgggaaacacgcggatcacgcgcacagactgtcagaaagttcatttctcatgtcgcttccgctgccgcccgactgcgcaggttccacgatgcagccgccgatggggagcgagaggaggacgccgcccggccgccctgtttcagccttcgtgccgggcgccgctgtcccgcctccaccgtttgccgccggtggcccgttcgctccgccgccgcggcagggagtgccgcctcctcagtctggtgctgcggcgcctgctttcggggctgcaccacccgccgcaatggggggtgggttcaggggtccaccgccgtcgcagggcccctacggtgcgggcacactgccccacggcccttttgcttccgcgccaccgcctcagggctctttcacctccgcgccaccgtctcagggctcctttgcctccgctccaccgtcccagagtccctttacttcccctccaccgtctcagggccccttcgctgctggaccaccgcctacgggcccttttgctgctacaccagcaccttttcgccctccaccgtcatcccttgcgcagccacaatctcccacgggaggcgctttgcctgcaccaccaacatatgcgaggccgccaccgccactacagtcacaagggtattaccctggtgcaccacctgcgaaccctcaatactcaatgtcaaggccagcatttcaacaaccaatgcagaatatgccacctcctccaatgggaccagctaccacatttggtaatcaggcagcttatccaagtgccgggcctccagtcggaggcacacttcagagcttagtggaggacttccagtcactgtcactgagctctacgcctgggtcacttgaccctggtgttgatgtaaaagggctgccaaggccattggatggtgacgaggaaccagttaagcttatggaggcatacccattgaattgccacccgaggtacttccgtctgacaacccatgcgattccggcatctcagtcattggtctccaggtggcatttgcctcttggagctgtggtgcacccacttgcagaatcacctgatggggatgaagtcccagttatcaactttgggtctgccggtgtcattcgctgtcgaagatgcaggacgtatataaatccttatgcgacatttgcagatgctggaaggaaatggcgctgcaatctttgcgcgttgctcaatgacgttcctggagagtacttttgtggtcttgatgctagtggcagaaggtacgatactgatcaaagacctgaactctctaagggaactgtagagtttgttgctccaacagaatatatggtgcggccaccgatgccgccttcctatttctttattattgatgtgtctgtatccgcagtacagagtggattgcttgaggttgttgcaaagaccatcaaatcatgccttgatgaacttccaggctttccacgaacacagattggattcttaacctttgacagcaccttgcattttcataacttcaagtcttctttgtcacagcctcaaatgatggtggttactgatttggatgatgtttttctgccattgcctgatgacctcttggttaatttggtcgactcaagacatgttgtggaatcatttcttgatagcttgccaaatatgtttcatgacaatgtaaatgtggagtctgctcttggtccagcacttaaagcagctttcatggttatgagtcaaattggggggaagttgcttgtcttccagagtactttgccatctcttggtattggtcgtttgaggttacgaggagacgatgtccgtgcatatggaacggataaggagcatactctgagggtaccagaagattccttctacaaacagatggctgctgaattcacaaaatatcagattgcagtggacatattttctttcagcgataagtactcagatatagcgtctttaggatctttggcgaagtatactggtggtcaggtgtaccactatgcatcattccagacacctacacatggtgacaaacttaaacttgagcttagtagggaccttacacgagagactgcatgggaatctgttatgcgtatcagatgtggaaaaggagtacggttcacaacctatcatggtcatttcatgctacggtccacagacctgttagcccttccagctgttgactctgataaagcttttgcaatgcaactgtcgctagaggagacattaatgaccacccagactgtatacttccaagtggcgttgctatatacatcatcctctggtgaaaggcgtatcagggtccacacagcagctgcacctgtggtcacagatcttagtgaaatgtatcgtcaagcagatactggtgccattgtgtcattgttgggtagaattgcgattgaaaattcactgtctgataagctggacagtgtccggcagcagttacagttgaagctcgttaaaagtttgaaggaataccgcaatttatatgttgtacaacaccggataggcgggagactgatttttcccgaatctctaaggtttttgccattgtacatcctggctatctgcaaatctcttgctcttcgtggaggttatgcagatgtttctcttgacgaacgatgcgctgctggtttctgcatgatgatattgcctgtaaaaaggctgctcaattttatctatccttctctgtacagagttgatgaagtactcacaatggaaccaaacaaggttgatgatgtttcattgaagcgattgccattaacgtttcagtgtttagatactggaggtttgtacctccttgatgatggcttcactttcctagtgtggttaggtaggatgctcccgcctgaacttgtgaacaacattcttggagtgagcttggcaaacttccctgacctatcaaagattgtattgagagagtgtgacaatgaattgtcaagaaatttcatgaaaatactaagatccctgcgggagaaggatccttcctatcaccagctatgccgtgtggtgcgacagggtgaacagccaagagaaggctatctgcttctatctaaccttgttgaggaccagatggctggaacaagtagttacgttgattggatacagcaaattcaccgtcaaacgcaaagctaatgacgaagaaccaacaggaagtgatgcttggaatttttgccttagtgtaaactgctgcaggatgtagattcagctgctgccggttccaaatcaatctcgcaaccccgtggcagatcttgttcagaagccagcggcccaacatgccggcttgtaagcagcatttgtctggcaaaaaaaatgctgttaatatctgtccatgtgattattctatttttgcacagtgagaatacagctgttgtatcggaataagtaggcaacaataccgtgggtattatacaactgggttcgtgtagtggcctgtgcgtttattaatcgcgttctttcctcatctggattcagttacttgccatttgggttataaatagttcatcgtgtaaactaactttttggctactttagtctgtttgtaatgggatatctcatttaatttaactgacattccattattcggacgttcctt

SEQ ID NO: 107803 - DNA, 1818 bp, Zea Mays
accaacacaacaacatctcctccgttctcctagctccagcaacaaacaggacacaacaccttctcctcctcattcttctaccatagctagctagctagcttcacatcagcagctacatactcaccgatagatacagacctcagagcatcacactacagagtacagacctagctcagagcacacatccagccatggggctcctccctaccgaccgcatggatagcctcttctccccgcgctgcgtgtgggtgaccgggcccatcattgtgggcgcggggccgtcggggctagccgtggcggcgtgcctgcgggagcagggcgtgccgttcgtcgtcctggagcgcgccgactgtatcgcctcgctgtggcaacggcgcacgtacaaccgcctcaagctgcacctacccaagcagttctgccagctcccgcgcatgccgttcccggaagactacccggagtacccgacccgccgccagttcgtcgactacctcgagcgctacgccgccgagttcgagatcaagccggagttcggcaccaccgtgctgtcggcgcgctacgacgagacgtcgggcctctggcgcgtcgtcaccaacggcggagccggcggcgacatggagtacatcgggcgctggctcgtggtcgccacgggcgagaacgcggaggccgtggtgcccgacatcccgggcctcgccggcttcgacggcgaggtgacccacgtgagcgagtacaagtccggcgaggcctacgccggcaagcgcgtgctggtggtcggctgcggcaactccgggatggaggtgtcgctggacctggccgagcacggcgcgcgcccggccatggtggtgcgcgacgccgtccacgtcctcccgcgcgaggtgctgggcacgtccaccttcgggctcgccgtgctgctcatgcgctggctcccgctctggctcgtcgactggctcatggtgctcctggcgtggctcgtcctcggcaacctcgccaggctcggcctccgccgccccgccgccggcccgctccagctcaaggagacgcacggccgcacaccagtcctcgactacggcgcgctcgcgcgcatccgcgccggcgacatcaccgtcgtccctgcggtgacacggttcgccggcaagggcggacaggttgaggtcgccgacggccgcacgctcggcttcgacgccgtcatcctcgccaccggatatcgcagcaacgtgccgcagtggctccagggcaacgatttcttcaacaaggacgggtaccccaagacggcgttcccgcacgggtggaagggcgagagtgggctgtacgccgtgggcttcacccggcgcggcctctccggcgcctccgccgacgccgtgcgcatcgccaaggacctcgggaacgtctggagggaggagaccaagcccaccaagagggccggcgcctgccacaggcgctgcatctcggtcgtcttctaatccgatcggccacacctgggagcatgcatgacgatgattgaagctaacttttctgaagcgcacacacagctgacagacagttgttcgttgatggtgttttagttagtctcacagcacgtccaatccccttggtttgttgttgatttgttctttgagatcgaggtacatcagtagtgagtaatatacgggtaaaaacagtgagagtgagttgagtaaaagaaaagaaaagaatggagccctcccatcagtaggggaagtgagtgagccctagcctaggggatttttactgcagctatggccgctagcttgctgtatagtagcaacctgttgatggaggaagaggctctctctttatgtttta

SEQ ID NO: 107804 - DNA, 131 bp, Zea Mays
accgttggtgatggtggtggcgatggcgtggaccgtggacgcatgcatagcatcgaggatgcagagggaatccacgtacgccaaacaatggcagcggcggcgcacaccaccctccgccccactgggcgaag

SEQ ID NO: 107805 - DNA, 1525 bp, Zea Mays
ataactcgattggcgaatatctgaaaaaaacccaaaatacaaagtagccgccgccgtgctcgtgctccagcgacctcgatggccatgcatcccgttgccggcgccggcgcgccccccgcgtcgtcggtccacggcaacgttgagtacgacgacttccactgggacgacgcagccgaggcggagcttcaggccttcgaggccgcctacgcctcggcttccgcctccgcaaagcgccgccgcttacccgactggacctctccatccccttccccctcctaccacctccatcgcagccaaaacccggtgtccagtggatccacgccatcgtggaccctcacgccccacacaccccaagacaatgtgagggcaagacgccaacaaatatcattcagcggtaagatagtttactgcaggacacctacagaggcggagaaagctgcaactgacatcttactcaaaattgagaggatgaaaaccccaggccaggtttctcttggatttgatctcgagtggaggccctttccaagaagaggagaaccaccttgtaaggttgctgtaatgcaactatgcatggagaaaactctgtgctatgtcctgcatattgctcactctggggtaccgcctatactgaaaactcttttggaggatagttcgtccattaaagttggaatatgcatagacaatgatgcaaggaaaatgttgaatgactataatgtctgtgtacaaccactgatggatttgtcgaccttggcaaatgtcaagttagcttctcccaaaagatggagccttgcttctttaaccgaaatgatcacatgcaaagagttgccaaagccgagcaacataagaatggggaactgggaggctgatgtcctctccaaacaacaacttcaatatgctgctacagatgcttatatctcatggtacttgtatgaggcactgcagactcttccagattacacgattgaagctgagtctgtaaaggcacaataacttcaagtggattctattgggaactgttgtgttagtctattatcttcacatctcaatcaggcagggggttgagtaggaactgggaagctcctttgtcgcaacaaatggatggtgaattccgtgtgagtatgtgtgttgtgcacttccagtttgcacttgtaaatttattctcctcgtatgtgaagggcgtgtctgttttttttttatttaaagaacttgactgttgtatgagttcgcaccccattttttttttgttaatacaacaatgatatgcagctctcttgcgtatcgagagggaaaaaaaagagatggttagttcctttgtcattgcttaaggtaaaaaacatgaattggactattggtattggactgtattttgctcgggaccattggaattactgtacggcaacctatttgccttgtattaacgtaaagctgtgcagttctctttatgtatggtttaaaaatgaagactgatttgtaaagagcgttatgatcagtggcgttataatcaggaaatcaaaaaaaaaaaaaa

SEQ ID NO: 107806 - DNA, 1542 bp, Zea Mays
attgtgaattataactcgattggcgaatatctgaaaaaaacccaaaatacaaagtagccgccgccgtgctcgtgctccagcgacctcgatggccatgcatcccgttgccggcgccggcgcgccccccgcgtcgtcggtccacggcaacgttgagtacgacgacttccactgggacgacgcagccgaggcggagcttcaggccttcgaggccgcctacgcctcggcttccgcctccgcaaagcgccgccgcttacccgactggacctctccatccccttccccctcctaccacctccatcgcagccaaaacccggtgtccagtggatccacgccatcgtggaccctcacgccccacacaccccaagacaatgtgagggcaagacgccaacaaatatcattcagcggtaagatagtttactgcaggacacctacagaggcggagaaagctgcaactgacatcttactcaaaattgagaggatgaaaaccccaggccaggtttctcttggatttgatctcgagtggaggccctttccaagaagaggagaaccaccttgtaaggttgctgtaatgcaactatgcatggagaaaactctgtgctatgtcctgcatattgctcactctggggtaccgcctatactgaaaactcttttggaggatagttcgtccattaaatcatggttccatgtcttttaggttggaatatgcatagacaatgatgcaaggaaaatgttgaatgactataatgtctgtgtacaaccactgatggatttgtcgaccttggcaaatgtcaagttagcttctcccaaaagatggagccttgcttctttaaccgaaatgatcacatgcaaagagttgccaaagccgagcaacataagaatggggaactgggaggctgatgtcctctccaaacaacaacttcaatatgctgctacagatgcttatatctcatggtacttgtatgaggcactgcagactcttccagattacacgattgaagctgagtctgtaaaggcacaataacttcaagtggattctattgggaactgttgtgttagtctattatcttcacatctcaatcaggcagggggttgagtaggaactgggaagctcctttgtcgcaacaaatggatggtgaattccgtgtgagtatgtgtgttgtgcacttccagtttgcacttgtaaatttattctcctcgtatgtgaagggcgtgtctgttttttttttatttaaagaacttgactgttgtatgagttcgcaccccattttttttttgttaatacaacaatgatatgcagctctcttgcgtatcgagagggaaaaaaaagagatggttagttcctttgtcattgcttaaggtaaaaaacatgaattggactattggtattggactgtattttgctcgggaccattggaattactgtacggcaacctatttgccttgtattaacgtaaagctgtgcagttctctttatgtatggtttaaaaatgaagactgatttgtaaagagcgttatgatcagtggcgttataatcaggaaatc

SEQ ID NO: 107807 - DNA, 1541 bp, Zea Mays
attgtgaattataactcgattggcgaatatctgaaaaaaacccaaaatacaaagtagccgccgccgtgctcgtgctccagcgacctcgatggccatgcatcccgttgccggcgccggcgcgccccccgcgtcgtcggtccacggcaacgttgagtacgacgacttccactgggacgacgcagccgaggcggagcttcaggccttcgaggccgcctacgcctcggcttccgcctccgcaaagcgccgccgcttacccgactggacctctccatccccttccccctcctaccacctccatcgcagccaaaacccggtgtccagtggatccacgccatcgtggaccctcacgccccacacaccccaagacaatgtgagggcaagacgccaacaaatatcattcagcggtaagatagtttactgcaggacacctacagaggcggagaaagctgcaactgacatcttactcaaaattgagaggatgaaaaccccaggccaggtttctcttggatttgatctcgagtggaggccctttccaagaagaggagaaccaccttgtaaggttgctgtaatgcaactatgcatggagaaaactctgtgctatgtcctgcatattgctcactctggggtaccgcctatactgaaaactcttttggaggatagttcgtccattaaagttggaatatgcatagacaatgatgcaaggaaaatgttgaatgactataatgtctgtgtacaaccactgatggatttgtcgaccttggcaaatgtcaagttagcttctcccaaaagatggagccttgcttctttaaccgaaatgatcacatgcaaagagttgccaaagccgagcaacataagaatggggaactgggaggctgatgtcctctccaaacaacaacttcaatatgctgctacagatgcttatatctcatggtacttgtatgaggcactgcagactcttccagattacacgattgaagctgagtctgtaaaggcacaataacttcaagtggattctattgggaactgttgtgttagtctattatcttcacatctcaatcaggtgcgagtagacttgcaagctgcatacaaacacgattgtgtaggactccatgagtatgaataagtgtccaaggcagggggttgagtaggaactgggaagctcctttgtcgcaacaaatggatggtgaattccgtgtgagtatgtgtgttgtgcacttccagtttgcacttgtaaatttattctcctcgtatgtgaagggcgtgtctgttttttttttatttaaagaacttgactgttgtatgagttcgcaccccattttttttttgttaatacaacaatgatatgcagctctcttgcgtatcgagagggaaaaaaaagagatggttagttcctttgtcattgcttaaggtaaaaaacatgaattggactattggtattggactgtattttgctcgggaccattggaattactgtacggcaacctatttgccttgtattaacgtaaagctgtgcagttctctttatgtatggtttaaaaatg

SEQ ID NO: 107808 - DNA, 1786 bp, Zea Mays
cccttccgttccgtccgctgcatcctcgtcgtacgttctgtctgtctttctcgccccctctcgctctccgacggctggtcggccgccgccgccgtaagccgccaggtgctgaggctttcgttggtctcttcgccggggacgagcacccactagtgattcctgaacagtttgttttagatggcaaatgaagagaagttgttcaagatgggaaatgcagatacagatactgctgcactgcacaatgaatgggatgatgctctctgtccgatatgcatggaccatccacacaatgctgtccttctgttgtgcagctcccatgacaaaggatgccgatcctatatatgtgatacaagctataggcattcaaattgcttagacaggttcaagaaaatgaaagtgaatgatggggacagtccttcacagtcaagctcatccatgcctaggggtacaagaaaccaaaatgttgtccacggatctcgttttggtcttactagagagagccgcagactacacatagacatatctgaacccaatgaagcttccaatcatcaaggtgccagccatagacctgctgccataggtggagaacaggaagataacagctacaatgaaggcacagatttgacattggaaggtcaagaggttgagatcaatggtacttcagagtcaagtgatatgtcaagcttaaaccaattgttgtgcccactgtgtaggggggctgttagtggctggaagatcatcgaagaagctagacagtatttggatgagaaatccagagcttgctcacgagaagcctgcatgttttctggcaactacagggagatccgtagacatgccagaagggtgcaccccactacaaggcctgctgatgttgatccatcaagacgccgtgcatggcaccgcctggagcatcagcgggagtatgctgatatagtaagtgcaatcaggtcggctatgcctggggcagttgtgtttggtgattatgctatcgaaggtggtgaaatgttttcacatgaccgggaaaccagtggcccaagtgaaccgagtgggtctcttctgacaacattctttctatttcatatgctcagcagtagtccgattagatcaggtgatgagccaggaggcacatcaaggggcctgagaaggcatagaagacgctatctgtggggagagaatttgttaagtcttcaatacaatgataatgatgatgatgatgatgatgatgatgatgatgatgagggggaggagggcgaaggagatgctgtagatgaagaagttcagagaccaaggagccgccggaggttcataagatcaagatcggaggagcgagtataatacattggtggcttgtggtaattacattcttcgctgctgtgaagttcttttgccgtgaacccatgatgactccttgcatggcagtggatgatgtgcttccttgcattgttaaaatgctgcgcacatccttgcaatcaaagacctaaaggcttgtggacctcaagttcaagtttagatgactcaaatgtgtttaacaccatccatgagaccctcttgaatccgacacttacggggaacactcgttcttatggcaaagctggactgatctcagcacaattacacaagtgatactagaagctagcttttggagatgctcgctccatcacagttggtgctgtcgctggtgcaccatgtctttttaccttatgcactgtgtgtcatctgcatttgttgtatattcttcacatattacattccattgagttcatgctgctactattctggttcatat

SEQ ID NO: 107809 - DNA, 170 bp, Zea Mays
gtgtctgttgcagtcgaccattgcgctggagccgttgctccgctggtgcatcggacagtccggtgaattatagcggagcgcggcctcagaaacccgaaggtgaagagtttgaagtcgatcgacctccggtggcgcactggacactgtccggtggcgcaccggacagtccg

SEQ ID NO: 107810 - DNA, 1826 bp, Zea Mays
gctgagctgggcggaccctccaaagcccgagcgtgagcgccatcgtccaccgaggccttgcctgcctgccttgtttccccaaccccctcggaccctcacatcttcctcggtctctccgccgcccaccacctccctccccctcctctctttatacgccaccgcggcggggcttcccccatcccttgtccgttcgctgcattgctcccctaaccgttcggccaggagacagcggagagggcagagatggcggccgcgtccttcaccgccgccaagttcctggcgccggtggccgcgagatccggcggagagagggcgcccccgctccccgccggcgcctcgtcctcctccttcgccaggaccctgcgccgcggcgcggtgcaccacccgcgcctgcgcaccgcgctcgccgtctcctccgacctgctcgctgggaacaaggccgcgcaggccgccgccgcgcatccggcggttacccgggaagaggcactggagctgtatgaggacatggttcttggccgtgtattcgaggacatgtgtgcacaaatgtactaccgtggcaagatgtttggtttcgtccacctttacaatggccaggaggctgtctccactggcttcatcaaacttctgaaccaagctgactgtgttgttagcacataccgtgatcatgtccatgcgctgtccaagggtgtcccggcacgttctgtcatggctgagctctttggcaaggccacaggctgctgccgtggacagggtggttccatgcacatgttctctgctccccacaacctcctgggaggctttgccttcatcggagagggcattcctgttgccactggtgcagcctttgctgctaagtaccgtcatgaggtgctcaaggagtctggccctgatgggcttgatgtcacattggcgttctttggcgatggtacctgtaataatggccagttctttgagtgtctgaacatggcacagctttggaagcttcctattgtgtttgttgtggagaataacctgtgggcaattggaatgtcacacattagggctacatcggacccagagatttggaagaaggggccagcatttggaatgcctggggtgcatgttgatggtatggatgtcctgaaggtcagggaggttgctaaggaggcaattgagagggcaaggagaggtgaagggccaaccctagtcgagtgtgaaacatacaggttccggggtcactcccttgcagacccagatgagctcaggaagcctgatgagaaaacacactacgccgcaagggattctatcacggccttgaagaagtacatcatagagcagaacctcgcaaccgaatccgagctgaagagcatcgagaagaagatcgacgatgtcgttgaggaggctgtcgagtttgctgacgcgagcccgcatccgccgcgcagccagctgttggagaacgtgtttgccgaccccaaaggctttggtatcggccccgatggtaagtacaggtgcgaggatcccaagttcacccaaggcaccgcccaagtttaaggaggttaatctgcgctctgtaccactgtacttgggttctctagttttgtcgatccagtgtcatgttaaggatactgtatgcataaggtggtccatttctttggctcttaggattgtgtctgatactgttgtgtaatttattcgaatgctcaactgatgcccaggttttatgatacgttccggagcttaacttgttcaggaacagctcagtttctactctatagaagtatgtagaatggttttggggtagtaaggccttgtttgtttaccccataaattatataatccagcttata

SEQ ID NO: 107811 - DNA, 726 bp, Zea Mays
gaggccttgcctgcctgccttgtttccccaaccccctcggaccctcacatcttcctcggtctctccgccgcccaccacctccctccccctcctctctttatacgccaccgcggcggggcttcccccatcccttgtccgttcgctgcattgctcccctaaccgttcggccaggagacagcggagagggcagagatggcggccgcgtccttcaccgccgccaagttcctggcgccggtggccgcgagatccggcggagagagggcgcccccgctccccgccggcgcctcgtcctcctccttcgccaggaccctgcgccgcggcgcggtgcaccacccgcgcctgcgcaccgcgctcgccgtctcctccgacctgctcgctgggaacaaggccgcgcaggccgccgccgcgcatccggtatggaataccttttctacgttgctctctcctgttacttcagagagaaaaaagcgatcttgggtgccgacgcagtgtaaaaacccgatcttgggcgctctttacagtttaactgtgctgcgcgattggatctcacgagtctgaaattccgatgagtgatatggtttctagtttaacgacgatttggctggttgcatcccacagtagtactttgtagtcgcaattcgggatgcataagcgtaaatctcacaaaactttacctcccagctttggaatgaaaggtgaaaggatatcgtggcctcctgaatttca

SEQ ID NO: 107812 - DNA, 2132 bp, Zea Mays
cccgctgctttaaatctcggcgttttcgtggcgcgtgcaggcggagaggaagaggacgccaatccaaatccttatccccacgtgtgttatccttccattttgtgggcgggggtgagctcctgcctcctgccgccctgcttcgcaatcctcctccacctcgacaacgacgccgtcgcacctcgctgctcgccgccacagcggtctcacctcatcagcttgtgtcggccacgggacgcgaccgaggcgagggcgggcagtctttgtccggtcggcgatgcagaccctccgtcccgcgcccgcctccttcctcgtgccgcccgctccccagctcctccgcacagcgccgccaccagccccgagaggtgaagtgcatctccctctccgcgtcgtatctcttccttgttcaagtgcagcgtactgattaactccgcgctttggttcctgcacgcactctctccctctctcagcaaacgctgctgctcttgccgcggcgtcgcacggctggttcccctcgccgcaccgtgcctgccggcgccgtcgacgcgtgacaaggtctgcgtcgtccggtgctagcgccaccgtggcctccgtggatgatgccaagaaggacgtgctcatagcgctctcccaaatcatcgatcctgatttcggcacggacatcgtgtcctgtgggtttatcaaggatttggaggtcagtgaggccttggaagaggtctcatttcgtctggagctgacgactcccgcttgcccaatcaaagacgagttcgaacagaaggcgaacgaggtcgtcgcagcacttccatgggtcaagaaggtagacgtcacaatgtctgcgcaacctgcacagccggtatatggaggggagcttccagaagggctacagaagatctccaacatcatagcagtttcaagctgcaagggaggggtagggaaatcaactgttgctgtaaatcttgcgtacacactagctgggatgggagctcgggttggaatctttgatgctgacgtctttggcccaagcttaccgactatggtttctcctgaaaaccggttgctagtgatgaacccagaaagcaaatatattcttccgaccgagtatttgggcgtcaaaatggtgtccttcgggtttgctggacaaggaagggcgatcatgcggggtccaatggtttcaggagtcatcaatcagctgctgaccactactgactggggtgaacttgactaccttgtcatcgatatgcctcctggaacaggcgacatacacttaacactctgtcaggtggctccattgactgcagcagtgattgttaccacccctcaaaagctggctttcattgatgttgccaagggagtaaggatgttctctaaactgaaggttccttgtgttgcggttgtagagaacatgtgctattttgatgctgatggaaaacgttattacccatttggacaaggttctggaactcaggttgtgcagcagtttggaatacctcacctctttgatttgccaatacggccaactctttcggcttccggagatactggaattcctgaggttgtggctgatccgcaaggggatgtggctaatacatttcagaatcttggggcatgtgttgttcaacagtgtgctaaaatcaggcaacaagtttctacagcggtgtcctacgatagatccattaaagcaatcagagtgaaagtgccagattcagacgaagagttcttgctgcatccagcaacagttagacggaatgaccgatccgctcaaagcgtggatgaatggacaggggagcagaaggttcagtacagtgacataccagatgacatcgagccagaagagattaggccgatgggaaactatgcagtttctataacttggcctgatggatttagtcagatagcaccttatgaccaattggaaatgctggagcggttggtggaggctccgagtccagcagcagcgtctgcagtggcctcgtcatgatacagcagaaagaatgttcagttagcaaggggcaagaaggccgacttttagctcccagaaaatttatagctctgctacaaattttgaaagaattttacagtactgtagaaccatgctcattgaattttaaaaaaaggcagcagctttcgttcctctt

SEQ ID NO: 107813 - DNA, 2091 bp, Zea Mays
cccgctgctttaaatctcggcgttttcgtggcgcgtgcaggcggagaggaagaggacgccaatccaaatccttatccccacgtgtgttatccttccattttgtgggcgggggtgagctcctgcctcctgccgccctgcttcgcaatcctcctccacctcgacaacgacgccgtcgcacctcgctgctcgccgccacagcggtctcacctcatcagcttgtgtcggccacgggacgcgaccgaggcgagggcgggcagtctttgtccggtcggcgatgcagaccctccgtcccgcgcccgcctccttcctcgtgccgcccgctccccagctcctccgcacagcgccgccaccagccccgagaggtgaagtgcatctccctctccgcgtcgtatctcttccttgttcaagtgcagcgtactgattaactccgcgctttggttcctgcacgcactctctccctctctcagcaaacgctgctgctcttgccgcggcgtcgcacggctggttcccctcgccgcaccgtgcctgccggcgccgtcgacgcgtgacaaggtctgcgtcgtccggtgctagcgccaccgtggcctccgtggatgatgccaagaaggacgtgctcatagcgctctcccaaatcatcgatcctgatttcggcacggacatcgtgtcctgtgggtttatcaaggatttggaggtcagtgaggccttggaagaggtctcatttcgtctggagctgacgactcccgcttgcccaatcaaagacgagttcgaacagaaggcgaacgaggtcgtcgcagcacttccatgggtcaagaaggtagacgtcacaatgtctgcgcaacctgcacagccggtatatggaggggagcttccagaagggctacagaagatctccaacatcatagcagtttcaagctgcaagggaggggtagggaaatcaactgttgctgtaaatcttgcgtacacactagctgggatgggagctcgggttggaatctttgatgctgacgtctttggcccaagcttaccgactatggtttctcctgaaaaccggttgctagtgatgaacccagaaagcaaatatattcttccgaccgagtatttgggcgtcaaaatggtgtccttcgggtttgctggacaaggaagggcgatcatgcggggtccaatggtttcaggagtcatcaatcagctgctgaccactactgactggggtgaacttgactaccttgtcatcgatatgcctcctggaacaggcgacatacacttaacactctgtcaggtggctccattgactgcagcagtgattgttaccacccctcaaaagctggctttcattgatgttgccaagggagtaaggatgttctctaaactgaaggttccttgtgttgcggttgtagagaacatgtgctattttgatgctgatggaaaacgttattacccatttggacaaggttctggaactcaggttgtgcagcagtttggaatacctcacctctttgatttgccaatacggccaactggatccaatccaaatactccgattaacagtggtccacccctatagaataatctagggattcaaatggactaatgattaaaatctacaatccagattactgtaatccgattgggatctgaacaagcccctaaataagagagcaaaaatcacagtttggtaagttatgcagctttcggcttccggagatactggaattcctgaggttgtggctgatccgcaaggggatgtggctaatacatttcagaatcttggggcatgtgttgttcaacagtgtgctaaaatcaggcaacaagtttctacagcggtgtcctacgatagatccattaaagcaatcagagtgaaagtgccagattcagacgaagagttcttgctgcatccagcaacagttagacggaatgaccgatccgctcaaagcgtggtgtgtatatatgcttttcagcattcagtatgtgggatatatgtggttctaacatcagttcttaaggatggcaagtcaaaagtgtcttcatgtcattaaattgtgaaagtttcatttctacttgatcatagttggtcgccatcataaatgtacaaga

SEQ ID NO: 107814 - DNA, 1225 bp, Zea Mays
cccgctgctttaaatctcggcgttttcgtggcgcgtgcaggcggagaggaagaggacgccaatccaaatccttatccccacgtgtgttatccttccattttgtgggcgggggtgagctcctgcctcctgccgccctgcttcgcaatcctcctccacctcgacaacgacgccgtcgcacctcgctgctcgccgccacagcggtctcacctcatcagcttgtgtcggccacgggacgcgaccgaggcgagggcgggcagtctttgtccggtcggcgatgcagaccctccgtcccgcgcccgcctccttcctcgtgccgcccgctccccagctcctccgcacagcgccgccaccagccccgagagcaaacgctgctgctcttgccgcggcgtcgcacggctggttcccctcgccgcaccgtgcctgccggcgccgtcgacgcgtgacaaggtctgcgtcgtccggtgcagctagcgccaccgtggcctccgtggatgatgccaagaaggacgtgctcatagcgctctcccaaatcatcgatcctgatttcggcacggacatcgtgtcctgtgggtttatcaaggatttggaggtcagtgaggccttggaagaggtctcatttcgtctggagctgacgactcccgcttgcccaatcaaagacgagttcgaacagaaggcgaacgaggtcgtcgcagcacttccatgggtcaagaaggtagacgtcacaatgtctgcgcaacctgcacagccggtatatggaggggagcttccagaagggctacagaagatctccaacatcatagcagtttcaagctgcaagggaggggtagggaaatcaactgttgctgtaaatcttgcgtacacactagctgggatgggagctcgggttggaatctttgatgctgacgtctttggcccaagcttaccgactatggtttctcctgaaaaccggttgctagtgatggtacacctcctatgaacctctatgttagcatgaaattttgtacctgcactaataatggtaaacagacttacctttagaacccagaaagcaaatatattcttccgaccgagtatttgggcgtcaaaatggtgtccttcgggtttgctggacaaggaagggcgatcatgcggggtccaatggtttcaggagtcatcaatcagctgctgaccactactgactggtatgcaaacttgcattggcatctgttctctaaaagaaatcatg

SEQ ID NO: 107815 - DNA, 102 bp, Zea Mays
gaataacatttaaaaatgaggattcttatattaaaatactttttaaccctaaaccttataaagaaatatttataaatcttagaataggattttggtcgttac

SEQ ID NO: 107816 - DNA, 194 bp, Zea Mays
ggcacgtaattgcttaaatgtgtcgggctcatttcgggcggcccgaaattataaaagcccgaaattcattttttggcccaaaattcatattagggcccgaaattcaatttttggcccgaaattcagtttttggcccaaattcacatcagggtccgaaattcacatcagagccctaaattaaaaacaaatttaat

SEQ ID NO: 107817 - DNA, 919 bp, Zea Mays
ataccatgtctaatatttaccatcgtatcgtctccatggtgctgcaccaattcaacgctcctccttattataggtcagcttagtagttggtggtgactcgatcggcgagatgggcatggtcgcttccatgtgcacggagcccatcaagcggcaccgggtggagagagacctcgacggcaaggtggcggacgcgctccgggagcggacgaggtcccggcagaggaccttcaggtcggtgaacagcatcaccatgcgcctgcccaggttcaaggaagggctcagggacgtcaagaacatcttcgaccagtacgacgaggattcagatggcacgatcgacagcgaagagctgcagagcttcggaagcagagtccgggtgcacatgtccgaggaggagatgagcaacctgcaccggtactgcgacatcgacagcaggaagggcgtccagttccaggagttcgtcgtgctcctctgcctcgcgtacctgctcttcgggccagacgtcacacgacgcgtttcggagttcgagtccggcaagctcaattacgtcttcgacgagctcatcgacgcgtacatcttcttcgacaaggacggggacggcatgctgcggaggagagacgtcacccacaggatgaacgaggcgtcgcaccaggagaggacacccagccacataacagcacagctattcaaggagatggatctgaacaggaacgggaaggtgaacctcaaggagttcctctactccatgatcagatgggctggtctcgggaccgaagacgatggcagcgatgaggcctcaccatgatgtaacttttttttttcttttcttttggtctgcattttaacagttgaataagtaaaatgtatgttgacaattgaaagtaaaaataaaaaatatcatgaagaaaatcgaaggtccaaa

SEQ ID NO: 107818 - DNA, 832 bp, Zea Mays
atggaggggctactggtgtgcgcaacgactagggcattgaatcacgtgctaaagaagcttgcggccttgatgggtgggtgataagtaaacgcttcaagcgggtgcgccgcgaggtacagtctctcacggctgagcttgctgccatccatgcgttccttctcgtcaagtcagaagaggagaatcccgatgcacaggacaagaactggatgaaggaggttcgcgagctctcctacgatatggaggataccattgacgagttcatgctccgtgttgatgacaagtctattagtcccgagggcttcgtccacaaattcaaagcttttctaaccagggccaagaatcgccgccggattgcaaaggcaatcgaagacctcaaggcccaagtcaaggaggtggaaccgtggaatgaagacaggaacggaagatacaaaagtaataagactatcatgaatacaagtaggccacggaccatagagctcttgatatgtttgaggatgcttcaaagcttgtcggcgtcgatggaccaaaagacgagctgatgaaatgcctggcaaggaagcatcaagatgctgctgcatcagaaccacatgaggtgaagatgttctctattttttgacatggagtggcaggaaagacaacacttgcgaaccaagtatatgtagagctgaagaaacagttcgacttcgattgctaggcttttgtgtcagtgtcacggaatccggacatgatgaaatttctcagcgaagtaaccaatgaaccttatgcatgcactgaagcagggagtacccaacagattgttggtagaatcgctgatttcctcggggataaaagg

SEQ ID NO: 107819 - DNA, 109 bp, Zea Mays
aggaaaataataacagacaaaaggagacatcaaaaggtgatggtctaaagctgtttaaaacaaatggtacttatccaggactcagaaccctgcaacaacaagatagaag

SEQ ID NO: 107820 - DNA, 107 bp, Zea Mays
gctagattatataatcttatcagataagttgcttgtttgtttcctcactagcttatttacattggattatataatctacctagattataatcccaaacaaacagggc

SEQ ID NO: 107821 - DNA, 97 bp, Zea Mays
caatcaacaagcaataaacgtcgcaacagaaaatcaacaaaccacgcagttgcaatcattagttgcaacgtgcggggatagggaggcgcgcggcagc

SEQ ID NO: 107822 - DNA, 291 bp, Zea Mays
atgcaacactgctcctgtcaaagttctgaagcctggaaattatctcctgccgccgcagccagcgcccactcccgcccgcgcccccctcatggcgccgcctcctccgccgccgccgctaccgccgatggcgataccctccgcctccaccgcatccggccaccgccacgcacgggagagggagggacgccgcctctacgcgcgctggagagggatggggcgccgtcgccgtcacacgtggtggagagattggggcgccgccgtgtgcgggcagggaaggggcggtcttggtga

SEQ ID NO: 107823 - DNA, 383 bp, Zea Mays
ttatgtacaaatgtgtgtttcattgttatagtaaaatgtccatgctttgcacacaatcatatttgataaccataaaaaatatatgttctatacacatttggatcttttatacacatttagatctcgagatgtccaattccctccaacgaaataagtccaagaattttgtttgagacctaaatgacctcagaacaaatgtttacattcagacaaatctttttaagatgctagaacatattcgatctttaaaaacaaccatagattccaatctgaaaaatcagcttgttgacattaccttggctccacggtgtcgttgtcaccgccacacaggaacatcggtccctcgtagccgccataatacgccctccctacaaccgcgtgca

SEQ ID NO: 107824 - DNA, 456 bp, Zea Mays
atgatctccggctcatttattttactgaacagggagctccaagggcgtacggccaacgagtacgttgaagcagggacaatggggatcgagtttacgataggaggtgatgatagcgcgacacgacatccctggacgcaagctaaagcagagcaagcggtctaccaaggaagatgcaagggaggcgaggagccgagcaatcacttgaacatggtcgacaacaaggtctgccggaagagaatatcggcacacaatgcaacacgacaaacgcgcagagcttcaaaatcacacacgcgagacctggccggaactgaggacaagcaaacagagagaaacatgtctgggagttcaacggcgatggggacgcggatgtggacacgaccgccacacactgcgcgaggacaaggaagtcagagcgacaacggcgcaacgatctcaacgctaagcaccggagcttga

SEQ ID NO: 107825 - DNA, 881 bp, Zea Mays
ggatgggtgcggaggctgatagcagggaactccgcgatgggtagcaaggctcgacggcgaacgacgcgacgacaggcaggaagagagcgcggactagagaaagactccgcgagcagcgacgcgaggagcaaaacgaggttgcggttgagcaggctcagaaacaaacacacaacgacttcatcgcgtccatcgcgcgcgcgtcacggacagcagggaggagttcagcgctgtggccatgggcggacaacagagcaggcgattcgatggcgagctgcagcatacaccaaggcaagaccgcggccgacgagttagagcactggctagcagcaggcacgggcgagcagagcaggcaggacgccgggcgtcgcgggcaagcaggaaaaggactcagcgagggagctcgacgcgcgcaacagggagaagcgactgagctggggactgaacgcgggcagcaggcagcagggcgcggccaacaggggagcaggcgcacgcgccatgggagagggaagagagagctttggccagggagatgcgcggccggcagggatctcgcgacatgggaggagcacgcggcagagggcgagcaggggaatgggcgcgccatggctggaatctttgggggaaaaacgcagcgtgcaagggagctcggtgtggccatggaggagcagggagcgcagagtgttggagaggagggagagagagagaagggagcggctggggaagggactcggctgggcgcccagcaggagaacgagcagggaggggcgagcgccatgggaagccaagggctcggatgcatgtggctagcaggggcgcgcgtgggagatgaacttgagggagagagggcggccaggaaatatcccgcggcggctgaaggatag

SEQ ID NO: 107826 - DNA, 382 bp, Zea Mays
atgtccagggcgcaagcagcaaggagttttagggggaaaccatgtcacggccacaacagcaaggcggcgcggaggtggccgtccaggctggtggacggcttcaggaggatgctagtggggctcttctccttcccgccacggccacccaaggtgaccttctccgtcgtccacgaccaccgcgccgccgccgccgcaggtgcaggggcaccagctacagctacaggagggtgcggcggcggcgacgcgtccaagcggtcgtcgtggagcagctccaacctgcacccgctgaacgcgcactacgacgaggccattgctgactgcgtcgagttcttcaacaagtccgccagggtcgacctcaggtcaaggccacacttttgatata

SEQ ID NO: 107827 - DNA, 1706 bp, Zea Mays
cgtatttgtgatgatgcaacatcagacaaatcatttccaaatgttcatgtactaaaaaaagagatttgttaattccttttatgtagaatggaacataaaaggagctaggaaactagtagtgagagtgcaaaggccaaacaaacactagctagtcacaaacaatcgaagaattcaggtatgcctctcgccacccttctgctcccctcagtctctacgcccaccgccggcgaccaccgcacccacagccggcggcatgaccaccaccacggcagcaagcgcaagaagaagccgccgccgccgccatcaccacagccgtcgctcccgttggcaccgagaaccccgccaccgccaggcgcaccaagccccaaggtccgtgcggcgggcaagaacaaccacgcccagtaccagtaccagcagcgccgaggccagccgacgaagaacagggccgcggcggcgtcctcgtcctgggagcaggtgaagagcctgctgagctgccggaccgcgacggcggcggcgcgcgtgcacgacccgtcggcgctggcgcggctccgcggcgcgtcgctctgcgccatgcgcgacgtcgtgctctcctccgcgtcgggcgaccgcgacacggcaccgctgaaccgccgccgcgccccgtcctcctccgctgcctctggcgccggcagcagcagccaccactcctccctgcggggcctctccggctgctacgagtgccgcgccatcgacgtggagcccatgtcgaggcggcggtacccgaggccgagggagctgtgcgcgtgcccgcagtgcggcgaggtgttcaccatggccgacagcttggagcaccaccaggccattcgccacgcagtgtctgagctgggtccggaggactccgggcgcaacatcgtggatatcatcttcaactcgagctggcagaagcggggccgccccatctgccacatcgaccgcatcctcaaggtccacaacgccccgcgcaccgtcgcccgcttcgaggcctaccgcgacgccgtccgctcccgctcccgctgccgcgccgccgcccgggtagcggccgacggcaacgagctgctcaggttccactccgcgccgctcgcgtgcgcgctcggcctcggcggcgcgaccgccctctgctgcgccggcggtgcttcgtcgccctgcggcgtgtgcacggccatccggcacggcttcgcgccgtgggcgggcgcgcacccgctcggggtgcgcaccacggccagcagcgctcgcgcgcacgactgcggctgctcggcttctccatcgtcggtgcagcagacccagcagccggcgaacgacgctgctgcctgccgcgccatgctggtgtgccgcgtcatcgccggccgggtccgtcgcggcggcggcggcggtgccacgtcgaacgctgccgatgaggatcaggaaggcccgttcgactcggtggccgtcgaggacgccgtcagcagcagcatgtacgggaacctcgaggagctcttcgtggccaaccccagggccatcctgccctgcttcgtcgtcatctaccgcgtccttgatgcttgagggaaacacgtcgtctacattatgtttgtaacatttttggttcagacaaaccatgagccactgaaatggtagatctagttgagaaggcccttgcttgtttgcttgtaatatttatcatggaagcccttgcttgtaatttatttctatac

SEQ ID NO: 107828 - DNA, 1781 bp, Zea Mays
cgtatttgtgatgatgcaacatcagacaaatcatttccaaatgttcatgtactaaaaaaagagatttgttaattccttttatgtagaatggaacataaaaggagctaggaaactagtagtgagagtgcaaaggccaaacaaacactagctagtcacaaacaatcgaagaattcaggtatgcctctcgccacccttctgctcccctcagtctctacgcccaccgccggcgaccaccgcacccacagccggcggcatgaccaccaccacggcagcaagcgcaagaagaagccgccgccgccgccatcaccacagccgtcgctcccgttggcaccgagaaccccgccaccgccaggcgcaccaagccccaaggtccgtgcggcgggcaagaacaaccacgcccagtaccagtaccagcagcgccgaggccagccgacgaagaacagggccgcggcggcgtcctcgtcctgggagcaggtgaagagcctgctgagctgccggaccgcgacggcggcggcgcgcgtgcacgacccgtcggcgctggcgcggctccgcggcgcgtcgctctgcgccatgcgcgacgtcgtgctctcctccgcgtcgggcgaccgcgacacggcaccgctgaaccgccgccgcgccccgtcctcctccgctgcctctggcgccggcagcagcagccaccactcctccctgcggggcctctccggctgctacgagtgccgcgccatcgacgtggagcccatgtcgaggtccgtacgattccgacccatcaacctttttttaaagcaaataaccatgattaatgcacgattaacgatcaccaggcggcggtacccgaggccgagggagctgtgcgcgtgcccgcagtgcggcgaggtgttcaccatggccgacagcttggagcaccaccaggccattcgccacgcagtgtctgagctgggtccggaggactccgggcgcaacatcgtggatatcatcttcaactcgagctggcagaagcggggccgccccatctgccacatcgaccgcatcctcaaggtccacaacgccccgcgcaccgtcgcccgcttcgaggcctaccgcgacgccgtccgctcccgctcccgctgccgcgccgccgcccgggtagcggccgacggcaacgagctgctcaggttccactccgcgccgctcgcgtgcgcgctcggcctcggcggcgcgaccgccctctgctgcgccggcggtgcttcgtcgccctgcggcgtgtgcacggccatccggcacggcttcgcgccgtgggcgggcgcgcacccgctcggggtgcgcaccacggccagcagcgctcgcgcgcacgactgcggctgctcggcttctccatcgtcggtgcagcagacccagcagccggcgaacgacgctgctgcctgccgcgccatgctggtgtgccgcgtcatcgccggccgggtccgtcgcggcggcggcggcggtgccacgtcgaacgctgccgatgaggatcaggaaggcccgttcgactcggtggccgtcgaggacgccgtcagcagcagcatgtacgggaacctcgaggagctcttcgtggccaaccccagggccatcctgccctgcttcgtcgtcatctaccgcgtccttgatgcttgagggaaacacgtcgtctacattatgtttgtaacatttttggttcagacaaaccatgagccactgaaatggtagatctagttgagaaggcccttgcttgtttgcttgtaatatttatcatggaagcccttgcttgtaatttatttctatac

SEQ ID NO: 107829 - DNA, 1590 bp, Zea Mays
attatcagtccaatcatatcccagcacgaagagccgccgcaatcctcctccccgtcccctaccttcgtcggtgctctcacccgccgctggtcgccattcctccagatcggcgcccagctcgcagcccactaggcgttgcgctccctctccaaccccaacgaaaccccaggggaaccctcatccccctgtcgtctcccttattgggggccagacatggagagcaagcagtgggggaagacgccccaggaggcggtgggcgcaggcggcggtcgccaagtggatctagatgaagaggatgacctggaggagttccggctgcccatgggccaccgccccaccgagaacctcgacacggatgggctccagcaagcctctgtctacacccagctcaccgcgtccaacgtcggtttcaggctactgcagaagatgggctggaagaccggcaaggggctcggcaagaacgagcaaggtatactagagccaataagagctgacatgagagatgcaaaattaggtgttgggaagcaagaggaagatgacttcttcacatctgaagagaatgtgcaacgaaagaaattgaatattgaacttgaggagactgaggaacatataaagaaacgggaggtcatagcagagcgtgagcacaaaatccgcagtgaagtcaaggagatacagaaggtgttcttttgcaacctctgcaataagcagtacaagctggctcatgaatttgagagtcacttgagctcatatgaccacaatcataggaagaggtttaaggaaatgagagaaatgcagagcagcagtggtagtcgagatgacagacagaaacgtgaacaacaacgagaagagaaggagctggcaaaaattgctcaacttgcggatgctcataggaagcagcagaaggataagcaagaaaagtcagagacggaggatgcggcacccaaaaacatggcagcctctagcaaccaggatcagaggcaaaccttgaagttcggattctctaaaatggctccttccaaggttctagttggtagtgccagcaagaagccaaaggttgccacgaaagtttcttcggtctttggcaacgagagtgatgaggactcgtgacctttgccagagggtggcagactggcagttgcttcttctgtcgtgcattggtctggggacttgataacagcaccgagaattgtatgaacttttgagggtacactgtataaggaaatctgtactgttgttgctggattttggaagctgtttattaaccattcgcccttgtaggcaggcaatacccttcagtttgggacacacctttgtattgtaggctgtattatcgttgttggcttttaatgttaaaaaaaacctttgtattggatgctacagtggtgtcacattttgtctgtcaaagttggaggcttaattttggacactttttttgttggttgcccttctcgtccgtggagaggatgtcactgcttcagtttaaagtttctttattttttgaacaaaaatcatgtgattatgcttatgtttgagttgagttgcataaacttgcactttcaataaggctgccggctgttgcaaaaaaaaaaa

SEQ ID NO: 107830 - DNA, 1580 bp, Zea Mays
attatcagtccaatcatatcccagcacgaagagccgccgcaatcctcctccccgtcccctaccttcgtcggtgctctcacccgccgctggtcgccattcctccagatcggcgcccagctcgcagcccactaggcgttgcgctccctctccaaccccaacgaaaccccaggggaaccctcatccccctgtcgtctcccttattgggggccagacatggagagcaagcagtgggggaagacgccccaggaggcggtgggcgcaggcggcggtcgccaagtggatctagatgaagaggatgacctggaggagttccggctgcccatgggccaccgccccaccgagaacctcgacacggatgggctccagcaagcctctgtctacacccagctcaccgcgtccaacgtcggtttcaggctactgcagaagatgggctggaagaccggcaaggggctcggcaagaacgagcaaggtatactagagccaataagagctgacatgagagatgcaaaattaggtgttgggaagcaagaggaagatgacttcttcacatctgaagagaatgtgcaacgaaagaaattgaatattgaacttgaggagactgaggaacatataaagaaacgggagagcgtgagcacaaaatccgcagtgaagtcaaggagatacagaaggtgttcttttgcaacctctgcaataagcagtacaagctggctcatgaatttgagagtcacttgagctcatatgaccacaatcataggaagaggtttaaggaaatgagagaaatgcagagcagcagtggtagtcgagatgacagacagaaacgtgaacaacaacgagaagagaaggagctggcaaaaattgctcaacttgcggatgctcataggaagcagcagaaggataagcaagaaaagtcagagacggaggatgcggcacccaaaaacatggcagcctctagcaaccaggatcagaggcaaaccttgaagttcggattctctaaaatggctccttccaaggttctagttggtagtgccagcaagaagccaaaggttgccacgaaagtttcttcggtctttggcaacgagagtgatgaggactcgtgacctttgccagagggtggcagactggcagttgcttcttctgtcgtgcattggtctggggacttgataacagcaccgagaattgtatgaacttttgagggtacactgtataaggaaatctgtactgttgttgctggattttggaagctgtttattaaccattcgcccttgtaggcaggcaatacccttcagtttgggacacacctttgtattgtaggctgtattatcgttgttggcttttaatgttaaaaaaaacctttgtattggatgctacagtggtgtcacattttgtctgtcaaagttggaggcttaattttggacactttttttgttggttgcccttctcgtccgtggagaggatgtcactgcttcagtttaaagtttctttattttttgaacaaaaatcatgtgattatgcttatgtttgagttgagttgcataaacttgcactttcaataaggctgccggctgttgcaaaaaaaaaaa

SEQ ID NO: 107831 - DNA, 1513 bp, Zea Mays
ggaaaattatcagtccaatcatatcccagcacgaagagccgccgcaatcctcctccccgtcccctaccttcgtcggtgctctcacccgccgctggtcgccattcctccagatcggcgcccagctcgcagcccactaggcgttgcgctccctctccaaccccaacgaaaccccaggggaaccctcatccccctgtcgtctcccttattgggggccagacatggagagcaagcagtgggggaagacgccccaggaggcggtgggcgcaggcggcggtcgccaagtggatctagatgaagaggatgacctggaggagttccggctgcccatgggccaccgccccaccgagaacctcgacacggatgggctccagcaagcctctgtctacacccagctcaccgcgtccaacgtcggtttcaggctactgcagaagatgggctggaagaccggcaaggggctcggcaagaacgagcaaggtatactagagccaataagagctgacatgagagatgcaaaattaggtgttgggaagcaagaggaagatgacttcttcacatctgaagagaatgtgcaacgaaagaaattgaatattgaacttgaggagactgaggaacatataaagaaacgggaggtatgcaatctaacacctggtgctagtttctctacattcatgcagttttttccctgggctgatgcttgacatgctggaacctagatataatagttgtaagacctctatagcctagaagtagctgtactttcgtgatgtgaggatagctagcatcaaccattaaagagtcttcagcattttgtgcgctttttatttggtggtttcttttccctgcttggtgcaaatcatgacaatccaggtcatagcagagcgtgagcacaaaatccgcagtgaagtcaaggagatacagaaggtgttcttttgcaacctctgcaataagcagtacaagctggctcatgaatttgagagtcacttgagctcatatgaccacaatcataggaagaggtttaaggaaatgagagaaatgcagagcagcagtggtagtcgagatgacagacagaaacgtgaacaacaacgagaagagaaggagctggcaaaaattgctcaacttgcggatgctcataggaagcagcagaaggataagcaagaaaagtcagagacggaggatgcggcacccaaaaacatggcagcctctagcaaccaggatcagaggcaaaccttgaagttcggattctctaaaatggctccttccaaggtggatatctcgaggataccattcaatttgtttgcatttcaggactttgctcgaaatgttggttccatgacctataaattgttgagatgttcgttgttgattggcaaatcttgcagtgctgttgaatttttgtggccacaagccactgctgcaagttcttgtcgaattagactacatatttctttccctagaacctccaatatttagtgttactgcagttttaacctgtaatattgtttgttcaaaatat

SEQ ID NO: 107832 - DNA, 1222 bp, Zea Mays
ggaaaattatcagtccaatcatatcccagcacgaagagccgccgcaatcctcctccccgtcccctaccttcgtcggtgctctcacccgccgctggtcgccattcctccagatcggcgcccagctcgcagcccactaggcgttgcgctccctctccaaccccaacgaaaccccaggggaaccctcatccccctgtcgtctcccttattgggggccagacatggagagcaagcagtgggggaagacgccccaggaggcggtgggcgcaggcggcggtcgccaagtggatctagatgaagaggatgacctggaggagttccggctgcccatgggccaccgccccaccgagaacctcgacacggatgggctccagcaagcctctgtctacacccagctcaccgcgtccaacgtcggtttcaggctactgcagaagatgggctggaagaccggcaaggggctcggcaagaacgagcaaggtatactagagccaataagagctgacatgagagatgcaaaattaggtgttgggaagcaagaggaagatgacttcttcacatctgaagagaatgtgcaacgaaagaaattgaatattgaacttgaggagactgaggaacatataaagaaacgggagagcgtgagcacaaaatccgcagtgaagtcaaggagatacagaaggtgttcttttgcaacctctgcaataagcagtacaagctggctcatgaatttgagagtcacttgagctcatatgaccacaatcataggaagaggtttaaggaaatgagagaaatgcagagcagcagtggtagtcgagatgacagacagaaacgtgaacaacaacgagaagagaaggagctggcaaaaattgctcaacttgcggatgctcataggaagcagcagaaggataagcaagaaaagtcagagacggaggatgcggcacccaaaaacatggcagcctctagcaaccaggatcagaggcaaaccttgaagttcggattctctaaaatggctccttccaaggtggatatctcgaggataccattcaatttgtttgcatttcaggactttgctcgaaatgttggttccatgacctataaattgttgagatgttcgttgttgattggcaaatcttgcagtgctgttgaatttttgtggccacaagccactgctgcaagttcttgtcgaattagactacatatttctttccctagaacctccaatatttag

SEQ ID NO: 107833 - DNA, 147 bp, Zea Mays
gggcgccactgctgttggggtctacaataatcgagcattacttacggtcgcaactacaacgtttcagacttcctgccgtgtgataaccaagttcctttgaatattgtgtcaactactagggcatgttagaattgcttgcgtgtgtgc

SEQ ID NO: 107834 - DNA, 641 bp, Zea Mays
caacacaagtcaaacatcattactataaaaaatatagggagacatgctccctaattaacagaggcatgcataaaagagtatgaactctctctcaaaaggaagcaccctactcccttagtgtttactaacatttctttctattgaaaagcggttcaaccaatcctttatgcagttcaaccgcatatctcacagacttcacccaaatggctagatgtggatgcccacacatatatatagcctccattttgtttcttcaacctctctccacatgttcaattcacatcaaacttgagacaaaagttgaaaaagagcatttactctctcccttgtcacttgcaccccaaatcttctccccaaatcatggtgggaaaacttggtgtgaggttaagatcttcaatttttgagttccattattccatctcacttgctttgagctttgggcaaacattaaaaccttgagcggatttgttactcttggagcttctagatgtctagtcgtcacttgagagtctcaaagtttgtggaaggcctcaagaagtttgtatcgcttgctcctcgagcatctagtgagtgacctcatcttgatctgtatggtcggtgaggggatgattagtgttgaaaaatactcagctctttgtggg

SEQ ID NO: 107835 - DNA, 2614 bp, Zea Mays
cagccgagccgagttccgacctatactataaatccagcgtgttacttaacgctggccggagcggagttccattcgaaagtttccagatggaacttctcatcaccaccttgtatgcagtttccctagcaacagtgatagtcctcctcctttggtttcacaagcccgcagtcgtggggaaagccactgccgttcccggcgacgactgccgcctgggccatggacccttccggtcatcggcagcatccaccacgtggtgcgcggcctaggacaccgcaccatgatggagctgtcccgtcggcacggccccctcatgttcctccgccttggcgaggtcccgacgctggtggtgtccagcgccgaggcagcggagctggtgatgaagacccacgacctcgccttctgctcccgcccgaccaccagcgtcaccatcgacatcgtcggctgcaagggcaaaggggctcggcttcgccccctacggcgaccggtggcgtcagatgaagaagatcaccgtcgtggagcttctcagcgccacgcaggtcaagcgcatcgagtccatcagagcccacgaggtgggacgcctcctccagtccgtcgccgccgccgccgcccgtggagccgtcaacgtcagcgccgaggtgaaggcgctcgcgccggacctcgtggcgagggccatgttcggtggcaactgcgccgagaaggccgacttcatctgccggtacaacgaggtcagccagctggtgtcgggcttcttcctggtggacctgttcccgtcgtcgaggctggtacggtggctgagcatcggcgagcgccgtctcctgaggagctacggcggtatccagcgcatcatcgcgtccatcatcgagagccgcaaagctgccagcaccagcgacgatggggacaactgcagcttgcacgaccatcctgcagaggatcttctcggcgtgctgctcaggctgcagaaggagggctcgctagctttccctctcacctccgagattataggcgccgtcatgtttgacatattcggaggtgccaccacaaccctagggtccacgatggagtgggctatgtcagagctaataaagaaatcagagacgatgagaaagacacaagaggacattcgtcgcgtgctaggtgggtcacgacgaggtgtcatcacgaacactgacctcgttggcctcacctacctaccaatggttatcaaggaggttcttcggctgcatcctccaaaccctctgttggtcccgcgtgagtcgagagaggattgccaagtcatgggctaccacattcccaaaggcaccaaggtgctcgtgaacgcatttgcgatctccagggattcaaggtactggaacaaccctgaagattttagcccagagaggtttcagaataacaatgtcgactacaaagggaccgattttgagttcacccccttcggtgctggtcgtcgacgctgccctgcaatcatgtttgccacttctactctagagattgcattggcaaaccttctctaccacttcgactgggctcttccggatggagtgagcccaaagatggtggaaatgtctgagcaatacgggatgggtgtcaccaaaaagttagacctgcatttgagagccatcccatatgtatactctactatggcataggtatggggggtggttaaagctacctgcaccttaacttgaggtcctttgatgatcgatcattgcatcttcctatttctgaataagggtgaacttttctatgcccatcttgtaggccactagtttgttttacatagagcaacttcaggagcttcctaaatgaaacttctactttgttttttgccaaaaagagaaaaagtacccttctaagggtttgaaaaacaactccattaaaagtaagaaattggatgtaactttctatggtggatagcaactccatgtccgctcactttgccttgcacccctgttgcccgcttcatgttcttttttcaacacaagtcaaacatcattactataaaaaatatagggagacatgctccctaattaacagaggcatgcataaaagagtatgaactctctctcaaaaggaagcaccctactcccttagtgtttactaacatttctttctattgaaaagcggttcaaccaatcctttatgcagttcaaccgcatatctcacagacttcacccaaatggctagatgtggatgcccacacatatatatagcctccattttgtttcttcaacctctctccacatgttcaattcacatcaaacttgagacaaaagttgaaaaagagcatttactctctcccttgtcacttgcaccccaaatcttctccccaaatcatggtgggaaaacttggtgtgaggttaagatcttcaatttttgagttccattattccatctcacttgctttgagctttgggcaaacattaaaaccttgagcggatttgttactcttggagcttctagatgtctagtcgtcacttgagagtctcaaagtttgtggaaggcctcaagaagtttgtatcgcttgctcctcgagcatctagtgagtgacctcatcttgatctgtatggtcggtgaggggatgattagtgttgaaaaatactcagctctttgtggg

SEQ ID NO: 107836 - DNA, 1943 bp, Zea Mays
cagccgagccgagttccgacctatactataaatccagcgtgttacttaacgctggccggagcggagttccattcgaaagtttccagatggaacttctcatcaccaccttgtatgcagtttccctagcaacagtgatagtcctcctcctttggtttcacaagcccgcagtcgtggggaaagccactgccgttcccggcgacgactgccgcctgggccatggacccttccggtcatcggcagcatccaccacgtggtgcgcggcctaggacaccgcaccatgatggagctgtcccgtcggcacggccccctcatgttcctccgccttggcgaggtcccgacgctggtggtgtccagcgccgaggcagcggagctggtgatgaagacccacgacctcgccttctgctcccgcccgaccaccagcgtcaccatcgacatcgtcggctgcaagggcaaaggggctcggcttcgccccctacggcgaccggtggcgtcagatgaagaagatcaccgtcgtggagcttctcagcgccacgcaggtcaagcgcatcgagtccatcagagcccacgaggtgggacgcctcctccagtccgtcgccgccgccgccgcccgtggagccgtcaacgtcagcgccgaggtgaaggcgctcgcgccggacctcgtggcgagggccatgttcggtggcaactgcgccgagaaggccgacttcatctgccggtacaacgaggtcagccagctggtgtcgggcttcttcctggtggacctgttcccgtcgtcgaggctggtacggtggctgagcatcggcgagcgccgtctcctgaggagctacggcggtatccagcgcatcatcgcgtccatcatcgagagccgcaaagctgccagcaccagcgacgatggggacaactgcagcttgcacgaccatcctgcagaggatcttctcggcgtgctgctcaggctgcagaaggagggctcgctagctttccctctcacctccgagattataggcgccgtcatgtttgacatattcggaggtgccaccacaaccctagggtccacgatggagtgggctatgtcagagctaataaagaaatcagagacgatgagaaagacacaagaggacattcgtcgcgtgctaggtgggtcacgacgaggtgtcatcacgaacactgacctcgttggcctcacctacctaccaatggttatcaaggaggttcttcggctgcatcctccaaaccctctgttggtcccgcgtgagtcgagagaggattgccaagtcatgggctaccacattcccaaaggcaccaaggtgctcgtgaacgcatttgcgatctccagggattcaaggtactggaacaaccctgaagattttagcccagagaggtttcagaataacaatgtcgactacaaagggaccgattttgagttcacccccttcggtgctggtcgtcgacgctgccctgcaatcatgtttgccacttctactctagagattgcattggcaaaccttctctaccacttcgactgggctcttccggatggagtgagcccaaagatggtggaaatgtctgagcaatacgggatgggtgtcaccaaaaagttagacctgcatttgagagccatcccatatgtatactctactatggcataggtatggggggtggttaaagctacctgcaccttaacttgaggtcctttgatgatcgatcattgcatcttcctatttctgaataagggtgaacttttctatgcccatcttgtaggccactagtttgttttacatagagcaacttcaggagcttcctaaatgaaacttctactttgttttttgccaaaaagagaaaaagtacccttctaagggtttgaaaaacaactccattaaaagtaagaaattggatgtaactttctatggtggatagcaactccatgtccgctcactttgccttgc

SEQ ID NO: 107837 - DNA, 442 bp, Zea Mays
tggcgtggcggtggctgcggcctcgcggggcacgagcgtaggcggtgaccaccggagatgcaagcgacggtggtgagtggcggttgagcgtcgtcgatggcgtggcgctagcaagcggcaatcctagaggaggggcgagcgacggcgcccttatggcgggtgagcgacggcggcgcacacctaggcacgagcggcgacgacgcaggtgcgcgtggcggcggtcgcgcatacaccctcaaatcggcgcggtatgggcgtccttcggtgaccaactcatccgatccgtggtctcggctgcttcctccggcgacgtcctgctccatccttgtttatgcatggggcctattggttggacccatattagaaatattttcatcaattatgatgtacgatgtagatatttatataactttttataaagatttttatgctttgcgcgata

SEQ ID NO: 107838 - DNA, 1722 bp, Zea Mays
cctccctccccagtcccccttccccaccaaggcagcaacccgcaaatcaaaaccctactccgcgcgcgctctctcacccgcctccatggacggcgcctcctccagcctccctctcccccaaccaccgccgcaggtctacctccgccgccccgtgccgccgcccggcccgccgcttcaggctgctcctagggtccagccgttcagcgcccctgcgcccatccccatcttctcctcgaagccccgcgccgctgtgaggtccccgattcctcctcctcatcttcctgctgctgttacttcagctcccgctcccctggcggccacagcggaggctccatctcggccgccgcccgcatccactgaccagccgccccagcagcaaactggtgcgatgcccccgcctccggctccagcaccggcggggaaggggggacccaagcccaaggcacagttgaatgagcaaaacagtggagaatattctcaatctgaaaacaacgtagtagaaactgcacaagggcatgataaggagactacccctggacctgtaaaagctacaaagaggataaaaaaactaaaggcttctaaacacaacttgaacaacacaaattctggagcaattgaaggagatgctgatccttctttatcctcattaaaccactgccgctatgacagctcactaagtctgctgacgaagaagttcatcaacctgcttcaaggagctgaagatggagcccttgatttgaataaagcagctgagacgttggaggtgcaaaagaggaggatatatgatataacaaatgttctagaaggtgttcatttaattgaaaagggacttaagaatatggttcgctggaagggatttgacatatcgaagcctaaggatatagaacgccaaatttcttcattgaaggaagaacttgaatctctttatgatgaagagttaaggttggatgacgaaataagggaagcaaaagaaaaactacaagctctcgccctagatggggataaaagaaagtcgttatatcttttgaaggaagatataaataagattcctcactttcagagatccactatgatcgctataaatgctcctcgtggaacttgtgttgaagttccagaccctaatgcggatcagtacatgtatgggaatctgggtttgcaggagaagcactacaaaattgtcctgagaagttcaatgggtcctgttgattgctatttgataagcggtgaccatgaggatatatttaaccagggccagctggtggcagcagacagattaaaacctgcagttgctactgatagttctcaagatttgcagcagatggattgtgatcctaatcaggcaagtaatggtggctgcatgcatgcagcagaaccatccagaaagcaagaaattggcattttgagaatcgttccatcagatgccgacgctgatgctgattactggcttgcttctggcgttgacgttagtatgacagatgcttggggcacgtagtggatggatcctcggagttagggctcttaacctgccccttagacagacaaaatagaatgagtctgcagtgcacaattgcattggggctggatcagtaggatacctttagtctccatgctctaggcccgttaactaacaaatcagagggtacatggtaggcagtagatcttgtacattggcggcatgattgtagttgttactctgtttcatcgacagttaagatagaatca

SEQ ID NO: 107839 - DNA, 562 bp, Zea Mays
atggcgacgacaccgccgtcgggcccttgtaacgcgacgtccggcttacccccgatctgctccttgtcggcgtccccgatggcgagcacgatggggagcgacatgttgacgaggcccccgtcggggaggcgaacgcagttgaagtggaggctctgcaggtactcgtgctcgcgcatgaacccgcggagcgggctggcccacccctcggcgagcacgtgcgcccactggaggtcgacgggggcgaggcgcacccgcgggagcgcctccgcctccgcgcgcagcgccgggaggcggtcgggcggggcgacgagctcgacgagcgcgccgccgtccgggtcgatgagggagctgcggaccgacatggcgcgccgcccgtgccgtggggagggggagcgcgagcgcggggcggcgaggcggaggcggcagaggtggagcgggtgcgcgagcgaggcggtggcgcggacgcgagccacagaggaggaagcggagggggaagggtggtggacgcggggtggagtgaggaggtgggtggtggccatggatgcgcgcgaggtgttcgacc

SEQ ID NO: 107840 - DNA, 480 bp, Zea Mays
aaacacgaaacctatccttcgtcttactaatacaccatgtcgcaaatatagaaacgattcaatcctacttcacttaggtttatccacatattcatcgcataataaacatctaaacctaaccttcacatgacgactaatctacgaccgtgatcacaagcacttcacaaacatttaatacaccacaacacgcatgctacagacaagatcattatcgacttgtatatataaccactctgggcataggaccaataacagtgaattggctaaccacacaaaaccgaactcaaattcacgatatcgacgacgatctgcagttcacttattttaccgaacatccgaagagtcctacgctagagctaatttttaccacacaaacaaaaatcagttaagcacaagcgacaccaacggatcctactaaacacatcattcgtttcatccatctaacaatttagctaacaggaatcatagatcagcttaccg

SEQ ID NO: 107841 - DNA, 285 bp, Zea Mays
atggagctgtgctcggccatgggaagggagatggcagggggcgctatggccagtcggcgttgtgaccaagcagggaggctccatgagcacctagcagaggtccggccatggatggatggtggagctcggaaggtgggtgtggaggtgagggaggaggctgctgctgcgttttggaacagagaggaggagaagtggcgtgtgggggaagggaaggagatgggtgggctgccatttattgagctggagctctggacatgtcaggtggcagtgagcagtggcaggtga

SEQ ID NO: 107842 - DNA, 1899 bp, Zea Mays
atggcctttctggtgccgtttctgctgggtctttcctctgtcctcgccgcgtggatctactctgaattcctgggatacagggcatcatcgtctcatgaaaaagtccactcggatgttcacgtcggcgataaaaccatcaaagaaaatgacagggcggtcctacttgaagaaggtgaatctaaaccgccatcgacaaaggcacccaacatgtctgccagagccaaattaatacggtttattacgttggacgagtcctttcttgttggaaaccgcgccacactgagagccatagctgaattcggcattattcttgtttacttttacacctgtgatcggaccaacatatttgcagagagcaagaagaactacaaccgcgacatgtttctgtttctttacattcttcttgtcgtcgcatcaacgattacctcactcaagaagcaccctgaaaattcagtagtttcaggaaagaccgttttctatcttaatcgcaaccaaactgatgaatggagagggtggatgcaggtcttgtttctgatgtaccactatttcgctgcctcggaaatatacaatgcaatccgtgtgttcattgcttgctatgtctggatgactggatttgggaatttctcatactactacaagaagaaagatttcagtatcgcaagatttgctcagatgatgtggagggtaaatttctttgccatgtcctgttgcatggtccttgacaatgactacatgttgtactatatcgctccgatgcataccctgttcactcttatggtgtatggatcactgtttgttctcaacaagtacaatgagatcccatcagtcatggccattaagatcgcaggctgcctcttgactgtcattctgatatgggaaattcctggtgtgtttgaaattttctgggcaccatttacgtttctgctaggttacaaaaacccagagccttctaagatgaacttacccctgttacacgaatggcgcttccgctctggccttgatcgttacatatggatcattggaatgatttatgcttactttcaccccaacgttgaaagatggatggaaaagctggaagaatctgagactaaggtgagagtgttaatcaagggaaccattgttacagcttccttaatggccggctatctgtggtacgaatatatctacaagctggacaaacatacatataacaagtaccatccctacacgtcgtggattccaataactatctatgtctgcctacgcaattgcacccaacagttgaggagtacccatttgtctctttttgtttggcttggcaaaattacaatggagagttatatttctcagtttcacatttggctcaggtctagtattccgaacggacagccaaagttgcttctatctttcttaccagattatccgatgcttaactttttgcttactacgacgatatttctgtcggtatcattccgggtgtttaagctcacaaacgtactgaaagaggcatttatccccaccagggacaacaagtgtctatatcaaaattttattgctggagttgcagtctttgcatgcctatattgcagctcattattcttcaaaacctaccaacagtatagctgatacatagactctaaatcttagctatctcatgtagctcaactcagaaagcacattgtttttcctgggatggagaaattccaagtaattaagtgaacttgttaatttgtttcttttgtatgtatttccaagtaattgcgtgtttttagagacatccatagtcgtgtccttagttttggtggttttaactgcctatgtaaacaaaacaacaagtcttgtaaaatcagttctatagtagtgttctactttagttaagctttactcttacgagttcactatatttccgcttacataata

SEQ ID NO: 107843 - DNA, 3036 bp, Zea Mays
ctggcccctctcatgtcctgagcagcggctagctagctccacggcttcgtcgccatggatcttgtggccggcgccgtgggcagcatcatccgcaagctcggcgagctgctcctggctgagtaccagctgcaggcgtgcctgccggaggaaatcgagtctctgaaaaatgagctcgagagcgcgcacgtggctctccgcaccgtggcggaggtgccgccggagcatcttgatcaacaggtccagctctgggctcgcgaggtcagggaggcgtcgtacgacatggaggacatcctcgataccttcctcgtcaacgacgcaccggctgagaaaaaggatggcctcggcaaacgtcgtcgtcttggtcgtcgtctcctggacaatatagctggcgccatggaaaagatgaggaagctgttcaaaaagagcaaggagtgtcacaccatagctggcgccatagagaagatgaaggaacggctccgggaggtggctgaccgccgcgacaggtacgccgttccggtggcagcgcctgcgccggcgaggacgctggatcctcgcctcgcatacatgcacagggaagcggcacagctggtcggcatggacaggtccaaggctgaggtcatggccatgcttctgccgctgccgtcgtcccgctgccccgaggacgacatcgacgtctctgccagtggcggtgacaagatgaagatagtttctgtggtcggagctggtggcctgggaaagaccactcttgccaaggccgtctacgacgagctcaaaccgcgatatgactatgaagcgtttgtttcggttggccggaaacctgacctggtgcaagtctttaccagcatcttcttccgtctcgacgtacataagcacgaggccattcgtgaagtaaaggacctacagctgttgaccgacggactacgaacatttctacaagacaagaggtacttgatcgttatcgacgacgtttgggatacagaatcttgggaaacaatcaaattagcttttgatcagaagaataagcagagtagggtaatcacaaccactcgcaaccgacaagtagcttccagcgagaaggtttacgagctacatccgctccctcatgacagctcgaagaagctattttatatgaggctgtttgggggtgaggacaaatgtccggctaatcatcctgaagaggcgtctcaaaggattcttaacaaatgtggcggtgtaccattggctatcatcacaatggcaagcttgctggtgggtaaatcgagagaagactggttggaggtgtgcagctctcgcggtttctaccgcggcggcggtaaagataacaacaaacaagtagatgacaccgtgtggatactgtctctgagctattatgacctaccttcatatctgaagccttgcttactgtacctaagtgtgtatccagaagactatgaggtcgagagggagagattgatatggaagtgggtagctgaaggtttcatcgagaagaaagcaggaagcagcagcagcctgtttgagcagggagaggaatacttccatgagctcataaacagatgcatgatccaggcggtgggggacgacaaagaggttgctgacgccatatttggttgtcgtgttcatgacatggtgcttgatctcatccgtgacatatcaaacgaagaaaacttcatcactgtctcatacgatgatggtagaagaggcgcaacgtcgtcgtcgtcgtcacgacacgtggtgcgccggttagctcaccaaaacagaagaataacggaggaggacaaccctgtgagtggcagcatgaggtcactggttgcctgtgggtgtgatatggatggttgggtcttgcacacgagctctaataagctgctgcgtgtgctagctttagagaaatgcacgccaccatctatggacatcggacatcttggaaaactgcttcatttgaggtaccttgggttacatggtactcgcatcaagacactcccagaggaaataggatccctcaagtttctgcaagcactggatttagaggacactaaaatatcacggcttccacagactgtttgcctgctaacacagctgatgtacctacgcggtgcaaccggggtcacaacattgcctgatggtttcttggggcaggtgacgtcactagaggagctccatatatgtcttcccaccaaagatgacgagtacagccagaagaagttcatgcaggatatgggcaagcagggagaaatcaggatgctcgttttgtatgggaacagaattgagttggatccgtggatgcagtccagtctagtgcaatcactaggcggtctgtacaagctccagacccttgtggtgaggcattatgcagatggggtagcagcagcacagggcagctgggacacggcgaagcttcggcgacgtctccggattttgaacttagatgtcctccggttccatcgtgtaccatcgtgcatcgatcccgcgcgcctccccaacctctcacacctacaactgcttgtggttcatctggacgaggcaggtctgagagcactgggcggcctgccagagctcacctacctcgcgctgtcgttgaagcctcgttcgctgaacagctcatcatgcaaggctacggtagctgatgttgttgccgcagatggcttcttcctcaagttgagatcgctcaagctgtatggctggatggtccagttggtgcccagcgaggactcggcaagtgtttcgctcagcatctggaatgaaggagcggagggttccacgagagactgcaccgccgggagggtagcacctgctatcatgccagacctcatacatctggagttcaatgtccctatcgcagccttgtataagataacaaataatggatgcagctgttacagcctcggctgggagtgcctcccttcgctacacaaaatcaaggcgcttgtcgactatgacggcacctacactgctgatttcgagaagccagtggctgagatgatgcaggcagcaaaacttcatcccaaccaacccataattgagatggttactcaattataa

SEQ ID NO: 107844 - DNA, 567 bp, Zea Mays
agaggcggagccatgtaatatacaagtgaaaaatcccccgcaaaaacatgcgtcgaaaaaagaccgcgacaacggtcttcgacattcgaccaatacaaagtcaccgcgaggctcagcgctagccaccctcggttgtgacaactccgtgcagaagtcgcctgagggtgtagccggaccagcacaacaagtgcgaaaaaccaaagtctaccgcgaagacttaccatgcagaagtcgcctaaggacgcccatggcaagtactggtcgcacgtggtgcagtgcaggagctgcaacgcagcactcaaggccatgaaggcgctcgaggctgccctgcaggtggcctcggtcgccgtcgtcaggctccttgtcgtcgccaaggaaacggtcctcacatcgactgttcagagggccgtggtcgtgtcagcgaccgtgctgtgcttcgctgcctcccgctggcttgccaacttcatccagaacttctacttccaagactacatccacgcctacaagtgacacgctcaggaatacatctgtttttaaggtttttgttgctaggagattgttgtattt

SEQ ID NO: 107845 - DNA, 873 bp, Zea Mays
tagctagcctttcagttcatcgagcaccactgcacatcccgatcatcattttgcgatacacattctaccaaactcgatcgcaagaagaagaaacagctagctagctaccaatcaatggcgtccaacgacaacgtcgccgtggccagcgaggtgagcagcgccgtggccaagctcaacgaccacctcgccaccgcgctcaccggcagcggcagtgagaacgccggcaccgtcatcacgctggccgggaagaacagcggcgccaccatggaggcggcggccgcgggcgacgtggaggacctcgtcgtcgtcagcagcgtggacgcggaggagcacgacgaaggtcatggccaccaggacaacgaggaggaggaggtggaggagaacgtggtcatcaccgcctacgccaacagcaactaccaggccgtcaacaactcggtgctcgttgccggcagctgcgccgtcgacgaccccggcgtgcacgtcgtcgttgtggagcacgtcgacgagatacgcgactacgacgaggacatcgacggccaagagttctaagcactactgcattgttattactgcaagctatatggatatggattgaagggcatatatatatatatatcgtcataatatatccctgcatgacaaatatatatctatgtactatactacatatacattacatctacattttcttggatcgggtatgtactggtactactgtaagttgttttgatgcatactgctacttgaataaaaaagctagctgaatatatatactctccgcccatttcaaattaattatataagctgttttaaccttttctatggcttttactgtacgtctagattatgtacaaatatatatgtagttttttt

SEQ ID NO: 107846 - DNA, 2927 bp, Zea Mays
cgacaattactttcgttgcgcgctgcaactgccgctcgccgatccgcgcacacagccgactgccgccgccatggaggacgttctgacaccgccgccgcagccggaactcgccggagagaagcgtaagagggaggagagttcgctggatgcgtccatcgaagacgctccatccgcccccgcctccacctgcagcgctgaggatgcggccggcagcgacgtcgcccggcacccgatgtggaagacgagcctgtgctccttcttccgccgccgcggcgccggcgccgaagggtgcagtcacggggactcctgccgctacgcgcacaccgaggaggagctccgcccacggcccgacggcacctgggaccccacctccgaccgcgccaaggagctgcgcaaggtcgccgcggaggcccaggaggaggccgaggaggaggtcacggtggatgagcagtcactcgacaagtgcctcgtcgggcttcccaggggctggacggctgataggctcaagtccttgctccaggatcagggaatctcgtatgcaacagcaaagaaaaagaagggaatgacagttggttttgtgacttttcagagtgttgaacaactaacaaatgcagttcaggtccttaaggagaacccttctgatggaaagcaaattaagatagtagatgccaatcgtaggtcccatcaaaaggcacatgctggagcacctgtatccaatactggaactgcaacagaaaatggtagtagtcctactacacctgcagaggaaacatctgtgcctgaatcggtgtcatcaagtaaaaaaggtgcccgtgatgcagttactccccttgcccatatgacttacattgatcagctagaacacaaaaagcaatctatggcacagatactgaagaaacttactcgcaatgctaggaaagcttgcccacctaccattccccatcctgattgggtttttaaatcaaaggaaatcggtggccttccttgcaagtttgaaggcattttggagtccccagttgttaatggataccgtaacaagtgtgagttctctgtaggatattctttagagggcaaaaagacagtaggatttatgctcggaaatttcagggaaggcgtgactgctgttgaggaacctgagaactgtccaaatgtctcagaaatttcctgcaaatatgctaaaatgttccaagattttcttcaatcatcaagtttccctttgtggagcaagattgacaactctgggttttggcgccaactcacagttcgtgagggaagatgtccagctgaagctgttgtttcacagaatgcagaatcacaaatatcagaagtcatgcttattgtgcaggtgtgttcgacaagtgttgatgaagctcttatgaaagaagagtttgacaagctgtctgctgccctggtacaaggagcagcaacatgctcacctcccttgccactgacaactattgtagtgcaagatcataaagggatatcaaatgctgcacctactgattgcccactgatcccgctattggtaccaaagggagataagttggatggcacatcagaagataaaacaagaatccatgatcacataagcaacttaaagttctctatatcaccaacagcttttttccaggttaatactcttgctgcggaaagattgtatgcccttgctggtgattgggctaatctcaattcagacacattactttttgatgtgtgttgtgggactggaactattggcctgaccttagcacagcgtgttggaatggttgttgggattgaaatgaatgaatcggcagtttcagatgctcacagaaatgctcttatcaatggcataaaaaattgtcgctttgtctgtggtaaggctgaagatgtgatggggccccttctcacagaatatcttggttcaccacagcagcaggctgcagcttctaaaagtaattctgaaatcgatgatacaagcaaaactgaggatatgattggttgtgcaagttatgatggtgaaaatatagatagctcaaagcagagacatgacaatgctgaaggtcagcagcctatggacacgtcagttgatcatcctacctgtgcaagtgaggtggatgggatggacgtggttgattgcaatcatgatgaaaacaatgtggcttctggtgaacaaaattgtggggaagcatcattgattaatggtaaacccattgagacatcatcagataatagtttggagcaaggcaagacatgcaaggatggttcttccagtccaaacaacaatgtccttgctgctaatgcatgccagtttaagaatgtcgttgctattgtagaccctccacgtgttggccttcaccctactgtgatcaaggcattgaggacgcatccacgtattcgacgtctagtgtacatttcctgcaaccctgacagtctagtcgccaacgggatcgagctttgcacaccaacacccgagaaacaagagaagaacaaaggcaaccgagggtggcggtctatgagcagcgcgggtctcgctcggcagaggacgaagtcgatgcccaactctgaaccttttatccccaagagggcaatggctgtcgatctgttccctcacacaccgcattgcgagatggttatgctttttgagaggtgaaggaagtgtgtctaccaattggacgcagctggcgtgcctcagattcttgttaagagatttttgacctttgtgtcgaggaccatatctgtttttcctcctcaccttggcccatccatatgttgtaacttagtaacatctattcgattgagaggccatgacggttggtgttggtggttactctttcggatttgccttctgttcggctacacttaatcactggtatgtatttctttttcgtgttaaatggatggcatagtaggactaattcgtgtacgtaaaatgtgtgctagtagcc

SEQ ID NO: 107847 - DNA, 320 bp, Zea Mays
ctgtcctgttttccaggcatatactgtagaaacaaaccatgaagctttggcttatatagtgcagaggaatcccaggttgactacattggagaagcagctcttcagaaggggaggaggctttcagcatcaacaatgaagccagtcatcttgctgcaaagccgtgcattgtatatgtgttcatgttgtgactcaacctatattcatttgctgcgattcttcttgttcatgcaatcgattgtaagcttccagttttcgtgtgccgaggcagtcttgcattcctcatgaacgtgtaatggctaatgagtacacgtaactcgagc

SEQ ID NO: 107848 - DNA, 1572 bp, Zea Mays
ctggtgggctgaccaatcagttcggagtctgccatcagcccatctctgtgcgcgactccccgtccgttcccctcttccactacgtgctcgcgagtcgcgtccgctcctcctctttccaaagggcgagttcgcatcgcagcgtcgcccgcagcagcagcggaccgcagaccacgccacctcagccagcgacagggagcgagggagcgattcgatcagaatcgacatggacggcggcgagcacgaagcggaggagtcctcctacaagcgccgggagcgcctgctcgccctccgctccgccgcaaacgcgtctccggcaggggctcctccgccgacggccgcggggagcatcctcccggaccctgacctcccgggagacgaggccgcatccgtgtgcccgaccccgccccagcggttcgactactacaccaaccccgccgccgccttcacttcctcctcaggaggtgccacaaatcccacctggtcccacaagcgcaagagccctcccgcctgctacgccccgcctccgcctccgccggcttacgggaactatggcagcgactatcaccgtccacaccagcagcctacatcatggcaagttcactcaacatccccgatgccacaagatgcggcaaggagcagtccatggcaaagccctatgcagttccaggatccaatgtcaggataccaaggaggtcctcccagcgctccacgtccttggggctcacattctggtcctggaggccgaggttcttattcaaatccaccaaactttgggttcagacacccgaatcccagccggggtggcagcccaatgaactatggaccaagaggtggcccatattcatcttatggacgtggcagggggcccaactactttggcagcccaggatcaagggggagaggtgggagggttggctgccatggccggagttacttcaacaagtcaatgcttgatgacccttggctggacctgcaacctggtgtcggcaacatactgatacctaggggtgagtatgactccaacaagtcctggctcccagaatcgctgcgaaaaaagaaggaaacgccgcctgctcaagggcaaattaaaccgacgccaggattgagcctagcagaataccttgacatgtctttcaatgaggtttctgataaagagaagtaggctttttttatgtatgcatagctacgacgacaggttgatgtttgtttttgccatcgtttgcaatagatctttggaagcacctcttcattacaactttgtaggctttgtttttttttaaaaaaaagagaagcagaactttggagaagggaaagttgcaaaggttgcgtagcatgtcagcgttttctgctggtgcattaacgaccagtgcctgtttcgtcttggattgcatagaaagtttggtggagattctgttgaaggaaaaaaaaagaagggtgcaaatcttgtgccaaaggtcagctggagatagatgctgcgcttttctttctttgttggtgcatatatgtataacgtgagcatccaaagtgagctaggcacataataaaaagcgcacagatcttttgcgtgatggc

SEQ ID NO: 107849 - DNA, 282 bp, Zea Mays
atgcacttctacttgaagcagcagcagatcataaacaaaaaaaaaacatccattgttaaggtgagttatagcgcagcatgtcgaaaacatcaagtgtctacgccttattgttcttcgccaactcttccacatcaagctccactgccagtactggaccatccagtttcgtggccatgccgctgttctcgactagaccgtgatcaacagcggttcttaaagagtatatcactctgccaaggatgtcagtcattgggacaggtccaaacaagcggctatctctag

SEQ ID NO: 107850 - DNA, 1794 bp, Zea Mays
cgtcttctcaccctcctccacagatttaccagtgatgatacgattcgtcgtcgtctcatcggccccttgggatctagaatggaacttggcgccaccactgccctgtaccctctgcaccgctgcaaaaccatttacctggtcaggcatgcccagggcattcacaacgtcgcaggcgagaaggacttcggcgcctacatgtcacatgaactgttcgatgctcagctcacccctttgggttggaaccaagtcgatggtctgcgggagcatgtgaagaaaagtgggcttgcagagaagattgaattggttattacttcccctttactgaggactatgcaaactgcagttggggtctttggtggtgaaaagtatactgatggtgtaaatgcacctccactaatggttgaaaatgctggacacagtggacgtccagctgtttcaagtttgaactgccccccatttattgcagttgaaacctgcagagagcacttgggtgtccatccatgtgacaagaggaggagcataacagaataccggcctctcttccctgccattgatttttcattgatagagaatgatggagatgttctttgggaaccagatgtgagagaaacaaatgaggctgtcgcattgaggggtatgaagtttatggactggttgtggacaagagaagagaaagagatagctattgtcagtcacagtggtttcttgtttcacaccttaagcatgtacagcaaggagtgccatccaaccataagagacgaagttagcaagcactttgcaaactgcgagctacggtcgatggtgttggttgacagaagcatgcttgggtcatattcgtcaagattcaactatgctggcaagaatccaaccgggctagatgtgcctagtgatattgcagataagaagcaggttgatgaagctcagaagaactgaggcaaccttgaaagcataccgtagatgacttggattatcaaaaagccactctgacctttgcgaagcttgcttgcttgctttgaagagggcatctactacagatagagtttacacataccattgcgttagtcgagatgaactacgcagcaatgtataagcatgtctgctcttttgtctcagcctacatttgagattcagggcattggactaagatcgcctatttatgataataataataataataaccggatcaccccacattcaccaggtgatgcacgtcaaaattctattggtttcctagctgttttaaaacctaggggtggtttctgatggatggcgataaaaccgatcgatgtatggttttgggttgtgcgctgtatttctgatttctggttcagagataatggaggccggcgctgctgcatatgcatccaaactgtttacattgtgtaaaaaccatatatgttttgtttacaacgtggaaggcgagacggatcacaacgtgcaatgcaggctgaccgcctgcgagagcatgtgaaggaatctggacttgcagagaagatcgagctggttatttgttctcctttatcgaggtacagttttgcatgatcttttctgcccagcgatgacaagaagcaaccaggaggaagctcaagacagaatctgagcggctgagcctgccttatgaccccaagggcttgtttggtgaattggtgttcaccgctgattccttttgtcatcctattttgaaaattccctagctacatccagtccatttgttaactattctgagaatactactctgaacttcccatttatggcgattagggttttgacactcttttcctttagggctagttt

SEQ ID NO: 107851 - DNA, 1890 bp, Zea Mays
aatccacctcctctgcttcccaggcccagcagcaggagctcccccgtctccgtcctcctccgcctctgtcagggtcccggtcggacttcctcacgaccgccgcgccaaatcccgtctcgttcctccgttccgctgcgcatcctcaggaatggaacttggcgccaccactgccctgtaccctctgcaccgctgcaaaaccatttacctggatgactgcctctttcaaatgtgcaggtcaggcatgcccagggcattcacaacgtcgcaggcgagaaggacttcggcgcctacatgtcacatgaactgttcgatgctcagctcacccctttgggttggaaccaagtcgatggtctgcgggagcatgtgaagaaaagtgggcttgcagagaagattgaattggttattacttcccctttactgaggactatgcaaactgcagttggggtctttggtggtgaaaagtatactgatggtgtaaatgcacctccactaatggttgaaaatgctggacacagtggacgtccagctgtttcaagtttgaactgccccccatttattgcagttgaaacctgcagagagcacttgggtgtccatccatgtgacaagaggaggagcataacagaataccggcctctcttccctgccattgatttttcattgatagagaatgatggagatgttctttgggaaccagatgtgagagaaacaaatgaggctgtcgcattgaggggtatgaagtttatggactggttgtggacaagagaagagaaagagatagctattgtcagtcacagtggtttcttgtttcacaccttaagcatgtacagcaaggagtgccatccaaccataagagacgaagttagcaagcactttgcaaactgcgagctacggtcgatggtgttggttgacagaagcatgcttgggtcatattcgtcaagattcaactatgctggcaagaatccaaccgggctagatgtgcctagtgatattgcagataagaagcaggttgatgaagctcagaagaactgaggcaaccttgaaagcataccgtagatgacttggattatcaaaaagccactctgacctttgcgaagcttgcttgcttgctttgaagagggcatctactacagatagagtttacacataccattgcgttagtcgagatgaactacgcagcaatgtataagcatgtctgctcttttgtctcagcctacatttgagattcagggcattggactaagatcgcctatttatgataataataataataataaccggatcaccccacattcaccaggtgatgcacgtcaaaattctattggtttcctagctgttttaaaacctaggggtggtttctgatggatggcgataaaaccgatcgatgtatggttttgggttgtgcgctgtatttctgatttctggttcagagataatggaggccggcgctgctgcatatgcatccaaactgtttacattgtgtaaaaaccatatatgttttgtttacaacgtggaaggcgagacggatcacaacgtgcaatgcaggctgaccgcctgcgagagcatgtgaaggaatctggacttgcagagaagatcgagctggttatttgttctcctttatcgaggtacagttttgcatgatcttttctgcccagcgatgacaagaagcaaccaggaggaagctcaagacagaatctgagcggctgagcctgccttatgaccccaagggcttgtttggtgaattggtgttcaccgctgattccttttgtcatcctattttgaaaattccctagctacatccagtccatttgttaactattctgagaatactactctgaacttcccatttatggcgattagggttttgacactcttttcctttagggctagttt

SEQ ID NO: 107852 - DNA, 2118 bp, Zea Mays
actaagcttatataaattccgttagatactcggtttgacatctcttttttatatacatttcgataagatcgtaaaaatctcacctcgcgcgcaaagcgcgcgttagacacaagttgcttctcacttggaaggaattatttgagttagaagaggagctccgtgctctgcttccttcccggccaatttttattttttatttcacagtcccattctgatcctgtggacagtgggttaataatagtaataaaaatgataatccacctcctctgcttcccaggcccagcagcaggagctcccccgtctccgtcctcctccgcctctgtcagggtcccggtcggacttcctcacgaccgccgcgccaaatcccgtctcgttcctccgttccgctgcgcatcctcaggaatggaacttggcgccaccactgccctgtaccctctgcaccgctgcaaaaccatttacctggtcaggcatgcccagggcattcacaacgtcgcaggcgagaaggacttcggcgcctacatgtcacatgaactgttcgatgctcagctcacccctttgggttggaaccaagtcgatggtctgcgggagcatgtgaagaaaagtgggcttgcagagaagattgaattggttattacttcccctttactgaggactatgcaaactgcagttggggtctttggtggtgaaaagtatactgatggtgtaaatgcacctccactaatggttgaaaatgctggacacagtggacgtccagctgtttcaagtttgaactgccccccatttattgcagttgaaacctgcagagagcacttgggtgtccatccatgtgacaagaggaggagcataacagaataccggcctctcttccctgccattgatttttcattgatagagaatgatggagatgttctttgggaaccagatgtgagagaaacaaatgaggctgtcgcattgaggggtatgaagtttatggactggttgtggacaagagaagagaaagagatagctattgtcagtcacagtggtttcttgtttcacaccttaagcatgtacagcaaggagtgccatccaaccataagagacgaagttagcaagcactttgcaaactgcgagctacggtcgatggtgttggttgacagaagcatgcttgggtcatattcgtcaagattcaactatgctggcaagaatccaaccgggctagatgtgcctagtgatattgcagataagaagcaggttgatgaagctcagaagaactgaggcaaccttgaaagcataccgtagatgacttggattatcaaaaagccactctgacctttgcgaagcttgcttgcttgctttgaagagggcatctactacagatagagtttacacataccattgcgttagtcgagatgaactacgcagcaatgtataagcatgtctgctcttttgtctcagcctacatttgagattcagggcattggactaagatcgcctatttatgataataataataataataaccggatcaccccacattcaccaggtgatgcacgtcaaaattctattggtttcctagctgttttaaaacctaggggtggtttctgatggatggcgataaaaccgatcgatgtatggttttgggttgtgcgctgtatttctgatttctggttcagagataatggaggccggcgctgctgcatatgcatccaaactgtttacattgtgtaaaaaccatatatgttttgtttacaacgtggaaggcgagacggatcacaacgtgcaatgcaggctgaccgcctgcgagagcatgtgaaggaatctggacttgcagagaagatcgagctggttatttgttctcctttatcgaggtacagttttgcatgatcttttctgcccagcgatgacaagaagcaaccaggaggaagctcaagacagaatctgagcggctgagcctgccttatgaccccaagggcttgtttggtgaattggtgttcaccgctgattccttttgtcatcctattttgaaaattccctagctacatccagtccatttgttaactattctgagaatactactctgaacttcccatttatggcgattagggttttgacactcttttcctttagggctagttt

SEQ ID NO: 107853 - DNA, 2197 bp, Zea Mays
actaagcttatataaattccgttagatactcggtttgacatctcttttttatatacatttcgataagatcgtaaaaatctcacctcgcgcgcaaagcgcgcgttagacacaagttgcttctcacttggaaggaattatttgagttagaagaggagctccgtgctctgcttccttcccggccaatttttattttttatttcacagtcccattctgatcctgtggacagtgggttaataatagtaataaaaatgataatccacctcctctgcttcccaggcccagcagcaggagctcccccgtctccgtcctcctccgcctctgtcagggtcccggtcggacttcctcacgaccgccgcgccaaatcccgtctcgttcctccgttccgctgcgcatcctcaggaatggaacttggcgccaccactgccctgtaccctctgcaccgctgcaaaaccatttacctggtcaggcatgcccagggcattcacaacgtcgcaggcgagaaggacttcggcgcctacatgtcacatgaactgttcgatgctcagctcacccctttgggttggaaccaagtcgatggtctgcgggagcatgtgaagaaaagtgggcttgcagagaagattgaattggttattacttcccctttactgaggactatgcaaactgcagttggggtctttggtggtgaaaagtatactgatggtgtaaatgcacctccactaatggttgaaaatgctggacacagtggacgtccagctgtttcaagtttgaactgccccccatttattgcagttgaaacctgcagagagcacttgggtgtccatccatgtgacaagaggaggagcataacagaataccggcctctcttccctgccattgatttttcattggcaagtctctcctattgtccgttcatgagccatttcttgggcattgcttttcttcagatatgtatttgcttatttgcagatagagaatgatggagatgttctttgggaaccagatgtgagagaaacaaatgaggctgtcgcattgaggggtatgaagtttatggactggttgtggacaagagaagagaaagagatagctattgtcagtcacagtggtttcttgtttcacaccttaagcatgtacagcaaggagtgccatccaaccataagagacgaagttagcaagcactttgcaaactgcgagctacggtcgatggtgttggttgacagaagcatgcttgggtcatattcgtcaagattcaactatgctggcaagaatccaaccgggctagatgtgcctagtgatattgcagataagaagcaggttgatgaagctcagaagaactgaggcaaccttgaaagcataccgtagatgacttggattatcaaaaagccactctgacctttgcgaagcttgcttgcttgctttgaagagggcatctactacagatagagtttacacataccattgcgttagtcgagatgaactacgcagcaatgtataagcatgtctgctcttttgtctcagcctacatttgagattcagggcattggactaagatcgcctatttatgataataataataataataaccggatcaccccacattcaccaggtgatgcacgtcaaaattctattggtttcctagctgttttaaaacctaggggtggtttctgatggatggcgataaaaccgatcgatgtatggttttgggttgtgcgctgtatttctgatttctggttcagagataatggaggccggcgctgctgcatatgcatccaaactgtttacattgtgtaaaaaccatatatgttttgtttacaacgtggaaggcgagacggatcacaacgtgcaatgcaggctgaccgcctgcgagagcatgtgaaggaatctggacttgcagagaagatcgagctggttatttgttctcctttatcgaggtacagttttgcatgatcttttctgcccagcgatgacaagaagcaaccaggaggaagctcaagacagaatctgagcggctgagcctgccttatgaccccaagggcttgtttggtgaattggtgttcaccgctgattccttttgtcatcctattttgaaaattccctagctacatccagtccatttgttaactattctgagaatactactctgaacttcccatttatggcgattagggttttgacactcttttcctttagggctagttt

SEQ ID NO: 107854 - DNA, 192 bp, Zea Mays
catgcatttttatttaggttgaactgtctcccacaaccggtactctgagcatggctgcaatcatgaacaagagcactcatctggacatactgccttcgcctagggataattcagctgatagtggccaagaagatggaggctctcgggagtttgaattcaagcctcatctcagttctcaatcgtcggtatgga

SEQ ID NO: 107855 - DNA, 1701 bp, Zea Mays
ggggaagagaaagcgagagggagagaaatagcaggccgccttgagctggcataggacgcgacggccgacggtctcggtctcgcaggggcagggctgggcggtcgacggaggccaattctccaacttcctccctccgtcgatcatccagcaccagcaggagaatcccgtcgaatccccctctcaaccaagggcgcgcgcgcgtgcgtatgcctcctccagatccaaagcaacagacagcgagggggcaccggggtccgccgcatgtttgcgatttatggaggatcatgctttcttgcttactacattagctcctgacgcgccgccctcccctcgcgttcattgatttctgttataattactaccgagctactatctccacattattattggtaaagaaagaaagggcgcctcctctaatttgatgggcattccgtttccttctcaacttcaacgccaacaacagttgatgctactatggttggaaatcgggcatggttcggagggcttttcagcggctcaggcaaaaggcgacaagtcagtgcagagaagatagtgcttgatctaacccctgtacaggaacagagactgcaaagtctgaaggaaaggctaaatgtaccttacgacgaaactcggacggatcatcaagattcgcttagggctctatggaatgcctcctttcccgatacagagctcactagcttagtttcggaacagtggaaagacatggggtggcagggcgtcaacccagcaactgatttcaggggctgtggatttgtttcgcttgagaaccttttgttttttgcaagaacgtatccggcttctttcaagagactgatgctgaagcagcaaggaatgcgaactacgtgggagtacccctttgcggtcgcaggtgtaaacatctcatacatgctgattcaactgttggagctcaactcagtgcgcccgaagtctttgccagggattaacttcatcaaagtgttgacagaacacgaggatgcattcgacgtgctgtactgcatagcgttcgagatgatggacgcccagtggctagcaatgcgagcctcgtacatgcagttcaaagtaataagcgggtgatgcttgtccttttttttgtttgtttgagttaattgatgatgaatcattagctaggatgcatgtgcaggaggtgctggaggccacaaggcagcagctcgagagggagctctccctggaggatctcaatagcatccatgacctccctgcctgcaaccttttgtacaaatagtactaatggtagttagattactgtgatacagtcaaaaggaaatttgtatgatgatcaggttgcatgtaaccagaatcatcaatcagcctgtaaaaagagaatatgtgaaaattgtattaagctgaactgactactgttgaggtcaaaaggttgtgttttgtcatgtgaaggaggcgctttttgactggatccgcgcgggagcatacataggacaactgctagcttccgatccaatgcaatgaatgatcactacgcagacccttttgaggctggtggattgtgtagatttaatatgcaaaaaagataagagacaatattgtgtacgtctggtgatgcatgtgcttgctttgttcccttgttccagatcctcaatagatgatgatgattattattattatcattattagtagtagaaaaaaacaaaaggcattgtttgg

SEQ ID NO: 107856 - DNA, 1619 bp, Zea Mays
ggggaagagaaagcgagagggagagaaatagcaggccgccttgagctggcataggacgcgacggccgacggtctcggtctcgcaggggcagggctgggcggtcgacggaggccaattctccaacttcctccctccgtcgatcatccagcaccagcaggagaatcccgtcgaatccccctctcaaccaagggcgcgcgcgcgtgcgtatgcctcctccagatccaaagcaacagacagcgagggggcaccggggtccgccgcatgtttgcgatttatggaggatcatgctttcttgcttactacattagctcctgacgcgccgccctcccctcgcgttcattgatttctgttataattactaccgagctactatctccacattattattggtaaagaaagaaagggcgcctcctctaatttgatgggcattccgtttccttctcaacttcaacgccaacaacagttgatgctactatggttggaaatcgggcatggttcggagggcttttcagcggctcaggcaaaaggcgacaagtcagtgcagagaagatagtgcttgatctaacccctgtacaggaacagagactgcaaagtctgaaggaaaggctaaatgtaccttacgacgaaactcggacggatcatcaagattcgcttagggctctatggaatgcctcctttcccgatacagagctcactagcttagtttcggaacagtggaaagacatggggtggcagggcgtcaacccagcaactgatttcaggggctgtggatttgtttcgcttgagaaccttttgttttttgcaagaacgtatccggcttctttcaagagactgatgctgaagcagcaaggaatgcgaactacgtgggagtacccctttgcggtcgcaggtgtaaacatctcatacatgctgattcaactgttggagctcaactcagtgcgcccgaagtctttgccagggattaacttcatcaaagtgttgacagaacacgaggatgcattcgacgtgctgtactgcatagcgttcgagatgatggacgcccagtggctagcaatgcgagcctcgtacatgcagttcaaagaggtgctggaggccacaaggcagcagctcgagagggagctctccctggaggatctcaatagcatccatgacctccctgcctgcaaccttttgtacaaatagtactaatggtagttagattactgtgatacagtcaaaaggaaatttgtatgatgatcaggttgcatgtaaccagaatcatcaatcagcctgtaaaaagagaatatgtgaaaattgtattaagctgaactgactactgttgaggtcaaaaggttgtgttttgtcatgtgaaggaggcgctttttgactggatccgcgcgggagcatacataggacaactgctagcttccgatccaatgcaatgaatgatcactacgcagacccttttgaggctggtggattgtgtagatttaatatgcaaaaaagataagagacaatattgtgtacgtctggtgatgcatgtgcttgctttgttcccttgttccagatcctcaatagatgatgatgattattattattatcattattagtagtagaaaaaaacaaaaggcattgtttgg

SEQ ID NO: 107857 - DNA, 1030 bp, Zea Mays
gcgagagggagagaaatagcaggccgccttgagctggcataggacgcgacggccgacggtctcggtctcgcaggggcagggctgggcggtcgacggaggccaattctccaacttcctccctccgtcgatcatccagcaccagcaggagaatcccgtcgaatccccctctcaaccaagggcgcgcgcgcgtgcgtatgcctcctccagatccaaagcaacagacagcgagggggcaccggggtccgccgcatgtttgcgatttatggaggatcatgctttcttgcttactacattagctcctgacgcgccgccctcccctcgcgttcattgatttctgttataattactaccgagctactatctccacattattattggtaaagaaagaaagggcgcctcctctaatttgatgggcattccgtttccttctcaacttcaacgccaacaacagttgatgctactatggttggaaatcgggcatggttcggagggcttttcagcggctcaggcaaaaggcgacaagtcagtgcagagaagatagtgcttgatctaacccctgtacaggaacagagactgcaaagtctgaaggaaaggctaaatgtaccttacgacgaaactcggacggatcatcaagattcgcttagggctctatggaatgcctcctttcccgatacagagctcactagcttagtttcggaacagtggaaagacatggggtggcagggcgtcaacccagcaactgatttcaggggctgtggatttgtttcgcttgagaaccttttgttttttgcaagaacgtatccggcttctttcaagagactgatgctgaagcagcaaggaatgcgaactacgtgggagtacccctttgcggtcgcaggtgtaaacatctcatacatgctgattcaactgttggagctcaactcagtgcgcccgaagtctttgccagggattaacttcatcaaagtgttgacaggtaggtaggacagagagtggtttgtaacttgtccatccattacctgattgagagttt

SEQ ID NO: 107858 - DNA, 1489 bp, Zea Mays
ccaaaccattttttggtggcagcgctgtccagcaaaaacgaacggatgaatccgcccccgcccctctcgcggccgtaaaaatcgtcttgccttccatccttaccctatcccctctcaaccttatcttggaggcggcgcaggcgcaggcgagtggccgtccagtcgcgcgggcagcagggggcggccatccgtccaggcgcaggcgagcggccgtctgtccagcgcatgctagtggccatccgtccaggcgaactgcgagcaggcgtccgtccaaacgaactgcgagcgtccgtccaggcttccatccaggcgagctgcagaacttttctacgcacaacacattccaagaaccgaaaatggagagtgaaggagctggtgagcactttgtggaacaagctgatggtagtggccatgttgtgtggacttctgcaatgtccgcttacatgctcagtaacctagcaagccttgtggctgaagggatcaggacatcaacaggcttcaagaaagttcaccttaacatgtgtgctaaggctctaaatgactatttcaagatgaagctcactggagaacaagtgaagaaccatttgaggacatggaagagaagatatgcgaagataaacagacttaggaagttaagtgctgcttcttggaacgaagataactacatgatcactcttgatcatgaacattatgcaaactatgtgcaggatcacaaatctgatgctgagtttttaaacaagcctttggagaactataaggaaatgttcattgtctttggaaacaatatggctacaggaaagtatgcaaaaggatcaagtgaagctctaggtactgaagatagaaacagtatggctgaaacagagattgatgagggagatggtaatgctgttcctagtcctatagatgatattggggcttcatcctcagttcctagacctaggaagaaggcaaaggttactagtaatgaagaggcagggctgattggagcattcaaagatggtgctgaaaggcttgcaatggctattgagaaagctggttcagatgacctaccacctgacttgcttcaaacattgcaaagtattccaggttttgatgacacacacaaggccttttactttgcatatctagtgaaaaatcctggattggcaaggcagttccctactctcccattgacatatcagataagtttgcttgctcgcttcgttagtgagaactttccttagattatgaggaccgggaattaggactatgctggaggttaagtggaaattagaactatgttgttcttttgttatgtaataatggctttgctatgtcgaaataccgggtttcttatgaaatactgggtttgttatgaccaacacagatgctcggtttgtttgttttgaaatactgggtttgagattcattgtaatggtgtatgctcagtttgtttgttttgaagtactgtttgaaatattgttttgaaatgttttttataacggtgtat

SEQ ID NO: 107859 - DNA, 2212 bp, Zea Mays
ccaaaccattttttggtggcagcgctgtccagcaaaaacgaacggatgaatccgcccccgcccctctcgcggccgtaaaaatcgtcttgccttccatccttaccctatcccctctcaaccttatcttggaggcggcgcaggcgcaggcgagtggccgtccagtcgcgcgggcagcagggggcggccatccgtccaggcgcaggcgagcggccgtctgtccagcgcatgctagtggccatccgtccaggcgaactgcgagcaggcgtccgtccaaacgaactgcgagcgtccgtccaggcttccatccaggcgagctgcagaacttttctacgcacaacacattccaagaaccgatggacaaggcgaccaagcttttgatttatggtgcttcagcacacatgttgttgtccatgatggccatggttattgagtctagaaaaagaaaaagagatagtagaagagtcggtattacttatgggccaatggaggaaagggataggatgagacttgattatcttaacactaaaatatggatgagtgatacaacatgtgtgaacatgcttagacttagtaggtctagtttctttcgcttttgtaagggctttagagaccggggtttacttgaagatacaatacacatgtgtgttgaggaacaagtggccatgtttttgaacacagtgggacacaaccttaggaataggttggtgggaacaaattatggtagatctggtgagactgttagtcgctacttcaacaaagtgcttcgtgctattggagagctacgagctgaacttattaggccaccatcattagagactccatccaaaatagcaggaaatccaagatgggatccctactttaaggattgcattggagctattgatggcacacatataagagcttcggtttccatagatatggaaccttcatttcgtggtagaaagtcttatgcctctcaaaatgtaatggcggccgttgattttgatcttcgattcacatatgtcttggctggttgggagggttcagcacatgatgctttagtactaagagatgctttagagcgagagaatggccttcgtgtaccacaaggaaaattctatctagtggacgctggatatggagccaaacctggatttttgcccccttttcgtgctgtccggtatcacttgaatggatggggaaataatctggtacaaaatgagaagaagttgttcaaccttaggcactcgtctcttcgtgtcaccgtagagcgtgcatttggttcactgaagagaagatttaaaatacttgatgatgccacaccattctttccattttctactcaagtagatattgttgtagcctgctgcattattcacaattgggtcatacaagatggaggcgatgagctgatcattgaagaatctaattggccaattcataatcatgctacaacatcaagtggccaagctagtgaacatgcattcatggttaatttgaggcaggaaatagcaaatcagatgtgggaagatcgtcaaaaccactatgcttcctaatttgttattgtttttcttgctgtaatttttatttatggacattaatatatggacttaattaatgtattcatatattgtgtgagattacttcttgctatgtgcacattaatgtatggacttatttaatgtattcatggacatcaatcatttatgtcaaaattcttcatgggatgtatatgtctggacataaccatattgcagaaaatggagagtgaaggagctggtgagcactttgtggaacaagctgatggtagtggccatgttgtgtggacttctgcaatgtccgcttacatgctcagtaacctagcaagccttgtggctgaagggatcaggacatcaacaggcttcaagaaagttcaccttaacatgtgtgctaaggctctaaatgactatttcaagatgaagctcactggagaacaagtgaagaaccatttgaggacatggaagagaagatatgcgaagataaacagacttaggaagttaagtgctgcttcttggaacgaagataactacatgatcactcttgatcatgaacattatgcaaactatgtgcaggtatcattatttttacatgtattgttactatatttcagcatattacttttacatgtactgttaatatatttcagcatattacttttacatgtattgttactatatttcagcatattactttt

SEQ ID NO: 107860 - DNA, 3029 bp, Zea Mays
atgagatggcagaggagcaaattcagttggctcctcagcgcatgcctcatttgtctgctgctgcagctggttggtgcgatcaggactagcttgttctggccacaatcttgcctgccgtctcctgcaatcccaagagaagatgaatcggtggaacaactgtggcacagttgtgctctcgacttgagaattcctcaagatgttagaaacaagttccattacagccttctgttcaacaccatcagcaattcgtatagagaaaatgataataagtcctatcctcagaaggtcggcattgaggaagcaaccacggcaaccttttcacctgcagaagttgccaacacttttctggattgcttaaacaagcataatttccctttctctgatcatggactgcagaagcatcaggaggaaaccataagcttacttcccaactctaacagcatcaaccttccttttgcgatgaaaagaagacgtctacttgaagaagattcagccattgctccaccccgacctaaagcaaaacaggcaataagaagcgttttgtcttccgaaggagaggctcacttgctagtcactaccgtgaaaaagtccggtaaaccagagcccaaaaacaagagcaaggacaacagtggcactattattgctggtttgtcagtggcttgtgttgcattggtggctcttatatgttcttcacgtaaatcatgctctaccccaattgatgtcaacaggttgggggcattgtcaaccagttcatcagcgagccagcgtaaagaatttaaatttcctcctataaaggcagaagttagagaaatgtcaatgaagtcagagtttgagcgacgcagcaatgtgcaggcgatgaaactaagttctcatgaaataactaccattgctggacgtccggcgacctctactaattctcaggatgtgaaatctgctgttgctgcagttccttctagtaatgccagcgacagcatatgtaaacctgcagctggtccagcaccagcaccaccaccaccaccacgtccaggttatcctctcccaaaggctcctcctgcaccatctgcaccaacaccaccggtaccacctccaaagatgcctacagctgctggttcgagcaatccacccccaccaggacccccaccgcctcctgctcccaggcctgcagttggacccggacctccaccatcaccaagtagtgccggacccggacctccacccccaccaggtagaggtggagctggacctccaccaccagccatgcctggtggtccaaaagcgcgtggtccaccaccattgaagaaggcagggaatgttgcaggtcctcctgtggcagacaataaaacaaagctgaagccattcttctgggataaagttactgcaaatccggatcaagcaatggtgtgggatcaaattaaagcaggatccttccagtttaatgaggagatgatcgagagcctttttggttgtcatgctgctgacaagaaaaatgctgacggcaaaaaggatttagcagcaaaggatacccctcaatttgttaggatactcgatgctaaaaaggcacagaacttagcgatatcactgaaggcattgagtgtttcagctgacgaagtacgtaatgcagttatggaagggcatgaactccctattgatctgatacaaaccttgataaggtggactccaagcagcgacgaggagctaaggcttcggttatacaccggggagctcactcaactgggtcctgcagagcaattcttgaggaccatcattgacataccttacctctatcagcgcctggatgtgttgcttttcatgtccactttgccggaagaagctgcaaatgcagaacaatcatttaaaaccctggaggtggcctgccatgagcttcggaacagccgtctattcaagaagctgctagaggctgtactcaagactggcaaccggatgaacgatggcacctttcgaggtggggcccaggcgttcaagctggacaccctcctgaagctctcagacgtgaagggggtcgacggcaagacgacgctgcttcactttgttgtccaggagatcattcggtcagagggcgtgcgtgccgttcgggccgccaaagagcagaacaacagcagcatatccagcgtgacttctgacgatctcaccgaggatgtcagcgatgacacggagcactacaagcagctaggcctgggcgttgtttcgagcctgggagacgacctccagaacgtgcggaaggcagcaatcctggacgccgatacgctgaccatctcggtggcgagcctggggcacaagttggtgaaggcgaatgagttcttgaacacgggcatgaagagcttagacgaggacagtgggttccatcgcaagcttggcgagttcatcgagcagtcccaggtgcgtgtgacccagcttctggaggaggaaaagaagctacgggcgctggtacgcactactgtagactacttccatgggagcacagggaaggatgagggcctacggctgttcgtcgttgtccgcgacttcctgggaatcctggacaaggtgtgcagagaggtgaaagaggcggctgccaaggctgctgctaataacaagaaaccttcagcggcaggatcaggatcaaagggaaggcaaccgtcgcagtcttcttcgtcgttccgtgatcctcgacagcagctggtgcccgcaattaaagatcggaggagtgcagcggcacgcagctctagttcatcttctgattctgactgactgacagcaaagaatttgtgcagatcacaccagattgatgaggtgatatgggagcacagcaggtagaagagttagcggctatctagttatggattgactcgcttacagcagaatgaaaaagagttagggacactacgccctggtaggttaatttagtatgcacatgatctcaggctctcagctttcgcctccgtaaatattattttatacaaatgtacatcctagatatgtatacaaagatcgttcatggcttaatgaataatattattttatacaaatac

SEQ ID NO: 107861 - DNA, 734 bp, Zea Mays
atggggaaaatgaagcgcgcgcagggaaccgctcggcagggagatgggcgcagagcgcggacgggcgggcgcgccagggaagtcggcgcggcggccatggaggaacctcggcgcagggagctaggcgcgacgctgggcgcgcgcgtcagaaatttcgacggcgaccggacagaggaacgtgcgcagggagacaaaggagagagagaggcgcggctgagggcgatgagaagaggaagctacggcgctggagatgggctcggcacggcggccatggcaacgggcagaggaacgccgagcagggagttcaggccggctgggagaacgccgggcagaggaggcgccgagcttaaggacggcggtgacgagatccgagcgcggcgaggaggctccagggagcatgacggcgcgtggagaagaagtcagagagttcgagcacagggagaggcgaccgcgctggacgagaagaggagcatggccggcgagagccatggagatgggagggccgagcagggcgcggccatggaaggcaggggagctccggccggactcgcggcaccagtgagcagagcgcggcgctggagcacacgcggccagggaattcgccccgaaattgcgcataagagagaggagacgggagggaagtaagggagagagagaagcaccggccaaaagagagcgagagggagaggaaggagccgagcgccatgagaggaactttggctggggagggcgtg

SEQ ID NO: 107862 - DNA, 195 bp, Zea Mays
atggagggtgccgtggcaagtgacgccgacgagtgcagccagggcgagagtggtgaggttggccaccagggagatggctgggggcggctgtggaagatggctggtgtggggagggggtccggcgccgagagctcggctaggcgactggtgctccatgggaggggcaggggacgacttctgcgtggggagggatag

SEQ ID NO: 107863 - DNA, 3206 bp, Zea Mays
gttctttgtgttgaggcctccatcatctatctcctctctcgtcgtgctggccgaccggcgacgacctatagctcctgccgcctcacgtcgaacgcgccatggccgccaactcaacagctaccaagcatgctttcaagcgtatattgacgagcctgattaagcctggcggtggtgaatacggcaagttcttcagccttcccgcactaaatgatccaaggatcgataagcttccctactctatacgtgttctcctggaatcagctatccgccattgtgataacttccaagttacagagagtgatgtcgagaaaatcattgattgggagaacacatctcccaagctggctgagatacctttcaagccagcgagatgcattctaatggacaacactggagtcccagctgttgtagaccttgcagctatgcgtgatatgatgccaaagttgggttgtgatccctacaagatcaatccattgattcccgtggatgctgttattgaccatgcagtgcgagtggatgtagcagggacctatgatgcattggatagaaacgaggagttggagttccaacgcaacaaagaaaggtttgcttttcttaaatgggcatccaatgctttccacaacatgcaggttttccctcctggttcaggcactgtacaccaggtaaaccttgagtatcttgcccgagttgtcttcaacgaagatggcattctttacttcgacagcgtggttggcacagactcacacaccactatgattaatagtcttggagttgctggttggggagtaggcggtattgaagcagtcgttgcaatgcttggccagccaatgggcatggttttgcctggtgtggttggattcaagttgagtgggaagttacaggatggtgtcactactactgacattgttcttactatgacccaaatgctaaggaagcacggtgctattggcaaattcgttgaattctatggtgttggtgtgggcgagctatctttgcctgctagggccacaattgccaacatgtctccagaatatggagctaccatgggcttcttccctgtagaccaagtagcattggactatctcaaattgacaggccgaagcgatgaaactgtgtcgatgattgaagcatacctgcgagctaacaaaatgtttgtggacaagcatgagcctgagacggaacgagttttctcttcatatctggagctggaccttagtgaggtggagccttgcgtttcaggccccaaaaggcctcatgatcgtgtccctttgaaggaaatgaagtcagactggcatgcttgcctggacaacgaagttggtttcaagggctatgcggtgccaaaggaacagcaaggcaaagttgtgaaattcgacttccatggaaggccagctgaaatcaagcatggcagtgttgttcttgcagcaatatgtagctccacaaacacatcaaatcccagcgtcatgattggtgctggccttgtggcaaagaaagcctgcgaattgggccttgaggtgaagccatgggtaaagacaagccttacccctggatctgtggttgctaccgagtacttgaaacatagtggccttcaagattatctgaaccagcaagggttccatgtcgctgcgcatggctgcgccacttgtgtgggcaactctggtgacctggatggatctgtatccgctgctatcacagaaaatgatatcgttgctgctgcggtgctgtcggccaaccgaaacttcgaggggcgtgtgaaccctctcactcgggctaactaccttgcctcgccgcctctggttgttgcctatgctcttgccggcactgttgacattggttttgaggaagagcccattggagttggaaagggtggcaaggaaattttcttgagggacatatggccttcaaaccaagagatcgatgaggttgtggagtccagcgtgcagactcacttgttcaagaaagtgtacgactccatcatggaacgtaaccctaggtggaaccagctgccggttccaaaggaggcactgtacccatgggacgacaggtccacctacatccgcaagcccacttacctggagggcatgtccatgacgccgcctggcccgcccacggtgacggaggcctactgcctgctcaaccttggagacagcatcaccacggaccacatctcctactcggggaagatccccgagggcacacctgcggccaagtatctgctcgagtatggtgtggagcccaagaacttcagctcctatggtggccgccgcgggaacaatgaggtggtgatgaggggagcgtttgccaatatgaggatcgtgaataagcttcttaatggcgaggctggtccctggacgatccatgttcctaccggggagaagctctacgtttacgacgcggcaatgaaatacaagtcggaaggtcatgacatggtcatcatcgctggctccgagtacggcagtggcagctctcgtgactctgctgccaagggaccaatgctactgggtgtcaagtcggtgattgcaaagagcttcgagcggatccaccggagcaacttggtggggatggggatcattcctctctgctttcaagcaggagaggatgccgattcactcggcctcaccggacgtgagcgctacaccatccacctccctaccagcaccgccgagatcagtcctggtcaggacgtgaccgtcacgacccacgacggaagatcattcacttgcactcttcgcttggacacacagcttgaggtcacatacttcaaccatggaggcatccttccctacatggtccgcaacctggcggcacaaatgaaataagttgaagtttattggtgggaataaattaaaaggtactcaatgccacgtatttggcgtatgtatgtaaataagtggcacattctaatcttcaattgtattattcgctctggcattgaggtgggtcgtagctgcattatactttctccgcaagacatgagcatggattttgttttagcaacagattatttgtactcttgattctttggttccatgctctcttcggccatctccatgtcaatttgctttgcaaacaatataatatcagcgtgccgtgcccttgtagatttccaaatggttatatgcatatgtactattgaaattgtcattttagtttgcaaacaataccaacgtgcctttgtagatttcaaaatggatatatatgttgtattc

SEQ ID NO: 107864 - DNA, 3147 bp, Zea Mays
cttttccatcggcggcctttcgtttcatcagatcctccgcctctattgggcgccgggcagccaagctgcaggcggatgggcgcgatagcgggaccacatcctgccgccgccgccgccgcctgcccctcttccactccgatccatggagcagcagctcctctgtggtggttgccacacgcacacgcctccgccgccaagcctcccctgcccctgcctccgccgccgcccacggaccctctctgtttcatcgaggtgccacgcgattcatccggaccagctgctgcgtgcccgcctcgtccccgacgtcaccaccagcgccaagctacaaccacgcgacgacgctctccatcggatccgagtcggagtcggagctaccaagcatgctttcaagcgtatattgacgagcctgattaagcctggcggtggtgaatacggcaagttcttcagccttcccgcactaaatgatccaaggatcgataagcttccctactctatacgtgttctcctggaatcagctatccgccattgtgataacttccaagttacagagagtgatgtcgagaaaatcattgattgggagaacacatctcccaagctggctgagatacctttcaagccagcgagatgcattctaatggacaacactggagtcccagctgttgtagaccttgcagctatgcgtgatatgatgccaaagttgggttgtgatccctacaagatcaatccattgattcccgtggatgctgttattgaccatgcagtgcgagtggatgtagcagggacctatgatgcattggatagaaacgaggagttggagttccaacgcaacaaagaaaggtttgcttttcttaaatgggcatccaatgctttccacaacatgcaggttttccctcctggttcaggcactgtacaccaggtaaaccttgagtatcttgcccgagttgtcttcaacgaagatggcattctttacttcgacagcgtggttggcacagactcacacaccactatgattaatagtcttggagttgctggttggggagtaggcggtattgaagcagtcgttgcaatgcttggccagccaatgggcatggttttgcctggtgtggttggattcaagttgagtgggaagttacaggatggtgtcactactactgacattgttcttactatgacccaaatgctaaggaagcacggtgctattggcaaattcgttgaattctatggtgttggtgtgggcgagctatctttgcctgctagggccacaattgccaacatgtctccagaatatggagctaccatgggcttcttccctgtagaccaagtagcattggactatctcaaattgacaggccgaagcgatgaaactgtgtcgatgattgaagcatacctgcgagctaacaaaatgtttgtggacaagcatgagcctgagacggaacgagttttctcttcatatctggagctggaccttagtgaggtggagccttgcgtttcaggccccaaaaggcctcatgatcgtgtccctttgaaggaaatgaagtcagactggcatgcttgcctggacaacgaagttggtttcaagggctatgcggtgccaaaggaacagcaaggcaaagttgtgaaattcgacttccatggaaggccagctgaaatcaagcatggcagtgttgttcttgcagcaatatgtagctccacaaacacatcaaatcccagcgtcatgattggtgctggccttgtggcaaagaaagcctgcgaattgggccttgaggtgaagccatgggtaaagacaagccttacccctggatctgtggttgctaccgagtacttgaaacatagtggccttcaagattatctgaaccagcaagggttccatgtcgctgcgcatggctgcgccacttgtgtgggcaactctggtgacctggatggatctgtatccgctgctatcacagaaaatgatatcgttgctgctgcggtgctgtcggccaaccgaaacttcgaggggcgtgtgaaccctctcactcgggctaactaccttgcctcgccgcctctggttgttgcctatgctcttgccggcactgttgacattggttttgaggaagagcccattggagttggaaagggtggcaaggaaattttcttgagggacatatggccttcaaaccaagagatcgatgaggttgtggagtccagcgtgcagactcacttgttcaagaaagtgtacgactccatcatggaacgtaaccctaggtggaaccagctgccggttccaaaggaggcactgtacccatgggacgacaggtccacctacatccgcaagcccacttacctggagggcatgtccatgacgccgcctggcccgcccacggtgacggaggcctactgcctgctcaaccttggagacagcatcaccacggaccacatctcctactcggggaagatccccgagggcacacctgcggccaagtatctgctcgagtatggtgtggagcccaagaacttcagctcctatggtggccgccgcgggaacaatgaggtggtgatgaggggagcgtttgccaatatgaggatcgtgaataagcttcttaatggcgaggctggtccctggacgatccatgttcctaccggggagaagctctacgtttacgacgcggcaatgaaatacaagtcggaaggtcatgacatggtcatcatcgctggctccgagtacggcagtggcagctctcgtgactctgctgccaagggaccaatgctactgggtgtcaagtcggtgattgcaaagagcttcgagcggatccaccggagcaacttggtggggatggggatcattcctctctgctttcaagcaggagaggatgccgattcactcggcctcaccggacgtgagcgctacaccatccacctccctaccagcaccgccgagatcagtcctggtcaggacgtgaccgtcacgacccacgacggaagatcattcacttgcactcttcgcttggacacacagcttgaggtcacatacttcaaccatggaggcatccttccctacatggtccgcaacctggcggcacaaatgaaataagttgaagtttattggtgggaataaattaaaagcaacagattatttgtactcttgattctttggttccatgctctctt

SEQ ID NO: 107865 - DNA, 474 bp, Zea Mays
atggcgatgagacagcgaaggcggtggcgatcatctccggatggcgaggagctaatcggagtcgcagaggccgtcaacgaggagaacgatcttcgttgcaccttgttttttgacgggtggatcaacattgacactggtgtgactgagaacgactcaatgacgaggcatgaggcacatagcggtggggaacgggggagcaggaatggaggcagggatcaccgaggctgggagttcttgcgcgtggcggggcatcggggatcacgagtgggacagtgggcgggggttgcgtcgggggtcgcaactactcggggtgccagggcgggggcatgtcgggaaatgtcagaggtagacataggcgagggcggaggcacacggagtgtggacgccctccttacattcttaaagagtagtatagatatgatatttttatttgctcgtttggtaataaggaaaaaaacttatgctttattttag

SEQ ID NO: 107866 - DNA, 1094 bp, Zea Mays
ctagcttcaatcttgggttccattaatcatacttacaacttctttaagaaagatgtatgctatggttggaaatgttttgtttacaatagctagaactgatttacatcattacatggccttgccccctttcatccatcaccttgagtctgcaaagaaggttctcgttttcttcattgttaggtctgtttaattaaatcgtacgagacgttatgttaattgtatcacaacatctgtcgtctatgagcaggcaggacagaagtgatccactttcttcatgcattcttgtaccgaaacagggtaacctcgtgctaactgggccatcaatggccacctcggcagaaagtccaattgccttcaccttctacctccatgatggcagcccgcaagccggagaagccgctgaggacgacgaggacatcgggaggataatctgcgactgcatcggcgacgacttctccaactacaacagggccatagtcgagactgtccaaatgggctatggcctcgctgaagtgatctatgccgtgctgaacaacggcgtccaaggccgggtcgctgtcaaacttgctcgcctgccggtgtccaaagccggagaagaagacgccaccgccattctcgggaggatcgttgctcgcagcaagctgttcgacgtcggctgcgtgctcttctacaaagagggtgacaatggagtgagcgtgcgaccgggggggctgattcagctggcgagggaagcgctcgccgtgccgctgcacatgccgctgacgattgagcttgacctgcatcgctgttccggcgatgaaattgttggaggggtccttgagttcaatcctgcgattgacggccagcacacggaacgacttgttggacaaaatggcgctgaattggaagtggcaatttcatggtcggagtacccttggtaatgcctattattattagccattaattcaagagtgcatttttatatgtatcaatgactaagggttttaaatcatgtttcatacaagacagttgcactagagcaagataacatttcgtggtgggaacgccaaataaataaaaatagagcgagtatcactttggttttttctaatata

SEQ ID NO: 107867 - DNA, 699 bp, Zea Mays
acaatagcacaatagtggatctgaaatagccacaaagtagtttctaaaggaacaatagcaagtcacaaaatttaaaacaacacaataccaaatctgaaatagctacatagatagtttgtaatggcataattaatagtaactagctgcagttagtaatgcagcaaatatgctaatgcaatctagcaatagtgatatgtcccactctcccgtcgcttaaaaatcatcatcaaactctcctgggatattgggtgcctccccttcttcaccatcattgccaccattagattcatcttcacaatctgtgatttctgcatcatcatgtggaacatcttcttcatcatcatcttcctcttcagcctctgacatattttgtgcagcaacataatttcttcttgaatacacattatgggcccttcttggtaagtttcggccacgaagtgcttgtgatactccaatgacattatccacaaggtcccatgtaaggtcacactcacacccacgcccaccttcagggactacatgcaaagaatcagcccactcattgtcccagttgaagtcctcatgaaccactggatcaaagtttttccccttcttctggcgtagtttttggaacctagctttcatctttctgttgtaggaaatgaagacaatagaattcaacctcttatgcaacaatcagtttcttttctttgtatggat

SEQ ID NO: 107868 - DNA, 326 bp, Zea Mays
cagtccccaatcgcgttctcttcctggccgacatggcggccgccaccggctacagcgacgccccaaccgacgagcaactgctggcgtactctgagctgcccatacatggccgcgacatggcggaggtgttcgccgtgcgcatcccggccatcgccggaggagacccgccgccccgtggcatcatctctttctacggcggccactgctgcagcgatttcatttacagctggaactcactggaagaggaagaagacacctcgaagcaaacctgcgacagccaggtgcagttccctttaatctctcctttcttcttagtactatcttaa

SEQ ID NO: 107869 - DNA, 237 bp, Zea Mays
atggactccaagcgccggctgcaggggcccttctcgctgcgcatcactaacgagttcggcgagacactggtggcttaccaggtcatcccggcaaactgggcgcccaacagctactaccgctccaacatccagtacgaggcttttggctctgctgctggacaggctactggctctgctattggactggggctcacaactttcaactgttctagaaatcttgttttggctctgttctag

SEQ ID NO: 107870 - DNA, 1175 bp, Zea Mays
ggaggcggtgttggctaaggatgcacaaaaattatacgacgcacaaaactcttccattacagtagtagagatagagaataaaaatagttgtaattggactacgggtacagaaagaagtatagaattttttttttgcaaaagagacgattgtgaaactgtgacaaatgcttcaatcttgggttccattaatcatccttataacttctttaagaaagatgtatgctatggatggaaatgttttgtttacaatagctaggactgatttacatcattacatggccttgccccctttcatccatcaccttgagtctgcaaagaagggtaacctcgtgctaactgggccatcatgggccacctcggcatacagtccaattgccttcaccctctacctccatgatggcagcccgcaagccggagaagccgctgaggacgacgaggacatcgggaggataatctgcgactgcatcgacggtgacttctccaactacaacagggccatagtcgagactgtccaaacgggctatggccccgctgaagtgatctatgccgtcctgagcaacggcgtccaaggccgggtcgccatcaaacttgctcgcctgccagtgtccaaagctggagaagaagacgccaccgccattctcgggaggattgttgctcgcagcaagctgttcgacgtcggctgcgtgctcttctacaaagagggtgacaatggagtgagcgtgcgaccgggggggctgattcagttggcgagggaagcgctcgccgtgccgctgcacatgccgctgacgattgagcttgacctgcatcgctgttcgggcgatgaaattgttggaggggtccttgagttcaatcctgcgaccaacggccagcacacggaacgacttgttggagaaaatggcgctgaattggaagtgacaatttcatggtcgcagtacccttggtaatgcctattattattagcctataattcaagagtgcatttttatatgtatcaatgactaatggttttaaatcatgtttcatacaagacagttgcactagagcaagataacatttcgtggtgggaacgccaaataaataaaaatagagggagtatcactttgggtttttctaatatatttgcaatagtgcataataaaactgtgcgtgcctcaaagtgaggcgctcaatttcag

SEQ ID NO: 107871 - DNA, 762 bp, Zea Mays
aagtacaactgtaatgggctaaactttgacttgaacataataaaaaaggcaccatacctatatccagggatgccaaggatagctgcttcagaactgcatttaaactcaatattgatttcgtgatcaaaatagcaaacaacattgcaggaacaagatgtgtataggcttatgatgatagtggaaccaagctacccacataatactaccattgtactgctaaattgtcattatcattattctcttaatattttaataaagccaaaacaatacataccaagctatactaactgtctaactttgatttgattgaattctgatgaggggctcattgccgtctgttgacagtaacaagaaattggtttccatactcctaaattaattgtaatcatagataatgacacaaaggattaggggaacgtgggctggtattgcagcccaatattttcatgcagtcccatcattagattaagattttgcaaagcctgaccagatgctcccttcacaagattatctatctgcaatgttaaaaatagcttgtaaggtatatgtgcatcttaagtatgtgatattatttttgatgtatacttatgtgaaggtacttatgacagacatgatgatggcccttctaggaattctatcctcatagacattcataaagtagtaatttgacccaacaacatggcttgtgcaagtagataacaccatgtaaataagagagatttttcttgaagatgattccgagtcatgaaacctttctttcag

SEQ ID NO: 107872 - DNA, 686 bp, Zea Mays
aaatgcgaatagaagttgtattgattcgattgattcttacaaatcggccgtagacctctctttttatagaggaggggggctggaccctttacacgactggattccgagctaatttcgcaaatctacccaacaaacatagcacaaaactcagaaccctaaactgctctgcgcatgcgcggaccgtccggcccacaggcgcggactgtccggaccacggaccgtccggcctcagagccggaccgtccgcccgctcaaaatggagctcaacaacgcgtcatgaagaaacgccggctgcgcgcagggcgaactgaagcaggagcaccgagcagaggaggaaaaagcacggctgggtagagaaacttcacggcgctcggcgcggcgaggacgcacgcgcaggtgagctggagctgcgtgcgacgcgagcagaggaagaagacgacagtgggagagggcgaccgcggcgcgctagggagttcgacggcgagctgcaggaagatccggccaggcgccatggctgggagctctgagcagaggaagcatcacggcagtggcaaacggctggggtggctctggtgtggatcctggtttggagaagaatgacggtcgacgaggaggacgccggtcaaagcagcggccggacatccatggcagccgtcgaagcacagtggagctgagacaggggcagt

SEQ ID NO: 107873 - DNA, 1626 bp, Zea Mays
ccctggccgatgctcggctccctgtctcacctctagtcttctccgtcctcccctctatgcgcgcacagggttggcgtgcgtcactgccctgtctcagctccactgtgcttcgacggctgccatggatgtccggccgctgctttgaccggcgtcctcctcgtcgaccgtcgttcttctccaaaccaggatccacaccagagccaccccagccgtttgccactgccgtgatgcttcctctgctcagagctcccagccatggcgcctggccggatcttcctgcagctcgccgtcgaactcccttgcgcgccgcggtcgccctctccctctgtcgtcttcttcctctgctcgcgtcgcacgcagctccagctcacctgcgcgtgcgtcctcgccgcgccgagcgccgtgaagtttctccacccagccgtgctttttcctcctctgctcggtgctcctacttcagttcgccctgcgcgcagccggcgtttcttcatgacgcgtgctccgctttgccatctccctgcacgtcgtggtattccgattcttcctagctcggaccgcgctcagtccccagctcgccgcgcccggtcgagctctctgcgcacacgccgcgcgcagccgtgtccctatgctcgccgtgggcggttccctgtgtcgtgctcgagatttcgccgcgcatccctgcttgccatctgtccacgcgtcatgcgtggagcaacgaaacaaaaatctgtgcgtgtcgtgctcccgcgccgaatccttttctagctcgccgcgacgcccggtgtcctgcatgctttgctcaccctcgtcggctacccgctgatgcttcaactcgtcaagttgttgttatcctatccgcgccagcacgcgaccgtggtcgtgttcgtcgagttcgccaacactctgttgccgattcggctgtcgtcgctgttgtgtgtctcgctgcgtgctcgccgagtgttgtcggttgtacctcagcactcgtgcttgccgctggctcgcgttaacactcgcgcgcctgctcgttcttgctgtgtcacgctcgctcttcatccatcgggcttcacacgtgctcacatttgcagtcgagtcgtcaaacccgtcatctcctactcaaccccacctcaccagctcgctcctgacttcaatcgaaggtcatagtcgttccgtgcatcagcaagaaatcccaagaatcgggtgaagacgaagctagcagcgcgatattatccaagcgctcgacaaactgcctggatcggaaaatcgctaccgatctcgcggattcgtgtcagctgtggaaacagtaagctaataaattattcagaatagttcgatcgatgaataaattaatgtgctagtgcgatgcttattaaggtgctcgataaattgcgtaagtcacgaaactctcgtcgacttcacggttcttgcgattatcgagccagattcagttgtggcgagttatttcgctattctgattaattagctgaattagtgtaccgagtagaatattagttggcctgtgtgatgataaaatagtttactcacttataaagatgtgtatgtatttatgataaagaaatgtttgagtaattgttgacatgtaaaatatgtgggaagtaaaataaaatt

SEQ ID NO: 107874 - DNA, 739 bp, Zea Mays
tttgatccccgcggggagctctagttccgctaagcgtgcgtaccggcgtccggatccgggaccgaagatgacagagtccctggtgcagaacaagccggggatggccagcatcaaggagatgccggtggtgcaggatgggccaccgccgggcggtttcgcgcccgtgcgcttcgcccatcggatccccacctcggccaggggaacaagaaatttccctcaaggaacaataagcgacatggtcagtgatgcttctgaggcgatatcattcatttgtaacaatgttgttagctttggaggggatcctaataaaacctacttgatgggtcaatcagcaggagcacatatcgtggcctgcactctcttagagcaagcaattaaggaatctaagggagagaatacctattggaatgtggctcaaataaaagcatattttggtttatctggaggatacaatatccaaaatttggtcgatcactttcatgagcgtggtgtctttatagttcaatatttctcagtgtttaaagaaccagaaatggatttgcttgtttctaattcattttgcttgttggatatcgatatgcacatgcattttcaggtaaattcattccttctactttacatcccttttttatttccttgcagccattgtctcagatagataaccttctgcattcagcttatgatcaatgggacaaataagatcatgccaactctactccatgtaccgctggtgtcacag

SEQ ID NO: 107875 - DNA, 480 bp, Zea Mays
atggcgcacggaatgatgacgtccagagtcgagcgcgacagagagcttcggaccccaacaagccgagcagggacgaggtccggcaaggtcgcggctgaggcgaacagggagcaggggctgaccggcggccatggagacaagctcagcttggggtcgggcgagcaccacagaagggcagcggcggtcagcaggaaacagggagcagcgccatgggcggccagcaggaaacagggagcggcgccatgggagataggtccaggtgtctgccatgaacaggagcatgacgaggaggcatctatggcggccggtgacgcacgacctagtagaggagacgactggcgcgtgcaaggaagaggtcgctcacccggaaccaaggacgagcagctcggccatggggagggaatgggagctgctcggatagcaggaaaccgagagggagagggaggggaagatgagccaaaacaacggcagctgtactaa

SEQ ID NO: 107876 - DNA, 1555 bp, Zea Mays
caaatattattgttgatctcgtcttagtttaaccattttatatatattttagaccctaagctcacaagcctaaaatatctatattttggttttgttaaaaaaaagagagaagaaaaataaaaaaactctacgtatccatctcccttctcgtgtacatgcttttctttggagatttttttcccaccgccgttgctcacttcacaaatatcccaccaccgcgtacggccaatgccttcatcccttcttcgcctgatattcctagaggccgccgcctccaagcttctttctcccacgcgtgccggcgctctcctctccagtcgtgctcctctgcttgcccagcgccccttagccctcggccatggagcccgccggtggccgtgctcagctccagctggatgcccagcgctcacccctgctccttctatacgcctagttcctgctcccagcacccctcagctcgctccctctctgttcgctgcgtccagctcagatctcgcctgctccagctcgccgcgcccatggccgagctcgcccctgcgcgcgcgttctcctgtgtccagccctagcgcgcgaagctctctgctcgccggttgctcctccctgcgttggcctcccctgcaagcatcttgcgaagctccctgctcctctcttccggtgttatgctggccggcttccaatctcccatggcgcgttcctgctcggcgcccagctccctcgctcctgctgctcgccgtggccggctccctgctgcgctcacccaggtcgccgccgtcgagccatcgaatcccgcccaccctttgccagccgctgttctctggtccgtgtgctggtcggcatcgtggagttttgtttggtcggcttgtcgttgacttcacaggcgtcgtcgaaccatcaaaccccttcctcatttgcatcgggtctccgagctggttgtcgacgattgctttcgcttcagtgccacatgcgatcatccttgcttgctggccgtgcacttcacccgctgttccattctgtttgttgctgttgcttatccgcgtcaagatttcacttgccatgattcagctcgatggttcgtcgttgttcatctccatgtcgggtctacaaccttattgtagatccatcttaggtgcttgtcgttattccatcgcctcgcttcgatgctagttccttcgtgacatctccgacttgtgttcgcgccaacaaaaggatcccaagagaatgtggagaagcaagcccctggtcgatgcccccaagtgctcgacgaaaggcctagacaaggatcatcgtcatttctgcgaagttctagtaatatggagagattccaagagttgcggattcaggagaaagtgaagcttagttcaatacttgtcaggtgtttgagcgaagacttcaatcggagactgacgtcattctcgcaaatattagtcaagttaattatggtgagctgattcactatttttactattgattttatgatcgggaaataagacacttagtttgcgtatgaagtttaagttagaaataccagtgatgcgcgatgtgcttcgatgagttt

SEQ ID NO: 107877 - DNA, 1550 bp, Zea Mays
atcccttcttcgcctgatattcctggaggccgccgcctccatgcttctttctcccacgcgtgccggcgctctcctctccagtcgtgctcctctgcttgcccagtgccccttagcactcggccatggagccctccggtggccgtgctcagctccagctcgatgcccagcgctcacccctgctccttccatacgcctagttcctgctcccagtgcccctcagctcgctccctctctgttcgctgcgtccagctcagatctcgcctgctccagctcgccgcgcccatggccgagctcgcccctgtgcgcgcgttctcctgtgtccagccctggcgcgtgaagctctctgctcgccggttgcttctccctgcgtcggcctcccctgcaagctgctcgcgaagctccctcctcctctcttccggtgttctactggccggcttgcaatctcccatggtgcgttcctgctcggcgcccagctccctcgctcctgttgctcgccctggccggctccctgctgcgctcgcccaggtcgccgccatcgagccatcgaatcctgctcacccttcgccagccgttgttctctggtccgtgtgctggtcggtgtcgtggagtttggtttggtcggctcgtcgttgacctcactggtgtcgtcgaaccgtcgaaccccttcctcagttgcatcgggtctccgagctggttgtcgacgattgctttcgcttcagtgccacatgcgatcatccttgcttgctggccatgcacttcaccccgctgctccattccgcttgttgtcgttgcttatctgcatcaagacttcacttgccatgattcagctcgctggttcgtcgttgttcatctccatgtcgggtctacaaccttactgtagatccatcttaggtgcttgtcgttattccgtcgtctcgcttcgatgccagttccttcgtgacatctccgacttgtgttcacgccaacaaaaggatcccaagagaatgtggagaagcaagcccctggtcgatgcccccatgtgctcgacgaaaggcctggacaaggatcatcgtcatttctgcgaagttctagtaatatggagagattccaagagttgtggattgaggagaaagtgaagctcagttcaatacttgtgaggtgtttgatcgaagacttcaatcggagactgacgtcgttctcgcaaatattgagtcaagttaattatggtgagccgattcactatttttactattgattttatgatcgggaaataagacgcttagttgcgtatgaagtttaagttagaaataccagtgatgcgcgatgtgcttcgatgagtttagttgccgagtatatttgaaccagttctattttgcagagtgtagtatttcggtgacgcgtaggttaagcaattatcgataagtctatcgatgctaattgtgttcagtgtgcgtaagatgaagtcgatgtcccgcgctagtagttagtatcatctatgtttgtgatcgataatgttggagtcggatattgattagttggattgatagctatgaataaatagttgttatctt

SEQ ID NO: 107878 - DNA, 219 bp, Zea Mays
atgaagctctgtgtttcgatggtcagcgagaagcaccttgtcaggacattctttggtggtgggtcacatggctctggcctctggggcaaaccatgcaaggaatggaggcatcagttgtatgtagtaggagaacagttcagtctacaaatgtattataatgtggaagtgtcacctgctcacctgaatgtgtcgtggtgtttagagtcaccgaaaggctaa

SEQ ID NO: 107879 - DNA, 487 bp, Zea Mays
ctcccagcccctcccgatggcgtggtcaagcatctaggtatcagaattcctggattccaaatctgagacggatgttgatgttgactataacagcttgtactcaaaggaggactttctacagggtttgcaagatctcacacggtgaagtatggagtagaaataactctgcagcgactaggtgtcagcggcggggccctctccgtcgccgccttcggcagcacatatatcagtttgaattatttattccactattgtggtctctttttttgtagaaaactggtagagatgagaaagaagtccttaaagctattgattatgtgcatgaattgagtatgaggtgccctggccaaagcgagtgttctactctacccaaaactttaggtagttgtgttgtctttagtggttcagttcctctaagtaaatcattcgctcaaaaggtgtcatctgaagctagaaaggtgataacccaaagatatatgtgcttatg

SEQ ID NO: 107880 - DNA, 104 bp, Zea Mays
atatacatccaattagcatatgcgatgggtatcacggcgaaggcataacacatctagactcgactcataaccgggggggaactacttggtcacgtcaccatttc

SEQ ID NO: 107881 - DNA, 288 bp, Zea Mays
atgcagggtcagggccatttgtatgagcaactggagcaggcagggatgatgagaggagaaccatgcatggcacctatgaggatgacccatgtagtagagccagttgttgtcaaagatccaaagaccaccacatatatgctagtggtgaatgcaaggatgcatgtagaggctgaggaagacacgcttgtcatgcctgggcgcactttggaggtggctgtcatttgtgtggtagaggaggatcattgggagtgcaagaatggagatgacattgcattgaggaggaggtag

SEQ ID NO: 107882 - DNA, 1800 bp, Zea Mays
agaaaaacccaaagtgatactccctctatttttatttatttggcgttcccaccacgaaatgttatcttgctctagtgcaactgtcttgtatgaaacatgatttaaaacacttagtcattgatacatataaaaatgcactcttgaattataggctaataataataggcattaccaagggtactgcgaccatgaaattgccacttccaattcagcgccattttctccaacaagtcgttccgtgtgctggccgttggtcgcaggattgaactcaaggacccctccaacaatttcatcgccggaacagcgatgcaggtcaagctcaatcgtcagcggcatgtgcagcggcacggcgagcgcttccctcgccaactgaatcagcccccccggtcgcacgttcactccattgtcaccctctttgtagaagagcacgcagccgacgtcgaacagcttgctgcgagcaacgatcctcccaagaatggtggtggcgtcttcttctccagctttggacaccggcgggcgagcaagtttgacggcgacccggccttggacgccgttgctcaggacggcatagatcacttcagcggggccatagcccgtttggacagtctcgactatggccctgttgtagttggagaagtcgtcgccgatgcagtcgcagagtatcctcccgatgtcctcgtcgtcctcggtggcttctccggcttgcgggctgccatcatggaggtagaggaagaaagcaattggactgtatgccgaggtggccaatgatggcccagttagcacgaggttaccctgtttcggtacaagaatgcatgaagaaagtggatcacttgctgtcctgcctgctcatagacgacggatgttgtgatacatttaacacaacgtctcgtacgatttaattaaacagacctaacaatgaagaaagcgagaaccttcttttcagactcaaggtgatggatgaaagggggcaaggccatgtaatgatgtaaatcagttctagctattgtaaacaaaacatttccaaccatagcatagatctttcttaaagaagttataaggatgattaatggaacccaagattgaagctagaaaaaaaaggaactagagtacaaagaatgatttattagagacaaaaatctaaatttcttctagtagatcttcatgcaactgatttttgtgggttgtaccgccgtttcaggtatcatcggcaatcaccatggtgccgataactacaatagctcgattattgacaggaaccacttgattttccgataaattatagccaaaaaataaaaataaaagcaacaaacagaaatcgaatacctaccccgttacccataccatagtccctactccctaagcactatgctacctcgttgtttcctctgctattccacctacttaagaaacagagtactctgttcttttaaaaacagaagtttcatggtttttatttctattcattgattgaccgtttgctgaaatcattaaaaaatcgaaacctatgctattgttggtgcttgcgacatagtagtgcttacagtagagctattaagatggtactaagaaggagagattaaagggaactgcacctggctgtcgcagatttgcttcgaggtgtcttcttcctcttccagtggactccagctgtaaatgaaatcgctgcagcagtggccgccgtagaaaacgatgctgccacggggcggcaggtttcctccgacggtggcggggatgcgcacggcgaacacctccgccatgtcgcggccatgtttgggcagctcagcgtacgccagcagttgc

SEQ ID NO: 107883 - DNA, 562 bp, Zea Mays
ctgaataactagacagacaatggcgcgcaacctgtctgtcacattgttcattctgacggcctatgtcgccgcgacggcggcaccgaccgtctgtgcggtcaaatctccggcgagcacaacgaccacaaggaaacacgaagcagccaaagaagagacggatgcgcctgccaaggcaccagctgctgcagccaccgaggggcctgctgcgggagcgcccatgacatggccggatggcgggcctgagttcgtcaagatggtcatcaagaaccccttctttaaaagcgcacctccatctggtagcgaagacggcctacccattgaccccactccagaaggcagcatgaactaaattaaataccaattacgagaccgaccagatatgcatggagcatgcaagaatgttgtcgaacgaatatatgctatgaatggttacatgtactggctacatttagttcagcttaatttctctagtacgctgaaagtattcgatcgatcgagtaggattaggattgacgacatgattatttgtgcaccgtttcagacagcaaattaactatatata

SEQ ID NO: 107884 - DNA, 113 bp, Zea Mays
gttcattccttataatttgttagttaatactaatatggaaaataagatcattacaccaaatttaataaatagatttatgatacatcacctcattttaaatagagtgatttttc

SEQ ID NO: 107885 - DNA, 284 bp, Zea Mays
acacataatcacatagatatacaaatttaattagtattgcgcaatgatagatccacatcacataaacacaagcaccagaatattattagatcattcacaaaaacatcacaattatatcattcacaaaagctagcaccacaactagatcagtcacaagcaccacaacaaaatcattaacaaaacctacacatgttattatgttttgcacatatttgcaaacactttacaaaatcattcacaaaagtactaacacttcaagcgattcgcaaaagccttcacaaaag

SEQ ID NO: 107886 - DNA, 580 bp, Zea Mays
atcacaacaaaaggcgcaagcaccgcacggagagcaagcaagaaagcaaccaccgcactgccactacctaacaatggcccgcgcctacgtgtttctcgtcgtgctcctcctggccgctgtcatcgtggcaccgttcgcgggagcgacgcgtgtcgacgtcgttgagggcaggtccatggcgtccgccgacgcgccggaggccgccgcaccatcacccgggcctgactccgcctcgtcaccggactcctcgtcggatgcgccctccagcagcagctcctcggactagatagctagccgctcgacgcacgatctcgctctccatctacacggcgatcgagttctagctttgtcggcatgcaatgcaaaattccgattcttcgggaataatcaagcaccaaaggaatgtgcttgcatcactcactactagtaccttgtttttatatatgtttcctctcctgacgctctccgattttaatcttcatgtatgcaacatatgtgatgaatggaaaaatcgatttgtatttgttaacaaagaaaaggttgcgtcaaggagaccctattgagtgcacctaaagagggg

SEQ ID NO: 107887 - DNA, 813 bp, Zea Mays
catcacaacaaaaggcgcaagcaccgcacggagagcaagcaagaaagcaaccaccgcactgccactacctaacaatggcccgcgcctacgtgtttctcgtcgtgctcctcctggccgctgtcatcgtggcaccgttcgcgggagcgacgcgtgtcgacgtcgttgagggcaggtccatggcgtccgccgacgcgccggaggccgccgcaccatcacccgggcctgactccgcctcgtcaccggactcctcgtcggatgcgccctccagcagcagctcctcggactagatagctagccgctcgacgcacgatctcgctctccatctacacggcgatcgagttctagctttgtcggcatgcaatgcaaaattccgattcttcgggaataatcaagcaccaaaggaatgtgcttgcatcactcactactagtaccttgtttttatatatgtttcctctcctgacgctctccgattttaatcttcatgtatgcaacatatgtgatgaatggaaaaatcgatttgtatttgttagtcagtcagtctgtataacaacgccgtcgggtttctgaaaccaagcaatgtatataaatgcaacaggaattacattctgtaattaaacaacctgttaaaagaggacttgatggctctctatgatgattttcatgaagataaacttccactttttagtctaaattttggggtaattactcttctacccaaaactaaagaggcaataaaactccaacaatataggccaatatgtctgttaaatgttagttttaaaatttttactaaagttgacaccaatagaataa

SEQ ID NO: 107888 - DNA, 216 bp, Zea Mays
atggcccgcgcctgcgtcttcctcgtcgtgctcctcctagccgccgtcgccatggcgccgttcgcgggcgcggcgcgcatcgacgtcgtcgagggcaggtccatggcgtccgcggacgcaccggaggccgccgccgacgctcccgctcctgctcctggccccgactcctcctcgaccccgtcgccggcaccctccagcagcagctcttccgactag

SEQ ID NO: 107889 - DNA, 275 bp, Zea Mays
ttcctcgacccaagaacttcgtgatgtgactataaacatggtcatcatgaagacaccaagagtagggcaaataatcaatagaaaaataaacataatagaaaaagaagttgtcgtctcatggcaaagaaaccacaatatgacatcgtaatgttgtacatgagaaataaaattaaatggcaattaccaaaacaagcattcacatttttagaagtggaaaagttgtattaggcaagcatgcacatttactgtatgtagaaaatttcttaaataagcat

SEQ ID NO: 107890 - DNA, 754 bp, Zea Mays
agctcgagccagagtcgttgaggccggtgacgacgagagcatggaggtccaggtccagcagagaggatcccctgcccccgcggcagagctggaggtctccctccgcgagttcaccatgtcggacgcggaggcgttcatgtcgtgggcgtccgaccctcgcgtggtccgcttccagcgccgcgacgcctacgaacatgtggaccaggcccgccgctacatcgccgaccacatcctgccgcacccgtggtaccgcgccatctgcgtcggcgcgggcgcgcccctccctgtggtgggttccatctccgtgaagcccgggcccaccgaggacgggcggccgttcagggcgtccgtggggtaccgcctggcgcgcgcgcactgggggcggggcatcgcgacacgcgcggtgcgagcggcggccgcggccgtgttcgcggcgtggccctggctgctgcggctggaggccgtggcggacgtggacaacccggcgtcgcagcgcgtactggagaaggccgggttcgccagggagggcgtgctgcggaagtacgtcctgctcaagggccagcccagggacatggtcatgttcagcatcgtcgtcgagacggagcaggacaaaccggatgggccatagatcgccgcgatgctatgggctcctgggctcctggcctttcgctgctgcgcatacggcatacgtcacgtatgtagtgtaacgttctaggcagccatgtatcatgtactgtatgtatgatgatagtat

SEQ ID NO: 107891 - DNA, 822 bp, Zea Mays
gctcgagccggagtcgttgaggccggtggcagcgagagcatgcaggtccaggtccaggtccagcagagaggatcccctgcccccacggcggaactagaggtctccctccgcgagttcgccctgtcggacgcggacacgagggcgttcatgtcgtgggcgtccgaccctcgcgtggtccgcttccagcgctgcgatgcctacgagcacgtggactaggcccgccgctacatcaccgaccacgtcctgccgcacccgtggtaccacgccatctgcgccggcgcgggcgcgcccctccccgtggtgggttccatctccgtgaaggctgggcccgccgaggacggggggccgttcagggcgtccgtggggtaccgcctggcgcgcgcgcactgggggcggggcatggcaacgcgcgcggtgcgagcggaggccgcggccatgttcgcggcgcggccctggctgctgcggctggaggctgtggcggacgtggacaacccggcgtcgcagcgcgtgctggagaaggccgggttcgccagggagggcgtgctgcggaagtacgtcctgctcaagggccggcccagggacatggtcatgttcagcatcgtcgtcgagacggagcaggacaaaccggatgggccgtagatcgccgcaatgctatgggctcctggcctttcgctgctgcgcatacgacatacgtcacgtatgaagtgtaacgttccaggcagtcatgtatactgtatgtatgatgatagtataccaccgtgtatatgtgataatctggaaaggaaataggaaaatgaataaccgtcccaccatgggaattgg

SEQ ID NO: 107892 - DNA, 854 bp, Zea Mays
aacagcgcagcgacctcgacgctaagcactggagcttgacgatgtcacggcgcagcaggaaataacaacatcacgatggtcggggagacaagtccggcgatgacgtagacggctagcacggcgagcagagggacatggctgcgcacacagggactcgacagcggcgacctggacgagcgcaacagggtgcaggacaaccgcggtcggcgagcaccagcagcgagggcgcggtccgagtgcaggcgggatggggcgcacctgcacggagctcggtgagtagagggctgggagcgtcgaccacggagagctcgcgacgctggagaactgaagggagctcggcatgggcagcggcccgcgtccacgacgagcagacaggggagagcgcgcgcagcagcgagcgaataccagggcgcgctagggaaaaagatggagtagaggacgccggcacaagacagagccgagctggagccaagaacgcggtccgagcagggaggccgcgtggggttgggcgccagggcgcaggaagcagggactcggcaaccaggcgcatgaccaacgcaggggcgagcaccagaggaaaaacagcggcagctaaaagtggtggacgtggccatggcggaaggcagagatccgagcagggacatgcgccatgagctaagtggaggacgagcagagagggaaagaaaaacagggacacggcacgagcagggagcaccagggacgaccagcagaggaggttgcacgcgcggggaaaaaggagcggcacgcgcagtggaggagcgagcagggagggaaaagctccgcgcgcaggggaactcgacggctgggcacgcggcgaggaggctctagggagc

SEQ ID NO: 107893 - DNA, 243 bp, Zea Mays
atgggagagctggaaggagcaccggccatggagataaaggggagggagcggttgggaagcagagaagctcagggagagaggaaagctgcggggcagagggagctatggaagagccgcggcgcgcagggagctgcgagggccatgggagacagaggagcacgcgtgggaggagccgctctaccgggagatgcgcggccgatagagagaagacgagggagagagaatgcggctggaagaagataa

SEQ ID NO: 107894 - DNA, 988 bp, Zea Mays
aattcaaccaacgtacactctcagtctcccccacccacctggccggtgaacgacacatgtacgctccgccaatggctcaacaccggcagcgcagcttccagtcgtttgcaaggacgtggctgcctctcgccgttatgatcttgatgtgcttcgccgcttccacgacggcgcagcagcaaccaccgccactgccgcagccgacgacaacaggcactgtaccgctaccgagcgtgccagcgtgcctgccagcgcaggccacgctgtcgccgtgcgtgagctacctcatcggcaactcgtcgtcgccgcccacggagtgctgcgcccagatacgggccatgttccagtcgcaggcgccgtgcttgtgcgccgctttggcgtcggcggggcccgcccagcagctcgggtccgcgctcggccagctgctgcccacctcgtgcgacctgcccgccgacgcgtgctcagcaggaacgacgagcgctgccccggctggtcccgcgtcaggcacgacctctgccgcagaaccgcctgcggcggccactgagccgaacgctgtgagcgacgacccgacggcgccagccggtggcgcagggatcaagtcggttccaggcttgcttgcctcggctacagcagcaggctccagtggcatacctgctgccgctctctttgtgtccttttgttggtcgtttatttatctcctttcaactctgatatgattatatgcttctgggatttgttcattgttgcgagtcatgcatgtcgatggtgcatatacgttcagatgagttggttggtacgtattagtgtgttgttcatgttccagtaatgctctctgtacttattgggagaccacgtcagacgtgtgcgtggacatgaattttattgtgcccatttcacacattgtgagtttcggtaaaatgattggcgcaatatcaagtgttgtcactattctatcgctaaaccactcccaactgtcatctaatctcttggg

SEQ ID NO: 107895 - DNA, 1297 bp, Zea Mays
gattggtgaatgaaaactttagccctagacagggtagaaagctgtattaataatagagtaaaatgggtatatgcttattacaaagatatattacacacagtacatcattacgccacacaataaatctaacacaactgaatcataattattggtcatagtgacgggtccaatttttcactaaactatattgtttctatacatgatctgatccttttcaggccgacctttttgcgtacaacaatataagtcacgtgaccatatgaatcgagaaagatggtgatagcagctacgagcaatttggtcatgctgacttcttgctgctgaaaatgagactccaactatacgtgttccctttctttgcggccgcatccagccgttttgcaccaacctggaaagataggttaatcaataaagtactagcaacaatggtaagcgcaaacttttctttggactccaagcatgtgtttggtttcggaacgatgtgggttggatcggaaccgactcatttttctgggttgaatcagacatatttcttgtttggtttcagtgacagattgaacctaatttcttgtttgattacagggttaaaatgggttgcagctacatcatctctttttgtttcgtgatgagggataaactgaatatggtcacctccctggacactcaggatgatatcttcaattcaatatgataacactattcaaaataaataaaaccgatactattttaatatttgagaaattcataagcacacgatatacataaattaaagccattattaactaagtcataaatttttagtgacgaggtctcactattacatttcagtcataattaaaggaacatcccaacaacatcaaatgcatttcagtgatgtaacatttgccatgactagcaagcttgtctaggcgatgacaagcactgacctttacctgctcgacgacaacactagcaagcctcgtgggttgtgcctacggaagaacacgccggcatcggagtgcaggtcagcgggggattgacggtgggatgtgcagcttctaacagcgttgacgaaggccagcacgctgcagggcaggccagtgggggactgacgacgggaggcaggtgggggattaatgtcggagggtaggccggcgggagtccctcgtcctaacaggccagcagtggcggcgcgcccctgtgctagtctcgagtggataatgcatgggtgacgggagggtgaagatgaagtgggtcgaaatgattcgcatgtttttgagaaatcactataacccacattttcaataagtatttcgac

SEQ ID NO: 107896 - DNA, 1093 bp, Zea Mays
ttggtgaatgaaaactttagccctagacagggtagaaagctgtattaataatagagtaaaatgggtatatgcttattacaaagatatattacacacagtacatcattacgccacacaataaatctaacacaactgaatcataattattggtcatagtgacgggtccaatttttcactaaactatattgtttctatacatgatctgatccttttcaggccgacctttttgcgtacaacaatataagtcacgtgaccatatgaatcgagaaagatggtgatagcagctacgagcaatttggtcatgctgacttcttgctgctgaaaatgagactccaactatacgtgttccctttctttgcggccgcatccagccgttttgcaccaacctggaaagataggttaatcaataaagtactagcaacaatggtaagcgcaaacttttctttggactccaagcatgtgtttggtttcggaacgatgtgggttggatcggaaccgactcatttttctgggttgaatcagacatatttcttgtttggtttcagtgacagattgaacctaatttcttgtttgattacagggttaaaatgggttgcagctacatcatctctttttgtttcgtgatgagggataaactgaatatggtcacctccctggacactcaggatgatatcttcaattcaatatgataacactattcaaaataaataaaaccgatactattttaatatttgagaaattcataagcacacgatatacataaattaaagccattattaactaagtcataaatttttagtgacgaggtctcactattacatttcagtcataattaaaggaacatcccaacaacatcaaatgcatttcagtgatgtaacatttgccatgactagcaagcttgtctaggcgatgacaagcactgacctttacctgctcgacgacaacactagcaagcctcgtgggttgtgcctacggaagaacacgccggcatcggagtgcaggtcagcgggggattgacggtgggatgtgcagcttctaacagcgttgacgaaggccagcacgctgcagggcaggccagtgggggactgacgac

SEQ ID NO: 107897 - DNA, 1315 bp, Zea Mays
ataaaaacatccgagttcttttctacttctttttctttcgccacaacttcaatccataccaatgcgcataatcgaaacattttacacatccattcaatttatcaatcgagtcgatcaagagcaacatgcatcggctcaccataaacaaactcaatcggcgtttgtaagaacgatggcgattctgatttgtgcatagctccgaacgtcgacgagcgttgagcggcttgccttctcctccacaaaacaaaacaaaaacaacacacatacacaattaatcataggaaaataacatcgatgcggaatcaaataaggatcatcgcggtctcaccgggggtgaacgacgtcgcggatggggctgcgcaaaaacagcaaacacccggtgagcgtcgacgtcgtgttgtccactgggcttcccaaaacagcgagccggcagcgcgcgcagatatcgggggtgctgctcacggcgaggccaaccagggaaagccttggccccaacccacggacaggacttcctgggcacggccaggaatggagctcggctcttaggaaaaaaaggcaggggcagcgggagcatgatggcgtagtggctagggagaggaaacaagcatcgctgctgctgggagcgcctgctcggccatggagggagctggagagttgaggccatgggcagcacaggaccatgtgccgcggtcgcgcgcagggaagttgcagatccggcagagctcgagtagagcacgcttgaggagcacagccgtcggaaggagggatcccgacgccatggggaagaagaccgtggggagggaggagggcaaggcatcggcaaggggcttcaacaggggagcgctcggccagggagatgtggtcggggcgagcagcggctagggcgtcccgcagcgagctcgcgaggccaaagcagagcatctagaacacctgggcgccatggggctatgctcctgttgtgcctgctcggaccccaagctgccggcggggtggaagacgagtagggagctgcatggctaggaaaacaggggtgccatgggaggatctcgcgcagcgtctattgcaggggggtggaggctcacgcccatggagcagggaagggcgcaggcttgggcgctcggatgggggggaggaataaggccgactggagatgcgacgccctggaggagaggaggaactgctgctcacctacaccaatggagccgaggagaggaagggaggccgccatgggctgggaggaagtctgctgcaccaggaacagagaaagaagaaagttgtgcgtgagataaaaagaaaggggagaagagagagtggc

SEQ ID NO: 107898 - DNA, 85 bp, Zea Mays
gtcacgtcttccaatgagatttagcaacattctaggtgaccttgaggatcctataacatcttccacgtgctcatccgcgacgatc

SEQ ID NO: 107899 - DNA, 153 bp, Zea Mays
tcacctgaagggcagggactcctggagcatggccatggtgttgaagggggatcccttgtaggagctctgcacctcatggctgccgcccttgatctcctcgccgtcccactcccactacgccaccgccgcaggggtatcgctgtcccgcccact

SEQ ID NO: 107900 - DNA, 222 bp, Zea Mays
gaaacatattacacacatccgcatatatacatgcactggccgatatcaaacaaagcatatgtattattataaatcgatcaacctgaacgggatcggagttgacttgtgcaagcacgtggtgcacccgaccggtcttgtatcgaacacgcgtgcgcgacgaatggcgattgacggctagctgcgattagacacacacaacctttaaacaatttcaccgagacc

SEQ ID NO: 107901 - DNA, 2328 bp, Zea Mays
atgaataccttctcctcccacaatgcaaggacggcgctgctgctccttgcactgtccttttcattggccgtggcgagcgaccccatgttctcgtgcggcccgtcatctgcgtcgcgggcctaccctttctgcgaccgttcgctccccgcggcgcggcgcgcggcggacctggtgtcgcggctgacggtggcggagaaggtgtcgcagcttggggacgaagcggcgggagtgccgcggctgggagtgcctccgtacaagtggtggtcggagggcctgcacgggctcgccttctggggccacggcatgcggttcaatggcaccgtcagcgccgtgaccagcttcccgcaggtgctgctcaccaccgcctccttcgatgagagcctctggtttcgcatcggccaggccatcggccgggaggcccgggcgctatacaacctgggacaggcggaggggctcactatctggtcacccaacgtgaatatcttccgtgacccgcgctggggccgcgggcaagagacacccggcgaggacccggcggtggccagcaagtacgccgtcgccttcgtccggggcatccaggggagcaaccccgccggcgcggcggccgcgccgctccaggcctccgcttgctgcaagcacgccacggcctacgacctcgaggactggaacggcgtggcgcgctataacttcgacgcccgggtgacgctgcaggacctggccgacacgttcaacccgccgttccagagctgcgtcgtcgacggcaaggccagctgcgtcatgtgcgcctacactgtgatcaacggcgtccccgcctgcgccagctcagacctgctcaccaagacgttccgaggcgcctggggcctcgacggctacgtgtcctccgactgcgacgccgtggccatcatgcgtgatgcgcagcggtacgagcccacgccggaggacaccgtcgccgtcgccctcaaggctggtctggacctgaactgcgggacgtacacccagcagcacggcatggccgccatccagcaggggaagatgacggagaaggacgtggacaaggccctcaccaacctcttcgccgtgcggatgcggctcggccacttcgacggcgacccgcgcggcaacgcgctgtacggccgtctcggagcagcggacgtgtgcaccgctgaccacaagaacctcgccctcgaggcggcgcaggacggtatcgtccttctcaagaacgacgcgggcatcctcccactcgaccgctccgcggtgggctccgcggccgtgatcgggcacaacgccaacgacccgctcgtgctaagcggaaactactttggccccgcgtgcgagaccaccacgccactcgaggggctgcagagctatgtcaggaacgtgaggttcttggccggctgcagctccgcggcctgcggctacgccgcgacgggccaggcggccgcgctggcgagctcggcggagtacgtgttcctgttcatggggctgagccaggatcaagagaaggaagggctggacaggacgagcctgctgctccctggcaagcagcagagcctggtcaccgccgttgccagcgcggcgaagcggccggtggtccttgtgctgctcacgggcggccccgtggacatcacgttcgcgcagtcgaaccccaagatcggcgcaatcttgtgggcaggctacccgggccaggcaggagggcttgccatcgctagagtcctcttcggcgaccacaaccccagcggcaggctgcccgtgacgtggtacacggaggacttcactaaggtgcccatgacggacatgcgaatgcgtgccgatccggccaccggataccccggcaggacctaccgtttctaccggggcaagaccatctacaagttcggatacggcctcagctactccaaattctcacgccagctagtcacaggagacaagaacctggcccctaatacgagcctacttgcccacctttccgcgaagacccagcatgccgccacgagctattatcacgtcgatgacatcggcacggtcgggtgtgagcagctcaagttcccggcggaggtcgaggtgctgaaccacggtccgatggacgggaagcactcggtgctcatgttcctccggtggcccaatgcgacggatggacggccggtgaggcaactgatagggttcaggagccagcacatcaaagctggggagaaggccaacgtcaggttccatgtcagtccgtgcgaacacttcagtcggacgagggcggacggcaagaaggtgatcgacagagggtctcatttcctcatggttggcaaggaggagttggagatcagctttgaagcctga

SEQ ID NO: 107902 - DNA, 182 bp, Zea Mays
ttttcttttccataattctttttttcttttctacaattcttttttttctttactacaatttagcgatcaatgtttacttgttttaattaatttttagtcactaacatctacatgtacgttcaggctataagatttggtagtgatccttgctctatagcgaaccaccgctagtccccgacgac

SEQ ID NO: 107903 - DNA, 108 bp, Zea Mays
ctcccgtgaaaaggctgacgtcatctctggggaattccgattgcgatgccgcattcggctcgcaccatttaaaatttatctttttctaaaaatgtcgagcctactgcc

SEQ ID NO: 107904 - DNA, 364 bp, Zea Mays
aacagcgccgtaacaaatcggccggatttggcgcaggctaccgggtctgcgggaattattgcgaatcggtctccggccttgctcgggtataaaacctcgacacagctcccagcttctccatgccatgccatggtccgccatttactttgagagtgggagaacagccattgttgagggttggtcctcttcgccattggcccgagaaaattggtctaggaagatcagcatcgaatgtaggacgtcttcgggggctcagccatgtgagaaatcatgtgggcgactggtaattcattgccggattccgactcttgcggccaaatcgccgcgcgacgagaacaagcctcctcgggatctaatcaccggt

SEQ ID NO: 107905 - DNA, 347 bp, Zea Mays
acaacggcagctgctgtttcataactgcaaccagagaaggagacgctatggggaggagcaaaggacgtggccttgggcgaccaggggaaggagtgcgccataggagggagaaatggatggagcggggaacaagacggatgccgcggccagaggaagtcgaggctgacagcgtccatggctggggcaagggcgagcgccagggaataggaaccgcgagcagggagggcgggcggtgctgttgccaggagctggaagcgccgccatggaaagcaagggcggcggctagaggatgagaacgagcgtcggcttgtgcaggtgatgaggacgtacgggaggttccaaaaatt

SEQ ID NO: 107906 - DNA, 204 bp, Zea Mays
atggcgccgttcttccctgtgcttatccccttctccctgcgcttgctctatctctctccttgtaccgcgcgtccatcccctgctccctccatgcggcgcctaaagacgtcctccttctcgggcctctccctcggcgagctcccctacaagctcgctccttctctgctcgtcctccacttggctcggatggcgtaccactgctag

SEQ ID NO: 107907 - DNA, 753 bp, Zea Mays
atgcagcacgggcaagggaacaggccgcacccttcctcgtactcgctgtcgtcgcctttgtctttcgcggcgcggcgccggtcgcagaccttccagtacacgcagaccacgatgacaccgaccaacgcgacggccaccgcgtcggccaccgagattagcacgatgaggctggtcttgatcggcagccgtgcaccgcccgcgccgccgttggtagtggcagaggacgacggaggcggtgggggcaacgacgacgacgacggtggagcgacgcggcaggggacctgcagcgggaagccgcagatccccgggttgttgaggaacgcggtggggccctggctggcgagggagccggactgcggaatctcgccggagaggttgttgaagcggaggtcgagcgtgacggtggccgggagccgaccgagctcgaggggcaccccgccggagaggtggttgtgggagaggttaagcgtgccggcgagcgcggcgagcttgccgagttctgctggtatggctccggtgaggttgttggacgataggtccagcatctgcaggcccaccatgtcctgccagacagccgccggtatgttgccggataacgcattctcggcgagaagcaatctctccagctgcttgcagcgtccaagctccagcggcagcgcgcccgtcaaggcgttctgcgacaggtccaggttctgcagcttcggtatcccacacagcgcggccgggaacggccccgtgagtcggttatcgtag

SEQ ID NO: 107908 - DNA, 607 bp, Zea Mays
gaccctatttccctttcatcttccatgctcaccttcgagagatcaagttgctgctgcggtagtccccaaccgtcatcatgcagaatgaggagggtaagacggtggacctttacgtccccaggaagtgctcggccacgaacaggatcatcactgccaaggtcatgcctctgtccagatcaacattggccacttggatgcgaatggcatgtacgatgtcacttcaccacgtttgctctctctgggtttgtccgtgctcagggtgatgctgacagctcgttggacaggccgtggcagaagaagaaggctgagatcaagcagtaggtcttgcatgtagttccaccaggaatggactcttgagggatactgctttacctatgttttatctcatgtatccgtactgtccagatgcaagtgttgtgctttcacttggtaccttaattctgaagactcaatattgttacttgggttccatctgagttcgttgtgttttcacaaatgtttccaaacgaagctaaaaagttttggatttgactttgctgctgaagtctggggtatgattccgatgtttggctggatgactaggttttagtttgtctggctttgctcg

SEQ ID NO: 107909 - DNA, 1515 bp, Zea Mays
gctaggctgttcctcctcatgccacttctcgctctttggcttaggcgcaggagcagaggcctcccatggcgccaccctctccccctgcagctttccctccctctcggccgcgccctctgtcctagctccctgctagccaccatctccaagtcggccatgggccttcccccatgccctcttctgctccaaggcataggagcctaaggtcctccatcagccgaacttgctccttctgtcatggcctcgcgctcgacggtggcgactcgtcttcccaagcgcttagtgctccacctcgccgggccaccggccaacctcgccggccgagcccctccccagcgcccagcctcccccagctgggtgtccctcaagcacagggagctttagctcgttctccttcgcgtcccccttgttcctcatctatgcaggtctcccgcccttctctggtcttgccatggtgggagccgcagccccaagtttgtgaccttgcctcggctccactgtgcgtcgccgctccccctgtgcactcgcttagccccgctttgcacactcgccgctgctcctccatgagcgttgcttgctcgacaaaatgcacaacacaccacacgtcgtcggtaccttgcagcagcaaggaacccctgcatcgtgccgctacacccgcgccgtcgatgcttgctaggcgctcgaccaaatgcctaagccagcctcacccctgcagcagcaacaccgtgcgtcctgctgctataatgccttgtactcgctatcccgcaactcacggtcatcgcagcgtgttgtcttggtttgggtagcgagcgtcgtctacggtgtcatgctatccttgttttcgtggtcgccgtccctctcacagtgcttgcctctgcagtgtgtccgaactcctccccgtgtgagcaccaccggacatggctggcttctagtcgttgtcgtgaccgacgcaactcctccacagagcacccccttcacacacgtcacgtcctacttatcagccttgcgtcgtcgatccctcgccattccacacttcaactcatgcacttgtccccgagtgcattgttaccccatgcatcatggacgcgacgtcatcgtcatgtctccttgcaagcttatggctttgccaaaacttgcaggtgtgcaaaatggatgatctcgtggaagaagtaaattaaaagggtgagatatttctttatgttttcttactattgttagttgccattttcatatgcgtgaagtggattggcgaaatttctcttatggacgcaagtagtgtaaacacgtaggtgaatcagaggaaagggcgagtcatgtcgtttgatgtgatgaatgggattagaaacattcgtttatgcgaaggttgtatatattggtggacgtatgtgtgtcgaatcacgtggtactcatggtccgttagataggtgcagtgtctcaaataaaagtaaccggtagtgttggtcacttgttttcaaatactgtgaatcaagaaaaaggcaacacaattgttaatcg

SEQ ID NO: 107910 - DNA, 871 bp, Zea Mays
cgccacagccttcttcctcccctcccacacgccactcatcccctttttcccctgttcatggcgcaggaaacctccccatccgagctccatccatggccgctcctctctccttcccctcaccagcacaccgggctcctccctccttggcgctcggcctccttggatcacaactcttctgctccttcaccgaggtccatgcagcaggctgtgtatgcacgccaggaaacgcccgaactccctcaactacccatggcgcaggggagcagtagctcttcatcccctaacctccattcccctgctcggttcgtctttaacctctaggccacgcgaccttctccatggcgcccgagctccattccttggtcttcctgctcggcgctaggtcccaggtccggcgacctctcctggatgcctggatccgcgacgtctctgctctcctctgcggcaccactcctccccatggctggtgcgcgcccctgctgtgtttctcccagcgagctctctgctcggctagcagccatggccggacttatgccccctgtgctcggcaccccaatggttggaatccgaccccccctgtttcccctcaaatctgagctctcctggtgttttgttttgtcctgcagaaactcccgtgggcgctggagatgcccagctcacgccggagctcaaggtcgcacctccgtctccatggctgtcgcagccaccacgcacccttgctaccccttgactgcgcgcgagtgctctcccatgtcgagccccctccatctggtttcgggctgcagcagccgcctcggcatcgtcgcgcagcgagctccatcgctgatctacacagcccctattcggttgtcgttctgccttcgtcgatctc

SEQ ID NO: 107911 - DNA, 1588 bp, Zea Mays
ctggagtgttcgaggcttcccctccccactagccacagtagcacctcagcccaggtccccgtcgcctccgctcaactgccgccgcagggcccgctgcaggcttccatgtgtggtagggcccggtgtaccctcagcccggccgaggttgccagggccttcggcttccccaccacctccgccaacgcgggcggcggtggagacggccccgctgtgccgacgctccatcttaaccggttccggccgtcgtacaatgtgttgcctggggcgtacctgcctgtgggcgccatgcgggcactaccaggttgcgcccacggaggaggaggttcggatggggaggggccggtgatccagtgcatgaagtgggggctggtgcccagcttcaccggcaaggccgagaaacccgactatttcaggatgttcaatgccagatcagagtccgtaaaagaaaaggtttcattccgtcgactaattcaaaaaaataggtgccttgttgcagtagaagggttttatgagtggaaaaagaatggatcaaaaaaacagccatactacatacatttccaagatcataggcctcttgtctttgcagccttgtatgatgcatggacaaattcagaaggagagatcacccatacattcactattttgactacacatgcctcaacttctctaaattggcttcatgatagaatgcctgttatcttaggcagtaaggactatgttgatgcttggttaaatgatgtttctgtaaaacttgaagaaattactgcaccttacgaaggagctgatctggtttggtatccagtgacatccgcattgggtaaagcatcatttgatggacctgagtgcatcaaagaggtacatatcggagctactgataagcctatttcaaaattcttcaccaagaaatcgactgcctacgatctatcagggaagtatgagaatatgtcacgggagcttgctcatgcttacaaagcagcgaaagtggaatgcgatggatcagtagaaaatcaaggaggggacggcaaccaacaccagtcccgagagaagcaaactactaattgtactataaaggatgaacctgtcaccttggaaccacaagttttcgagacaccgtggagcatcgagcatgaagatactatgactctggctggtgccactttggaaacacaacgtgatttgggattcaagagaaagatcgaggacactcaagtcgaagctagcatgaaaccctctcagcttaccaggaaggaaaaagctgtaaaagcagcttcggatgggcaggcatcgttgctttcatatttcgcaaggaagcagggtcgctcgatgaagtagtttgcggtagccgtgccatgtattcctgtgtaactcaaactttaccagtacctgtcctccgtgttcgggacaaactatttcggttttaattttgttttggctaccactaaaatgaaccagctagatttctgcggtcattaattttctgcggcccaacttagccgaggccaatgaaaaaagaactttatttccggtagtctggtccaatcactgaattaagaaccttgtttttggtggttatgttaagccgctgaac

SEQ ID NO: 107912 - DNA, 222 bp, Zea Mays
cccaagagggatcgagcctcgcaccgggggcgggccggacccagctggacgtggaggcggcagctctggatggtcatccttgcggatctcctcctcctcacaatcctcttcgccgcctggctcgcagtctgccggggattcagctgcattggtcggtaaatagctacacaacctccaaggtacgtacgtaaatcactaaatcaaatccatggcctttcttcc

SEQ ID NO: 107913 - DNA, 429 bp, Zea Mays
atggccagcacgcgtgccatggccaaggactggagcagagagggactcgacgagggagatgctgggcatggagaggaggaggagccgtgcgcaccagaggctatggcgagcgagcagaagggcgagctccagtgtacgattgagcagggggttgaagggctggacaaactcgacggtgtccacggccagagcgagttggagaagccgagcaagggcgagctccatggcggggtcggcggaggccagcagtggacggcgccctgcgcgcggcgtgaagagagcatgcgctaccgcgcagaggatgaaatgttgggcgagctcggccaggagagaggcagagagcagcgtggggcgagcagggacacgcaccaccatggtggggagggcgacgaccatggaggaagagaagggaaaaacgcgacagaataa

SEQ ID NO: 107914 - DNA, 1126 bp, Zea Mays
gagaaaccaaataaatttatgcacatcatactgatatttggttggtgtggcattttgtttggaattcaaggatcaaaaccttaactgaattttaaaataatggaaatacaaactgaaaagaaaatacaagaaagagaactcccagccggcctcacctttttcgttttttttcttttcatttcttttttccctctggccggccatgcgcatgcgctacactgttggagaatctttcacaggagcgctgcatgcggaacctcgaggtcctcctcacgcaccagccatttcctccactcgctacggagtctgtggtgcatgcgctcgcctcttctcttgcgcattgcccagtatacaggttcatgcgtgatgccgcccggtggacccctccccatctcgcatgcatcgtctccgccgcgaagccgcgcgtaactgaattagcgtctttgcggggtccgctcggctgtgaaactgaaccccgctttagccgcctgggcgctcacctggtccgttcggtagatgaggtctaccgtgattctcggacgtcagctcaccctgcggctataaagccatgccatctccccagcgatcacccccatggcgagcactctacagagcctgggcttcttcgtcgtacgccggcgtccctgctagtgcctgccgttgaactatccggccaccattgatccgacctcccctaagccatcgatgagtagagaaaaacagtgaacgccacctctgtactcgccccaccttatggcgcgtcgctcctgcagtaccggcccacgctctgcgcggcgctcaggtgttacggctgccctcaaatccgtcgtcggaccattggcactggggcaagcaaaagcacggacaggtgctcggcgtgctgcaacggcttccgatttgcccggctagatggaagacggctggggagcatcttctctggggaacaccgcgtgtcatgggtgccttgccgaagttcagggacggcgtgattgctcatcgtcgttcatgctccaccgtggcgccacccatctccgtgggcagtgggctgcatcgtccaatcgaccgcagtgagatcacgagaatctgaagatcatcctggtacctggaatctcaagtcccaggcaag

SEQ ID NO: 107915 - DNA, 1126 bp, Zea Mays
gagaaaccaaataaatttatgcacatcatactgatatttggttggtgtggcattttgtttggaattcaaggatcaaaaccttaactgaattttaaaataatggaaatacaaactgaaaagaaaatacaagaaagagaactcccagccggcctcacctttttcgtttttttttcttttcatttcttttttccctctggccggccatgcgcatgcgctacactattggagaatctttcacaggagcgctgcatgcggaacctcgaggtcctcctcacgcaccagccatttcctccactcgctacggagtctgtggtgcatgcgctcgcctcttctcttgcgcattgccagtatacaggttcatgcgtgatgccgcccggtggacccctccccatctcgcatgcatcgtctccgccgcgaagccgcgcgtaactgaattagcgtctttgcggggtccgctcggctgtgaaactgaaccccgctttagccgcctgggcgctcacctggtccgttcggtagatgaggtctaccgtgattctcggacgtcagctcaccctgcggctataaagccatgccatctccccagcgatcacccccatggcgagcactctacagagcctgggcttcttcatcgtacgccggcgtccctgctagtgcctgccgttgaactatccggccaccattgatccgacctcccctaagccatcgatgagtagagaaaaacagtgaacgccacctctgtactcgccccaccttatggcgcgtcgctcctgcagtaccggcccacgctctgcgcggcgctcaggtgttacggctgccctcaaatccgtcgtcggaccattggcactggggcaagcaaaagcacggacaggtgctcgacgtgctgcaacggcttccgatttgcccggctagatggaagacggctggggagcatcttctctggggaacaccgcgcgtcatgggtgccttgccgaagttcagggacggcgtgattgctcatcgtcgttcatgctccaccgtggcgccacccatctctgtgggcagtgggctgcatcgtccaatcgaccgcagtgaggtcacgagaatctgaagatcatcctggtacctggaatctcaagtcccaggcaag

SEQ ID NO: 107916 - DNA, 825 bp, Zea Mays
caaacatgtaaatgcacggcacaccacaccacagcccccctactttcctctaccttgcagactgcacactgcctcaagatggtttcctgttcctcatctccacggccacccatccctctcctgctcctcttcctcctccacttctcctctgtcctcgccgtatcagctccttcagcctcacaacaggctggtaccgacggcggcggcggcaatgtgtcggagacggcggcatggacgccgcggctgaggaagacgttcttggacggcggcatcgagcactggcacgggcggcggctggtggggcggttccaggtgtgcgcggtgtgcacctgctgcgggggcccgcacgggatgtgcatcccggcgccgtgctgctacgccatcaactgcaacatccccaaccgtccattcggcgtctgctccttcaccccgcgcacctgcaactgcctcaattgccacctctagcctagccttgccgccaaggatgccaaggtgtggcgaactgctgctggatccatggttttgattgtttcgctttttaagttggttgccgatgcaagggattcgtggtgagagattcgttaatttagggaccaagtggaagattccatcattgcataatactagtattgttagtagtatatactcttgtcctgcattgtagttgtagccatgactcatagtaagtagcagtatggtgatggttggattaattcagcttttttgctcttgcttggtgttgttcaactgtggatagtatctatcattgcagtgtggtacttgtattatttttttcctcatggcagtaggcatgacctttgttct

SEQ ID NO: 107917 - DNA, 494 bp, Zea Mays
cttcccttcccacgccaccggtgccgcccagatcggcaaattcgcccgcatctaccccgcgcgcgtcccggatggccacttcttcctccgcctgccctggggttccgtagcatgggccactctctctcctcgcattccaaatccagcctctcctcccagtcgccccgcagcaggtggctctcgtcgatgggtccaccgctacggctgaccgcgccgatgcagatcgctccggaggacagcggcagtggcagttcctcctcgtttgcgccgctcgcctgggactacatccaggacctgcctgacgagatcctcgcgctcgtcttcgcgtcgctctcgcccaccgatcgcaacgcctgctcgcgctggatggagtcgacgccaccacgcgccaccgcctctccctcgacgcccgcgccgcgctgggcaacgctgcccccgcgctgttcgcgcggttcaagaccgtcacgaagctggcgctccgctgggcgcgcggg

SEQ ID NO: 107918 - DNA, 2090 bp, Zea Mays
aggaacaaaacgactggctgtccgaacggggacgcctggttcctctcattccccttccacctctctctttctttccactactcgccctctctctcttgcgcgcgcgtgacaacatccctccacgggcgcgcggcgcgggagcacccaccgacttatcgccggtggggcggggcgggggcgatctgatgccggcgcggcggtgatggcagcgccgtccggcggtgggggcggcggtgcgggggagggctcctcctcggccgccgcagctatgacgatcggggcccacggggtggaccaagtcacagaagcgatgtggcagatgaatttaggagatgccatggaactggggccatacccagagcgtgttggtgatccagactgtagctattacatgaggactggcatgtgcaggtttgggatgacctgtaaatttaatcacccagcagacagaaagctggctgttgctgctgcaagaatgaagggagaatatcctcaaagaattggacagcctgaatgtcaatactatctgaagactggcacatgcaagtttggagcaacttgcaagtttcatcatccccgagaaaaggctgcaatggcaactcgagttcagctgaatgaactgggctacccactccgcctgaatgaaaaggaatgtgcttattatttaagaacagggcagtgcaagtttggaagcacatgtaagtttcaccatccacaaccatccactatgatggttgccgtacgtggctctgtttattcacctggacagtctgcaacttctcctggccatcatgcttaccagggggctgtaacaagctggcccttgtcgagatctgcttctttcattgcaagtccaaggtggccaggtcattcaagttatgcacaagttattgttcctcctgggcttgttcaggtcccagggtggagtccttatgctgcgcagattggttcttcatcctcggatgaccaacaacggacacctggagctgcccaatactatactggctcacgccagagtggaacacctggcataggcgatcgaggaatgttttcatcctaccaagcaggttctgttcccgttggactttatgcagtacagacggagaatgtatttccagagagacctgaccaacctgaatgtcagttctatatgaagaccggagactgtaagtttggttctgtatgcaagttccatcatcccagggagcgaataattcctactcccaattgtgcactaagtccattaggcctacctttgcgcccgggagaaccaatatgcagtttctataatcgctatggcatgtgcaagtttggtccaaattgcaaatttcatcatccgatgggaaaccctatgtatggccatgcttcatcaccgacaagtgaggcccaaacatctcggcgtatgctggcacatgtaccatcgcatccagaagtatcacctgacagtggctcgggaaggtctaggaggattgttcattcagattcccagcaaataccctctgttgaaaggatcaccgagagagaggcgtcctaagccatcctcggtgtcttcgttcatgctgcctcccctcccctcccctcccattcttgacgagtaattaaatgcaacaacatctgagaatccgaagctgtacaggtcttttgcctcatctttgagctttacataccggagcttgcttcaacatgtattgcatccaggcatgaaaaagttcttgccggttcgggatgctcatttgcccccataaaaacgggaacaaacctaccttatttaaacatatgtatgaaactcactcacctctggacattcaaacccattcgagtaatggtcccggtgttgtagtttatagagctgtgtttcagtggacaaacctttgcgaaactgactggggatgcgcaagcatagcctcctttattaattattatctcgtttttttcctagcatctctcttttcataagggcaacccaaagtgttggaataatagattgccaccataatgctctgtattacccaccatatttaaacctggttacttgtgagtaattttctctttgtagttctgacttactcgatcaatctgccaggagattt

SEQ ID NO: 107919 - DNA, 624 bp, Zea Mays
cggcggccgggtcgacggagatcgctgcctctacaggcggcgtggctctccctccccggatcgataccatggtcaccgtggggtccaggtcgttgttagggacatcggtcccaggggtgggtgccctaccctcaccaagaccaactatgtcgagtgggccgcggtgatgagggtacagctccaggttcgccgcatgtggttagcagttcggtacgtcgacgtcgactactacgaggatcgtcgggcgctagatgccctcattgctgcagtcccgcccgagatacaattttcactttcccagaagcggactgccaaggaagcttggtacgccatcgctgcggcccgcatcggcagcgaccgtgcccgcaagaccacactgcaggcacttcgcaaggagtgggagaacctggcctttaagccaggtgaggatgttgatgactttgctcttcgccttaacactctgttccagaagatggtgcagttcggtgacgacacctacgatgaagagagagccgtcgagaagctcttccattgcatccccgagaagtacaagcagattgctcgctcaatcgagtctctgctagacctctccacgatgacgatcgaagaagcgattggtcgtct

SEQ ID NO: 107920 - DNA, 370 bp, Zea Mays
ggcgctgcttgccttcgactttcctcgcgtcatctcgtgcttcccaatccctatagatagaactggattgatccccatggacccatggttctctcagacgccactgcgcctgttcgacgacgcgaagccagaaggcctcgtggtcggggaggctgacgcagagagggacgatgggaacgggggtacccgcctacaacggcgctcggggcataatagttggtcaggcgtgatcataggggcgcactagaggcgcgtgcatcggtccgtggggccgaagacggtcggtgcggcggcgattgctcgccgggatccgcaagaaccgccgtccgatcatcctgcgttgtcagcactcttcccatcagcgccttcg

SEQ ID NO: 107921 - DNA, 3171 bp, Zea Mays
atggcgaccaaccgagaggccagtagcggcgtggatgaaggggcccgagtcgggcatggtcacgacgatggggaagggagccgccatgagggagagaggcatcaggtggtgacgagtaggtctgttggcgcagagggccagcggacagaggccacgacaataggctggggccgcggcggcgatctggtggtagggtatggtggaggaccaacattaccaagaaaggcaatcaatactggcttttctcaaactgatttggcgatagaagtttatcctctacgactgcagttaattctaatgtcaagaggagagcgaacctttataaggataagcaagaaggtatgcatttgggactattatggtcgaacaaagcattcattgatggatagcttggacaaaacccttgatgatgccaacattcagatggatcaaaacattctagttgaggtaaccactgatgcaagtggtagtctggatggtttggttaagcgaaacaatttttttgagagtgatgctccgaaatcaggattgccagatgagaattttgcagccaacaactatgcttccagaagctatagctctagtctgacaccaagcatctacctgcgatcacccaatggtgatctggataatgtgcatggttctagtggcatgatcacgaggggatcgcccttaggtcttacagggctacttaatcttggaaatacatgctatatgaacagtgccatacagtgtcttgtgcacacaccacagtttactaaatacttctgtgaagattatcatcgcgaaataaatcggcaaaatccactgggtaatgtgggtgaacttgcattagcttttggtgagctattgagaaaactctgggctcctggaggacgtgcccctgtttcacctagaccattcaaaatgaagctttctcggtttgcatctcagttcagtggatacaaccagcatgattcacaggagctgttggcgttcctattggatggactccatgaagatttgaatcgtgtgaagcatagaccttacataaattcaggggatgctgatggaagatcagatgaagaagttgcagatgaatattgggcaaatcatattgccagaaataattcaatcattgttgatgtatgccaggggcagtacaagtccactttggtttgcccagtctgtgggaaggtttcagtgacttttgacccgttcatgtatctttccttgcccttacaatttgcctcaacccggagcgtgactgccgtggtgttttcttgtgatggtagtgttccaccaacaccattcactgtgaatgtaccaaaacaaggtaggtgcagagatctattacaagcccttggtgctgcatgctcacttaaaaatggggagaaacttctaattgctgagatacggaatcataagatctaccgttttattgatgatccagtgcttcagctgtctacaataagtgatgatgatcatctggcagtttataagctcccaaagttggaaaagagggtgaattacattcagtttgtgcatcgtcatgaagatctggaccatggaaacaataacagcttgacatcttggaaaccgtacggtgttcctcttcttgcacaaatttctcgcaatgaaattgtcacgggttttgatatccatgagttggtccataaaatgcttgtgcccgtgctaaggaatccggactctctgcatttggctgttcaaagttctgtttccacaagaactcatagttatcataccgacagcagcaaatgtcagcttctgttggttgatgatagcaacacagtcattgaaaaatcaaatgatgctatcaggatcccacaatcttcacttgcaactgtattttttatcaactggcccaaggcagatctgaaaaagatagacactcatcatttagagtaccttccagaggtgtttatgtatgctccgcctgcgaagagaacccgtggtgaagctctgtcactctatgcatgcttggatgctttcttgagagaagaacctcttgtacctgaagacatgtggtactgtccaaggtgcaaggagcaaagacaagctagcaaaaagttggatttgtggagacttcctgaagtactagtcatacatctaaagagattttcatttagtaggtcaacaaaacaaaaactagaaacttttgttaattttccaatacatgacttggatttgacaaattacattgccaataagaagacttcagagcgccagatctatgagctgtatgctgtgagcaatcattatggcaacatggcaagtggacattatactgcacacattaagcttgtggatgagaatcggtggtacaacttcgatgatagccatgttgcttccattgatgaagatgaggtgaagactgctgcagcttatgtgctattctatagaagggtcagagaacaagacatagcaaggggaactagtaatggatctcagttatatgcaaaaagaagtcacggatatagccataggtaggctgatgattactgtggttcggtgcaagggggattctggaaatgacacccgcacgcctttagtcattgccaggagtatatggcttgctggaaaaaatgctcatcacgtgcagtcaatgcaccgttgtccagttgtcacagaagatatttcgtgcagtgctggtacaagatgggaattttgtatgaggtgagttgaaggagtaattgactctttatgataactgggtagcttcaacaggaacgccggggcttggtggcattttgttcgtctgttttcttctagaagagaaacaaggggaggcaagaaaacatttaggaaacaccttttcgttaatttgattttttatttccatttttagatttagctagtctgtacactgttgttggaaatgggtccgctgttgttggtcgatgcttgtggtggccaataatactacacccaactataccaggctctgcaatggcgaatcatggtgcacattatggtgctctgttgcgggaagaattgtagctgatgttgtacttatatactggcaaaaaggccccagaaatgtaaaaatgtatcgatatgctgacatcttaaaccctattttggattcgtgctctttcctatggatgaaggtgtgcgccatttaggggttgtttgtttgaagaatcaatccattctaggtaggtgattatc

SEQ ID NO: 107922 - DNA, 594 bp, Zea Mays
aaaaagcaacctcgcagatccgcggccccccctcctccgctcacaggttcaccgcatcgacgccactaccgtttccactgccgcctcgaccccgctccaccaattcttggtcaagccgctccagctaagagacggagagccctgcggaaaggggagacgaggggagggtgcaaaccctagccgtagaccgcgggctcctcctcctcgccggcggcggcggggatggagatggtggtggcggcgccggcgctccccgccgaagtggagagggctctcatccgggacataaccgtcgcggctgatgcccacgccaaggagggagacactttcttcctcatcaccaccaggtggtggcaaagttggattgattacctcattcaagatttgactggtgcaacaagtaatggttctcatcatcatgagtttggttcaaaaactcctagaaggccaggagctattgacaataccgatttaattgatgatgtgccacttgaagtctccaacatggagattgagatacatgataacttggttgagggtcgggattacatactgcttcctcagcaagtttgggaaaagttgcatggttggtaa

SEQ ID NO: 107923 - DNA, 1292 bp, Zea Mays
ccaccgccccccctgcccatcacctcctctctcaatttttgcagccaccaaaccctagccgcccccccccccctcaatcccctcctcccaaggtgccaatccttgccgctcggatcgtcgtctcgtggtgcgattctccaaccgttttggtggagggaagaagggaagaaggaaagggggagaacccaaggtggtggacttccggatcgttcttagggattttgcccaaacttcggtgaaggcaagtaaaactgtgatggttattccgtctgtcagatgaggagtcttatacttgtttatgttgtgctatcatgttcaaattcatattttcttttgagtaccatcatttgaaaatgttcatgtttcatggatttcgtatgttgagtttgaggtttgattatgttactcaagtggttattatgtggaatggttggaagtaaatgcctagcacatttttatttgggaagaacttatgatgttgtcatgcataatgcactcatcatccattgcattgaagtttcgtcgcgatcttatggtccgaccgtaccggtacattgagcatcatatgttgcccgagaaggggtatggtgcagcttcatatccttagaggtatggaggcagaagtcattattgcttttgtagccatgtgcattcatgggagaggtgttgaatctattatgtggatgtggataatttggacttgtgcatggtgattctacttggcgttgagcttttagttacttgtttacttgctgcaatttactgttcaaaagaaaagaaagaagtcctgaacacgtggttgtgtaagcacagttgatttacaatgtcctatttgttgttgttatgtttacttgctgagatgtgttatctcacatcttgcattgtttgatgcaggcacctaatttctgctttgggaatagagggatgtagcagcacgaccactacacctttaataaaggaaccaccatttaataatgttgttaatcagagttggacaagtctagtgaattgctttgttcttggttgagcgtttattttggggtgggctgagtttcttatcccatttgttttgcttcagttgggtcataattaagttttaccacttttgcatttcagtttctactatgtgaattatatgtctttatatcttgtatgagcttcatgtttcccctccttgttatgctagttttcaaaggaggtgctgccggattttgctatatattctttctttattacttctcttgtgttgagtaagtttggtgggtggggtttgtggtattatccattgtatg

SEQ ID NO: 107924 - DNA, 2168 bp, Zea Mays
agacaaacaagtggagacctggcctggcttcccccacctatctggcgctctcctgcccctctactaaaacgtgggcattaacaaggacgcccccatggaggcatggacctccaatggcgaccctgccgacctcgcaccggcctggcccctcatatatcccacgcttatagatatcgcagaacagtgtgcactgtctctcccatgctttctcttggtaggtgttctctgcctgcctcctccaaccccggcccctcactagaattcttgtcgcaagcacacaccatgatctgttacatgctgtggttagcggcatgctgcctcctcctcttgtacagcgttcgattcaggtccggctggagccatggcaacggccccaggagctaccccgtgattgggtgcctggtcgacttctacaagaaccggtggcggctgctggactggtacactgagctgctggcggcgtcgccgacgcagacgatcgtggtggaccggctgggcgcccggcgcaccgtggtgaccgcgaaccccgtgaacgttgagcatattctcaagagcaacttcggcaactaccccaaggggaagcccttcaccgacatcctcggcgacctgctgggcaccggcatcttcaacgtcgacggcgagctgtggtacgcgcagcggaagctggtgagccacgagttctcggcgcgcgcgctccgggagctggagttcgccgtgctcgaggacgaggcgcgggagcgccttgtgcccgccctgggcctggcggctgcgcgcggcgacgtcgtggacatgcaggacctgctccggcgcttctcgttcgacgtcatctgccgcgtgtcgctgggcgttgaccccgggtgcctggaccctgcattgccggcgccgaggctggccgcggcgttcgacgcggcggcggggatcatcgccaggcgcggcgcggcgcccgtggccgccgtgtggaaggcgaagcgcgcgctggacgtgggctcggagcggcagctgcgcgaggagatcgcggtcatccacgaggccgtcatggacctcatccacatccgcaagaaggagtgcgggctgcgggtcaacggcggcgacggacggaggagcgacctgctgtcgcggatgatcgaatgcgggtacccggacgaggcgatccgcgacatggtcatcagcttcatcatggccggccgggacaccacgtcgtcggcgctgacctggttcttctggctgctcacccgccaccgcgacgtggagcgcgaggtcctgcgggagatcacaggcggcggcgcgagccacgccgccgccggcgggcagggcaagatgcgcgcgctccacgcggcgctgtgcgagacgatgcggctgtacccgccggtggcgtgggactcgaagcacgcggcggcgggcgacgtgctgcccgacggcacccgcgtggagcgcggcgaccgcgtcacctacttccagtacgggatggggcggatggagtccatctggggcgctgatgccggcgagttcagcctgcggcgctggctgtccattattccggaggagaacgcggcgccagcgccacccgccgcggtggccggcttgtcgccgttcaagtacccggtgttccaggcggggccgcggacgtgcctcggcaaggagatggccttcgtgcagatgaagttcgtggccagcaccgtgctccggcggttcgagctcgtccccgtggacgaggggcgtgtgccggtgttcctgcccctgatgacggcacacatgggggacgggctcaacgtgacggtgaggagcagatcaggggaacacgttgcctctgctgcgtcgtctgggaattgagtattatacccggcctcctcatgtaagtagtacgacaaattaaaaccaggattatttatttagttactactactatatgaaaactgcttcgttattactactagctatgaaattcatgaggaccacgtactgttttattagctgcgtagattgcagacaacagtgtacacttttgtaccatgtcgatcatgatcatatgaaagagatacacaggaggatacatatttgcagctatacgccctcgctcgcatgtatatacaccaagctatttatttctgttcacaaacactcagtttgtatgtatctatctactcgtatatattaatatatataaaaat

SEQ ID NO: 107925 - DNA, 110 bp, Zea Mays
aaaatttgtttagatatttttccagttcaaaacaaagtgaaaagaagccatgtgattttatgtgctatcccctgtagtctatagttaatcgcgatctaatttatgtagcc

SEQ ID NO: 107926 - DNA, 258 bp, Zea Mays
gaatttctaaatgcaaaagctaagaaaccattcactccttgcaaatatgccttgctgtgcctacaatatttttatgttaaatgacattttaaccatgtgtgtcattcaatttgtgaaacatggtttgtacctagcatcattatcgatccatgttttgtccatcaacctttgtataggggaccagatagcttccaaaatgaaaaatatcataagaaatacaatagccatataatttttatatatctatatttatgtcca

SEQ ID NO: 107927 - DNA, 271 bp, Zea Mays
ttttttttgcatcagagaaaaatcatgaaataaataaatttgggaatactaaaatgttattaaccaaacataaatcctaaaacattagaatggaatagtcctctcatgaactataatattcgagatactttccacaatttataaataattcttaaaagggaatatgtgttacttctctaaaaataagcaaaacaacataggttcattgttattgattttaacctttaattcgatcacacattcacaaatgatattctcctaaaatgaatta

SEQ ID NO: 107928 - DNA, 1656 bp, Zea Mays
gtggtacccatctttatttctattgtttaatttttcatcttgttgttgtacttttgttaagctctatttttttcttatgattatttctgactgttttttggccattatttatttattttgcaggtctactactactatccgttttctgctctttcagatccagccaagctcttcaatgatctcagatggaatatcagtagaccccagggttttgaggctgttatgcgtgtaaggtgcagtcagggtctccaagttcaggactattatggcaatttctgcaagcgtgttcccaccgatattgatcttccagcgattgattctgacaaaactgtgatggtcacgtttaagcatgatgacaagttacctgaaaatgtggaatgtggcttccagtgtgcacttctctatactactgtatatggacaaaggaggatccgagtcataaacctttcactttcatgcacaaatttgcttgccaatcttttccggtatgctgatttggagacacagttttcatgcttcctgaagcaagctgctaatggcatcccgacatctccattacctcgtattcgggatgaagcaacaaatacatgcataaatattcttcaatcttaccgcaaacactgtgcatctgtaacttcatcagggcagttgattctcccagaggctctaaaactgctgcccttatatactttggcactggtcaaaagcttaggcttgagaaccgatgggcgattggatgaccgttcctactggatatctgtagcctcgtcagtttctgtagtactagctgttcctttggtgttccctagattgattcctatccacgatctcacatcaagggatgacgatgattctcttatacccagtccccttatgctcaatagtgagaatgtacaagaggatggagtttatttattggaaaatggtgaggatggtttaatttatgtaggaaacatggtaaatccggctaccctggaacaaatattcggtgtctcttctttggctgcattaccagcccagttggcgttggagcaatttgacaacgaactctcgaggaaggttaacgaagttgtaaatgaaataagacgccagaggtgctcatacttgaggttaagacaatgcagaaggggtgaaccatctggtgattttttccggtcatttttagtggaggacaaggcgcctggcgtcttctcctacgtcgagttccttgtgcatgtccacaggcaaatccaaagcaagatgacctgagggcccaagatcctggttgtaacatttcggtcagtagatggattgtatgtaccccgggagtttgatttctgcataaggagacagcaaagtggcgattccatatcaatgtggagcataaagagtgctcggataatagaactcaggaatagaggcttgtggtgtttacagcaccgtttttggagtgggtggtatatgtgttgtatacagagatgagaggggtggagctttagtttttgtgttgtcttttatcatcgtgcatccttgtttatctcatgtgcaaaaagtgttggattatgttggttggaaggttatagaggtttcgtaataaaatgcacctagctaatcgatagtatgaatcagatatactataatttaactattatgtttgcctattcgaatttaaccctg

SEQ ID NO: 107929 - DNA, 258 bp, Zea Mays
atgacgaaggtgctgtgcaggctcacgacgtcgaggcttcggctaggcgatggtgaggcatgtgggctgcgcgacggctgctgcgagatgcgctggacaggcgcacgcgacgcgacatggagagcacgcgcgagcggcgctgggtgcgcgacgcggctgggcgcggggcgtgcgacgcgggcagcgctgatgctcgggcgagcacgcggttgtggcgcgggcaagcgcgaggagagggagagaggagtggggcgttag

SEQ ID NO: 107930 - DNA, 1122 bp, Zea Mays
atggcgttgaacacgacgggcgggggaccgccttcccagaacgctgatgagaaattgggtgtcaggtaccaggcccatatggatcaccattgggcagtgcttgaacggacagtgtccaacgatgtcacccccatagaccccaacgaggtgctcgacaaccaccgcgtcggcgagctcatcgccaccttcacgtctgcggccgatgttgccttctccagcaccgccgacgtcgagtgtggcgtgggtggactcttcgatggcgatggtgctgccaacgcggagatcgccgacgactgggacaaaccctccaccgcttccaccgacgagcccaacctcgtccacgtgctccgccacggccctccgcggctcgtcgagagccgcctccatgcactccgcgtggcgcaggagctgggtgcccgtccacgtgctggtgggcgagctcgtgtgcttacgagagaagatgatggcgaccaccatccccatgacctcgggctcggtcgtgccgcgctcgtccctgtacctggcctccatcaggctctgcagcacgtcgtcgtccccggctcggatggaggagcgcctgcgcgaccggacgtcctcggcgaagatactctctttgatggcactgacgtcaccaagctgcctaccacctgttcgacttcggggctcacagccgaactcgccatggcgcactacggctcgcatctacccagtgataagggaggttctatcgcgtcgtggcagccggcgccgtcgctggcgctcgcgtgccagcaggcgtcctccgcgcgcggcacgccgaccatggccagcatggggaagatgagcgttggggacctcacggagtctgacctcaaggggaagcgcgtcttcgtgtgcgtcgagatccacgagccacccgacgagaaccagaacagcaccaacgacatcctctccaccttgtgcgacactgccatgcatgtcgtgaagcgttgtcaacgcctgttttccgctcgtggactcgaccggcgcgttcgacgcggccgtggcggcgcgggtagcccagatggctgtgccgttgccagccaggaacgcaacgcccataggctcctcaccagagagcacgtcgtgctggttcccgtgtga

SEQ ID NO: 107931 - DNA, 510 bp, Zea Mays
tacatagagcctatacactccaccgggggtgaaatgggacaactcctaggttttttatccgacggtcactcgctccacacgaagttgcttcgccttgacgcacccttcgttatgataacacatgccaccactggttccctccggaaccactatcgccgagttttgtggcccaaactcatcgaaacccgccattcgtagagctaggtagttttgaggcccaaactaccaaacctatcgcgagtaccacaccacgtgtgcgtcctccacgaccagacgcgtgtcccaccagtccttgatcacgccgacaacacagtccactccaccacgtcctcacgcaagtgtgtgtcccaagtgtccgccaccacggttggtcactcgactactccggtccgttagtcaagacccaacacttgcccttcaccgctcccggcccatcagcatgagcccacatgaccttcacctcagtcgtcgatcaccatatatgtgttccatacttgcacaccacaagct

SEQ ID NO: 107932 - DNA, 127 bp, Zea Mays
aaaccctgcacacatagtggagttttgcttgtgcacttaaactgttttaagattgaaccctatttaaatttaattcgaaatttggaatttaaaacctgattaggattgaaatataaaattagaaaat

SEQ ID NO: 107933 - DNA, 1410 bp, Zea Mays
atgaagaccctgacacaggcgctggcgaaggcgtcggcggtgatagagaagacggtgtccacgaaggtgcaggaggtgacgggcccgcgcccgctgcaggactatgagctgctggatcaggccgggtccggcgggccggggctcgcgtggcggatctacacggcgcgaccgcgggatggcgccccctcggcgccctaccccgtcgtctccgtctgggtgctggacaagcgcgccctcgctgaggcgcgggcgcgggcggggatgtcgaaggtggccgaggacgcgttcctcgacctcgtccgcgccaaggagcagtggctggccaaggagcagtggctggccgccgttgctgatggccacgcccacgcctccgcgctcgtcaacgcccacctctcccgcaggaacatgccagcggcggatttgggggtgctcaaggatatgccggggatccgcgataaggctaactccaagtttgtgcttagagaggagcaatacagtggcatgcttctgtcggcctacaaggagatggtccgtcagctgtcctacttggttgaagcttcccattctatgcgctgtttttctaaagcagctccaaattgctccatcacacagtattctcatatttgaggatgccgatcaatatctgagacactgcacacattaatgtttacatgttttaatcggatttgttttactttcctgcattattctcttttggaaaagtttcctgacaatgtagatcatttatatctgtagaggctgctactcttggaatttctctcgattgctttaaaggaaggtgtagaactcgagacatcattaaattggggtggtgaactatatgatggtgaatcaaatgaacttcagagtattggccttcagtcaggagatgcctactcaccgcctgaaaattggtgtgcagaacgtttagggagtcagcgacctggcaatctccctctgcacaaagctgaaagagaggaagctgctaggaagcaggaagagttgcaagcacaactacaagctcaacaggccgcacttgaagaaaaccaaagtttgttgcgccaggcccaagaggaagtgaaggggatgcataccaagtttgaagagaccaatgcactgctacgagctgtcctgaaacttcagaaagattgaggtagggatgcataccaagtctgaggatgatgcctttgcttaaggtttttctatctatggttagaactttgtcagaactatgtgcactctgtttgaatgcttcaaacctttgtggtggaacctttgtatgtttgaacctctgttgtggaagaactagtgtgctggaattgtgtatgacttgtgatgagaatgttgtgtatgatggcttttctgtgtattatgattctgtgagctatcatgagagctcagtgtgtcgtc

SEQ ID NO: 107934 - DNA, 1038 bp, Zea Mays
aggaccaactgggttgccacacgtgtgttttcctcccgtcctgcaggtatgcagcggataaggtccccctgcgccaacgggcaatgcatggaacctatcaaaccaagccggcgattctccgatcccaaccagactcatggtggcgttcatggcgagcagcggggccatgaaggcgtcgagcaggccaaccttcgtcacccctcgtagcttctttaactggggcaaaagcgcgagagaaaccgagacgccgccgccgcagctgcagttctcctaccacgacgtcgagccaccgttccccatgtcgctcgtggcaaaaacacacctcagagaccgtgagctcaggtgctgctacaaggccaccgtggacggcttcagtgctacggacttccaccggcggtgcgacttcaagggcccctgcgtcgtcgttggctacaccgacggtggcttccgtttcggcgggttcagcccggaggggtaccgaagcacggacgactactacgacacgctggacgcgttcctcttctactgggcggaatctacggaggtctcggcgccgcccgtggtgctgcccaaggtgggcgggagcggcgcggcgctgttcgactactcccgcggcgggccacagttcggcgccgacggcctgctcatcggcccgccgctcaccgccgtgatgggcgtgttcactggacccgactccagcgccggcgtcggcgacctccgcagcgctcgctcgcggcttggcctgtcgtacgcgaggcggccggacgggaaggagagcctgttcggcgacgagggcagggcccagctcgtggaggtgctcgtcttctgcaatccgcagatcgcgagcctgtactgactgctcattgttactagcttgcagctagagtctgtataaactattcattatcgcttaatttggagtctaaaacataccaataataacaatgtaaaattgtgggtacggttaattagttgattattaagttattgaaagatcaaataagtaatgacgaaattacttttattctctaatgaaaa

SEQ ID NO: 107935 - DNA, 1111 bp, Zea Mays
aggaccaactgggttgccacacgtgtgttttcctcccgtcctgcaggtatgcagcggataaggtccccctgcgccaacgggcaatgcatggaacctatcaaaccaagccggcgattctccgatcccaaccaggcaagcagtgtacgcagaaaagggtggttcccccgctttgatctccgtacgtcctgtcatctcatcgatctgcttcgcatccacgcctgagcagactcatggtggcgttcatggcgagcagcggggccatgaaggcgtcgagcaggccaaccttcgtcacccctcgtagcttctttaactggggcaaaagcgcgagagaaaccgagacgccgccgccgcagctgcagttctcctaccacgacgtcgagccaccgttccccatgtcgctcgtggcaaaaacacacctcagagaccgtgagctcaggtgctgctacaaggccaccgtggacggcttcagtgctacggacttccaccggcggtgcgacttcaagggcccctgcgtcgtcgttggctacaccgacggtggcttccgtttcggcgggttcagcccggaggggtaccgaagcacggacgactactacgacacgctggacgcgttcctcttctactgggcggaatctacggaggtctcggcgccgcccgtggtgctgcccaaggtgggcgggagcggcgcggcgctgttcgactactcccgcggcgggccacagttcggcgccgacggcctgctcatcggcccgccgctcaccgccgtgatgggcgtgttcactggacccgactccagcgccggcgtcggcgacctccgcagcgctcgctcgcggcttggcctgtcgtacgcgaggcggccggacgggaaggagagcctgttcggcgacgagggcagggcccagctcgtggaggtgctcgtcttctgcaatccgcagatcgcgagcctgtactgactgctcattgttactagcttgcagctagagtctgtataaactattcattatcgcttaatttggagtctaaaacataccaataataacaatgtaaaattgtgggtacggttaattagttgattattaagttattgaaagatcaaataagtaatgacgaaatt

SEQ ID NO: 107936 - DNA, 943 bp, Zea Mays
aggaccaactgggttgccacacgtgtgttttcctcccgtcctgcaggtatgcagcggataaggtccccctgcgccaacgggcaatgcatggaacctatcaaaccaagccggcgattctccgatcccaaccaggcaagcagtactcatggtggcgttcatggcgagcagcggggccatgaaggcgtcgagcaggccaaccttcgtcacccctcgtagcttctttaactggggcaaaagcgcgagagaaaccgagacgccgccgccgcagctgcagttctcctaccacgacgtcgagccaccgttccccatgtcgctcgtggcaaaaacacacctcagagaccgtgagctcaggtgctgctacaaggccaccgtggacggcttcagtgctacggacttccaccggcggtgcgacttcaagggcccctgcgtcgtcgttggctacaccgacggtggcttccgtttcggcgggttcagcccggaggggtaccgaagcacggacgactactacgacacgctggacgcgttcctcttctactgggcggaatctacggaggtctcggcgccgcccgtggtgctgcccaaggtgggcgggagcggcgcggcgctgttcgactactcccgcggcgggccacagttcggcgccgacggcctgctcatcggcccgccgctcaccgccgtgatgggcgtgttcactggacccgactccagcgccggcgtcggcgacctccgcagcgctcgctcgcggcttggcctgtcgtacgcgaggcggccggacgggaaggagagcctgttcggcgacgagggcagggcccagctcgtggaggtgctcgtcttctgcaatccgcagatcgcgagcctgtactgactgctcattgttactagcttgcagctagagtctgtataaactattcattatcgcttaatttggagtctaaaacatacc

SEQ ID NO: 107937 - DNA, 1087 bp, Zea Mays
gaccaaggtccacaaaatgaggagacaatatcgagtcctctaaactacccttctctctatatatatatcaaaattaccctgtgttggccttctctctcgcatattctctcatctctatccctctctctaaagacgtccccaacttttatttgactagtctgtagatatataatagccacatagccagccaaatcataagcagctgctcatctcgttcgtcgatgttcgtcagccaggcatcgcctttgttgtttcgggtagagagatgacatcctcgtcgtcgacgaatacatcagacggcgccaagccgtcatcttgccggagaggccactggcggcctggggaggacgagaagttgaagcagctcgtgaacaagtatggggcccagaagtggaaatccattgccgaaaaactggagggaagatcaggtcgatcagatcggcaagagctgccggctcaggtggttcaaccagctggaccctcggatcaacaaacggcccttcacagaacaggaggaagagcggctgctcaacgcccaccacgcccacggcaacaagtgggcgctcatcgcccgccacttacccggccgcacggacaacgccgtcaagaaccactggcatgtcgtcatggcgcgtcgctgccgcgagcgctccaggcaccatgccagggccgcgagctccagctcccctctctccatcaacttgtctccaagagaaacgctagacgtggatatcggcgaccgtgtccgtcataaacatcgccgaaagggattatcacgccggtgacagcgccgacaagccattgaagaaggacgtgcccttcattgatttcctcggcgtcggcatgtcctcgtaattattcatagtattgcattaattcttgaaataccaatcgatgtagatcaacaagtgtatcgatcggcgtttgttggttattagggcattagtagactgcatgcaggagtagtcgtctagaggtatcagatatgcatgcagggttagagagttcatcttcgttgatggttagggcgttctgatgtgctgattcatcaatcaatcaaataaggctccagacactttattttctt

SEQ ID NO: 107938 - DNA, 111 bp, Zea Mays
aaagttcaaagagtttttggatctaaagcaaggtgaagaagcgagtgtaatggactatttaagaggtttactcgcctatcctagtatgttttggattatgtggatgccagt

SEQ ID NO: 107939 - DNA, 2267 bp, Zea Mays
atgcaggaagggtgtaaagcctatctcttggatgattcagctgcttcactgttgatgaggtgtcatacatgcagtaaaggtgtgctggactttttccctgagcttccaccttgcgtggtaaacatgcaggcgctcgtcacctccaccgaccccgacgcgccgcttggctcgggcgccgacagcatccccacccatgtcggcgaaggggccctcgagccaggccatggcgatgtggccgtaggcggtctcgttgagttgggcgcagtcccagttccggtggaggccacaacccgacgccgaaccccgacgctcagcttcgctgggaactactcgcaacacgccctcaccatctggaggccctccttcatgcagcagatccgcttcgacgcccacaccccgctccgggaggcctgggagatcgacgcgcacatgcagtccgcggtcaggggcccgggcgccttcaatgtctacggccgagcaggcgagcaccctgctccctggacggatccaccaggacctctcgatcgagctccagcagtaggcaccttccagatcgagctccagcagcaggcgcaggtgcgcagcgatcaatcagcgagcaggacgagcggcaggggagaagcactcgagtcgagagcagatcaggatgtttgtgaagatcgaccgcacgacgcccagacttccgctgtcgaggaggccatggccgcgggcgcgggagaccccgggcagctcgaccaactcttgctgctcgacccctacgccgaggacgacatcaccaactactgcgtcgagttccataatgctgtcgtcactaccatctactcctccatcatcatcaagccggagacgggcagcagtagcagctcttccttcgcgtgttcgaccaattgtcccagccaggcactgcacaacattgcactgaacgtcagggttcagcagctgcttgtttctgttggctcccctagcaatgctcttgtgctcaagattccaattcagggtgttgtggatgcacttcataggaaaacactccagggcacaggtctgaatgaagagcaaatgagacaggctagcgtcgcagacaatggtcatcgtcagctaaacaagatacttgttgacttggatcaagataacattactgctaagaattatgcaattgcattttacacagagaagcacattcagattccatgcttgggcggtgaacacgaagttactttcttccatgagtatagagattcagttgaacgggtgtttgttgatcatccctcgtatcacagacctggaaatttatatggagctaaagttgttcttcttgggttccaacattatgcggtcatgcttggtacaactgtgatcataccaactgcacttgttccacaaatgggaggaaaatatgaggacaaagttgtggttatccagacattgatgttcgttgtaggtatgaacaccctacgtcagagtttcttgggtaccaggttgcctgcagtgactggcgggtcatacacttttgttctgtataccatttctatcatccttggtggacgttctgctaatgaacctagttcacacattaaatttctgggcatcatgcgtgggacacatggtgcgttgattgtggcttcagctttacagattatagttgccttcagtggcctttggtgtaatgttgccaggtatctgagttcactttcagctactcctttggtggcactagttgtatttggactgtatgagttagaaattccaagagcagggaaaataaaggctttgtccgttgatgcagtaatagtgtttggatcacaaaggattcctcaggtcattcattcagttatgtggatcatgttcatcctttttagagtcatctggtgcttgcaattttcctgggatcctggtggaagtaattggtggaagtaatgttacacatcggcttgagggcaagccgcattttaagaaagggggaatgttagggactgccggcccaatagcccatggtgcagcccaactatctgatgtcttgtgctacaaaggagcaaggaaacatagcagcagggaattattcagagaacagactcttggttattatgcttcttcttccttagcgtcttcctcttgtacccagatccacatttcctgtgcttctagattcttctagtgtctttctctagtatctgatcacctgcttgctgtctatcctatattctgtctcaaatcatagtttgtgttggagtgaattgagtgtgagttcgtcctcgagattgagtgctgtt

SEQ ID NO: 107940 - DNA, 2427 bp, Zea Mays
gttagggactgccggcccaatagcccatggtgcagcccaactatctgatgtcttgtgctacaaaggagcaaggaaacatagcagcagggaattattcagagaacagactcttggttattatgcttcttcttccttagcgtcttcctcttgtacccagatccacatttcctgtgcttctagattcttctagtgtctttctctagtatctgatcacctgcttgctgtctatcctatattctgtctcaaatcatagtttgtgttggagtgaattgagtgtgagttcgtcctcgagattgagtgctgttaacaattggtatcagaggagtcgattctcggttagctccaatggatcccgctgccctcaagttcctcctcgacgagatcaacagaaggttcgacgaggcagatgcccgtgtcaaccggctcttcgacaagctgcagcagcccgcccaccttctggggtcattgccctccgcgtcattcgatctcccagccaccccgctcagcgtcgaccacttctccgacgcatccgccagcgtgccggccacccccgctgcggctgttgaggccgtcgtcattgtcgacaactggggcgggtgcttcgatgacagagagcagtactgtacggcgccatccgtcgtcgccgacaactggggagggttcttcggtggcgaggatctcgatctgccaggaagcacttccttcccctgcaacagcgaatcgggcgccgtccctaccaaggcgctcgtcacctccaccgaccccgacgcgccgcttggctcgggcgccgacagcatccccacccatgtcggcgaaggggccctcgagccaggccatggcgatgtggccgtaggcggtctcgttgagttgggcgcagtcccagttccggtggaggccacaacccgacgccgaaccccgacgctcagcttcgctgggaactactcgcaacacgccctcaccatctggaggccctccttcatgcagcagatccgcttcgacgcccacaccccgctccgggaggcctgggagatcgacgcgcacatgcagtccgcggtcaggggcccgggcgccttcaatgtctacggccgagcaggcgagcaccctgctccctggacggatccaccaggacctctcgatcgagctccagcagtaggcaccttccagatcgagctccagcagcaggcgcaggtgcgcagcgatcaatcagcgagcaggacgagcggcaggggagaagcactcgagtcgagagcagatcaggatgtttgtgaagatcgaccgcacgacgcccagacttccgctgtcgaggaggccatggccgcgggcgcgggagaccccgggcagctcgaccaactcttgctgctcgacccctacgccgaggacgacatcaccaactactgcgtcgagttccataatgctgtcgtcactaccatctactcctccatcatcatcaagccggagacgggcagcagtagcagctcttccttcgcgtgttcgaccaattgtcccagccaggcactgcacaacattgcactgaacgtcagggttcagcagctgcttgtttctgttggctcccctagcaatgctcttgtgctcaagattccaattcagggtgttgtggatgcacttcataggaaaacactccagggcacaggtctgaatgaagagcaaatgagacaggctagcgtcgcagacaatggtcatcgtcagctaaacaagatacttgttgacttggatcaagataacattactgctaagaattatgcaattgcattttacacagagaagcacattcagattccatgcttgggcggtgaacacgaagttactttcttccatgagtatagagattcagttgaacgggtgtttgttgatcatccctcgtatcacagacctggaaatttatatggagctaaagttgttcttcttgggttccaacattatgcggtcatgcttggtacaactgtgatcataccaactgcacttgttccacaaatgggaggaaaatatgaggacaaagttgtggttatccagacattgatgttcgttgtaggtatgaacaccctacgtcagagtttcttgggtaccaggttgcctgcagtgactggcgggtcatacacttttgttctgtataccatttctatcatccttggtggacgttctgctaatgaacctagttcacacattaaatttctgggcatcatgcgtgggacacatggtgcgttgattgtggcttcagctttacagattatagttgccttcagtggcctttggtgtaatgttgccaggtatctgagttcactttcagctactcctttggtggcactagttgtatttggactgtatgagttagaaattccaagagcagggaaaataaaggctttgtccgttgatgcagtaatagtgtttggatcacaaaggattcctcag

SEQ ID NO: 107941 - DNA, 120 bp, Zea Mays
tactggatatctcacttaaaacaacaaagcaggtacaaagtacatacaacctaacgccaacactatatggcgataatattaagaaagcatccaattacattatgcatgtgctcagatcca

SEQ ID NO: 107942 - DNA, 300 bp, Zea Mays
atgaccaggaaaaagaccacgacttcctctgatggcggcactccaaagaaagcaaaggtggtggcggaggatgaggaagaggcggggttggaggatgaggaatctggtcctgatgtggctagcttcattgtatcctctttttcatgcgcggaagtggagtaccctttcttctctttaacagcaggtgtgattggtgcagtctccttctcactactggtgataaaccatgactgggaaaaagaccacggcttcctctgccggccgcactctaaagaaggccaaggtagtgttggaggatga

SEQ ID NO: 107943 - DNA, 1509 bp, Zea Mays
tggagtatatataaatcacctattgcccaacgtagctccgcagcgcacacacatacacaagcacaagcgcactctagcaatggcttctgaggttgtccgccctagcgacgccgagctactaaaggcacaagccgacatatggcggctcagcctctcctacctcacgcccctgtcactgaggtgcgccgtggagcttggcatccctacggcgatctaccgccatggcggggctgcctcagccgctgagctggtcacggcgctgtctctcccctccactaagctgccgttcctccgccgcctgctgcggctcctcgccgcgtcgggcgtgttcaccgtcgacaagcagagctcggaggaggagcggtaccgcatcagccccgtgtcctacctcctggtggacggcatccctcacgaggaccacatgaaccacaccgctctggtgctcacctgcacctcgacgcgctacatcgaggcggggatagggctggcggagtggttcaagagggacgtggtcacgtcaccgttcgaggagctgcacggggcgactctgttccacgagagcatggggagcctcgacgcagatttccacgacatggcgagcgaggccttggacgcccacgacaacttcggcatcgagatagctatgcgggagttcagggacttgttcgaggggatccagtccatgacctactgctgcggtaacttcggtgatgacaagggtgccagggccattgtcaaagccttcccacacataaaatgcactgtgctggcccctcccaagatcattgccaccaaaccggccgatggagcgatgataaactatgtcgaaggtgacatgttcagtttcattccacctgctcaaactgtcgtgctaaagcttgtgctgcaccacctgaccgatgaggagtgcgtcaagctcctggctcaatgccggaaggcgattccttcacggaaggatggcgggaaagttataatcggtgatattatgattgaccactctgggcctatgctggaaactcacctcctgatggacatcggcatgatgaccatgacaaaaggacggcagagagatgaaaaagaatggagcgagctcttcaccaaagcagggttcagcgaatacaagatcctgaaggaatttggagctcgtgttgccttcgaagtctatccgtgagattgcacctggactatacatatatatttacatacatatatgtatgtgtgtgggtgccttgcgtggcttggcgtgatgatgtcataaataaagagggtgggtgtgcttgcggtattcatggatggccatggatctgagcacatgacgttggatgctttcttaaggctctcgtggatcttctatatttggaagaagctgtaaaataatatatcgccatctagtgttggcgttggcttgtatgtactttgtacctgctttgttattttgtgtaatatcgagtaacctaatgtatacttgcttactactatcactaccgaaatctatctctttgccgagta

SEQ ID NO: 107944 - DNA, 213 bp, Zea Mays
atgggcaaggtggaggacgagctcgacaccagggagatggggcgagctgtaggtggaggagcagaggaggcgccgagtcgcagagatgagggagagaagagcagggtcagtgccggtggaacccagggtgagctcgccgatgtccatggctggacgcgagcaccaaccaaaagaacaggggcgcggctagacgactcccagggagcggcatga

SEQ ID NO: 107945 - DNA, 452 bp, Zea Mays
aatctatgtacctctatgattgtttatcattccaacttgttccgttgctattcctagatccttgtcacctcctttgtgtcttcctccaactgtgttaatacattctctaggccagaaattaggatgagtacttggaatacttattcagcattgctatctattactgacttgtgtactacaaatatatatttagtgagccttcccaaagctccacctttttctcgagcagaacatgtactcctttgcaatcacaaccacgctctttgggcagtcacaccgggcaccgtttgccatctttatgaggaggagagtcaggctcttcttctactagaatattgcagttggcagcaaaacctataggagcaccttcaggaggaccctcaggaacaccttcagttggagaagctttagattgaggaactggttcctctcccccttccacttcaacctct

SEQ ID NO: 107946 - DNA, 1793 bp, Zea Mays
aacaaccgacgagcgaatcgcgcagtcttttcgcgtgggaaaaagctagtcggcccggatataaaggcatttcttcctcgcaaatcgcaagcttcgtcttcgtcctccactgggcaacgaacgcctcctccctccctggttccgttggctcttgcaccaccagcaatggcggcttcttggagagccgtggcgctgtcggtcgtcacgctggcctggctccttggcggtggcgcgtgggcgttcccggcggaggatttggtcacgcggctgccggggcagccgccggtgacgttcaggcagttcgcggggtacgtggacgtggacgtcaaggccgggaggagcctcttctactacttcgccgaggcgcaggagaacgccgccgccaagccgctcacgctgtggctcaatggaggtccaggctgttcttctattggaggcggtgctttcacagagctagggccattttaccccagaggtgatggtcgaggcctcaggttgaacaagaagtcatggaacaaagcgtccaatcttctgttcgtggaatcgccggctggggttgggtggtcttattccaacacttcgtcggactacatcaccggagatgcgcggacagctaatgacatgctccggtttttgttgggatggtacgccaagtttcctgagtacagatccagagctctattcctcactggagagagctacgcagggcactatataccacagatcgctgatgtacttgtcacccataacgagaggtccaagggtttgaagttcaatattaagggagtcgctatcgggaatccgcttctgaagcttgacagggacgtcccggcaacctacgagtatttctggtcccacggcatgatctccgacgagacattcctagcgatcagccacagctgcgatttcgaggattacaccttcaacaacgacagcccccacaacgagagcaagccgtgcaacgatgccatcgcagaagccaacgccgtagttggagactacgtcaacaactacgatgtcattcttgacgtctgctacccatcgattgtgatgcaggagctacggttgcgacagtttgcgacaaagatcagtgtgggagtggatgtctgcatgtcctacgaaaggttcttctatttcaacctaccagaggtgcagcaggccctgcacgctaacaggacgcacttgaagtaccaatggagcatgtgcagcgatttcctcaactacagcaacaccgacggcaacatcgacatgctgcctacgctccaaagaatcgttgagcgcaagataccactctgggtcttcagtggcgatcaagactcggtggtgccattgttgggcagccggtcccttgtgcgagagctagcgcacaccatggggctgcatgtcaccgtcccctacagcacctggttccgcaaaggccaggttggaggctgggtgacggagtatggcaacttcctaaccttcgccacagtgcgaggtgcatctcacatggtgccgttcgcacagccggaccgggccctcgggctgtttcgatcgattgtactcgggcggagactaccaaacgcaaccagtccaccaattggctgaagtgtatctatctacaaatgaaggtggagatagaaaaaaggttgcttagggtttttcttttttcctttcagttatgttatagtagattagttcataaacatgtattggatgttgaataagttctttattgtttataaagagcagaaaataatactattattaatattatgactcttgtcattacactagcatcaaaacatgcattt

SEQ ID NO: 107947 - DNA, 1205 bp, Zea Mays
gtatttgctccagtagccaggcttgattctgtgaggttgcttattgcacttgcagcacatgagagttgggaagtacatcatatggatgtgaaatcagcattcttaaatggtgaattgggtgaagaggtgacaatgaaatctcttggtttcagaaagagcatttcagaacctgctatttatcttagaagaaacatcaagtcacagttggtggttggcgtgtatgtggatgatttgataatcactggaacaaattgtgaggacatcaagctgttcaaggaagagatggcagctgttttcaagatgacagatctggggttactgaaatattatctgggaattgaagtaaggcaaaataaggagggaatatctctcagccaaggagcatatgcagaaaaaattctggagaagaatggaatgagagaatgcaacccgtgtcagactcccatggagacacggttgaagctgagcaaactgagcactgaacccctagtggatgtcacggtataccgaagcatagtaggaagcttgaggtatttggtcaacactcgacctgaccttgtgtttgctgtgggatatgtcagccggtttctggaagaaccccacaaagatcacatgatggctgtgaaacacattctgaggtatgtgaagggaaccaagaattggggtttgtggtttggaagaaaaggaaggaaggaggctgggctgattgggtatagtgatagtgattatgctggggatgttgacagcaggaagagcactactggagtggttttcttcctgaacaatagtccagttacttggacttcgatgaaacaaaaggtggtggctcaatcaacctgtgaagcagaatatatagctgctgccaatgcggcttgtcaggcattatggctgagtagggtactggccgaagtacaaggagtatcactgaaagctccaatgctaaaagtggacaacaaatcagctattgccctcattaagaacccagtgctacatggtcagagcaagcacatagaagtgaagtatcattttgttcgggagtgtgctgagaatgggcagatcaaagtggacttcatcaggagcgaagaacagctgggggacttcctgacgaaaccgcttgggaagaccaaatttcaagagttgcgctctaaggtcggactggtggatgtagacagattgcaccacaaggcttaggaggagattgttag

SEQ ID NO: 107948 - DNA, 798 bp, Zea Mays
gtagtggtccagcgagtaattcgtgaggtgagtgcagggagtggatatcccacactcaccaagaccaattactcggactgggcgctcctgatgaaggtgaagctgagggcgaggatgttgtgggacgtcatcgagcacggaggagcagacatccatgaagaaatgatggcactcgacgctctctgcagcgcagtgccaccagagatggtgtcttcgatcgcagacaagtccacggcaaaggaggcgtggaagaccattgcagacctacgggttggcgatgatcgcatgaagaaaactgctgctgtgctgcttcggaggaagttcgacttggcaacgtttaatgacggtgagtccgttgaagatttcgcgctgcgcctaaatggcatggcagcggaactctccactcttggagctggcgtggaagaagagaagatcgtggagaaaattgctcgcagcgttccaccacgcttcaagcaaatcgtcctctccatcacgactctcctcgacctgtcaaccctcactgtgtctgacatggtggggaggttgagggcagcggaggacgcctttgaggaggccccaggatcactgcagcacagtggtcgactctacctcacggaagaagagtggaatgcccggcgcagagggcgctcatcaggtggaccaccggctggaaaggtcactggtgatgagtgcagaaggtgtggcaagatgggacattgggcgcgagagtgtccgtcaaggcacaagaaggagcaagcacatgctgtccaagaagaagaggaggctacacttcttgtg

SEQ ID NO: 107949 - DNA, 510 bp, Zea Mays
atggcggtgaaggacgacaaatccgagacggtggcagtggtggagggcaccgtcgcctcacgtctcgctcacgactgcttcggggaaggacgacgatggagcagcggcagagcggatggcagcaatgtggacgacgatggagtggcggcggagcggatggtggtggcgacggagggcgcggacgcgcggtcgcttcgctcggatccgctcgtgtcccttccaacctggggaaggttgcccgacctcgggtggtcgggagcgcttccacgggtatccctccgtgtcgggggagaactggaccagggtgtttgtcttccaaatgggccaaaaagtatgcccgagatagatctccacgtgagctttggacccgggaaaacccatcgtgcttatgccagcttgatagaggtcgagccaccttctccgtgtcatcatcactgtggtgctcgtgaaggctggtggagtcgtgccaccgcctacggtgtgcccgcccacttgaggtcgtgctcctag

SEQ ID NO: 107950 - DNA, 2147 bp, Zea Mays
agagttgtgactgcggagagtgttagactgtgcgtgtctctgctgtaacgggctttggtccagaccatgtacctcctctatatatatactaatgcctaccttaattagggctagggtttccaacatttagatcttttcagtttagttagtattggaacaaactatacctcctttctaatggaatgctactgtttaggttcaagtatggcaatatttattgggagccctttgcacctttcaaaaatattgttggtaatatttggtcaaataatctcctccagatctacagactacaagaatactactatttaggccttgtttggatactcttgtattcacctcaatccatgtgtattgatgtggattgaggtatacacatggattgaggtgaatacgagattatccaaataaggccttagcgggaatgcaagcggtgccgaccaacacctctttgcccgccccgcaagaaagtcctattcggcaatgcagccagccatcatagctattgcggtttggagcaggctgacctgcaaagcccagtgggtgatcagtggtgtcatgaaacaccagtcatacctgcaactgcaaggcccacttcaagtctgcgctagatcgctatgctgatagaggacaagcgatgcgacctggcacctgctggctggtcgtatttggtatggacgtcgtccttcacggtgaactcgtcgagccataacttgatggaggctgactagatgagccatacaatggtgacggtgagcgaccgcgtgtgtagaggcagtgtcgcccatgttttgtaacgtcggcggcggtgtgtcctgtggggatgccatagaggagcaagacgaggaagcaaacatgattgaggaggtaagtgcgtagcagaagaatgggggcttcgctgcggcagcccaagaacacatgggtggcctccctgtgtggctgcggggcagagcagctcgtgcaggtagcgcgttctcttgctcagggttggtggcagggagcattgcagcagcatgaggtacttgtctacaacaataatcgagtcttgccgaggcagtggcgccgggtgcctgtgtccatgtcagaggggtctgccacgtgtagcggcttgcagatggacgtagcgggctccaatagtgcctgctaagtaaattccagccaggcctactggattgacgcgatcatctgtgtaaattccagccgtggctgcaaaacctgcaaaccgacgaagcagacagctgtggtgtgcgggttgactgcccgtcccactggcagccctactattttagattcaagaatggattatgggtagcccttccagaaatattatcagctagcctgaatcaaaccttaagccttaatatgtagctgaattagataacaaaattgaaaatttccaagtttctcgacatgtgggtaacgtatgggtgtctaaatgttttgaaccttttggttaaacatttgttccttgaaccaacatgaactggctattgttatactaatatattggttaacatttgatccagagccacttgttgattgagtcatcatgtcattgatcgttacctcgttgggcattttgtacgagttcatgtcattttgttctaagcaatcttttttctgatctctataaccagcacaaactaagttcatgttgctataggtgcattgtgaacatgttatttgactatagagaaatagttgcattgttgcaaaaaaatacatggtgaattacatattttctccatgtaggccttttcattacgtatcttgcgctgttcttgatggacgggcatggtcaacctgcgttgttgtaccttgtgccatgtacattgggggttattgttattcttggttggttaagaggtgagctttatgaattatggaacttcggaaaaagtccaggagaaaattttgtcaatgaaccatgacaacaaaatccagggaagatgtattcttcagcgtagtagatagcttgaggatgtttattaggaggcaccgtgtattgcaagatgttatgtttagcattatttcaaagaaggatgctattgtgtttgaaaaaaatgatatacatgtaagatgcaagcatgtactcccacagtcgtaaaataatccaatataagtgccgctatatagttccaaaataa

SEQ ID NO: 107951 - DNA, 1889 bp, Zea Mays
acgacgatgatatttcgcatcacacttccgtctggccaccgcaaagcaccccctctccccccgtcgccatggcgagcgataaccgcgcgtcggtcttccccttcgccgccgccgtccttgtggtgctcctcgctggcggcgccgcggcggacgacgcctccagcgacgacgacgctgggacttcacggacacccggctgctccaacaagttccagctggtcaaggtgaagaattgggtgaatgggactgaaggtacaacttttgttggcctaagtgcaaaatttggagctcccttgccaagagatattcatgaagcaaaaaagtcatttgctgtcctctcaaatccaattgactgttgctccaacttgacatcaaagttaacaagttcagttgctatagcaacacgtggggaatgtgctttcacggaaaaagcaaatattgctcaggccagtggttcgaccggtttactagttatcaatgataatgaagagctttacaagatggtttgcggtgagaatgacacctccattaatgtgacaatacctgttgtcatgataccacagtcagcaggaaagaagctgaagaacttattgcatcatggagcaagtgtggaagtgcagctatattcaccaaatcgaccaactgtggacctttcagcatgcttcttatggataatggctgtaggcaccatagtctgtgcttcactctggactgaatttgttacatgtgaacaggttgatgagcgttataatcagctgaccagaaaggatggacctgacacgggaacaaaatacagagaagataaagaggtcttcgagatcagcgcgaagggtgcttttatttttattatagtagcttcagttttcctcctcctcctgttctacttcatgtcatcttggttcgtttgggtgctaattgtactattctgcattggtggtattgagggtatgcatgcttgcttggtcacgcttctagctaggatttttaaggactgtggacaaaagactgtacaactccctgttttgggggaggtcttgatcttatctgttggaattgtaccattttgtgcggtgtttgcaattctctgggctgtgtatcgccatgcttcatttgcttggataggccaagacgttctgggtatctgtttgatgataactgtgcttcagatggcacgtttaccaaatatcaaggttgcatcggcacttcttagtgctgcatttgtgtatgacatcttttgggtgttcatttcacctcttatattccatgaaagcgtcatgattgcagttgctcgtggtgataacactggggaatcaattcctatgctcctaaggataccccgcttctttgatccatggggtggttatgatatgataggctttggtgacattatcttccctggattgcttgttggattcagctatagatttgacagagcaaacagaaagggtgtcttgagtggatattttctctggctaattgtgggatatgcagttggccttttcattacgtatcttgcgctgttcttgatggacgggcatggtcaacctgcgttgttgtaccttgtgccatgtacattgggggttattgttattcttggttggttaagaggtgagctttatgaattatggaacttcggaaaaagtccaggagaaaattttgtcaatgaaccatgacaacaaaatccagggaagatgtattcttcagcgtagtagatagcttgaggatgtttattaggaggcaccgtgtattgcaagatgttatgtttagcattatttcaaagaaggatgctattgtgtttgaaaaaaatgatatacatgtaagatgcaagcatgtactcccacagtcgtaaaataatccaatataagtgccgctatatagttccaaaataa

SEQ ID NO: 107952 - DNA, 1938 bp, Zea Mays
acaaacaaccactcccaccaccaccatttttcccaccaactaacatcagccatcacactatataattatagtatatatatacattctcatcgcagcaagctaaagtccagtaccatccctctccctgctagctatctgaccatactggttggaacttggaaccagcttctagaggatccagccggaaagaaagagtcgccgtgtgcgcgatggctgcgaaggcaacaggccacgtgggcacggaggcgatggaggtatccgtggaggtggcgaacggcgacgacgacgcggcacggctagacgacgatgggcggccgcggcggaggggcaccatgtggacggcgagcgcgcacataatcactgcggtcatcggcgccggcgtcctgtcgctggcgtgggcaatggcgcagcttggctgggcggcggggaccgccatgatgctgctcttcgccggcatcagctactacacctccacgctgctcgccgagtgctaccgctgcggcgagccgggcaccgggaagcgcaactacacgtacacggaggccgtgcgcgccatcctcggcggtgccaagttcaagctctgcggcgtcatccagtacgccaacctcgtcggcatcgccgtcggatacaccatcgccgcctcaatcagcatgctggcgatcaagagggcggattgcttccacgacagagggcacaggaacccgtgccgcagctccagcaacccctacatgatcctattcggcgccgtcgagatcgtcttctcacagataccggactttgaccagatatggtggctctccatcgtcgccgccgccatgtccttcacctacgccaccatcggcctcgcactcggcatcgcgcagaccgtcgccaacggcgggttcaagggcagcctcaccggcgtcaatgtcggcgacgggatcacgccgatgcagaaggacacgatcaaggcgccgccgccatcggaggtgacggtgatgaagaaggccacgatggtgagcgtggcgacgacgacggtgttctacatgctgtgcggctgcatgggctacgcggcgttcggcgacgacgccccggacaacctcctgactgggttcggcttctacgagcccttctggctcctggacgtcgccaacgccgccatcgtcgtgcacctcgttggcgcgtaccaggtcttctgccagccgctcttcgccttcgtggagaagcgggcggcagccaggtggcccgacagccggttcatgacccgggagctgaggcttggacccttcgtgctcggcgtgttccgtctgacctggcggacggccttcgtctgcctcaccaccgtcgtcgccatgatgctccctttcttcggcgacgtcgtggggctgctcggcgccgtctccttctggccgctcagcgtctacttccccgtcgagatgtacaaagcgcagcgtcgcgtgcgcaggtggagcacgcgctggctctgcctccagacgctcagcgccgtgtgcctcctcgtctccatcgccggcgccgttggctccacggccggcgtcataaacgcagtcaatttgcaccgaccattcagtggctaagagcgtgtgctctactgctccgtgcatcctcgtcttctctcgctccgtcgcagtcactatctatagcggaccaaattaaccaagcactccgttagcgtggctgtttatcaagcctgctcctgttctgtttatgcaggcggagcctgcagcttgtttgcacgcccggggcataaagttggtatccatcttctaaatgtcacggttatattgtatttttttaagatgagcacgattgatcacaccctaagattcctgtaaggtacactccaatgggaggtagattgaagggagaagatcgaaatgtttgcgaattcattttttattccttcttaattatagatgattacagttatacctttgggat

SEQ ID NO: 107953 - DNA, 1706 bp, Zea Mays
acaaacaaccactcccaccaccaccatttttcccaccaactaacatcagccatcacactatataattatagtatatatatacattctcatcgcagcaagctaaagtccagtaccatccctctccctgctagctatctgaccatactggttggaacttggaaccagcttctagaggatccagccggaaagaaagagtcgccgtgtgcgcgatggctgcgaaggcaacaggccacgtgggcacggaggcgatggaggtatccgtggaggtggcgaacggcgacgacgacgcggcacggctagacgacgatgggcggccgcggcggaggggcaccatgtggacggcgagcgcgcacataatcactgcggtcatcggcgccggcgtcctgtcgctggcgtgggcaatggcgcagcttggctgggcggcggggaccgccatgatgctgctcttcgccggcatcagctactacacctccacgctgctcgccgagtgctaccgctgcggcgagccgggcaccgggaagcgcaactacacgtacacggaggccgtgcgcgccatcctcggcggtgccaagttcaagctctgcggcgtcatccagtacgccaacctcgtcggcatcgccgtcggatacaccatcgccgcctcaatcagcatgctggcgatcaagagggcggattgcttccacgacagagggcacaggaacccgtgccgcagctccagcaacccctacatgatcctattcggcgccgtcgagatcgtcttctcacagataccggactttgaccagatatggtggctctccatcgtcgccgccgccatgtccttcacctacgccaccatcggcctcgcactcggcatcgcgcagaccgtcgccaacggcgggttcaagggcagcctcaccggcgtcaatgtcggcgacgggatcacgccgatgcagaaggtctggcgcagcctgcaggccttcggcaacatctccttcgcctactcctacgcctacatcctcatcgagatacaggacacgatcaaggcgccgccgccatcggaggtgacggtgatgaagaaggccacgatggtgagcgtggcgacgacgacggtgttctacatgctgtgcggctgcatgggctacgcggcgttcggcgacgacgccccggacaacctcctgactgggttcggcttctacgagcccttctggctcctggacgtcgccaacgccgccatcgtcgtgcacctcgttggcgcgtaccaggtcttctgccagccgctcttcgccttcgtggagaagcgggcggcagccaggtggcccgacagccggttcatgacccgggagctgaggcttggacccttcgtgctcggcgtgttccgtctgacctggcggacggccttcgtctgcctcaccaccgtcgtcgccatgatgctccctttcttcggcgacgtcgtggggctgctcggcgccgtctccttctggccgctcagcgtctacttccccgtcgagatgtacaaagcgcagcgtcgcgtgcgcaggtggagcacgcgctggctctgcctccagacgctcagcgccgtgtgcctcctcgtctccatcgccggcgccgttggctccacggccggcgtcataaacgcagtcaatttgcaccgaccattcagtggctaagagcgtgtgctctactgctccgtgcatcctcgtcttctctcgctccgtcgcagtcac

SEQ ID NO: 107954 - DNA, 1182 bp, Zea Mays
acaaacaaccactcccaccaccaccatttttcccaccaactaacatcagccatcacactatataattatagtatatatatacattctcatcgcagcaagctaaagtccagtaccatccctctccctgctagctatctgaccatactggttggaacttggaaccagcttctagaggatccagccggaaagaaagagtcgccgtgtgcgcgatggctgcgaaggcaacaggccacgtgggcacggaggcgatggaggtatccgtggaggtggcgaacggcgacgacgacgcggcacggctagacgacgatgggcggccgcggcggaggggcaccatgtggacggcgagcgcgcacataatcactgcggtcatcggcgccggcgtcctgtcgctggcgtgggcaatggcgcagcttggctgggcggcggggaccgccatgatgctgctcttcgccggcatcagctactacacctccacgctgctcgccgagtgctaccgctgcggcgagccgggcaccgggaagcgcaactacacgtacacggaggccgtgcgcgccatcctcggcggtgccaagttcaagctctgcggcgtcatccagtacgccaacctcgtcggcatcgccgtcggatacaccatcgccgcctcaatcagcatgctgtaagtaaagcatgcaaggtttacacacatgtaatcaccatatccgggtttctcgtaatcgtcagttgattttttattcgtgcagggcgatcaagagggcggattgcttccacgacagagggcacaggaacccgtgccgcagctccagcaacccctacatgatcctattcggcgccgtcgagatcgtcttctcacagataccggactttgaccagatatggtggctctccatcgtcgccgccgccatgtccttcacctacgccaccatcggcctcgcactcggcatcgcgcagaccgtcgccaacggcgggttcaagggcagcctcaccggcgtcaatgtcggcgacgggatcacgccgatgcagaaggtctggcgcagcctgcaggccttcggcaacatctccttcgcctactcctacgcctacatcctcatcgagatacaggcaaactatctatctattatatatgaagccttgctatttcttcacttctttagccactttaatggatgctctgtctcttgctaa

SEQ ID NO: 107955 - DNA, 2313 bp, Zea Mays
aggccgccaaattaaacttgaccatttcctctctctctttctctctaactccgggtccctctctcttactctctctattctctccatccttgcttctgggaagctcatcagccatggacgatgccgctgcagaggaagaagcttccatgttcgagaccagccatgtcctcggcgccctgctggcctcctcgccgttgctggcgcgcgcctgggaccgctgcacagccgcctccgctgcagcgccgtggttcgttcacggcgaagacggcggcaaggtgtacgtggggttctctggggtgcaggctgcgcttacggcggcaggcgcggcggtggccggcggcggcgccgacatcttcgcgccggtgagtctcggcggggacgcggcggggcggatgttcgcgccgctggtcgccgccgagcccgacccggccgctaccggggagccggttgccgtgcaggcgctggcgctgcagtgcttcctgaaactctgctgcagtcctgatttccagatgcttctgaatcagatcaggggcaaggcagtcgtgttcacgggccactcccttggtggcgccgttgcggccctcacggcgctacactacctctgcatctcatcgtcaagctcgccacctgctcctcctgtcctgtgcgtcacctttggaagcccattacttggcaacgaggcgctgtccagggccatcctgcgtgagcactggggtggtaacttctgccacgtagtctcacagcacgatgtcgtcccaaggctcctcttctgctccccggacgccgtacccgcgcacatcattgttggaatgcaactgcagcaatggccggcgtggactcggcacacaggagctgtgagcacggtcaccgcgcacatggcggacactgacaaagacgtgctccggcagctgatacagacgcacgttggcgctgtggccgtggaacagaagcttgccgcttctgagacgacaggtgggagcccgtaccggccgtttgggacgtacgtgctgtgctccccagaaggcgcggcgtgcgtggacaacccgaccgccgcggtacagatgctgtacgccaccttcgcctctcagagctcagccggtgcagagtccccggaggccgcgcactcctgctacggcgagctcgtgctgaaaatgccgcaccacttgcttctcaagagatggctgcgtgtggacgacgacatgccggcgacgcccaactacgacgacggcgtctccctcgcgttggaggcctctggcatcgacgtcatggccatggaggcgtcgacggcgcggcattggctgaaaacatcaaagcgggcagggcggcggccgagcctgaactgcgctcgcctggcgacgcagctgggccgggtcacgccgtgccgtgcacagatagaatggtacaaggcgctgttcgacgcagagatggggtactacgacgcgttcaagcagcggcggtcgcccaggaagtacaccaaggtgaacttaaaccgcatcaagctgggccagttctgggaccgagtgctgagcatgctcgacgccggccagctcccccacgatttccaccgccgcgccaagtgggtcaacgcctcccgcttctaccagctcctcgtcgagcctctcgacattgccgactaccatcgacacggccaccacctgacgagcgggagctacatgactcacggccgggagaggaggtacgagctgttcgacaggtggtggcatgagaagggatgcactggcgctggcggtggcatcacgtcctccatgtcggcagcgtcggcgagcagccggagacgcagcaaatacgccgggctaacgcaggacccgtgcttctgggcgagagtggaggaggcgagggagcagacggagagcgcacgccgcgagcgcgacgtggccgaactggcgatgaagctggaggagctgcaagagttcgagcgctactcccgtgagctggtggcgaccaaggaggtgtccgtcgacgtgctcgcgccgcagtcgagctacacgctgtgggtggaggattggaaccagctcaagctcagggctcagggatgatgtgaggacaatgttgcttcggttttgagctgggctgcaaacagatgatgaattcgtaggtagctggtgggcgttctacaaatagttcaggtgtaaatgaatcattggatcatggtgctagtatatgtgatggtaaatatatccaaacctatagaagcgctgcagtggattacagtattgttgtggttctcgtcgaaattctgaaaaaacgataatatgacaataccaattagttttaaaatcctccttttcttcg

SEQ ID NO: 107956 - DNA, 1614 bp, Zea Mays
aggccgccaaattaaacttgaccatttcctctctctctttctctctaactccgggtccctctctcttactctctctattctctccatccttgcttctgggaagctcatcagccatggacgatgccgctgcagaggaagaagcttccatgttcgagaccagccatgtcctcggcgccctgctggcctcctcgccgttgctggcgcgcgcctgggaccgctgcacagccgcctccgctgcagcgccgtggttcgttcacggcgaagacggcggcaaggtgtacgtggggttctctggggtgcaggctgcgcttacggcggcaggcgcggcggtggccggcggcggcgccgacatcttcgcgccggtgagtctcggcggggacgcggcggggcggatgttcgcgccgctggtcgccgccgagcccgacccggccgctaccggggagccggttgccgtgcaggcgctggcgctgcagtgcttcctgaaactctgctgcagtcctgatttccagatgcttctgaatcagatcaggggcaaggcagtcgtgttcacgggccactcccttggtggcgccgttgcggccctcacggcgctacactacctctgcatctcatcgtcaagctcgccacctgctcctcctgtcctgtgcgtcacctttggaagcccattacttggcaacgaggcgctgtccagggccatcctgcgtgagcactggggtggtaacttctgccacgtagtctcacagcacgatgtcgtcccaaggctcctcttctgctccccggacgccgtacccgcgcacatcattgttggaatgcaactgcagcaatggccggcgtggactcggcacacaggagctgtgagcacggtcaccgcgcacatggcggacactgacaaagacgtgctccggcagctgatacagacgcacgttggcgctgtggccgtggaacagaagcttgccgcttctgagacgacaggtgggagcccgtaccggccgtttgggacgtacgtgctgtgctccccagaaggcgcggcgtgcgtggacaacccgaccgccgcggtacagatgctgtacgccaccttcgcctctcagagctcagccggtgcagagtccccggaggccgcgcactcctgctacggcgagctcgtgctgaaaatgccgcaccacttgcttctcaagagatggctgcgtgtggacgacgacatgccggcgacgcccaactacgacgacggcgtctccctcgcgttggaggcctctggcatcgacgtcatggccatggaggcgtcgacggcgcggcattggctgaaaacatcaaagcgggcagggcggcggccgagcctgaactgcgctcgcctggcgacgcagctgggccgggtcacgccgtgccgtgcacagatagaatggtacaaggcgctgttcgacgcagagatggggtactacgacgcgttcaagcagcggcggtcgcccaggaagtacaccaaggtgaacttaaaccgcatcaagctgggctgcaaacagatgatgaattcgtaggtagctggtgggcgttctacaaatagttcaggtgtaaatgaatcattggatcatggtgctagtatatgtgatggtaaatatatcc

SEQ ID NO: 107957 - DNA, 1388 bp, Zea Mays
tcggtaggtccaaagaaagcatgtatacaaccttaggcaggtgatattatctggtgactctgaaagctgcagtgaacaaattttccagtacatgcaagcggtagctgatgaaattgttttggtaaatgttgacccccaaaagccacccaaggcatggaatctggtaaagcttttggatgaatttgttagtctaggcggaaaactgagtgaatcattcaaggacatccgagagcaaaacctccaatcagcacttgagcaaatgcaaggttggggtcctgtgaaggctgatagtttcgcccttccaaacatgccgttgccgcccgattcattcagaggaattcgaaaaagaacatcttcaataacgcggtggttttccatttgtgttgatgatacgtcaaagaaagggagatatacaaacactgtgaatctgctccggaaatattttggggattttctaatagctacctacttgaatgccgtgcaagagtcccgttatgacgatgcttatataggtggaattgagagggaagtactattgaagactcttgatacattatggaaagaccatttggtaaacatgaacaagcttagttctgctgtgaacgttcggagttttggacacagaaatcctctggaagagtacaagatcgatggctgccgcttcttcatctcaatgttgagcgccacacgacgtctcaccgtggaatcccttgtgcactactggtcgtcgcccatggagtccgaggagatcttcaacacagaggatcaatagcagaagacctgacgtggactggtgctgcaagttgtgggcaggttaattagcagagaggcacaggtataaacaggagccgcgcgcggcgtgtgttaaccctgtaaaatcacaagctgacatggccacggttgcgtcgatttcgcgctgtggctgtgcacctacatataaaactaagtacatctcaatgcacaagagggtagtaactggataggtgtggactgcaagacagtctgatccatcccacatcagcaatacggcgttgccgcaaagttggcatctcgttcacagtgtactgtggtcctttagcctgtcatgatgatgaaaaagtccgctctgtacctttttctttcatcgctcgtcagacggaacaggagagtgcggaatctcttgcttgtggatgacgaactcttcgtgcaggtaggtacgcagcctagtggtcatgctttgacattgccaaatatttggtttttaattttttttcgggcgtgtgatggtggcaatttgtaagtaaaaaactctagggagtatggtaccgatttaacctgtgtgtactgctgcagttgcaacaatatactgtacaaaaagtagaagcccgtgaattaaagcttaagtctcc

SEQ ID NO: 107958 - DNA, 1000 bp, Zea Mays
tcggtaggtccaaagaaagcatgtatacaaccttaggcaggtgatattatctggtgactctgaaagctgcagtgaacaaattttccagtacatgcaagcggtagctgatgaaattgttttggtaaatgttgacccccaaaagccacccaaggcatggaatctggtaaagcttttggatgaatttgttagtctaggcggaaaactgagtgaatcattcaaggacatccgagagcaaaacctccaatcagcacttgagcaaatgcaaggttggggtcctgtgaaggctgatagtttcgcccttccaaacatgccgttgccgcccgattcattcagaggaattcgaaaaagaacatcttcaataacgcggtggttttccatttgtgttgatgatacgtcaaagaaagggagatatacaaacactgtgaatctgctccggaaatattttggggattttctaatagctacctacttgaatgccgtgcaagagtcccgttatgacgatgcttatataggtggaattgaggtgaacgttcggagttttggacacagaaatcctctggaagagtacaagatcgatggctgccgcttcttcatctcaatgttgagcgccacacgacgtctcaccgtggaatcccttgtgcactactggtcgtcgcccatggagtccgaggagatcttcaacacagaggatcaatagcagaagacctgacgtggactggtgctgcaagttgtgggcaggttaattagcagagaggcacaggtataaacaggagccgcgcgcggcgtgtgttaaccctgtaaaatcacaagctgacatggccacggttgcgtcgatttcgcgctgtggctgtgcacctacatataaaactaagtacatctcaatgcacaagagggtagtaactggataggtgtggactgcaagacagtctgatccatcccacatcagcaatacggcgttgccgcaaagttggcatctcgttcacagtgtactgtggtcctt

SEQ ID NO: 107959 - DNA, 760 bp, Zea Mays
acgggctgaagtagagtctatgttccaattaggtcgccctgttttagttggaactacaagtgtcgagagttctgaatacttgtcagagctacttaaagttcacaagattccacacaatgtccttaatgcaaggccaaagtatgctgcaagagaagccgaaataattgcccaagctggaagaaaacatgctattacaatatctactaatatggctggcagaggaactgacattattttaggtggtaatccaaaaatgcttgcaaaagaaatagtagaagataacatacttccatttttgacccatgaacctcctaatattgacatggaaggggaatccacatcccacaagggtctctcaaatgtagaacttagtccatcatcagtaggtctgcttgccaaagctgcaatcatgtcaaaatatattcacaaaagcgagagaaatgaatggtctttgagtaaggcaaaatccactattgctgaatctatagaaatgggtcaaatgattgggatggagaaactgcaagagcgcatgactgaagagtctgagatgtaccctctttgtgatgcaataggacttgcttatctcagtgtcttaagggattgcgaagttcattgttcttttgaaggtgctgcagtgaagagattaggtgggcttcatgtagtaggaacctctttgcatgagtcacgccgaattgataaccaaatttcttgtccatcatcagcagctttcattcttacactggatgcatccatgcactga

SEQ ID NO: 107960 - DNA, 1260 bp, Zea Mays
atggccggcggcggcggcggctctctgtctagcccctccgcctccttcctttccagtcccaccccaacaccgccccctcgtctcctccgcaggtgtagcacgaagtctgcctcacgagatagccccatcctcagaccaaaaaagccgcctccactcttctgcgcggcggcagccactcccacccccgctcccgcggccgcgtccaagtcggctgggtcatggagggacctgtgcagtctcaacgcctgggtggtgcgagactaccgccgccttgtcgactccgtcggcgcgctcgagccggcgcttcggaggctctctgaggaacagttgaaggcgaagacggccgagttccgcagccgcctaacgcgcggggagacgctcgccgacgtccaggccgatgcgtttgctgtggtacgtgaggcggctaggaggacgcttgggatgcggcatttcgacgtccagataattggcggtgctgtgctccatgacggctgcattgcagagatgaagacaggcgaggggaagacgcttgtttccacacttgcggcttatctaaatgcccttacagggaaaggggttcatgtggtgactgtaaatgattatttggcacagcgtgatgctgaatggatgggtcgtgttcatcgctttctcggtcttactgttggtctgattcaggcgggtatgaagtcagatgagagaagagctagctacagatgtgacattacatacactaacaactcggaacttggatttgactatcttcgtgacaacctatctcgaaacaaagaacaactagttatgagatggccaaggccattccattttgctattgtggacgaagtggactcagtacttatagatgagggaaggaatccattattaataagtggagaggataatagagatgcagttcggtatccaattgctgctaaagtcgcagaacttcttatggagggtgttcattacaccgttgaactaaagggcaataatatagatctgacagaggacggtgtagcacatgctgagattattcttgggacagatgatctatgggatgagaatgatccatgggcaaggtttgtgatgaatgctttgaaggcaaaagtgttctaccgaagggatgtccagtatattgtcagggatgggaaagctattataattaatgagttgtacttagcagcttgtgcaggggaggctttgcatatgtacagacacatgcacttgtatatattcctatttgagttttttgaagggacatag

SEQ ID NO: 107961 - DNA, 2217 bp, Zea Mays
tcgcagtgggctctgaatactttgaagaagcccattgtcaccatgaagtggttagagcaatgctggattgagcatcgtgttgtgcctcatgaaccttacaggattcttccctttactgggttgaatatctgtgtcactaaactggatccagctttctaaaagacaacacaccttgattactatattgatttcttaacatattattacaaacctggaggtgacaaatatgtcatggcccaaaaatggggtaatatttacattgtgaatccaaaatgggttgaccaatctgttgctcgaagagcaacatcagttgatgattcagtatcaatgtcacaacatttgcctgcttcatttggtgatgcttcacggatcagcagcactgatattgttggtgcacctagtgtccaagagacagatgacatgcaggttgatagtcatattgctgaggactcagagccagaaaacgatgatctatatttatcaaattgtcgaatttctctggtgggttttgaagagaaagagttgttaaggcttgtcatgctgatacgtaatggaggtggatcccggcatattttgctaagtgagaagcttactcatattgttattggtacaccttcagatgaggaaaaaaaggaggtaagacgtctggctgcatggggtgtaataaatatagtgaaagtaacatggttagaagactgcaataaagcaaaaaaagaagtgaaagtatcctcaatgcatatagctactgagctcctcttgaagggattttctcaagtaagcatggaaaattctgctgatacacgtgaaactaaggtagccaaaagctcaggtgggatttttcatgttccaactgtcaatgacttgcatgaaaaacaccatgaaaaaggtgtgtcatctgaaaggaaaccaaaaagaggcaaacatgaaaacagtataagtaaaacccgatcagcagccaggactgaaaaatcaagtcaacagaatggattggccaatgttagcgagtaccagctccaatataaagtaacatcgataatgaattctggaagtagcagatcaaatatattcaaagggagaacattcagtttctcaaattcattttctcatgacaagagacctgaggttgttgattgggtcagagatggtggaggcgttatggtggatgacatacactcaactgctgcagatttcataattgagtgccacggacaaaacagcttgccttgtgacttctctcattcacttgtttcaactcaatggatacgatcatgtttggaggagaactgcttacaagatgttgggagtcatcctatcttctctcctttgcgctgtcgcatcccattcccaggatttgaaagctttcgtttctgtatttcactttcacaatatggagagaaagaaagacatctgctgaagaacttgtgctttctactgggagctaagtttacagacaaagcatataagggagtaacccatctcatctgcaaatttgcaagtggtcttaaatatgaggtttactccaaaagaggaactcccaccattacttctgagtggctctatgagtgtgtaaaacaggataaacttctccctgttgatcactttcagccaaaaccacttacatcacaggataaagatgcttatccgtgcactgccagccaatattccacacaggctaccagatttgattcctctgagctgcttagtggttgtcaagtaacaaaaaacaatgcaacacacaattctggtaactctggtatttttgcagtcaatgaagaaacaactatgcctgctgttagtagaaagagaagaatatctgttcctggtaaggttaacggtatttgtggaaacatcgaaaaaactgagaaacaactcgacaatagctctgtccctgatgtcgcagatgccatagaggttctatcatccaagatatttcaacctgacaattctgttgttcaagagcagaaagatacacactcctttgacatttcaaggagctggctgaacatgcaacagaagcaagatagcacctctgtcacaaaggttcaaaacttaaactctgtaccagtcccctccccagctcctactacttactaccctttcagtgagacgcagacagaatctcaggtcgttggatacgaagaagatttaacaggcaggcagaagatcatagacagggttcggtctcagagcattaatgtgactccgtcgagtgagatt

SEQ ID NO: 107962 - DNA, 291 bp, Zea Mays
gcttattaaacatactattgcttcagtaatggattgcatatactaaaatagtcctgaaacatcacgtcattgtctctgcacctgtacataattatatgatgcttaaagtctaccgcatttgttatttcaacatgaaccacaggcgccctaaatacttatttttgttgcatttttaatgaccttactgctagatgttgaacttgggtcctaatacagatcaacgataactatagtagtagtagatggacaaccattgatttgattactctgtctgcctgcctccattgattc

SEQ ID NO: 107963 - DNA, 139 bp, Zea Mays
tttttttctaaatataagtatactttatattattaaaacatttctaataaatccaataacagtttctaacactaaatatttattttatatatttaagttaattgtgttttgaaataatgaaatactactaaaacaaccc

SEQ ID NO: 107964 - DNA, 1678 bp, Zea Mays
ttccatctccatccaccgcgccccaaattgcacggccctgcctccccattcgtgcggattgaatctcgaatcagcggccatgagcgtggtcggcttcgacgtcagcaacgacaccctggtggcggtggcggcgtggcagtggggcattgatgtgctcctcaacaccgagtccaagcgcgagtcacctgccgccgtcgccttctcccacaacgcgcgcctcatcggctgccacgccgcgtccgcctcatctgcccacgcccccttctccagcgtcaaacgcctcctcctgggcgccacggggaggaacccagactcctccctcttccgcgacctcccccgcctccctttctccgtttccgatgccgccggtggtggcgccgtcgtccacgttgaccacattggccgcatcgcgctctctccaacccatctcttctccatgctgctcgcctacctcaagcagctcacggatgccaacctcggcagcacccccgtcgccgactgcgtgatctccgtgccctgctacttcactcaagcgcaacgccgcgcctacctcgacgccgccgccatcgtggggctccggctggccaagccctcgctgccggccacatggctgctgctgcacgcgctcttctgcgctacctccatggtcgttggcttccgcttctcccgcctcatcgtcttcctcctcttcctgcccaccccgcccatcaaccccgccgagcacctcgtcttgctcgtgtcctcacccgatctgatccaccacatcgtcttcgtcggccgccacccgatccgcgtccgcgcctggccacacggagaccccagcgagctcctcaaagcgcactgcatcctcgctgccgtccagaacgtgcaacacagcaccaagcgtcgtggcacgagacccgtgaggcacgtcattgccgtcaccccgaccaccacctccgcgctctaggtgtcgttgctcacgtctctagcgcacaccctccgcctcattgacgcccgactcgtgtggatcgtcgtcgagccgagccaccgcacaaacgtcgtcgctgcggtgctctcccgctccaacctcgacttcctacacatcaccggtcctagcgactccaccgcgcctgcgaatccatgccctcagggtgatttggacgaagcggatggacggcatcgtggtgtttgccgacgagaacagcatcctccgcaccgagctgtttgacgaggcgcagaaggtgaccaccatgggcgtcgtgctcgtcggcatcctgcgcgaggatgacggcgccagcgagtccttcctaaaggcaccatagtgcgacgcggaagggaacctggtgggctaccgcgtctcggaggagaccgcgacatactgatggccagcaggctggagtggtccggcttcgtggtgaacgtgtgggcactgtgggaggacgccaaggagcggccggtgtgggtgtgcaatctcagcgccaccgacgacaccgacccccgcgccgccagccccctcccgctcgtcaccgacgccggccgcgttgagccgctcgccagctgcgcccaggcgactctcatgtggtcctcgctacgttccgacagtgaggtcaaattcccacatgagtataatggcggcacaagctcatgttcgggggagggagggggcacctcgagagcggggcagttgcgcgatggc

SEQ ID NO: 107965 - DNA, 1285 bp, Zea Mays
accaactgtgacaatccagtcaattatgatctctagcccccctccttccggctcctgtcatcctgcgcatgccatcggggcgctcgccgggacaacatttacctcgacagcgacgccgccgctctccctcgacgagagctcgtagctgtgtccgcgcaaggcttactcctttcttggccccgaccccttctccccgccgccggcgccgcgcttggcttgatgctcgacgtctgcgcgccacacgggcccgccaagctcccggctgcgtttgtcgccggcgtgcgagtcgcctgggtcgccggcaggtggtggtggcgatccgtggcggtgggggcggcgcgccatggcgtcaccacgcgggcgtcgttcttcgggctcgattcccaggttgcttcatttctgcatcatcaagaaaaaatgaatgttcttgtggaacctgatgttcatgatacatttgctagaattccaggttatggttttgtgcaaaccttctatactcaagataccaggtgcaaggtgatggggtgatagttgcaacaccaacaggcagcacggcatattctactgcagctgggggatcaatggttcatccaaatgtcccatgcatgctgtttactccaatctgccctcactcactgtcatttagacctgtcatccttccggattccgcacggcttgaattaaagataccagatgaggcaagaagcaatgcatgggtttcatttgatggcaaaaggcggcagcaactatcaagaggagactctgttcgtatatccatgagtcagcacccgctaccaactgttaataaatctgaccaaacgggtgattggttccgcagcctgatcaggtgcctcaactggaacgagagattagaccagaaggcactatagacactagaatctttttttattttttgatgtacatatgtaaattcacgcacaaatatagttttgttttttctgccaacatgtacagtgcgtaacaacaaagaactttgcatatcaaggatctaatcaggtggcttgagggataaatgagagttaataaaaaattgctcaatagaatcttgtttttcaaaacttcaaccaagtttttaacacatcgaaaatgacaaataaaaaaatgttaaatgagtagcccacaagcccaaaacaatggcttcatatttttaatgatgactgacgaacaaatcagagtaacgaaacctgtaggaaacaagtacaacattgaaaacctctaaaataaaaaagcacatcaaaagtcttcgaaattagaaaaacatgac

SEQ ID NO: 107966 - DNA, 3380 bp, Zea Mays
accaactgtgacaatccagtcaattatgatctctagcccccctccttccggctcctgtcatcctgcgcatgccatcggggcgctcgccgggacaacatttacctcgacagcgacgccgccgctctccctcgacgagagctcgtagctgtgtccgcgcaaggcttactcctttcttggccccgaccccttctccccgccgccggcgccgcgcttggcttgatgctcgacgtctgcgcgccacacgggcccgccaagctcccggctgcgtttgtcgccggcgtgcgagtcgcctgggtcgccggcaggtggtggtggcgatccgtggcggtgggggcggcgcgccatggcgtcaccacgcgggcgtcgttcttcgggctcgattcccagaattttcagacaagggacccgtcccagttgttgtggatcggtccggtgcctggtgacatcgcggagattgaggcctactgccgcatattccgtgctgccgagcagctccacaccgcagttatgtcagcactttgtgatccagagacaggagagtgtcctgtacgctatgatgtggaatcagaggatctgccaatcctggaagacaaggtcactgccgtccttggttgcatgctggcgttgctgaaccggggaaggaatgaggtgctctcagggagatcaggtgttgcaagtgctttccatggatctgtggacagcacctctgatatgatcccaccactcaccttgttccgtggagacatgaagcgttgctgtgagagtatgcagctggcacttgccagctaccttgtaccgagtgagcccagggggttgaatatatggaggaagctgcagagattgaagaacgcttgttacgatgcaggtttctcaaggcctgatggttatccatgtccgacattatttgcgaattggtttccggtgtacctttcgattgtgtcagatgattcaggaacagatgagcccgaggttgcattttggaggggagggcaagtcagtgaggaggggctggcatggctactagaaaagggattcaaaactattgttgatctccgggaagaagatgttaaagatgatttgtacctttcagcagttcaggaggctgtctcatctgggaagatagaggtggtgaatatgctggttgagatcggaactgcaccatcagctgaacaggttaaacaatttgcagctcttgtgtcagatggcgcaaagaagcccatttatctccatagcaaagaaggtgtttctaggacgtctgcaatggtctcaagatggaaacaatatgttactcgttcagagagattggctgtccaaaatcactatataaatgggaatggtaaggtcctgacaagtgacaagaccaagcagcacacgggcagcccaagctcctctatgaatcgaactgaaattggtatggtaacggaatctgataggaccatgaacaatggagaatcatgtgagatagacatagagacagctcgtcataatctggaggtcactaatgccctttccgatgaccaaagtactcaacaaggtgaaatgcttgggactgggacagaacccttgtcaaactttaaactggagagtaacccccttaaagcacaatttcctacttgtgatattttctctagaaaagagatgagcaagttttttagaagcaaaaaggtttatccaaaatctgttctgaactcaaggagacaatcaagtagcttgctggtctcaaggagaaaacaaaatttcagcacagagcgtaatggaaccattgactatgaagcagcagagttcacaattttagaaagttcaaatggaacatcatttgacaatgattatattctatcagtttcttcaggtatcactgatggaaaaccttccaacaatggagccttttcgttaattgagaaaaaggaaagggaagtttcagtcactacttttgatactagagcatcggcgagcagttctaatggaaaggttcaggttggatcacaaaaaactgctgaaaagaatggtaccccttatctggagagaaacaattcaaataatgttgatggaagtatgtgtgcatctgcaactggtgtcgttagactccagtcgagaagaaaagcagagatgtttctggtacgtactgatggattttcttgtactagagaaaaagtaacagaatcatctctggcttttacacatcctagtacccagcaacagatgcttatgtggaaatctcctccaaagactgtcttacttttgaagaaattaggcgatgagctgatggaagaagctaaagaggttgcttcatttctgcatcatcaagaaaaaatgaatgttcttgtggaacctgatgttcatgatacatttgctagaattccaggttatggttttgtgcaaaccttctatactcaagataccagtgaccttcatgagagagttgattttgttacatgcttgggtggtgatggactcattttgcatgcatcaaacttatttagaacttctgtaccacctgttgtctccttcaatctcggatctcttgggttcttaacttcacataatttcaaagatttcagacaagactcgagagatttaatccatgggaacaacacacttggagtttatataacccttagaatgcgcctaagatgtgagatctttcgtagtggaaaagcaatgcctgataaagtgtttgatgtgctgaatgaagttgttgttgatcgaggttccaatccatacctatcaaaaattgagtgttatgagcataaccaccttatcactaaggtgcaaggtgatggggtgatagttgcaacaccaacaggcagcacggcatattctactgcagctgggggatcaatggttcatccaaatgtcccatgcatgctgtttactccaatctgccctcactcactgtcatttagacctgtcatccttccggattccgcacggcttgaattaaagataccagatgaggcaagaagcaatgcatgggtttcatttgatggcaaaaggcggcagcaactatcaagaggagactctgttcgtatatccatgagtcagcacccgctaccaactgttaataaatctgaccaaacgggtgattggttccgcagcctgatcaggtgcctcaactggaacgagagattagaccagaaggcactatagacactagaatctttttttattttttgatgtacatatgtaaattcacgcacaaatatagttttgttttttctgccaacatgtacagtgcgtaacaacaaagaactttgcatatcaaggatctaatcaggtggcttgagggataaatgagagttaataaaaaattgctcaatagaatcttgtttttcaaaacttcaaccaagtttttaacacatcgaaaatgacaaataaaaaaa

SEQ ID NO: 107967 - DNA, 749 bp, Zea Mays
tttttttctaagcacattttgtttccaaactttttttttgtgcactccgtgtgctccatctggcagttgctggaggaacacagcacacaatcgcaatggcgcacctgccgcagctgagattattgccatcatggaacacgacagtgttggtttcgacgaaatagaggtgtaggtaagggcttcgataatttggagccgcagacgacagcaaagcgctgatatggacatgaaaactctattagttgttacggacactaattaatcacacgccgtcatctcatcagcctgtccgccttcaacttccgcccgccggcggcgctggacatcgggctcaccctcaccgtgcacgccaccaaccccaacgtcgtgcccgtgcgctacgggccctctaccgtctccatcctctacggtggcgcgcacctcggcaccgcccgcctcaacgccggcgagcagcccgccacctcctgccgcctgctccacctcccggcgcgcctcgacggcgtcgagctcgcgcagcgcgcccgcgccctcctcttcgacgtcgcgcgccgccacatggagctggacgcggccgtcgagatcgccggcgaggccgcggtgctgctctggtcccgccccttctccgtccgcatcgacagccacatcaccgtcgaccccgtcttcctggaagtcgtcgaccaggagaaccgcttggagatgcagctctacctcgcttcaattttttttaccaactagactagagtagatgc

SEQ ID NO: 107968 - DNA, 908 bp, Zea Mays
aagtaatattttttatcttactcgtcctctccctgaccgatctcccaaaccaaaccgggaccgggcggcatcctccgtctcgtactgacccccgcaccgccaaaccctagtccacagcggtgaggcgaccttgcgacctccgttcctctgcgctccggctgagttgctgatttgggataatcatgttctctctgagtgaatgaacatgtctgggaatgatgataagccacatgctgctgcaaacagaataaaggcagccacgttatcagtgactaagggattgagcagggctcaagctgaatgggctgcgactgctgctacccgcaatgtgaatgcctatgggcagaaggaagagggaccaagccgctggcaggagaggaagaaagccaagagtcagatgtatctgatgagtacagagaaggttgcgaagctgggcactgtgaagcaaaaagcttcagaaacttcttctgttggcgcatatacccaatgccataagtgtttccagcatggtcactggacatatgagtgcaaaaagagcgggtgtacatatcacggccctcaagaacgtagcagcttaagaaccccaagatgaagaaatgcgtacctgtttcttatcgatttgagaatcctgatggtgatcgacgattgtgagcttccatgttatgtgttgtgatacttgagacttttattatgactacatatgagatattgtctattattatgactggatgagatgtgtcttattatgactatggatgagacttttgtgatgtaattgatgagactatgaatttcaatattgttatgtgattgtgtgtgagatgttttatgtgaaaatatattgtgctaaatagttgttgatatatttgttatgttgtgtaatgtggtgtaaaataaaaataaacaac

SEQ ID NO: 107969 - DNA, 582 bp, Zea Mays
atggctggcacaaagttagtatcacttggtctccttgttcttatgggcataggattagccaatgcagctagggtggcgagatactctagtgctgatgggactggcaacggagagggacagggtggcggatatgtgaatggcgggggatcagggtctgggtccggtaccggatccggtgatagtagtccttatggtacctatgcaagtgctggagggggtggtgcaggtggtggagctagccaatacggtgggtctggatatggttcagggtcagggtctggttcagggtctagtacatatagtcaaggagggtattattcgggttatggagaatcttctaatgctggtggttctggtggaggtgggggtggagggcaagctggaggttatgggaattccaatgctcaaggatctggtagtggcaccggttctggctctagctatgctaacaggtattgggatggatcaagtgaaggaggtgcaaatgctaatggcaatggtggtggcaccggaaatagtcaaaatggtggcggtggcggtggttcaggtgaggggactggatatggcaatgcctacccatga

SEQ ID NO: 107970 - DNA, 1167 bp, Zea Mays
cgctgcattttccttagcaaaagttcaccgcatattgcaatttgttgacaatgacaaactattgctaagacaacacaaggataaaatgaccatcttttctgcacttgaacaaccactatttctcctacccttgtcaagcaattgcgtgaggcaactggagcaggcatgatggactgcaaaaaggctcttgctaaaacagggggtgacattgataaagctcaagaattcctacggaagaaagggctggcggctgctgacaagagggctggcagagcaacagctgagggaagagttggctcttacatacatgacagcagaatcggggtccttattgaagtgaattgtgagactgactttgtgtctcgaggtgacattttcaaagagttagttgacgatcttgccatgcaaattgttgcttgccccccaagtgcagtacatctctattgatgacgcccctaaggaggttgtgaagaaggagaccgagctggagatgcagagggaggaccttttgacgaagcctgagcagattcgggctaagattgtcgaagggcatgtaaagaagaggcttggagaattcacgttgttcgaacagacattcatcaagaatgacaaggtcacaataagtgagtggctgaagcaaactataactacaactggagagaatatgaaggtcaggagatttgcccgatacaaccaaggtgaagggctagagaagaaaagccaggattttgctcctgaagttgcgcacagacagcagcgaagccgacaccatctgctcctcccaaggatgacaagcctgctgaaacaacagaatccacggagaagaagccggctattgcagtttcaacctcgtttgcgaagcaactccgagacgaaaccggcgttggcatgatgggctgcaagaaagctctggccgagtctgacggcgaccttcagaaggctcaggagttcctgaggaagaagggcctctcatccgcagacaagaaatcctctcggctagccgccgaaggactgatcggctcctacatccacgatagccgcatcgactgcatgatcgaggtcaactccgagaccgacttcgtggcccgcaatgacaagttcatggagctggtgaacgacctcgtgatgcagattctttggagtacaatttccaacgcctggggttga

SEQ ID NO: 107971 - DNA, 1620 bp, Zea Mays
atggtggcggagacagcggctattggaggagaaacaccagggcaatctctgaatggtactgtgaaaagtacaacgagagcagggacatttgtgacgttgcctgatgggagtgaaggattccttcccagagaagaggaagcattagcattatttacccttatcggacaatctgcaatggaaattggtaaacagataagggttaaagtactgaatgtggcacatgttcaggccactttgataatgaaaggggtggaagatgatgaagacgatctgaagacgctaaatatggagcttaagcgggactggtccagagggactaatgcgttcgagttggcttccgtaggaacaaagagatctttgcattcttgtatcagagggaaaggaccaaagtgccggctgatacttcagtttctgctccggaagctgaaagctatcaggaggaagctgctccaaaagatgaggaaagtgggaattcaggattctacttctgtggcaaatgttgttgaggaccaaactgtaggatctgaaagttcacctacaattagtgttgaattgtcctccaacgggaccccagatagatctattgtgtctccagtttcagaaactgcagataaacctactgaacctaaagaatcttcagcggtagaagaggttcttgtaactgcaagcagcgaggcagggaaagaaccagctgctgacactgaggctgtaccagccttgagtgagaaaactggtgccgagcaattgcgtgaggcaactggagcaggcatgatggactgcaaaaaggctcttgctaaaacagggggtgacattgataaagctcaagaattcctacggaagaaagggctggcggctgctgacaagagggctggcagagcaacagctgagggaagagttggctcttacatacatgacagcagaatcggggtccttattgaagtgaattgtgagactgactttgtgtctcgagtgcagtacatctctattgatgacgcccctaaggaggttgtgaagaaggagaccgagctggagatgcagagggaggaccttttgacgaagcctgagcagattcgggctaagattgtcgaagggcatgtaaagaagaggcttggagaattcacgttgttcgaacagacattcatcaagaatgacaaggtcacaataagtgagtggctgaagcaaactataactacaactggagagaatatgaaggtcaggagatttgcccgatacaaccaagtgacaacaccactcacatttggcacacatgtttccaggaagccggctattgcagtttcaacctcgtttgcgaagcaactccgagacgaaaccggcgttggcatgatgggctgcaagaaagctctggccgagtctgacggcgaccttcagaaggctcaggagttcctgaggaagaagggcctctcatccgcagacaagaaatcctctcggctagccgccgaaggactgatcggctcctacatccacgatagccgcatcgactgcatgatcgaggtcaactccgagaccgacttcgtggcccgcaatgacaagttcatggagctggtgaacgacctcgtgatgcagattctttggagtacaatttccaacgcctggggttga

SEQ ID NO: 107972 - DNA, 760 bp, Zea Mays
atggcgggcacaaagctaatatcacttgggctccttgttctcataggcataggattagccaatgctgtgagggtggttagataccactctagtgctgatgggactggcaacggagagggacaaggtggcggttatgtgaatggagggggatcggggtttgggtctggtactggatctggtgatagtagaccttatggtacccatgcaagtgctggagggggtggtgcaggtggtggaactagccaatacggtggatatggatatggttcaggttcagggtctggtttaggatcaagtacatatggtcaaggaggttattattcgggttatggaagatcttctaatgctgggggtactggtggaggtggcggtggaggacaagccggaggttatgaaaattccaatgctcaaggatctggtagtggcaccggttctggctctagctttgctagcaaatattgggatggatcaagtgaagtaggtgcaaatgctaatggcaatggtggtggaacaggaaatagtcaaaacggtggaggtggtggaggttcaggtgctggggctggatatggcagtgcctacccatgaacttgacatcagtcaatctaatgttggagctcatcatcctttcttgtttgaagttgtaggattattattttccttgcctctttgttatgcttttggttgaaccaaattaataaagggtccaactatcttgtaaggtccaacttataagatgatgtcgtaacaatgtatgtttatg

SEQ ID NO: 107973 - DNA, 844 bp, Zea Mays
atggcgcggtcgcttctctgtgcacgcgccgtcgccctgatttcctgctcccaggctccaactcaagttcgcttgaccgcgcgtgtcccaacgccgcaccctgcagcctcctgctctggcgcccagctccctgcgccgagcgcttcttctttccctgtgccctccccttgcttctctcttccagctcgctcagccagcgaggtccctcccatgtctacctgctcgcagtgcctctggttccggctgcagttcggtgcttggagctccctatccgtcctctctctgccgagcgattttcttgcgcgcgcgcgcagctccggctcgttcgcgaactccttgtccgcgaactcctcccatccgtgccagtcgccgtttctaagatcgattccaagctgcagtgtgcccagctgcttcttcctcttcccgtggcgtccatcttcctcggctcctttcagctcggatccctacgcgcggagcttttcccctagccaagatcgtccttgcgcactgtcgtcgcctagttcgcgtcccgctcttgctccagctatggcgtttcgtcgtcgcagttccctgtcctctacgcgctctattttttgtgcgcgcgtgctcgtcgtctctgttccagccgtccgcacaattttctctgctcccttgccatggtcgtcgcgtgcctacgcgcagctcgctgagttcgacctctgttcttcctgcgcccaactccatgcgcgcgctttgctttctacgcgctggccacagctcggagtttccctgcgtgatgtcacaaaatccgcttattgttgatgtcgcgcttcgtgcatcgtgtgctcgacggaggtcccaagcc

SEQ ID NO: 107974 - DNA, 116 bp, Zea Mays
cccgagtattcgtcaaatcaaaattgtgtcacaattactatctacatcgtaaacattgctaagaaaatcggaacagataagtttttatccgagttcaaccaaattagtagcatctc

SEQ ID NO: 107975 - DNA, 806 bp, Zea Mays
gaactcatcacaactcaaacactctacttgtatctcacaatggcaggcacaaagctaatatcacttgggctccttgttctcataggcataggactagccaatgctgtgagggtggccagatactctagtgctgatgggactggcacaggagagggacagggtggtggatatgttaatggtgggggatcaggatctgggtctggcaccggatctggtgatagtagtccttatggtgcccatgcaagtgctggagggggtggtgcgggtggtggagctagccaaaatggtgggtctggatatggttcaggatcagggtcagggtcggggtcaagtacatacagtcagggagggtattattcaggttatggagaatcttctaatgctggtggtactggtgggggtgggggtggtggacaagctggaggttattggaattccaacgctcaaggatccggtagtggcactggttctggttctagctatgctaacaggtattgggatggatcaagtgaaggaggtgcaaatgctaatggcaatggcggtggcatggggaatagtcaaaatggtgggggcggcggtggttcaggtgatgggtctggatatggcaatgcctacccatgaacttgatatcagttaatctaatgttgggcccaccatctttccttgtttgaagttgtaggattattattttccttgcctctttgttgtgcttttggtagaaccgaattaataaagggtccaactatcttgtaaggtccaacttataagatgatgttgtaacagtgtttgttaatgaaaactatata

SEQ ID NO: 107976 - DNA, 627 bp, Zea Mays
gaaccgggaggagagcaaggcatgcgacgtttttcctaccaattggctctcgtcgtacgccatcactgcatgaggatctggatgaggtaggcaaggtagaggaggccgaaacatgggccgaggcggtgctgctcctcatcatgtgcggcgatcaccacgcatctggcaaggccatcaaggatgtgctttcagtctttcaccaaggagcttggcgatgactaccaggctgcgccaccaaccggccgttatgaaactatgtttcatcaagatgcacccatttctactgcaggaccatatgttttatttcttgacatatgattgtgatgtcctaattattcgttgaattgtatttatttttgttattgacgcatgttacttgaggactgcttcatttactgttttatttaaatgctttatcactatttatatctaaaatgtattttgaattgttattttgaaatctaacttgtaccttatttcaagaccttcattctcaccggactcattttatatcatttcagaagcaagaaaaatgtaaggatgctgaacttagtgcaatagatcttttaaaggacatgcattgcaacaaaaagaaaggttttagtgaaaatattgagaaagctattg

SEQ ID NO: 107977 - DNA, 862 bp, Zea Mays
actcatcatcacaactcaagcacctatagtagtacctcacaatggcagacaaaaagctaataccgttggggctcattatcctcatgagcataggattagccaatgctgttagggtggttagatactctaatgccgatggtactggcacaggacagggagaaggtggtggatatgtgaatggcggaggatcaggatctgggtctggcaccggatcaggtgatagtggtccttatggtacacatgcaagcgctagtgggggtggtggagggggtggaactagccagtacggtgggtctggatatggttctgggtcggggtcagggtcaggatctagtacatatagtcaaggagggtattctggttatggagaatcttctagtgctggtggtaccggtgggggtggagctggaggacaagctggaggcgcatggaattccaatgctcaaggatccggtagtggaactggttctggctctagctatgctaacaggtattggtatggatcaaatgaagcaggtgcaagtgctaatggcaatggtggtggcacaggaaatagtcaaaacggtggaggtggtggtggctcaggtgctggatctgggtatggcaatgcctacccctagtttctatatctaagtcaacctatagttggggcccaacaatctttcttgtttcaagttgtgaaattagttagtttgttcgtacctctattacactttttgccagaactaaataaataaagggcccaactattctagtaatggcagcagtttagtgtgaggttcagcttgtaagaatctgttgtaaacatgtcagtctatgaatgaaataataacttccctttagataattctataataactct

SEQ ID NO: 107978 - DNA, 2036 bp, Zea Mays
aaaccgtagctagctacagcgtctctcccggtctcccccatggtaattatttcttgtccgagtccaacctcaacaagggattgctggcggccccgcaagcgaagagaactttcaaaccaaacgagcagtcgtgtccaattcaatcccccgggtaatccggtgagcgcgcgcgtgtatatatattatatacacagggctgccgccgccagcagccgtcgcgcctaccgccacctgactccctctgccttctcgtcgctctgctcctccgttgccgtgaccctaagggaggaggacgaggaggaggaggaggaggggaaggaacggagggatggcggaggagacggtgcaggagctgcgcgcgagcttcgcgtcggggcggacgcgccgggccgagtggcgggcggagcagctcaaggggctcatccggatgatcgacgagaaggaggccgagatcagcgccgcgctccatgaggacctggccaagccgcacatggagtcctacctccacgagatatcgattacaaggtcctcgtgcaagtttgccctcgacgggctcaagagctggatgaagcccgagaagatacctgcggccttaaccacgttcccgtcctctgctcaaatcgtgccggagcccctcggtgtggtgctcatcatctcagcctggaactaccctttcatactctcgatcgacccagtcattggagcaatcgcagctggaaatgctgttgttctgaagccgtcagaaatagcgccagctacctcgtcattgctagcgaagctgctgcccgagtacgttgataactcctgtattaaagtcgtggagggaggcgttgcagaaacaacctcactcctggaacagagatgggataagatcttctacacaggtaatggaaccgtaggacgcatcgtgatggcagcagccgcaaagcatctaactccggtggctctggagcttggtgggaaatcccctgttgttgtggactcaaatgttgaccttcatgttgccgtcaagaggatcgttgttggcaaatggggatgcaacaacggccaagcatgcattgccccagactacatcataacgacaaaatcatttgcgccagagctggtggcctccttgaaaagggttttggaaaggttttacggggaggatcctctgcagtcagcggacctgtctcgtatcgtgaattcgaagcacttcaggagactgacggaattgatagaagagaaaagcgttgctgacaagatcgtgtacggcggcgaggttgatgagaagcagctaaaaattgctcctacactgttgctcgacgtcccccaggattcagcaatcatgaccggggaaatatttgggcccttgcttcctatcgtgacggtggaaaagatcgaggagagcttcgacttgatcaacgccaggcctaagccgcttgccgcctaccttttcaccaagaacaagaagctgcaggaggagtttgtggcggacgtgcctgcaggagggatgcttgtgaacgacaccgtgctacatctcgccaacccgtacatgcccttcggcggcgtcggcgacagcgggatggggtgctaccacggcaagttcgggttcgactgcttcagccacaagaagggggtcctggtccgcggctttggcggcgaggcgaacgccaggtacccgccctacacgacggagaagcagaagatcctgagggggctcatcaacggcagcttcatcgcgctcatccttgccctcctgggcttcccgagggagaagcgttagatgggccttctaactgggcccagtacaagcgttttgttcgtgttcgatggatggcacagtatatacactgccatgtgctgccaaatagatgcaaaccgtgcttgtgttacacggctgtgtaatgcattatattgttgcattgacatgtgggttaccgaattgtacgtaagggagttgcattaataagtgtggtctgcctgtcaattatcaagtgttcacaatggatacttcgacggatgcatcatgcattcatgcatggatgtggcatatc

SEQ ID NO: 107979 - DNA, 1953 bp, Zea Mays
aaaccgtagctagctacagcgtctctcccggtctcccccatggtaattatttcttgtccgagtccaacctcaacaagggattgctggcggccccgcaagcgaagagaactttcaaaccaaacgagcagtcgtgtccaattcaatcccccgggtaatccggtgagcgcgcgcgtgtatatatattatatacacagggctgccgccgccagcagccgtcgcgcctaccgccacctgactccctctgccttctcgtcgctctgctcctccgttgccgtgaccctaagggaggaggacgaggaggaggaggaggaggggaaggaacggagggatggcggaggagacggtgcaggagctgcgcgcgagcttcgcgtcggggcggacgcgccgggccgagtggcgggcggagcagctcaaggggctcatccggatgatcgacgagaaggaggccgagatcagcgccgcgctccatgaggacctggccaagccgcacatggagtcctacctccacgagatatcgattacaaggtcctcgtgcaagtttgccctcgacgggctcaagagctggatgaagcccgagaagatacctgcggccttaaccacgttcccgtcctctgctcaaatcgtgccggagcccctcggtgtggtgctcatcatctcagcctggaactaccctttcatactctcgatcgacccagtcattggagcaatcgcagctggaaatgctgttgttctgaagccgtcagaaatagcgccagctacctcgtcattgctagcgaagctgctgcccgagtacgttgataactcctgtattaaagtcgtggagggaggcgttgcagaaacaacctcactcctggaacagagatgggataagatcttctacacaggtaatggaaccgtaggacgcatcgtgatggcagcagccgcaaagcatctaactccggtggctctggagcttggtgggaaatcccctgttgttgtggactcaaatgttgaccttcatgttgccgtcaagaggatcgttgttggcaaatggggatgcaacaacggccaagcatgcattgccccagactacatcataacgacaaaatcatttgcgccagagctggtggcctccttgaaaagggttttggaaaggttttacggggaggatcctctgcagtcagcggacctgtctcgtatcgtgaattcgaagcacttcaggagactgacggaattgatagaagagaaaagcgttgctgacaagatcgtgtacggcggcgaggttgatgagaagcagctgtaaggatcacttttgcagctggtatcggtacggcagtggaatttctttctttgattcatgttaatgtttctttttttttctctctcttgattgcagaaaaattgctcctacactgttgctcgacgtcccccaggattcagcaatcatgaccggggaaatatttgggcccttgcttcctatcgtgacggtctgcctgccttgttcatggaacaatctgcagtacgtattctctgcatggagcaattcgtctgattgtttcggaaactgtgtttggcgcaggtggaaaagatcgaggagagcttcgacttgatcaacgccaggcctaagccgcttgccgcctaccttttcaccaagaacaagaagctgcaggaggagtttgtggcggacgtgcctgcaggagggatgcttgtgaacgacaccgtgctacatgtaagtcgtagtaaaaaccaactggatgcaaaatccaaatcttcttctaacttggctcccgtcccagctcgccaacccgtacatgcccttcggcggcgtcggcgacagcgggatggggtgctaccacggcaagttcgggttcgactgcttcagccacaagaagggggtcctggtccgcggctttggcggcgaggcgaacgccaggtacccgccctacacgacggagaagcagaagatcctgaggg

SEQ ID NO: 107980 - DNA, 1536 bp, Zea Mays
atgcttcctacccctcgcactttcttgaagcggctagcacttttggttttagacgaccggctggtagggttaaaaaaacaaatacgcttctctcctctcgccttcgcctccgagccccctgttctgaatggtgaccagacctgcccatggccccgcgctcgcttaggtcgaggcgccgccgcccgccgacccgagcatcctagctcctccccgcgggcgctgagcagcgagccatcatgcccgctgtgtcgtgcctccatcgcgttgccccactggccgctcaagcacttctttcgtgtggagctcggcagcattagcagcagccgctccaactcggagtctccgacgctacagcagtcgtcgaccgcacgtacccgcatcacggagtacatcgtcgaggaggagctccaggtcgtgctccagcgacccgccaagccagcaacagaagcttgccacaatggagcgcgggcaaccatcgttcgtggcctgacccctacggcatcattcaggtccttcttcgtcgtcttttttggcatgctagcttcgaaatttttattttgcttacttctgttttggttttgtggcgtgtgggtggatttcaaggatggagaagtcccattcgccaaaattcaaaacgtcctcccaattaaaatgtcggcatgaagaatgaggaatgaatttgtgagacttttaggcaaatgcacatcagtctcggccaatcaaaagaaaatggtagaatttttttggaggggctttcgttgcatttttcattttctctaaattcatcgtatcattagcagcaccttaattttgggtcttctctgcctctacaggtagtatcgtgttttggccactaaatcccattggcctgatgcttccttgcgagagactcaattctcatatatttttgaaagaaaagggtaaaaacaccgcgcgtaggcgcgcgttggccactagtagacattaacgggcgctcttcggataggttcttcttatccgaactaggcagatcgagattgcatacacagtaaaagtgacggattatgatgcacataccataggaggatccaaccggaaatggcggaggaagagccgaccagagaagctaggagcgcgtggcaaagggagcgaccgagcgcctgataggaaagctagggcgtgaggggctgaccggaaatggcagagaagctagggcgtgagggattgagggccggccgccggacgacgggacgaagggtggctccaccgtggctgggtgggcgcggcgctgaggagatcgagcgcctcacgggagcgaccgagcggcgagcgggactcggcgggcggcggctctcaggagacaggagattgactgaactcctggcgggcggatggcagcttctagcggctgctgcactcctggtggcgcggcttggggagaggaggtggagagaggtgggcggtagagagagaagagagagaaagggggagggagaaggagtggcggcggcttgggggagggagcagggtagtggcggctagggttgggggttgggg

SEQ ID NO: 107981 - DNA, 1432 bp, Zea Mays
atgcttcctacccctcgcactttcttgaagcggctagcacttttggttttagacgaccggctggtagggttaaaaaaacaaatacgcttctctcctctcgccttcgcctccgagccccctgttctgaatggtgaccagacctgcccatggccccgcgctcgcttaggtcgaggcgccgccgcccgccgacccgagcatcctagctcctccccgcgggcgctgagcagcgagccatcatgcccgctgtgtcgtgcctccatcgcgttgccccactggccgctcaagcacttctttcgtgtggagctcggcagcattagcagcagccgctccaactcggagtctccgacgctacagcagtcgtcgaccgcacgtacccgcatcacggagtacatcgtcgaggaggagctccaggtcgtgctccagcgacccgccaagccagcaacagaagcttgccacaatggagcgcgggcaaccatcgttcgtggcctgacccctacggcatcattcaggtccttcttcgtcgtcttttttggcatgctagcttcgaaatttttattttgcttacttctgttttggttttgtggcgtgtgggtggatttcaaggatggagaagtcccattcgccaaaattcaaaacgtcctcccaattaaaatgtcggcatgaagaatgaggaatgaatttgtgagacttttaggcaaatgcacatcagtctcggccaatcaaaagaaaatggtagaatttttttggaggggctttcgttgcatttttcattttctctaaattcatcgtatcattagcagcaccttaattttgggtcttctctgcctctacaggtagtatcgtgttttggccactaaatcccattggcctgatgcttccttgcgagagactcaattctcatatatttttgaaagaaaagggtaaaaacaccgcgcgtaggcgcgcgttggccactagtagacattaacgggcgctcttcggataggttcttcttatccgaactaggcagatcgagattgcatacacagtaaaagtgacggattatgatgcacataccataggaggatccaaccggaaatggcggaggaagagccgaccagagaagctaggagcgcgtggcaaagggagcgaccgagcgcctgataggaaagctagggcgtgaggggctgaccggaaatggcagagaagctagggcgtgagggattgagggccggccgccggacgacgggacgaagggtggctccaccgtggctgggtgggcgcggcgctgaggagatcgagcgcctcacgggagcgaccgagcggcgagcgggactcggcgggcggcggctctcaggagacaggagattgactgaactcctggcgggcggatggcagcttctagcggctgctgcactcctggtggcgcggcttggggagaggaggtggagag

SEQ ID NO: 107982 - DNA, 386 bp, Zea Mays
aaactccacgactcggcctcctcttcttagcaccatccggtgcatccagctgtcgccgccttgcatcctccacctccccagatcccaccgcgatggaggaagacgatgagttcggtgacctctacacggacatcctcatccccactcataccccccaatccacctccacgctatccaaccatgttctagtcgaaaccctacaccgcccgcctccacaccctaatcttacccccgtggcggcggcagctgaggaggttgacgatgactggctcctaggagggagcaaacccatacccggggtcgacccgaccgatgattgggccgacgaggacgacgatggaggggagcccgcacctcccgcgaagcggcatcacctgctgctgctg

SEQ ID NO: 107983 - DNA, 1632 bp, Zea Mays
gtgcacctgatacggagccaagtttttttctcgttcctctcttctcctgctttctaagtccagtctcccgggcagaagaggcacgagaggaaggtggggaaggaaaccacagccgcttctggcgggcgctcaccctgccccttccacctcgcctcgcctcgcaatggaggtttccaggtggaccccggcggccggcctcctgctcctgttgctcctcccgctcgcggccaccccgtcacgcgccgccacgatggcgagatcgccgtcgtcgtccactgccgtgttccagctccagggagacgtataccccaccggccactactatgtcacgatgaacattgggaacccagcgaagccctacttcctggacgtggacactggcagcgatctcacctggctgcagtgcgacgcaccctgtcggagttgcaacaaggtgccacatcccttgtatcgaccaacggcaaaccgccttgtaccgtgtgcaaacgcactctgcactgcacttcacagcggacagggctctaataacaagtgcccttcaccaaaacaatgcgactatcagataaagtacaccgacagtgcatcttctcagggtgtgctgatcaacgacagcttctcactgcccatgagatcctccaacattcgtcctggcctcacatttggctgtggatatgaccagcaagtggggaaaaatggcgctgtgcaggcagcgattgacggcatgcttgggctcgggaggggatcagttagccttgtttcacagctcaagcagcaagggatcaccaaaaatgtcgtcggccattgcctaagcacgaatggaggggggttcctcttctttggggatgatgttgtgccttcatcacgtgtaacttgggtgccgatggctcagaggacatctgggaactactactcacctggctcaggaacactgtacttcgatagacgttcactaggcgtgaagccaatggaggtggtatttgacagtggtagcacctatacttattttactgctcaaccataccaagctgttgtttctgcgctcaaaggtggtctcagcaaatcacttaaacaggtgtcagatcccactctgcctctgtgctggaaagggcagaaagcattcaaatctgtgtttgacgtcaagaatgaattcaagtcaatgtttctgagctttgccagtgccaagaatgccgccatggagatcccacctgaaaactacctcattgtcacaaaaaatggaaatgtgtgcctgggcattcttgatggaacggctgccaagctgagtttcaacgtaattggagacatcacgatgcaggatcagatggtgatctatgacaacgagaaatcgcagctgggatgggcgcgtggggcatgcactaggagcgccaagtctattctgtcttcctttccctgagctcagttctatgtacttctgatagagtttaagaaaatcactatatcaaacctcctcgcaatgcatgaatttcctaactgaagagggagggagagagagagagagaatgttcctgtttatgtagagatggagtccaaaatttgtgtgcctgatgagttcttccccatatgatattaactgaaatagtatatcaattgaatgtattacattttaagttttaa

SEQ ID NO: 107984 - DNA, 412 bp, Zea Mays
gtgcacctgatacggagccaagtttttttctcgttcctctcttctcctgctttctaagtccagtctcccgggcagaagaggcacgagaggaaggtggggaaggaaaccacagccgcttctggcgggcgctcaccctgccccttccacctcgcctcgcctcgcaatggaggtttccaggtggaccccggcggccggcctcctgctcctgttgctcctcccgctcgcggccaccccgtcacgcgccgccacgatggcgagatcgccgtcgtcgtccactgccgtgttccagctccagggagacgtataccccaccgggtacgctggtcgacgttctctcctttgtgtaccctgatcgaagcccgattgtagtattggagccaatcagcacggccgctcgctcgtgcgaggtggg

SEQ ID NO: 107985 - DNA, 7014 bp, Zea Mays
tggtatggatctaagcatggcaagtttgaacttgtcagaacctcgagactctagagaatcaacttcgcccgcaccatcaacatcatcttctatatcaagagaaaaaggtgacctggcagaagttgatgatcctgaaagtgcaatgtccactgttgctagattgttggaagacctccatgctagcatggtgtctccatcggggaaggaagctacaaccagaaggttacttgaactggctagagcgaaaaaggaggcaaggattttgataggtagccattctcaggcaatgccactactcatatctacccttagagttgggtcatctgcagcaaaagtaaatgctgcagctctacttagtgcactctgtaaggaagaggacttgcgtgtgagggtcctcttaggaggctgtataccacccttaatctctcttttgaagtctgagtctgctgaagcgaagaaggctgctgctgaagctatttatgaagtatcttctggtgggcttttggatgatcacataggcaggaaaatatttgtgactgaaggtgtggtgccaactctgtgggacttgcttaatcctaggtctcaccaagatagagtagttgagggctttgtgactggggctttaaggaatctttgtggggacaaagatggttattggaaggccacacttgaggctggaggtgttgaaattattactggtcttctttcatccaagaatactgcttcacagtcgaatgctgcttctctgttggcacggtttatctctgcttctggtgatagcattcccaaagttatagatgctggggctgttaaggctctccttcaccttctaaatcgagataatatcatttctgttcgtgaaagtgcggctgatgctttggaggccctgtcttccaagtccagtattgcaaagaaagctgtggtggatgcaggaggccttcctattctgattggagctgttgtagcgccctcaaaggaatgcatgcagggtgggacatgtcattctctgcaaagccatgctgtccgtgctttatcaaatatttgtgggggaacaacttctctgttgctttaccttggtgagctctgccaagcaccccggtcacctgttcccctcgctgatattcttggagcgcttgcttattccttgatggtttttgacggctctgatgataaatcatttgaccctgttgagattgaaattactttggttgcgctcctaaaatctcatgacagcaagcttgatcgtattcttgaggctttagcaagtctatatgggaatgattgtttctccgacaggcttgatcactcttattctaagaaggttcttgttgggctgattaccatagctcctgctgatgttcaagagcttcttgttcgtgccttaactagcttgtgttgcgatggtgttggaatatgggaggctcttggaaagagagaaggggttcagttgctaatatcattacttgggctttccagtgagcagcagcaggaatatgcagtttccttattggctatcttgagtgatgaagtagatgacagcaaatgggcaataacagctgctggaggtatccctccacttgtccagctactagaaacaggatctcaaaaagcaaaggaggatgcagcttacatcatgtggaacatgtgctctgacagtgatgatatcagggcatgtattgagagtgctggggctgttatggcgctaatttggcttctaaagagtggtagccctggtggacaggaggcatcagttaaagcactgaagaagttgatacgatcagcagattctgctatgatcaatcagttactagcattactgctcagtgactcattgagctcaaaggcccatgtcattactgttctcgggcatgtccttgtgctggcgcctcagagagctctaatccagagtggagctccagctaataaagttcttaggtcactggttcttgttcttgaatcatcaaatgaagaaacacaggagattgctgcaactgtgttggctgatattttcactatgcgtcaggatatttgtgatgtaatggcaattgatgaaattgtccagccatgcatgaagcttttgacaagtggaaaccaagtgattgccacacaatctgccagagctttaggagcactgtcatgttcagctagttccatgtcaaaaaacaaaatgtcttgcttaactgaaggtgatgtgcgacctcttatagagatggcaaagacatcatctattgatgttgctgaaacagcatttgctgcattagcaaatctcctatcagatgcacagattgctaaagaagcattagatgacaatattgtcttggctttgactagagtgctcaaggatgggagtttagaaggcaagattagtgcttcgcggtcacttcgtcagttggtcaaccagtttcccctcagtgaagttctcccagattacttgcagtgctgttttataattcatgcactgttggtatgtctatctggcatcagtttagaaaatgttacaagtttggaaccccttgatgttcttacattgatggctacaacaaaggagggttcgcattatagcccccctctatgcactggttttcttgaagttccagaaagcttagaacctttagttcgctgtattagtattgggcttccacctgttcaagataagtccattcaaatcctagcaagtctctgtcagggtcgaccttcgctacttggtgaatatttaaacagaagtcaaggatgcatcacttctcttgctactagagttatagagtcaaatgacatggaaataaggatcagcagtgcagtcatcctcatatctgcaatgagggacagcagagaacggtccatcgatgttctggaagcatcaaaagttctgaagaatctgatatctgcactcattgatatgctgaagcaacattcctctttaacatccctagacattgaaatctggaaaccttccacagaaaaaagttcgcttaattatgagcaggatgttttgagtgtgcctgaacttggaaaggtttctgaagaaactgttgcactatggttgctctcactgatttgttcttatcatggaaggagtaaatatactgttatggagctcaatggcgttgacacagtatctgatagacttgctagctatactgctaaccgacaggaacagtatgaagactcagaaaatatatggacttgtgcccttctgttggctactctgtttcaggattcagtggttgttcagtcttctgaaataacacgaaccataccttccttagcatccttgctaaaatctgatgatattatcaataaatactttgctgctcaggcactggctagccttgtttccactgggagcagaggtatacagcttgctattgcgaattctggtgcagttttgggtgctgtagcattgatcggacaggtagaatctgatatgccaaaccttgttacaatggctgaagaattcaagttgtcagacaatccatgtcaaataatgttgagaagcctttttgagcttgaagatgtctgcactggtgcttccgcccggaggtccatacccttgctagtggatctacttaaaccaatgccagataggccaggtgcacctctgattgctttgcaccttctgactcaactagcggaaggtagtgagtcaaataaaattgctatggcagaggctggagctttggatgccttgactaagtatctatctttaagccctcaagactcaactgaaactactataaccaatctgttggggattttatacactaatcctgatcttctttaccatgaatcatcacgtagcacttcaaatcagctggtagctgtcttgcgtttgggttcgagaagttctaggcttagtgcagtaaggacgttgcagaaactctttgattcagagaatataagggacaccgaagtggcccggcaagctattcaaccactacttgacatgcttgagtcaggaactgaaatagaacagcaggcagcacttggtgcgcttatcaagctttctgctgggaacatcgctaaggattctgctatgtttgatgtagaaggcaacacacttgaaaatctttacaaagttttatccttcagttcgtcattggagctgaagaaggatgctgctcaactctgctatattttatttgagaactcaactgtacgtgcatcaccaattgcaacagaatgtcttcaacccctgatatcactgatgacatcaggatctagtttggctattgaaccagcagtttgtgctctaaacagattactggatgaggactacaatgcagaaattgctgcaactagcgaagttattgatcttcttgtcagttttgttcctggtacaaactatcagttgtctgaagcatgtatcggtgctctcataaagttgggcaaggatcgtccaaactgcaagcttgacatggttaaagctggtatcattgagcatgcacttgatatgattcttgatgttcctgtatctgttagttcatccattgctgaattgcttcgcattttgacaaacaacagtggcattgctaaaagttctgctgctgcaaaaatggtggagccacttttcttgcttttacgtcgccctgatgttactatgtgggatcagcacagtgccttgcaagcactcgtaaatattttggagaaacctcagagtctagcagcattgaagttgactcccagtcaaataattgagcctttaatatcatttcttgagtctccctctcaagcaattcagcaacttggcactgaggtgctctcacatcttctagaacaggaacattttcaacaggatatcactacaaaaaatgcagttgttcctctggtgcagcttgctggtattggaatcttgagcttacaacaaactgcagttaaagcacttgaaaacatctcacagagttggcccaaggcagtagccgatgcaggtggaatttttgaactttcaaaggtaattgtccaggatgatcctcagccaagtcaagcattatgggaatctgcagcacttgtgttatgcaatgttctgcgttataattctgacaactatgtcaaagtctcaatggctgtacttgtgagattgctgaactccaccatggagagtaccgtcacgatagctctcagtgctctacttgttcaagagaaaagtagctcacgctgtgctgtggccatggctgaggctggggcagtacgggcactcttggagctcctgaagagccatcgatgtgaggaatctgcagcaagattgcttgaagccctgataaacaattcaagggtccgtgaaacaaaagttgccaagtatgctattgctccactggcacagtacctgttagatcctcaatctaagaaccagtcagcaaagtttctggttactcttgcactaggtgacattttccagcatgaagctcttgcaagggcaagtgactctgtgtctgcctgccgtgctcttgtaagcctacttgaggaccagcctacggatgacatgacaacagttgctatttgtgcactgcaaagcttagtgatgcacagcaggacaaataggcgtgctgttgctgaagctgggggcattttggttgtgcaagaattgcttctttcaccaaatgtggatatttcaggacaggctgcccttctaatgaagtacctattttcaaatcatacgctgcaagaatacgtgtcgaatgagcttattcgatctcttactgctgccttagagagagagctgctctctacgtcaactatcaatgaagttattctgaagaccatatatgtgatattcagcaacttcaaaaaggttcggttttctgaggccgcaaccttgtgcataccacacctggtttgtgctttgaaggatggaaatgaggctgcccaagagagcgtgcttgacaccctttgcttgcttaaagaatcttggccgcaaatgaatgaagacatcgctaaagcccagtccctgatttcagctgaagccatacctgtactacaaatgcttatgaagacatgtcctcccagttttcacgagagagccgatagtttgcttcattgcttgcctggttgcttgacagtgaccatcattcgtgggaataatctgaaacagacaatggggggtacaaatgcattttgttgcctgcaaataggaaatggtcctccaaggcaaactaaggtggtaaaccacagcatgtgcccagcttggaacgagggtttcacttggttatttgacgtggcccctaaagggcagaagctctacatcatatgcaaaagcaaaaatacgtttggaaagtcaacccttggaagagtgaccatccagatcgacaaggttgtcaccgagggtgtatacagcgggttcttcagcctcagccacgacggaggtaaggacggctcaaggaccctagagatagagatcgtatggtccaataggccatccaacgactgtatgtagcgtacggatgatttacctgacgccaattcttgtactcttggcttccatgtaaatcagccccccccccataatcatccgaattcatttatttgtacgtagaaagttaagacacttagataactcgcgccatcattcaattattgaggtcatttccgggattgtggccctgctgctgtaaactgattttgcacccgggtatttttttttgtacaggtgaatttatttcatgtagttatagcttagtgtagattggtggtgagtacggacaagccctagtgacagtaacattgggtgtgatgtgtggcgtgatatttgctcccgtgggtgtgtttccggcacttgtagcctcaggatacacatggctgagcttggcactgttctatttgtcaggcatgtttgtttacctgtttggttctggctacgcaaaactttttttttacatccaccttgccatagccgtaccagcggtacgaggaatctgaggtacctttttcttccatctcggcagaagtttgatgtttggcgaaactgtctcaggttacatggtaataacaatactatttgcaaaaccaaacacgccacatacc

SEQ ID NO: 107986 - DNA, 6392 bp, Zea Mays
tggtatggatctaagcatggcaagtttgaacttgtcagaacctcgagactctagagaatcaacttcgcccgcaccatcaacatcatcttctatatcaagagaaaaaggtgacctggcagaagttgatgatcctgaaagtgcaatgtccactgttgctagattgttggaagacctccatgctagcatggtgtctccatcggggaaggaagctacaaccagaaggttacttgaactggctagagcgaaaaaggaggcaaggattttgataggtagccattctcaggcaatgccactactcatatctacccttagagttgggtcatctgcagcaaaagtaaatgctgcagctctacttagtgcactctgtaaggaagaggacttgcgtgtgagggtcctcttaggaggctgtataccacccttaatctctcttttgaagtctgagtctgctgaagcgaagaaggctgctgctgaagctatttatgaagtatcttctggtgggcttttggatgatcacataggcaggaaaatatttgtgactgaaggtgtggtgccaactctgtgggacttgcttaatcctaggtctcaccaagatagagtagttgagggctttgtgactggggctttaaggaatctttgtggggacaaagatggttattggaaggccacacttgaggctggaggtgttgaaattattactggtcttctttcatccaagaatactgcttcacagtcgaatgctgcttctctgttggcacggtttatctctgcttctggtgatagcattcccaaagttatagatgctggggctgttaaggctctccttcaccttctaaatcgagataatatcatttctgttcgtgaaagtgcggctgatgctttggaggccctgtcttccaagtccagtattgcaaagaaagctgtggtggatgcaggaggccttcctattctgattggagctgttgtagcgccctcaaaggaatgcatgcagggtgggacatgtcattctctgcaaagccatgctgtccgtgctttatcaaatatttgtgggggaacaacttctctgttgctttaccttggtgagctctgccaagcaccccggtcacctgttcccctcgctgatattcttggagcgcttgcttattccttgatggtttttgacggctctgatgataaatcatttgaccctgttgagattgaaattactttggttgcgctcctaaaatctcatgacagcaagcttgatcgtattcttgaggctttagcaagtctatatgggaatgattgtttctccgacaggcttgatcactcttattctaagaaggttcttgttgggctgattaccatagctcctgctgatgttcaagagcttcttgttcgtgccttaactagcttgtgttgcgatggtgttggaatatgggaggctcttggaaagagagaaggggttcagttgctaatatcattacttgggctttccagtgagcagcagcaggaatatgcagtttccttattggctatcttgagtgatgaagtagatgacagcaaatgggcaataacagctgctggaggtatccctccacttgtccagctactagaaacaggatctcaaaaagcaaaggaggatgcagcttacatcatgtggaacatgtgctctgacagtgatgatatcagggcatgtattgagagtgctggggctgttatggcgctaatttggcttctaaagagtggtagccctggtggacaggaggcatcagttaaagcactgaagaagttgatacgatcagcagattctgctatgatcaatcagttactagcattactgctcagtgactcattgagctcaaaggcccatgtcattactgttctcgggcatgtccttgtgctggcgcctcagagagctctaatccagagtggagctccagctaataaagttcttaggtcactggttcttgttcttgaatcatcaaatgaagaaacacaggagattgctgcaactgtgttggctgatattttcactatgcgtcaggatatttgtgatgtaatggcaattgatgaaattgtccagccatgcatgaagcttttgacaagtggaaaccaagtgattgccacacaatctgccagagctttaggagcactgtcatgttcagctagttccatgtcaaaaaacaaaatgtcttgcttaactgaaggtgatgtgcgacctcttatagagatggcaaagacatcatctattgatgttgctgaaacagcatttgctgcattagcaaatctcctatcagatgcacagattgctaaagaagcattagatgacaatattgtcttggctttgactagagtgctcaaggatgggagtttagaaggcaagattagtgcttcgcggtcacttcgtcagttggtcaaccagtttcccctcagtgaagttctcccagattacttgcagtgctgttttataattcatgcactgttggtatgtctatctggcatcagtttagaaaatgttacaagtttggaaccccttgatgttcttacattgatggctacaacaaaggagggttcgcattatagcccccctctatgcactggttttcttgaagttccagaaagcttagaacctttagttcgctgtattagtattgggcttccacctgttcaagataagtccattcaaatcctagcaagtctctgtcagggtcgaccttcgctacttggtgaatatttaaacagaagtcaaggatgcatcacttctcttgctactagagttatagagtcaaatgacatggaaataaggatcagcagtgcagtcatcctcatatctgcaatgagggacagcagagaacggtccatcgatgttctggaagcatcaaaagttctgaagaatctgatatctgcactcattgatatgctgaagcaacattcctctttaacatccctagacattgaaatctggaaaccttccacagaaaaaagttcgcttaattatgagcaggatgttttgagtgtgcctgaacttggaaaggtttctgaagaaactgttgcactatggttgctctcactgatttgttcttatcatggaaggagtaaatatactgttatggagctcaatggcgttgacacagtatctgatagacttgctagctatactgctaaccgacaggaacagtatgaagactcagaaaatatatggacttgtgcccttctgttggctactctgtttcaggattcagtggttgttcagtcttctgaaataacacgaaccataccttccttagcatccttgctaaaatctgatgatattatcaataaatactttgctgctcaggcactggctagccttgtttccactgggagcagaggtatacagcttgctattgcgaattctggtgcagttttgggtgctgtagcattgatcggacaggtagaatctgatatgccaaaccttgttacaatggctgaagaattcaagttgtcagacaatccatgtcaaataatgttgagaagcctttttgagcttgaagatgtctgcactggtgcttccgcccggaggtccatacccttgctagtggatctacttaaaccaatgccagataggccaggtgcacctctgattgctttgcaccttctgactcaactagcggaaggtagtgagtcaaataaaattgctatggcagaggctggagctttggatgccttgactaagtatctatctttaagccctcaagactcaactgaaactactataaccaatctgttggggattttatacactaatcctgatcttctttaccatgaatcatcacgtagcacttcaaatcagctggtagctgtcttgcgtttgggttcgagaagttctaggcttagtgcagtaaggacgttgcagaaactctttgattcagagaatataagggacaccgaagtggcccggcaagctattcaaccactacttgacatgcttgagtcaggaactgaaatagaacagcaggcagcacttggtgcgcttatcaagctttctgctgggaacatcgctaaggattctgctatgtttgatgtagaaggcaacacacttgaaaatctttacaaagttttatccttcagttcgtcattggagctgaagaaggatgctgctcaactctgctatattttatttgagaactcaactgtacgtgcatcaccaattgcaacagaatgtcttcaacccctgatatcactgatgacatcaggatctagtttggctattgaaccagcagtttgtgctctaaacagattactggatgaggactacaatgcagaaattgctgcaactagcgaagttattgatcttcttgtcagttttgttcctggtacaaactatcagttgtctgaagcatgtatcggtgctctcataaagttgggcaaggatcgtccaaactgcaagcttgacatggttaaagctggtatcattgagcatgcacttgatatgattcttgatgttcctgtatctgttagttcatccattgctgaattgcttcgcattttgacaaacaacagtggcattgctaaaagttctgctgctgcaaaaatggtggagccacttttcttgcttttacgtcgccctgatgttactatgtgggatcagcacagtgccttgcaagcactcgtaaatattttggagaaacctcagagtctagcagcattgaagttgactcccagtcaaataattgagcctttaatatcatttcttgagtctccctctcaagcaattcagcaacttggcactgaggtgctctcacatcttctagaacaggaacattttcaacaggatatcactacaaaaaatgcagttgttcctctggtgcagcttgctggtattggaatcttgagcttacaacaaactgcagttaaagcacttgaaaacatctcacagagttggcccaaggcagtagccgatgcaggtggaatttttgaactttcaaaggtaattgtccaggatgatcctcagccaagtcaagcattatgggaatctgcagcacttgtgttatgcaatgttctgcgttataattctgacaactatgtcaaagtctcaatggctgtacttgtgagattgctgaactccaccatggagagtaccgtcacgatagctctcagtgctctacttgttcaagagaaaagtagctcacgctgtgctgtggccatggctgaggctggggcagtacgggcactcttggagctcctgaagagccatcgatgtgaggaatctgcagcaagattgcttgaagccctgataaacaattcaagggtccgtgaaacaaaagttgccaagtatgctattgctccactggcacagtacctgttagatcctcaatctaagaaccagtcagcaaagtttctggttactcttgcactaggtgacattttccagcatgaagctcttgcaagggcaagtgactctgtgtctgcctgccgtgctcttgtaagcctacttgaggaccagcctacggatgacatgacaacagttgctatttgtgcactgcaaagcttagtgatgcacagcaggacaaataggcgtgctgttgctgaagctgggggcattttggttgtgcaagaattgcttctttcaccaaatgtggatatttcaggacaggctgcccttctaatgaagtacctattttcaaatcatacgctgcaagaatacgtgtcgaatgagcttattcgatctcttactgaccatatatgtgatattcagcaacttcaaaaaggttcggttttctgaggccgcaaccttgtgcataccacacctggtttgtgctttgaaggatggaaatgaggctgcccaagagagcgtgcttgacaccctttgcttgcttaaagaatcttggccgcaaatgaatgaagacatcgctaaagcccagtccctgatttcagctgaagccatacctgtactacaaatgcttatgaagacatgtcctcccagttttcacgagagagccgatagtttgcttcattgcttgcctggttgcttgacagtgaccatcattcgtgggaataatctgaaacagacaatggggggtacaaatgcattttgttgcctgcaaataggaaatggtcctccaaggcaaactaaggtggtaaaccacagcatgtgcccagcttggaacgagggtttcacttggttatttgacgtggcccctaaagggcagaagctctacatcatatgcaaaagcaaaaatacgtttggaaagtcaacccttggaagagtgaccatccagatcgacaaggttgtcaccgagggtgtatacagcgggttcttcagcctcagccacgacggaggtaaggacggctcaaggaccctagagatagagatcgtatggtccaataggccatccaacgactgtatgtagcgtacggatgatttacctgac

SEQ ID NO: 107987 - DNA, 607 bp, Zea Mays
tggggtttcgctgacgctgagctccacccgtctgagttttgacgggccgcgcgacaccatcctcctcttcttgccgcgccgtcgtcctcgcggccgaccaccgccgtcccagcctcctccagcgctcccgccgccgaccgtcacggcttcactgccctcccttagctcgcccgacgtgcttcctctgccccaattgcgcccaccagccgcatccgcctcccgcggccggcggcgcgccgctgcctcgtcaccccagccacccaccgctgggccgccctcccgccattgcaggtctaggggagagatcagcctccgggacccaaagtccccacccctaacccggcggcaggggatcgctctttgtcttcaacggactttctgccagcgcccagcggaatattggatgcggcggccgagatctcatcgcctgggggctctgtcggtagggtgaggtggaggagggcatgattttttggccgtttctgtgatcctgacagattcggtgggtgtaggtgtcactggcacaggaattctatagctagcgaaggtatatttgtttcgtgaaggtgtctgtcggtgtcctcatctaatgaaatttacaaatctt

SEQ ID NO: 107988 - DNA, 579 bp, Zea Mays
atggctcttttgcctcttgccttagtaaactacccaggagtccgctcctcccaggcacaagcaaagcagccgctcgtggagcttcccggtgaccctcccgacagtgtgctctctgctagtggctccagctccttcaccctctccttcactccatgggataattcaaagaacctgcataaaatagatgttaccgtcaactcttatttcgccgttcttgatggtaaaaaggtgtacaatcggggcagaacaataaatttggttgtgaatccagaacactatacacttattgatttagagaaagatgtggattcatatttcaaatggggtagctgccaaaagccaattttctgggttgttgaaaagggtgacaaatggcaatgtaagttgacttcagatgctcagcttagtgacctgcccaggtgttacgacaagaaggatggtgtccctctctccggcaagagcaagtccatgtgttaccacaaggaggatggcgtccctgtttccaaccagtccgggtgtgacaacaagaaggatggcatttatctcacctggaggaatcaaccgcaggcttatcattga

SEQ ID NO: 107989 - DNA, 2271 bp, Zea Mays
gcccaaaattacggcccctctctttctctctctgactacctccgtatgaggcagcttgtgctcgttcgagactgagacaccccaacacgcctccctcagcgcagatctcgccgccgccgagatgctccgccgcggcgtgcttcttctcgcggccatcctcatcgccgtcgcacactcgcccctcgcgtacgcctcggaggccgagcacaagtataaaacagaagaacctgttaagctatgggtaaacaaggttgggccttacaataaccctcaagaaacttacaactattacagtctcccgttttgtcaaccatctgaaaaccctgcacataaatggggtggtctcggagaggtccttggtggaaatgagctgattgatagtcagatcgatataaagttcataaaaaatgtggacaagggggccatttgcacaattgaacttgatgttcaaaaggttcagcaatttgctaatgccattgaaaactcatattggtttgagcttttcatagatgatctgccattgtggggttttgttggggagactgacaaaaacaatgagaaaaagcactacctttacactcacaagaacattgttgttaaatacaatggtaacaggataattcatgtgaatctaacacaagagtcacctaagcttcttgaagctggcaaaaagttggatatgacttattcagtgaagtgggtgcaaacaaatgtggcatttgcacggcgctttgaggtttacttagactacccgttctttgaacaccagattcattggttctccatcttcaattcattcatgatggttattttcttgactggtttagtgtcaatgatattgatgaggacactaagaaatgattatgcaaaatatgctcgtgaagatgatgatctggaatcacttgagcgagatgttaatgaagaatccgggtggaagcttgtccatggtgatgtgttccggcctcctcgtggccaggtgtttctttctgccctagttggtattggcactcagctggcggctcttatcctgcttgtgattgtgttggccattgttgtcatgttatatgttgggcgaggagctatcatcacaaccttcattgtgtgctacgctcttacatctttcatctctggatatgttagtggtggtctctattcaaggaatggtggaaaaaactggataaaggctatgatccttacagcatcactttttccattcttgtgtttctcgattggattgttgttaaacactattgctatcttctaccgatcattagcagctataccatttggcacaatggttgtcatgtttattctttgggctttcatctccttcccgttggttctattggggactgtagttggtagaaattggagtggtgctcccaacaacccgtgtcgtgtgaaaacgatcccgcgcccaattcctgaaaagaagtggtaccttacaccttctgttatttcactgatgggtggacttctccccttcggcagcatcttcattgagatgtacttcgtattcacttccttctggaactacaaggtgtactacgtctatggtttcatgttgctggtgtttgtcatcctcataatagtcaccatatgtgtcactattgtgggtacttatttcttgttgaatgctgagaactatcattggcaatggacatcattcttctctgctgcttctaccgccttgtatgtgtatctatactctatatactattatcatgtgaagacaaagatgtcaggatttttccagacaagcttctactttggttacaccttgatgttctgtcttggattgggaatactttgcggtgctgttggatatttgggctccaccctatttgtgaggaggatctacagaaatatcaaatgcgactaaacttggtctaggctgctagcatgtcttgtcacaatatggtgcagagtaataccttgagcttctgattgacttcggaaattacacaggaggttgctctccctttcgttactcttttcatcttttttggcctatcttcctggacgtgtggaactgcccatgataaatgtatacctagttggagaattagtcagagtactggaaagtacatgtaggtttttttggtgcggcctctctcggtcaattgtaggagtacattgatgaatattactgcagtgcagattccagtgggctagattcgcccctcttatgactgtttctaactacgtaccctctccgtcccaaattagaattcgttttagggaattaatgaattcatacaatagttgatc

SEQ ID NO: 107990 - DNA, 1137 bp, Zea Mays
atggcactgaggccatttcaagcccactttctggcacaccctgttatgctccttatgttggttggccacgcataccagcgtcacggggagttccaaggcctcgaactccgtcaccagctgctccatggtcagcttggcggggcgtctcacgagagtcacgagccccaccaccacgtatgtcggttaagtatgtcgtcgtgcgccatcagccacgacaccaaaggctctaagttgaaggggtgcttgcccgtgagccggacaagcgccgggtggcgccgcacccacgcgtcagatgtggcctcgccacgcgagtcgcagacggctggctccacctcgaggcacaggaggtacgatgatcgccagtccggcgggaatgttgtatttttccatggaatcaaaatcggggcgggtgcgacgcttgcctcctgggccaccgaagcagaacatgttgaagctcttgggaggcacaatggtcgaccacgggtggggggggcaggaaaaagaatagccaaagtgccatccaggcagcatgtggagggtgtagaacgagatagtaagaaggaagacaccattttccacagagagacaaagcacggggacgacagttacagacggatccacaatgtcaggggagagggaaattggagagttggaagcagtgggaccgctgtacctcgggtgccatcgcggaaggccttggagacatgcttgggtgtccagcataggccctcatggcggtcgtcctcgtcaagccccaacaccagccgcccgatggccagtggcgtcctgtcgcagctgtaccaccagggcgtggaggtcgacgcgctggtgcgggtcgagacggacaggatgcgcgcgacgctccaggaggctcggcggcggcacgcgcggggtgtggtcgcggccgtgggccgcgcggcggatgctcggctccgcgccgcggaggcagagctggagcgcgcccgccgccgcggcgcgtatctggaggtgcggctccggcatctggccggggagggccaggcgtggctgggcgttgccaggagccacgaggccgtcgccgctggcctccgcgccacgctcaacaaagtgctccaacatcccgccggcgaatataaatgcttcgtggcaaaaaactaa

SEQ ID NO: 107991 - DNA, 1088 bp, Zea Mays
tcctcgtataaaaccaaccatgtgacccctcccctcccctcccctgcccgggtgccggctccctgcctccgttcttctgttgtccacgaaaggctcgcactcgcgccggtcgttcgctgcagcacacaacgcaatcgccactgtcgtcgctcgtcagtccaccgactccaccgccaccggcagaaccagaacacatcgagcggcatcggagcgcgaatctgtgcggcggcgtcgcctctgccgggcgggtgggcggcatggggaggtccccgtgctgcgagcaggcgcacaccaacaagggcgcgtggaccaaggaggaggaccagcgcctcatcgcctacatcaaggcccacggcgagggctgctggaggtcgctaccaaaagccgcagggctgctgcggtgcgggaagagctgccggctgcggtggatcaactacctgcgcccggacctcaagcgcggcaacttcagcgaggaggaggacgagctgatcatcaagttccacgagctgttcggcaacaagtggtcgctcatcgccgggaggctgccgggcaggacggacaacgagataaaaaactactggaacacgcacatcaagcggaagctgctcgcccgcggcatggacccgcagacccaccgcccgctggccgcagcgccagcaggagggccgcagcagcagcattgccattaccagatggagccacagaagcgggcggcggcggcggaccattccgaggccgccgttgccaccaactcgccggaggccagcagccgcagcagcgacgacgacgaggcgccggcgctggcgccaccgccgcggcggcggcagcgccacctcgacatcgacctgaacctgtccatcagcctcgcggcctaccagccgccggagggaaccggcagcgccatcgagccactgacggcgacgacgaagcgggaggagggaacggcggcggcggtgtgcctctgcctcaacagcctcgggtaccgggcaggcgtcgagtgcgcctgtggcagcggcggctcgccacatggagtaggttcccatctttccttccttcaagttaactaggtggatgcccgtgcgttgcca

SEQ ID NO: 107992 - DNA, 1490 bp, Zea Mays
tcctcgtataaaaccaaccatgtgacccctcccctcccctcccctgcccgggtgccggctccctgcctccgttcttctgttgtccacgaaaggctcgcactcgcgccggtcgttcgctgcagcacacaacgcaatcgccactgtcgtcgctcgtcagtccaccgactccaccgccaccggcagaaccagaacacatcgagcggcatcggagcgcgaatctgtgcggcggcgtcgcctctgccgggcgggtgggcggcatggggaggtccccgtgctgcgagcaggcgcacaccaacaagggcgcgtggaccaaggaggaggaccagcgcctcatcgcctacatcaaggcccacggcgagggctgctggaggtcgctaccaaaagccgcagggctgctgcggtgcgggaagagctgccggctgcggtggatcaactacctgcgcccggacctcaagcgcggcaacttcagcgaggaggaggacgagctgatcatcaagttccacgagctgttcggcaacaagtgagctgccctgccatgctgcactgccgacgaactgggagcatttcaagcacccccgtaccgtacgtgtccctgatctgacccatccgtgcgtgtgtgtacatatacacaggtggtcgctcatcgccgggaggctgccgggcaggacggacaacgagataaaaaactactggaacacgcacatcaagcggaagctgctcgcccgcggcatggacccgcagacccaccgcccgctggccgcagcgccagcaggagggccgcagcagcagcattgccattaccagatggagccacagaagcgggcggcggcggcggaccattccgaggccgccgttgccaccaactcgccggaggccagcagccgcagcagcgacgacgacgaggcgccggcgctggcgccaccgccgcggcggcggcagcgccacctcgacatcgacctgaacctgtccatcagcctcgcggcctaccagccgccggagggaaccggcagcgccatcgagccactgacggcgacgacgaagcgggaggagggaacggcggcggcggtgtgcctctgcctcaacagcctcgggtaccgggcaggcgtcgagtgcgcctgtggcagcggcggctcgccgtcgtcccgttcgcagtgggctcgggattttttacaggcggcgccctgctacagaggctagcattgatcagtgagacagtgacatgatcgggagggcttttactgaggggaggggcagagcagatatagttaactagtagtactattagtaaaaaggcaagcgtgcttagtaggctttagcagctcatgcattgcatgcatcatgggttatttacgaggagatgtgctctttgtcttttgtcgattctggctctggcctcggacacagactgatcgatcatgccttggcgacatgacatgcatactgtagagtggtttagtcgcagcatgcgtgcagttcatgacttttgtgct

SEQ ID NO: 107993 - DNA, 1367 bp, Zea Mays
tcctcgtataaaaccaaccatgtgacccctcccctcccctcccctgcccgggtgccggctccctgcctccgttcttctgttgtccacgaaaggctcgcactcgcgccggtcgttcgctgcagcacacaacgcaatcgccactgtcgtcgctcgtcagtccaccgactccaccgccaccggcagaaccagaacacatcgagcggcatcggagcgcgaatctgtgcggcggcgtcgcctctgccgggcgggtgggcggcatggggaggtccccgtgctgcgagcaggcgcacaccaacaagggcgcgtggaccaaggaggaggaccagcgcctcatcgcctacatcaaggcccacggcgagggctgctggaggtcgctaccaaaagccgcagggctgctgcggtgcgggaagagctgccggctgcggtggatcaactacctgcgcccggacctcaagcgcggcaacttcagcgaggaggaggacgagctgatcatcaagttccacgagctgttcggcaacaagtggtcgctcatcgccgggaggctgccgggcaggacggacaacgagataaaaaactactggaacacgcacatcaagcggaagctgctcgcccgcggcatggacccgcagacccaccgcccgctggccgcagcgccagcaggagggccgcagcagcagcattgccattaccagatggagccacagaagcgggcggcggcggcggaccattccgaggccgccgttgccaccaactcgccggaggccagcagccgcagcagcgacgacgacgaggcgccggcgctggcgccaccgccgcggcggcggcagcgccacctcgacatcgacctgaacctgtccatcagcctcgcggcctaccagccgccggagggaaccggcagcgccatcgagccactgacggcgacgacgaagcgggaggagggaacggcggcggcggtgtgcctctgcctcaacagcctcgggtaccgggcaggcgtcgagtgcgcctgtggcagcggcggctcgccgtcgtcccgttcgcagtgggctcgggattttttacaggcggcgccctgctacagaggctagcattgatcagtgagacagtgacatgatcgggagggcttttactgaggggaggggcagagcagatatagttaactagtagtactattagtaaaaaggcaagcgtgcttagtaggctttagcagctcatgcattgcatgcatcatgggttatttacgaggagatgtgctctttgtcttttgtcgattctggctctggcctcggacacagactgatcgatcatgccttggcgacatgacatgcatactgtagagtggtttagtcgcagcatgcgtgcagttcatg

SEQ ID NO: 107994 - DNA, 297 bp, Zea Mays
acaccgtgtaccggcggtgccggagccttgaccgctccatgggaccgctagagatccgcatggtgtccctcgacgccgcgattacaacatcaccatgttcggagcctacgcgcaagaggagttgtccctgtggcatcatctctggctccgccactctgattttataaattattccttaatttgttgaaagaaagatgatgataagcctttgttatatagactagaattggtcagtcctttgctgatagtagttcgtctgttgattcaggtgtatttttcgtatttgtatatattatg

SEQ ID NO: 107995 - DNA, 101 bp, Zea Mays
gttatgtcaataacctcgaagtatgcatgctttttgtccgaagtttacgatataattattgccagtcttatgcatgtttgtccatacacttatgatacaat

SEQ ID NO: 107996 - DNA, 1625 bp, Zea Mays
ccatagtggatggcgtgaatggcctgaggatccaagtggatggccaagagatggagggtcaggagttggtggagctagtgggtcaagggaaggaaaagctggtggttttggaagcgggggagttggagggccttcaccggtccggaagccacaaagaactagttgggttccccctcctaaagaaccagttgattgggttgagataataccaactggagatgggtcattgaaggcaagtaaagaaagtgttgggcaatatatgtcatatgaaatagcctggattggtgaagaggatggtaaggagaaacattataagttgcctgaaggagatactcatacgaaacacacacactccgtgttccataggaatgcggcaagtgttgttggggatatgatgtactatgctcgaatccaggtgattagtcaagctatgttgggtagtgaagggcgacgtccagggagtaagaacgaggtgacacagtatggactcgatatgactgagcaacaatatcttgagcattcgattccatggatagccaccatgatgctgcttggcgtgcgttatgccgttactgggcttcggctgaattcaaggcaaagtctgtgcgacacagttccaatcgtggaactgagtcgtatcacatgtttggatgtgatgattactttcgtttggcaaaacgaatggaagctaacactggtgcaatgcctagtgatgttcaaatataccatagggggcacaggggaccagatcctgcaaatccgtatgtgttgtgcagccaaaaggcaatagatcatgtggtgagtgttttgaaatgtttggtaggttctgtttatatggatttttgtatgtaagattgcattgttcttttgtatgaggctgcatatggcgaggcgatgtctggtcagcacggaccagactatgactggaggacctcacctattgatcctcaggttgtgtatgcaagtggtggaaaagctcatggaaggtacacaatgtttgctaacgtcatcgactcgagccaggtgagggttcatcatggaggttcgtcaaggtctgcttctcgtagctcccgttgctccactcaatatctagcagaagtggagcaactacgagaagaacttaggcgacatcaggattacttgaagcaacaagctgcgcaacatgaatattatgctacacagattcaacaacaacaaacactcatacaacaactagctcaggcccaagggatacatatcccggtgcccccactactaccaccacctcccgttcattatccttggtcttcacctccacctacacctacatctccacctaccgaacatcagaccctgccagctaccttgccgacgcatgaacgagaagacggggtagactttgtcgaaaccctcttcgctagtggaggtatcgacaatcactcgtcactataccccgatggtgatcggtgatcgtgagcttccatgttatgtgttctgatacttgagacttttattatgactatgtatgagatattgcctcttattagtactggatgagatgtgtcttattatgactatggatgagacttttgtgatgtaattgatgaggctatggatttaaatattgttatgtgattgtgtgtgag

SEQ ID NO: 107997 - DNA, 567 bp, Zea Mays
atggcgcgtgtgttgagggcgtggggaggaggtgcacggctgccatcaacactctcctacacccggatctgcgcgtctgccctggacttccatggatggttgtccgcgcccaccatcggctcaccatggatcacgccccagccgcaaatttacagacagaagcttcagcagtttgtagctgatggagagctgagcaagaaggaagtggaagctctgatggcattccaagtgcatctttgcatccctcaagaaactgtggacgctgcacatactgagatttgtgggcaactattcgaaaaggttcttgacagctcacaaaagctattgcctccagatgagctccgtaaacggtttgagcaagaagttgctttttctctctttggtaagaatctgcaattaaatttgacatccattggttatatatttttccttgttcagttaccacacatgctgccatctgaaaaggcattttcagctgctgtatctgctcttggcatctacaacaaagacgggatagtagtttatgatggaaaggggctgttcagtgctgctcgtgtttggtggtaa

SEQ ID NO: 107998 - DNA, 386 bp, Zea Mays
cacccactggctcgacttcgccaccggcgacgccaccgtcgagaagaaactactcacggactagctaattaataacgtaccgccttgctagccctcaccctcactgatgagtgccataagcattactacaaagacaggaccacgcaacaacaatggtgccaataaaggctttgaagcatgcttcgccacagagcgcctgctttttcttttaaaaccagcattttcgtttcagcttatatatatatttatagaacgcatgatctgtatccaatacaagcttcagaacccctttatgttttcggaaaaggtcgtccaaaactccggtccagattatgttgctatttgaaaactgaggcaatatatagctttatatcattatatgtgag

SEQ ID NO: 107999 - DNA, 338 bp, Zea Mays
ctacaacggttcacacttcacagcccacatcaacaaatggccaggaaagaagtgacgctcctgctcttcctcgtgctgcttgtcgcagccgtcgaggcacagctgcacgacgagcctacggcggccgctgtcgggcggcggcgtggcgcgaaggccgccacggcgccgacgcacctccacttcttcttccacgacacggtgagcggcaagtcgccgacggggggtacgcgtggtgagcccgccgggcgtcgtcgccgtcgcccgtgttcgggatggtgaacgtgatggacgatccgctgacggaagggccggaacaagggtcgtcctccgtcgggcgg

SEQ ID NO: 108000 - DNA, 869 bp, Zea Mays
taaatagaatctgccagaaacaatttgtaattccatatccagatccagtttctcatgcatatctagtttgtgacagaaacaaaattgccttagaaatcatgagagtatctagaccaacaaacataaacagaaactcatgagagtaatttgatacagatgtggctctctaaaatataaataagatataaaaacgtgattgactctctaaaatataaaaagacttttgaagattgaaaatatatagatagtggtatttttatggaaaaatgactctccaaatgataatttagattgtgaaattttgaaacgactcttgggactacttcgtatcaatcgtgtgcaataactggtttgacatctactttacatgggtgtatatatctatatatgtaatcaatcaatctatatatgtaatcaatcaaagaagaaattaaagaagcataaaaaaactaattaacaaaccaaaacccaacccgtcgctgatctccacgcccaggtggccgctctcgatggcgatcctctcggcgctgtcggcggggaggcacttgtgcagcgagtcgaacaccacggagaagtaccggagactggccgtgaaaggtggaagcagcagccgcgccagccgcgccttggttcgccgcagctcgtcgtggctcgtgccggagccggtgattcgcagggaaactggctcgtcgccgtcgccgtcgtgttatgcgctgctcgttctcgcgctcgtgctcgcggcggcggccgacagggactagatcaaggagggccactggaagtcgtacgacacgtcgaggtcgaccacgtggaggtgccggcgatggtggccgccgctctggaacgcctccgcgatggcgactgcgagt

SEQ ID NO: 108001 - DNA, 111 bp, Zea Mays
atatcagatgtttttataactgacacgttatctctatgtgtaccccataaacacagcataatttatacgtttcgagctagtttggaaactccgttttcccacgagattttc

SEQ ID NO: 108002 - DNA, 618 bp, Zea Mays
atggccgagcgcgcctggatcttctccctcccaggcgtttgatagatcggccgcttgttcctctccgctgctcgccggttccctttccccaagctccatggctgctacacctccccagccgagcggctcttccccacggcgctccctccctgcttctccctccctctcgcgtcttctcctcgccggcgtgctcctgctccagccatggcgcgcgcccctgcttccatggatgccgcacccgctgcttgctccccttgcttctccagtccgagctccttcccctcgacttcccatggccggcttcgtgctcacccagcccctgctctgtttcttccacggccgagtctctttttcctttgtcgtcgccgttttcctgtgccgcggcctcgcccagccgttcctcctctttcctcttgctcgggttcagtccagttcgcccctgcgcttgccatggtggccgtcgcgcccatgccggctggagctcgctcggctgcggtctcgtcccggctccctgctgtggctcgccgcgtccctgtgtttgaattggtcgaccttcactcttctccccatggtcggacaacctcgtcgatgctgctatttggtggtcgcctcttggcc

SEQ ID NO: 108003 - DNA, 2559 bp, Zea Mays
cccgctaaacctattcgacccgtcaacgaacagatccaccctcaccagccgcctgacgttcgagccgcaccagccctaaacccttccacctccagccgccataactgtaatccctttcaccatcagctgcccctccgttcgagccgtcgacgccctaatcctatcaccttctggccgcccaaatccctttcggctcctgccgccctctttttgaggcgcatgccatggagtcgttggtcttcgagtgccaggccatggcggcacagaccatggagtcacaggctatgatggcgcaggtcttagtctttaggccatggagtcgcaatcaggcgttcaagatgctctgagacttgagtcaggttcgtccaacatgcatgatggattcagtacaccaaaaaaatgaatatccttctgacatcgctgtccatctgtgtacttgattgtgatgataaattgaagccagtaattggaacgtcatttggttctctagaggaagtggaagaattgtacaagatatatgctcttgagaattttattggctgcaacattccagaacatatcgaaatccatccaccatccgatgttcactcccagtaaaaacatcaagaaatccaaagaactatttaaatcgtgtaaagggaaaaatagtaaagtgagacgaaggtagtcaaacagtcatattgctaaagtattacaggtaggagaaagaatccaacagcatgttgaggagcttctacagtgttattggcatgggaattttgttagcttctatagtgctattggtatgtcgagtagcttcaaccaggtatggactttttaactctagcgagagtttttagttgtcacacactaatggctgaattggggaaagtagtaactgaaaatgagagtaaccagcatcaacaatagtttgctttcaaaattcagaaggatagttccttgttttgtacaacattttttaagtataagagttttaaaatagaacatagcagcatgaaaggcttattttttccagaacatagtttaatagacttaataagtttaaacgacccataattctggtgctttattctatcttttatctgttgggtcattaaaatctatagactttagcgtcctatcttgtcatgtattagtgacgtatggaatcatttggagtcaatgggaagattaatagccaaaaatgttagaagatcatgcttgtttagacctctatgttgtacggaccagcaggtttgaaatgatgttgtcactgttccttgttctcaactgttgtattaagcaagtactaccatggggatgtggggtgggactagtccaaatgttgtagttactagttactagagttagcaagcagaggaattggtaatggtgatgcgttctcaacttcttatgtgtgcttgtcgttcgatcgtccatcagtttttagatgtacaaaacatatcaccgcattgacgtccatggctgcgagtacagtacagtggtcggccggttccaagtttacaaacagcaagcagtactagtgagtaggtgacattagcagtacaaacccttaaacctgcaactaagcacgacagagagtaggggcggagctcaggcccgttcatctcggttaggtggaagaaatggtcggcatatgtgtttctttcatgctttactgcatcctgcatttttattttgttgcactggcacgaccgcctggcactggcaccccctcgtactgatctgatgttgtaatagcaattagcatgcgttcagattagttaagatatggagctgagctcgctgccaacaaggtcaatactagcatccatttttttgcaaactaggacacaatcaggtgaaaagcttgagctgcattctttgtctatttaactttactagttctgtttgtttcatggtatgctgttatttacaagtaagcccaggagattcttttattgatgttaaacaattacttttggatgctcctgaaacatgcttctatgcatgatacaatttgatattgcatactaaagatgggttagctcatcagttagaagactacaaggaaatatctgaaatagcagatataacttctagtggatgttcactggagatggttgctagtatgtaacaacttctagtttcttctctattgtcatatatacttatatagtgcttattttctggagctaaagtaaaagttctttcagcaacatacaatgagaggtctattaggtcacatctccgacgtgtgaaggggctactatctctgtctagtctttatgtttccctatcaacgtccttagctctgcttcaggagtccgctcaaggaaaatttgcaggacttatatatgtgttctctgttcactgatgcggctggagcgtcatgtcaactgctcaccctccccctaacaaattaaactagactgatgagtggagcttcatgttgggatgatccatgcaccttttaagttttggaacgtcgtactcaaatgtagcttgtgttagttgaacctatcgtactttcttttggaattaaattatatgatatttaaacatgtttgatgtttaata

SEQ ID NO: 108004 - DNA, 818 bp, Zea Mays
gaccgggctgttgagttccaagcacaaggcgacacagacacaggcacacagccatggacgtttccgtcaatcgggcatcgaccgtcgacagagagagatcctcgtaaccatcgctgcgaggcttggccgcttgcgctgccggtcattaggcagggacggggggaggagcgaggggggcgctgtcaaatcgaccatgcgccatggcgccgctgccgcgggccgtctagatccaccataccaccgcagccaccatgtcgtggtcgtcgctgacgagcggcgacacgtacaagtcgccagcgttcatcgcgctggtgagcgcgctgtgcgtggccgtgctgctgctgctgcaccactgcgtcctcgtcgcctgctgccacggcggcgacaggcgacgccggaggcagcagcaccaccaccggcgcgtcgtcggcgtggtcagcgccagcacggccgacacgcggcggcaacggcagccggaagaggaagaggaggcgagcgtcagcgtggaggtgagcgcgacgtcgcggacgcacctggtgggcgcagcggtggtgtgccggtaccgcaaggaggaggcctggaacgagtcgacgtgcccggtgtgcctggccgacttcgacgacggcgaggtcgtgcgggtgctccccgagtgcatgcactacttccacgccgactgcatcgacacgtggctgcgcgggagcaccagctgcccgatgtgccgcgccgagaccacgcccacgcccacgcctagcccggcctccgtgcgccaccacctcgagctctccgtctccctcgaggagatcctcgtcgcgacgtga

SEQ ID NO: 108005 - DNA, 3749 bp, Zea Mays
cttcaaaaatcaagttgattatgcggataccgcaaacactgcaaattcggttgttccctacccttctagagtaatctctccacacacacactcacacgctgctgccggctgccctcctcccgccccactcgtcccctccgaaccaagtccgatccatccatccccaaatttctcctctcagcgcgtggggcagtggcggcggcagcgtgggcgcgcggaccgctacgggcacgggagcagcggtggctgcgcaggcagctgtcagcatgcggcatggtgactacgggagcccaggcggcgccggtgcggctgcagccggcggcgggcgaccgtgaggcggctgcgggagcggtgaagtccggtggcgcctgctttgttttgtgttcctatttttgatttgcgaaaggatccaagagagagaggagggggagaaggcgagaatccaagacaagagcgagcatggagtttgctacgggtgccatgggtaccctcctccccaagctgggcatgctgctgcaggaagaactccacctgaagaataatgtgaaggaggggatcaagagcctcactgccgagcttgagagcatgcaagctgcacttgtgaaggtgtctgacgtgccattagaccagcttgacccaaacgtcaagatttgggctaatgaagtcagggggctgtcctatgatattgaggacagactcgactccttcaaggtgcgcatggagggtcttgattcaaccaagcgcaaaaccatcatgggattcatccaacaaacccgtggcttggtcaccaagttcaagattcgccatgtaatatttgatgacattaaagacttcgggagccaagtaaaggaggtgaaggagcggtatgacaggtacaaggtgcatgatgttgtagctaatcctatcgcaaccacagttgaccctcgtctcttggctatgtataacaaggtttccgaccttgttggcattgacgaagaagctaaggagctaatgaataatttgtttgaagatggtgacgagccagcgaaaaagatcaagacagtctctgttgttggatttggaggactcggcaagactactcttgttaaagcagtctatgacaaggttaagaaggagtttgattgcagtgcttttgtatcaataggtcagaaatgtgatctcaagaaagttttcaaggacgttctttatgatcttgacaagcaaaatcatgaaaatatcattgcatcagaaatggatgaaaaacaactcattgataagctacaggaattccttgcagacaagaggtacttggttgttattgatgacatatgggatatatcaacatggaagctgattagatgtgctttggtggaaagtaaccctggaagtagaataatcataactactcgcatttgtgaagttgccaaaaaggttggtggtgtttacaacaagaaaccactctctcttgatgactccaagacattattctatactagagtatttgctggtgaaagcatgagtcttgataacatatctggtgaagtgtgcaacaaaatcctaagaaaatgtggtggtgtgccattgtccatcattacgatagctagtctgcttgttggtaaacagagggaggactggtctaaggtgtatgattatattggttttgggcatgaagataacgaggttattgggaacatgagaaagatattagctttcagctattacaatctacctccttatctaaagacatgcttattgcacctaagcatatttccagaagatcacaagattgagaaaaattcattgatatggaggtggatagctgaaggttttgttattggcagagaagaactagggttatttgaggttggagagagctatttcaatgagctcataaatagaagcatgatccggtggatagagctctctagtagaagcaagattcgagatggttgtggtattcatgatatggtgcttgatcttatccgcactttgtcaggtgaagtaaacttggtcacggtatcagatgtggagcagcagtgtaccacatcatcatcatattcaccagtcagaagcattagcgctcgaagattagccttccacaaaaaaagaagcattgaacacaaccctggcacagaaataggacaggtgagatcattcaatgctttcaactgctctggtagtaggatgccccgacttttaagcttcagggtcttacgtgtactagctctggagaactgtaatttctcagcaggaaactgttgccttggaaatattggcaaattgcatcagctgaggtacctagggctagtggagacatccattcgtgacgacttgctgcctggagaaacaggacgcctcaagtttctgcagacactagatgtaagacgaagtggcataaaaatattgccagcgtctgttggtgagctaaggaaactgatgtgcctgcgtgctaccgagggcacaaggatgatggccgagattgggaagctggcgtcactggaagagcttgaggtacactctgtggacaagtcgccaaacttcgccacggggctggggcagctaaccaaggtgagggtgcttgagatccatttcgacgaaatggacgagagcacagagaaggctctcatggagtccctgcgcaacctgcggaaaatccagagtctgcagatatggtccaagaaggagaggacaattgaccttggcggcttgttggaagactggacgccaaccccttcaaatctccgtcaactgatgctgcgtggcatccatttgcccaggcgtccgtcatggattgatccctcatgtgtcccgctcctctcgtacttgtcgctcacggtccaggccgtgcaagtgcaggatctagaaatcctcgggaggctgccgttgctcagctacctctacatctggagtgagggcatcaactgcttatcctatactgctaccagcagagacgagtttcagaatctgagatatctggacacaaacctggagatcatgtgtggacagcagggagcactgcctatggttgagaagttgacatgccgtgccagcatggggaagtatgttgccttcgccaggagcagcatgcctttcgacgatggcagcgtggtgaatcctgctgctgttgctgaggcagaattgccagtaattctacctttggacattggctggcccgtgaacatgccttgcctccggggcatcacctatttgctggactaccaggactgcagtgccaaggagtgggctcatgtggagacattgctcatgcacgtgagaaaaatccaccccaactgtccacccttccgaatcaaaaagaactgcagagacaaggagattactatgatcgacgcaatcatctaccttgaagatgtcaaggatgtgttcaaggacaacccctccaaatactcggagtttcttgatctcttgcaagattataggagagacagaatcaaaatcaaagatttgatcatccgtctcaagaccctatttactggacatgatcctaatctcatccttgacttcagcgtcttcctgcccggggagtgggccatcactctcggggacctgtagaagaagccccttcatgatcgattctagctaggccatcacccatttagttaataagaccaagtcgggatgacggcgatggatctgatcatgttacccgcacaaatggcgaagaagaggacgatactcatgaagcgtaatatgcaatccctgtcaccagtggatgatctttgcttcagttaattcatcatccaaagaaaaag

SEQ ID NO: 108006 - DNA, 558 bp, Zea Mays
atggacagggagctgctgctcgcctgcagcaagggcgccgagttggggaggctgagcgcagggaggaagaagctactgctgggagcaccttcgctaggggagctcggccatggctgccctgcgcaagggaggccagggaggagggcgaaaaatctgggcgtccatagcaggcgagatggagctcgcgcccatggaagaagaagggtagggggcgtcggctgccctgcgcgcgacggggaagaaaccagcagagagctccgcggcgagcagcagctaaaggaaatggaggtccgagtgggagggattgctggcgagctcctagcaatggggactgctggcggccgcagagcaaaagggggcgctgggagagggagagcagaggcgccacaccatggacgccggcgagctcgatgctcgagctcggaccagacgagatgtcgcgccctggctagagcagaggtggcgttggggaagaaggcgatgctgccctgcgcgctggagcttggggaaggctgggcggccatgggaggggaggaagctcccaacgcgcagccgtga

SEQ ID NO: 108007 - DNA, 1469 bp, Zea Mays
ctttctccctcctccctgctcgttcctccctgacgcgcgctctcaccggccaaacttcctgcgccgcgacttctcagcttgccgcgttttgctcggcccctccatgccgcgcgcccaggtgcctgctcgtgcccagcttcttccccagccagcgcactcctgctccctcgccatggcacgctcgagctcttccctgcgttgcgcgcgagctcggcgcctaacttccctgcgcgcagctcaccgagctcggcctctgttcctcctgcgccctgctccctgcgccggagttccctccctgctcctgcccagcgtcgcgcccctcccttctccttgctcctgttcggagctccagctcggtgctcctcagcttgattttcctctgcgtcgcgcgccgggcttgctccctgctcgctccgcgtgtctggctagcctctgctcggaccgcgcccagcgccatgcgcgtcttcctccctggtgccggagcttcctctgcgcgccgagcctcttccagccatgtgcctagtccccagctccttccctgcggcgccctgctccctttgcttgtctccatggttgcgcagcagaccgtgatgccccagcccggattttcctgctcgccctccagcttccgtagcccagctcggatcttttccatggtcgctgcgcactggccctgcttggattctcgtcgtgcgtgcctgggcgctgccccagtggccgcctgctccaatcgccgcgcccaaccgagttcacccctgcgcgcaaccgtgggtttcgctgcgcagcgttcctgctccccggcctccgtcgtgctcggtagcaagtaattcatgtctaagcagcagctgcgatcccttacgtcgtgctcgccagatcgagtctcgcgtcgtcgatctgcgcaatttctgttcgataatcggttccgtctccgtcgaactccaattcgccatcacgccgagctccttcaacgctacaccaccacgtcatcgttgttccatcgcctcgcttcgacgctagtccctacgtgctgtcttcaaattgtgatcgcacggacaaaagcatccccaagaaaagatgtccaaagattggatggtggtgtgcgtgaagttcgtatagtacctaccaagtgcttgacacaaggcctaaacaagaatcagcaacgtttgcttggaattttaattgaatcggtaaccattctctagttcgttatttctttaattgattgagtcgatggatggaattaattaatgtgctagtgtgatgctcactaggtgcttgataaattgcgtgagtcctagaactctcgtcgacttcgcggttctcgtgattatcgagccagattcagttatgacgagtaatttcgctattccagtcaattagctgaattggtggaccgagtagaatattagtaggcatgtgtgatgatgaaatattttaatcatttataaagatgtgtatatatttacgat

SEQ ID NO: 108008 - DNA, 206 bp, Zea Mays
taagaagaaaaaatctttgtaagttatccagcacaatgtacaagtacaatagattgcggagtaccttcttcacacatatacaaatactcactgatgaacctctattatttgaggaagggattcatatcaagggccatataatttgaaatctctatattctcttctacgctcaaaccaatatttatttttcctttgcttaatgtgcc

SEQ ID NO: 108009 - DNA, 540 bp, Zea Mays
atgcaggtggaggtggggttttgcaacatgaagtcggagctgctatgtcaggggatgtggctcggcaacgataacatgaggcgaacctcccttcttcgtggtccagaatgtttcgaaggtcgggcaaaaactagaggcaaggtggagggtcaagattggaagtcggagctgctttgtgccttgagcccggcaacgatgacctgttgagacctttcgcttcgggttgtctgtctgcttttcatttggttcgtctgtcgcctgctttgggaagtcggagttgctagatgttctacatccttgcttgataacgatgatccttagcagttttatgtgctctcgtgtggggttgccgctgcctgtgtttgtttgggcgctctgtgtcggtggtgagtgtggtgtcgtgttgatgtcccaatccaaccagcgagttaagttgtatggtgtcgacgtgttgatgtcccaatccaaccgcctgttgtttgttgtttagtccgatccggaccacttcttctttattaatataatcggcagctctcctgc

SEQ ID NO: 108010 - DNA, 2086 bp, Zea Mays
agtccctcccctataataaacgggcgccacgcacgccacagccgcggcctgcgagcgaggcatacacatccacgggccacgcccaccggcatctcacggcggaagcagccaagcagccggccgggcgcctcccgtgccgccgctgagcatggccgctgctcccgtgggcgctcagaatcgctgcgtcttcgttggcaacataccatacgatgcgacagaggagcagctcgtgcagatttgcgaagaggttggcccagtcgtatccttcaggttggtgattgacaaagagactggcaagccaaaaggttatggcttttgcgagtacaaggacgaggaaactgctctaagtgcacggcggaaccttcagggttacgagatcaatggtcgtcagttacgggttgattttgctgaaaatgggaggaacactgacagaaatagagaaaagggtcgtggagggccagggatgacatctaatgttgatagtcagaaacagttagctggaacttctgttgttggagaggcaaaccttcaccagcctgttggtctcccaccagcaatacatgctgcgtctgtgatggctggcgtccttggtggagctcagactgcaaatgttcaaaacggtttacctgtccagtatggacttggaaatgatcctcttactcattatttggccagaatgtcaaggcatcagctgcatgaagtcatggttgaattgaagttcctagccactcaaaataaggaacaatccaaaactttgctgcaaggaattccacagctgccgaaggccctatttcaggcacaaataatgcttggaatggtgacaccacagatgatgcacatggcaaagagccaacagccctcgggctccttatcacaatcttcatctcacctcaatgagccatatccacagacagatgctatgattccgctagtctcaagaccttcaagtttgccaactaacataccaccgaacccaactgtcctacaggaacaaactgcaacactacatagtattcctcagcatcaacatgcatcccagcccctagtcaaaatgtttccacatggacatcagtctgggatcgccgcacaatctccaatgctacatcagcccctcgatggttcttctagtgttcctactcaatctcttgtgacctcagtaggcttaacctcacaagttcagctaccattggtgccacagcaccctggaccatctgtcatgcctacaagtgtaccacagctacctttgacccaccctcatcttgctcaggtagctgttgcacctgagaccctaccaaatgaaataagtactttggcagagtttacccatccttcaaagttgagaaaattggaggatggaacctcggtgcctggaatagtgaacagcagccatgctgtttatacagttccactgcaagcagtgggccctagcggaccatcagggagctatagtgctggttctgttagcttacagcaaccagggaatgaagagcagcttacgcctgatgtggagtcagctcttctgcagcaagtcttgcagctgacacccgagcagctgagttcgttgccaccagagcaacagcagcaggtgattgagctccagaagatgctttcagttagtaaatagaagcaactgagagctaacgcagcaaaaatgctggttgagaatctggcacatcacataatggcgagttggtaactagtggaaactggaaatgatcctcagatttgtttatgaagtcaccacgccgcctgtaacctgtaagcattgtcggcatcctgatgccatcaggatccatatggttttctttcttcagctcggagataaaagaaatgtgataggagaagagtagtgtggaaaaagggatacgcattatccatcactgttgtatcattatagggagaaaaaaataatatgtattcaaaggaactttttttcagcgcttctcgaatgggctgtagcatcacacatttttgtccttagagttttcttgcaaaaaatgtaggtaggaaatgaattttgtgtaagcttatgacgaagagattttttttatatttgttgccataggtctgtttaattgtttgaggc

SEQ ID NO: 108011 - DNA, 697 bp, Zea Mays
agtccctcccctataataaacgggcgccacgcacgccacagccgcggcctgcgagcgaggcatacacatccacgggccacgcccaccggcatctcacggcggaagcagccaagcagccggccgggcgcctcccgtgccgccgctgagcatggccgctgctcccgtgggcgctcagaatcgctgcgtcttcgttggcaacataccatacgatgcgacagaggagcagctcgtgcagatttgcgaagaggttggcccagtcgtatccttcaggttggtgattgacaaagagactggcaagccaaaaggttatggcttttgcgagtacaaggacgaggaaactgctctaagtgcacggcggaaccttcagggttacgagatcaatggtcgtcagttacgggttgattttgctgaaaatgggaggaacactgacagaaatagagaaaaggtcgacgatcctcaaatttttactgtagaagagcctttcctaccacctttggagttctctgttaatctgagaagttgtattgtcttcgttctgtgaatgataatagttgcgccttctccaaccaccctgtgtctcctgtttcgatctcttacaagcgtgtttgtgtatgtacagctgcttggttgtacatacacacacctgctgtacggttcaattccttcattgaattatattgttatggtgtggtgccaa

SEQ ID NO: 108012 - DNA, 521 bp, Zea Mays
gcttgaccacccacaccacacaatgtggcactattcccaacatatcaccctaatgcttcattgggcgcgcaagatgtttttgttgttgtttctggatgtgcaggggattttaggactgacaggttgtatttatcaatctcaattacagttggcaacataccatacgatgcgacagaggagcagctcgtgcagatttgcgaagaggttggcccagtcgtatccttcaggttggtgattgacaaagagactggcaagccaaaaggttatggcttttgcgagtacaaggacgaggaaactgctctaagtgcacggcggaaccttcagggttacgagatcaatggtcgtcagttacgggttgattttgctgaaaatgggaggaacactgacagaaatagagaaaaggtcgacgatcctcaaatttttactgtagaagagcctttcctaccacctttggagttctctgttaatctgagaagttgtattgtcttcgttctgtgaatgataatagttgcgccttctcc

SEQ ID NO: 108013 - DNA, 1786 bp, Zea Mays
agaatttttctatggacacacgaagagtccgcaaaaaataatcaactcgttttttttctttctccgctcctccgagtgaccgagtccaaggcttcgttctgctctccggctctcccgcatccaccccgtctcatccccaatccgaccacctcatccctcgcctccatggccctacccctcgcgtcaccggcgggggcatgagccggtgactgctcacgcggcctcgtctgtctgcgcacgcgcgcggggtcggcgagtgagcattgcggcggtccgcgatcgcccgtgggggagcatggcgtcggcggcggggtcggccggcggggccggcgcggggtctggcgggctgaagacctacttcaagacccccgaggggcggcacaagctgcagtatgagaagacgcactcccccgccgtcgtgcactacagccacagcggcaagaccgtctcccagatgacagtggcatatttgaaggagaagccagcaggccagggttccacgccttcaacaccaagtgctggtagtgggatgcggtctgcagctgcaagacttctcggcactgggaatgggagccgggcacttagcttcgggagcaatggtaccagcagggctgtctcaggaagcagccgcatgggtggaggaattggtgtgtcgactagtgcaagtggatcgcaaggcatggcaaactatgatggaaagggcgcgtacatcatatttaatactgcagatacactcttcatcagtgatctcaactcacatgacaaagatccaataaagtccatccacttcagtagctcaaacccgctttgccatgcatttgacccagaggccaaggatgggcacgatctgcttgttggggtgttctcaggagatgtctattcaatgtcactgaggcagcagctgcaagatcctggaaagaagcccgtttcatatcagcattttgttaatagagacaaagataaagacaaagatccaagtcaaggtggcgctgccagcagtcggagcacttgtgttgcatgggttccagagcgtgaaggaatttttgttgttagtcatgctgatgggaatctgtacgtgtatgacaaatgcaaggatggaaatactgattggacatttccaactgtaaaggatcaaagtcaggtgctgatttcacatgcaaagtcgagtaagagcaatccaattgcaaggtggcacatctgtcaaggtgcaatcaatgacatttccttttcaccggatggtgcttacttggcaactgttgggcgtgatggccatttaagagtatttgactttgctaaagaacaactaatatttggtgggaaaagttactacggtgcactgttgtgttgctcttggagtgcggatggcaaatatttgttatcaggtggtgaagatgatcttgtgcaagtatggagcatggatgatagaaagatagttgcatggggtgaagggcataattcatgggttagtgcagtttcttttgatccgtattggtccccaccaaattctgatgaaacggaagaaaatgtcatgtatcgctttgggtcaattggacaggatacccaactgcttctctgggatctggcattggaagagattgctgtccctctacgccatccgtctggtggctcaccgacattcagtagtggaagcccatctgcacagtgggataatgcgtgccctccagccggtgttctacagccttctccacggatgcgagatgtgccaaagctctcacctctcgttgcacaccgggtacatgtagatcccctatccggcctggaattc

SEQ ID NO: 108014 - DNA, 1221 bp, Zea Mays
attcatatcgacttgagagggatatggtagttgtggcgaggattgattcagtctaacaccttgtacaagcagagagattttgttccctccgttgagcagatataacaactccttgagctatgtagcccctatttttgtttatatgttcttccttttatgcttttatactaatttgaattggtcctcacatgatcatgcatcagtatccaatgatttagactcatctaatgcttctgcttccttacatgaatatgcattagcaggtcagtcatctagctctacttactataacaagcacgcattatccactgatgtgattcttattcctgctaatttgaatgtgttattatgctcaattatcagatctcgtgtatgctccgcattgtaaacacgtagaccaccaatcctacattgtttttgttcttccttttatgcttttacgatgatttgaattggtccttttcagaacaatgcacccccaatacctagtccactctagagcagtatacgacagatatgcccagtacccccagtaagtatatgctcttttgtttttttgatccactgcccaagtatccagaaggtaaactagattttgatgtctgcatattaaaattgccgatatcgaataaatcgtccattgaatcagttttctatgttttcagaatgatggacaaggtacaccatgacagtagaatttttttacaccctggttatcttgttttaattcatcctttctgcgctccaattattttggtgaatcttagcatagaacttgaccttctattattttgtatgtttggtttgcatgggataacctggcatgggatatatttatgaacattgatatcgtttttatgcttactcacatgggataatctgatcttctaactcaagatatttttcttttggtaatctgatcttctaactcaagtttgcattcagtttagactttaggttatgttagtcataacaagcttgaaaagacatattagcaaagaaagatcatatcaacagttcatgttacgtttgcagatatggacctcggtggttttctccacattaggaaagctggaagagccttttgaactcagttttttgctaacagtggtgttatggtgaaacagagttttgtgtgtatgtaccaacagctaaaatgtaaacacgacattatcatagttgagtacaggaataattatctcttatatcttattgtaaaat

SEQ ID NO: 108015 - DNA, 1009 bp, Zea Mays
atggcacgacctgagggttcaattgcagaagcatatgttgctaacgaatgtttgcatgcatcttcaaggtattttgatgatcttgaaacaagacacaattgtgagggaaggaatagagagcatgttgatatgagtaagggtgatatatctgttttccaacatggagtacaattacttggagccccaaggattacatatctagataaggattatgataagatggtttgtctatacggaaaggagttacaaaatgagggaggatttcctgatgttgaaaaacaagtagaaaaacaattttcttcctggtttaaaaaccatattggaacactttggcatgcgcaaggagaatatctttgttctgatctattcgctttgtcatgtgaacctgatatgcgaataagagtttattcagcatgtattgttgatggtgttcgataccacactatcgatcaaataattcagttgcaatataatgcagacaagagcggacatcggtcagtggttatttttcgatgtgattggtttgacacagaaaacaagaagggaagaataaaagatgatggattattcaaaagcatcaaccattccatatgttggtacaaaaatgatcctttcattcttgccccataggcaacaatggttttttatttgcaagacaccagatttggggggtagctggagggtagttcaaaattttgtgcataggcatctttggaatgttgatgaaacttgtagtgatgaaatacccaatggtgtgtcgctttcttaccaagatgatgagtgtgtagcttgtaatattcagcatactgaagtgaatgtgaacaatgatacacctagggtacaaaatgttgatattatagatgcaagtgtagttgaagatctacatagacaaagggaaatggaacagaagcaagattatttcgaagatgaagaagatgaaacaggatggcaatatgctagtgataatgacgagagaaatatcccaaatgttgatgatgatgatagcgat

SEQ ID NO: 108016 - DNA, 1456 bp, Zea Mays
gccagaatggatgcgccgtcaagcagcacgagcaccactgcgaccattagtagccggagcgcctccgagcacgaggctggagccgcaacaagggccagtgcttcgagtgcggcggagggtccaacacaccacccgttctactacgccgccgccgccgccaacgcggccgggatggcgcccgttcatgaggtcgctggccatcgcgcccgccgcccctgccgtcgcgggcggcgcgagggaggtgcagctggcgcagcagcagcagtcggcggaggcacatgcaggtgcaggatcgtccggcgtttactgcggacgcggacaagaaggccgtggtgctcgcggtagccgggagcaagcacccaccaaaggctggcacaccaaggtggagggccgcgggcggcggatacggttgccggtgctgtgcgaggcgcgggtgttccagctcacgggggagctgggccacaagaccgacggcgagaccatcgagtggttgctgcagcaggcggagcccgccatcgttgccgccaccggcacggtgaccacgacgaccatgccggctaacttctcctcgctcgccatttccctccgctccgccgacgcctcacacccgtcctccgcctcccgccccgcggcctaccaccacctcctgccgcagcagcacaaggtcgccgccatgctcgcctggcaccaccaccaccatcaacagctactcccaccgcatccgcagcagcagcagcaggccccacaagatcctggcgtcgaggagttcatgaggaagcgctacagggagggcaccgacgacctgtttatggaccccaccacgcgccagcatcatcccgacgatagcggcggcgaggccgaggatcacaaggcccacgttactctagcagccaccgcaatgtaggccctggctcccaacagtgccgacggcggcgccttctggatgccgcccacgtgggcgttcgatggcggcggcgggagcacggtgcaggcgccgctccagttcatgtcaacaagaagcggcgacaacaactccgctggaacaatggacgccaacaccggcatgctctccgcgctcaacgccagcttcggcggcgtcccgcaccagcagcaggatagggctagcagccggagatggttccgcgccaccgcggcgcgaatggcggcgacgccgggcgtggagccacgagccaccagtaaggatggaatccatcgatcgcatgatgaggtagcaatgcaatgcaagggtgtgcgctgctagctagtggatggtgcatgcatttggcggcgactagggcaaagttagtggcttgattaggtcattgctactgctattgtcatgcgttgatctgttggttgcttaatttatttttagcttgcgcttggattaatctatgattgtgcttattgagtgttgggagtgatgatttgctgtgggtccgattaaatcacaaaa

SEQ ID NO: 108017 - DNA, 243 bp, Zea Mays
agctcatcccacttttcctcgatcagatccattatagcaactgactgttctggggtggctagagatgatacaatggcaatgcaattgccaagggcaaaccaccggaaatccatcatagcagggctgacgttgccaagaaagtagcctcctcgacatggcatgaaatcaaacacccaatcaggaatggaatctggaattacattgaacttgttcacagcagtgtgggaatactcttctgttttg

SEQ ID NO: 108018 - DNA, 1429 bp, Zea Mays
cccttaccgtaatcaaataacttcgaaaatccccacaatcagcgacgattatcagattagacgttccatcgaacatttggcgagcaccaacctagtacttcactgccttcaccaccaagcgatctgcgttccgaaaaagcgacgcagctgaatccccacgctacgatagttgttgcgcgccgaggtgataaggccgaagttcgacaaaggggagtggatggttttgcagagatcgccgaagtgatttccggtccatccgcgagcagcagcttagcgaaggaggttgttaacttgccgcgcgaccgagttataatgacaggtccgaacagcgacaacatgaacaaatggacaacagagccgcttgacgagacgagtgcgaccaacgagcaagtagatacattgatgggctgaataggtgcgcttgacgagacgagtgcgaccagcgagcaagtagatacattgatgggctaaataggtggtgtaggaaaccaaacagcacggcatagccgaggcatcggacgagacaagcgcgagataaaaagacgcgcggtcagagacctaagcatccgcggtggcgatttggacgaaagcgagctagtgacgacaactcccggccaggcgacgatgtaaacgacgaccgacatgagcaggtctcagctgctgcgcgcagcgagcagaagatgaccggcaacagacagcgctgggggagaaactcgccagcatgattcggagcgggccacggacaacgccgccgcgatcaaggcgagcacgaccaaggaaggggcctcggcaacttggaggagcagggactgggcaagcgcttgaacagcaataccgacgcgaagagatgaaaaccagagcagcgagccgggaacaaggagcaggggcgcgtgccaccatggcgggctggtcggccagcacgaagaggcgacggcgagggagatccgagctggaggaagcttccggcgatggcgagggagctcggctgtggagagagagcccgcagaaattccggcaccgagcacaggagatgtcgcatcttccaggggcgaatagggaacgggaggaggaagaggagtggccgagccagagccggcgcgcgcgaggacctagggagaggaagagggtcgcgagctggaggagctcagctggacgcagacgccagggcgcaccagagaagtcggcgcggcggccatgggaaggggagggagagctctgctgggcgccatgggagctgaggaagaaaagacggagctccagccggacgccaggaagaagaccgagctgggcgcagtggaggaagtccagggcgcggctgagggcggggccgagcagggagccggctgggggaagaagaaacgctcggcgcgcagaggaaggaggagcggctctgcggctgtgcctgtacgcgtgaaatagaacaacggcg

SEQ ID NO: 108019 - DNA, 577 bp, Zea Mays
atggggatgcgtctggagtacgctagtcacgacaattttatggttgattctcaaaaccacccaatgctatggatggtgggtttcaccaagtttgagcctaaaaacttggcggtgcggttccagtgcgaatcggaggtgacacgtggtgtcatcgtgaaggaaagagctatttttctgttgtattctaattatcactatttgaaactgatgggaaatcaagtggagtccgtgctgctcaagatccacttgcactgcgacggctgcgccgaccgcatcaggcgatgcatcggcaagatcaaaggcgtcaaggatgtggtgctggaggccaatgccaaggacgaggtggaggtcacgggcaccatggacataccgaacatggtctcctacctcaaggagaagctcaatcgcaaagggcatggcattggtttgcttggagatacttctagtcattttgcaaactatgatcccccatatggttagatagttattttggcaaatgttattttagaaattcaatttgataggtttgtgggcttccttcaatcactttgaatttgtgaatttcattgcatgattt

SEQ ID NO: 108020 - DNA, 1389 bp, Zea Mays
gtgaggcaaacactgacgacgctggccggcgtgccgttaatttaatttctcagggtccgtgcgcatgccggcggcgctctgcggcgtcgtcgggttcaagcccactgccggccgcctctccaactccgggcttcttcctctgaactggaccgtcggcatgccggggatcctagcagcgacggtcgaggacacgctgatcgcgtcggtgccgggcagctagcttcttgtttctcccataaaccaaatctttcgattcacatgtctgctttgttttcacccatgaggtaatgaaaacaccacgcaaatgttgtctgctttcttttccgtgcttcctttcaggtatgcggcgattgctgatcagtcaaaaccaagccctttgcagcagcctgaactgaacctgcccatgctgacacgcacgaggtccatgcccagcatcaggctcgccaaatacgcaaagtggttcgacgacagctcggaggacatcaggagcctctgcgggaaggcgctgcagatgctgcgcacgcactacggctgggagagcgtggacgtcaccgtccctgagatcgaagagatgcggctggcgcactacgtgaccatgggctcggagtgcactgcctccctcgccgccaagtacctggacagcatggacaggtccgaggtcgggtgggacgtgcggatcgcgctcagcgcctacgggtccttcagcagccgagactacctcagcgcgcagcgtctccgatgccggcagatgtacttccacgagaagatcttcgagactgccgacgccatcgtcacgccgatgacaggggtgacggcgtacgcgctgcaggacgacgcgctgagcacgggggagctggactacatcaacggagctgcgctggtgaggtactcgatcgcgggcaacttcctggggctgccagcgatcaccgtgcccgtcgggtatgacaggggagggctccccgtggggctccagttcatcggccgcccgtggtcggaggccacgctgctgcacctcgcctacgccatgcaggaggcgtgcgggaagaaggtgctccggaagcccaaggtgcactacgacctcctcaccaaagagtagctccagcgagcatcgatccggcagattgctctctatgaggcgcgcggttgctgattgcatgcacctctagtgtgattgattgtttgtttgattgattgagcttgtgatgagagagtgggggaagttgaatggaatgccgtcaatgtcggacaactctcaactaggagaagaaaaaaaaacatggttgccagcaccatgcatgtgcaccaccattcgttttttaatgtcgtcctcattgaaacattatgtaagtattgtgtatacgtgtgctttagattcgtttttcactgccc

SEQ ID NO: 108021 - DNA, 1251 bp, Zea Mays
gtgaggcaaacactgacgacgctggccggcgtgccgttaatttaatttctcagggtccgtgcgcatgccggcggcgctctgcggcgtcgtcgggttcaagcccactgccggccgcctctccaactccgggcttcttcctctgaactggaccgtcggcatgccggggatcctagcagcgacggtcgaggacacgctgatcgcgtatgcggcgattgctgatcagtcaaaaccaagccctttgcagcagcctgaactgaacctgcccatgctgacacgcacgaggtccatgcccagcatcaggctcgccaaatacgcaaagtggttcgacgacagctcggaggacatcaggagcctctgcgggaaggcgctgcagatgctgcgcacgcactacggctgggagagcgtggacgtcaccgtccctgagatcgaagagatgcggctggcgcactacgtgaccatgggctcggagtgcactgcctccctcgccgccaagtacctggacagcatggacaggtccgaggtcgggtgggacgtgcggatcgcgctcagcgcctacgggtccttcagcagccgagactacctcagcgcgcagcgtctccgatgccggcagatgtacttccacgagaagatcttcgagactgccgacgccatcgtcacgccgatgacaggggtgacggcgtacgcgctgcaggacgacgcgctgagcacgggggagctggactacatcaacggagctgcgctggtgaggtactcgatcgcgggcaacttcctggggctgccagcgatcaccgtgcccgtcgggtatgacaggggagggctccccgtggggctccagttcatcggccgcccgtggtcggaggccacgctgctgcacctcgcctacgccatgcaggaggcgtgcgggaagaaggtgctccggaagcccaaggtgcactacgacctcctcaccaaagagtagctccagcgagcatcgatccggcagattgctctctatgaggcgcgcggttgctgattgcatgcacctctagtgtgattgattgtttgtttgattgattgagcttgtgatgagagagtgggggaagttgaatggaatgccgtcaatgtcggacaactctcaactaggagaagaaaaaaaaacatggttgccagcaccatgcatgtgcaccaccattcgttttttaatgtcgtcctcattgaaacattatgtaagtattgtgtatacgtgtgctttagattcgtttttcactgccc

SEQ ID NO: 108022 - DNA, 2314 bp, Zea Mays
acacaacacaacacagttctccctttccactccagtccaaccaaccgtccatgggtttcttcatcccgccgcccaaggtgtacaagccggcggcagaggtcgacctcgggccggacagcgacgagcactacatcagccccaacgtgaaagcgccccgcgtggccgggttcctggtgaagatgctggcctgggtgctggagacgccggtgcttggctggatcgtgctcggcgtcctcaagagggacaacctcgtctacaagctcgtctcggacgctgagatcccggagccgccgctattcacggccacccacacatggcaagcagcgatccaggagcagagcgtgcgcgtgacggagtcgaggctgtcgccggcggagcgcgtgcaggaggccgtcgcctgcgtcccagctgctgcccaggcccagttggagccggcggcggggttcaggcgctggacggtgcgggacttccacagggcgtacagatcaggacaggctacccctaccatggtggcgcggcgattcctggcagccgtggaggaatgttcagggccggacctgaacatgggcttcttcatcagctgcgaccctgcggacgtgctgcggcaggccgaggactccacccgcagataccagcaaggggcgccgctgtccgccatggacggagtactggtcgccgtcaaggacgagctcgattgcctgccgtacccgaccagcggcggcacgcggtggctggggtcggcgcggcggtgcgcggcggacgcggcgtgcgtggcgcagctgcgcgcgtgcggcgccgtgatggccggcaaggccaacatgcacgagctgggcgcgggcaccagcggcatcaacccgcaccacggcgccacgcgcaacccctacaacgtgggcagggtgtcgggcggctcctcgggcgggtccgccgccgccgtctgcgccgggctctgccccgtcgccctcggcgccgacggaggcgggtccgtgcgcatgccggcggcgctctgcggcgtcgtcgggttcaagcccactgccggccgcctctccaactccgggcttcttcctctgaactggaccgtcggcatgccggggatcctagcagcgacggtcgaggacacgctgatcgcgtcggtgccgggcagctagcttcttgtttctcccataaaccaaatctttcgattcacatgtctgctttgttttcacccatgaggtaatgaaaacaccacgcaaatgttgtctgctttcttttccgtgcttcctttcaggtatgcggcgattgctgatcagtcaaaaccaagccctttgcagcagcctgaactgaacctgcccatgctgacacgcacgaggtccatgcccagcatcaggctcgccaaatacgcaaagtggttcgacgacagctcggaggacatcaggagcctctgcgggaaggcgctgcagatgctgcgcacgcactacggctgggagagcgtggacgtcaccgtccctgagatcgaagagatgcggctggcgcactacgtgaccatgggctcggagtgcactgcctccctcgccgccaagtacctggacagcatggacaggtccgaggtcgggtgggacgtgcggatcgcgctcagcgcctacgggtccttcagcagccgagactacctcagcgcgcagcgtctccgatgccggcagatgtacttccacgagaagatcttcgagactgccgacgccatcgtcacgccgatgacaggggtgacggcgtacgcgctgcaggacgacgcgctgagcacgggggagctggactacatcaacggagctgcgctggtgaggtactcgatcgcgggcaacttcctggggctgccagcgatcaccgtgcccgtcgggtatgacaggggagggctccccgtggggctccagttcatcggccgcccgtggtcggaggccacgctgctgcacctcgcctacgccatgcaggaggcgtgcgggaagaaggtgctccggaagcccaaggtgcactacgacctcctcaccaaagagtagctccagcgagcatcgatccggcagattgctctctatgaggcgcgcggttgctgattgcatgcacctctagtgtgattgattgtttgtttgattgattgagcttgtgatgagagagtgggggaagttgaatggaatgccgtcaatgtcggacaactctcaactaggagaagaaaaaaaaacatggttgccagcaccatgcatgtgcaccaccattcgttttttaatgtcgtcctcattgaaacattatgtaagtattgtgtatacgtgtgctttagattcgtttttcactgccc

SEQ ID NO: 108023 - DNA, 2410 bp, Zea Mays
gaaaccatccctgcaggtccctgctccctggttatattaagcagctcccaatctttggcatttgcaggcacacaacacaacacagttctccctttccactccagtccaaccaaccgtccatgggtttcttcatcccgccgcccaaggtgtacaagccggcggcagaggtcgacctcgggccggacagcgacgagcactacatcagccccaacgtgaaaggtccctcgctccctgaccagacctctcccatcccagctacagcggtgcacatgcatgcatgagaatgattgattgttcaattgagtagatggtcggaggcgatctccgtctccgcgcgcgcttgcttgctttcttccgctgctgatacatgcgtggaccgtcttgcagcgccccgcgtggccgggttcctggtgaagatgctggcctgggtgctggagacgccggtgcttggctggatcgtgctcggcgtcctcaagagggacaacctcgtctacaagctcgtctcggacgctgagatcccggagccgccgctattcacggccacccacacatggcaagcgatccaggagcagagcgtgcgcgtgacggagtcgaggctgtcgccggcggagcgcgtgcaggaggccgtcgcctgcgtcccagctgctgcccaggcccagttggagccggcggcggggttcaggcgctggacggtgcgggacttccacagggcgtacagatcaggacaggctacccctaccatggtggcgcggcgattcctggcagccgtggaggaatgttcagggccggacctgaacatgggcttcttcatcagctgcgaccctgcggacgtgctgcggcaggccgaggactccacccgcagataccagcaaggggcgccgctgtccgccatggacggagtactggtcgccgtcaaggacgagctcgattgcctgccgtacccgaccagcggcggcacgcggtggctggggtcggcgcggcggtgcgcggcggacgcggcgtgcgtggcgcagctgcgcgcgtgcggcgccgtgatggccggcaaggccaacatgcacgagctgggcgcgggcaccagcggcatcaacccgcaccacggcgccacgcgcaacccctacaacgtgggcagggtgtcgggcggctcctcgggcgggtccgccgccgccgtctgcgccgggctctgccccgtcgccctcggcgccgacggaggcgggtccgtgcgcatgccggcggcgctctgcggcgtcgtcgggttcaagcccactgccggccgcctctccaactccgggcttcttcctctgaactggaccgtcggcatgccggggatcctagcagcgacggtcgaggacacgctgatcgcgtatgcggcgattgctgatcagtcaaaaccaagccctttgcagcagcctgaactgaacctgcccatgctgacacgcacgaggtccatgcccagcatcaggctcgccaaatacgcaaagtggttcgacgacagctcggaggacatcaggagcctctgcgggaaggcgctgcagatgctgcgcacgcactacggctgggagagcgtggacgtcaccgtccctgagatcgaagagatgcggctggcgcactacgtgaccatgggctcggagtgcactgcctccctcgccgccaagtacctggacagcatggacaggtccgaggtcgggtgggacgtgcggatcgcgctcagcgcctacgggtccttcagcagccgagactacctcagcgcgcagcgtctccgatgccggcagatgtacttccacgagaagatcttcgagactgccgacgccatcgtcacgccgatgacaggggtgacggcgtacgcgctgcaggacgacgcgctgagcacgggggagctggactacatcaacggagctgcgctggtgaggtactcgatcgcgggcaacttcctggggctgccagcgatcaccgtgcccgtcgggtatgacaggggagggctccccgtggggctccagttcatcggccgcccgtggtcggaggccacgctgctgcacctcgcctacgccatgcaggaggcgtgcgggaagaaggtgctccggaagcccaaggtgcactacgacctcctcaccaaagagtagctccagcgagcatcgatccggcagattgctctctatgaggcgcgcggttgctgattgcatgcacctctagtgtgattgattgtttgtttgattgattgagcttgtgatgagagagtgggggaagttgaatggaatgccgtcaatgtcggacaactctcaactaggagaagaaaaaaaaacatggttgccagcaccatgcatgtgcaccaccattcgttttttaatgtcgtcctcattgaaacattatgtaagtattgtgtatacgtgtgctttagattcgtttttcactgccc

SEQ ID NO: 108024 - DNA, 2277 bp, Zea Mays
gaaaccatccctgcaggtccctgctccctggttatattaagcagctcccaatctttggcatttgcaggcacacaacacaacacagttctccctttccactccagtccaaccaaccgtccatgggtttcttcatcccgccgcccaaggtgtacaagccggcggcagaggtcgacctcgggccggacagcgacgagcactacatcagccccaacgtgaaagcgccccgcgtggccgggttcctggtgaagatgctggcctgggtgctggagacgccggtgcttggctggatcgtgctcggcgtcctcaagagggacaacctcgtctacaagctcgtctcggacgctgagatcccggagccgccgctattcacggccacccacacatggcaagccatccgtctgcttgacaaccgatggatgcagcagcgatccaggagcagagcgtgcgcgtgacggagtcgaggctgtcgccggcggagcgcgtgcaggaggccgtcgcctgcgtcccagctgctgcccaggcccagttggagccggcggcggggttcaggcgctggacggtgcgggacttccacagggcgtacagatcaggacaggctacccctaccatggtggcgcggcgattcctggcagccgtggaggaatgttcagggccggacctgaacatgggcttcttcatcagctgcgaccctgcggacgtgctgcggcaggccgaggactccacccgcagataccagcaaggggcgccgctgtccgccatggacggagtactggtcgccgtcaaggacgagctcgattgcctgccgtacccgaccagcggcggcacgcggtggctggggtcggcgcggcggtgcgcggcggacgcggcgtgcgtggcgcagctgcgcgcgtgcggcgccgtgatggccggcaaggccaacatgcacgagctgggcgcgggcaccagcggcatcaacccgcaccacggcgccacgcgcaacccctacaacgtgggcagggtgtcgggcggctcctcgggcgggtccgccgccgccgtctgcgccgggctctgccccgtcgccctcggcgccgacggaggcgggtccgtgcgcatgccggcggcgctctgcggcgtcgtcgggttcaagcccactgccggccgcctctccaactccgggcttcttcctctgaactggaccgtcggcatgccggggatcctagcagcgacggtcgaggacacgctgatcgcgtatgcggcgattgctgatcagtcaaaaccaagccctttgcagcagcctgaactgaacctgcccatgctgacacgcacgaggtccatgcccagcatcaggctcgccaaatacgcaaagtggttcgacgacagctcggaggacatcaggagcctctgcgggaaggcgctgcagatgctgcgcacgcactacggctgggagagcgtggacgtcaccgtccctgagatcgaagagatgcggctggcgcactacgtgaccatgggctcggagtgcactgcctccctcgccgccaagtacctggacagcatggacaggtccgaggtcgggtgggacgtgcggatcgcgctcagcgcctacgggtccttcagcagccgagactacctcagcgcgcagcgtctccgatgccggcagatgtacttccacgagaagatcttcgagactgccgacgccatcgtcacgccgatgacaggggtgacggcgtacgcgctgcaggacgacgcgctgagcacgggggagctggactacatcaacggagctgcgctggtgaggtactcgatcgcgggcaacttcctggggctgccagcgatcaccgtgcccgtcgggtatgacaggggagggctccccgtggggctccagttcatcggccgcccgtggtcggaggccacgctgctgcacctcgcctacgccatgcaggaggcgtgcgggaagaaggtgctccggaagcccaaggtgcactacgacctcctcaccaaagagtagctccagcgagcatcgatccggcagattgctctctatgaggcgcgcggttgctgattgcatgcacctctagtgtgattgattgtttgtttgattgattgagcttgtgatgagagagtgggggaagttgaatggaatgccgtcaatgtcggacaactctcaactaggagaagaaaaaaaaacatggttgccagcaccatgcatgtgcaccaccattcgttttttaatgtcgtcctcattgaaacattatgtaagtattgtgtatacgtgtgctttagattcgtttttcactgccc

SEQ ID NO: 108025 - DNA, 2245 bp, Zea Mays
gaaaccatccctgcaggtccctgctccctggttatattaagcagctcccaatctttggcatttgcaggcacacaacacaacacagttctccctttccactccagtccaaccaaccgtccatgggtttcttcatcccgccgcccaaggtgtacaagccggcggcagaggtcgacctcgggccggacagcgacgagcactacatcagccccaacgtgaaagcgccccgcgtggccgggttcctggtgaagatgctggcctgggtgctggagacgccggtgcttggctggatcgtgctcggcgtcctcaagagggacaacctcgtctacaagctcgtctcggacgctgagatcccggagccgccgctattcacggccacccacacatggcaagcagcgatccaggagcagagcgtgcgcgtgacggagtcgaggctgtcgccggcggagcgcgtgcaggaggccgtcgcctgcgtcccagctgctgcccaggcccagttggagccggcggcggggttcaggcgctggacggtgcgggacttccacagggcgtacagatcaggacaggctacccctaccatggtggcgcggcgattcctggcagccgtggaggaatgttcagggccggacctgaacatgggcttcttcatcagctgcgaccctgcggacgtgctgcggcaggccgaggactccacccgcagataccagcaaggggcgccgctgtccgccatggacggagtactggtcgccgtcaaggacgagctcgattgcctgccgtacccgaccagcggcggcacgcggtggctggggtcggcgcggcggtgcgcggcggacgcggcgtgcgtggcgcagctgcgcgcgtgcggcgccgtgatggccggcaaggccaacatgcacgagctgggcgcgggcaccagcggcatcaacccgcaccacggcgccacgcgcaacccctacaacgtgggcagggtgtcgggcggctcctcgggcgggtccgccgccgccgtctgcgccgggctctgccccgtcgccctcggcgccgacggaggcgggtccgtgcgcatgccggcggcgctctgcggcgtcgtcgggttcaagcccactgccggccgcctctccaactccgggcttcttcctctgaactggaccgtcggcatgccggggatcctagcagcgacggtcgaggacacgctgatcgcgtatgcggcgattgctgatcagtcaaaaccaagccctttgcagcagcctgaactgaacctgcccatgctgacacgcacgaggtccatgcccagcatcaggctcgccaaatacgcaaagtggttcgacgacagctcggaggacatcaggagcctctgcgggaaggcgctgcagatgctgcgcacgcactacggctgggagagcgtggacgtcaccgtccctgagatcgaagagatgcggctggcgcactacgtgaccatgggctcggagtgcactgcctccctcgccgccaagtacctggacagcatggacaggtccgaggtcgggtgggacgtgcggatcgcgctcagcgcctacgggtccttcagcagccgagactacctcagcgcgcagcgtctccgatgccggcagatgtacttccacgagaagatcttcgagactgccgacgccatcgtcacgccgatgacaggggtgacggcgtacgcgctgcaggacgacgcgctgagcacgggggagctggactacatcaacggagctgcgctggtgaggtactcgatcgcgggcaacttcctggggctgccagcgatcaccgtgcccgtcgggtatgacaggggagggctccccgtggggctccagttcatcggccgcccgtggtcggaggccacgctgctgcacctcgcctacgccatgcaggaggcgtgcgggaagaaggtgctccggaagcccaaggtgcactacgacctcctcaccaaagagtagctccagcgagcatcgatccggcagattgctctctatgaggcgcgcggttgctgattgcatgcacctctagtgtgattgattgtttgtttgattgattgagcttgtgatgagagagtgggggaagttgaatggaatgccgtcaatgtcggacaactctcaactaggagaagaaaaaaaaacatggttgccagcaccatgcatgtgcaccaccattcgttttttaatgtcgtcctcattgaaacattatgtaagtattgtgtatacgtgtgctttagattcgtttttcactgccc

SEQ ID NO: 108026 - DNA, 2242 bp, Zea Mays
gaaaccatccctgcaggtccctgctccctggttatattaagcagctcccaatctttggcatttgcaggcacacaacacaacacagttctccctttccactccagtccaaccaaccgtccatgggtttcttcatcccgccgcccaaggtgtacaagccggcggcagaggtcgacctcgggccggacagcgacgagcactacatcagccccaacgtgaaagcgccccgcgtggccgggttcctggtgaagatgctggcctgggtgctggagacgccggtgcttggctggatcgtgctcggcgtcctcaagagggacaacctcgtctacaagctcgtctcggacgctgagatcccggagccgccgctattcacggccacccacacatggcaagcgatccaggagcagagcgtgcgcgtgacggagtcgaggctgtcgccggcggagcgcgtgcaggaggccgtcgcctgcgtcccagctgctgcccaggcccagttggagccggcggcggggttcaggcgctggacggtgcgggacttccacagggcgtacagatcaggacaggctacccctaccatggtggcgcggcgattcctggcagccgtggaggaatgttcagggccggacctgaacatgggcttcttcatcagctgcgaccctgcggacgtgctgcggcaggccgaggactccacccgcagataccagcaaggggcgccgctgtccgccatggacggagtactggtcgccgtcaaggacgagctcgattgcctgccgtacccgaccagcggcggcacgcggtggctggggtcggcgcggcggtgcgcggcggacgcggcgtgcgtggcgcagctgcgcgcgtgcggcgccgtgatggccggcaaggccaacatgcacgagctgggcgcgggcaccagcggcatcaacccgcaccacggcgccacgcgcaacccctacaacgtgggcagggtgtcgggcggctcctcgggcgggtccgccgccgccgtctgcgccgggctctgccccgtcgccctcggcgccgacggaggcgggtccgtgcgcatgccggcggcgctctgcggcgtcgtcgggttcaagcccactgccggccgcctctccaactccgggcttcttcctctgaactggaccgtcggcatgccggggatcctagcagcgacggtcgaggacacgctgatcgcgtatgcggcgattgctgatcagtcaaaaccaagccctttgcagcagcctgaactgaacctgcccatgctgacacgcacgaggtccatgcccagcatcaggctcgccaaatacgcaaagtggttcgacgacagctcggaggacatcaggagcctctgcgggaaggcgctgcagatgctgcgcacgcactacggctgggagagcgtggacgtcaccgtccctgagatcgaagagatgcggctggcgcactacgtgaccatgggctcggagtgcactgcctccctcgccgccaagtacctggacagcatggacaggtccgaggtcgggtgggacgtgcggatcgcgctcagcgcctacgggtccttcagcagccgagactacctcagcgcgcagcgtctccgatgccggcagatgtacttccacgagaagatcttcgagactgccgacgccatcgtcacgccgatgacaggggtgacggcgtacgcgctgcaggacgacgcgctgagcacgggggagctggactacatcaacggagctgcgctggtgaggtactcgatcgcgggcaacttcctggggctgccagcgatcaccgtgcccgtcgggtatgacaggggagggctccccgtggggctccagttcatcggccgcccgtggtcggaggccacgctgctgcacctcgcctacgccatgcaggaggcgtgcgggaagaaggtgctccggaagcccaaggtgcactacgacctcctcaccaaagagtagctccagcgagcatcgatccggcagattgctctctatgaggcgcgcggttgctgattgcatgcacctctagtgtgattgattgtttgtttgattgattgagcttgtgatgagagagtgggggaagttgaatggaatgccgtcaatgtcggacaactctcaactaggagaagaaaaaaaaacatggttgccagcaccatgcatgtgcaccaccattcgttttttaatgtcgtcctcattgaaacattatgtaagtattgtgtatacgtgtgctttagattcgtttttcactgccc

SEQ ID NO: 108027 - DNA, 1605 bp, Zea Mays
gagagatcgcatcgcctccttcgttcccgcgccgtcactgtatcgttcgtatgcaggttttaattattgcgatttatttattggatgcaacggctcgatctgctaataactgcaggggcgccgctgtccgccatggacggagtactggtcgccgtcaaggacgagctcgattgcctgccgtacccgaccagcggcggcacgcggtggctggggtcggcgcggcggtgcgcggcggacgcggcgtgcgtggcgcagctgcgcgcgtgcggcgccgtgatggccggcaaggccaacatgcacgagctgggcgcgggcaccagcggcatcaacccgcaccacggcgccacgcgcaacccctacaacgtgggcagggtgtcgggcggctcctcgggcgggtccgccgccgccgtctgcgccgggctctgccccgtcgccctcggcgccgacggaggcgggtccgtgcgcatgccggcggcgctctgcggcgtcgtcgggttcaagcccactgccggccgcctctccaactccgggcttcttcctctgaactggaccgtcggcatgccggggatcctagcagcgacggtcgaggacacgctgatcgcgtatgcggcgattgctgatcagtcaaaaccaagccctttgcagcagcctgaactgaacctgcccatgctgacacgcacgaggtccatgcccagcatcaggctcgccaaatacgcaaagtggttcgacgacagctcggaggacatcaggagcctctgcgggaaggcgctgcagatgctgcgcacgcactacggctgggagagcgtggacgtcaccgtccctgagatcgaagagatgcggctggcgcactacgtgaccatgggctcggagtgcactgcctccctcgccgccaagtacctggacagcatggacaggtccgaggtcgggtgggacgtgcggatcgcgctcagcgcctacgggtccttcagcagccgagactacctcagcgcgcagcgtctccgatgccggcagatgtacttccacgagaagatcttcgagactgccgacgccatcgtcacgccgatgacaggggtgacggcgtacgcgctgcaggacgacgcgctgagcacgggggagctggactacatcaacggagctgcgctggtgaggtactcgatcgcgggcaacttcctggggctgccagcgatcaccgtgcccgtcgggtatgacaggggagggctccccgtggggctccagttcatcggccgcccgtggtcggaggccacgctgctgcacctcgcctacgccatgcaggaggcgtgcgggaagaaggtgctccggaagcccaaggtgcactacgacctcctcaccaaagagtagctccagcgagcatcgatccggcagattgctctctatgaggcgcgcggttgctgattgcatgcacctctagtgtgattgattgtttgtttgattgattgagcttgtgatgagagagtgggggaagttgaatggaatgccgtcaatgtcggacaactctcaactaggagaagaaaaaaaaacatggttgccagcaccatgcatgtgcaccaccattcgttttttaatgtcgtcctcattgaaacatta

SEQ ID NO: 108028 - DNA, 610 bp, Zea Mays
gggtgtggcatttatctcccctcacacacgttctttgcttcgcttcggcaccgcacaggccctgctccatcgtcacttgtccctgcgctgacgctcgcatgctgctacactcgctgtggctaccggtggtcgagctcctccccttggccgcgctctccttcgcttgtgccttacccatcgagctccagcgtttgccagcgtagagctcgccccttgcgtgtccctcgtctccacgcatgcatcagctccctgcgccctcgcctgctgctctggcttgccactatttcggtcctaccccacctttccggttaccagccgtcgtcgtggacacgccccgacagtaccaccaattgatcgtcgactcttaaaacctcaccagcgttttcctcgccacgccctagatttaaggagaaatccccggatttgtgaaggagaaagcgaagtgagcgccgcctactaagtgttcgatgtaaggtccgaaccgggaacctcgcctttctcgcggatcttcggcgcaagcatatggtgtgtcgactttcagattcattgttgtccacatgtgcgatagttggtgaatgaacatgtcaaaggagagtaaattctttaggta

SEQ ID NO: 108029 - DNA, 504 bp, Zea Mays
tggcatcatcccagggaagtcagtcgatgcatgttcattatggttatggattgatggcttgcgcgattgctctgacgggggtagctgtgatagtttacttgagacactcgaaagcgtgatgaacttctggaggatcaacaaagaattttgcatagcttatatatacgactaatacgcatagaaggatcacacacttcttcggctcatgagaaagttaagtaatcatgggccgatgacgaagattacattggtggtccaagaaaaatatgctgactgactgtcatgttctccagttacctgacgaagtcggttcttatggtggcagggaagcctatgatatggttcttatggttggcaaccatgaattcagtgatgtctcaagtaaccatgtatatgcatctctgagcatgaaaaccaagaatgaatcacatatcccaagtcgagattcttctttaacttttcactatttattgatcagtggcggtgctgcatgtaaaataacat

SEQ ID NO: 108030 - DNA, 1620 bp, Zea Mays
atgagttccaccgccgctgtggcccttaatcgccgcactcgcagccgcccgccgtcggccgcatcctcccgcaggtccgatgatcccacggccgccgtcgccagtaccgccaacggcaacggcaatgtccccaccaaggccgcctcccccgatcacgcctcaggggagaggacggtcaagaagctgcggctgtccaaggcgctgacgatcccggaggggaccacgatctcggaggcgtgccggcggatggcagcgaggcgggtcgatgccgtgctgctcaccgacgccggtggcctgctctccggcatcgtcaccgacaaggacatagctacaagggtcattgccgaggggttgcgggttgagcaaacaatcatctccaagattatgacaaggaaccctttatatgtcatgggggacacacctgctattgaggcactgcagaaaatgatccaaggtaaatttagacaccttccagttgtagaaaatggtgaggttattgcgatgttggacattacaaaatgcctctatgatgcaatatcaagactggaaaaggcagcagagcaagaaagtgcactggcagctgctgtagaaggggttgagcgacagttaggtggcaacttctcagctccacacaatctcatagagactatgagagaacggatgtttaaaccttctttgtcaaccattatcacagagaacacaaaagtagcaactgtttccctttcagatccagtttgtgtagcagcacggaaaatgcgtgagttacaagttaattcagtcattattactgctggaaatttgcttcatgggatctttaccccaagggatgtgctgatgcgtgttgtggcccaaaatctttctcctgagttaactctagtagaaaaggtaatgactgcacaccctgactgtgctacattggacacaacaatccttgatgcactacatatcatgcatgatggcaaattcttgcatattcctgttcttgatggagatgggcgggttgctgcttgtttggacgttctgcaacttacccatgctgcgatttcaatggtctccctttccatggctcatgccctctctttcttaatccatcttagtaatcttagtccatctgaaatggttttccctctgaaggttgaaggaggtcctggtgctgcaactgatgtggcaaacacgataatgcagaaattctgggaatctgcacttgctctagagcaacctccagaggaggattttgatagtcacagtgaattacctttagtgatgccatcagatgccagggatggcagtagtagtatttatcgtcctgctgttgataatttatttgtctttaagcttcaggacaagaagggacgcatgcatagattcacttgtggctctgaaagtttagatgagctgatatcgtctgtaatccaaaggttaggcatggttgatgagaagagggtgattcaactgttgtatgaagatgacgaaggcgacaaggtgctgttgacaaccaattctgatcttactggtgctgtgttttgtgcgaaatcatctggattgaaggtctttcgcttctctgatgtggaccccttttgttcggttataccatatttatcgcactgtggggctatttag

SEQ ID NO: 108031 - DNA, 604 bp, Zea Mays
gtgaccatacccaattctgtaagaattgctaccttattgagtgatataagaggtgcctcatctactactacggggttgcaaattatgatccttgttttttttcttgatcagttattgcaagtggtgtcaacaagcatgaggctacaactgcatcacctacaaggaagtcaaaagtaagaggcacatgcatttgtaatggcatcataatgttctttattcccatttcattatggttcctcactatttctgaatagttgtggctgattgttatgttgcccaatgacaagggtgagcaatgtattaccagcttctgtcgtagcaatatttgatgaggcacccctagccctccagtcaccacttcattccttccattgatgtcagtgccagtccttgaataacttcgactcttgcatcaggaaccacttcaccaatacgctctcgcattaggaaccacttcatcagcacgttgttgtcatgtagcccgaagctttttaggaaccacttgatcagtacgttgcccgtgaactatctcgtgtacatgcaacctgggacttgagattccaggtaccaacttgctctttagatgacttgtgacctcactgct

SEQ ID NO: 108032 - DNA, 813 bp, Zea Mays
cttggtatacacgtctaccaaatgccttcatcacacaaaccgcaattctaacataaccttcgcctcacacatacatacacaacatcaaccatattgcaggaagagtaaaccataactgaacaacctggtggaatcacacccgagtcgggcatgctatctacgggttgggcattttgtcgaacaagtagagcgcgaggcgcggagtcgagtagtcgacaaagggctgcaaacaacgacacactggttcaaacattttatcgagcatgcttagcacgagacgatgaggacagcgaggtgtttgccgggttcgacgatgtcacggctgaggctgcacagatcgaggacgctgctgcacgcgacgacacacggcgaagtcccagctcagacgtttctccgaacaccatcacaaatgcccaaacgtcgccgcggaggagctcggcgtggaataaagacggcgacccgagcaacacgaccgcaggcgaagccctgcgcgcacgcgcagagggagaccgagcgcacgcagcggagtccggcagtctgcagcctgggcgcgatggcgtctgcggccaacgtcagggcgaggcaggcggctggcggacttcacaggggtggcagacggcacttgaggctggaccgacggcgagcaccagagaaaagcggggacgacgaccagggagccgcggccggacctgagggagatgagggaggtcgagcgcagcagacgaccgacgtggtgcaggacgctcggcgctagagatgaacagcggtcggatggtgtaggaagggatggcgtgagggggtacgacagctagg

SEQ ID NO: 108033 - DNA, 1433 bp, Zea Mays
ctagctacgtgtgtactgtagaccatgcctttccctccagtcgccgtcaaggagatgagcagagaagccaggaagacgaagtctcggtcctccccttcgccttcgtcctggctcgaccggtccatgaagttctactacccgtcttccacctcccgcaagagcagagcccaggcagcgccagccgcagcgacagaaggcaagagcactgacggcggcgacaagccgagcaacggcagcagcggcaagaagaagaagaagaagaagagaagcataagcatcggtcggagcatggcgtgcgggagctccatctgcagcacgagcaccaaggagagctcggtgatgagccgggacagcagcagcggcgcctccagcaggtcgctgaggtctcccaacgttgacgccgtgtacgcctcggccgccgccgccatctccgccacgtcatcattcagctcggtcaccaccacggcggcgaccaccgtcacgtcgtcgacgtcgtcgtcctcgccgctgtcgtccgcactctcgtcgccgctctcctccatcgggagatccttcaggggcgtgcagatcaggaggctctccggctgctacgaatgccgccactccgtcttcgaccccagtggcttcgccgccagcttcccctgcgccgactgcgacgaggtgttcagcaagccagagtcgcttgaactccacagagcaaccaggcatgcagtttcggagctggcacccgaggacacgagcaggaacgtggtggagatcatcttccagtccagctggctgaggaagcagacgccgccggtctgcaggatcgaacgggtactcaaggtgcagagcagcgacaggaccgtgaagaggttcgagcagtacagggagagcgtcagggagagggcgcgcagcgatgatcaggggcagggcaagaagaaccctcggtgcgtcgccgacggcaacgagctgctcaggttccactgcgccaccttcacctgctccctcggcctcgccggcagcaccgcgctgtgccgggcgccgtcggcccagtgcatgctgtgcagcatcatcaaggagggtttcagggtggacggtgatgggaagattgcgacaatggcgacgagcgggcgggcccacgacacggcccagctggtgctgccggacggcagtgacaagagagcgatgctcttgtgcagggtcgttgcagggagggtgaagaaggcgagtggcgagaagtgctcagaggactctactaacttcgactctgtcagtctcagtcccagcacggaaggggtctactcagatttagatgaactgtttgtgttcaaccctagagctatattgccctgctttgtggtcatatacagtggctattaagttatagccactgctaatttttgtttcgatttcactgttgttggtcctataatataatccagttcttcctt

SEQ ID NO: 108034 - DNA, 412 bp, Zea Mays
atcacttctttgatgtaagctcgccgggttgcatgtttgttcttgggcaacatttcgatgatcaaatgaaggaccataggcacgggtgacgaattctagtttttaactatggcgttgtgtctcgcctatcaagatctgctaaccatataaaacaaacagaggtaatgatatgtgtgtggtgctctgcatcaatagatatgagcccgcatgttctaatataaataggcaaagcagagagattatatggtatattcaaccgacatcatcttagatacgaataccctaatctatatgtaagatggttggagtagagatcagatcctatacgacttatctaatatactctacccttgactccttcatgcgcattaagatctcaaagttctttggtttataaaaaatataaaataaa

SEQ ID NO: 108035 - DNA, 375 bp, Zea Mays
atggaagctaagcgatgctacacaatgaaagttggatggtttgacaaagaggagaacaatgctgatacactgtccatgcgcctaggaaaggatgctacgtttgtccgtgctgcgttcagtaaccggctttccatatttatgcaggacagtgctgcagtatctgtggctctcctcattggaatgttgttgggatggcgggtgtcacttgttgcacttgcaattttgtcagttcttgttatatcttctattgcacatgtaataaagttttttttatttgctatccactgaaaagattactgtgttatcagaaatttcatgcctagcatttacttcctttgaagcttgtgtaagaccagatagtgtactggagaaatc

SEQ ID NO: 108036 - DNA, 198 bp, Zea Mays
ttttgagttcatgtgacttattttagaaacttgagctcacaaactttctcttatttgatctctgtatggtggaattatgtcattttataatctttgttcgttcagtcagtcgttgtgaactctcttctaatcgctcacttcattggtcgtgttgtaccaagccatattgcatggagtaaacaataacatcagttagcc

SEQ ID NO: 108037 - DNA, 369 bp, Zea Mays
atggagaaattgcccactgtgaaacaaactgagcaaggagcgctcgtaaactttatggcgaaatctgcggcagccgatgccagagcgcacggcgaggaagcttcacagtttgacgagaccgtggccgagcgaattttatggcgcggactggggaaggactcggcgagcaacgacgcgaggagtaaagtgaggtcgcggtcgggtgaactctatggcacggactgcttcacggacaagacagctgtcgcgacgcgcacgacgtcgccacgccacaacaccaccacggctaggctcgcgccggccgttgctgaaccacgagagcagggcgaggcgctagaatttgaggccgagcgagccgagacgacttga

SEQ ID NO: 108038 - DNA, 1480 bp, Zea Mays
gcgaggacgaggacgacgcgggcgcacgcagcagcaagctctgaccctgaaagctgaaaccgctccacgccctccccctccgcgcagagccagccaagccaaccagccagtcagaagaggaaccggggagcggcagctgcagcggccgagggcggagcacgcgaggttcaagattatccggtttaaagacatcagaagaggctgcggcatggatagataccaaagggtagagaagcctcggaatgacacgccaatcagccagaatgagatcagaatcactactcaggggaggatgaggaactatatcagctatgggatgtcgctgcttgaggaaaatggacatgatgagattagtatcaaggccatgggacgggccataaataagacagttatggttgttgaattgatcaagagaagggttggaggtcttcatcagaacactgctactgaatctgttgatatcacagacacatgggaacctttggaagaaggccttctcccactagagacaactcgccatgtgtcgatgatcactgtgacactgtcaaagaaccctctggatacatcatctccaggataccagccacctatcccagctgaagaggtgaaacctgcttttgactatgatcatgaagaatcgtatcccactggtcgtggaagaggacgtggtggtggcagaagaggcaggggaagaggcatgagcaatggcccccctccacctgcttatggttacaacgaagagtgggaggaggaaggagattattataacagagggcgcgggagagggcggctacgtggacgaggtgggagagggcgtggtggctactacggaggtgggaggcgtggtggctacggttatgattatggctatgcccccagaggcgggtactatgaagagcaagacgaatactatgatgagcccgaggaatatgctcctccccctggccgcggacgtggcagagggagaaggggcggcatgccttggcgtgggcgtggaggccgcgggccaccgcgcggtggccgagggagctactactaggcgcgagaaatgcgacgtgccgaatgcgtgtgcttattagttatctgttagcgtttgctgcagtgctcttctatggagctccgaccccggactggaattatctcgtaggcccttccaggtgctactctacttcagctgctgtccctgtgcaactcgtccgggcaagttttgtggctcgctcgtggttttgtagctaggttaagcgagtgaagttacactcggtagcgcagtatttcctgcgagattgtttattcttctgttaatgtacctaccttactatttcgtttggattatggatactgggtgcatccgtttcatgtttattctcctggtaatctgtagctttaccgacagtgtgtacgctgatgcctgctgccatacggggcagaagttttttttatgctgcagaacagagcagcagggaaaaaaagtcacaataca

SEQ ID NO: 108039 - DNA, 1522 bp, Zea Mays
gcgaggacgaggacgacgcgggcgcacgcagcagcaagctctgaccctgaaagctgaaaccgctccacgccctccccctccgcgcagagccagccaagccaaccagccagtcagaagaggaaccggggagcggcagctgcagcggccgagggcggagcacgcgaggcatggatagataccaaagggtagagaagcctcggaatgacacgccaatcagccagaatgagatcagaatcactactcaggggaggatgaggaactatatcagctatgggatgtcgctgcttgaggaaaatggacatgatgagattagtatcaaggccatgggacgggccataaataagacagttatggttgttgaattgatcaagagaagggttggaggtcttcatcagaacactgctactgaatctgttgatatcacagacacatgggaacctttggaagaaggccttctcccactagagacaactcgccatgtgtcgatgatcactgtgacactgtcaaagaaccctctggatacatcatctccaggataccagccacctatcccagctgaagaggtgaaacctgcttttgactatgatcatgaaggtgacattctcagttgatcttctcttcctaacgctgtggtcaggatcatcgcataaccaccattatgttcattgtttatttagaatcgtatcccactggtcgtggaagaggacgtggtggtggcagaagaggcaggggaagaggcatgagcaatggcccccctccacctgcttatggttacaacgaagagtgggaggaggaaggagattattataacagagggcgcgggagagggcggctacgtggacgaggtgggagagggcgtggtggctactacggaggtgggaggcgtggtggctacggttatgattatggctatgcccccagaggcgggtactatgaagagcaagacgaatactatgatgagcccgaggaatatgctcctccccctggccgcggacgtggcagagggagaaggggcggcatgccttggcgtgggcgtggaggccgcgggccaccgcgcggtggccgagggagctactactaggcgcgagaaatgcgacgtgccgaatgcgtgtgcttattagttatctgttagcgtttgctgcagtgctcttctatggagctccgaccccggactggaattatctcgtaggcccttccaggtgctactctacttcagctgctgtccctgtgcaactcgtccgggcaagttttgtggctcgctcgtggttttgtagctaggttaagcgagtgaagttacactcggtagcgcagtatttcctgcgagattgtttattcttctgttaatgtacctaccttactatttcgtttggattatggatactgggtgcatccgtttcatgtttattctcctggtaatctgtagctttaccgacagtgtgtacgctgatgcctgctgccatacggggcagaagttttttttatgctgcagaacagagcagcagggaaaaaaagtcacaataca

SEQ ID NO: 108040 - DNA, 1452 bp, Zea Mays
ccaggcccagtgtgcgaggacgaggacgacgcgggcgcacgcagcagcaagctctgaccctgaaagctgaaaccgctccacgccctccccctccgcgcagagccagccaagccaaccagccagtcagaagaggaaccggggagcggcagctgcagcggccgagggcggagcacgcgaggcatggatagataccaaagggtagagaagcctcggaatgacacgccaatcagccagaatgagatcagaatcactactcaggggaggatgaggaactatatcagctatgggatgtcgctgcttgaggaaaatggacatgatgagattagtatcaaggccatgggacgggccataaataagacagttatggttgttgaattgatcaagagaagggttggaggtcttcatcagaacactgctactgaatctgttgatatcacagacacatgggaacctttggaagaaggccttctcccactagagacaactcgccatgtgtcgatgatcactgtgacactgtcaaagaaccctctggatacatcatctccaggataccagccacctatcccagctgaagaggtgaaacctgcttttgactatgatcatgaagaatcgtatcccactggtcgtggaagaggacgtggtggtggcagaagaggcaggggaagaggcatgagcaatggcccccctccacctgcttatggttacaacgaagagtgggaggaggaaggagattattataacagagggcgcgggagagggcggctacgtggacgaggtgggagagggcgtggtggctactacggaggtgggaggcgtggtggctacggttatgattatggctatgcccccagaggcgggtactatgaagagcaagacgaatactatgatgagcccgaggaatatgctcctccccctggccgcggacgtggcagagggagaaggggcggcatgccttggcgtgggcgtggaggccgcgggccaccgcgcggtggccgagggagctactactaggcgcgagaaatgcgacgtgccgaatgcgtgtgcttattagttatctgttagcgtttgctgcagtgctcttctatggagctccgaccccggactggaattatctcgtaggcccttccaggtgctactctacttcagctgctgtccctgtgcaactcgtccgggcaagttttgtggctcgctcgtggttttgtagctaggttaagcgagtgaagttacactcggtagcgcagtatttcctgcgagattgtttattcttctgttaatgtacctaccttactatttcgtttggattatggatactgggtgcatccgtttcatgtttattctcctggtaatctgtagctttaccgacagtgtgtacgctgatgcctgctgccatacggggcagaagttttttttatgctgcagaacagagcagcagggaaaaaaagtcacaataca

SEQ ID NO: 108041 - DNA, 447 bp, Zea Mays
atgggggcgactgggagcatgcacacagaggtcgacgatgaacgaagggagcagggacaggagctgggcacgcaggcgaagggcgaccagagcacaggagccagggagcttggaccaggggcgcacgcccgtgggagctccacgacgaggtcggccaggtcgagcgacagcagggagagaaggggcggcctggcaccatggcagagggcaagaccgagctcggcgttggggcaagtgccggccatggaagtgcaccgggcgacatccgagcgtgaggaagatgaggaagagagagaaagcagggggagcgagcagtgggtgtggccatggagagggagcagggggcacgacggcgatgggaagcaggggagggagcgccgtgagctgagggagagagaagcagaggtgagggcggccggtaaaaatcccacgaggccacaaagatga

SEQ ID NO: 108042 - DNA, 534 bp, Zea Mays
tcttacctgggtatgagcaatgacacggataacagaagcatatttcttcatcttctcaagctgcagctgaatttccttcttgccagcatcattttcatatttgagagcatactttgtgaaagccttcttcttgctcttgcaccagttcttgtagaaccttctcctcacttcttcactaagatgttgggcccaaacagagttgagtgtgcggaggccacgaggagtcttcacatatgccacgagcccaacaatgacaagaggaggggtttcaatgatggtaacagcctcacaagtttccttcttatggagttctgtagaaatcaagtaggcagagcagttacgataatggagtgaaatgcttaattgattaataaaaaagaagggggtggacatactggatcctggcttctcaacctcacggacaatgtgagtcatgccagccttgtagccaaggaaggcagtgagatggcaaggcttcttggggtcatccctagggaatgacttcactgcaaaaacaggaaaactactatcaga

SEQ ID NO: 108043 - DNA, 914 bp, Zea Mays
aacaacaaaacaattgaaatctatatgtaatgattggggcattaaacaaccaaaatagcacaaaacatagacactacagttctgaagcatggaacgatccatagaagaccggaccatgctcctaaaccatccggctacaaaacttggtacagcaaggttacaaacaaaagtatcacagtttgatgattttgagaaatgggacttcgctgcaccgcagcaccttacgccttgagcttgccaaagaacctctgcttctcatcggtagtctggaagcgaccgtgcccaaatttggacgatgtgtcgatgaacttgagcttgatctcctccagcgccagccgggaagtctgcttcaggagggactggcggagggtcaccaccctcttctttggtcccacacagcagcccttgatcatcaggtagtcacccttcacgataccataatgggggaagccacccatgggagtgatgtccttctcatacctgtcaaactctgtggaggcatcgtgggtctcttgtccagccttgccgatcttgtacaccttcttgttcatctcagtgcggtggtggtacccattctgaccagcacgggcaaccgtataggagaccctagccggatgccatgcaccgatacaagcaactttgcggagacccctgtgggtcttgcggggaagccgggtgacaccccaacgagtgaccacaccctcgtaacctttccccttggtcacaccaatgatgtcaatcatctcatccttctggaagacagcatcaacagggacctctttctcaaagaatttgtagccatagtccaccttgtcagcaatggtaccaccattgacctgaatctccatcaggtgagccttcttctgcttcaaacccttcatcttcctaatctaaaatatacaaatacataaaag

SEQ ID NO: 108044 - DNA, 1011 bp, Zea Mays
atgaggcgtcttgaatttgccttcttgttcaaggtaagcacgccaccgcgacgtagcggtgggaggaggaggagcatgatagggagaagcgagacccacaagcgctggcttcgacgagagctgggcataaccaaggatgtcacgtcgcttgtgcagataattaagtttgttcagcttcatgctcatttaaatggtggtgctgagtctttcttaaatgtcaagtcttggtttgttggtttgctctgtagtgacggagaagtaatcgaagagtttggtaaacctactggcagaggcaagcagaaattaaattattgcttatatatggctctcacgtctgaacttattcgtaagggttccaagtctggagcttcgtcgaggtgtgctggttgtcaaggttctggcttcaaggtccaaatccggcagttgggacctggaatgattcagcaaatgcaacatccttgcaatgagtgcaagggttctggagagaccatcagtgataaggatacatgcccacaatgcaaaggtgataaagttgtgtcggagaagaaagttcttgaagtggtagttgagaaaggtatgcagaacgggcagaagatcacattccctggcgaagctgatgaagcgtttgttctgactcacttggataacaggcagctgctgatcaaaccgaaccctggcgaagttgtgaagcctgattctttcaaggcaatcaacgatgaaggcatgcccatgtatcagaggcccttcatgaagggcaagctgtacatccacttctcggtggagttcccggactcgttgagcctggagcagtgcaaggccctggaggctgttctcccgcccaagccaatatcacagtacactgacatggagctggacgagtgcgaggagacgatgccctacgacgtgaacatcgaagaggagatgcagaggcggcggcagcaccaggaggcctacgacgaggatgatgatgtgccaggcggtgggcagagggtgcagtgcgcccagcagtag

SEQ ID NO: 108045 - DNA, 199 bp, Zea Mays
agtcggaaatgggatctaggcacattccaatctgagagaagtatggggatgagagaggtaggatttggctttgtattggcagggaggttcttgcgaagaacatgatgaagttcctacaactaatggagttgtccagaaaattcctcgaattgaagcatctatccaggagcaacatctgcttgagtcggtggccatgtga

SEQ ID NO: 108046 - DNA, 693 bp, Zea Mays
atggcgaataggaaatcgacaaccggcgaaaccgatagccgaataggaattgcacagatcgacgacgcgtggcccgatctggtgagcacgacgcaaaggagggcgttgttgccgctgcttcgacacgaagtacttgctgccgaggcagacgagcaggacggaggctggggtctaggcatcgagccagcacatcacgcggtttgggaaccacaacacccacacgaagcgcttgccgcagagcaccagatcgcttgccattcgcgcagagctccaaaatcgtgtgccgaactgggagccgaggcgagtgtggcaagtgagctgaggggggcaccagggaactcaacggtggccagactgggcaagcgccatgggagaggcgcgctgacgaggaagcaggaagccgcgacgagggagctcggcgcgtggccgactggagcagcgcgcgagcagaggatagggagggagaagcaaggggattcgacgagctggagatggatggaggaaactccgagctgggctacggccggacgctggggagaagacgagggcgcgctacaggggcacacgacggccggactgtgtcgccatggcaaggtggtttctgcagctcgattcggctcaggcggtggcgcgcttcgtccaccactcgacgagctgcgtgaaccccgcgaggaaggtgcccatgggaagtaa

SEQ ID NO: 108047 - DNA, 659 bp, Zea Mays
ccttaatcattacatcattatcatcataacttcataaggaaacaaatataaatttctcttgcaattgaaagctgtccaaagttccttaacctagattacagtcagataacatttttacttgctagatcattcttcgttgatctttgcacggctatgctttctttgcttgcacgagtaagggttttgatccaacagatgttacttgatgtcgtgtctatatacaataaggtcactcatattactgaaaggaagtaggctgttaagattagcatctgtggagtgcaggctttcagagagtactacccctctatgaatgatgcatgtacagttctagagtgtgtatggataaaagataaattcgttttgcatgaaaaggttaaagatatctctcaggaaacccaagttgagaatcagaagtgctacggtcctgaatctacagtccaatatgaaacaattgcactgattagtgaaggttaaaatgctttatcttctatttgttacaataaatgcatgatgatccattgatcttgattttttgttgctttgtcagaattagctgacatgctcatgaatcatgagaatccttggtgctttgttgctgatttggtttgaaaaacaagcactttgtagtgtattgcattgttaagagcatagctcaa

SEQ ID NO: 108048 - DNA, 627 bp, Zea Mays
caatcatctaaatatgatttacaataatctgaattaaacagatcttcctgctagtaatttttctcattgaactaattacaatcatttgaattacaatcatatgaactatagtagcaacttaaaatatggataacaaaaaacaaaaactattaaacagaaactatgattgtaattaaacagaaactatgattgtaattaaacagaaactatagtagcaacttaaaatatgataaacaccgtgaggacagcactggaccaagcgccacatcatttgaaggacctgacaacgaatatgatggaacgtggcaccttctagtttagatgaaagacgatccaggccttcctagaggttagaactgctagtaaacagaatctgacatccgaataattcttctcattaaacagaaactgacttaatggcgcaaagaccgctagtaattcttctcattaaaacacctcctgatgacaataaaactgctacaagaaaagagaagaaaagagaagatataggagaaaggaaactgcctcagatttatatgaactatggtaacaacttaaacagaagaaaagagaaggaagtcatgagagtaaaatcacttgatcatgagagtaaaatcacttgagaag

SEQ ID NO: 108049 - DNA, 1735 bp, Zea Mays
cctcccgcgacgagaagctcgcccgcaacctctccctcggccccatcaagctcgccgagcacatcaaggaggcgcggaaggataaagcagccgtcgacaatgccgatgccgcgccatggcggaggctatgttcgccgcggggtacgagacggagtgcacgcaggtgttcctggtggcgcggcggaacgcgctggacgcgtcgctgcagagcctcgggtacgagaaggcgagcatcgacgacgtggtgaagatgccctgggaggcgctggagtcggagatcgggacgtggatcaaggccttccagcgcaccgtcgaggtggacctccccggcgagagggacctgtgcgcccgcgtcttcgccggcaggcaaaggtgcttcgggcgcgacatcttcgccgacctcgcgcgccgcgcaatgctgctcatgctcaccttcacggaggccgtggtgctgactaagcgcgccgcggagaagctcttcaaggtgctggacatgtacgaggccatccgcgacgccgtcccccgggtggacgcgttcctggtcgcggccaacgacggcgaggggggccctgccccagctgacgaagacggcggcagcgcgcccaccgccctggttgacctcaagcacgagctggcctccgtgcgcacccgcgtaggcgagtcggcggcggccatcttttgcgacctggagagttccatccgggcggacgccgggaagcagccggtgcccggcggcgcggtgcacccgctgacccggtacctgatgaactacctcaagtacgcgtgcgagtacaagaagacgctggagcaggtgttccaggagtaccggcgccccgacgacgacgcggaccacgagggcggtggcggggacccgttcgcggcgcagctgatggaggtgatggagctgctgcacagcaacctggaggccaagtcgaggctgtacaaggacccgtcgctgagcagcatcttcctgatgaacaacgggaggtacatgctgcagaagatccggggctcgccggagataaacgcggtggtcggcgaggcgtggtcgcggaagcggtcgacggacctgcggcagtaccacaagaactaccagcgcgagacttggagccgcgtgctcaacctgctgcgcgacgatggcgtgatcaccgtgaagggccacgtgcaaaagcaggtgctgaaggaccggttcaagcatttcaacgccgccatggacgagatccagcggacgcagggcagctgggtggtgagcgacgagcagctgcagtccgagctccgcgtgtccatcgccgcggtcatcgtgccggcgtaccggtccttcctgggacggttctcgcaccactttaccgcggggaggcaggcggagaagtacgtcaagctcagcggcgaggacctggaggccatcatcgaggagctcttcgacggcaacgccgtgtccatgcccaggagaaggacgtaattaacaaggacccggccccccgtgcgtcactaattcggttttacgagccattgttgcagtatcttattttctgttttttcttaatttcgatcgttcttcagagttgctcttctgcattgctctttgctcaatcacggcagatagtggtgtaaccgtcgattaatcgattcatgtacctgttcatatatattactccgtgtaaaaataactgtcataaaaaatacattactccctcaaccctcctgtgaaaaatacttaacatattttactttgttt

SEQ ID NO: 108050 - DNA, 2220 bp, Zea Mays
gacctctcctctctctctctcctacacctcctccattccctatcctccctccacgcttctctcccccactgcatgcctcagaaaccagacgcggcagaccagccattattgaggcattgaccttggttcgttgcgccgagcttggccgcggcaaggaatggacaggatccccgtcacgccgcttaagtccagcagcttctcggcggccacctcccgcgacgagaagctcgcccgcaacctctccctcggccccatcaagctcgccgagcacatcaaggaggcgcggaaggataaagcagccgtcgacaatgccgatgccgtgcccgaggaagccgcggagccggacctcgcggcgctgtcggctgagatcgacgcgttccttgcgtcccacagggacggcgacgcgccgatggcggtctcggaggtgacgctggacaagtttgccagcgccgtcgagcaggagattgcgcagtcggagggcacggacgacaagtgggcgccgagcgaggccggggatgcgccgccgctcgtcgccgcgatcaggcgcctgtccgcgctcgcttgcgcgctcaccgcggacaaaacgccgggcagggccaccacatacagcatcggggtgcaccgcgtcaccggcgtgctgcaccgcgccatgacgttcgtggaggatgagttccacggcacgctcgaggacccccgcgtcgccaaggtggtgccgcaggccgccgacacgggcagcgccacgggcaggtccatgaagcggccgccgtcgttcgggcacggcgccgagctcgaccgctgcgttgtcccgaccccatgggccgacgcctcgccgccgttccctccggagaccgtggtccggctccgcgccatggcggaggctatgttcgccgcggggtacgagacggagtgcacgcaggtgttcctggtggcgcggcggaacgcgctggacgcgtcgctgcagagcctcgggtacgagaaggcgagcatcgacgacgtggtgaagatgccctgggaggcgctggagtcggagatcgggacgtggatcaaggccttccagcgcaccgtcgaggtggacctccccggcgagagggacctgtgcgcccgcgtcttcgccggcaggcaaaggtgcttcgggcgcgacatcttcgccgacctcgcgcgccgcgcaatgctgctcatgctcaccttcacggaggccgtggtgctgactaagcgcgccgcggagaagctcttcaaggtgctggacatgtacgaggccatccgcgacgccgtcccccgggtggacgcgttcctggtcgcggccaacgacggcgaggggggccctgccccagctgacgaagacggcggcagcgcgcccaccgccctggttgacctcaagcacgagctggcctccgtgcgcacccgcgtaggcgagtcggcggcggccatcttttgcgacctggagagttccatccgggcggacgccgggaagcagccggtgcccggcggcgcggtgcacccgctgacccggtacctgatgaactacctcaagtacgcgtgcgagtacaagaagacgctggagcaggtgttccaggagtaccggcgccccgacgacgacgcggaccacgagggcggtggcggggacccgttcgcggcgcagctgatggaggtgatggagctgctgcacagcaacctggaggccaagtcgaggctgtacaaggacccgtcgctgagcagcatcttcctgatgaacaacgggaggtacatgctgcagaagatccggggctcgccggagataaacgcggtggtcggcgaggcgtggtcgcggaagcggtcgacggacctgcggcagtaccacaagaactaccagcgcgagacttggagccgcgtgctcaacctgctgcgcgacgatggcgtgatcaccgtgaagggccacgtgcaaaagcaggtgctgaaggaccggttcaagcatttcaacgccgccatggacgagatccagcggacgcagggcagctgggtggtgagcgacgagcagctgcagtccgagctccgcgtgtccatcgccgcggtcatcgtgccggcgtaccggtccttcctgggacggttctcgcaccactttaccgcggggaggcaggcggagaagtacgtcaagctcagcggcgaggacctggaggccatcatcgaggagctcttcgacggcaacgccgtgtccatgcccaggagaaggacgtaattaacaag

SEQ ID NO: 108051 - DNA, 103 bp, Zea Mays
cccaacatgacattgcaagtataaattatatatttatttatattgattgctttgtccatgccaaaaaaacatataattcgataaggcatgatttatataaaat

SEQ ID NO: 108052 - DNA, 1709 bp, Zea Mays
tcaccacgccaccctccccattccccatcaccattcactcatccaccaccgccatccccccacgcaatctcaccggaaaaacgcctgctcgagttgagctgagctgggccgccatgcgcccacggacccactgagccaaagccccaccgaccccaccacaacgctgtcggccattccctgtccaagatccgcgcttcgattcgtccgccgacgccgagaccgacaccatgccggccacggacctccagggctcctccccgtcgacgcacgcccactcgtccccgttcccctcgttcggccgcacgctcctctccctccgccgcgacgccccggcggccgcgatgccgccgccgcgcggcgccggcccggagctcggggacttccacgcccatgtcgctgtgcgccttgcgggcctgagcgcgcccggcggggaggagttcatgtccgtcgcgtgggtccggcgcctgctggaggcgttcctgctgtgccaggaggagttccgggcggcggtggccgaggcgcggcgccgcggcggcggggtcacggcccccgcggacgcggagaagctggtggcggaggtcggcgagcgcgccgtcagggcgctcgacgtctgcaacgcggcgcgcgacggcgtggaccaggcccgccgctgggagcgcctcgcggggctggcggcctccgcactgctggcgcccgccgaggggcaggtgcacgagggccagctctggcgcgcgcggaaggcgctctcggacctttccctgctcctcgccgacgatgccgccgccgcctccgcgggcgccggcggcgggctcgcctcgttcctcgcgtcccaccgcaaccgctccttcggccgcgcgcgggcgtcgccgtcccgcgcctcgccctccgcgcacttacgctcgctgtcgtggagcgtgtcccgcacctggtcggcggcgcgccagctgcaggccatcggagccggcctggccgcgccgcgcgccaccgaggcctcctgcggcttcgccgcgccggcctacgccatgggctgcctgctccacctcgccgcctgggcgctcgttgccgccgtgccgtgcccggaccgcgccgccgcgctgcaggcgcaccacctcccggccgcgccgccgcgcgccgcgttcccctgggcgccgccgctcctcgcgctccaggaacgcctcgccgaggaggggaggcgcaaggaccgccgcagctcgtgcggcctgctcagggaaatccacgcgctggacaagtgcgcgcagcggctcgcggaggccatcgacgccgcgccggtcccgcttaccggcgagcgggaggccgagctgcgtgaggctgcagcggaactcgccgcggcgtgctccgccatcaaggacgggctggacccgctggagagacaggtgcgggagctcttccaccgcatcgtgcgcagccgaatggcgggcctcgatccaccgatggccaatgcagattgagctctattcaagatcatcatcgtcttgccttcgatctcacagtgtggcggtgctcttgtgaattgtgatcagctagtggaaagtataaaatgtgtgtccttctgtaaaggattacacaaagaggaaagggaaggtgtcatctttgggtaaagatgattccttattcccatgttttgatgctgcatttgctgtatatccttgtgttttttgatagtgtcacgtctgtgcgcagctaattct

SEQ ID NO: 108053 - DNA, 1805 bp, Zea Mays
aatcctaaattacttttccaggtgacaccgtgatattgctgtgaagttttgtggcacttcctgcatcccttatatggtattaacaaaaattttaattgtctgggtgatccatttgagcaaatggaaggcaacgatgtaccccttggaaacatgttgcaaggggttccctatgaaagtttagacttacgtggcagctctatgcaaaattatgctccaaactcaggaaaacatatcttcagcagctcccagatgccaggtactttcacaatgtctatgaccagggctacagagcctgatgactttcctgggtttcagttcaaagaacagggaaagagtgatgaccaccaccaccaacaccatagtcatcactcaaagaactgcaagagtgatggtgaggaacatgttgtggctgaagatgctactgataccccaagtggcaaaggcaagaagggctctgcatggcatcggatgaagtggacagattcaatggtaaaacttttgataacagcagtgtcttacactggagatgatcatggtgctgattccggcggtggcaggaggaacttcacaataatgcagaagaagggcaaatggaaggcgatatcgaaagttatgggagagagaggctgccatgtgtcaccgcaacagtgcgaggacaagttcaatgaccttaacaagagatacaaaaggctgacagacatccttggtaggggcactgcatgcaatgttgtggctaatccagcacttcttgatagcatgactcatctttcagataagatgaaagacgatgcaaaaaagatacttagctcaaagcacctattttatgaggagatgtgttcctaccacaacaacaaccgtgtaaatttgcctgaagatcatgcacttcagcattcactactgcttgcccttagatgtaaagaggagcatgatcctcagagggatccaagtggagatgctgatgaatacgatcaaagtgctgattctgattatgaggagaatgacgacgatcaacatcctgtgcatataaacatgagggagccctcaatgcacaaaaggaagcgccacagtgatgtggctttggtcacatcaagttctcatgaaggcagtgagaggtctgatccccatgctgtcacagtggacatcaacaaggctttcacagatgcaaccaacatggttttgttgcaacaagacttggcttcacaagccatagagattcagaaacgtcgcttgcagattgaagcaaaggaactggaactcacaaagcaacgtcttaagtgggagcggttcaggaagaagaaggacagagagatagaaaggattgcattggagaatgaacatatgatgattgagaacaaacgcttggagcttgagctgagacataaggagttagagctagagctgaagctgaaagacaaggggaaccatccgtaacttttgcttgaccaacactacagtatgtaagatggtaaacaagtaagtgggcttttgaactctctttactatggaaaggctttatattcatcatcttgagcagctatttttatttgaaccttttccattttgatttactttttctgaacacaattttaatttgctagatatggaactctcttgtttgtgttttctgttaatatagacattttttatccgtatatttaaaagtgtatcaatgtttgtcgttacagggaaccaaatacatttgtgtcatgatttttaagccaggcaattcataatactttttctcatatttgcatataagaaaaccattgctttaatcatcaacatgtgattggctgcatttaccg

SEQ ID NO: 108054 - DNA, 1977 bp, Zea Mays
gtatagtttaatggttttctagtcgtccgtcctcctcggttctggctgccaaccccaagaactgccttgcctagtgcctactgcctagggaaggaccgaaggagaggtgcgcggctggtggcgtgcgagtggcagcggcgccgcgggactcttctcctcgccgctcgcctgctgggtgcgccatccctcgacggtgacaccgtgatattgctgtgaagttttgtggcacttcctgcatcccttatatggtattaacaaaaattttaattgtctgggtgatccatttgagcaaatggaaggcaacgatgtaccccttggaaacatgttgcaaggggttccctatgaaagtttagacttacgtggcagctctatgcaaaattatgctccaaactcaggaaaacatatcttcagcagctcccagatgccaggtactttcacaatgtctatgaccagggctacagagcctgatgactttcctgggtttcagttcaaagaacagggaaagagtgatgaccaccaccaccaacaccatagtcatcactcaaagaactgcaagagtgatggtgaggaacatgttgtggctgaagatgctactgataccccaagtggcaaaggcaagaagggctctgcatggcatcggatgaagtggacagattcaatggtaaaacttttgataacagcagtgtcttacactggagatgatcatggtgctgattccggcggtggcaggaggaacttcacaataatgcagaagaagggcaaatggaaggcgatatcgaaagttatgggagagagaggctgccatgtgtcaccgcaacagtgcgaggacaagttcaatgaccttaacaagagatacaaaaggctgacagacatccttggtaggggcactgcatgcaatgttgtggctaatccagcacttcttgatagcatgactcatctttcagataagatgaaagacgatgcaaaaaagatacttagctcaaagcacctattttatgaggagatgtgttcctaccacaacaacaaccgtgtaaatttgcctgaagatcatgcacttcagcattcactactgcttgcccttagatgtaaagaggagcatgatcctcagagggatccaagtggagatgctgatgaatacgatcaaagtgctgattctgattatgaggagaatgacgacgatcaacatcctgtgcatataaacatgagggagccctcaatgcacaaaaggaagcgccacagtgatgtggctttggtcacatcaagttctcatgaaggcagtgagaggtctgatccccatgctgtcacagtggacatcaacaaggctttcacagatgcaaccaacatggttttgttgcaacaagacttggcttcacaagccatagagattcagaaacgtcgcttgcagattgaagcaaaggaactggaactcacaaagcaacgtcttaagtgggagcggttcaggaagaagaaggacagagagatagaaaggattgcattggagaatgaacatatgatgattgagaacaaacgcttggagcttgagctgagacataaggagttagagctagagctgaagctgaaagacaaggggaaccatccgtaacttttgcttgaccaacactacagtatgtaagatggtaaacaagtaagtgggcttttgaactctctttactatggaaaggctttatattcatcatcttgagcagctatttttatttgaaccttttccattttgatttactttttctgaacacaattttaatttgctagatatggaactctcttgtttgtgttttctgttaatatagacattttttatccgtatatttaaaagtgtatcaatgtttgtcgttacagggaaccaaatacatttgtgtcatgatttttaagccaggcaattcataatactttttctcatatttgcatataagaaaaccattgctttaatcatcaacatgtgattggctgcatttaccg

SEQ ID NO: 108055 - DNA, 1723 bp, Zea Mays
gtatagtttaatggttttctagtcgtccgtcctcctcggttctggctgccaaccccaagaactgccttgcctagtgcctactgcctagggaaggaccgaaggagaggtgcgcggctggtggcgtgcgagtggcagcggcgccgcgggactcttctcctcgccgctcgcctgctgggtgcgccatccctcgacgccttgcaggcgtatttggaagatctgggcgccgttggagacttggagtgcaagttctttctctggatggcggcacacgagcggtgctggacgtcaggccgcgtggctcaccatggactgcctgtctgcccccaccctccacgctgccctttatgtgaccaggagacgggcgggccccattcaattcaagggtattaaaatgaatacccattatttgtataaaaaataaatatatacatatatatagtatatatatacatggaaaataggaaataaatcaaataaatgaaggaatatttttaacttggaccaaatatctccttcccgtctcccatacctaaccagcccaatagaatgtcgtggcccatgagactcaacagagcgacaaagtccacctcagtacctcacgggaaaaaaaatccccaaaccctattgtagtcgcaccatgatagagccaccatagcgctaactgccaagtcgtggtcgcgtcttgctgccctcgcgtgcccgcatggagacacgagcacctctgtcgccccaccgcggctttgtggtgccactaggtgcccatacctgactggctaactgtcgctgcgtcgcacttggccttgttgttgagtcgcccgtcatccgaggcttcgatccaccgcagtcagggtgccaccgcgtgccaagacagacccctagggggcagggtccgtgccaatgtccaagccaacccagccggcagccacctgaccccgacctctcctgcttggctgcttgcagtactgtgctgcaggtggggcattagcgattgaaagagtcaaagaggcaaacaaccagctagcaactgagcaacaaccaacatgtgcattttgatttaaaacttttgaaaaagttgtatcgaatttgagtttagtagactagctattgaatcagttatgaccatatcgtgtgtgcttaattatagattatatatatgctgatagacaagttttaggtcttccaaaaaaagtttcatcctaaactttccaatacccaccctctaaatcctgggcccgccactgccaggagaatgagactatcaaccatgtcttgatatcttgcgtattctcacgccaagtttggtttgttgtgcttcatcgtctgggacttgatgtccttgtgccatcacaaaatgacgacaagttccaagcatggtggcgacgaagcacgtggagggcacccaaggcagcgaggaagggtctaaacacattagccatcctcgttgcttggatgatcttgacacattggaattaatgcgagtttgatgacatctcaccgttggaggtgaatggtgttacatgaggtgaacaacccaggtcacctttgggcgatggaaggagccaaggctctagtctctcttctaggacattagctaggctatgctgtttgtatctaatttagagtgcggatgtacaagaaaactaacccaagctgtggaatcgacatatatttggactgttttgtctacctattaatgaaacgagacgcaacctgtattttcgag

SEQ ID NO: 108056 - DNA, 434 bp, Zea Mays
ttacaaaatcaaaggagcaaccagacatggctgtcatgatctaagatacttcaacgtgattggatcgaacccagacatatgactaggagaagctccaaggccactttgtcaagggtctctgcaatgcacttactggttgcatgatttactggaggttgtgcgcatgaatgtgccacacattggtacggggattggagttgaagcagataaatttcaccaacattggagacatgattgtcattcctatcctgtgcacactgcctcctcgccgtcattcatcgtcacccttgcagtcccgataccggagcatggttgccaggggagagcagtccgagacaaatttgccatgttggggcagtcacaggagccaaggggttgcagtcacaggtcctgctagccaggatggagcaatcataggacctcctagcagtcca

SEQ ID NO: 108057 - DNA, 429 bp, Zea Mays
atgaaacagggaatagtgtctacccagcacaaccgtattaccacaggtgtcacacacgaggaaccacaaccacaagatgctggtcagcagctgttcgggtgttcgggcgtggctcacctaacggctgcatacagcgagaccgacttgaagttgctccagatcgaggcggccaccaactctcggatggtggcgccggagtcatccgtgcgctctgtcgaggcttggcgcccgcgcgtggactcgacgatcgatgccctacgcttgtccctggactacgtcgccaccaaggtgtcaaagatggagatccagtggtcgcgtgatccacgcgccgatggctacaacaagccaggcgtgctcagagcacatgggtcggtgcccggacgaccacctgtcaccgcggcatacagtaccctgcgtggtaaccaatga

SEQ ID NO: 108058 - DNA, 654 bp, Zea Mays
atgagaaaggacattttggagggctctattgctgttcgtggtagggggaaaaacaaaaggaagtggattcctgttgaagatgatgaactgatcaaagcattggttgatgtttctttggatccgaggtggaggagtgatgggagtttcaagaatggttacacttcagtacttgaagctcgcctcgctgaaaagctacctgattcaaaaatttctgcaactcctcatatcgagtcaaggttaacatacttcaagacaaagtattctgctttggagcagatgttgaacaagagtgggttcacatgggatccgaccaagaagatgattcattgcgagaaacaacaatatgagacacattgcaagaataatccagatgcaaaagggttgtatggagtgtcctttccttactatgatgaactttcaatggtatattccaaggacatggccacaggtgaaggtgcggaagacatgacagatgctgttcaaaacttggaagaagagctagttcgtgtaaatgctaatgatgaagaggatggagaggatatgacatctgtagagacaccaaggcgttctgttgactcaacatcatctagctccaagaagcggaagaaagagtggaaaggaaagaagacttcatcaagtgacccaatgaagtga

SEQ ID NO: 108059 - DNA, 111 bp, Zea Mays
gctgcccaaaaattggctgaaacccgattagtgttgtttttgtttttgtttacaagcgaacaaacattggctgaaatcctacccgcgggtatctgatatgaacacgtttac

SEQ ID NO: 108060 - DNA, 1451 bp, Zea Mays
cgtaaacagccccggaaaaattactcttgtgggttcccacctggcgactgtttttcttctccagtacacctcgccagcgcgataacttaactgcggcggcagccgccggcccgccgcccagctgcgcaggtcttcgtcgcgccggccactagaacgcagcacataaggttttatcgtttggtaatgatgatttaatgtattttcgtggactaaagttgacccatacctccagcaaacttttcatcatggatgaactggatgaacgggagttggtttttgcatgggaagataaagacaccatcattgatcagcttaacaggattgatctctctgactgggaggaccatgaatcgagccaggaacttggaggctcgttaacgagatctccagatgcagcgatcggtattcttatgcgcgtcctaaagaacgccccaggcctcagggaaaggctactgacagtccccagtgctggcacagttcctcaagaaccttcttcactccagagggtagtgactgaggaacatggcagcggagcatcaagctctgcggtggtgccttctgctcttctgaggtcaaggacagcggcggacgcgctgcaggagctgaacaggtacaagcagattagagaatcgatactgagccgcagcagagggcatccctgcagcaccgagctggaggagaaccccgcggatggagacccatagcatacagtatgacgacgaaagcgagctgtatataagtagagaaggctagaagctagctggctgtcttttaagttgctggtggctgctgagatgattttggaaattaggtagctgctaggaactgaccaactctctatatctgctatacatgtataagctacggcagacatatatatctgggatgatggcccacttgctgggttgtgtaaagtcgagacgtttaactgaagttcatgccgtgaaaatgtggttgaccttggctctgttctgtcgacgatttgttaccggacccatgaaagatcttgaagtgttctgtattaaaaaataggatccatttttttatctgttgagatttaatctcggataaatgtagttttcgatgcttcgatgcaagtggtacccaagaaagacacttttcgttacttaggatcaatgcttcagaaagagggagacatcgatgagaatgccagtcatagaattaaagttggatggttgaagtggtggcaagctgcaggtgtcttatgcgacccccgggtgccacacaaactaaaagacaaaaggcctgtttggaacactgcctcggcagccacatcccgccacactcaggacgccatagttgtggcgctcaaattggcagccgcaccttaggcgtgctgcggcgccgcatgcgtctgtccaaacagacccaaattctacaggacaacaatctggtcggctatgttgtatgtagcagaatgttggcccact

SEQ ID NO: 108061 - DNA, 1568 bp, Zea Mays
taccaaaccaacacggcaacacccattccggcagcggcaggcatctcctctcccgccccgccccgagcaacgcccgctaggctcaggctgctgctacccgcagtccccatccaccctacccgcagtccccaccgcaaccgccgcctcggcccgggctgtgttgacccccgttgacctccgccagcccggccgtcatggacctgcgcttcccgccgccggcgccgtcgtcctgcttcggcgggggcggtgtgctcccggcacgggggcaccaccggcgggcgcaatcggagacgttcatccggctgcccgacgcggacctcctgctggacccggatgccgacttcggcttctccgacatcgacttcccctcgctgtccgacgactcgcccgcggcgtccgacccgacgccgcagccgcaggccccgccaccccagcagccgcttccgcaggcggcttcgccggcgtctgcggcgccgccgaggccgccgagcggagcgcacatgcggagcctctccctcgacgccgccttcttcgacggcctctcgctacagggaggcgggggcgtggcggggcacaagaggagcggctctatggacggggccacctcgccgttcgagggcgagtccgcgccgacgtccgtgctgccggactacgccaagaaggccgtgcccgacgacaggctcgccgagctcgcgctcctcgaccccaagcgcgccaagaggatcctggcgaaccggcagtctgcggcgaggtccaaggagaggaagatcaagtacaccagtgagctggagaggaaggtgcagacgctgcagacagaggccaccacactttcggcacagctcacgcttcttcagagggacacctctggtttaaccactgagaacagggagctgaagctccggctgcaggccatggaagaacaagctaaactccgagatgctctaaatgacgccctgagagaagaagtccagcggcttaagatagccacagggcaggtccctaacataaacgggaatcccttcaacggaggactaccccagcagcagcaggtgccgagctatttctcacaaccacaggggatgcaatacttcagcagccaccagggccagcatcagcatccgaaccatcaccctcagagttcttcaaacggtggtggccagtccttgagtgactccatggatttcatgtgaggaccgaaggagagacagctcaggagttgcctgagatcacataccaactaaagtactgtaaaaaggttgctgatgtataccatattcagtattattatgatacgcgtcattgtaggttagctagctgttccttgtaccattaatcagaagttcattcatgcatgaattgacaacctgtcattgctttcgtttctggggttcaagtaaaatcgtttgactgcttgacgagttcagtgtcggtgttgccatgtaaagtcgttcttgtaatagtgaatgaatagttcccggttggaactagtggttttttacactgctgaaagccatcgtggttggcaataatgtctcatggtcaatgaaacgtgaaataattctgcctgt

SEQ ID NO: 108062 - DNA, 1678 bp, Zea Mays
taccaaaccaacacggcaacacccattccggcagcggcaggcatctcctctcccgccccgccccgagcaacgcccgctaggctcaggctgctgctacccgcagtccccatccaccctacccgcagtccccaccgcaaccgccgcctcggcccgggctgtgttgacccccgttgacctccgccagcccggccgtcatggacctgcgcttcccgccgccggcgccgtcgtcctgcttcggcgggggcggtgtgctcccggcacgggggcaccaccggcgggcgcaatcggagacgttcatccggctgcccgacgcggacctcctgctggacccggatgccgacttcggcttctccgacatcgacttcccctcgctgtccgacgactcgcccgcggcgtccgacccgacgccgcagccgcaggccccgccaccccagcagccgcttccgcaggcggcttcgccggcgtctgcggcgccgccgaggccgccgagcggagcgcacatgcggagcctctccctcgacgccgccttcttcgacggcctctcgctacagggaggcgggggcgtggcggggcacaagaggagcggctctatggacggggccacctcgccgttcgagggcgagtccgcgccgacgtccgtgctgccggactacgccaagaaggccgtgcccgacgacaggctcgccgagctcgcgctcctcgaccccaagcgcgccaagaggatcctggcgaaccggcagtctgcggcgaggtccaaggagaggaagatcaagtacaccagtgagctggagaggaaggtgcagacgctgcagacagaggccaccacactttcggcacagctcacgcttcttcagagggacacctctggtttaaccactgagaacagggagctgaagctccggctgcaggccatggaagaacaagctaaactccgagatggtacgtagtctttctccggaaggtcttgagccactatcataccaggcccagaaagcgactcactttccctgtttcaagatcattacaaggcaaacgatatcaaccgatcactctaaatgacgccctgagagaagaagtccagcggcttaagatagccacagggcaggtccctaacataaacgggaatcccttcaacggaggactaccccagcagcagcaggtgccgagctatttctcacaaccacaggggatgcaatacttcagcagccaccagggccagcatcagcatccgaaccatcaccctcagagttcttcaaacggtggtggccagtccttgagtgactccatggatttcatgtgaggaccgaaggagagacagctcaggagttgcctgagatcacataccaactaaagtactgtaaaaaggttgctgatgtataccatattcagtattattatgatacgcgtcattgtaggttagctagctgttccttgtaccattaatcagaagttcattcatgcatgaattgacaacctgtcattgctttcgtttctggggttcaagtaaaatcgtttgactgcttgacgagttcagtgtcggtgttgccatgtaaagtcgttcttgtaatagtgaatgaatagttcccggttggaactagtggttttttacactgctgaaagccatcgtggttggcaataatgtctcatggtcaatgaaacgtgaaataattctgcctgt

SEQ ID NO: 108063 - DNA, 259 bp, Zea Mays
ctccatcctgctggatccaaatctatggtcagttccctatgccgtgacctatcatatatacttactacaatcctctctgctagcttgtatcattgatatacatggtgtttgtctgaattgtattttcaggaaaaattgcgcagctaggagcagggtaattatctactgcctcaaataatccagttaattaattagtaatgatgttgatatgtgttgtatttgggtcttttgaacaggatatttcttgtagttcagctca

SEQ ID NO: 108064 - DNA, 1108 bp, Zea Mays
ctttctccttccattccacgcagaaaacagaaccgaagcatatagatcatcacacccacaccatccctcgcaacaatggcgtgccaccaaaggtcgacgagcctgccttccatgcctcgctccaccgactccagcagcgtggggcaagagcaagagctgcaggccctgaaggttggcgcctcgtcgccctcggcgaccatcgagaccacgcgcgacggtctgcggaggctcggcgacctctacagccgtgtggagaagacgctgcacttgcccagcaaccagctggccttgcgccgccgcttgacccagcagcaacaagggaagacggcggcggaggaagagctcgacaggtctctcgcgctgatcgacctctgcggcgccacgcaggagagcttggcggagctgaggacgcgcgtccaggacctgcgcctggcgttccggagaggagacgccgccgacggcggcgcaggtatccagctcaaggccgagtctttcgtccgtctggcgaggaaggcacgcaggcctcctctgaagaagacgacggccggcaacggcaaagccactgctgaagatgggtgccgagtggtcaggctgatggcggaggccagggagacggctgcccgtctgcttgagtccgtgtcacgcctcttgccggagcagatcggcagtctgaatccgaacgcgagcagatggtccctcgtgtccaagaggttccggaagagagaggctgtgtgcgaggtcgaggagcggcagctgcaggcgctcgagcgcggcgtgggagacctcgcggatggtgttgatgtcctgttcaggaggttgattcaatgcagggttgctctcctcaacatccttagctcctagatgcttctcatgaatggcgatgcagtatatatgcacacaagttcgcaatttgtatctggacacaaataaaatgtagataaagcacgccattggccattccaatagatatattctcatttctggtgatatagccagatgaaggtgaaacatcacatttttcggtttggggcttttattgtaagagatggattcgattctcttatcttggaccagggggacacctctaaaaattaaggaatgtttagtt

SEQ ID NO: 108065 - DNA, 3895 bp, Zea Mays
caacagtgacaccagcacaagcaaggagaggcatagggaggagagcagccagcagcaggaaagctgagcagccgtcagctgagagctagagcaagagcatccaccagtggcggcagcagctagcgacaaaggctgaatccgagagtgcgcgccgcagccgtggctgccgtcccaggcgccgctgccgcttgtgagaggcgctcgtcttgtattcacgaggagggcgacgatctcccgcgcggcaaaggaactaaccactggccccgccctgtgatggctgctgtccgtgccccggcggcgaagggaggtgtaggtgctccggaggcggcggcgtggagtggcagtggtctccgcgcgaaccaggccgggcgcgccagctgccgcggcgcctagagcgagcgcctggacgtggtctctctcgcagtccgagttggagcttgggttttggcgcggagggacgccggggttctggttctggcaacgcggctggaggaaggggggaaacggagatggcggtcggggacgcgctgcgacggctgtgcgaggagatcgggtggtcctacgccgtcttctggaaggccatcggcgccgccgaccccgtgcatttggtgcgggaggacggttactgtggccacacttcatgccctgtcggatctgagccttctgaatctctgcctctgcccagcgacgctgggtgctctgttcctgcagctgacaccatctgctggcttgttaacaacgatatggcgtcgcaggttcatgtcgtcggacaagggatcgtgggccgtgccgcgttcagtggcaatcaccaatggatcgtccacggtactgccaatggtcacgggctctcctccgaggttgctgctgaggtgaacaatcagttcagagttggtattaagactattgcgatcattcctgtgctgccacggggtgtcctacagttaggctctactggtttggttatggaaaacacaaattttgttatgtttgcaaagaagttgtgttctcagctaaacaaccgttcaagcatggctgcatctgcttcggttaagaacacttctagtcagcatggtcagtcacgtcctgatactgcaactgtgtcaactagtacaccaccaaatgcattgctgagtgcatctttgcttaaggttgcgcaacagaatggtcaccctgttagagagcacagtgtctatgctgagcgtgatcttaggtttatacaacaagcatccatctgtgagagtcaatttggaagtaatttacagagtggtgttatgaactcatgtttgacctccccaagcttcgcatcagttaaaaagcagtcacttttgatgaacagcattgggcagttacagttcagtaataatgtgcattcatcagcagatttggcaagggagatcatattaaaatcccttgggcgccaggactcttctgtctgcgaaaatacaaacatgaatatgcatcgtggaagatatgtagtatccaatgatataaatggttctaggaattttgattttcttcctattggtgcgaaagaaagcagagccaacttatcaatccctgcgtcgagtcaaattttggaccacatgccaggaacattgcagcagaaacagtctctagtcccattcagggttacccaatcttctgaattttctaagaaagtggagaaccctgaaagtggatcatttcaaattccttcagttacaacttctgattctggtggtcaggtttctaacagtttcaacatggtccaagagaatcgattgagtatgtcaaacaatgtccgacaagtccaaaagattgacagatttagtgatccaagtgctaatgtcagcactcagagaatgaagaacagagatgaatgcgagccaggaatgcccattgagagagcctcctcgttcctagtcgaacctggtgcagataatgacttgtttgatatgtttggttctgaatttcatcagtcctcccacaacgttggtgctgatttggtcacctggagtggtacagagtctcagaactcagatagagatgtccctgaatcgtcaatatgtttcaatagttcaccacttttcagttcgctagacaacgagcttcactattcaggtatcttatcgctgactgatactgatcaactattggatgctgtcatatcaaatgtcaatccaagtggtaaacagtgtcctgataatagtgcttcttgcaagactgcactgatggatgttcctagcacatctcatctttgttcaatagatttgaagagatgtgagtctcccagcgttccttccctgctaattaagcacgaattggcacagtttgctaaacagccatgtctcgttgataaatctgaggatggttgtctttcccagaataatggaatgcacaaatctcagatacggctttggattgagagtggtcagaacatgaaatgtgagagtgcttcagcttctaatagcaaaggtcttgatgtgccaagcaaggcaaatcgcaagagatctcgaccaggagaaagccctaagccacgacctaaggaccggcagctgatacaggaccgtattaaagagcttcgtgagcttgtaccgaatggggcaaagtgtagcattgatggtttgttggagaagacagttaagcacatgcttttcttacaaagtgtgacgaaaaatgcagacaagctcaaggactctactgagtctaagatacttggtagcgaaaatggccccctttggaaagactacttcgaaggtggggctacctgggcttttgatgtcggctctcagtctatgacatgtccgatcattgtcgaggatcttgaccgacctcgtcaaatgcttgtggagatgctctgcgaggatagaggaatcttcttggagatagctgatttcatcaaaggacttggactgactatcttgaggggtgtgatggaaacacgcaaaagtaaaatctgggcacgattcactgttgaggtaatacagctaaatttgaaaattagtatcctttcagttcaaaatctgaagcaataaaacagtaaccagaatgagaaaccaaagtaacgagatgatgctgatgaatactattttctgtggatttacgttgcttgccgatttcactaccgattgaggctgtttcatgcaggcgaaccgggacgtaaccagaatggagatattcctatcgcttgtgcgcttattggagccaaattgtgacggcagtggagcggcggacaacactaacaacatgaacatgcatcttggtttggtgcaccaacctgtcatcccagcaacaggtctcatccaatgagattaagactaagaggaaaccctcaagcatcttccaagtgctaagagcaggaggagctcagctaactcctgccatgactagcatcaccaatacgccatgcagtgcaccacctgctttcccgagacaccttaatctgtgcaaaagtgacgtccttcttgagaccaggtcgcagaaatggaagaaggaaaacaacgcaagagtgatcatcaggcagtgttttgttcgtatgatctttagattgtttgttagttagcgctgtttggtcgtatattagtggttttttttgggtactgttatccagaatggaagttcttgggttggtttatttcacacacacaaaaagatggaatgccacctttgttataagtctcttcacattagaaccagtgagcatagctagtgaaaaattgtttgagaagactcttgagtcattgctctgatcagattatttgttattactcactgctgctgcctgccaacatccagaagtagatcactggattctagctgaagccacaatgtcatccagcagcacatggtgctgccaatgagttgcaatgtgatatgtttactttaagcaaaacagatactaataatactagtaggc

SEQ ID NO: 108066 - DNA, 498 bp, Zea Mays
atgtcaggttctagcgtcggtaaagtgcctagcattcctcccataccagataagcagaatctggttgaaattatcagcaaaataaattcattgaacaatatgacctctgcggacaagtctcctccatctgaagtcgttgatttggatgctttgcaagagcaacaagtgcaacgggaggattctgtggggaagacgaccaacggaatcgacaagcaaactgtgccatcaaccatggatttgctaggagtttttccaactggccttgcaacttcaacacctgagacaaatacatctctgtcccaagggagcagcgacagcagtggtaataacaagagcaagagccattcaatggagccagctactgttgtaaattcacacgatatatcaacccaagattttcctgctggtggtttcatgagaagcaatagcacacaagaaagccgacctcatatatacaagcagacagaacacgagggttcaagttctgcacttccttaa

SEQ ID NO: 108067 - DNA, 650 bp, Zea Mays
aaaactgtgacaaatatgcatctccctcgttaacggagtaatgatggcagatactggtgtagcaggagcttggcctgaagcccgtgcatgattcttctctgtgtgaggacttggttcttggtttggctgtggggaacaaaatttggaactgtcgtcaacttcatgactttagttcaggtttaaaaccttatctagcttattgtgattgtcttgattatgccattaaagaacttttaagatttgtgtattatgccactaagacatattacattctctgtgttaaaaaggcatgttctgcttaaacgactcggtcaactacggctctcagttgtagtcttcatggttttgttcctccattcttggcacgtccttatctgcaaatgaatgtcaaccttccattactatctgtctgcgatgtttcatcatgaaattcttcaccaaagatgctacttcgtcacaaattagtaacattctttcccccatatagttgatatggttcgagtgtactgagcactaacaattgcagctcatgaaaataaggcccttgatttttgtcatagaacaagagcggctattttaattgcagcactcacatgaaaataaatctactctgcatgctggggattgaggcgactgaagtgtgagccttc

SEQ ID NO: 108068 - DNA, 949 bp, Zea Mays
acccagaggtccaccagcctcgcgggaatctcacctgtgaaagcgagcacacgcaacttagatacgcaagcacgtcaatggagagaagaagggtggccgcatcgttggtggcggtggtggtgccgctgctgctgtgctcgtgcttcgtcgccggtgatcagggcgagccggcggcggggggctcggacacgaaccagctgtgcgtgagcaagtgcgggacgtgcccgacgatctgcacggcgtcgccgccgacgatcctgccgatgaccgcgccgccgccgccggccctggcgctgcttccgctgtccgcgcccccgccgccgtacctggagctgggaccgccgccgccgccgggggacgagtacgacctgctgcccccggtcacgccgctaacgagcccggcgccggagtccccgtgctcgaccccgccttcttcctcttcctcgtcgtcggagcctccgccgtcaccgcccccgccgccgccaccgaagagcagcagcgggtcgtcgtcttcctcatcttccccgtcggcgccctcgcacttctcctctccgccgacgccgccgtcgtcgtccaacccgtactactacctgtacctgtccggcggcgccaaggtccgcggcggcgcgtccagcgcttgcgccacggcgctcgtcctcgccgcgttcctgcccgccgtcgcccttttcaagtgacgcacgcttctgttgttagtgcagtcatctgtcggctgtcggctgtccagaccggtgttttaagattcatgcatgcatgcattacgtacgcgcctcgttttggcatccgattcggtgatgctctcatctgtcgggctttccggccggtgccagatgatcgatccatgcatgcggataatagcagctgtctttgcaatttgttcactgtatcaacgttcctgtacgtaccttaatgattttgtaaagtgaattct

SEQ ID NO: 108069 - DNA, 2611 bp, Zea Mays
tcgttctcgtctcccagccccgtcgccgctgacgtggcgcccaccgcgcggaaaaaaatattgcagatattttcctcaccgctccttcccccctctctgctcgtccttgcctcccaccgcaccgccggctcttgctctgctcggttcctcctggcagcaaccgaatgtctcccgacgccgacgccgccgccgggggaggaggaggtggagaggcgagcgccggcgccggcgccggcgcgtcgtcgcctcccgcgtccgcgtccgcggcggcgaacggccgggcgctggtgcggtgggaccagatcctgccgcgccgctccctgcgggtgcttctcgtcgagcacgacgactccacgcgccagatcgtcaccgcgctcctccgcaagtgcggctaccgcgtggccgcggtcgcggacgggatgaaggcgtgggaggtcatgcgggagcgtgcctacgacttcgacctcgtcctcaccgaggtcgccatgccctccctctccggcatccagctgctctccaggatcgccgccgccgccgagtgcaagaacatccccgtcatcatgatgtcatcccaagattctattggcacggtgctcaagtgtatgcagaagggtgcggtggacttccttgtgaaaccagtaagaaagaatgagctgggtaacctgtggcaacatgtgtggaggaggcatgcaatgaattgccagacaaatggatcagaaaataatgcagccagcaatcatgtaagtaccaatgttgctaatgggtcaaagacaggagaaaacaatgatgaggaaagtgatgcccaagtgctccaagtgaaagtgagaagaatgtgcgttccaaatgccttaatggtattacttctgcaaaggtggctgagcaaataatggataatgccttgaggatcacggatgcaagttcacgtcgtccaaccaatcttggcaaagatttggctatgactgaaccagcagctgatagaaaatgccaatctttagtgatggaaaataatgctgtcaaagaaaagaaccctggtgaaaagtcgaagagtgctgtaataggtcatgctgattcttacccctcccaatttctcgagaccaacttgggaaaacaacagtatcgtaatggttacaagaatcaagaattcagggaaaaagatatctttaatcactcgaattcttctgccttctcgagatatggcaatagaaggatagaatcatcaggtgagatacagtttcttccttctcgttgcattgttgggcaagagcagcatgttcatggcaaggacccagttttccaacccaatggggtcttgctgcctcccaatgaccataatacaggtgagagtacaaggcaagctcgaattactctggacagtagcatggagggtgctgacatcatttgctccagtagtgctagggaagatgctggtgcaagtagttcttcccatagaaaggacagtatgagccatccctcatatgggtttgtacctgttccaattcctgtcggtgccatgatgccctatcattgtggtgcaattctgcagccagtatactacccacagggtccacttatgcactgtaattcatctgcaatcaacaaggcaacaattcatcaaacctctggccaatctaactaccgtgaagattgtggtagtggtagaccatctcaggttgatgaacacaaacagtcagaggaaaagcaccagttgcatcattcaagacaaattcatcgggaatcaggacaaccagttgacatggttagagctcacatggatcatgctaaccagagtgcaagctgcagccgggatatctgtaaaggaagcggatgcacgggtagcggtgaagccgataccaatgcgaacacgacggttgccctagagagtggcaacgagagtggcatccaaaatagtgacaggtctcaccgagaagctgctttgatgaagttccgcatgaaaaggaaagacagatgcttcgataaaaaggtcaggtatcatagcaggaagaagcttgcggagcagaggccaagagttaaggggcagtttgtaagccagaagctgaaagcagctatggcaacggaagccgaaactgactcgtgacgggcgctagtccagaactgtaattttggttcttcccttcgcgccaggtgtgggcgattggactggtaagtctgaaggctggcaaaagtttttttttcttccttccatggttagcctttctgtacaaaggtgaactccacgtcgggtgtttgttggcatccaagccttattttttgcgaggtacatcaagttgacaaaatgttcggagggatagggtgaaaacggtgcaagcgccatatttcgtccatacgcttaggtgtttgtggagtgtgaaagcagagcctgtacagcatattcaccacccattctgttgccattacaattgtagtaacttgtaattactactatgacaaaagtagacactgttgtagaacttacagccagcaggtcttttccatatgggacagtagcattttatttattaattggttgatcatatgaggacagtcccgaatgcaggacagttaagatttgtttgatccaatccaatcatccagcattttgcttgccttaaac

SEQ ID NO: 108070 - DNA, 2292 bp, Zea Mays
gtgcatcacaagcggccttgacctaatagaattgctgaacctgatatttagatttgttatgggtttcatttgttttgcactggttgcctatggcagtgatgtcatcccaagattctattggcacggtgctcaagtgtatgcagaagggtgcggtggacttccttgtgaaaccagtaagaaagaatgagctgggtaacctgtggcaacatgtgtggaggaggcatgcaatgaattgccagacaaatggatcagaaaataatgcagccagcaatcatgtaagtaccaatgttgctaatgggtcaaagacaggagaaaacaatgatgaggaaagtgatgcccaaactgttttgtcttgactagagctttggtaacaaaagggagactgaaattaagagtgctgagacgttaccagatattcgtagagatgaaatggctggctcatccaaaaaaattgaactacaaaataagtctaatgatggagtaaacacaaaagtggatgcgtcaaaagatagcgatggtaaagaattcaaacctggtcacatgattttatgttaacttatgctctgttgccggtaagttagtgtgtgctattctattgtgcacatgtagcagtaatttgttatttcattgcatgcaggtgctccaagtgaaagtgagaagaatgtgcgttccaaatgccttaatggtattacttctgcaaaggtggctgagcaaataatggataatgccttgaggatcacggatgcaagttcacgtcgtccaaccaatcttggcaaagatttggctatgactgaaccagcagctgatagaaaatgccaatctttagtgatggaaaataatgctgtcaaagaaaagaaccctggtgaaaagtcgaagagtgctgtaataggtcatgctgattcttacccctcccaatttctcgagaccaacttgggaaaacaacagtatcgtaatggttacaagaatcaagaattcagggaaaaagatatctttaatcactcgaattcttctgccttctcgagatatggcaatagaaggatagaatcatcaggtgagatacagtttcttccttctcgttgcattgttgggcaagagcagcatgttcatggcaaggacccagttttccaacccaatggggtcttgctgcctcccaatgaccataatacaggtgagagtacaaggcaagctcgaattactctggacagtagcatggagggtgctgacatcatttgctccagtagtgctagggaagatgctggtgcaagtagttcttcccatagaaaggacagtatgagccatccctcatatgggtttgtacctgttccaattcctgtcggtgccatgatgccctatcattgtggtgcaattctgcagccagtatactacccacagggtccacttatgcactgtaattcatctgcaatcaacaaggcaacaattcatcaaacctctggccaatctaactaccgtgaagattgtggtagtggtagaccatctcaggttgatgaacacaaacagtcagaggaaaagcaccagttgcatcattcaagacaaattcatcgggaatcaggacaaccagttgacatggttagagctcacatggatcatgctaaccagagtgcaagctgcagccgggatatctgtaaaggaagcggatgcacgggtagcggtgaagccgataccaatgcgaacacgacggttgccctagagagtggcaacgagagtggcatccaaaatagtgacaggtctcaccgagaagctgctttgatgaagttccgcatgaaaaggaaagacagatgcttcgataaaaaggtcaggtatcatagcaggaagaagcttgcggagcagaggccaagagttaaggggcagtttgtaagccagaagctgaaagcagctatggcaacggaagccgaaactgactcgtgacgggcgctagtccagaactgtaattttggttcttcccttcgcgccaggtgtgggcgattggactggtaagtctgaaggctggcaaaagtttttttttcttccttccatggttagcctttctgtacaaaggtgaactccacgtcgggtgtttgttggcatccaagccttattttttgcgaggtacatcaagttgacaaaatgttcggagggatagggtgaaaacggtgcaagcgccatatttcgtccatacgcttaggtgtttgtggagtgtgaaagcagagcctgtacagcatattcaccacccattctgttgccattacaattgtagtaacttgtaattactactatgacaaaagtagacactgt

SEQ ID NO: 108071 - DNA, 384 bp, Zea Mays
atggaggagggagtcaaggaggcgggaggggaagcgtcatctcggtcctcggtcctcggtcctcagcaatactatacagatttaagagatcttagtttgtttttaataatggtctgggagattcattcttccacccctatcaccacattgtttggtccgaacaacgttgattatttcactgatgctgatcgccagttccttctcaacatttggtcccagaaggcaacaatattggatctacagacacaaaaaactgtccacaggctccttgttcaccagcgggagatgcgtgatgttgcttgccaccccacacttccaatattggctaccagattagatgatgggactgtttgtttgtgggacgccactacctacagaaactaa

SEQ ID NO: 108072 - DNA, 1269 bp, Zea Mays
atggtatgcaatctccttgacctggctttaacttctcttgagcactcatcctcaattgaggagcttgaggcaagtacatgtgtctccgagttgctggagcaggtgcagtcgctgggtgtttctacagtgccatcatcccagctgcatcgaataaccagtatacccaaaggctttggcgaaacaaacactcatcatatacgctcccctgggtcgacctctgagagtagcaagctactggacgtatacccactggagctccggttcccattggagccaaacaagtgcactgaatgcccagtgaccctgacaaacaggacagactgttacgttggtgtctggattacaccggcgaaacctcacacttgccatggcttttatttttcgtacctgtggtggcagtttccaagctcatcctttttccagatcatggacccgcattccacattggtcgtaaccttggtaatggacccgctgcagctgggactgggactgcaagacactgaggacaaatttcaggtgttgatgattgtcatggaatcacagaaggatctcgaaaatttgaacccgtcgattagtagcagcacggacaatgatatgttgaggcgagtcgaggagttggggggcgaggtccaccgggcaatcctgagggctgtcagctgtgatccagcaagctgcaagccagaagtggtccacagtgttccaatggtcatttcagcaaaaactttagagaatgtcttatccatcgacgtggacctcgatatgtgttggatcctggctagtcatcgcgcaggttatgtttccatttggaactacaacacacagggaagggtgactgcattgaaggtcaccaaggaagcaggcatgctacactcgctcacacgtactcgtagtgccaccacatcgtgtgtttattcggccaaatttatcactagaaagaaattgttcgcaacaggggacggctatgggtatatctgcatctatgcatacacaatggacaaagtgaagaaatttgaagcttatcatggcaaacctgtcagcttgttggctgttcactcaacctacccgttcttgctttcgtcgtcgtcttgtgaccgctcaatcaagctttgggcctgggaccagcaatgggcgtgcactcgaacattcgacgctcacacgagcggagtgcagcatgtcaggttcaacccagctgatgtcaacacttttgttagtgtttcctgtggtggcgcctgtgtaaagtttctatccagtgttgataatcactagtta

SEQ ID NO: 108073 - DNA, 145 bp, Zea Mays
gatccccagtatagcactcacacaccccacctaggattacatagtagagtgttcaccggatacaaaggagaaaacaacgacctagaactgttttacacaaacagctccccaacctggagggaggacagggctttcgctcctgtta

SEQ ID NO: 108074 - DNA, 1343 bp, Zea Mays
aaggttctctgactaggattcctgcagaagaggaatactcaggatgaaggaggagttgtaagggtagagaaatgtgacgactaggtgacggcgtgacctccaactgcttaatagctgtccgaggcgccgaagagctaatttgagtctatagtagcgttgtgtgggttttcaaattgtcaaatttctccctgtctctatgatcggtcaaagccgagcgtaccgtgtttaataatgtcaaaaatctcatctgcgtgggcttgtcaacgcggaaaagccggtggacctcgtccgcgtggagtctcatctgcttgggcttgtcaacgcggaaaagccggtggacctcgtccgcgtggagaaaaaaaaaacagagaatatctgcgtaaactcctctgtgtcagtcatctgcaccccacttcatcagcattatccgcggctccggcctccgggcttggttcatctctttagctagcgggaggccattcgcagttggagcttcttccatagatctggttggtcactgctccaagaaggtctcggccagccggcggaaggcccctcttccagaaatggacgatcaggagaatgaagatcaagcccttgagcacatattaactgatgctaatgcagagccagtcatgctatcatatgcattcttaaaaagtattacaaatgatttctcatgtgtaatcggtaggggtgggtttggagtggtttataagggttatcttcataatgggaaaactgtagctgtgaagcagctttccaaaacagatgacttttcagaaaagcagtttcatgatgagcttatgtgtttgataagggttaaacacaggaatatagtgagatttttaggctactgctctgatacacaacaaaaaatggcagatttcaatggaagatttgttttggcagatatccgacgaaggttcctctgctttgagtttgtacctaacaaaagccttctccattatctcaaagaacaatctactggacgtgattggaaaacacgctatcaattgattgagggaatctgtcagggtttgtggtatcttcatcatgaagaacacattaatcatttggatctgaaacctgaaaatattttactggatgatgacatggtcccaaaaatatcagactttgggttatcaagacggttcagtggagaactgaatgttatcatcactgaaaatatctgcgggacattgggatatattgccccggaatatttgagcaaaggggaaatatcattcaaggccgacatttttagtctgggaatcataatcaaaaaaatattaatgggaagtaatgatttatctgattttgaaaaggattctgcctactag

SEQ ID NO: 108075 - DNA, 537 bp, Zea Mays
aaaaggaaaaggagggagaaaatttttggttggtaaacccaacgggggggatttttccaaaaaattcaagagaaggagaaaaaaaaagaaggagggagagggaaagagagaaggggaggaggagagggaaagggaaaagagagaggaaaagagaatggagggagggagagagagaagagagaggagggagagggcagtttatatataggaaaagagactggagggagagagagagagaggagagagagggtaaagggaagagagaggaaagagagggagagggagggagggaagagagaggaaagggagggagatggagaggagagagggaaagggaagagagaggaaagagagtggagggagggagagagagaagagagaggagggagagggagtgtatatataggaaagagagtggagggagagagagagaggagagagagggaaagggaagagagaggaaagagagggagagggagggagggaagagagaggaaagggagggagatggagagagagaggagagagcaacggaaa

SEQ ID NO: 108076 - DNA, 578 bp, Zea Mays
aaagaacttcacaccaatggtgatgagagacgcgaagccaggagacgacgtaagaggagagagagaggagagagagagggagagagaggagagagagataggagaaagagagaagagagaaaggagagagaggagagagagaggagagagagagagagaggagagagaggtagagatagaagagggagagagagggaagagagaggtaggagagaggagagagagaggagagagaaagaggagagagagagatagaggagagagaggagagagagaggatagagagagagaggagagagagatagaggagagagaggagagagagaggagagagagaggatagagagagaggagatagagagaggagagagaggagctagggagaggagagagaggagagagagagaggagagagaggagagagagaggagagagagagagaggagagagagaggagagagagggagagatagaggagggagagagaagagggagaggggagagagagaggagagagagagaggagagagagagaggggagagagagaggagagagagagaggagggagagagagaag

SEQ ID NO: 108077 - DNA, 827 bp, Zea Mays
ccctcatctctcctcccgtgccatcgcctctcatcgtcgtcttcctccgtgtgccgccgctaccgcagcccccttgcctgctcgcctccacggccacacggaggccccctgtgttgctctcgattctcactcctcctctctatttcctgtgttgtcgccccgccccatggtcttcttcctcgcgccagcactgtccctatgcctcctccttgctcacctccatggcctcgcggaagcggaccttgccgcgagtgcttcccaattctcctcacctcgtcctctctcctttcaggatatgcgctgccatcgccggcgtagccggagccggccgtccacgcaaccctgccgcgggagggcggcacgtcgatgctggagctgcacaatgtgtcgctgctggagcagcatacgacggtgaaggcgctgcggcagcacctgatgcgtctgcagagggtagtctaagtgacatgaagtcaaaatctctgaaggtatgccttcagaggcttggaagacttgccgttctgaaggcccttacttcatgttccactggcagttctgagatgatggaaaagctaaacaaaatcgtgtttgacatcttggaaaagcagcagcagccccagccagttgaccattctgacgcgccttctcctagcattatgctttcttgtagcttcatttggaaaaggcagattgctcaaggaatttcatgtttagctgcaccacaccatggtatcatcaatcattcagccccattctacagatgtaaattgtgcaaatcctttttcttcgagacttttgagagtggtctattttttacaagcttctcttag

SEQ ID NO: 108078 - DNA, 1077 bp, Zea Mays
aagcgacccatacttcttgacagacgtccgctgatacgacccgatggagagaggtcttgtatggttttggagattgcttggggtcacggccgcaaccccaatggcatcctctgacttctgtgccgggaacacttccctggacttgtcgagtacgccggagtgacgagcccagcatacaccttcgaccactacgccgtcgcccccgatgcagtagatcgggacagcagacaattcaacaacaaggcggagcgggtgaagcaagagctgtgggatttcttcaggtgcgatgctggatacgaggccagggcggatgtggtgtctacgacgtgctgtaagaagctcgtcgtggacatgcactacgaggcgcgcatccaggccatcgtcacttaccacggctccgtccttggggagaaggtgaacaagaaggacgcccgaaccatgtcattgactgcggaccagtacttgcagtgctgggagaagatggtgcagaggtggtgctcggctgagtgggacgaggcgcacaacgctagccgggaacggcgtttgctgatgcaaggtccctcccaccatcaaggcagccgcagcctgagcaaatacgcggaagcatggtcggcggcacatggtggcgcgccttgctccacgttctcggcatatgccatggcccacaaggggaaggcgacgtccgacgtcacctacaacccggatgatgggcccgaggcgtacaccaaccccgccatccacagccgactcagtgagtacaccgccatggccaaggaggtccatgggccagattacgatccgaggaccgaggacatcgacggagatgtcctcatgagggtcggaggaggcaagaggcatgggcggtactggattgccgacggggcaatcgactcgtcctccactcccactctctctcaggtgcgagcaaggagcacgagcgcgagcccagccatacgacctcggcaggacacctcacagcatcgtatccagcaactccagactcagctagatgatgagaggaggcaacgtgaggagctggagaagaggatggcggagatgttcgcgtacatgcagagc

SEQ ID NO: 108079 - DNA, 995 bp, Zea Mays
gctataaaggcatggtacagagcaaatgctgatgatcgaccgatgccaaataccaaggccgagtggtcatcaatttacttgacggaggagcaatacctagaggtgtcggtgccgtggatggccacccgatcggagggttatcgggcattgtgcagatggtgggcttcccctgagtttcgtgccatttccgaaaggaacaggggaaaccgtgggaccgagtcgttccacaactacggtggtgatggtcatgtgcgcttggctaagcgaatggaagtcaaattcggtcgtacgcccacggatgtggaggtgtatatgcaagggcataggggttctgatcctcagaatcctgatgtgttatgcactcagacggccaccgaccgtctagcttcgtatggggaggagatggttcaacgccatgggcaggagtacgattggaggagccagccaatcgaccctcaggcagcatatgctagcggaggaggacaagcccacggacggttgggtatttttgattctacgattgattccagagagctaagacgccgtggacgacagtccacatcgtcgtcttcacagtcgtcccgttcacgatcatccgcccacgacatggagatggcagtgttgcgtcaacaggcagagtaccatcaatcagtcttgagggaacaattggagtaccagaggcaacaatctgagtaccagaggcaacaagccgagtaccagaagaagagggacgagtattatgcaaacctccaggcccaaaatcaagctcttctctcggtaagctgaagtaacattttgtagcttattttgcaaaacacttgatgtgtatcttattagctcaacaatgtcttgtatataatttgtagcaactagcccaacaagcgggcgtcccgatgccgacatatgggatgccgcctccggagtttgcactgccaatgccaatgttggcgcctccaccaccgcctccgcctccgtcacaattccctatggtatgt

SEQ ID NO: 108080 - DNA, 1354 bp, Zea Mays
ccatcatccccatgaccgaccgctccgtccgaccccatctccttccacctctctctccctctctcactcgctgctgctagctctgcagctgcctcggagtaattgctgccatccggagccttcgcttcagcgaaaggtggtccgagtccgaccgccgatgggcaggaagggaggccccctggcctccatcttctcctcctccaggcagtccaagcccggcggcaccgccgcggccgcgcccaccccgccgtggccatggccgtcctgcgcgaccaagccgcagacggcgtccttccggcggcaaggcagcgacaacggcgatggccggaagtgcaccacggccgccggccgccgcttcgacgacgcagcagcagcagcagcacccggcgttggcggacggctgcggccgccgcgcggggccgccgcgccgggcgacgagatgtacaagacggtcaactccgtctacttcgacgccgccgactcatgccgctccttcttcttcttcgacgacgacggcggcggcggggacgcggcggacgacgacgtcctcgacgacgacgggagcttctcaacgatgacggcgtcggaggagtggtccgaggccgtgatccgcagcctcggccggacctccaccggccgcttcttcttcgacgcgggccccgcggcgcccgtcgcggcgtcgaccaactccatcctcgccgcctccaagtcgtcgaagccgctctatgaggcgcccccaagcaagctaccgcgggcggtgatgtcacctcccgtggcgggagtggtgctaaccgacgacgacggggtcagcgaggccgagacggagacagaggtgccgtcgtcgtcgtcgtcgctgctggaggagagcgtggcggtggcgctggactcggacgacccgttccgcgacttccgcgcgtccatgcacgagatggtggccgcgcacggcctccgcgactgggcggcgctgcaggagatgctgctctggtacctccgcatcaacggcaagcacaaccacgcgctcatcgtcggcgccttcgtcgacctcctcgtcggccttgccacgagcagcgccgcctctcactccgccaccaccgcaaccacgacgaccacaaccacgacggcatgctgctgcagcagcaccttcagcagctccagtactagcagcggtggcggtggcactaccactactgcagctgtagctgcaagcatgatggatgagcaatgtggaattagcgccggtgcgtcgtgctcctctgtttcgtctgatctggaagaagaggcggctgcaggagagagatcaagcaacaatggccactgcacaagttgcgatgcactcgattattcctgttcttga

SEQ ID NO: 108081 - DNA, 282 bp, Zea Mays
aaagaacatgaagagaagcagatgacaaagagaattgtgaacggatccaagtgcaccgaactcaaagtatactaccagctaagcctccccactatcattttatctaaaaattagcatcaaccgaaatatccgagaagaatgcatataaactttataccccaataaaaaaaccccccaatacacacaagctcggcattgtattacttaacatatgttatataaaataaaagttatattaggggaagcataagaacaacaagagactactttcatatcagaaaa

SEQ ID NO: 108082 - DNA, 120 bp, Zea Mays
ttagaaaagaaattttatacccccaaattcagggtgttacaaccgtctttattgatcttctttgtactcgtgctttccatagatatagttactcatcttagaagctagtggaatttataa

SEQ ID NO: 108083 - DNA, 171 bp, Zea Mays
atggagcaggcgcgtggtcaagggaaggtgctggctagggtggggctcaccgggagggcagcgccagcggcgacgtggctcgctcggtgtagcgagtcatggccagggagcaagctggggcaggactgtggcgccagcagcggcgaggaaggcgctcggcggccagggtga

SEQ ID NO: 108084 - DNA, 86 bp, Zea Mays
gctcttgcacatcattatccttcctattgagaggagagtagaaggtttagttagaactcatccttcgtacgtgtccatgagtgcac

SEQ ID NO: 108085 - DNA, 116 bp, Zea Mays
gagtttattgggtgccaaatcatgtctaggaattttcctagaatatttgcagccttcgagatattttttagacactaaatacgatttcagcctttttctggaattattttaatttt

SEQ ID NO: 108086 - DNA, 923 bp, Zea Mays
cctaggggcactctctctctctccttatctcttcacacgcacagatttttcttctggctttggcttatctcctggccgcacgcgcaagcacaggtagaaaaatctgtagccatcggcccgggtcttcttcccccacgcaacagccgtactcagggtctcaggctcattcttccgttgatttttcttcctgcgcgcacgccatcgttacctccagcagctccttccagccgagctctccctttcccatggcggcagtgctccctctgcctggctgcctggtcttcctcaagctcatctccctgcacatctggctttctccagctcctgcgccgccgttctctctgcgctcagacttgccgcgcgccaggaagctcctacgcgcaggctgtctgccggtcgagctccctcgcagtggccttcccctgccggtgcccaaccccaacgcccagccgtgtttctctccacgccgctctcaggtctccggctgcctgcgcgcgaagctccccttggccacgccccctctctgctcgtcgcgccctgccccggcattggccccagctcggttgtcggttctgtcctcagctcgccttccttcgccgccagccagcctacgtctccttcggtcagacgacccctgctctccctcgcacgtcgtgctctctctcatggctcatggagccctagctcacgcccagctcatctccatggccgctgcgtcgcgttccctgctcgcgctcctctgtctagccccatgttgccgtgtctctgctccagcttcccgtgctgcgccatcatcgctttctgtcacgctcgacaaaaagcctaaatcagaagtggctgctccgtcttattcgtcgaataggaatcgtcatgctgacacgccgatgtcgtcgatcgtcattctcgtctacgccaagtcctaa

SEQ ID NO: 108087 - DNA, 323 bp, Zea Mays
atggccgtcgtagccaccacgcacccttgctacccccttgactgcgcgcgagtgctctcccatgtcgagcccccctccatttggtttcgggctgcagcaaccgcctcggcatcgtcgcgtagcgagctccaccgctgatctacgcagccccctattcggttgtcgttctgcctccgtcgatctcctccatgcacgtgtgacagcagccgctgccccttcgcgtcgagtgtgccgacacggatctacgtagtcccgacgcgatgttgtcaaactccggtaaaaccccatcgccctcgctgcaacttgttctttttagtgctcca

SEQ ID NO: 108088 - DNA, 1889 bp, Zea Mays
atgctgctaggcgagaccgtgctagagatcgtgcaggccagccagttcgcgcgggacatcgtgatggctgccggcgctacgaatcgggagcccccgaggaccccgaaaccggctcccaggaccaagaagccggcggcgggcgagccgacgcctctccgcgcgcggcgtgcctgggagaagcagagccatcggggtggcgccgcgacacggggcattgacacggccacgccgccgtcgcgcaactgcgtgcggtcccagatccagttcaagcccgtgtcgtcggtcgccgtcggccggccgtccgtgtccgccatccacgtttcccccaagaaccggtcgtgggccaagaaggcggtgatgttccttaaccccatgttccacacctccacctctgccgccaccgacctgtgtgcgacatcgtcgccttccaagaagcagaagcggcacaagtttctggtcaagtcgccaccgagcgcgctgggatccaagctcaggatgcacgggaaggccctgcccgcactatccccgtgcttcacgggacctctacccatcgccggagccgacgcaaacatgcaacaaattatagtgaagaggctcctcccgtccctgtcgcttggtggatcacccccacggaaccaccctagccaaagacagagttcattttcctctccaagattcaacctcatagcattgctgtcgtctggtgatagatatgcattaccgagcttcaacgaactgaactcgagctttgctgtttcatctatgatcgttatttccataaccgagtccgccaccgagaagaaggagaaggctctagtcgagaagaagaagtccattgagagccgcaagctcatcttcacccgcgcaaagcagtacgccgaggaatacgaagcccaggttgctcaactttattctggtttggtgaaggctggtaagcaagcacgaccggagaagtttgagatcccagctaaaatcaagctgacactgcagccatggacgtcgagcttaagaggtggtcatcaagaaggcatacgagatggaccttgcccagttaaaaaagctgaagattacagaaatagtttgcaacaagaagcacaagcaaaagctcaagcattacactttgaagatgaattagctagaaaaagaatgccggagatatgcacagccgatacattcctcagcaagattacttctcagagggactctacacgttcgatattgggcagaatgaccttgctgaaactgtatgaccaaggtgctaggaagttttggattcacaacacaggccccctcggctgcttgcctcaaaacatcgccctgttcggcaaagacccatcccaactggacgagctccactgtgtggcgaagcacaaccgtgccgcaaagcttttcaacttacagctgcacgcactttgcacgaagctgagggcagaattcgatggagccagcatcacttacgtggacatccacacgatcaaatacagcctgatcgccaactactctcgatacgggttcgagcacgccactcaggcatgctgtggatacggaggcccacccctgaactacgatggtaacgtaccatgtggacacacagtgtctctggatggtaagatggtcaccgcaaaagggtgcagcgacactactgaattcgtcaactgggatgggatacattacacggaagctacaaatttctatatcgcgtcgcagatcctgaccgtgaagtattctgatcctccgttcgtggataagatgtcgttcgtcataaaacctagattctgattagcatacaattttccctctttactcaaccactttacagcaccggttgcagatacgatgtatacttattacttgccaataaccatatatagcttgagtaaaaaaatcat

SEQ ID NO: 108089 - DNA, 927 bp, Zea Mays
atcgcccgtccacttcaatttccatctctctgggcactccggcggaacgaagaacgcccacggatccgaggaacaagccgtctttgtgggctttagaatgcagatcttcgtgaggagccccagcggcaagatgatttgcctcagggtccaacctgacgataccttgcatacagttaagaaaaagattttagaaaaataccaccttgtctttgaaggagtgcagatggaggataacctcacactggctgattataacatccagcatcaatccacgcttgacctccaagaaaagatgcaaatctatgtgaaggagacgctaaaaggcctaaccatcactcttgatgttgatagcttagatactattgacatcataaaggacaagattgaatacaacgagggatttcccaagggtcggcaatgcctcatctttggcgacgaacagctagagggcaagtacaccttggcggactacaacatttgcaacgagtccacgcttctccttgtcatccacccatgtacaagtacaagtgacgcaatgcagatctttgtgaagatgcaaaacggaaagaccaccactgttagggtcgacagctcagataccgtcaacagtatcacggtgaagatctatgaaatggagggcatcccacccctagaacagcgcatcatctttcgcggcaggcgtcttgagggcagacgcaccctggcggactacggcatccagaaggaggaaaccctccatctgatgctttgcctttgtggctggtgatgagactgatgccatgcatgcatgcatggtcattcaatattactactagtggtttgttatcagtaaaaagtatcattaattatagggatgccgtgtcatttagctaaaggtctttcttaccaggagagttctgtcatcagtaaaagtttttattgtggtac

SEQ ID NO: 108090 - DNA, 775 bp, Zea Mays
atcgcccgtccacttcaatttccatctctctgggcactccggcggaacgaagaacgcccacggatccgaggaacaagccgtctttgtgggctttaggtatacgagaatgcagatcttcgtgaggagccccagcggcaagatgatttgcctcagggtccaacctgacgataccttgcatacagttaagaaaaagattttagaaaaataccaccttgtctttgaaggagtgcagatggaggataacctcacactggctgattataacatccagcatcaatccacgcttgacctccaagaaaagatgcaaatctatgtgaaggagacgctaaaaggcctaaccatcactcttgatgttgatagcttagatactattgacatcataaaggacaagattgaatacaacgagggatttcccaagggtcggcaatgcctcatctttggcgacgaacagctagagggcaagtacaccttggcggactacaacatttgcaacgagtccacgcttctccttgtcatccacccatgtacaagtacaagtgacgcaatgcagatctttgtgaagatgcaaaacggaaagaccaccactgttagggtcgacagctcagataccgtcaacagtatcacggtgaagatctatgaaatggagggcatcccacccctagaacagcgcatcatctttcgcggcaggcgtcttgagggcagacgcaccctggcggactacggcatccagaaggaggaaaccctccatctgatgctttgcctttgtggctggtga

SEQ ID NO: 108091 - DNA, 2871 bp, Zea Mays
cctgcccatcccggtcctccaccgcgtccgacgtgaaacgtggagtgagttgtggacttgtggttgttccggagacatcctctccagtctccacccccactccacgaacacgattgctgcttgcctgctgcttctgcggctcgcggccatcagatccagcgccaccgatgccgccgcagccgaacgggggcaaggtgaccccgaacctggcgatggacgcggaggccacgcgcctgctcaacctcacggtgctccagcgcttggaccccgccgtcgaggacatccttatcaccgccgcgcacgtcacactctacgatttcaacatcgacctcaaccagtggagccggaaggacgtcgaggggtcgctgtttgtcgtcaagaggaactctcagccccgattccagttcatcgtcatgaaccggcgcaacactgataatctggtggaggatctcttaagtgattttgaatacgagcttcaacctccatatttgttgtaccggaacgcttcacaagaagtcaatggaatttggttttacaaccaacaggactgtgaagctgttgcaagtctatttggaaggatactgaatgcttacgccaaagtacctccaaaacctaaagtgccttccacaaaaagtgagtttgaggaactggaggctgttcctacatctgctgctatagacggcccccttgaacctccgccagcgtctgccgctgtagtccttgatacccctgatgaatcattaatcagttacttcagtggcgctgctagcattggaagtgtatcaaacgcacaaccgtctggaagagtgcacccatctactgagagcatcccatcttcccatgtgccattgatcgttccatctgctgcttcaacacatcaactgcccccttcagtagcttcaacagcttcaccattgcccgtccatggaactaatgcccacactagccggccaacaaatcttgtgacaccagatttctttgcgcctccaccatcctcttcagctccactggctccgccgggtgcatctgtggttcctactgcgccacctcttcatcccacttcggcggcatctattcaacgttctcagtatggcaccccactgctccagccctttccaccgcccactccacctccttcccttaacccctcacacagtgatagacttactgttacaagggatagagtcaaagacgctctacagagacttgttcagagcgacgagttcgttgatctggtgtgccgggaattgcagagatcacttgtataggctgcttgcttagtcttgtcgggagttttctggctcgtggcaagaatgtgcctgtaattttcctttgacttttttgcatgcttcccttcccgtactattgtataggtttgtgttagtgtattggtgtagagtactataggaatggttggtagtatctgtggggtcccttggttccaaatatccgtgttggcagtgtgagaagcggaagtaaaactagcctgttcaagaacgttggaatttgatgtgctttggcgtggacaaattacagcactgagattctagaagtttttttttaattcttattaacttcgctttctggaaaaggagaaaaaaagagagatatgatgctgactttccctgttgtttgacaggcgaccgtataacctacaacccaatcatattcacattccctgaactacactgtacatgtcaacggcactctctagtggttgtggtgttcgcgatgcccgaatgcccgggcgggccgaatcggacgagttcaccggaacgtgagcatgaccaggaagccgaggaaggcggcggcgccgacgccagagcagcagagatcaaggatgccctcgcgcctggccttcgactccttgcgcgcccttttccccctgacgaactcctcgtacctgagcctggccacgtcctccgccgcgccgcggcacccccgcctgggcgcggccatggcggcggcgacggcggccagcccgtccctgccgctgacgccggcgccgtcggcgtcctcgacgcgcaggctgacctcccggacgtggccgcggcgctcgtcgcacgtgacggcggcgtcgagcgcgacgccgccgccgagcacgacggcgaagcgcgccacggtgtcccccgtgagccacttgcggtcgacggccacggcgcggcggctggacgcgttgagcgcgcggccggtggccgggtcgaagaggacccagctgagctcgaggtcggccggcgcgatcgccgcggcggccggcgacgtgaagccctcctgcagcagcgcgtcgacgcggaacggcgcgcccaggaaccagtcggaggcggcgtccgtctccacgacgcgcgacaggacgcagacccccgcgtggcgcaggtcgacggccgacacgaggcgcgcgggcaggggctgcggcggcgtgggaggggagaccgagcacgggaaggggaaggcgtcggcgaagagcgcccggtgaccgccgtcgacgcggcctgtgcagggcaggtcgcggacggagggccacatggcgaagcagagcgcccgccacgtggccgggtcggtggcgaggctgcggaggccggagctcgcgcagccgaccgccgccagcgacgcgccatccaggcggcggagcacgagggcgaggacgtccgccgggaggtcctcgatgcccgtgccgccgacgtcgtcgccggccggagaagaggcttccatcgccccaacacccatgggatgagacgaacgatggccggtgggcggccgaccgggagacagtaggagcgaggccggagaacgtggataggaaaggggttgtggtggtggttgcgcgggcgcgcacgcgcgtttctgatggcctccggcgtcggaggagggagg

SEQ ID NO: 108092 - DNA, 2949 bp, Zea Mays
ccatcccggtcctccaccgcgtccgacgtgaaacgtggagtgagttgtggacttgtggttgttccggagacatcctctccagtctccacccccactccacgaacacgattgctgcttgcctgctgcttctgcggctcgcggccatcagatccagcgccaccgatgccgccgcagccgaacgggggcaaggtgaccccgaacctggcgatggacgcggaggccacgcgcctgctcaacctcacggtgctccagcgcttggaccccgccgtcgaggacatccttatcaccgccgcgcacgtcacactctacgatttcaacatcgacctcaaccagtggagccggaaggacgtcgaggggtcgctgtttgtcgtcaagaggaactctcagccccgattccagttcatcgtcatgaaccggcgcaacactgataatctggtggaggatctcttaagtgattttgaatacgagcttcaacctccatatttgttgtaccggaacgcttcacaagaagtcaatggaatttggttttacaaccaacaggactgtgaagctgttgcaagtctatttggaaggatactgaatgcttacgccaaagtacctccaaaacctaaagtgccttccacaaaaagtgagtttgaggaactggaggctgttcctacatctgctgctatagacggcccccttgaacctccgccagcgtctgccgctgtagtccttgatacccctgatgaatcattaatcagttacttcagtggcgctgctagcattggaagtgtatcaaacgcacaaccgtctggaagagtgcacccatctactgagagcatcccatcttcccatgtgccattgatcgttccatctgctgcttcaacacatcaactgcccccttcagtagcttcaacagcttcaccattgcccgtccatggaactaatgcccacactagccggccaacaaatcttgtgacaccagatttctttgcgcctccaccatcctcttcagctccactggctccgccgggtgcatctgtggttcctactgcgccacctcttcatcccacttcggcggcatctattcaacgttctcagtatggcaccccactgctccagccctttccaccgcccactccacctccttcccttaacccctcacacagtgatagacttactgttacaagggatagagtcaaagacgctctacagagacttgttcaggtaaaaattgtccacactgaaaacatacagggtacaactgttttggatcggtatcatcattttctctaactctcaccaaatgcctgacagagcgacgagttcgttgatctggtgtgccgggaattgcagagatcacttgtataggctgcttgcttagtcttgtcgggagttttctggctcgtggcaagaatgtgcctgtaattttcctttgacttttttgcatgcttcccttcccgtactattgtataggtttgtgttagtgtattggtgtagagtactataggaatggttggtagtatctgtggggtcccttggttccaaatatccgtgttggcagtgtgagaagcggaagtaaaactagcctgttcaagaacgttggaatttgatgtgctttggcgtggacaaattacagcactgagattctagaagtttttttttaattcttattaacttcgctttctggaaaaggagaaaaaaagagagatatgatgctgactttccctgttgtttgacaggcgaccgtataacctacaacccaatcatattcacattccctgaactacactgtacatgtcaacggcactctctagtggttgtggtgttcgcgatgcccgaatgcccgggcgggccgaatcggacgagttcaccggaacgtgagcatgaccaggaagccgaggaaggcggcggcgccgacgccagagcagcagagatcaaggatgccctcgcgcctggccttcgactccttgcgcgcccttttccccctgacgaactcctcgtacctgagcctggccacgtcctccgccgcgccgcggcacccccgcctgggcgcggccatggcggcggcgacggcggccagcccgtccctgccgctgacgccggcgccgtcggcgtcctcgacgcgcaggctgacctcccggacgtggccgcggcgctcgtcgcacgtgacggcggcgtcgagcgcgacgccgccgccgagcacgacggcgaagcgcgccacggtgtcccccgtgagccacttgcggtcgacggccacggcgcggcggctggacgcgttgagcgcgcggccggtggccgggtcgaagaggacccagctgagctcgaggtcggccggcgcgatcgccgcggcggccggcgacgtgaagccctcctgcagcagcgcgtcgacgcggaacggcgcgcccaggaaccagtcggaggcggcgtccgtctccacgacgcgcgacaggacgcagacccccgcgtggcgcaggtcgacggccgacacgaggcgcgcgggcaggggctgcggcggcgtgggaggggagaccgagcacgggaaggggaaggcgtcggcgaagagcgcccggtgaccgccgtcgacgcggcctgtgcagggcaggtcgcggacggagggccacatggcgaagcagagcgcccgccacgtggccgggtcggtggcgaggctgcggaggccggagctcgcgcagccgaccgccgccagcgacgcgccatccaggcggcggagcacgagggcgaggacgtccgccgggaggtcctcgatgcccgtgccgccgacgtcgtcgccggccggagaagaggcttccatcgccccaacacccatgggatgagacgaacgatggccggtgggcggccgaccgggagacagtaggagcgaggccggagaacgtggataggaaaggggttgtggtggtggttgcgcgggcgcgcacgcgcgtttctgatggcctccggcgtcggagg

SEQ ID NO: 108093 - DNA, 906 bp, Zea Mays
ccatcccggtcctccaccgcgtccgacgtgaaacgtggagtgagttgtggacttgtggttgttccggagacatcctctccagtctccacccccactccacgaacacgattgctgcttgcctgctgcttctgcggctcgcggccatcagatccagcgccaccgatgccgccgcagccgaacgggggcaaggtgaccccgaacctggcgatggacgcggaggccacgcgcctgctcaacctcacggtgctccagcgcttggaccccgccgtcgaggacatccttatcaccgccgcgcacgtcacactctacgatttcaacatcgacctcaaccagtggagccggaaggacgtcgaggggtcgctgtttgtcgtcaagaggaactctcagccccgattccagttcatcgtcatgaaccggcgcaacactggtacggacgacttcctggcttgcgtcttgggtcgttggtttgtttttatgatgacccacctgtggtgcctactgcctaggagctgtaccaacggtagcaattgcgatgtaaaaataattccttttagttcttgttaaatggagatcaccttgtgatatctaaaggttaactagtgcactgcaatgcctaggtcgctgataaatttaggtaacacttgtgtgccctgggttactgtcaaggcgacatctatctattgatctattctcaattgatagtgaatcattgtagcctgggtaaccatatattgctgcctgctgcttcatctcgattaggtatctcaataatttttgcataagtactggtgtctattatcgtgcattcattcatttgttcattcatttgaataccaatgacagtgtcatgctctgccctggttgcgtcatgtggatcagacgttctaatagcatttgaggttgact

SEQ ID NO: 108094 - DNA, 183 bp, Zea Mays
atggcggctgggctccccagccacgacgtctgcaaggcgaggccccgcgccaagcaccttccccaccgcgtcgacgccgcctcgccgcgccagctctcgtcctcgttcgcgttcaacagccacacgcgggctcgctgtctgcacgcccaacacacctcgccgtccgtcgtcgtcacaaggtga

SEQ ID NO: 108095 - DNA, 328 bp, Zea Mays
taatacagagagggaccgtctaaaagtattgtgcaagatatagagcatgcactcatcatatctaagtgatcggagtgatattgattggcttattagatggatattggcccagtttatctttcatttttttctatagctgttagaaatttactttgctcatagttcatactataattaatatgagactcttgttttgtggtccaagtgttcagcgctcagggtgccttggaagtacgctagcttgttgtcatgaagaagtcattcaagttccttccagtgagttattagttcatatgtatatttctgtttatatcttatcttgtttatg

SEQ ID NO: 108096 - DNA, 1262 bp, Zea Mays
aaacatctgagtctagctcctgacagtcacagacctcaaaactgttctgcacatccttcagctcctttcttttgcagttgcagacttgcaggtaagcaagcagaacagagtggcatggcacatctctcaagtcccaactgactgcctgccatgcccaggtgcatgttgtccagagataagcaggtgatggctgcgccgatggccgcggcggacggcgggctgaggcggctgttcgagaagccgctgccggagaacccgacgctgctggaggcgctctcggcgtggaaccgcaacgtgcaccaccccagcagcaagcccatcgacacggcgtccttcacggagatcttcggcgagctccacttccaggagaagcagcagcccgaccgaggcgccctcctgccgccgtcgccgtcgcccccgccgacgccgctccctccttcccgcacgctgtcgtggctcgacatcgcggccgaggccgagaagagcaaggacgactcgtcgctggacgcgctgctgaggcccaagccagcgaccaccgtggccacggtgaagaggagcgcgagcttctgcaccaagaagggctcctccgcgtcgctgctgctctgcaccgaggggctcggctccgagagcaccgtggacgctgacgacatgttcaaggacggcgacgccgaggccgaggccgaggccgccgccgccgcgctcaagggcacggacacggcggacggcagcgacgccgaggaggcggtgaaggaggagaggcagccaaagacgttcccgccgccgataccgtccatcgggcgcggcggcaagccgtacgtgtgcttccggtcgttccgggaggacggccggttcgtgctgctggaggtggtgatccccgggaaggagctcctgcaggccacgcgcgagggcggccggctcaggctgcagttcgccaacgctgccgcagcagccgcaggtggtgtgggtgtcgtcgacgaggcggtgcacggaggtgacgacgatggcgacccccgtggcaagaacgcatgcatagacgacgacgaccacgatgacgagcgctaggtgatcgtcggggttcgttgatgtacttggcatactttatcacgatcgataattgtcctactactactgctacggatgatgatgatgcaatggtgaatcatgctgatgagaagcatcggctaactaattaattaatgtttctaaagtgtttttcagaaagtgatctgaaaagcgttgtgctcgtcctattcagtcataaa

SEQ ID NO: 108097 - DNA, 1356 bp, Zea Mays
caaagtcactcagttgagagaaatacaaacatctgagtctagctcctgacagtcacagacctcaaaactgttctgcacatccttcagctcctttcttttgcagttgcagacttgcaggtaagcaagcagaacagagtggcatggcacatctctcaagtcccaactgactgcctgccatggtagtgtagtgtctgagttctgaacagagcaggcgcaggagaagtgaaacatttgttcacttgtgcagcccaggtgcatgttgtccagagataagcaggtgatggctgcgccgatggccgcggcggacggcgggctgaggcggctgttcgagaagccgctgccggagaacccgacgctgctggaggcgctctcggcgtggaaccgcaacgtgcaccaccccagcagcaagcccatcgacacggcgtccttcacggagatcttcggcgagctccacttccaggagaagcagcagcccgaccgaggcgccctcctgccgccgtcgccgtcgcccccgccgacgccgctccctccttcccgcacgctgtcgtggctcgacatcgcggccgaggccgagaagagcaaggacgactcgtcgctggacgcgctgctgaggcccaagccagcgaccaccgtggccacggtgaagaggagcgcgagcttctgcaccaagaagggctcctccgcgtcgctgctgctctgcaccgaggggctcggctccgagagcaccgtggacgctgacgacatgttcaaggacggcgacgccgaggccgaggccgaggccgccgccgccgcgctcaagggcacggacacggcggacggcagcgacgccgaggaggcggtgaaggaggagaggcagccaaagacgttcccgccgccgataccgtccatcgggcgcggcggcaagccgtacgtgtgcttccggtcgttccgggaggacggccggttcgtgctgctggaggtggtgatccccgggaaggagctcctgcaggccacgcgcgagggcggccggctcaggctgcagttcgccaacgctgccgcagcagccgcaggtggtgtgggtgtcgtcgacgaggcggtgcacggaggtgacgacgatggcgacccccgtggcaagaacgcatgcatagacgacgacgaccacgatgacgagcgctaggtgatcgtcggggttcgttgatgtacttggcatactttatcacgatcgataattgtcctactactactgctacggatgatgatgatgcaatggtgaatcatgctgatgagaagcatcggctaactaattaattaatgtttctaaagtgtttttcagaaagtgatctgaaaagcgttgtgctcgtcctattcagtcataaa

SEQ ID NO: 108098 - DNA, 1226 bp, Zea Mays
caaagtcactcagttgagagaaatacaaacatctgagtctagctcctgacagtcacagacctcaaaactgttctgcacatccttcagctcctttcttttgcagttgcagacttgcagcccaggtgcatgttgtccagagataagcaggtgatggctgcgccgatggccgcggcggacggcgggctgaggcggctgttcgagaagccgctgccggagaacccgacgctgctggaggcgctctcggcgtggaaccgcaacgtgcaccaccccagcagcaagcccatcgacacggcgtccttcacggagatcttcggcgagctccacttccaggagaagcagcagcccgaccgaggcgccctcctgccgccgtcgccgtcgcccccgccgacgccgctccctccttcccgcacgctgtcgtggctcgacatcgcggccgaggccgagaagagcaaggacgactcgtcgctggacgcgctgctgaggcccaagccagcgaccaccgtggccacggtgaagaggagcgcgagcttctgcaccaagaagggctcctccgcgtcgctgctgctctgcaccgaggggctcggctccgagagcaccgtggacgctgacgacatgttcaaggacggcgacgccgaggccgaggccgaggccgccgccgccgcgctcaagggcacggacacggcggacggcagcgacgccgaggaggcggtgaaggaggagaggcagccaaagacgttcccgccgccgataccgtccatcgggcgcggcggcaagccgtacgtgtgcttccggtcgttccgggaggacggccggttcgtgctgctggaggtggtgatccccgggaaggagctcctgcaggccacgcgcgagggcggccggctcaggctgcagttcgccaacgctgccgcagcagccgcaggtggtgtgggtgtcgtcgacgaggcggtgcacggaggtgacgacgatggcgacccccgtggcaagaacgcatgcatagacgacgacgaccacgatgacgagcgctaggtgatcgtcggggttcgttgatgtacttggcatactttatcacgatcgataattgtcctactactactgctacggatgatgatgatgcaatggtgaatcatgctgatgagaagcatcggctaactaattaattaatgtttctaaagtgtttttcagaaagtgatctgaaaagcgttgtgctcgtcctattcagtcataaa

SEQ ID NO: 108099 - DNA, 247 bp, Zea Mays
tctattttcttttgaattcaacttcaaacacaaatttgaggattacttgaatgcacaactagaataaatcaacatacaaaaagaaaagatgatccagcataaatatattttaaacccacgattcaaaaattatctaacaaaccttaatcaccatataaaccatatatcttagaaatcataactaatagcaatgtgttcaccaccataaactaattaatccaaaccttaaggaaccatactacacaat

SEQ ID NO: 108100 - DNA, 1563 bp, Zea Mays
cgcatcccctcccgcccgcggataacgcgaccgtcgttgtgattcccctcgccccccaccgccgcgattccccaaccgcccgcggatcacgcgcacgaccgccccctcccgacgcgattccccaaccgcccgcgatgaatccccgctacgcccgctctcaacaacctccgcctccatcgccgtgcgtctcggtcatggaaacaaaccgcagcgcccgactccaggcgcggttcgccctccgcacaagccctcgacgcgtcgacgacagtgacgatgacagtgaacggatctgcaggggccgcggtggagaggaaggagaaggtggaggaggataaggacaacgaggggctgccggtgaaggaggagcaggagaggggctggaggtcctctacgactacggctttggctccgtgaccgtcaaggactacttcgcggcggccaaggtcctgtgccgggacgacggtgggccgccacgctgattctctcccgtcgagtgcggccacccggtcgtggatcaagcgtcgctgctgctcttcttgccaggtgcgtgcgtcgcttcagctggccaaaatcagtcatcttaatgcttgtctctgaagggcagcacgtagctggaggtgctgggcaaacggagcaggagagaatcagtatgcatcaatgcatcatacacagccaaattgtgtactaatacttcatctgtatttaccaggatgcaccatggaggggtgcaggtgttgctgtacccatgttttcaatcagatcatatcaggaccttggcgttggagaatttctagatcttaaacttcttgttgactgggcagtcaatttgggcttccatcttgttcagctccttccaatcaacgatacttcagttcatgggatgaggtgggattcttatccgtacagctccctctctgtgtttgctttgcatcccttgtacctgagggtacaagcactttcagatgcaattcctgtgttaaggaagaaattcagcaggcaaagaagcatttggataaaaaggatgtcgactacgaggcagcattgtccacaaaattgtcgattgctagaaaaatattcaatttagaaaaggaaaaagtgctaaactccagttctttccagcagttcttatctgaaaacgaggaatggttgaaaccatatgcggcattttgctttttgcgggacttctgatcacagtcaatgggatcgttttttctcagttttccaaggataagcttgacaaacttatttctgaaggtactttacaccatgatgttatacgttttcattactatgttcagtaccatctatatatacaattatctgaggcagcaacatatgcaagaaagaaaaatgttatcctgaaaggtgatttacctattggtgttgataggaatagtgtcgatacttgggtatacccaaccttgtttcgcatgaataccactactggagcgcctcttgattattttgacaagaatggacaaaattggggttttcctacatataactgggaggagatgtcaaaaggataattatgggtggtggcgagctcgtctgacacaggtt

SEQ ID NO: 108101 - DNA, 1372 bp, Zea Mays
caaataatctatctaccagtgcgtgtgctcatccgtgcacgccggcaatggtgtcctccgcccgtgcgctcatcggcctcctcgtcgccgcggcctccctcgccgtcgcgctctcggatggcggcgggatggcggcgccggtgtacgggtacgcggcggggagccccaacgggccggagaactgggggaagctgagccccgcgtacaagctgtgcggggaggggaagcagcagtcgccgatcgacatcgtcaccaagcaggccgtccccgccgccaccctcgacaccctcaaccgcacctacggcgccaccaacgccacgctcatcaacgacggccacgacatcacgctggcgctcgagggcaaggttgggacggtgacggtgaacggcaaggcgtacagcttcgagaagctgcactggcactcgccctccgaccacaccatcaacggccagaggttcccgctggagctgcacctggtccacaggagcgccgacggcgcgctggcggtcatcgggatcctctaccagctgggcgccccggactccttctactaccagctgaagcggcagctgggcgagatggcccaggaccggtgcgacttcgccgaggaggaggagtcgcgggtggaggccggcctcatccacctgcgctcgctgcagaagcgcaccggcagctacttccgctacacgggctccctcaccgtgccgccatgcaccgagaacgtcgtctggagcgtcctcggcaaggtgcgccagatcagccaggaccagctgcagctgctcaaggcgccgctgcccgggagcgacgcgcgccccacgcagccgctcaacggcaggaccgtccagttctacaacccgcccaacagcaccatctccttccagatctaacactaaaaagtactttggaatctttaatatagtgtaactctgtttatgataaatcaatattctatcatttgtattcgttccaacgtattcgatcgagtcagtcatgcgtgcctaataggccaggatttaacacaccgtagacccgataaaatgggtccgatttaacccctaagatacctaacccgttattcaaccacgtctcaccgaataaccagaggtcattatctcctagatggactgtgagaaaacacttaaggccaatataacatgaagcctagtttgaaggagagcgagcaaccaagtaagctataaaaaaaagcatgtatcctgataaaaaagtacagtatatatgggtcatatatccactttaattttattttttattggtagggtatattttaatttaaattttatttttatggaggaggtgcatcatactggcttgccactagaccctcgagtgaggacagacgctgccgagctgc

SEQ ID NO: 108102 - DNA, 1245 bp, Zea Mays
cagtccgtcagtgtggtggtcagagagaaaagatgaaaaaaaagaataattcattggagccgcacgtctccttccggccttccccgacgatgccgctgccgccgggaggaacggatggatcccattggcttgccaccaccactgcccgcttcggttcctattcccgctcgctacggccccagtcgcgctcctcaccggccggcaccaccccgcccgccctcgccttttgcctgccgagatttaggcctggcattctagcaatgcagaagaagtgatcttataatcataaaagataacaatggggatatccaaggtgaccggcatctctgcgacagcttttcttgtcacatctgttggtctgtaccagctcggcatgagaattattgtgcttcctttcctagccaccagtattgttgcttctgttgtcactgttgcatcccatgatgccatcaacctaccgtggatcctggggaagaactcagtgggaaggtttcctctttggtcagttatactgtttggtcctttcttgacgcttgctcggacatatgcaatggttaagagatacatgaggaaagagtccgtgtatgacaagattgtggatggcctatatcttggaggatggccctttctcttgaaacatttgccccctggaaacccatctgtcatagactgcacttgtgagcttccaagaatttccttcgttccagcagacgagtatctttgtcttgcaacttgggataccagagctccaacaccataccaaattgaaaaagctgcacgttgggcttgtggaaagagatctgaggggaagccggtttatgtccattgcgcatttgtatattaattgtcatgtttattcttcgtgatggacacattaggtcatggaagaagtgcttgtgtcgtgtgtgcaattctagtagcgctgggcattgctgagaactggaaagaggctgagaacatcatccgtgaaagaagaaagataaaaatgaacgcccttcacaggaaaaccttggaagagtggtccaaacaacgggattctcagaaaaaggctaagtagttgtaagtgtaacattttccttagagataaacttgtttgtggtgttaaagcttgtttgaaacatcatacaatggcatatctacttaggccaagtgtaatgtctgtgaaattattattattattttctcggtgtttctacctttaaacatatttgatttatatccagatttggtactatttttttgtcc

SEQ ID NO: 108103 - DNA, 1203 bp, Zea Mays
cagtccgtcagtgtggtggtcagagagaaaagatgaaaaaaaagaataattcattggagccgcacgtctccttccggccttccccgacgatgccgctgccgccgggaggaacggatggatcccattggcttgccaccaccactgcccgcttcggttcctattcccgctcgctacggccccagtcgcgctcctcaccggccggcaccaccccgcccgccctcgccttttgcctgccgagatttaggcctggcattctagcaatgcagaagaagtgatcttataatcataaaagataacaatggggatatccaaggtgaccggcatctctgcgacagcttttcttgtcacatctgttggtctgtaccagctcggcatgagaattattgtgcttcctttcctagccaccagtattgttgcttctgttgtcactgttgcatcccatgatgccatcaacctaccgtggatcctggggaagaactcagtgggaaggtttcctctttggtcagttatactgtttggtcctttcttgacgcttgctcggacatatgcaatggttaagagatacatgaggaaagagtccgtgtatgacaagattgtggatggcctatatcttggaggatggccctttctcttgaaacatttgccccctggaaacccatctgtcatagactgcacttgtgagcttccaagaatttccttcgttccagcagacgagtatctttgtcttgcaacttgggataccagagctccaacaccataccaaattgaaaaagctgcacgttgggcttgtggaaagagatctgaggggaagccggtttatgtccattgcgcatttggtcatggaagaagtgcttgtgtcgtgtgtgcaattctagtagcgctgggcattgctgagaactggaaagaggctgagaacatcatccgtgaaagaagaaagataaaaatgaacgcccttcacaggaaaaccttggaagagtggtccaaacaacgggattctcagaaaaaggctaagtagttgtaagtgtaacattttccttagagataaacttgtttgtggtgttaaagcttgtttgaaacatcatacaatggcatatctacttaggccaagtgtaatgtctgtgaaattattattattattttctcggtgtttctacctttaaacatatttgatttatatccagatttggtactatttttttgtcc

SEQ ID NO: 108104 - DNA, 810 bp, Zea Mays
cagtccgtcagtgtggtggtcagagagaaaagatgaaaaaaaagaataattcattggagccgcacgtctccttccggccttccccgacgatgccgctgccgccgggaggaacggatggatcccattggcttgccaccaccactgcccgcttcggttcctattcccgctcgctacggccccagtcgcgctcctcaccggccggcaccaccccgcccgccctcgccttttgcctgccgaggtaatctggagacctgcgatcccctcgcgcgcagacacgacgcgctttcgtttctgtcccgtggtggttagctcgttcgcatctcactgtcgatatgttttatgatgaacgattttgctgatatatcttgatctgttgtatttgtaatgtttggatcggatggatcttggcccactgctttgatgtaggtaggatttagttacccgatttgttctctaagccacaaaactgaggcagccagacaggggtgaccggctgaccgcgttttatgccttgatcgtcagtgtcgtcaccgtgtttctgcactaaaaaagaagaagctggaagcatctcacgttaccaaacgcacattcttgctaattcgattgccctcccccatcagcgttgatcaacgagtgaatctacctgatccaatggttaagtaaaccgtgtttgtgggttttgttgttttcttcagtatggccctgagttaggatgctagtgtcaagctgttcaactatgtttaatgctgacctgttaggaactactacttgtttttcacatcgaaaaaatcgactccgaaaatttgcatt

SEQ ID NO: 108105 - DNA, 330 bp, Zea Mays
gctcagggggggcaggcaccgttccggaatccaggacgacgacgacggttcccggcacggcacgggacgccgggcgccggcagccatggatggatggatggatatatgtgatcgagctgtatggcctaggtatttttttggagttggggatggccgacaaatgcagcgctgctttcacggtccatgaacacgttgcttccaggctaaattacgcagcgtgtaagacgtattgtaatgctgctttgcttggttgctgtccagcacttcgcgctgtttcaggtatgtatggctgcgtttaggttaattctcctcttcagcacggatcctgac

SEQ ID NO: 108106 - DNA, 1695 bp, Zea Mays
ccgaagcatcctcctcctcgcccgccgccccgctccggcagttaccagtcggctctctcgtgctctctgcctgcaggctgcagcggcgcccgtccggtcgccttgccacgtcgccgcccgcgcccaccacctgaggccggtcgcccatccataacgcccactcccgcagtccagtccccacctcttctctcacatcacagagtcgcacgcacgcctcctcccctccctccccccctcacttcccacgcctcctcaccgcgcgcagatcggaggaatggtgagcgcgtcgagcctgctcctcccgacctccgtgcgggacctggcctcctgcgtctccgacggcgccgtccgcgtcgcctgcaccagcccggcgtccacgctcacggtctcctcctcctcctccaccacctcctcgccgccgccggccacgctctccgtcgccatctcctaccgcgccaccccgcaggccccgtcgtcgccgccgctcttgctgcgcctcacctggtcgcactcccggcacgggcccccgacgctctccttcgccggacccaccgcgtcgtcccccgccgtcctcctccgccgccgcaggggcacctactgcctcccctcctccacctccacatccacccacatccccccgctcgctctcttctgggacctaaccgccgccaggtacagtccggcctcgtccccgtccccggagccagcctccgggttctacgtcgtcgccgtcgccagcgccgaggtggtgctggccgtgggcgacctggcggcggagttcatcaaggcgaagttcgagggccagatcccctgggcgcggtccatcctccccgtgtcccgcaccgaccgggtcgtggcggcggcgccgcggccgggcggggcggttcacacggcgcgggtccggttcggcgagggcgcgccggagcacgaggtggccgtgggctgctgccgcgccggcgccggcaggcccggggaggaggagctctgggtcagcgtggacggcaagcgcgccgtgcacgcgcggcgcctgcgctggaacttccggggcaaccagacggtgttcgtggacggggcgcccgtcgacgtcctgtgggacctccacggctggtggttccaggacccgcccggctgcgccgtcgtgatgctccgcgccaggagcgcgctcgagagccggctctggctggaggaggaggccagggcgcccgggttcgcgctcctcgtgcaggccttgaggacgccgccctgatcttggtggtcctttgaatcctgatgaagaggtcaaatgctcactgcctgctggttgatcatgtttccttttgactagggaatttggtgggtggtatttagcaaaccaaaccaaatccagccgggggggaatggtggctgcgttggcaatctagacgtttttaggttccggtgtgtggaatgggtttgggaaggacaccatggattttcatgtggttttggtataccaagaggagatatattgatctgtgactgctgtttgggtcatcttctttctgtctgtctgtatgtcttttcttctaaaaacttgctgcttgttatttcccgataatttgcagctctatgaggtctgtgctcgtacagtttaacaaaggattatacagtatcatcatagggtgtgccttgattcagcattaccaactatatgtattgattatacaattgctcttc

SEQ ID NO: 108107 - DNA, 1588 bp, Zea Mays
cagtttctgtcgtttgcacatattcaaaatcctagccccgatgacctgggtataaccggacacagacccaaactagaaccaggtgtctgttcagttcgtgtccgccgtcctctgttcaagtgcaagcgagcgaagaaacgaagcaccaggaggcgggaacaagaaggaatttgcgcagcaagcaaaggtcccgagttgcaaacttgcaacccaagaagagcgttggacatgcagatggaggggagggagggtatcgcggtggtggccgcaggcggcggccatggatccgggcagcacggcatgttcggagcggcagacatcgccatggcagaggcgcatgaggcagcggccaaggggtaccagtaccagtcctccccctcgtcgccgtcgacgtccctcacgccgtcgccgccgccggctgcggctggccacgccggggacgccaccgcggcgccacttgcctggagcctgggcggcgggatgccgagcgagcccgcgggggcccgcgcggctccggcaggcgccagatcctggccactctcggggaatggtacgcgctgtcagccggcgggagcttcacgcctcacgtcatcatcgtgggtactggggaggatgtggcggcgcgcgtcatgtcgttttcgcagaaaggtccacgctcggtctgcatcctctccgccaacgggacaatctctaacgtgacgctgaggcagccgggctcatctggtagcaccttcacctacgagggccgtttcgagatcctgcagctgatgggctccttcacaatggctgaggaaggtcgtaagaggacaggcggcctcagcgtctctctcgctggcccagacggccgtgtggtcggcggcgtagtggctgggatgctgcgtgccgcaagtcctatacaggtgatcgtgggaagcttcctgcccaacagcctgaagcagcaccagaggcggatgagcgcgcagcagcagctctccccggttccggcactgccagaacctgaagcgcccccacccgtgctcaccgcagccaccccgatctctctggcaggtcctgggaacgggttccatgatgcgccgccaccctccgccgcacctccccagccccacgccagcgccatgaacctgaacgcgacgggcttccccgtggctggctggcccgcaagctcgccgcagcagatggtgtacagggcttcccctgacatcaacgtcagcttgactccccaggagtaggatcgttgggctcgtcgtcgtcttctcttttctttccgtcgcctctacgctgatacattttgggagagagagaggaagtgagctaggatcatgaaaggataggcaatatactgaatgagaatgaactgatctgtaggtggcgccaaccatgactgtggcagttgatttagtcctactcctttttcagttcttgtttcttaatgctctgcagccgttattgttgggttgtggcgttgcgctgtttagcctgttctgttattggtgaatcttctgatggccaaatagccagttctactcgatcggtgtctgttcagtaggatcattagccaggggatctgtgaacactaacttgctgtttc

SEQ ID NO: 108108 - DNA, 118 bp, Zea Mays
ggttcatacctttagtgggttcagactggaatttacgtccagggacgggggaggagcgccactaagtagactcctgctccaagtgttgggtctacttgttgctttgaacgaagaaaag

SEQ ID NO: 108109 - DNA, 315 bp, Zea Mays
atgatagcagtttgtatttgttcttcaatcttatcttcagaaagccacatgctgctcttcctgcgcaggagctccttctttattgccttcttctcctctttgcgcttctccttcttccgccagctctccagcttctcagctctttctttcatgagggtctggcggaagtcctcctcgaacgcgcggcgctcggcggcgcgcgtctgggcggcggcgagcttggcggccttgcgctcctggttggcggcgcgggcggcctcggctctggcgtcggccttccgctgccgctcggcctgcaacagctgcacctcgtag

SEQ ID NO: 108110 - DNA, 1285 bp, Zea Mays
cgcgcctcttcctcttcttggccgccgctggctcgccgccgccacctcggccgcagcagcagcacgcgacgagcagtgacgcgagagcaaagaagagcgcgttgccgacggcgatcccggctacggcgccggggctcaaccccggcctgcggctgagcgactcctgcgtggccagcgccggcgacgacgaggcgacggaggacgatgccgccgggttggacggcagcacggacgaagacgaagtcgaagacgaaggcggcgtcggcgcgggctcccgcggcaggaactcgcagtgcggcagcggcggcgcgggcccgcagaggccggcgttgccggcgaatgaggcgaggccgaacctggcgcgcatggcgtcgggcagccggccggagagctggttgttggaggtgttgaagtccgcgaggcggggcagcgcggcggccacgtcggggacgaggcccgtgaggaggttgtcctggagcctgagcgtgacgagcgccgtgagtccggcgagcgcgggcgcgggcgggacgggcccggtgaggctgttgtcggcgaggtcgaggcggacgaggcgggtgaggcgcgcgagcgcggccgtggggacggcgccggacacgtcgttgcgggagaggtagaggaggacgaggcccggcgcgccgcggagcagcgcgtccagcgtgccgttgaggcggttcccgcggaggtccagcgcgcgcagctccgccaggtgggacagcgggtcgagcgggccgcgcaggtccagcgacggcagggtcagcgaggtgacgcggcggccgtccgccgagcagcccacgcccgcccaccgccccgcgcacgcgtcgcccgtgctccagttcgccgccaggatgccgtgcgcgtccgcgccgtgccggaagatggtcagcgcgtccgtgtcgctcggcttcacctccggctctgggtccggtacggccgacggcgccgctgccgacaggatcgtcaggaatgccgcggaaagcagcaagaaggagagccgcacgcgcattgccgccgccggcagccgcaggtgtggacgccgacggcgacggggcgagtggaggtggagcgagatcggcatgggagtgggccgggcgagagaggaaaggaaaggagaggtccggaggaatcactcaaccaaagccatgactggagtgagtgatcttggctgctccgtcagtcagtctgcattgggacgagagaagtgctactccatctccatgcaacttttgatttttgaagaatcgacggagctggcgcttggggtcgg

SEQ ID NO: 108111 - DNA, 1561 bp, Zea Mays
tccgtctctccatgtataatttattttattaaaaaaacagaagcacaaactaccgcagcttatcaagcaagcgctacggagcgcaggtcaccgagctctggcccgcccaagttcactacccgacccgccgcgccgcagtctagaagcttctgccggccgtctgcggcccgcccatccgcaacccatggctgtcgtcgaagaagacgctgcggcgtctgcagatcccgccgccgcgtccgatcccgccgctggctccagcgaaaacgagatcacagtagaagaggcttctttcgtgcattctgaacctccccaggatggcagcgccccacccgtggtttcctctgacatggaggcccttcacgacaaggttaagaagcaaatcatcaaagaaggccatggcaggaaaccgctgaagttcgcgacgtgctttgtgcactatagagcatgggttcaaggatcatcgcataaatttgaggatacctggcaagagcaacatccaattgaactagtacttggaaaagagaaaaaacaaatgtctggtttaggcatcggtgttggcagcatgaaaagcggggagcgtgcattgttgcatgttggttgggagctaggctatggcaaagaaggaagtttttcattcccaaatgtccctccaatggcagaccttgtttatgaagttgaactcattggatttgatgatgttaaagagggtaaatcccgaagtgacatgacagttgaagagaggattgcagctgcagacaggagaaagattgagggcaatgcatatttcaaagaaaagaagcttgaggaggccatgcagcaatatgaaatggcgattgcatacatgggagatgatttcatgtttcaattatttggaaagtacagagacatggccttggctgtgaaaaatccatgccatctcaatatggctgcatgcctgatcaaactaaagagattcgatgaagctattgcgcagtgtagcattgttttgacagaagatgaaagtaatgtcaaagcgctgttcaggcgaggaaaagctaaatctgaacttggccagacagaatcagcgagggaagatttcctcaaagcgaagaagtactccccagaagacaaggagatcattcgggagctccgtttgctcgcggaacaagacaaggcactataccagaagcagaaggagctctacaaaggtctctttgggccaagtcctgaagcgaaaccgaagaaggcaaagtacctcgttgtgttttggcagtgcctggtgtcatttatcctttatctggctgggatgttcaaacggaagaacgagtaggataatttaccagaaaattgtgtagaactggtggcctaattgaccaaccttgtattataaggagtgttgaattttctgtagaactgtcggccggtccggatcaattagttgttatgaactctatacgatgttgttcactattatgccatagtttcatacagtctttcaactggagctcaaagggccttttatgccattgtatattgcagctttcatatttagattatgctagtaataatactgttgctacaa

SEQ ID NO: 108112 - DNA, 2834 bp, Zea Mays
gtctctcttcctcctcctacctcccagtcccacctttctttctttcttttttctttctttttgggtttctctttctcctggtccggtccgggagacctgctggaccagacggtgccgactcactgcaggcgttcgcttgacagccttcctattacgagacgagctcttggttttccgcagacacggactctaacaagcgagggcctgtcatggcctggcctgctgttaagtctcgtctcctgcgtgactgcgtctctcttctctctctctcgctctttctcccggagtagattttattcctattcattcctcgtgtgagtgaggtccctccgctcctcctctctctctctctctctccctctccgcggagtggagccggagtcgagaggcaggcagacgagacgaggaatgcttccttcttcccatgccgccgccgtccctgttcttctcctccctccctaattccagtgctctcacgtaccagatctgaggccgcggcggagcgtgacgacgacgaagtcggtcaggatgagccgcgaggataccctgaaagtgcagaccctcgagctcaaggtgaacatccactgcgacggctgccttaagaaagtcaagaaggtgcttcacaagatcgatggtaaaacgttctccttctttataaagccgcgaaccgcttgccttttttttgttattgtttgccgttctttcgtgttcgtcttctctgcctgccagggtgagacttgagagtgagaccagctcagccggaggggagaggctgctcgcctgctctcttcttctccgtaacagaaacgatggacgataacccttgtgtccattccgaaaataacttgttttcttctgttctaatacaaatgcgctgggcatggattggtgggtgttgcaggggtgtaccagagcacggttaatgcggcggagggcaaggtgacggtgtccgggctcatggacccggacaccgtcatcaggaagctgcacaaggccgggaagccggcgcagctgtggggcgccaccgccaagcctgccgtggcgacccagctcgagaaactgcagctcaaggatgccgggggcaagggccagggccagccgcccaagaacgcaggcggcaagggtcagccgcccaagaacgccgccggcaagggccagggccagggccagaagcagcagcagcccaagggtggagcgggcggcgccggcgccggcgcgaaagtggtggcgctgccgcactcgcagccgacgccgcagcagctgatgcagatgcagcagcagatgcagatgaacgggatgaagtttgctcatccggagctcatggccatgggcgcaggtcgcatgccgatgccgatgccgttcccggcggcagcgcaggcgcaggcgcaggccgccgcggccaaggaccccaagaccgtcaagttcgacctcccggggggcgaggagttcggggacgacggcagcgacctcgacgacgagttcgacgaactagacgacgtggatttcgaggacgacggcctcgacgacgacgacgacggcgacctgtacgacggccccgggatggtgatgaagcccatgggcatgcccccggccgctgctgccggtggcggcaacggaaacggcggcggcaagaagggtggcggcgggaacgaggtcccggttcagatcaatgggaacgccagcaacggcggcggggcgaagcagaacgggggcggcaaaagcggggccaagaacggcaagggcggcggcggcggcggcggcgtcgttgccccgggcggcgggaaccaggctgggcagggcaagccgaaaggcggcttccccggcggcgccggtctcggcgggccgatgatgggcggcgcgccgccgccgcatgcgggcatgatgatgaggccgccgaacatgatgggcggcgcgggcggtttccccggcatgggccagatgggcggccacccccacatgggtggcggcggcatgccgcaggcaggcgggggcgccgcgcacggcatgccggctggtggcagcatcagcatggccgctggcggaatgcctggggccgggttctttccgcgcggcgttggcggcggcatgccggccggcgcggagatgctgggcatgtcgcagctgcctccgcagcagcagcagcacatggcggcggtgatgcagcagcagcagcagcacatggctgcgatcatgcagcagcagcagcaacagatgatgatgatgaacgggcacggccacggccacggccaccatggccacggcgggtacgggtacgggcgcccggcgatgccgcagtacccgccgccgccggcgtactactacccgatgccgcagcgccacccgcacgacagcatgttcagcgacgagaaccccaacgggtgctcggtgatgtgaggcgaggcgcggcggcggcctgcggggggctccggagaaagtgaaccaggcaaccagccagccagccaaccggaaggagggagctcgggcccgtcaggtcggaggcggccgccgtgagtggaagagtcgtcgtcggtatacatgaagaaaaaaaaaactagctatatgctatagcaccagccgtaacctcgccgccccatttcgttttcgtctttcccctagtttgttttcacctttggtactttttgtttcccttctctgaacaaagaaagagcggcatgcagcttcctcttccttgagtggaaggtaggtatagtggtaacaacaatgatagtggtgatgctagctgatggctgtcttccttcgcttctttctttcttgcttgcttgcttgcttgcttgcttgccccatatctaatgaatggacaatgtgcaagagca

SEQ ID NO: 108113 - DNA, 2143 bp, Zea Mays
cctggtccggtccgggagacctgctggaccagacggtgccgactcactgcaggcgttcgcttgacagccttcctattacgagacgagctcttggttttccgcagacacggactctaacaagcgagggcctgtcatggcctggcctgctatctgaggccgcggcggagcgtgacgacgacgaagtcggtcaggatgagccgcgaggataccctgaaagtgcagaccctcgagctcaaggtgaacatccactgcgacggctgccttaagaaagtcaagaaggtgcttcacaagatcgatggggtgtaccagagcacggttaatgcggcggagggcaaggtgacggtgtccgggctcatggacccggacaccgtcatcaggaagctgcacaaggccgggaagccggcgcagctgtggggcgccaccgccaagcctgccgtggcgacccagctcgagaaactgcagctcaaggatgccgggggcaagggccagggccagccgcccaagaacgcaggcggcaagggtcagccgcccaagaacgccgccggcaagggccagggccagggccagaagcagcagcagcccaagggtggagcgggcggcgccggcgccggcgcgaaagtggtggcgctgccgcactcgcagccgacgccgcagcagctgatgcagatgcagcagcagatgcagatgaacgggatgaagtttgctcatccggagctcatggccatgggcgcaggtcgcatgccgatgccgatgccgttcccggcggcagcgcaggcgcaggcgcaggccgccgcggccaaggaccccaagaccgtcaagttcgacctcccggggggcgaggagttcggggacgacggcagcgacctcgacgacgagttcgacgaactagacgacgtggatttcgaggacgacggcctcgacgacgacgacgacggcgacctgtacgacggccccgggatggtgatgaagcccatgggcatgcccccggccgctgctgccggtggcggcaacggaaacggcggcggcaagaagggtggcggcgggaacgaggtcccggttcagatcaatgggaacgccagcaacggcggcggggcgaagcagaacgggggcggcaaaagcggggccaagaacggcaagggcggcggcggcggcggcggcgtcgttgccccgggcggcgggaaccaggctgggcagggcaagccgaaaggcggcttccccggcggcgccggtctcggcgggccgatgatgggcggcgcgccgccgccgcatgcgggcatgatgatgaggccgccgaacatgatgggcggcgcgggcggtttccccggcatgggccagatgggcggccacccccacatgggtggcggcggcatgccgcaggcaggcgggggcgccgcgcacggcatgccggctggtggcagcatcagcatggccgctggcggaatgcctggggccgggttctttccgcgcggcgttggcggcggcatgccggccggcgcggagatgctgggcatgtcgcagctgcctccgcagcagcagcagcacatggcggcggtgatgcagcagcagcagcagcacatggctgcgatcatgcagcagcagcagcaacagatgatgatgatgaacgggcacggccacggccacggccaccatggccacggcgggtacgggtacgggcgcccggcgatgccgcagtacccgccgccgccggcgtactactacccgatgccgcagcgccacccgcacgacagcatgttcagcgacgagaaccccaacgggtgctcggtgatgtgaggcgaggcgcggcggcggcctgcggggggctccggagaaagtgaaccaggcaaccagccagccagccaaccggaaggagggagctcgggcccgtcaggtcggaggcggccgccgtgagtggaagagtcgtcgtcggtatacatgaagaaaaaaaaaactagctatatgctatagcaccagccgtaacctcgccgccccatttcgttttcgtctttcccctagtttgttttcacctttggtactttttgtttcccttctctgaacaaagaaagagcggcatgcagcttcctcttccttgagtggaaggtaggtatagtggtaacaacaatgatagtggtgatgctagctgatg

SEQ ID NO: 108114 - DNA, 2479 bp, Zea Mays
gtctctcttcctcctcctacctcccagtcccacctttctttctttcttttttctttctttttgggtttctctttctcctggtccggtccgggagacctgctggaccagacggtgccgactcactgcaggcgttcgcttgacagccttcctattacgagacgagctcttggttttccgcagacacggactctaacaagcgagggcctgtcatggcctggcctgctgttaagtctcgtctcctgcgtgactgcgtctctcttctctctctctcgctctttctcccggagtagattttattcctattcattcctcgtgtgagtgaggtccctccgctcctcctctctctctctctctctccctctccgcggagtggagccggagtcgagaggcaggcagacgagacgaggaatgcttccttcttcccatgccgccgccgtccctgttcttctcctccctccctaattccagtgctctcacgtaccagatctgaggccgcggcggagcgtgacgacgacgaagtcggtcaggatgagccgcgaggataccctgaaagtgcagaccctcgagctcaaggtgaacatccactgcgacggctgccttaagaaagtcaagaaggtgcttcacaagatcgatggggtgtaccagagcacggttaatgcggcggagggcaaggtgacggtgtccgggctcatggacccggacaccgtcatcaggaagctgcacaaggccgggaagccggcgcagctgtggggcgccaccgccaagcctgccgtggcgacccagctcgagaaactgcagctcaaggatgccgggggcaagggccagggccagccgcccaagaacgcaggcggcaagggtcagccgcccaagaacgccgccggcaagggccagggccagggccagaagcagcagcagcccaagggtggagcgggcggcgccggcgccggcgcgaaagtggtggcgctgccgcactcgcagccgacgccgcagcagctgatgcagatgcagcagcagatgcagatgaacgggatgaagtttgctcatccggagctcatggccatgggcgcaggtcgcatgccgatgccgatgccgttcccggcggcagcgcaggcgcaggcgcaggccgccgcggccaaggaccccaagaccgtcaagttcgacctcccggggggcgaggagttcggggacgacggcagcgacctcgacgacgagttcgacgaactagacgacgtggatttcgaggacgacggcctcgacgacgacgacgacggcgacctgtacgacggccccgggatggtgatgaagcccatgggcatgcccccggccgctgctgccggtggcggcaacggaaacggcggcggcaagaagggtggcggcgggaacgaggtcccggttcagatcaatgggaacgccagcaacggcggcggggcgaagcagaacgggggcggcaaaagcggggccaagaacggcaagggcggcggcggcggcggcggcgtcgttgccccgggcggcgggaaccaggctgggcagggcaagccgaaaggcggcttccccggcggcgccggtctcggcgggccgatgatgggcggcgcgccgccgccgcatgcgggcatgatgatgaggccgccgaacatgatgggcggcgcgggcggtttccccggcatgggccagatgggcggccacccccacatgggtggcggcggcatgccgcaggcaggcgggggcgccgcgcacggcatgccggctggtggcagcatcagcatggccgctggcggaatgcctggggccgggttctttccgcgcggcgttggcggcggcatgccggccggcgcggagatgctgggcatgtcgcagctgcctccgcagcagcagcagcacatggcggcggtgatgcagcagcagcagcagcacatggctgcgatcatgcagcagcagcagcaacagatgatgatgatgaacgggcacggccacggccacggccaccatggccacggcgggtacgggtacgggcgcccggcgatgccgcagtacccgccgccgccggcgtactactacccgatgccgcagcgccacccgcacgacagcatgttcagcgacgagaaccccaacgggtgctcggtgatgtgaggcgaggcgcggcggcggcctgcggggggctccggagaaagtgaaccaggcaaccagccagccagccaaccggaaggagggagctcgggcccgtcaggtcggaggcggccgccgtgagtggaagagtcgtcgtcggtatacatgaagaaaaaaaaaactagctatatgctatagcaccagccgtaacctcgccgccccatttcgttttcgtctttcccctagtttgttttcacctttggtactttttgtttcccttctctgaacaaagaaagagcggcatgcagcttcctcttccttgagtggaaggtaggtatagtggtaacaacaatgatagtggtgatgctagctgatg

SEQ ID NO: 108115 - DNA, 2423 bp, Zea Mays
tttatgttttcttttcgttcaaagaaaccgtactgataggaaacagttgatattttacatggctctaaaagtttataataataaagaatttaccaacccaggtggaattaataataacaggaggacctgtatctaaaattagaaatccttgaaggagaacacaggaagaccacccaccatgtcagagcctatttaaaccgcgctttgggcagccatctttcacacaacacaagagccttctcgctctgatctgagcaggaggaggaagaaagccaaaggccttccttgcgcttccagggcaaagaagatctgaggccgcggcggagcgtgacgacgacgaagtcggtcaggatgagccgcgaggataccctgaaagtgcaggtgagttcttctgtttgcctgtcattttagtcaatcaggcagggctggccgctgatcccggttcgcgctcaccctgcatgccatgtcttctcctgcggcgtttttctgtctgggcgcacagaccctcgagctcaaggtgaacatccactgcgacggctgccttaagaaagtcaagaaggtgcttcacaagatcgatggggtgtaccagagcacggttaatgcggcggagggcaaggtgacggtgtccgggctcatggacccggacaccgtcatcaggaagctgcacaaggccgggaagccggcgcagctgtggggcgccaccgccaagcctgccgtggcgacccagctcgagaaactgcagctcaaggatgccgggggcaagggccagggccagccgcccaagaacgcaggcggcaagggtcagccgcccaagaacgccgccggcaagggccagggccagggccagaagcagcagcagcccaagggtggagcgggcggcgccggcgccggcgcgaaagtggtggcgctgccgcactcgcagccgacgccgcagcagctgatgcagatgcagcagcagatgcagatgaacgggatgaagtttgctcatccggagctcatggccatgggcgcaggtcgcatgccgatgccgatgccgttcccggcggcagcgcaggcgcaggcgcaggccgccgcggccaaggaccccaagaccgtcaagttcgacctcccggggggcgaggagttcggggacgacggcagcgacctcgacgacgagttcgacgaactagacgacgtggatttcgaggacgacggcctcgacgacgacgacgacggcgacctgtacgacggccccgggatggtgatgaagcccatgggcatgcccccggccgctgctgccggtggcggcaacggaaacggcggcggcaagaagggtggcggcgggaacgaggtcccggttcagatcaatgggaacgccagcaacggcggcggggcgaagcagaacgggggcggcaaaagcggggccaagaacggcaagggcggcggcggcggcggcggcgtcgttgccccgggcggcgggaaccaggctgggcagggcaagccgaaaggcggcttccccggcggcgccggtctcggcgggccgatgatgggcggcgcgccgccgccgcatgcgggcatgatgatgaggccgccgaacatgatgggcggcgcgggcggtttccccggcatgggccagatgggcggccacccccacatgggtggcggcggcatgccgcaggcaggcgggggcgccgcgcacggcatgccggctggtggcagcatcagcatggccgctggcggaatgcctggggccgggttctttccgcgcggcgttggcggcggcatgccggccggcgcggagatgctgggcatgtcgcagctgcctccgcagcagcagcagcacatggcggcggtgatgcagcagcagcagcagcacatggctgcgatcatgcagcagcagcagcaacagatgatgatgatgaacgggcacggccacggccacggccaccatggccacggcgggtacgggtacgggcgcccggcgatgccgcagtacccgccgccgccggcgtactactacccgatgccgcagcgccacccgcacgacagcatgttcagcgacgagaaccccaacgggtgctcggtgatgtgaggcgaggcgcggcggcggcctgcggggggctccggagaaagtgaaccaggcaaccagccagccagccaaccggaaggagggagctcgggcccgtcaggtcggaggcggccgccgtgagtggaagagtcgtcgtcggtatacatgaagaaaaaaaaaactagctatatgctatagcaccagccgtaacctcgccgccccatttcgttttcgtctttcccctagtttgttttcacctttggtactttttgtttcccttctctgaacaaagaaagagcggcatgcagcttcctcttccttgagtggaaggtaggtatagtggtaacaacaatgatagtggtgatgctagctgatg

SEQ ID NO: 108116 - DNA, 2343 bp, Zea Mays
tttatgttttcttttcgttcaaagaaaccgtactgataggaaacagttgatattttacatggctctaaaagtttataataataaagaatttaccaacccaggtggaattaataataacaggaggacctgtatctaaaattagaaatccttgaaggagaacacaggaagaccacccaccatgtcagagcctatttaaaccgcgctttgggcagccatctttcacacaacacaagagccttctcgctctgatctgagcaggaggaggaagaaagccaaaggccttccttgcgcttccagggcaaagaagatctgaggccgcggcggagcgtgacgacgacgaagtcggtcaggatgagccgcgaggataccctgaaagtgcagccatgtcttctcctgcggcgtttttctgtctgggcgcacagaccctcgagctcaaggtgaacatccactgcgacggctgccttaagaaagtcaagaaggtgcttcacaagatcgatggggtgtaccagagcacggttaatgcggcggagggcaaggtgacggtgtccgggctcatggacccggacaccgtcatcaggaagctgcacaaggccgggaagccggcgcagctgtggggcgccaccgccaagcctgccgtggcgacccagctcgagaaactgcagctcaaggatgccgggggcaagggccagggccagccgcccaagaacgcaggcggcaagggtcagccgcccaagaacgccgccggcaagggccagggccagggccagaagcagcagcagcccaagggtggagcgggcggcgccggcgccggcgcgaaagtggtggcgctgccgcactcgcagccgacgccgcagcagctgatgcagatgcagcagcagatgcagatgaacgggatgaagtttgctcatccggagctcatggccatgggcgcaggtcgcatgccgatgccgatgccgttcccggcggcagcgcaggcgcaggcgcaggccgccgcggccaaggaccccaagaccgtcaagttcgacctcccggggggcgaggagttcggggacgacggcagcgacctcgacgacgagttcgacgaactagacgacgtggatttcgaggacgacggcctcgacgacgacgacgacggcgacctgtacgacggccccgggatggtgatgaagcccatgggcatgcccccggccgctgctgccggtggcggcaacggaaacggcggcggcaagaagggtggcggcgggaacgaggtcccggttcagatcaatgggaacgccagcaacggcggcggggcgaagcagaacgggggcggcaaaagcggggccaagaacggcaagggcggcggcggcggcggcggcgtcgttgccccgggcggcgggaaccaggctgggcagggcaagccgaaaggcggcttccccggcggcgccggtctcggcgggccgatgatgggcggcgcgccgccgccgcatgcgggcatgatgatgaggccgccgaacatgatgggcggcgcgggcggtttccccggcatgggccagatgggcggccacccccacatgggtggcggcggcatgccgcaggcaggcgggggcgccgcgcacggcatgccggctggtggcagcatcagcatggccgctggcggaatgcctggggccgggttctttccgcgcggcgttggcggcggcatgccggccggcgcggagatgctgggcatgtcgcagctgcctccgcagcagcagcagcacatggcggcggtgatgcagcagcagcagcagcacatggctgcgatcatgcagcagcagcagcaacagatgatgatgatgaacgggcacggccacggccacggccaccatggccacggcgggtacgggtacgggcgcccggcgatgccgcagtacccgccgccgccggcgtactactacccgatgccgcagcgccacccgcacgacagcatgttcagcgacgagaaccccaacgggtgctcggtgatgtgaggcgaggcgcggcggcggcctgcggggggctccggagaaagtgaaccaggcaaccagccagccagccaaccggaaggagggagctcgggcccgtcaggtcggaggcggccgccgtgagtggaagagtcgtcgtcggtatacatgaagaaaaaaaaaactagctatatgctatagcaccagccgtaacctcgccgccccatttcgttttcgtctttcccctagtttgttttcacctttggtactttttgtttcccttctctgaacaaagaaagagcggcatgcagcttcctcttccttgagtggaaggtaggtatagtggtaacaacaatgatagtggtgatgctagctgatg

SEQ ID NO: 108117 - DNA, 2302 bp, Zea Mays
tttatgttttcttttcgttcaaagaaaccgtactgataggaaacagttgatattttacatggctctaaaagtttataataataaagaatttaccaacccaggtggaattaataataacaggaggacctgtatctaaaattagaaatccttgaaggagaacacaggaagaccacccaccatgtcagagcctatttaaaccgcgctttgggcagccatctttcacacaacacaagagccttctcgctctgatctgagcaggaggaggaagaaagccaaaggccttccttgcgcttccagggcaaagaagatctgaggccgcggcggagcgtgacgacgacgaagtcggtcaggatgagccgcgaggataccctgaaagtgcagaccctcgagctcaaggtgaacatccactgcgacggctgccttaagaaagtcaagaaggtgcttcacaagatcgatggggtgtaccagagcacggttaatgcggcggagggcaaggtgacggtgtccgggctcatggacccggacaccgtcatcaggaagctgcacaaggccgggaagccggcgcagctgtggggcgccaccgccaagcctgccgtggcgacccagctcgagaaactgcagctcaaggatgccgggggcaagggccagggccagccgcccaagaacgcaggcggcaagggtcagccgcccaagaacgccgccggcaagggccagggccagggccagaagcagcagcagcccaagggtggagcgggcggcgccggcgccggcgcgaaagtggtggcgctgccgcactcgcagccgacgccgcagcagctgatgcagatgcagcagcagatgcagatgaacgggatgaagtttgctcatccggagctcatggccatgggcgcaggtcgcatgccgatgccgatgccgttcccggcggcagcgcaggcgcaggcgcaggccgccgcggccaaggaccccaagaccgtcaagttcgacctcccggggggcgaggagttcggggacgacggcagcgacctcgacgacgagttcgacgaactagacgacgtggatttcgaggacgacggcctcgacgacgacgacgacggcgacctgtacgacggccccgggatggtgatgaagcccatgggcatgcccccggccgctgctgccggtggcggcaacggaaacggcggcggcaagaagggtggcggcgggaacgaggtcccggttcagatcaatgggaacgccagcaacggcggcggggcgaagcagaacgggggcggcaaaagcggggccaagaacggcaagggcggcggcggcggcggcggcgtcgttgccccgggcggcgggaaccaggctgggcagggcaagccgaaaggcggcttccccggcggcgccggtctcggcgggccgatgatgggcggcgcgccgccgccgcatgcgggcatgatgatgaggccgccgaacatgatgggcggcgcgggcggtttccccggcatgggccagatgggcggccacccccacatgggtggcggcggcatgccgcaggcaggcgggggcgccgcgcacggcatgccggctggtggcagcatcagcatggccgctggcggaatgcctggggccgggttctttccgcgcggcgttggcggcggcatgccggccggcgcggagatgctgggcatgtcgcagctgcctccgcagcagcagcagcacatggcggcggtgatgcagcagcagcagcagcacatggctgcgatcatgcagcagcagcagcaacagatgatgatgatgaacgggcacggccacggccacggccaccatggccacggcgggtacgggtacgggcgcccggcgatgccgcagtacccgccgccgccggcgtactactacccgatgccgcagcgccacccgcacgacagcatgttcagcgacgagaaccccaacgggtgctcggtgatgtgaggcgaggcgcggcggcggcctgcggggggctccggagaaagtgaaccaggcaaccagccagccagccaaccggaaggagggagctcgggcccgtcaggtcggaggcggccgccgtgagtggaagagtcgtcgtcggtatacatgaagaaaaaaaaaactagctatatgctatagcaccagccgtaacctcgccgccccatttcgttttcgtctttcccctagtttgttttcacctttggtactttttgtttcccttctctgaacaaagaaagagcggcatgcagcttcctcttccttgagtggaaggtaggtatagtggtaacaacaatgatagtggtgatgctagctgatg

SEQ ID NO: 108118 - DNA, 1726 bp, Zea Mays
gtctctcttcctcctcctacctcccagtcccacctttctttctttcttttttctttctttttgggtttctctttctcctggtccggtccgggagacctgctggaccagacggtgccgactcactgcaggcgttcgcttgacagccttcctattacgagacgagctcttggttttccgcagacacggactctaacaagcgagggcctgtcatggcctggcctgctgttaagtctcgtctcctgcgtgactgcgtctctcttctctctctctcgctctttctcccggagtagattttattcctattcattcctcgtgtgagtgaggtccctccgctcctcctctctctctctctctctccctctccgcggagtggagccggagtcgagaggcaggcagacgagacgaggaatgcttccttcttcccatgccgccgccgtccctgttcttctcctccctccctaattccagtgctctcacgtaccagatctgaggccgcggcggagcgtgacgacgacgaagtcggtcaggatgagccgcgaggataccctgaaagtgcaggtgagttcttctgtttgcctgtcattttagtcaatcaggcagggctggccgctgatcccggttcgcgctcaccctgcatgccatgtcttctcctgcggcgtttttctgtctgggcgcacagaccctcgagctcaaggtgaacatccactgcgacggctgccttaagaaagtcaagaaggtgcttcacaagatcgatggggtgtaccagagcacggttaatgcggcggagggcaaggtgacggtgtccgggctcatggacccggacaccgtcatcaggaagctgcacaaggccgggaagccggcgcagctgtggggcgccaccgccaagcctgccgtggcgacccagctcgagaaactgcagctcaaggatgccgggggcaagggccagggccagccgcccaagaacgcaggcggcaagggtcagccgcccaagaacgccgccggcaagggccagggccagggccagaagcagcagcagcccaagggtggagcgggcggcgccggcgccggcgcgaaagtggtggcgctgccgcactcgcagccgacgccgcagcagctgatgcagatgcagcagcagatgcagatgaacgggatgaagtttgctcatccggagctcatggccatgggcgcaggtcgcatgccgatgccgatgccgttcccggcggcagcgcaggcgcaggcgcaggccgccgcggccaaggaccccaagaccgtcaagttcgacctcccggggggcgaggagttcggggacgacggcagcgacctcgacgacgagttcgacgaactagacgacgtggatttcgaggacgacggcctcgacgacgacgacgacggcgacctgtacgacggccccgggatggtgatgaagcccatgggcatgcccccggccgctgctgccggtggcggcaacggaaacggcggcggcaagaagggtggcggcgggaacgaggtcccggttcagatcaatgggaacgccgccggcgtactactacccgatgccgcagcgccacccgcacgacagcatgttcagcgacgagaaccccaacgggtgctcggtgatgtgaggcgaggcgcggcggcggcctgcggggggctccggagaaagtgaaccaggcaaccagccagccagccaaccggaaggagggagctcgggcccgtcaggtcggag

SEQ ID NO: 108119 - DNA, 1862 bp, Zea Mays
gtctctcttcctcctcctacctcccagtcccacctttctttctttcttttttctttctttttgggtttctctttctcctggtccggtccgggagacctgctggaccagacggtgccgactcactgcaggcgttcgcttgacagccttcctattacgagacgagctcttggttttccgcagacacggactctaacaagcgagggcctgtcatggcctggcctgctgttaagtctcgtctcctgcgtgactgcgtctctcttctctctctctcgctctttctcccggagtagattttattcctattcattcctcgtgtgagtgaggtccctccgctcctcctctctctctctctctctccctctccgcggagtggagccggagtcgagaggcaggcagacgagacgaggaatgcttccttcttcccatgccgccgccgtccctgttcttctcctccctccctaattccagtgctctcacgtaccagatctgaggccgcggcggagcgtgacgacgacgaagtcggtcaggatgagccgcgaggataccctgaaagtgcaggtgagttcttctgtttgcctgtcattttagtcaatcaggcagggctggccgctgatcccggttcgcgctcaccctgcatgccatgtcttctcctgcggcgtttttctgtctgggcgcacagaccctcgagctcaaggtgaacatccactgcgacggctgccttaagaaagtcaagaaggtgcttcacaagatcgatggggtgtaccagagcacggttaatgcggcggagggcaaggtgacggtgtccgggctcatggacccggacaccgtcatcaggaagctgcacaaggccgggaagccggcgcagctgtggggcgccaccgccaagcctgccgtggcgacccagctcgagaaactgcagctcaaggatgccgggggcaagggccagggccagccgcccaagaacgcaggcggcaagggtcagccgcccaagaacgccgccggcaagggccagggccagggccagaagcagcagcagcccaagggtggagcgggcggcgccggcgccggcgcgaaagtggtggcgctgccgcactcgcagccgacgccgcagcagctgatgcagatgcagcagcagatgcagatgaacgggatgaagtttgctcatccggagctcatggccatgggcgcaggtcgcatgccgatgccgatgccgttcccggcggcagcgcaggcgcaggcgcaggccgccgcggccaaggaccccaagaccgtcaagttcgacctcccggggggcgaggagttcggggacgacggcagcgacctcgacgacgagttcgacgaactagacgacgtggatttcgaggacgacggcctcgacgacgacgacgacggcgacctgtacgacggccccgggatggtgatgaagcccatgggcatgcccccggccgctgctgccggtggcggcaacggaaacggcggcggcaagaagggtggcggcgggaacgaggtcccggttcagatcaatgggaacgccagcaacggcggcggggcgaagcagaacgggggcggcaaaagcggggccaagaacggcaagggccgccgcatgcgggcatgatgatgaggccgccgaacatgatgggcggcgcgggcggtttccccggcatgggccagatgggcggccacccccacatgggtggcggcggcatgccgcaggcaggcgggggcgccgcgcacggcatgccggctggtggcagcatcagcatggccgctggcggaatgcctggggccgggttctttccgcgcggcgttggcggcggcatgccggccggcgcggagatgctgggcatgtcgcagctgcctcc

SEQ ID NO: 108120 - DNA, 246 bp, Zea Mays
atggagggtggtggccagacgggggccggcgcacgggggtcggcggcgccgaagcagggccggtggtcagaggctgtggccgagggcgatgctggctggtggaacaggccacaggcgacagcgggaatagggacccgatgtcaaggtcgagaggacacgcgtgggggcagggtgcaggacgtcgatgtctccggaggtgcttacgctcggggcgacgactgtcttagggctcggaagcgggcgtga

SEQ ID NO: 108121 - DNA, 126 bp, Zea Mays
atggaatataacccaaaggtagcagtgtcggttccagagacgaagcagccccagaagctccttcgtttctcagatgttgaaaggctatttgaggagctctggatcgtaacacgtgatctaggatag

SEQ ID NO: 108122 - DNA, 83 bp, Zea Mays
cctatttcaaatctaattgaaacagactttatattcaatttaaacacaagtgcaacgatcaaaatatctagcatgcatgcaac

SEQ ID NO: 108123 - DNA, 1831 bp, Zea Mays
cgacctgaatttccatggtaccatttcgatgagtggacaaggccaagatttctggctcgatgtagttttccgatcgagctgggcccaacactaaaacaatctaacgacccaacgacctttgggtccgggcgtgggctgcaattttcaacccatggtcaggtttagatgcgagacaacagaagattacccccgccatttgaacctccaagttcagaaactgaccccctcgtccctccccaccatcgcgatggctgacgacgccgcggcggcggcgttcgcgccctctccctcgccaccgtcacccgtagcgcaacctctgcccgacctctccccgccgccgcccttctccccaccagccggcacccctgcttccggggcgcagacgccgagcctcccggacaccccggcctccctagatccggacacccccttctccgacgccaccccgacccccgccgacgcctccgacgccgccctcgcttcggacgacggcatcaccaacccgtcggggggcaccgccggcaagcacatgacgctcgcgccgcccgccccgcccgccaagaaaccgtccaagaagaagggcggcaacagcgtctggacccgcccggcctcccgcaagggcaagaagaaggcgaggcagccgggcggcctcggccacggctccggcggccccgccggggccgccagaggctccaaccctaggcccaacgccggcggcgaggaggagttcctcctcgtccccgcgacccgcctcgccgccgagcgctccgacgacgcgcccggccagcctgtgctcctctcccgcgtcttcaagtccgagcggatcgagctctcagaggaccgcctcaccgcggccagcaccaagggattccgcatggtgcgcgcgacccgcggcgttgcggcaggggcgtggtacttcgaggtcaaggtcgtgcacctcggccccaccggccacacccgccttggatgggccaccaacaaggctgacctccagacgcccgtcggcttcgacgcctatgggtttgggtaccgtgacgtcgatggcgccaaggtgactaaggcttggagggacaagtatgctgatgaagggtacggggaaggagatgtcctggggttctacatttctctgcctgatggggagcggtatgaaccgaagcagcctgacctgattcagtacaagggaatgccttttcacgtccaagtccccaaggaggagcagaagacgccggatcctgtccctggaagtgagatatgctacttcaagaatggagtatgccaaggcagcgccttcaaggacattcctggagggaggtatttcccagccgcgtcactgtatacgatgcctaacgagccaaactgtgtagtcaagttcaacttcgggccagattttgagttcttcccacaagatttcggaagcctgccagttcctcaaccaatgagcgaggtaactcatcaggcacttgaagtgaagaacgaggggcctaccgagaatggcatcgctgaaaaaactagctagtgtagttagcatgcttttgtataacttatacctatgttaacactaagcaagttatgatgtataagttagccgtagcagttatatctgactggattaatgcttgtgctgttactaaatgggctctatcttctccttgcctgggttaatggtgttattgtagtgctgctgatcgtggataattgttaactggttatgttatgtaagggcaacctgatcaacaattaatcatcgtctggtcgaccactaggtgacaaggtctgaccaagcgctcaagggatatatatattgaaaaaaaatcaagagatgagttttttt

SEQ ID NO: 108124 - DNA, 1026 bp, Zea Mays
aactcgcagatggaaggcttcgatacatcgaactgcaaccgcgcgacgtggggtagaatataatctggtgcgctccccccggcccccgcgaacaacttcctgcttgcacgcaagccactccgaggccaagtctagggtttgggaatctgtaggaggggagaggggagcgcgctcagggtcagggaggcgaagatgatcgaggtggtgctgaacgaccgcctggggaagaaggtgcgggtgaagtgcaacgaggacgacaccatcggcgacctcaagaagctggtggcggcgcagacggggacgcgccccgagaagatccgcatccagaagtggtacaacatctacaaggaccacatcacgctcaaggactacgagatccacgacgggatggggctcgagctctactacaactaggcgccctgaccccaaccgtgccctgatgtaaggttaatccgaattctgaagtcatgggtgcgcttccagtcacagcgtctttagctaacaagctcgcatacatataggcaacttgagtgagctatgtagtacggatatggttgtgtggcaaactgccaatgactattgacatccttgcatatattgacatgtgacaaggatcaacctgcaaaactggtgccctgctactcgcagaccttattatcttaaataacacaggtggtgtgtttttcaattatgtgaaaaccttggccttgtttggataatttatggtgtgattggattggttgtagttgtaggacaaccggggacagcctcttcagcgtctcgtttcgtccgtccaattctgatctactgctagggacgacaccgaggattgttgtatcaataaactacagtttgagtacttatataaatatgaaaaaccgtgatcggaaaaaagaatgtcttgaatggagtctgtagaactccaaaaatactagctttagggaagcgttttgcatccaaacacttcgtggcacactaaaatcaaactatttcataaaattgtattattattttcaaaactaaaaa

SEQ ID NO: 108125 - DNA, 1021 bp, Zea Mays
aactcgcagatggaaggcttcgatacatcgaactgcaaccgcgcgacgtggggtagaatataatctggtgcgctccccccggcccccgcgaacaacttcctgcttgcacgcaagccactccgaggccaagtctagggtttgggaatctgtaggaggggagaggggagcgcgctcagggtcagggaggcgaagatgatcgaggtggtgctgaacgaccgcctggggaagaaggtgcgggtgaagtgcaacgaggacgacaccatcggcgacctcaagaagctggtggcggcgcagacggggacgcgccccgagaagatccgcatccagaagtggtacaacatctacaaggaccacatcacgctcaaggactacgagatccacgacgggatggggctcgagctctactacaactaggcgccctgaccccaaccgtgccctgatgttaatccgaattctgaagtcatgggtgcgcttccagtcacagcgtctttagctaacaagctcgcatacatataggcaacttgagtgagctatgtagtacggatatggttgtgtggcaaactgccaatgactattgacatccttgcatatattgacatgtgacaaggatcaacctgcaaaactggtgccctgctactcgcagaccttattatcttaaataacacaggtggtgtgtttttcaattatgtgaaaaccttggccttgtttggataatttatggtgtgattggattggttgtagttgtaggacaaccggggacagcctcttcagcgtctcgtttcgtccgtccaattctgatctactgctagggacgacaccgaggattgttgtatcaataaactacagtttgagtacttatataaatatgaaaaaccgtgatcggaaaaaagaatgtcttgaatggagtctgtagaactccaaaaatactagctttagggaagcgttttgcatccaaacacttcgtggcacactaaaatcaaactatttcataaaattgtattattattttcaaaactaaaaa

SEQ ID NO: 108126 - DNA, 696 bp, Zea Mays
aactcgcagatggaaggcttcgatacatcgaactgcaaccgcgcgacgtggggtagaatataatctggtgcgctccccccggcccccgcgaacaacttcctgcttgcacgcaagccactccgaggccaagtctagggtttgggaatctgtaggaggggagaggggagcgcgctcagggtcagggaggcgaagatgatcgaggtggtgctgaacgaccgcctggggaagaaggtgcgggtgaagtgcaacgaggacgacaccatcggcgacctcaagaagctggtggcggcgcagacggggacgcgccccgagaagatccgcatccagaagtggtacaacatctacaaggaccacatcacgctcaaggactacgagatccacgacgggatggggctcgagctctactacaactaggcgccctgaccccaaccgtgccctgatgtaaggtaatttcctccaggttaatccgaattctgaagtcatgggtgcgcttccagtcacagcgtctttagctaacaagctcgcatacatataggcaacttgagtgagctatgtagtacggatatggttgtgtggcaaactgccaatgactattgacatccttgcatatattgacatgtgacaaggatcaacctgcaaaactggtgccctgctactcgcagaccttattatcttaaataacacaggtggtgtgtt

SEQ ID NO: 108127 - DNA, 195 bp, Zea Mays
atggcggcatccaacaagaagcccattgctgccaccgcgctcctgttcgtcgccgtggcactcgggttggcggcttctgcgcgggctcaggcactgctggctccggcgcctgcaccatccggccaaaatccctgccctgacggcttccgcaacttacttgcgtttgctatagccgtgaagggaatattcacttaa

SEQ ID NO: 108128 - DNA, 611 bp, Zea Mays
aaggcaggctctttgtttgttgagaagagcagaacacactaccgccggcatcagctagctagagctagccagtagcgatggcatccaacaagaagcccattgctgccaccgcgctcctgttcctagcggtggcactcacgttggcggcttctgtccgggctcaggcactactggctccgacgcctgcgcctgcgccatcccaaaatccctgccccgccggtttcaacaacttacttgcgtttgagatagccaagaaggaatttcttcttaataacggtactatgctgctattgttcccgtctcggggcacccaaagcaccacatcaatggcgccgtctgcggctaagggagtgcgaggtgtagtctgcatctgctttctctctacaaaccgtatattaattggcggccccctcacatgccagcagctggtgtagtctggccttctccgctgaaccccatgctcaacatgtgtccggcccgcacctatttattactcacatactatatatatatatatatatatgtactcatcttctatgatgaataaataagtcacgccgtttattaaatatatatacagatatatgtaatgcgtgatatgtgttggtgtt

SEQ ID NO: 108129 - DNA, 546 bp, Zea Mays
atggtggttgaccaggaaaagaagctttctgaggacaacgtgaaagatttatcaactgaactacaaaaagtcacagatgactacatgaaaaagatcgaatccatccagaagcagaaggaacaggaactgatgaaaatttagacctcaagctgactgtatggctggtgaggaataatcgcctccgtgaagcatggacccctgcatatgttggtgaattcacaatgcagtgatgtgatgttttctgaagcagtttgtttggttcatggttttggcgtctcggtgctacgccagggatgcacgttttgaatcaggcgttttgctggaacttttgggtgcacacaagttgagacaatgctgctgctgtgtgtgtgtgtgtgtgtgttttgagattaagacaacgctgctgtgttttttctttgagattaagacaatgctgttgcgtatgttcttctcgttttctgtaatgttcgtaaatagtctcgtcgtcgtcgtgtgtctgactgctacattgtcaatgtttctaaacatacatctctgaatcaaatg

SEQ ID NO: 108130 - DNA, 117 bp, Zea Mays
ttttctttagttgttagaatctttccctctcaccgagggcccagttgcgccacgcaggaatccaaccatacgtccatacccgcttccatatataaagtcaacttgcaagggtgatta

SEQ ID NO: 108131 - DNA, 181 bp, Zea Mays
gtctttggggactagcggtgggtcgctatagagcaaggatcactatcaaatcttatagcctgaacgtacatgtagatgttagtgactaaaaattaattaaaacaattaaacattgattgctaaattgtagtaaagaaaaaaagaattgtagaaaagaaaaaaagaattatggaaaagaaaa

SEQ ID NO: 108132 - DNA, 592 bp, Zea Mays
atttgtattgaggtttaagttctcacttcaaaagatggtcatttcaggtcaagtgttacatgcaacagctactttctggacttgatcattgtcataaccgtggtgttttgcatcaggatataaagggtgcaaatctcctacttgacaataatggcattcttaaaatagcatattttggtctagctacattctttaatcccaaacaaaaacaacatttgacaagtcgtgtagtaacattgtggtacgagccttctgagcttttgttgggtgctactaactatggtgctgttgttgatctatggagtgtcggttgcattcttgctgagttgctatcagggaagcctatcatgctaggacgaactgaggtggaacagttgcacaacatttttaagctctgtggttcaccatcagaggagttttgggctaatttgaagttatcccgagctaccatattcaagcctcagcatccgtaccaccgatgtgtgaatgatgtatataaggactttcctactactgctataacacttttggaccatctacttgcgtagaacctgggaataggggtaccgctgcatccgcccttgacagtgaa

SEQ ID NO: 108133 - DNA, 553 bp, Zea Mays
ggggccaagaccgtgcgcaagccggtcttcaccaccgtcgaccagctgcacccctagatgcatggccacactcttaccatccgcgtcatctctgcctgcaccatcctcgacaaatcctccatgcacattggtcgtacccgcatcgcccagtgcctcgtcggatacaacaccgacaccgtccttgtcacgcccgcaacaatcaggatacactcacggtgtgctggtgtgtgagtggaggaagagcttgatggaggatgagggagaggaatcagtagagcaaatgagcaagacgagacagatgtgtagctgttggtgtttctccactatcgcgacctcaatgcgcaagcatggcctatatagagtgacgagaacaccatggaattgagttgtgttgttgtggtgcggagtaggagtgtccaagcaaggagagaatcacaggcgatttctctcattgttgttctggcatcgtttctgattctacgtttaaacaaagtgtttgtctcattagggcgtgtttcctcactttttctcgcacaagaatctagtaaaaagg

SEQ ID NO: 108134 - DNA, 598 bp, Zea Mays
ggggccaagaccgtgcgcaagccggtcttcaccaccgtcgaccagctgcacccctagatgcatggccacactcttaccatccgcgtcatctctgcctgcaccatcctcgacaaatcctccatgcacattggtcgtacccgcatcgcccagtgcctcgtcggatacaacaccgacaccgtccttgtcacgcccgcaacaatcagggtatgcaatggttcaaggctccgatcttaattgttgatctctaaatcatcgtattcagttaattttctatttaatatttagcaaatttgtcatagatacactcacggtgtgctggtgtgtgagtggaggaagagcttgatggaggatgagggagaggaatcagtagagcaaatgagcaagacgagacagatgtgtagctgttggtgtttctccactatcgcgacctcaatgcgcaagcatggcctatatagagtgacgagaacaccatggaattgagttgtgttgttgtggtgcggagtaggagtgtccaagcaaggagagaatcacaggcgatttctctcattgttgttctggcatcgtttctgattctacgtttaaacaaagtgtttgtctc

SEQ ID NO: 108135 - DNA, 1445 bp, Zea Mays
gagtcttccgtcggagctgggattgagagaaatccgcgtgtgcgtaaaatggggggggggggcattgttggttgaggggctctgcctggttgtcgtgaacctgcacggagctttggtgggcggagctaggatcgggggaaccctcgattggtcgccgacgtccgattcttgcatctgggtcgcgctgcaccatgggcggttgtctctgcgccataattcgtggtaagaaaatcctcttctagctttgccttgtcccctgcatcaagtagcagcgctcgaattgggttataggcatgtgatttgtggcatgcagtactccggtgtatgggctgggtccgccgtgtgggctgggtcggtatcctggtgggtgatgacccagggtcgtcggatctgaaagggaaatgtgcctttgggccatttctataatgttttggtgattaaatggctaacacatagtaaatgagctgctatgtgacaaacaagcaaaaagtgcaaattatataacaagatatgtttctagacttagtaattggtttttgtatactaatgtatttatctaagtgttagaaacagagtagagaagaaaagaaacgaattgcaaaagacttggctgtgtgcagccgaagtccagctcggcctggcacaccggactgtccggtgcgccaggctggtctccggtgaaaatgccgctctcgggattcgacggcggcgtacgactataattcaccggactgtccgatgagtcatccgtggtgaactcgttgccctcggaaaaagcaaaggggcgacgtggctataattcaccggactgtccgatgagccaacagttgcctgcaccaacggtcggccgcgcaatcttcgcgcgacatgtggactgctccaatggtcagaggagcaacggtcgaatatgccatttttggaaggagatcgcgcaccggactgtccggtgcgccactcgacagaaggcaaggatagccttccttgttggtcttcaaaggctcctagctgccttggggctataaaagggacccctaggcgcatggaggaggaatccaagcattcactaagtattctaaggcatccaaactctactcccgcgcattcgctttgttgtgttagagatttgagctccattcgagtcgcgaactccctgtgttgtcatttgagctcgagtcttcacttgtgtgcgtgggtgtgctgcgtatttgagtcttgcgtgttttgcttctcccaaccttactctgtgcctttattgtgattcttgttgtaagggcgagagactccaagttgtggagattcctcgcaagcgggaaaatactctaaggaaaacaccgtggtattcaagttgatcattggatcacttgaaaggggttgagtgcaaccctcgtccattgggacgccacaacgtggaagtaggaaagtgttacttggccgaaccacgggat

SEQ ID NO: 108136 - DNA, 423 bp, Zea Mays
atggcatccaacaactccattgcttatccttcgctcctgttcctggccatggaactcgctttaactgttccagtgcatggccaatctccgagtgctgctccaacagtcccggcggcaccatcccaaaaccgttgcccccctggcttccctgacctgatctccttgattgaaggcatgaagatgtattttgagcaggccaacagcagcagcgaatgcctgtacctcccctctactagtattcccggcatcaatggtccctacaaatccgttccagcgtcaacgcctggtttccctgaccacccaatctctctcaaaagtgaaggcgctatgaaggtgtgcgctacttacgaccccaatcccggttcatcaacaccgacgacgccggcacaattctgtcttggaatgctatttgacctggcataa

SEQ ID NO: 108137 - DNA, 179 bp, Zea Mays
caatagctctgttgatctagcctctcacgggcactgtgtgggggtatttataggtatccgagtgcccagcgccttgtgttaaggacgcatgtgccctcagacacctagtttatccccagaatattcccataaagcagggttacaagctgtaattacaagaatgcctttacaagctaggc

SEQ ID NO: 108138 - DNA, 1117 bp, Zea Mays
atggatcgactctattgtaacatgatgaggtcagacatcccaacccggtcgccgccgcaggatgatggggtaccctttgagggtgcgggtggtggggaagaagacgaccctgtcctcctcagcctcttcccagctgaagcgcgtcaccagacggtggaggaaaacggagaccaccacgcgggcaagctcgtggcccgggcacaggcgaggccccccgccgaagggagtgaacacgctgcccccctgctgcgcgtcctggcctactactcgtactccctccttcttgctctgctgccatctccaggggtcgaaggcgcgagcgttctcgtagtgctcggggctcaggtgcacggctcggaacgacgcgaagattctgcagccctttgggataacgtaatctgacgaacacgaacgagacggggtatgctgttatagacgaacggacggacggacgaaccaatgtcccagctggtaccaaagcttgaagacgacgatagaaacacctttgaaatggatgtcggcgttcgcccgcctgaacaccccgctgatcaagttagccacgcgcagcgtctcactgatcacctgcaaataataaaaaaaaaagaacgggcgtgctagctcagatgtttgttcttttcgaattcaggagggagatcgcgagatgacgccggtagagcagggaggggatccgaagaaatttgacagggagttagttagttacgcattgtgtaaacggcatcgacttgtaatcgctccattgcagaggctgctcgtccttgcctttcctgtgtctgatgctgtcgtgctcttcctgcaaaaaaaaaaaaatgcagaagaaaccatttgggagagtactggaaaaaataaacaaagattttggatcctgtcccactatgacgctgctactataataagggtgtacagagatatatagggggcatcagcaccctatcgaattgcgggatgtttatagagaatcaaccaggcaaattgccaatcaaatctcccatgattcttagccatagtaccttgagctgcgccagtgcagtgggcgtctcggtgaggaacttgacggcgagcgtcatgagcacggaggtggtctcgtagccagccacca

SEQ ID NO: 108139 - DNA, 402 bp, Zea Mays
atggatcgactctattgtaacatgatgaggtcagacatcccaacccggtcgccgccgcaggatgatggggtaccctttgagggtgcgggtggtggggaagaagacgaccctgtcctcctcagcctcttcccagctgaagcgcgtcaccagacggtggaggaaaacggagaccaccacgcgggcaagctcgtggcccgggcacaggcgaggccccccgccgaagggagtgaacacgctgcccccctgctgcgcgtcctggcctactactcgtactccctccttcttgctctgctgccatctccaggggtcgaaggcgcgagcgttctcgtagtgctcggggctcaggtgcacggctcggaacgacgcgaagattctgcagccctttgggataacgtaatctga

SEQ ID NO: 108140 - DNA, 207 bp, Zea Mays
atggccgctcgcctccccctcctgctccttgctgtaccttggcgcggctgccgccgcctccacgtacgacgaggccactctaccaccgaggccgccccgtcggtgtcggcacccgccgccgaggacgcggcgtcgagtaaagtagaatggtccacaaaaatgtattcaaccttatttgttttattaaataaccaaatgacgttttaa

SEQ ID NO: 108141 - DNA, 2607 bp, Zea Mays
gcctctacgcctgcctctcctgcgccaccgtcttctgcccctcccacgctgccacgcacgcctccgcctccgcggggttagcggcgtttgcgaagcggtcgcggcaggcacggttcgcggcggttgggtgttcgtgccttgcggagcggtcgcggcgggcgcggttcgcggcgggcggttggcgggggcgggggtcgcggcgggatcgggcgggcgattgtggcagggcagtctacaacatagtcttaatagttagtacagatattgagggccaaatgcaaaaacccaccaggagcatccggcagagggtctgcttcttcaaaccactcgcatttccacatcaacatcaacacgaggccctgccgccgccgccgcccgcccgccccctcctaaaccccggcgaccaaccatggccttctccgctaaaccccactgctcctgctccaccaccaccaaaccccccacccccgtcgcccacctctctccacccccgtccctctccgtccgcgccgccgcctgcgccccgcgctccgcctatggcctctctgccgccggcgtgggcggcggcaaggcgtcccccagtaccgttcgcctccgcgctcgggcccagcgcatccgcgcgtcgcagcagcagccgcggcggcgccctgaatacgtgccgaaccgcatcgacgaccccaactacgtgcgcatcttcgacaccacgctccgcgacggggagcagtccccgggcgccaccatgacgagcgccgagaagctcgtcgtcgcgcgccagctggcccgcctcggcgtcgacatcatcgaggcggggttcccggcctcctcccccgacgacctcgacgccgtgcgctccatcgccatcgaggtcggcaacccgcccaccgccggcgctgggaccgcccacgtgcccgtcatctgcggcctgtcgcggtgcaacaggaaggacatcgacgccgcatgggaggccgtcaggcacgctcggaggccccggatccacactttcatcgccaccagcgagatccatatgcagcataagctcaggaagacgcccgagcaggtcgtcgctattgccagggagatggtggcgtacgcgcgcagcctcgggtgccccgatgttgaattcagccctgaggatgccggcaggtcaaatcgagaattcctgtatcatatactggaggaagtcattaaagctggagcaaccactcttaatatcccagacactgtcggatacactcttccttatgaatttgggaaattaattgctgacataaaggcaaacacttctggaattgaaaatgctatcatttccactcattgccagaatgaccttggtcttgcgactgccaacacattagcgggtgctcgctcaggagcaagacagttagaggtgactattaatggtattggtgaaagagctggaaatgcttcattggaagaggttgtcatggcaattaaatgtcgtggggagctcttagatggtctatatacgggaattaattcccagcatattactttgacaagcaaaatggtacaagagcatagtggacttcatgtgcaaccacataaggctattgttggtgccaatgcctttgctcatgaaagtggaattcatcaggatggcatgcttaaatataaaggaacatatgaaataatatcgcctgatgatattggtttaacacgtgcaaatgaatttggtattgttcttgggaaactcagcggaaggcatgcagtgagatctaagctagtggagcttggatatgaaatcagtgacaaggaatttgaagatttctttaaacgctacaaagaggtcgcagagaagaaaaagcgtgtaactgatgaagacatagaagcgttattgtcagatgagatattccagcctaaggttatttggtcccttgctgatgtacaggcaacatgtggaacacttggcttatctacagcaacagtgaaactgatagcaccagatggagaggagagaatagcatgttcagttggaacaggtccagttgatgcagcttacaaggctattgaccaaataatccagatcccaactgttctccgagaatatggtatgacctcagtcaccgaaggcatcgacgcaatcgcaacaacccgggtggttgtcaccggagatgtgaccaacaactccaaacatgccttgactggccgcgctttcaaccgctccttcagcgggagcggggcagcaatggacatcgtcgtctccagtgtcagagcttacctgagtgccctgaacaagatgtgtagctttgctggtgccgcgaaagccagcggcgaggtacctgagagtgcaagcgtccaaagcgcagagtgagcttggcgacgatttggttctcatgtggactgggcggcgtaagagccagagcaactgttaaagagggtgacatttcgtttctgtattaggctgttcaatgttgggggttttgccttgtcagtgtggtgtgactgtactgttctttttttggaggatagcccagcttggaacgtgcaggcaattttggacctaggtagtgtacaatttgtatcttatatgaacaatacttccaataatcgaaagacttaagatgggttgctggagtctgttctcgt

SEQ ID NO: 108142 - DNA, 654 bp, Zea Mays
atgggggagggatcaaaggcgatgctggccaagcccatccagctcgcggaccaggtggcgcagcaggcgggctggcagtgcctcatggcagactgcacggagctacggtcccgcgccatgaagctcgccgagctcctgcggcaggaggcaggcggcatgcggcgcgggtcgagctgtacgagcgccccgccacgcgtcatggccgacacggagcgggcgctccacaaggccgcaggcatggccgcgcgctgcttccagagccactcccgcctccgccgcttcttcacgctcaacccgatgtccgggctcccgctcaccctcgccctgctcgacaccgcgctcgaggacatcgcctggctcatccacgtctcgtccccacaggacgacgacggcgacctgcgggggctccccaacatcgcgcagaacgagcccgtgttcaacatggtttgggacaacatcgcgtgcctccacaccggcggtccagacgcagcacgttctccgcccaaaattcgcctgcaaccccgagcgacgacgatgggggaggggtcgaaggcgatgctggccaagcccatccagctccatgggaaggaattgacaaaggaaccactatgcgatttgctggtcgcatgcagcaacacgacatcctcatattag

SEQ ID NO: 108143 - DNA, 320 bp, Zea Mays
tacctatacatatatatatatatatattactctataagactctattgtagaccatctgtgcaccgcggttctgccactccctgttccgcccaccaccggtcgtatgacaggtgggtcccatgtgtcagtccatcacgcttccgtccgaccgtcatccagatttccgcaatatagccgcctccacgacgagattggcgacgtcctccctgcgcccgcagcccccctccccgttccctccgcccccaggccgccgcacgcacgcccctgcttcactcacgcccagctcctccctcttcacccggctccccacatggtcgtcg

SEQ ID NO: 108144 - DNA, 505 bp, Zea Mays
tagacggatcatttacatgtactaagatgcatggaacaattaatccacatcaaataccatgaaattcttgcattagtatctagctagccacaccaccatcatgcatcctcacatcacaatgcagattaaaaatctaatacaacgaaattgaagatccatcatctttggatggatggatgcatatatgtatgaaaacaaaaggcattgcttgcttgatgaaggaaactaaatacttattatgggaaggcagtggggaagtacaagttggacgggctccctcggccaccaccgctgctccctttcctggcctcgccggccaccgctgccgccatctcctggccctggtacatgagcgtggaattcatggtgaggctcaccaagctgtcgtcggcggcatcgcttcctcctccccctgccccggcgtcgtcgtcgcgcgtggtcaccatcaccgcggactgcacgagctcgaggcagagcctgagcttgttgggctcgatgtgcgtga

SEQ ID NO: 108145 - DNA, 1645 bp, Zea Mays
cacactcatgcccccacctctctcctccccactgcggcttctgaaacagtaactaccgccttccgcatcccagcacgacacaacccccacatgcacgcttcgcgcagccctcgccaaccaaccatcggcctcccctcaccactcttcctcctgcaaccgccgactccgatctagacaccgccgcccgagtgcctagaccccagatcacgctctatccccctccccacttcttcctcccacaaccaccggggcagcacatcctccccgtccacctccattgtcccggtcttccatcccaagaactcctcctcctctcgcctcatgggccgcctcaacccctcctgcgtgtaggtccactccgccgcgaacctcgccaccaagtgccgccacccccctgctcccccggcaccgccaactagccctccaccagcaacgtctgcccgccctacgacgtcatgtacggctccaccatcggtctgctcatcatgacactgtcctgtcccaccgcttcaacgacaacgccgccatgagcggctctctcgtcctcggtggcatcggaggcggcgagggcatgcagtacgtgccattggtgaagagcgcagcgagtgacaagttgtcgtacgacatgtactactacctggtgttgaggggcgtgacagtgggcgggaaggcggtgcggctctcggcgcaggcgttcgcggccaacgcagcagggtccgaaggcgccatcgtggactccggcaccacgttcacatacctagacccgaccgtgttccagcctgtggcggacgcggtggtgacggcggtgggcggtgggtataaacggtccaaagacacagaggtcgggttggggctgcacccttacttcgcgttgccacagggtgccaggtagtaatcaccgactttggaggctctggggctggaaatgagggcgacgacccgaccatcatcctcagtagcttctagcagtagaactaccccgtggagtatgacctggagaaggagaggctgggccctggggttccgccgacagtcatgcatgtcgtgtcggtggcagggatcgaagtggaggctactaattactccagagtccagtccatgtaacactgtagcagcaaaggtaattccaaagctggttgttcgctcttttattagtgcccatgctttgcggattgtactggtaataaaaacctcaccaatcgcctcttcgaggtggtgctacatggttggtctgtatgatgtgctggtatttcagcccatttttgttgaataactatttttatttaccagcagaaaataaattattgcttatatatggctctcacgtctgaactcattcgacaggtcatcaaaggattgaagccaacagagcgttgtttgctcctaaagtttgtggcgagtcaaccaactgataaaccattcaggactgaacacatcaggcgtcttgaattttccttctggttcaaggacaagcttggctttatgcacagtcggttcttcatattattccatagaaaataaattatagtaatgataatggtggtttgcgacagaaggctagatatatgtcaagatgcctcccaaatggttcaatttatgtgtgcaacctacctcctagaactgatgaaactacgttggctgaata

SEQ ID NO: 108146 - DNA, 1379 bp, Zea Mays
atagaaaaatctggtgcgcatttatcctttcagctcgctcggccgtctccctcatcctcttccatggctcgccacgcgccctagcgtctgcgcccggcctgagctcctagcgttgcggctctttcccggcttcttcctcccatgcagctcgcccgtggccatcgctccgccatgcccagcaccttgccctcggcgtcggtcatccttgtcgggcgcatgatcctgctcggccatggatgttgtgttgtcggcccgactttctccatctccctgctcgttcccctggtgcgcagggcatcctcccctctacctcctccagcgctcggatctagccaccgttttctggccgtggcgagcatgtacccatcagctccgacctcgcctgtggtcgagtcacctgcctccactcatccgcgccctcggcaatgttgggcagtctcggacgcctgggtccttggccatgcgcccttctatttcacgctttccccattcggtgcctcggctcgccctcgcgcgtccatctttgggcgcaatctgctctagctcgtggacgccgtgtcctggctctggtcgctggatgccgcacctcgcctgtgctggccgtcatcacgtataggcctggacaccacctctacctacacgagctcaatcggatccccatcgtcgcgaattcgctgtcgatttagcagctgcgccagttggtcgcctcggtgcgaattcgccgtagcatccaggattttggcaggtctccccgctcaccgtcatcccaagcgtcgcatcggacttaccatgtatgtatgatgttcaccaaatgctcgacaaaaagcttgaacgagtcgtactgccatcgtcttcgtcgcgctggcacgtcgatgtcgtcatttgccttcgcactgttgtcggtcggcaacctcgctgtcgtcgcgttcgctccgactctgcctctacgtgctcgccttcgatcaccgctgcaattttagaagtttgagtgaagaagtggaactcgcggggcgcttgcccggaactcgacaggaggcatgaacaagaatcagcaacgtttgcttggaattctaattgaatcggtacgataattaatcacgtgatgcggaagacgacccaagtcgaccccaagataatgcagagattggacatctccgcaagactatgtcgtcagtcggaccaacctgaagatggataatctgaacgaatgccaagacaaaggctggtcgccaagtggacgtcaactaataaacactaatctagtgttattccaggcaagccccggtgcatttaccccttccttgtatttttaaaaagacttttatacacttaagtctagtgaaatgtgcattaagtttataggaattgcttggaaacta

SEQ ID NO: 108147 - DNA, 1718 bp, Zea Mays
cgcagtgtaacaactaacaaagcttcattaatttttttaataaatcttccgaggcgtccagcgtcctcccggcgacgacgcttcccgagctctctccttcccgcgaccctctcctctgccccgctccactagggttttgccgcagacctctcgctcgcttccggttccgcgaggcaaccgtccgaccggtcggaatggtggatgtggaggagaccgggaacaagttgcaatcgcagatgcgcctccacgcggagccggaggacgacgccgccgacctccccctcccggccctcttcgatagggcgtcgcggctccacgccctggcctccagctccgctctcgaccaggatgggatccgcacgggggttgacctgctgcggcgctgcgacgacatggtcagcaagctcggcctcttctcccccaacgagaccaaggaggacgtctccacagcaaacctcaagtacctactggtcccatattaccttgcagaaatgaccgaaaagatagcacaggaggatcggatcccggttcttaagacgtcacaggaccatctgaaggagttcattgctctatgtgaagtactagagcttatcccagaggatgagctagaattgtctaggcagaagcagccagatactatgacaaacagaagagcgcagaaggttgcccggttcaaacgtcaaaaggctgcagaaacgaagctccaagagatcagagagagaaaagaaaggcgtggacgctcattgagagcagctgctttgtctgccccaattgaagctggagaggaagatgacctggagaatgatggggaggaagaaagagaggcttggttagctaccatctcattggctctctgcaaggcatttgatcttctcgacatgctaaagaaggaagaagaaatgcttcaagctgtaaaggaaaggaaggcaaaggatgggaatgcatttgctcgtgaaatgctcgatgaacgaacgaagaaggccgaaacatggcaccataatgctgccaaccgtgtggcatattccaaaccagctgatcctatcacttgtgcaacatttgctcaagatgtcattgaaggtagagcaagcgtttcacaagctcacgagcacaaacaccagcccctgatatttggacctgcaagtattgttggtggtggtctaaccagtgaaagggaaagaatgacagcgcaagtttttcagcctagctacaggatgccaacaatgagcattgaagaagctggtttgcgcgagatgaaaatgatggagaaatggcaagaaaggaccgctgagctgatgaaagaatcaacctccgcgtggcacaaggatggcagcagctcggcccaagaggatgaggacgccgaggaggaaaaagcaagagcgtgggacgactggaaggatgacaaccctcgtggcgcaggcaacaagaagctcacgccctgtggttaatttgtgaaacacgctgtgtattgatactccacatggaacatgatgctcatgtagacggtaggatgtttaattttatcattgttgctgtgttttttctgtagtgatgttgagtgtatcgtagcctgtttgtgcaagtgcgatatgtcctccctaatacgacacgtttttctggagccaaagaaatcgtatgcctgtctgcaattgtcatgctgcttggtgccgtttggcttattaataagggaaaaaattggttgtacctgctgtgtaaagcaa

SEQ ID NO: 108148 - DNA, 1765 bp, Zea Mays
attaatttttttaataaatcttccgaggcgtccagcgtcctcccggcgacgacgcttcccgagctctctccttcccgcgaccctctcctctgccccgctccactagggttttgccgcagacctctcgctcgcttccggttccgcgaggcaaccgtccgaccggtcggaatggtggatgtggaggagaccgggaacaagttgcaatcgcagatgcgcctccacgcggagccggaggacgacgccgccgacctccccctcccggccctcttcgatagggcgtcgcggctccacgccctggcctccagctccgctctcgaccaggtgcctccctcctctctcttctgggaactggggtcgtctcgcccttcttccgctcacccagagattgagatcgggtgagcggtgcttacgcgcttggtttttttttccgccgcgcaggatgggatccgcacgggggttgacctgctgcggcgctgcgacgacatggtcagcaagctcggcctcttctcccccaacgagaccaaggaggacgtctccacagcaaacctcaagtacctactggtcccatattaccttgcagaaatgaccgaaaagatagcacaggaggatcggatcccggttcttaagacgtcacaggaccatctgaaggagttcattgctctatgtgaagtactagagcttatcccagaggatgagctagaattgtctaggcagaagcagccagatactatgacaaacagaagagcgcagaaggttgcccggttcaaacgtcaaaaggctgcagaaacgaagctccaagagatcagagagagaaaagaaaggcgtggacgctcattgagagcagctgctttgtctgccccaattgaagctggagaggaagatgacctggagaatgatggggaggaagaaagagaggcttggttagctaccatctcattggctctctgcaaggcatttgatcttctcgacatgctaaagaaggaagaagaaatgcttcaagctgtaaaggaaaggaaggcaaaggatgggaatgcatttgctcgtgaaatgctcgatgaacgaacgaagaaggccgaaacatggcaccataatgctgccaaccgtgtggcatattccaaaccagctgatcctatcacttgtgcaacatttgctcaagatgtcattgaaggtagagcaagcgtttcacaagctcacgagcacaaacaccagcccctgatatttggacctgcaagtattgttggtggtggtctaaccagtgaaagggaaagaatgacagcgcaagtttttcagcctagctacaggatgccaacaatgagcattgaagaagctggtttgcgcgagatgaaaatgatggagaaatggcaagaaaggaccgctgagctgatgaaagaatcaacctccgcgtggcacaaggatggcagcagctcggcccaagaggatgaggacgccgaggaggaaaaagcaagagcgtgggacgactggaaggatgacaaccctcgtggcgcaggcaacaagaagctcacgccctgtggttaatttgtgaaacacgctgtgtattgatactccacatggaacatgatgctcatgtagacggtaggatgtttaattttatcattgttgctgtgttttttctgtagtgatgttgagtgtatcgtagcctgtttgtgcaagtgcgatatgtcctccctaatacgacacgtttttctggagccaaagaaatcgtatgcctgtctgcaattgtcatgctgcttggtgccgtttggct

SEQ ID NO: 108149 - DNA, 664 bp, Zea Mays
aacggtgaaacgaacaaacccttaaggcttgttcggttagctctcaatccatgtggattgagtgtgattgagtgggtttaaatctcaaataagtcaaatttcttcttaattttttccagttccatccaatccatggataacgggattaaccgaacaaggccttatataaatttcatactctttcaatctgtcccagaaatacattttagtagggtagaccggccccaagtatcgaggcccatacagatacagtgatcttaattttttccagttccatccaatcatggataacgggattaaccgaacaaggtcttatataaatttcatactctttcaatctgtcccagaaatacattttagtagggtagaccggccccaagtatcgaggcccatacagatacagtgatgcagactactgtacttaggtcaaggtgctttgcttgtcccgatcaaaatgtcctgcgtgcctatacaacgctgagagatctggctaaactttgttgccatcatttcactacttcacatccaaatatcattcgcacgccaaacagactggtgcctagcaattcttgtccaaccatggtctacatgaccattgatgttgctggaaacaccctgtccagtagggtataaacacctccaccaagtaaaaatgcaccactga

SEQ ID NO: 108150 - DNA, 1675 bp, Zea Mays
gaacggcctaggcgctagcgataagccccgcccaccgcgcgcgcgccgcggcaccgtaccgggatgggcgccataggcatcgtcgtcagagcgtgcgcgcctctcgctcccgccgccgcggccgcgccggcaccctccggctccagctccagggacgccgctcaggcccagcggtggagcaagcccacgaggaccggccgcgtgctcgtgctcggcggcactggccgtgtcggaggatccacggccaccgcactctccaaactccgccctgacctcggcatcctcgtcggtggcagaaaccgctttgacagggagaaaggcgagtccattgcagccaagcttgggggccaatctgagttcgtccaggtcgacacccgcaacgcaggcatgttggaggaagcgctgcagggtgtggatttggttgtccatactgctggacctttccagagggcggaggagtgcaccgtattgcaggcggcgatatctactaagacaccatacattgatgtctgcgatgacacggactattcttggagagcaaagggcttccatgagcaagcaaaagctgccggtgttccagctattactactgctggcatctatccaggagttagcaatgtgatggctgctgagcttgtacatgctgccagaagtgaaaatggcgaacctgaaagactaagattcttctactatactgcaggtactggtggtgctggtccaacaattctgacaacaagttttctacttcttggggaggatgtgattgcatataacaagggagaagaaatcaaattgaagccctatagtggagctctgaacattgattttggaaagggggtcagaaagaaaaatgtctacttattgaatttgcctgaagtcaagagtgctttcaagatattaggtgtgccaactgttagtgctcgatttggtactgctcctttcttctggaattggggaatgcaggctttcgcaaactttttacctgttgagttcttgagggatagaaataaagttcagaagttggttcagtctgttgatcctttggttcgagccgttgatggtattgcaggagagcatgtctctatgagagtagatttggactgctcaaatggtcggaatactattggattatttactcataaaaaactatctgtatcggtgggatttgcaaccgctgcatttgctttagcagttcttgagggcaacacacaaccaggagtttggtttccggaagagccggagggaatacggatagaagcaaggaagctgcttcttgagcgtgcatctcaagggacaagtaccttcgtgatgaacaagccttcctggatggtagaaactgatccgaaggaagtcggcctaggaatttttgtgtgagaagatcgagttgcttaaattattggggtgcttgaaaagggcagctaaatcttgggagtagtttaccatccgcgagaagttgaatgcggcaaccagcagcatgttgaagtccttgcgctattttgtttttgaaagggttgtatatgaaccatgatgattatgaagaaaaagaatacaggtcagttacacgattttgttcaccacaggtggtaagcttggaacttatctgtcgtttggttcacgaaatgtaatataaatagcaatataataattcacagttgaataccagcggtaacctata

SEQ ID NO: 108151 - DNA, 2235 bp, Zea Mays
gaacggcctaggcgctagcgataagccccgcccaccgcgcgcgcgccgcggcaccgtaccgggatgggcgccataggcatcgtcgtcagagcgtgcgcgcctctcgctcccgccgccgcggccgcgccggcaccctccggctccagctccagggacgccgctcaggcccagcggtggagcaagcccacgaggaccggccgcgtgctcgtgctcggcggcactggccgtgtcggaggatccacggccaccgcactctccaaactccgccctgacctcggcatcctcgtcggtggcagaaaccgctttgacagggagaaaggcgagtccattgcagccaagcttgggggccaatctgagttcgtccaggtcgacacccgcaacgcaggcatgttggaggaagcgctgcagggtgtggatttggttgtccatactgctggacctttccagagggcggaggagtgcaccgtattgcaggcggcgatatctactaagacaccatacattgatgtctgcgatgacacggactattcttggagagcaaagggcttccatgagcaagcaaaagctgccggtgttccagctattactactgctggcatctatccaggagttagcaatgtgatggctgctgagcttgtacatgctgccagaagtgaaaatggcgaacctgaaagactaaggttagagttctctgttgtctagactctagaacaggaaacgaccaaatagccattcagtgtacactaagggttgtatttggttttctgttggcatgtagtagttaaattaccattcctcatgatgtgttttctctcctagctaggctaggagtattcctgcataattgctgttgcatcaacctgtttcttcaatgtttccttgatctatgaagctagtaattagtgttttgtgaacatccatacctattctatatgttgctaaacccctcttttagattcttctactatactgcaggtactggtggtgctggtccaacaattctgacaacaagttttctacttcttggggaggatgtgattgcatataacaagggagaagaaatcaaattgaagccctatagtggagctctgaacattgattttggaaagggggtcagaaagaaaaatgtctacttattgaatttgcctgaagtcaagagtgctttcaagatattaggtgtgccaactgttagtgctcgatttggtactgctcctttcttctggaattggggaatgcaggctttcgcaaactttttacctgttgtatgtatttttcctcagattatgctttatacaaagttaattcgtttcagccccatagttatggttgctattattgatactgtagtaattaattaaatttacagttgcaaacagcaattagcgattctcattctgcatttataacatttaatgtgtagttcctgtgttacagttaaaccaaatggtttgctgtgggctggaatccagaacatatacatgaagagatgataatgttcagttttcagttcgcattaattacctgatccccaacttggccctcttcaggagttcttgagggatagaaataaagttcagaagttggttcagtctgttgatcctttggttcgagccgttgatggtattgcaggagagcatgtctctatgagagtagatttggactgctcaaatggtcggaatactattggattatttactcataaaaaactatctgtatcggtgggatttgcaaccgctgcatttgctttagcagttcttgagggcaacacacaaccaggagtttggtttccggaagagccggagggaatacggatagaagcaaggaagctgcttcttgagcgtgcatctcaagggacaagtaccttcgtgatgaacaagccttcctggatggtagaaactgatccgaaggaagtcggcctaggaatttttgtgtgagaagatcgagttgcttaaattattggggtgcttgaaaagggcagctaaatcttgggagtagtttaccatccgcgagaagttgaatgcggcaaccagcagcatgttgaagtccttgcgctattttgtttttgaaagggttgtatatgaaccatgatgattatgaagaaaaagaatacaggtcagttacacgattttgttcaccacaggtggtaagcttggaacttatctgtcgtttggttcacgaaatgtaatataaatagcaatataataattcacagttgaataccagcggtaacctata

SEQ ID NO: 108152 - DNA, 4246 bp, Zea Mays
tttgaattatgctgcaagatgtagacatgctacttagcagaagttgattctgtaaaatgttgtgctattgtgcaggacactccatgccttgttaaacttctttcagttttggttgaaatatttgggcccacccccttattttttaagacttgtaaggaaaatgatgaaaagttggatatcaagtcttatctggagtttttcaatgatgaattgctcccttggtgtttggatggaaaatatagcacctgtaactcaaagattgatttgttactttccttatttcaagatgaatccttctttgaccaatggtgttccatcatcaaatgtacgacaactgaacaaaagcagtccgttgatgataagacctcaaatattctgggacgatatgaattgcttacactgttacttcagaaaatcagagaaaagattgctggggggaagctaagaaatttgcaggaaaatggttatcttctgcaacatttgcgtcttgatatattagattctactgcagcttctgtcctctgtgatttgcctgcttcagattgccaagttagttttatatgtgctgcacttggtggcgcagatcaagaggaccaaatctgcttcctttctcctgagacagtttgtaaaattctcggatccattttaaagaatttggcattggtactcaaaacatcaacttttgaatgggcaaggttagcacattctttgttgcctgctgaacctgagcacttgatggttccagaagaaaattcctcaataattaacttcgagatggctcggattgcctttaaagttcttcagggtagcttgttttcactttggagacttgaggaaaattctgtatttccttctattctggctgctctttttgtcattgaatgggaatgtagcatgtctttagctcttgatgaagagaagtgtttggaaagtaatatagaagatacggaagttggtgtttctatgtgcagcagttcaaaaggttgtttggaggaggaaatgcatttgaaggttaaccttgcagaaagcatacatgttttttgccaaagcttaagtccatccttttgggataatcttcactcatgcacattgaatagattggcaactattctacctcagtgtgtcaggtatgctgtatttcagacaagagacttgcatgcggaaaggacatcaatcttatgttccgagtgggtggtggacatgttgaagctcacctgtctcgatcacagaaacttggaaagtttttttgatgttttattatctgagggggaacattggccgctctggttgatgccatctttacaaaatggacatttatctgtgaaggtccagctggatccagatattacagatgaaattgaactcaaacacgagcgatttgttgcctttgttgataggcttattctcaaacttggctttagtgaagtggttttaggtattccaggaaatatacagtctgccacatcacaatcaattgatatcacttcacctgtctcttccttgtccagagtatgggtggctggtgaggtcctttgcacttggacatggaaagggggctgtgcattgaaaacattcttacctttgctggttcagtacatgaaagacgagtcatatcttgagatcaacattgtgccattgttgcttgatacactgttaggtggcgcccttatgcatgatagtggtccgtgggtactgtttaatgcttggcatctttctgacaacgagatcgataaaattcaagatcgttttcttcgtgctcttgtggctttgttatttactattaatacaaatgattgtctctggagagaatctgatgcacttgtattttttgagcaactgctgagcaatctttttattggctcatcagttaatagaaaatgcctgaagattctaccctatgttatgacctccatcataaaacagttctcagccttgaacaacggagattcttcgtatgctgatttggtgcggaaaagcatacagagttggcttgatgcaaccatttcttgtctgtcatcaagctcaagggaggtacctgtgcaagatattgaggactggatgcaagtggtgttgtcttgcttcccattgaggataactggaggagcccgggaattggtagctgtggttgagcgagagatcagtgatacagaaagatcactgatgttgactctgtttcagaaataccagattttctatggtagtacagcttcatcattggtcactagtggaactgccgtatcaacgacagttgaattactgggagtgaaactgacagctgttttggttggttattgctggagcaaccttaaggagaatgattggcattttgtgttccgcatggtattcaaatgcattgaatcgtctgttttgcttgtggaagaaatgactgatggcataaatgatgccacaataaaccaggtatcaagtgaagatgccttggagaagcttaaattagtggttggcactacagataagttaacattaagccttgcagaatctgctttggttacaatgtgtcagctcaaccatctttgtaatatccaagaagcagaaaactcccagtgtgtacagcttattaaatcaggggactatgctgagagtaatgacaagatggtagagagtgtcctccgtttgttcttggcctctggtgtttcagaggcaatcacaaaatcttgcagtgaagaggcttcgtctgtcataggttctagtcgccatgcttatttgcacttttgggaacttgtggcatcattcataaaaaatgctccactgcaaagtagaaagtctgcacttgagtccatggaactgtggggactgaccaagggttcagtcagtggactatattcgattcttttctcctcacaaccaatatttcacttacaacttgcagctttctctctacttctctctgagcccttctgtcaactttcactggttaaaaattattcaatgggagaaagttgctcatctgctcagcaatctggcacaagccaaagtgctgagttgatgccagattcagacaagacagtgcatctaagagaggaactttcagacttaatcgagttcccaacatctgaacttctcaaaactgatctgacagctcgagatagggttgatgtattcattgcctggtcattgttgctgtcccacctgcaaacactaccagcatcttccagtatcaagggagatgtgcttcaatacatacaagaaaaggtcagtccgtgcatattggattgcattttccagcatatcccagtaaaggccgctgcaccgaatgggaagaaaaaggataccgagctagcgcctgaagcagaagctgctgccaaagcttcgaagaatgccatagctacttgttctttgcttccgtacttggagtctctttggcccatcgggactttgcagatggcctcacttgcaggctcactgtacgggatgatgattaggctgctgccttcttttgtgcgcacatggtttactaccttgagagaccgttcattgtcatactcaatcgagtccttcaccaaacaatggtgcagccctcctcttcttctagatgagttttctcaggttaaggagtccgtatacggcgatgagaatttctcggttagcgtcaacaggtcggctttcgagatcgttgctacatacaaaaaggaggagacaggaatcgaccttgtcatacgcctcccgagctgttaccctctgcgccacgttgatgtcgaatgcacgagaagtttgggtatcagtgaagtcaagtgcagaaaatggctgctttcgctcacgtcattcgtccgcagccagaatggcgcgatagcagaggcgatccgcacgtggaagagcaatttcgacaaggagtttgagggcgtggaggagtgcccaatctgttacagcattctccacaccagcaaccacaacctgccgcggctggcgtgcaagacgtgcaagcacaagttccacggcgcctgcctctacaagtggttctccacgtccaacaaatcgacttgcccgctgtgccagactccgttctagtcctagctctagacacatgcttgtttgttggcaccacaccgttcgatccttcgatgtaaatggcgtgtgtacgcagcgcagtgttcagcgttttggctgttaaatactctcgaaacaggacgggacctgcagagactgagttcagaggtcttataatctacaattaccgtggattcgctagattatttttaggttaattgaacatgaaaatgtctaaattctt

SEQ ID NO: 108153 - DNA, 5577 bp, Zea Mays
atggggaagcagaagggccgcgcgtccagcagcggcatggcggcgtcgctggtaccgcacgcccatggcgccgtccccaccgtcggtttcggcggctaccatggcgccgtccgtgttgagcccgctgcgccctccgacccagacgccccgattcgccttaccccagatgtggatggtgaagtactccagaacctaaagaggctgggaaggaaagatgcaacaacaaagatcaaggccttatctactctctctatactctttggacaaaaaccttgtgaggaagttgtgcagattgttccacaatgggcatttgagtacaagaggctgctacttgactataacagagaagttcgccgtgctactcatgaggccatgtctagcctcatcacagcagttaggaaaggtatagcaccgcacctgaagtctttaatgggtccttggtggttttctcaatttgatcctgctcctgaggttgctcaagctgcccgacgttcgttcgaggcagcattcccacagtcagatagaagactggatgcattaatgttatgtgtgaaggaaacatttctttacctaaatgagaacttgaagctaacaccacaagctttgtctgacaaggctataccaatggatgaactggaagatatgcatcagagggtaatgtcatcatcactgttagctatggcaactcttatagaaattttactaggagtgaaattgcaaagttgtgatggtgagagtaccaatactgaaaacaaaaatatgtcaaaagttaggtcaactgtactttcttctgctgaagctgcattttgtatgcataaatgttttcttgacgtcctcaagtcaaaaagttctgttatacggtcagctacatactcactgcttacaagttacatcaaacatgttcctcatgtttttgacgaagaaaccatgaagaaactttccccaactctacttggtgcattccatgagaaggatgcgtcatgccactcttctatgtgggatacaattcttgttttctctagaaagtttccagaggcttggtcatattgtaatattcacaaagttgtcctcagtcgggtttggcatttcctacaaaatggatgttatgggtccaaacaagtttcatatcctcttctagttcagtttttggactctatgccacctaaagcagtcatgggacaacaatttgtttttgattttttgcataatctttgggctggaaggaaccagaggcagttatcagctgctgatagtttggctttctgtggtgcctttaaacagagttttttgtggcttctaaaaaatgcatcaagatattctactggagattcttcagatgatgtacccatcaagcttataactgatgtacttgccaaaatagtttggcgtgactaccttttattgtctggagacacaattggtggcggtgttctcttatctcgtaaaacttcagggttagctgcgaacatgcactacccaacatactatcttcaggatttgaagaaatgcatcactgaaatactggatgtgattgcagatacagaaaatcatttacttaatatttcttgtcagtcgctgttaagtgactgtttggacataattcaacaaggagagaagctttccaagtttcagaatcatgtagaacaacttgtgtcgttctttctatctttggatcaaattgttgtatgcaaaggtgaattatggccactggaaaggttagcaaaaccattggttgagcaatctttgccagctattaagttcatggacactccatgccttgttaaacttctttcagttttggttgaaatatttgggcccacccccttattttttaagacttgtaaggaaaatgatgaaaagttggatatcaagtcttatctggagtttttcaatgatgaattgctcccttggtgtttggatggaaaatatagcacctgtaactcaaagattgatttgttactttccttatttcaagatgaatccttctttgaccaatggtgttccatcatcaaatgtacgacaactgaacaaaagcagtccgttgatgataagacctcaaatattctgggacgatatgaattgcttacactgttacttcagaaaatcagagaaaagattgctggggggaagctaagaaatttgcaggaaaatggttatcttctgcaacatttgcgtcttgatatattagattctactgcagcttctgtcctctgtgatttgcctgcttcagattgccaagttagttttatatgtgctgcacttggtggcgcagatcaagaggaccaaatctgcttcctttctcctgagacagtttgtaaaattctcggatccattttaaagaatttggcattggtactcaaaacatcaacttttgaatgggcaaggttagcacattctttgttgcctgctgaacctgagcacttgatggttccagaagaaaattcctcaataattaacttcgagatggctcggattgcctttaaagttcttcagggtagcttgttttcactttggagacttgaggaaaattctgtatttccttctattctggctgctctttttgtcattgaatgggaatgtagcatgtctttagctcttgatgaagagaagtgtttggaaagtaatatagaagatacggaagttggtgtttctatgtgcagcagttcaaaaggttgtttggaggaggaaatgcatttgaaggttaaccttgcagaaagcatacatgttttttgccaaagcttaagtccatccttttgggataatcttcactcatgcacattgaatagattggcaactattctacctcagtgtgtcagaaacttggaaagtttttttgatgttttattatctgagggggaacattggccgctctggttgatgccatctttacaaaatggacatttatctgtgaaggtccagctggatccagatattacagatgaaattgaactcaaacacgagcgatttgttgcctttgttgataggcttattctcaaacttggctttagtgaagtggttttaggtattccaggaaatatacagtctgccacatcacaatcaattgatatcacttcacctgtctcttccttgtccagagtatgggtggctggtgaggtcctttgcacttggacatggaaagggggctgtgcattgaaaacattcttacctttgctggttcagtacatgaaagacgagtcatatcttgagatcaacattgtgccattgttgcttgatacactgttaggtggcgcccttatgcatgatagtggtccgtgggtactgtttaatgcttggcatctttctgacaacgagatcgataaaattcaagatcgttttcttcgtgctcttgtggctttgttatttactattaatacaaatgattgtctctggagagaatctgatgcacttgtattttttgagcaactgctgagcaatctttttattggctcatcagttaatagaaaatgcctgaagattctaccctatgttatgacctccatcataaaacagttctcagccttgaacaacggagattcttcgtatgctgatttggtgcggaaaagcatacagagttggcttgatgcaaccatttcttgtctgtcatcaagctcaagggaggtacctgtgcaagatattgaggactggatgcaagtggtgttgtcttgcttcccattgaggataactggaggagcccgggaattggtagctgtggttgagcgagagatcagtgatacagaaagatcactgatgttgactctgtttcagaaataccagattttctatggtagtacagcttcatcattggtcactagtggaactgccgtatcaacgacagttgaattactgggagtgaaactgacagctgttttggttggttattgctggagcaaccttaaggagaatgattggcattttgtgttccgcatggtattcaaatgcattgaatcgtctgttttgcttgtggaagaaatgactgatggcataaatgatgccacaataaaccaggtatcaagtgaagatgccttggagaagcttaaattagtggttggcactacagataagttaacattaagccttgcagaatctgctttggttacaatgtgtcagctcaaccatctttgtaatatccaagaagcagaaaactcccagtgtgtacagcttattaaatcaggggactatgctgagagtaatgacaagatggtagagagtgtcctccgtttgttcttggcctctggtgtttcagaggcaatcacaaaatcttgcagtgaagaggcttcgtctgtcataggttctagtcgccatgcttatttgcacttttgggaacttgtggcatcattcataaaaaatgctccactgcaaagtagaaagtctgcacttgagtccatggaactgtggggactgaccaagggttcagtcagtggactatattcgattcttttctcctcacaaccaatatttcacttacaacttgcagctttctctctacttctctctgagcccttctgtcaactttcactggttaaaaattattcaatgggagaaagttgctcatctgctcagcaatctggcacaagccaaagtgctgagttgatgccagattcagacaagacagtgcatctaagagaggaactttcagacttaatcgagttcccaacatctgaacttctcaaaactgatctgacagctcgagatagggttgatgtattcattgcctggtcattgttgctgtcccacctgcaaacactaccagcatcttccagtatcaagggagatgtgcttcaatacatacaagaaaagcatatcccagtaaaggccgctgcaccgaatgggaagaaaaaggataccgagctagcgcctgaagcagaagctgctgccaaagcttcgaagaatgccatagctacttgttctttgcttccgtacttggagtctctttggcccatcgggactttgcagatggcctcacttgcaggctcactgtacgggatgatgattaggctgctgccttcttttgtgcgcacatggtttactaccttgagagaccgttcattgtcatactcaatcgagtccttcaccaaacaatggtgcagccctcctcttcttctagatgagttttctcaggttaaggagtccgtatacggcgatgagaatttctcggttagcgtcaacaggtcggctttcgagatcgttgctacatacaaaaaggaggagacaggaatcgaccttgtcatacgcctcccgagctgttaccctctgcgccacgttgatgtcgaatgcacgagaagtttgggtatcagtgaagtcaagtgcagaaaatggctgctttcgctcacgtcattcgtccgcagccagaatggcgcgatagcagaggcgatccgcacgtggaagagcaatttcgacaaggagtttgagggcgtggaggagtgcccaatctgttacagcattctccacaccagcaaccacaacctgccgcggctggcgtgcaagacgtgcaagcacaagttccacggcgcctgcctctacaagtggttctccacgtccaacaaatcgacttgcccgctgtgccagactccgttctag

SEQ ID NO: 108154 - DNA, 2517 bp, Zea Mays
ccagataggacgagacgatggtaacttaagcctactttgctcgctgcggcgatgccacgatggcgccacgctcttccaccttcctctcccgcgtcgccgacgccgcgcgcccgctctctgtctccgctcgtccccgtctctcaccgtcctgtccctctcacaccgccgccgcgcccgccttcagcccgcccgccttccacacgcacctcgcatccgtcgcgtcgcacctcccctccctcctagccgctctctcccgcgcccgcgccgcgcggctcccgctcctcccggtcacccgcgcgcttgccgcctcagcgctcctccgccacggtcgtctacccgatgccctcgcacacttcagtctcctcccggattctgaccccaccgctcctttacccgtaccgctatgcaattcccttctctcagcgctagcgtcgtccactgggtctctcggccacgcgcgcaaggtgttcgatagaatgctggcaggagctgtcgagctgaacaccgttgggttcggggtgtttgttaatgccgcaggtaggaaagatgacggactggctgaggtcctgcgcctggtggatgtggtgggctgtcaagggagacgggttaacaggtcggttgtggtggcaatgcttgtggacggtatgtgtagggagggacgaattgaggatgcttggcgtgctatggatgagatgaggctacgtgggtggaaaccagatttcttggcatataggattgtggccgaggggtttagggtacaggggagggtggaagaggaaggaaggatcttgaagcagaagaggaagcttggtgttgcgcctagaaaggatgagtacagggaatgtgtgcttgtgttggtgtccaacaggctgtttagagaagcgaaggagattgccgaggcggttgtgttgggagatttcccaattgatgatgatgtgctgaacattttggttggttcagtgtctgagattgatgtcgatggtgctgccatgttctgcaagttcatgatggggaaggggaggtttccaagtactgagatgcttgcacacctttgcgagagtctttgcaaaagtgggaagggcgacgaaatgtgggagattttgagggtgcttttggacaaggggtattgtaggaatgcaaggggttaccatttggtggtgtcattcttagggaaggctggaaaggttagggaggcatatgatgtgctcaaggaggtgaaaaaaaagaggctagagcctgacatttcatcatataactcccttatggaagcgctgtgtagaaatgaccttcttaggccagccaagaagttgtgggatgagatgtttaccagtgggtgtagcccaaatctgcagacatacaatatactcataacaaaatttacagaaatgggtgaaagccaagaggtccaacaactctttgaccatatgttccagaaaggtgtggccccagatggtgcaacatacacgtccttcatcaatatgttgtgccaggaaaataaatatgaacgggccctggaggtctttaataaatcttggatgcaggatgctggagtggctagttttgtgctgagtagttttatacttgcactctgcaaacaaggtaatttcaaagcagcattgagtgttatgtgtaatgttccatctaatgttgagaacttgaactcacacatcatcttgctgaagcatctaaccgatgttggggaagtggagatggccattgagcacctagaatggattaggagcaactgcagctctagttttgagaacataatgaatgagttcatggcttctctatccacatcagccagtcttcaacatgtgacaaagttgatacagtatttacactcacggagacttattgatgatgcacattgtaggttgggggaagaatgattgagactattatgtggtccgatcaggcagccacaacattattagggaaacaagatctatattgcagtgtttatgcctatcacaaaatgaccagatcacaaaggtacaggaaagtgtgtaatgtaaccacactattcttacaagaaagagtgcgactagggtgcgactgtgcgaggtgtgtgtggattgcgggcgcggcggcggcttgagaggaacaggacggtgggagacagagagggggtgtgtggtggcggtggcggtgccagcgacgacgcaggagaggaaggtggaggggcgtggtgtcatcgtggcatcgccgcagcgagcaagtaggcgcgaagttagatcagaacgggttcggatcaaattatattgatatgtgcctctctaatggatacatccgatcatttttttaattgagtcagatctttttagctttgggttagatttgattttagatttttaaaaaagttggtctgtgtccgatcgaccaatcgatccgtggtcaaaaatatggtttgtgtctgttcgtagaatttgatcggttggattgaatttttttcaagcgagttaattgaattggacggatatggcgagttaattaaaattgttttaagcgagttaa

SEQ ID NO: 108155 - DNA, 2103 bp, Zea Mays
gattgcaccaacccgttcaattgtacttcagatagcatcttctttgattgtcatcttttgcatactcttgttgacggtgctatcatattcttgaaaaccttccacgctgtccatctgagcattcttctatctctgcatttgtcccttaacagtcacctgctttgaggttccatttggatacccatggctggattcagtttgagattattatatatcttttgttctagctgtttctgttgttttctttccatccatacattatcactttgcttcccccaatattgttggttcctgtgctctttccaaagtttccttggaactttgagctttggaagatgccaaggagaacaggaaatgctgctccaaccaaatcagttgaattggtcaaacaagaccaattggagtttgatgatcctgatgaggtagatgacgaggaagaagttgagtatgaagaaattgaggaggaggttgagtatgaagaggtagaggaggaggaggaggaggatgaggatgaggaggatgaagaaatggaaggtgtgcatgaaattgatgctaatgatgaaagtaaaatggtggatgctgatgggaaggttgagaatgaaaaagagaagcatgctgagcttcttgctcttcctcctcatggagctgaagtttatgttgggggcatatcttctgatgtatcttctgaagatctcaaacaactatttgaatctgttggagaagttgtggaagtgcgaatgcgaggaaagggggataacaggacttatgcttttattaatttcagaactaaagcgatggccttaaaggccatccaaaatttgagcaataaagacctaaagggaaagaagataaaagtttctccctcccaggctaagaacaggctatttattgggaatgtaccccatgactggacacatgatgatttcaaaactgcagtggaagaagttggtcctggagttttaaaagttgaactcatgaaggcgccaggcttagatcgcaataagggttatggctttattgaatactacaaccaggcatgtgcagagtatgctaagcagaagatgtctaccccagaattcaaactagatacgaatgctcctactgtcagctgggcagatcctaagaatgccaatgaagctacatctactgcacaggttaaatctctatatgtcaaaaacctccccaagactgttactcaagagcagctgaaaaagctgtttgagcatgttggagaaattacaaaagttgttgttccacctgcaaaatctgggcatgaaaatcggtacggttttgttcattttaaggagcggtacatggctatgaaggctctgaagaacactgagagatatgaactcgatggtcagctgctggattgttcacttgcgaaacctcctgctgataagaaggatagtactgtatcaacacctactgcaaaaggaggcccgttactcccaagttatgccccacttggatatggactggtgggagcttataatccacgtggaaagggattggcagatgcttataataacccccttggaaatggactggcaggtgcttatggtgtgctttccgctcgtgctgcacagccaatggtgtatgctccaggtgctcctcccggctcaacaatgatcccaatggtcctaccagatggccgtcttgtatacgtaccacaggccgcggggcagcagcctgtgcatgcgacttcacctctgccacagcaaggtggtcgtcgattcggtggtagtggcagcggtggtggcggatccagctcttccggcggaaagcggcagaggggagatgaccatggtagtaacagcaacaacagccgcaggggccggcaccgtccgtattgatgattgcaatgccgctgattagcagttagaagttagaaccgagcagttagcacattcgtcgcagtaccatgctggaaacggtggtttgaattatttatttaccatgctggaaacggtggtttgaattgaataagacaaagtttttgaaaaaaagtcaacgggtgtcgaatattcgtgaactgaggtattaccttagtcaagcttgaagaataaaaactatgctgtgctcttggctggactccacata

SEQ ID NO: 108156 - DNA, 1881 bp, Zea Mays
gtttccttggaactttgagctttggaagatgccaaggagaacaggaaatgctgctccaaccaaatcagttgaattggtcaaacaagaccaattggagtttgatgatcctgatgaggtagatgacgaggaagaagttgagtatgaagaaattgaggaggaggttgagtatgaagaggtagaggaggaggaggaggaggatgaggatgaggaggatgaagaaatggaaggtgtgcatgaaattgatgctaatgatgaaagtaaaatggtggatgctgatgggaaggttgagaatgaaaaagagaagcatgctgagcttcttgctcttcctcctcatggagctgaagtttatgttgggggcatatcttctgatgtatcttctgaagatctcaaacaactatttgaatctgttggagaagttgtggaagtgcgaatgcgaggaaagggggataacaggacttatgcttttattaatttcagaactaaagcgatggccttaaaggccatccaaaatttgagcaataaagacctaaagggaaagaagataaaagtttctccctcccaggctaagaacaggctatttattgggaatgtaccccatgactggacacatgatgatttcaaaactgcagtggaagaagttggtcctggagttttaaaagttgaactcatgaaggcgccaggcttagatcgcaataagggttatggctttattgaatactacaaccaggcatgtgcagagtatgctaagcagaagatgtctaccccagaattcaaactagatacgaatgctcctactgtcagctgggcagatcctaagaatgccaatgaagctacatctactgcacaggttaaatctctatatgtcaaaaacctccccaagactgttactcaagagcagctgaaaaagctgtttgagcatgttggagaaattacaaaagttgttgttccacctgcaaaatctgggcatgaaaatcggtacggttttgttcattttaaggagcggtacatggctatgaaggctctgaagaacactgagagatatgaactcgatggtcagctgctggattgttcacttgcgaaacctcctgctgataagaaggatagtactgtatcaacacctactgcaaaaggaggcccgttactcccaagttatgccccacttggatatggactggtgggagcttataatccacgtggaaagggattggcagatgcttataataacccccttggaaatggactggcaggtgcttatggtgtgctttccgctcgtgctgcacagccaatggtgtatgctccaggtgctcctcccggctcaacaatgatcccaatggtcctaccagatggccgtcttgtatacgtgtaagtagttttgatctattcttctattgattttttttatggtcacaatagtggtgaaatttagatggttatccatgcagagcactgcagtctagtttttgtttcttgtaccttggatccttaagggcagtcaactgctgcattgatgcttccatgccaactcatattttccttggtgtttggcagaccacaggccgcggggcagcagcctgtgcatgcgacttcacctctgccacagcaaggtggtcgtcgattcggtggtagtggcagcggtggtggcggatccagctcttccggcggaaagcggcagaggggagatgaccatggtagtaacagcaacaacagccgcaggggccggcaccgtccgtattgatgattgcaatgccgctgattagcagttagaagttagaaccgagcagttagcacattcgtcgcagtaccatgctggaaacggtggtttgaattatttatttaccatgctggaaacggtggtttgaattgaataagacaaagtttttg

SEQ ID NO: 108157 - DNA, 264 bp, Zea Mays
gcgtgctgcctttcatgctgaagcatagttttgtttgctatcacatttaattttatttaaattattttgggcttgatctaaaatggacaaatatatatatatactaggtacgtgcttgtgcgtttctacggtttccatttattgcatagatagaccttgtgaaataaattttagagaagtcaattcaactttagttgaacatcttgatcttttcaatgatccaaagctgaacactcatagagtacacaacatttatagctttac

SEQ ID NO: 108158 - DNA, 93 bp, Zea Mays
tttttctattgtatttgtcgttgggaactattgttggacaaaatatgcataaatactatattgtatttcagattggctataatattaatgaat

SEQ ID NO: 108159 - DNA, 87 bp, Zea Mays
ggggactcgaacccaggtggcccaacgcaaacaaagcacttggatagattacagagaccactcggacaaaatcgatgtccatgcccc

SEQ ID NO: 108160 - DNA, 1315 bp, Zea Mays
tatcttgggttcctatttctgtagagacttcatcctgtcgtaatacatgcagagtgtgacgtaataatgttctgccaaacagctggggttactttttgcctgacagtgggaaatagtatgattcagtgtctcaaacaccactggccatgtattttacagttgtgttttgctattaacatatttttcaaaacattctatggcgattgcattttttgatcacatggcacataggtagtgaattagtgatcatgaatattttatgttgacggagttatttttctgtacaaattagtgtgcaaaatgccaaaatgcaaagataatttccaagcctggataatttgtagccctcctttgcttatttaatcgactgtagtgtgcaacagaaaagcttttagcagaatccaatgttcttaacttttacagcatttatcaatataccattctgaagtctgaagagcatatacggataatctggagtagagcactagagcccattaagacatcatatgcagtgaacatacactcagcctcttgtttaagcagtacgtatactatttcagttgatgaacaaatattgcaggcttcttgttatttgtaatcagccactgattctggcaggatgcacggcttctgtttctctgtgcggtgcatatctaaaagtgcacgtagtcattttcgtctgtggtttgatttgaaaccaaagcagaggctggcctcaatgttagctctctctttgttttccagctgcatataatatagctgaagtgtaaagaccccttattgttcactcgacatgtcacactgttatcaaaattgtctcagattattggctgacgatttttctttacgttatggaattgcagaaaaggtacgaagacataccagttttggggcagaggccagccgaagaatgatatactttggtcgccatttagctccggtttaaccgtttcattttcgcacaataataagctgtgtaaacttcttactctgctgctgagagctgcttcccattcattttactctgaacatgctgtgagggaatttcgtggtgcatggctgaaatctgttatatagagcatatgcaaatacgtctagaggattcctctctctgcccagttcgacattatccgtgcacgtatcctgccctttcaaaatgacaaaggtttctacggactaatttttagcctttctgttttagtccttaaattattaaatacagtgactaaaagagagattatctctattttagtccttatgtttggcaatttagagactaaggtgtcgtttgattcacatatttgtaatgtgatgg

SEQ ID NO: 108161 - DNA, 701 bp, Zea Mays
ggtgggaactataaaaagaagacgtctccgaatccgtctccgcctttcctgtctcctctcgctcgctctccccgtctcccgcacgcccacccgccgccgccgttcgccatgggcctcctcgactcgctgtaccgcgtggtgatgcgccgcaacgccgtctacgttaccttcgtcgtcgccggtgcctttgcgggcgagcgggttgtagactacggagttcacaagatctgggagatgaacaacctcgggaaaaggtacgaagacataccagttttggggcagaggccagccgaagaatgatatactttggtcgccatttagctccggtttaaccgtttcattttcgcacaataataagctgtgtaaacttcttactctgctgctgagagctgcttcccattcattttactctgaacatgctgtgagggaatttcgtggtgcatggctgaaatctgttatatagagcatatgcaaatacgtctagaggattcctctctctgcccagttcgacattatccgtgcacgtatcctgccctttcaaaatgacaaaggtttctacggactaatttttagcctttctgttttagtccttaaattattaaatacagtgactaaaagagagattatctctattttagtccttatgtttggcaatttagagactaaggtgtcgtttgattcacatatttgtaatgtgatgg

SEQ ID NO: 108162 - DNA, 325 bp, Zea Mays
ggtgggaactataaaaagaagacgtctccgaatccgtctccgcctttcctgtctcctctcgctcgctctccccgtctcccgcacgcccacccgccgccgccgttcgccatgggcctcctcgactcgctgtaccgcgtggtgatgcgccgcaacgccgtctacgttaccttcgtcgtcgccggtgcctttgcgggcgagcgggttgtagactacggagttcacaagatctgggagatgaacaacctcgggatatttattcctgatgtaatatatgcagaacgtgatgtaatagttttctgacaaataactggagttacttattgcc

SEQ ID NO: 108163 - DNA, 861 bp, Zea Mays
gcaactcgctacatcccgcgggtgccgacgccgccgctcgcgttaggccactccgccgttcgcgacctgtcacttcctgtccgtccccctgccgcacgccaccggagctcactcaccgattagtccccacctcagaccctctccgcgcgcgcccagtccggcggccgccctgcccaacgctagggtttaggtggcggctgcagggtcacgccggcgccctccgccctccaccggccgccgacagaaggggtgacgtaggtcacctcgcttttccttggcgagccgtctgtctgttggtgtcggcccgacaaacgccgaggagggagacagcgagatgccgcaccgagcgcgcccgatgacggggctgctggtgttcatgggcgtcaacctcgcgctcttcaacaccatcagccccgtctacgacttcgtctgcttccacccctactgggaacgaaggagagaacgccgccgaagggaacttgaagctctgcgggcgaaaggatctctagagacaactaactaaattctcctaaagtcggcatcggagatgatgtctttgattttatcggcgtcatacaacccttgctccttcaaggcgtgctcaagctcttctttagtaatgtacctgtgagataaacgaattatatatgtgtcctgttatgatatgtgtcgtccagaattcaggtaccagctgtatcattttaacgttcaacttacccgctgttgtccttgtcgaaatactggaatgctgtgtaaaggtgctcttctctatccagtttgttcatatgcactgttgcggtgacgaattcgtcgtagtcaattaacccgttgccgtcagcgtcagcctggaaatgtataaag

SEQ ID NO: 108164 - DNA, 701 bp, Zea Mays
gcaactcgctacatcccgcgggtgccgacgccgccgctcgcgttaggccactccgccgttcgcgacctgtcacttcctgtccgtccccctgccgcacgccaccggagctcactcaccgattagtccccacctcagaccctctccgcgcgcgcccagtccggcggccgccctgcccaacgctagggtttaggtggcggctgcagggtcacgccggcgccctccgccctccaccggccgccgacagaaggggtgacgtaggtcacctcgcttttccttggcgagccgtctgtctgttggtgtcggcccgacaaacgccgaggagggagacagcgagatgccgcaccgagcgcgcccgatgacggggctgctggtgttcatgggcgtcaacctcgcgctcttcaacaccatcagccccgtctacgacttcgtctgcttccacccctactgggaacgaaggagagaacgccgccgaagggaacttgaagctctgcgggcgaaaggatctctagagacaactaactaaattctcctaagtaagaacaagcttcccagttcctctgttctgtatttgtattcattctgccacatgcaagatgtaaactcagaacctcttccccgtcaccatatagaccattctttttaccagtggttgtctcaagtatcaagatgttccttgtacaatctgtggaagtgctcactgc

SEQ ID NO: 108165 - DNA, 231 bp, Zea Mays
atgtcccaggaatgtttggattgttgtattctaacattgtttggttgaacatattcaagttggagcgtcgggtctccaacaattaaactaaaaggaggagtggagcttcatgttaagatgatgcatgcacctttcaagttttggaatgttgtgctcaactgcaacttgtggccgttgaacccattctacttacttttagatttaagttataggatatttaaaaatatttga

SEQ ID NO: 108166 - DNA, 272 bp, Zea Mays
aggacttcttcagtgatcttttgatacatcgctgctgatacaaatagcctacccagactatttttgtgaaggtatgtgcttacctatattgcttcttgaggctgactcatgtgattggtggtgtttggaagatacattaaagtttaatttgacaaatgtcttttgcttagggctcctagcttggtgtttcttgttctgtgatacttgtgcatgcgaagtaggtgaactgctacttaaatggtacatatttagcttatttacttactggtggc

SEQ ID NO: 108167 - DNA, 95 bp, Zea Mays
cctatatacattagttgttataaagcgttgaaatgtaattcaattgatgtatatgttttggaacatggagggagactgggagagccaagctgatg

SEQ ID NO: 108168 - DNA, 104 bp, Zea Mays
acgcgatcgtgttatcggtccattcattgtatgtatagaagtgatgtcctcatcacggttcaagaccacgtgacatcaaaaatctacactagaaaacggaccca

SEQ ID NO: 108169 - DNA, 2981 bp, Zea Mays
aatggaaccagtacctctattccattccaggctgcttcttcctgcgcgattcgacacggactcagaccctcacacgcctcctcaccggctcacgacgtcgccacctcagatccggcgaccgatcccctcctcctcggcgaggcgtagcccgcagagccgagccggacaacacagccacgaccacgaggcgtcgtcgcggagtagtcggagccgtttctgctgcccccctccttcccgccaagtttgtcaagttacgtccgatgctccagacatagtagaaaaccatgggagaagttagtgatgacaattccaacctgtcctttctaaaaagaatcgcaacaagtgacgtaccgctgttgaaagagtatggtgtaaatggagttgtcgtcgctctgcttcttgctgtagttactcccgtcttgctttccatgatgtttggcaagaaaacaaagcagagggcggtgcgagctaatgtgggtggagaggaaggatttgccatgcgaaacagtaggttttcctccttagttgaagtcccatgggaaggcgccaccacgatgtcagctctgttcgagatggccagcaaaaaatactctcgacggaggtgtcttggcacgaggaagctaatcaagagggaatttgtggaatcttctgatggtaggaagtttgagaaactgcaccttggtgaatacgaatgggatacgtacgccgaggcatttaaccgcgcatgtaattttgcttctggacttgtcaagatgggccacgacctagatagtcatgctgctatcttctctgatacaagagctgagtggatcattgctgctcagggatgcttccgacaaaatttgacggttgtaacaatatatgcatctcttggtgaggatgcattggtgcattcactaaacgagacacaggtttcaactctgatatgtgattcgaagcaacttaagaaaatacctgcaatcagctctaaattgcagagtcttaggcatattatctatattgaggatgaacctgtcgaggctgagacactgaaccaagtgaagcatctgacaacattgtctttcactgaagtagaggagttaggcaagacatctagtgttgatgcaaggttaccttcaagctctgatactgcagttatcatgtatacaagcggaagtactggtcttcccaagggtgtaatgatcacacatggcaacatggtggccacaactgcagcagtcatgacaatagtcccaaaacttggcatgaatgatgtttatctggcttaccttccattggctcatgtctttgaactagcaggagagactgtcatgctagcttctggtactgccattggatatggttcaacattgactatgactgatacatcgaacaagattaagaaggggacaaaaggagatgtttctgtactgaatcctactcttataatttcagttcctgcaattttggatcgtatcagagatgcagtgtttaagaaagttggtgagaagggtggcctgacaaaaaagctgtttgattttgcatataagcggaatcttgcatcaattgaggggagttggtttggatcctgggcaccggagaggatgatatgggataccattatttataaaccaatacgggcaatgcttggaggacgtgtaagatttgttctttgtggtggtgcacctttatcaggtgacacacaaagattcatgaatatatgtctaggtgtcccagtgggtcaaggctatggtttgactgaaacctgtgctggagcagctttcactgaatgggatgacacaagtgtgggtcgtgttggtccaccacttccttgctgctatgtgaagcttgtttcatgggaagaaggtggttacaagatttctgattatccgatgccgagaggagaggtcgtggttggcggacacagtataacaaaaggctatttcagcaatgaagcaaagacgaatgaagtatacaaggttgacgagaggggtatacgctggttctacactggtgatattggccagttccatcctgacgggtgccttgagattattgacaggaaaaaagatatagtaaagcttcagcacggagaatatgtgtctcttggcaaggttgaatcggctctagcaacaagtagttatgtggagagcatcatggtctacgccgatccgttccataactactgtgttgccctggttgttccagtacgccaggccctggagaagtgggctcaaaattctgggataaactgtgaaggctttgaagagctttgccaaaatggccaggcggttaaggaggttcagcaatcactatcgaaggccgcgaaagcagcgaggctggagagattcgaggtgccggcgaagatcgagctgctgcctgagccgtggacgccggagtccgggctggtgacggcggcgcttaagctgaagagggagcagataaaggccaaattcaaagacgatctggacaagctctaccactgaagaaaagcggggcttgcacccacgcgttcaggagcttgcgctgccaaaacgctgcctggatgcggaatggaacctactgacctgcacgagaccacgagtggtgtgtgtgtgtgtgtggatgtgtgtcggcgtcggtacagcaggagctgcttcttgtgtgatgaaaaataagccaaagtgttggttggaacgatcttgatttgtatagcttcacttaacttgcatgaaccctagctcgaaatcagttgaatctggatggaccggtcgataagagttgccgctatcggttttgatgcctcacgatggttgaagccgggcagccggcaattgtcggggcgttctctgagatggccatagtcgtcgcaatttgacctgtggatttagatatttgttggatatctaatccaatagataccagagccgggtatggatacatgtttttaccacagttttgatgtttttaccacagttttgatctgtggtcagactttaataaaatggctccctgtgctctga

SEQ ID NO: 108170 - DNA, 102 bp, Zea Mays
tattcgagtcttgttatttagtaactgatttatatttgtatccatatattcaaattctgatatttatctataccactatataatccaccacttcaaataaat

SEQ ID NO: 108171 - DNA, 862 bp, Zea Mays
gtgaatataaacagacaaacagatacaaagacaaattgaaggcagctgttacacaacaaaaccattaggggacaatatcataattctcaatactggaatgatgaaaatcataatagagggactagccaaaatagtcttcataatctctcacattaatttcacattgcaaacaaggtttcaggctaggcattaaagtctaaacattatggtaaagcagcagctagatatagaaccagataagcagatccattgataggaaataaagcgaagaacacccacaacgatctgaaaaatcgagatggagcaggcagccgctcaacggtacgacttctggaacctggcgcgggcaccacgtccgccgaacttcttcggctcgcagcgccgggggtcagcgacgaggagggtgcgatcgtagcgggtaaagatgtccttgatctccttcttggcggcctcgtcgacgtacttctggtagtaggcgacgagccccttggcgacggcctggcggatggcgtagatctgcgacgtcttcccgccgccgcggacgcggatccgcatgtcgatgtccttgaaccgggaccgccccgccagcaggatgggctcgaaggccttgaggcggagcatctccggtcggatcagctcaatcgggacgccgttcaccttgatcaggccgcgccccggcttcgtgtacgcgaccgcgacggcggtcttcttccgcccgaagcactgggccgtgcccggggtagggcggctcagcacggtcatggttggggtcgtgcgggattcgcggcggcggtagggttttggcggctcgggcgttttgtctggtgccgccgcggctgttagaacggtatgcggcccgtgg

SEQ ID NO: 108172 - DNA, 309 bp, Zea Mays
taggataaaaacccatcaggtttcgagtatccattaccatctctaccatcaacccaccaaaggacaccctggatctcaccagcctggccgactcaaatacagcatacaatcaggctgtcacagtactgcatgctacatagagaaagttcaggatcaagacaagggaatatggaaaatgtgtggagagttgcctgggcacgattgctggccttgtcgcttgcaatccaaaggggttgctgaattgatcctaggaattgcctccagtcccaggatgcatcaaatcatagcggaaaatacgtaatatatacg

SEQ ID NO: 108173 - DNA, 1271 bp, Zea Mays
aactcggcttccttctcccacttcttaacgattcctccatctttcttgtgcccacaagcttcctcctccattttttttatctgctttttccccctcggctgttcctactcaggctgggcagcagagctagcagtggtccctggtgcttcaggcgaccggccatggtggagctggagcctagtgtgaagtcggagcatggtggaggagtcggcctggtcctgcctcctggcttcaggttccatcccacagacgaagaggtcatcaccagctacctcctgcacaagttcctgaaccctagcttcgcgccgcacgccatcggggaggtggacctcaacaagtgcgagccatgggatctcccaagcaaggcgaagatgggggagaattccaaggagtggtacttcttctgccacaaggacatgaaataccccacgggcacgcgcgcgaaccgcgccaccaaggagggctactggaaggccacaggcaaggacagggagatcttcaagccagctgcagggcgtgaccgtgaccgcgagctagtggggatgaggaagacgctggtgttctacatgggcagggctccgcgcggcaccaagaccaactgggtgatgcacgagttccgcctcgagggcaagtccaggcacacctgcaacgacctacgcttcaatcccaaggatgaatgggtcgtgtgcaaggtgcaccacaaaggggccgaagaggccagcgccgccaagaagtccgccggcgggggcggcgaggagcactactactccaccgcaacgcccaacgtcagctccgtcgaaggcggcgacgagttcctcgtcgactccctgctggattactccagctacttcaactgcttcgcaaccggtggcttgcctctgcccagcacgacggccaactcagccgcagcacctgcaacgaacgacgacgactcctcctggagcatgcttcgtcacgcgccggcagaccagcaagcaatggtggggagctacagcttgcaccaccaggcaatgaaggcgaaaactgtaggcggcgtcacctccccgagtttctccgctggtttgccgagctcgccggtggcggactacgtgggaaacgatgcttctggctaccatacaaacaactattaattaacgatggatgatgagccgctgccgaaaatatagtgatccaataggtggtgttaggctattcacacttactgtacagttttaaaacaatgtcacatcaaattttgtttatggaaccgtgtacactgagtttcaactaga

SEQ ID NO: 108174 - DNA, 2727 bp, Zea Mays
cttgttcctgtctcggcggcgtcttcttctttactcccggtttccctccctcgtcgccgtccatctgctatctcaggcgctcagccaactgactccactgacccccaactccgctgccgactgccgagcccggactggctgactgggtgcgcgcggcgcggtggtgcatcagcagcccgcgcggcgccaaaacacacaaactgctccctccctccatcctatccccccacgctgggtcgcccgatctgcatgcgcacggcggcttcctcttggcgtttctagatgggctcctcctccgtcctcctcttcccctcgtcctcctccgccgcaccctccgccccccattcctttccccactctcatgccaccgccatcgcctcctcccactccttattgccgccgctgccctgctccaaccccccgcctcctctttcctcgcaagaccacgtcctcatccactacatccaccagctagacgagcaagaagccgccaccatggtccgcaagcgccccgcgcccgacatggacctcccgccgccgcgccgtcacgtcacgggcgacctctccgacgttacggccgcagccgccgccggtggtggtcctggcgcgccgtcctccgctagcgcgcagctacccgcgctgcccacccagctccaccagctgccccccgcgttccagcaccacgcggcggaggtggacgtgcccccgcaaccgcacccgccggcccattcgcaggcgggcggcgaggcgcccgcgtccacgaccgcgtgggtggacggcatcatccgcgacatcatcgggagcagcggcggcggcgctgtctccatcacgcagctcatccacaacgtccgcgagatcatccacccctgcaacccaggcctcgcgtccctcctcgagctccgcctccgttcccttctcgccgccgaccccgccccgctgccgcagcagcagcgcgctctcctgcacggcgctccggccgccgccgcggggctggcgctccctctcccgccaccgcttcctgacaagcgccgccacgagcctgcgccgcggtgccagcagcaacagcaggaggagccgcatccggcgccgcagtcgcccaaggtcccgaccgccgaggagaccgccgcggcctcggccgccgcggccaaggagcggaaggaggtgcagcggcggaagcagcgcgacgaggagggcctccacctgctgacgctgctgctgcagtgcgcggaggccgtgaacgcggacaacctcgacgacgcgcaccagacgctgctggagatcgcggagctggccacgccgttcggcacctcgacgcagcgcgtggccgcctacttcgccgaggccatgtcggcgcgcgtcgtcagctcctgcctaggcctgtacgcgccgctgccgccgggctcccccgccgcggcgcgcctccacggccgcgtggccgccgcgttccaggtgttcaacggcatcagccccttcgtcaagttctcgcacttcaccgccaaccaggccatccaggaggcgttcgagcgggaggagcgcgtgcacatcatcgacctcgacatcatgcagggcctgcagtggccgggcctcttccacatcctcgcctcccgccccggcggcccgcccagggtcaggctcaccggcctgggggcgtccatggaggcgctcgaggcgacggggaagcgcctctccgacttcgccgacacgctcggcctgcccttcgagttctgcgccgtcgacgagaaggtcggcaacgttgacccgcagaagctgggcgtcacgcggcgggaggccgtcgccgtccactggctgcaccactcgctttacgacgtgaccggctccgactccaacacgctccggctcatccaaaggctggcccccaaggtggtgacgatggtggagcaggacctgagccagtcggggtcgttcctggcgcgcttcgtggacgccatccactactactcggcgctgttcgactcgctggacgcgagctacggcgaggacagccccgagcggcacgtggtggagcagcagctgctggcgcgggagatccgcaacgtgctggccgtgggcgggccggcccgcgccggcgccggcggcgccaggttcggcagctggcgcgaagagctcgcgcggtctgggttccgcgccgcctcgctcgccggcggcgccgccgcgcaggcgtcgctgctgctcggcatgttcccctccgacgggtacacgctggtggaggagaagggcgcgctcaggctcgggtggaaggacctctgcctgctcaccgcgtcggcgtggcggcccgtccagacgccgccgtgccgttgagagctgaaatcgttgttggttacccagccagtggtagatcttcttcgtactatactcctgcttgagtttcttgtgccacttcttttgcatctgtagctagctagctggctgctcgatttggtcgtcagttccgagatgggaaaacgaaaacatctcttctcgtcactaatcgctagatccattcacagtgatagttactgatgtaagcctactaattagtttaatggcagatcaaccttgtttagcctaattagttacttggtactactgttctttatttggtggagttccaccatttcatatgtgggcatgagctgaggtcaaggctgtctacaacagctattctattttagctcgtatcatatcttctattttaatttaaacgctgcattctacagtataaaacaa

SEQ ID NO: 108175 - DNA, 1841 bp, Zea Mays
caaattcccttctccctcacgtctctttctctccccaagccgccgcctccctgccgttccgtggagcaccaggccagtgccgttccgatggtcattccaagccagtgccattctcctttggccgtccctgctccagccgtgagctcacccaggccacggcctcgtcgaaccgcacagcccctgcgctccttccccagccgcgcttagccctatcctccctgctcgatctccttcgagccgtaacggctccctggcgtgtccggctccctgcccctctccatggcgtcgcccagctctagctcgccccccctctgatctgtgcgcaggggtttcttccatggcgagctcccctgcaaacttcatctagccgccggccgagtttctttggtggtcgcttacccccagcatcggccagagcttgctgtcattccccaacaaacatgtggttgtaggtgagagatttcagaagtctgttggacgaagaaaagagaagtgaaatttgtgcagcgcccgtcaggtgttaggtttaatagatattgtgtctaccgtgtgagggaatcgtgccagcttcctttgggtttgggactgggagctccatcgctctatggtatgaaccacgtgtgtttgtgacaccaatgtgtaggatccatatactctgtcctagattaattagcagtgtgtgaatgccacagcatactctgtcctagattaattagcagtgtgtgaatgccacagcggcggtgctcgcccgtgtctcagctgccttcaatggcccccttgcccgcgcagtcgtctttggggtccatattgatggtagtccctctttctttgtgtgttcacaagatgggtcggcagttttagtgtctcacacgcagtggccacgggatttttcaagtcacttggtcgtggaagggcttcttattgcagtcatagtgttccagctctccaggaagagctacaaaccaccaaagaagccactcactgaaaaggagattgatgagctatgtgatgagtgggagccagagctgctatgccctccaatcaaggagggggccacaatagatgctccaacattggaaagtgccgttggaccacatacgattgttgattgttgatggtaaagaagttgtgaactttgcatcagcatgaggtctggagtctagacacagcattgcaaactgaggtttaatcatcttagcaactacggtacgtgaccctgagcgcgtgattgttgcgaaacaacgaccacctcggtctacaccttaaaggtttgcgcgacatggcttttcatagtgctcaattggatctatcccctgagcataggagaaaagtatcaatctgtacagtggatccaagtattctataaagcatgtatcctccaatttcccacaagcgagaatggcatgatatgatggatgaaatggctgttgcggtcaattgtctttcaaggatcaattgtctttcaagaaccacacttatgtattggtttgtgtgcagttcaagctctgcaaggtgaggtctgttcagtttggccagaaagtcatcccctacctgaacacctacgacgaccgcaccatccgctaccccgaccctctcatcaaggccaacgacaccatcaagatcgatctggagaccaacaagatcatggacttcatcaagttgtatttgccctttcatagacttcatcaagttatatacttagttaggctcaatgttagcacaaacagttgatgagcaagtttaaatttagagtacacttatgtatgagttattatttgacaatacttatttatgagatattgaatattatttatctatattatattaattatagtgttatt

SEQ ID NO: 108176 - DNA, 1142 bp, Zea Mays
caaattcccttctccctcacgtctctttctctccccaagccgccgcctccctgccgttccgtggagcaccaggccagtgccgttccgatggtcattccaagccagtgccattctcctttggccgtccctgctccagccgtgagctcacccaggccacggcctcgtcgaaccgcacagcccctgcgctccttccccagccgcgcttagccctatcctccctgctcgatctccttcgagccgtaacggctccctggcgtgtccggctccctgcccctctccatggcgtcgcccagctctagctcgccccccctctgatctgtgcgcaggggtttcttccatggcgagctcccctgcaaacttcatctagccgccggccgagtttctttggtggtcgcttacccccagcatcggccagagcttgctgtcattccccaacaaacatgtggttgtaggtgagagatttcagaagtctgttggacgaagaaaagagaagtgaaatttgtgcagcgcccgtcaggtgttaggtttaatagatattgtgtctaccgtgtgagggaatcgtgccagcttcctttgggtttgggactgggagctccatcgctctatgatgggtcggcagttttagtgtctcacacgcagtggccacgggatttttcaagtcacttggtcgtggaagggcttcttattgcagtcatagtgttccagctctccaggaagagctacaaaccaccaaagaagccactcactgaaaaggagattgatgagctatgtgatgagtgggagccattgtggttgttgttgcatgagtaatcctacatatcatttcatatatggattaaccggatggtctcactcttgaaactgtgggagtgttggtgcaattcttatactagtttcacttaacttaatagtgccatgtgtggggacctattaatcttgaacatttactcgctagattatatgacatttaaaccatgtactcgtgattaaccagcaagggacaccttgaaccacatagaatatcatttacccttgctacccaaatgcttacatggctacatgcttcttggattgtattctctcttctctgatatcagtatgatcatcaaagcacctaaaatgtgctgctgtatgtatatagc

SEQ ID NO: 108177 - DNA, 2751 bp, Zea Mays
tccaagaataacagctcctcgtctcctcgctcccatggatcactcggcaccccacacgtgtttctccaccatctatccccggcgcggcgcgtacgtccaccagtgaccgaccgtcacatcagccatcatcgccggcggcgacgaaggagctaacaatcgatctaccggcccacgagcgaaccgaacggcggaggatcgatggcggcgacgacggtaaccgacccgctggcggagctgtggaaccacacgatgtcgacgggccggtcggacctctactgcttcgacccgaggaagatcaccatgaaaggcatctggacgggggacaacccgctggacttcgccctcccgctcctcctcttccagatcatcctcatcaccgccaccacacgcgccgtggcgctgctgctggcgccgctccgcctcccgcgatacatcgccgagatcctggcgggcttcctcttgggtccctccgtgctgggccgcgtcccactcttctccgacatcgccttcccagtccgcagcatcttcatcctcgagtccatgtccctcatcggcctcgtctactacaccttcactatcggcgtcgagatcgagctccacaccgtcctccgctcgggattgcgcagcttctggttcgccgccgcctccgcgctcccgcccttcgtcgtcggcatcgtcacaggctacgtcgcgctcaccggcagcgacgacgacagcggcggaacaacgacgacggccgccaaggccgagcagaagttcctcaaccgcctctccttccccgtcttccttggcgccactttctgctccaccgccttctccgtgcttgcgcgcaacatcgcggagctcaagctcgccggcaccgacgtgggccagctctccatctcggcgtccctcatcaacgacaccttcgcgtgggccgggctcaccgtcgccacggcgctggcgcacgtccgctacggcatggtcccgtgcatctggacgttcgtgtcgggcgtcgtcatcgtcagcatcagctaccttgtcgtccgccccatgctcgtccgcctagcgcaccgcgtcgccgagggcgaggtcgtcagcgaggcgcaagagtgctgggtcctcgtcggcgtcctggtagccgcgctcgtcgccgacgccggaggcacgcacgccatattcggcgccttcgttttcggcctcgccgtgcccaacgggcctgtcggcgtcgccatcgtagagaaggtagaggacttcgtgatgggaacgctgctgccgctcttcttcgccatgagcgggctccgcacggacaccgcctcgatcaccagcatgcccgctgcggtgctgctgatggtggccgcgctggccgctgccgccctcaaggttgccgccgcagtaggcgtcgccgccgtgttcggcatgccgctgcttgacggcacgtcgatcggcctgctgctcaacaccaaggggatcatcgagctcatcatcctcaacatcggcaggaacaagaagatcatgagtgaccagtcgttcacggtgctggtgttcatgtcggcgctgatcacggcgctggtgacgccgctgctggccctggtggtgaagccggcgcggcggctggtgttctacaagcggcgcaccatcgcgtggccgcagttggaagcggaattccacgtgctggtgtgcgtgcacatgccgcgcgacgtgccggccctcctgacgcttctggacgtggcgtcgccctccgaccggtcacccgtggcggtgcaagcgctgcacctgattgagttcgcggggcggtcgtctgcgctgctcctgatcaacgcgtcggcgccgtcgtcgtcgttcgagcactcggtgcaccggcgcagccaggtggagctgcagttcaagcacatcgcgcacgccttcatggcctacgaggagaacgtggcgggcgtgttggcgcgcaccatggcggccgtgtcgccgtacgcgacgatgcacgacgacgtgacgtccgccgcggaggagcagcactcggcgctcatcctgctgccgttccacaagcaccggtcggtggacggagggctggaggtgttccacccggagatccaggcactgaaccagagcatccagcgcttctctccctgcaccgtgggcatcctcgtcgaccgcggcctgggcggcgtgccgggcgccgggtgccgcgtggcggcgctattcttcggcgggcgcgacgaccgcgaggtggcagcgctggcgatccgtatggtgtccaacccggccatcgacctcacgctgctccggttcgcccagaagggcggcagtttcacgggcaccgagttcgatgcgctcaaggagcgcaaggccgacgacgggatcctgcgggagttcctggaccgggccaacagcgtcagcggcggcggcggcgcgggcgtggagtaccgcgagcgcggcgtgttcaacgccagcgagatggtggcgcagatcagggaggtggaggcgctggggaaggacctcttcgtggtgggcaaggtgccgggactgccggcgctcacggcggggatggcggagtggagtgagtgcccggagctggggcctatcggggacctgctctcgtcgaaggacttccagacgacagcgtcggttctggtggtacagtcgtacgtgaggccgtctgccggggggatgtcggcggagcagggacttggcggcggcgatggcgtgtctgcggcgggacgaccgccacggccagatcagatccgtaggagtagccttgggcataggagctag

SEQ ID NO: 108178 - DNA, 399 bp, Zea Mays
atgacgatggtctccctcgccggcttcaccgctctatctgccggcctcctgctcatctcctcgttcctgcgagctcaaggagccagcggcggcgagtcgtacgtgccggtgcggagggtggtgtaccggtccatgtcgccggcggcgggggcggcgatgaccacggcagaggcggcggcggcggcgccaccgtaccagccgttcgaggtgtgcgaggggtgccggtgctgcgcgtcgtcgtcgtccaataatggcagcagcagcagctgtgtggacacgagctgctgctacgccatcgactgcgacctccccggcaagcccttcggcacctgcgccttcaccccgcagacctgcggctgcggcgccgccagcaacaactgcagccagccggcaccctga

SEQ ID NO: 108179 - DNA, 159 bp, Zea Mays
tatttttttgggccatattatttgccttgtttttgtttctatcaagactgctatttagaaattggaaaaatctgcacattgaaaaatctaatggattagacacgttggtttgtttctatttaataattcaaatactcacacgcataataaataaattgg

SEQ ID NO: 108180 - DNA, 246 bp, Zea Mays
atgcagagcatccagcaactctaacttcccaaagcagccgacagacgaaccaaacgaaaagcagacagacagcccaaagcgaaaggtctcaacaggtcatcgttgccgggcacaaggcacagagcagctccgacttccaatcttggccctccgccctgcctccggttttgcccgaccttcaaaacattctggaccacgaataagggaggttcgcctcatgttattgttgtcgagccacatcccctg

SEQ ID NO: 108181 - DNA, 461 bp, Zea Mays
tgctcgcccaccctccgctcccctcaaccggtcgagttcctctgctgtgagctcagaccgcgcccagccccaactcccagtcgagcccctttcccctgatctccatagcacgcgcgccctggagctctatgtgccgcgcgccctagggctcccatgcgccgccgtcctggtccaagttccctgcgcgcgtccagccatggcgccccatgcttctctcttcctctgctcatcctcaagctgcgccctgttgaggtccttccatggccggcgctcggccctgctcctgcttcagctcgcccctgcgcgcgcgttccgttcttccctatgtgcacatttttctaagcccagctgcctcttgcttctccctccctctgcccgttgccatggccgccgtgccgagcttcatccttccgtgctcgcgccctgctcatccatggcggcttccccctgctggcagccgc

SEQ ID NO: 108182 - DNA, 2294 bp, Zea Mays
ctattaaatccctcatcgtcgtcccctgccagctgccctgccttctctctcctgtgcaatcttctctctcggtatccctacccttcttcaatccccaaccaaacccctcctctccgctctcactctcgcccgcgtcgcaatcattctcgtgggggcggggggcgctttaatccctccccggatttctgtggcgtctgctccctccacccggattccgccaggattgagttaatcgcatcgcatcctctctcttcctccccccgattgttccatctgggtcgcgttgcttctttcttcccgatttgccgccgccatccacgtcttgcaggagtaggactccgccctgtccgtcctatccacctgtcctcgcttccgtccacgccatcgccgcgctctctctccctgctgctgctttcttgggccggtccggggcttcgtccctgccgggcgtaaatgcgcgtccgtgcagcggatcccagccttcgccgctccaagtcctgtcctcgtctgattccaactaggagcaggaggaggagaatcttctgcgcatgctaatcctagcagcggtggccagagatgacgaaatcgttctgacttcacctgcgctggcggctgctcagctccgagccccgagtactgagcccctccactgctatggacatcttcttgatccgcgcctgtctcctccggctgctgctggtgctcttcgccgccgccgccacctctccggcggcggcgcagtcgcagccgccgtcgcccgccaggatactcgacgcggcgctgcaggactacgcgtaccgggccttcgcgcgcccccgcaccggcattgtctacaacgccacgctcccgggcaacctcaccggcattgccgtctccgcggtccgcctgcgcagcggcagcctccgccggaagggcttcccgggctacttccagttcggcgtccccacgggcgtcgtcgtgcagccgtacgtcgagcgggtggtgctcgtgttccacgacctcggcaactggtccgaccactattacccgctccccgggtacacctacctggcgccggtgctcggcctgctggtctacgacgccgccaatctttccgccgcggggctgcaggagctcaacgtcatcgcgtcgggcggcccaatttcggtgcgcttcggcggtaatgtcagggcggttccggcaggcagtgcagcgccaaggtgcgtggtgttcgatttggatggcgtgccgcagttccgggacctggaggcaaccgatatgtgctcgacgtatcgccaagggcatgtctcgatagtggtgaactccagtgggattgctcctgctccacctccacctggcgcgatagccccgtcgattccgaccactggaggaaataccaagggaagctcaaaggcgtggaagattgccgtcagtgtggttggtgctgccgtagcactgggtctcatggctgcgcttctgctgtgtttggtgaggcataaaagggataagaagcttcaggtgatggaacggaatgcggaggttggagagacattgcggatggcgcatgttgggcggacacaagcaccggtggcgttggggacacggacacagccggtgattgagaacgattacaccgcatagtggagttttggggtcttctgcatgattctactaacatgaagacatcaccatggtgatggctggagatgagattgtccattggttgcttgacgcggacagttttccatatcagcagagggcaactgcagctgctaattttcaggtccaaggttcagctccatgagggttcagcacattattttggtgggtttgttgtgatgctcaagttttctactgcaagacaatggctattgtttgttcatgttcatatgtgaggagttccttttcatttccaagcaagcaggcagtgttgtggaaatcttattcctatcagacttggagtcctcagttattcttttgggggtatctgtattcaatagaaaaacaggcttggcaatggagctgaggtaacattcattgcacattgcgatcacgcagcatgagtcaggcggattcatgctgtgctggagaaattcattcatccagcttcaataattcgattccatttcttttttttcttcttcttcttggtttcatgtttagacaactgctaagatgatgtagtgctgcacatgtttactgcttatctgttgttgtggtagttagtctgattgtgatcatctagatttctggacatttattttacatccgttgtgattgttctcttggaaacaacttatgttctaattgcatca

SEQ ID NO: 108183 - DNA, 110 bp, Zea Mays
cttatttctatttctttgtattttgaaactttcaaattcaaatttgactccggtttcatatttaatattcagaatctaaaaccaacatatgatgtagtattcatttactt

SEQ ID NO: 108184 - DNA, 443 bp, Zea Mays
ggtggacttccggatcgtacttagggatttgcccaaacttccggtgaaggcacctgatctttgctttgggaaagaagggatgtagcagcacggcccaccacacttttaaataaaggaaccactccttaataatgatgttaaacagggagggtcaagtctaggggattattacattttaatctttcatggtagttgaactgtttagtttggtgggctgagttgtctatcttttgtctggtcatgaatgttcatttctacctttgcatttcgattatactatgtcaattatctttcttttatatcctgtataaactctatgcttcccttgttatgctactttcaaggggggtgctgccagattttacaatactttctttctctatgtgttgcataagttttgtagaaaggtttattttggtaacatccattgtgtgggattagtg

SEQ ID NO: 108185 - DNA, 869 bp, Zea Mays
ggattgtccacgaaaatgcagctcccctgcctcatgcccatcaaatcgttaaacttgttagatcggtaggcagagagaggccagactgatgggaatggcagcgaaggagcactttgtgcttgttcatggtgaagggcatggagcctggtgctggttcaagctccgctggctccttgagggtgctggctaccatgttacatgcattgacctagccggaggcggcgtcgatcctactgaccccaacacaatccggtcgttccagcagtacgacaagccactcatagacctcatttcaaccttgccggagggggagaaggtgattctaatcggacatggtgctggagggctgagtgtgattcatgcaatgcacgaatttgttgacagaatcagccaagcattttttgtggcagctacaatgctaccatttggatttcaagctgatgaagataagaaagatgggttaccaactttgcctgagaacgagattgagttgacacttggtgcgggagcagatgatcctccaacaaccatttccttgaggccagaattccagcgtgatcgactatcacaacaaagccctgaagagctatcagtacagcaagcttcgaaggagatgatgaaagattgaaccgaatcaaacgaattttcataaagatgcagcgtgaccacatgctggatcctcaacagcaagattccatgatcaagaagtggccacccagcgaggttttggccatagatacagatcacagtcccttcttctctgcaccagaacagctgtttaatttaatagtcaaatctctatgatgcataaatgcagaaagctacagactggggttgcccggattcttgtaacactacccacaaacaat

SEQ ID NO: 108186 - DNA, 285 bp, Zea Mays
ctgaaatgaaaatgaactatatatgttagtgtcaatacaatgtttacagctcccatttctgagtcgtaattcaacatgcaggagtagtgaaagatttgaaacttaccagtataccgacaatatgatcaattttgaccaagagactaccaacattgtggtattaataattgtcactatactagatatgaacaaatttacaacaataatatgcaatatccatacaccataacaaaagaatatgacaaaactaaattgctgcaaatatttccaacttctctgagaaac

SEQ ID NO: 108187 - DNA, 2063 bp, Zea Mays
ctcccctcaacctagcaccgccacttgcgcccaccacgccgccgcaccgccgctggtgaacgaatccgtccatcccgtacaccagccatgtcctgacacactgacacacacctggtggaggaggaggcgctacctccgtccgccggcggtgcaggggaggagccggccatcctcagggcggcgttgggctccggcaagctgcgcatcgaggggtcgctgagcttcaagcgggcgcagaccgcactgcaggtggagaccgagatctccatccggaccgctgccatgcccgcgccgggaccgggacccctacccaggggaacccccgagaggaacacacaacaacgtctcaccagtcagccaccaccgtgctccatttcctttctctctctcggctcctccgctctcttgcccgagtcgctagcttccctgccccgcctcctcccatccccgtggacagacaaccccccacctccgcttccatagcatccgagctaaggtcaactcctccatcggcggagcgagagcggggaagagacgggagggtcccgaatccgagccgagctgcgctccccgcgcgaccgacactcaggtcttgtcgtcccatgcagatctgctcttcctcctgaggccatccatgaatccgtggcacacaggaagttaagattaatctagacatgataatctacaggcttatgagggcttacataagttcatcttctctacggaaatctgcattgagggctcttgcaaaggcactgacgacagatcaactcttcaacctaagagagcagtttacattattcggtccaaacaagagtggccatatatcattgcaaaatatgaagacggccttgatgaaaaattcctcgggtgcaatgaatgattctaggattcttgactttgttaactcaatatgcaatatccaatatggcatgattgattttgaagagttctctgctacggccattagtgtatatcaaatggaaggcctggagacctgggaagaacatgctcaacaagcatatgaattgtttgacaaggagggcaaccgaccaattgtgattgaagaacttgcatcggaacttggacttggcccttcgatctcatttcatgttgttctcaaagattggatcagacattcagatggacacccaggaagttgagttgccccttgaccaggaggaatccacctaccgtctggacgaaaaacgatcccatccatggggcagcgccaggtgtaccgaatctttggcacagcgatcagggatctatttcgcaaatgaacggaaagatagcacaattctttttctttttgtgctagtgccagtattgtggaacgaatttataaggtttgtgggttgggctgctaacatttatgttcgaatttggacgcctctctctctctcaggttggaaaggggttgctgaaggacgagaatgctcagaagcttgcgttgcagcactggctggaagcgattgacccgcggcaccggtacggccacaaccttcactgctactacgactgctggctccactccgaaagcaagcaacctttcttctactggccgcacttgaagaaatcttatatcagtttgaggaaaaactccaagctgaaagagaggaagctgctaggaagcaggaagagttgcaagcacaactacaagctcaacaggccgcacttgaagaaaaccaaagtttgctgcgccaggcccaagaggaagtgaaggggatgcataccaagtttgaagagaccaatgcactgctacgagctgtcctgaaacttcagaaagattgaggtagggatgcataccaagtctggggatgatgcctttgcttaaggtttttctaccttgctagaacatatctgtggttagaactttgtcagaactacgtgcaatctgtttgaatgcttcaaacctttgtggtggaacctttgtatgtttgaacctctgttgtggaagaactagtgtgctggaattgtgtatgacttgtgatgagaatgttgtgtatgatggcttttctgtgtattatgattctgtgagctgtcatgagagctcagtgtgt

SEQ ID NO: 108188 - DNA, 2057 bp, Zea Mays
tgtcctgacacactgacacacacctggtggaggaggaggcgctacctccgtccgccggcggtgcaggggaggagccggccatcctcagggcggcgttgggctccggcaagctgcgcatcgaggggtcgctgagcttcaagcgggcgcagaccgcactgcaggtggagaccgagatctccatccggaccgctgccatgcccgcgccgggaccgggacccctacccaggggaacccccgagaggaacacacaacaacgtctcaccagtcagccaccaccgtgctccatttcctttctctctctcggctcctccgctctcttgcccgagtcgctagcttccctgccccgcctcctcccatccccgtggacagacaaccccccacctccgcttccatagcatccgagctaaggtcaactcctccatcggcggagcgagagcggggaagagacgggagggtcccgaatccgagccgagctgcgctccccgcgcgaccgacactcaggtcttgtcgtcccatgcagatctgctcttcctcctgagataaagtgaccctgaccccttctttcttatacattggaaattacaggccatccatgaatccgtggcacacaggaagttaagattaatctagacatgataatctacaggcttatgagggcttacataagttcatcttctctacggaaatctgcattgagggtaatacttttgtaggttgcttgtactgttttgcaagaatcatcatctttcgtttctgttggatcttggatgatcaataactgaagcctccatttttaagtgtattttattgataatgttttatctgcatcacctagcaaatggttgctttgttttttgatttatgtgatcctcttatgctttttcctcttataaatatatgtagtatgtactgctctgtaaataaaaacactgaatgcctgtggtctgtccgtctgtgcacaatccatgctttctattcagcttaatgcaaatctggtatactctgtgcagatctgttataacaagtgttattcagtatgttccttgcttgcctttcaccttaaaaattagaataaatgatcgtcatatggttgttctatttttccattctactgatccttatttcctgggactgcatttttgttgggatgacattgtttcttgctattattgtgaacaaaggacacttcaagaaactgttatacatgacctgctaattagctatttaagtttttcaggctcttgcaaaggcactgacgacagatcaactcttcaacctaagagagcagtttacattattcggtccaaacaagagtggccatatatcattgcaaaatatgaagacggccttgatgaaaaattcctcgggtgcaatgaatgattctaggattcttgactttgttaactcaatatgcaatatccaatatggcatgattgattttgaagagttctctgctacggccattagtgtatatcaaatggaaggcctggagacctgggaagaacatgctcaacaagcatatgaattgtttgacaaggagggcaaccgaccaattgtgattgaagaacttgcatcggaacttggacttggcccttcgatctcatttcatgttgttctcaaagattggatcagacattcagatggacacccaggaagttgagttgccccttgaccaggaggaatccacctaccgtctggacgaaaaacgatcccatccatggggcagcgccagtgccagtattgtggaacgaatttataaggttggaaaggggttgctgaaggacgagaatgctcagaagcttgcgttgcagcactggctggaagcggccgcacttgaagaaatcttatatcagtttgaggaaaaactccaagctgaaagagaggaagctgctaggaagcaggaagagttgcaagcacaactacaagctcaacaggccgcacttgaagaaaaccaaagtttgctgcgccaggcccaagaggaagtgaaggggatgcataccaagtttgaagagaccaatgcactgctacgagctgtcctgaaacttcagaaagattga

SEQ ID NO: 108189 - DNA, 1606 bp, Zea Mays
ctcccctcaacctagcaccgccacttgcgcccaccacgccgccgcaccgccgctggtgaacgaatccgtccatcccgtacaccagccatgtcctgacacactgacacacacctggtggaggaggaggcgctacctccgtccgccggcggtgcaggggaggagccggccatcctcagggcggcgttgggctccggcaagctgcgcatcgaggggtcgctgagcttcaagcgggcgcagaccgcactgcaggtggagaccgagatctccatccggaccgctgccatgcccgcgccgggaccgggacccctacccaggggaacccccgagaggaacacacaacaacgtctcaccagtcagccaccaccgtgctccatttcctttctctctctcggctcctccgctctcttgcccgagtcgctagcttccctgccccgcctcctcccatccccgtggacagacaaccccccacctccgcttccatagcatccgagctaaggtcaactcctccatcggcggagcgagagcggggaagagacgggagggtcccgaatccgagccgagctgcgctccccgcgcgaccgacactcaggtcttgtcgtcccatgcagatctgctcttcctcctgagataaagtgaccctgaccccttctttcttatacattggaaattacaggccatccatgaatccgtggcacacaggaagttaagattaatctagacatgataatctacaggcttatgagggcttacataagttcatcttctctacggaaatctgcattgagggctcttgcaaaggcactgacgacagatcaactcttcaacctaagagagcagtttacattattcggtccaaacaagagtggccatatatcattgcaaaatatgaagacggccttgatgaaaaattcctcgggtgcaatgaatgattctaggattcttgactttgttaactcaatatgcaatatccaatatggcatgattgattttgaagagttctctgctacggccattagtgtatatcaaatggaaggcctggagacctgggaagaacatgctcaacaagcatatgaattgtttgacaaggagggcaaccgaccaattgtgattgaagaacttgcatcggaacttggacttggcccttcgatctcatttcatgttgttctcaaagattggatcagacattcagatggacacccaggaagttgagttgccccttgaccaggaggaatccacctaccgtctggacgaaaaacgatcccatccatggggcagcgccagtgccagtattgtggaacgaatttataaggttggaaaggggttgctgaaggacgagaatgctcagaagcttgcgttgcagcactggctggaagcggccgcacttgaagaaatcttatatcagtttgaggaaaaactccaagctgaaagagaggaagctgctaggaagcaggaagagttgcaagcacaactacaagctcaacaggccgcacttgaagaaaaccaaagtttgctgcgccaggcccaagaggaagtgaaggggatgcataccaagtttgaagagaccaatgcactgctacgagctgtcctgaaacttcagaaagattga

SEQ ID NO: 108190 - DNA, 424 bp, Zea Mays
ggggctcatgatggtgttgaaccccgattcattgacttttacatggagggacaccgaggtctagatccagagcatctagaaattttatgtgacgacagcacgacagaaaagctgactcgttacgctaaggaggttaggaggaaagcaggagacgagggtctagattggagggaggcacctttcgatccggaagcagcatatgttgctggtggtgggctaccacatggaaggttggggatcggtgatggggttgttgatgagcaaataagacaacaacaacaagttcaacaactatctcaacaagttcagatgatgcagggaatggtgatgcagatgtatagtgctcagatgggatctcaaatggaaccccagttcacccgtccgccacaatctggacagacctcaaacaaccaacgaaacacag

SEQ ID NO: 108191 - DNA, 210 bp, Zea Mays
atgggagggagcacggtgtgctgcaggaagggacgacaccatccacgggagagggtcctcgcagggagggatccagggggagccgccatgggagggcagggagaggagcgcccaagtggtggctgccgtagggatgaacgccagggaagaggatggcgtgagggagttcggctggagcttgaggaagagacgaggatgaaggagaaatga

SEQ ID NO: 108192 - DNA, 285 bp, Zea Mays
cagcggaaataaattctttattacaaaatgattacaagtttatcaagattttattatacctcatcggagtgattacaaagaaagtgtttcaaaagaattacaatttgaaatgttataaagtatttgtaaattttaaaatacatgctagcttaagtgacaatcctcaataaagaagttaaagatgggatatacttatataagaaggccgagcccaccggcacttagcaccatccacaatagaacaaaattacaacctgaaaaacaacatggaataaaaccctgagt

SEQ ID NO: 108193 - DNA, 2151 bp, Zea Mays
tgtggtctggttttggtcacgtgtttcttctgcttccggttttggttcacctcgaggcttctacaccgcgtccctctccctccgcttcttccgccatctcgtctagcccccattgtagaactctctccaactccaacgccctaccccggccgtcaaaattccatctttccgccgttttcggggccgcacggctgcaagatcgatcaatcttgcgccgatcgagccgcagacacaaccagttccgatccccagccggtgctcgcggaccgcaggcggagcccggacggagcatgggctcccgattcgccagcgcggcgctgcggctgctggtgtgcgcagcgctcctgctgggttgctgccacgggaggttcgtggtggagaagaacagcctcaaggtgacggcgcccgacgacctcaagggcacctacgagtgcgccattggtaacttcggggtgccccagtacggcggcaccatggtcggcttcgtcgcctaccccaaggccaacaggaaggcctgcaagagcttcgacgactttgacatctcctacaaggccaagccgggggcgttccccaccttcttgctcgtcgacaggggagattgctactttgcaaagaaggcatggaatgcacagaaagcaggagcagcagcaatccttgtcgctgatgacaaagatgaacctctaattacaatggacaaccctgaggagagtggcaacacagattatctagagaacatcactattccttcggcattaataaccaagagttttggggacaagctcaagaaagtaattgacaacggtgacatggttagtgtgaatttggattggagagaggccctgccccatcctgatgagcgtgttgagtatgaattttggaccaacagcaacgatgaatgtggcctgaagtgcgatagccagattgattttgtcaagagcttcaaaggagcagcacaagtacttgagaagaagggctatacagagttcactcctcattacattacctggtattgcccagaggccttcattctgagcaagcagtgcaagtctcagtgcatcaatcatgggagatactgtgcacctgacccggaacaggattttagcaaaggatatgatggtaaagatgtggtggtccagaacttgcgccaagtttgtgtctttaaggttgctaaggagcacaagaagccttggttatggtgggactatgttactgattttgcgattcggtgtccaatgaaggaaaagaagtacacaaaggagtgtgctgatggtgttatcaagtctcttggccttgatcataaagcaatagataaatgtattggtgatccagatgctgatgaagaaaaccctgttctgaaagctgaacaggatgcacagattggcaagggctctcgtggtgatgttaccatcttaccaactctggtaattaacaatagacaatacagaggtaagcttgacaaaggagcagttcttaaagcactttgtgctggttttaaggaaactactgagccagccgtttgcttgagtgaagatatacaaacaaatgagtgcctagagaacaatggtggctgttggcaagataaggctgctaacatcactgcatgcaaggatactttccgtggaagagtttgcgagtgtccaattgtgaaaggagtaaaatttgttggtgatggctatagtcattgtgaagcttccggatctgggcgatgtgaaattaacaatggaggatgctggaaagataccaagaatggtcggacatactctgcctgtaatgatgatggctgcaaatgcccagatggattcaagggtgacggtaggcacaaatgtgaagatattgatgagtgtaaggaaaggactgtgtgtcaatgcaaagaatgcaaatgcaaaaacacatggggaagctatgagtgtggctgcagtggaggcttgctttacatgaaggagcatgatacatgcataagcaaaagtggagcatcagaagcaggttggggcttcttgtgggtcatcttctttggccttgttgcagcaggagttgcaggatatgctgtgtacaagtacaggatccggaggtacatggactcagagatccgtgccatcatggctcagtacatgcccctggacaaccaaggagacgttcagagccattctcatc

SEQ ID NO: 108194 - DNA, 812 bp, Zea Mays
catttaagcaatcatccagtgaccaaatggaggcttggaccggctacctcgaatgcattgtgcatgcaagtagcggtcgccaaccaatatgacagtgaaaacatggccaaacacaatcatcatcaatggtaacaaacatagactagctacatcagttcacatactcccatcaattcctccatccacaggcaacacacacaaacacacacatggcaccctcttccgcgcccccaattctatctaaaccggaaatttcagttttgggcatgccggtacactctggaaggcacttaccactggagtcaaccaccactccacaaattattttaggctcatgtacctccagtggacttattctcctacagcaatgcatgcattcgacctacatttcggtcttcctgttcaggaagttttttttgctttcaggttcctagttaggctgggcctgttcaccagcgtgagatgcttcttgcattgtggcttccgactcctggccctgcatcatcaaggtatcgcctggtgccgcctccacatctgtagaatccccattagatctcaatgctatgaaagcgctcaccgactcctgctctgtagttgtagccttattgtcaggcttccacacttctgtgttgctgggtgggtcctgttcgacagttctagcttccttgttatgttggacctctgcaggatctctgggtgggtcctgttcaacacttctagcttccttgttatgttggacctctgcaggatctctgggtgggtcctgttcaacacttctagcttccttgttatattggacctctgcaggatct

SEQ ID NO: 108195 - DNA, 1944 bp, Zea Mays
cacatccatctacgtatgtatacaatattagaattttaagaatggcccgtcgccatacgcatgctgccctaccctaccgctaccggccctgtcattaaatgcctcccaccacgatacgaaccaaccaacgaaccaaacataaattcagcccaccgcttcgaggacaggacggagggagctcacgcgcgagcaaagcaaagcacaagcagcaatggggatctgctgcggcaaggccaaggcggcggcaggggagcccgacgacgacgagggcctgggcttcccatggatgcacgacgacctgttccacagccacctgtgggccagcgccggcgtctccgtgcacaccaagcagggatggaagggcgccaaccaggacgccatgaccgtctgccaggacttcgccggccagaaaggccacatcctctgcggagtgttcgatggccacggccctcgtggccgggaagtcgctcgccacgtccgcgacaccctcccggtggaactagccgccgctctgaagccgagaaccggggacgaagatccctccgcctcgagcgacgcttcgaagcctaaacctgacgaagatggctcaggcgagaatggagaagatggctcaggcaagaatggagatgcttcgagcaacgccgatttggattccttcgacaagtcaggaggtagcggctcgtccagcgacgttacgagcgacgagagccagcagcagcagctgctgctgtccacttggaagaacgtgttcgtgagggcttttgagcaggtggacgaggagctgaggcggctttcaggaatcgactgcatctgtagcggcacaactgcagtcgctgctgttaggcagggcgatcacttgatcgttgccaatctgggcgattcacgcgccgtcctctgcacccgggacagcaaggaccgtctgatccctgtccagctcaccactgacctgaagccggatctgccaagtgagctcgcgaggattctgagctgcaaggggagagtgttcgccatggacgacgagccggacgtgccccggatgtggctgccggaccaggacgcgccgggcctcgccatggcgagggcgttcggtgacttctgcctcaagagccatggccttatctgcgaacctcaagtctactgcaggaaactgtccgagaaagacgagttcttggtgcttgctactgacgggatttgggacgtgctgtcgaacaaggaggtggtgaagctcgtgtcatcggcgcctgacccgtccaaggcggcgaggcagctgatcgaccgggcggtccgagcgtggcggcgcaagtacccgacgtccatggtggacgactgcgccgtcgtgtgcctgtacctgaaccggcgggcctcacctgctcccgtcgagagcagcagcggcctgctcccagttcccgacgacgtgaggccggccgcgcctttcacaggcagcagcttccgcagggctctgacgagcaacggccaggcggtgtcggaggaggggacgacggcggtgtggagagcgctggagggggtggcgcgggccaactccgtgatcaggctgccgcgcgtgggccgcgtgctgagctggcggaggcggtcgacctcgctggacgaagacgacggcggcgagcgggattgatggactcgggcggggagggcatcggaggtcgtcgttttcatggccggtacacgtagacgtagctagattcgttcgtgcatgggccgatggacgcgaggtgtaggatttgattggcctgtcgcattctggtgtggctgttgcaatggatgatgcgacatggacaggagtagcatttctttatccctggctgatgaatcagtgagtgcttttcatcctgctcgtctatgtactgctactgcacttgctgtaactgaaatttgtgggtgagattagcatctgacaacataagaagtgaagaacgtgactgcagt

SEQ ID NO: 108196 - DNA, 1771 bp, Zea Mays
tctctctcttcctgcattagttgcagagcctctgcctactagttcgcatctgtgcacatggcccatatgcaagctgttcaaggtgttgtcgtagcttgcattgcaatgcaggttgcaacttagcaactcaacagcttgagaaaagtgcaccggatccatcttgtatatccgctcagaactgaaatctcgcaacctgagactgagatatgctagtggaagagaacaattaaaaaaaaaactgatttctttcagcaaaactggcttctttcaggacttcgccggccagaaaggccacatcctctgcggagtgttcgatggccacggccctcgtggccgggaagtcgctcgccacgtccgcgacaccctcccggtggaactagccgccgctctgaagccgagaaccggggacgaagatccctccgcctcgagcgacgcttcgaagcctaaacctgacgaagatggctcaggcgagaatggagaagatggctcaggcaagaatggagatgcttcgagcaacgccgatttggattccttcgacaagtcaggaggtagcggctcgtccagcgacgttacgagcgacgagagccagcagcagcagctgctgctgtccacttggaagaacgtgttcgtgagggcttttgagcaggtggacgaggagctgaggcggctttcaggaatcgactgcatctgtagcggcacaactgcagtcgctgctgttaggcagggcgatcacttgatcgttgccaatctgggcgattcacgcgccgtcctctgcacccgggacagcaaggaccgtctgatccctgtccagctcaccactgacctgaagccggatctgccaagtgagctcgcgaggattctgagctgcaaggggagagtgttcgccatggacgacgagccggacgtgccccggatgtggctgccggaccaggacgcgccgggcctcgccatggcgagggcgttcggtgacttctgcctcaagagccatggccttatctgcgaacctcaagtctactgcaggaaactgtccgagaaagacgagttcttggtgcttgctactgacgggatttgggacgtgctgtcgaacaaggaggtggtgaagctcgtgtcatcggcgcctgacccgtccaaggcggcgaggcagctgatcgaccgggcggtccgagcgtggcggcgcaagtacccgacgtccatggtggacgactgcgccgtcgtgtgcctgtacctgaaccggcgggcctcacctgctcccgtcgagagcagcagcggcctgctcccagttcccgacgacgtgaggccggccgcgcctttcacaggcagcagcttccgcagggctctgacgagcaacggccaggcggtgtcggaggaggggacgacggcggtgtggagagcgctggagggggtggcgcgggccaactccgtgatcaggctgccgcgcgtgggccgcgtgctgagctggcggaggcggtcgacctcgctggacgaagacgacggcggcgagcgggattgatggactcgggcggggagggcatcggaggtcgtcgttttcatggccggtacacgtagacgtagctagattcgttcgtgcatgggccgatggacgcgaggtgtaggatttgattggcctgtcgcattctggtgtggctgttgcaatggatgatgcgacatggacaggagtagcatttctttatccctggctgatgaatcagtgagtgcttttcatcctgctcgtctatgtactgctactgcacttgctgtaactgaaatttgt

SEQ ID NO: 108197 - DNA, 2681 bp, Zea Mays
tccccgcctcaccacatctcacctcgtctcctcctccggtccttcccccatctcttcgccggcttccatttcttgcctgccagtcactctcgtccgccgcagatcgagaagccgccaccaaaccccccctccaccaccgtatgaccatgacagcccagcagcaccggcaccccaagcgccgctgcgtcgccctctccctttctccgtccctcgcgcgcatccccggcgcccccacgccgccgctcgactcgctggccgacgagcttctcttccttgtcctggaccgcgtggcccaggccgacccgcgggcgctcaagtccttcgcgctggcctcccgcgcctgccacgccgcggagtccagccaccgccggacgctccgcccgctccgcgcggacctcctgcccgccgcgctggcgcggtacccgaccgcgacccgcctcgacctcaccctctgcgcgcgcgtccccgacgccgccctcgcctccgccgccgtctccgggtcctcctccgccctccgcgccgtcgacctctcctgctcccgcgggttcagcgccgcgggcgtctccgagctcgccgtcgcctgcccgggcctcgtcgacctcgacctctccaatggggtcgacctcggggacgccgcggcggccgaggtggcgcgggccagggcgctccggaggctctcgctggcccgctggaagccgctcaccgacatgggcctcggatgcgtcgccgtcgggtgcacggagctgagggagctctcgctcaagtggtgccttgggctcacggatctggggatccagctcctcgccctcaagtgcaggaagctcaccagcctggatctctcctacaccatgatcacaaaggctagcttgcctcccatcatgaagctacccagtcttcaagagttgacactggtggggtgtattgcgatcgatgatgatgctcttggtagtcttgagagagaatgcagtaaatcactacaggtgcttcatatgtctcagtgtcagaatatcacaggtgtgggagtttcatccatcctgaagtcggtacccaatctattggaactggaactttcatactgctgtcctgtcactccttctatggtgagaagcttccagaagcttgctaaacttcagaccctgaagctggaaggctccaaattcatggccgatggactaaaagccattggaacctcttgtgcttctttaagggaactaagtctgagcaagtcatctggagtgaccgacacagaactctcttttgctgtgtcaaggctaaagaacctgctgaagctggacattacttgttgtcgcaatatcactgatgtttcactagcggccataactagttcatgctcttctctcatctctatgaggatggagtcttgtagccgtgtttccagtggagcactccaactgatcgggaagcactgttctcgcttggaagagttggaccttactgacagtgatttggatgacgaaggtacttactgaactggctactgaattattcttccctggatggacctaaagccgactctgaatattttctgtgcaggattgaaagctcttgccagatgcagcgaactttcgagtctaaaaattggtatttgcttgaagataagtgatgaaggtcttacccacatcggaaggtcttgcccaaaactccgcgagattgatttgtacaggtgtggaggccttagcgatgatggaattattcaaattgcgcagagttgtccgatgctagagtctatcaacctatcatactgcacagaaataacagaccgctcactgatttcactatcaaaatgctcaaagctgaatactctggagattcgtggctgccccagggtttcatccatcgggctctcagaaacagcgatggggtgcaggctgctttccaagcttgatattaagaaatgctttgggattaatgatgctggaatgctttacctttcccagttctctcatagcctccgtcagataaacttgtcatactgttcagtcaccgatattgggcttctttccctttcttgcatatccggcctgcagaacatgacgatcgtccatgtagcgggtataacgcctaatggcttggcagctactcttatggtttgtggtggtttgacgaaagtgaagcttcatgaagcattcagatccatgatgcttcctcacatgataaaaaatgttgaggcacgcggctgtgttttccaatggattgataaaccattcaaggttgaggtggaaccttgtgatgtatggaagcaacagtcgcaagacgtgcttgtacgatgagaattgagttgaccctcgagcatgtggctatcgtggaaatcatggcatgcatcgttatggatggatgggttgttggctggcaatgtcatccgcgcaagtgattcctgtgtttgagcataggtcttgatgttgttgtatactggtataagcaagtgattcctgtgtcatccgcaagtgtatgtatgtcttgatgttgttgtatactggtatagatgagtaggtcccacatttatttggtgaggtgatcatttgacaggaagttgctgtatagaatactaccatgtaaagatgtcgatacggaagggatgagaaaatggttttgaaatttagtacgatatgccttttcctatgttcgtttagttttaatccgtactatcttctactgtttct

SEQ ID NO: 108198 - DNA, 2569 bp, Zea Mays
catcgtcgtctccccgcctcaccacatctcacctcgtctcctcctccggtccttcccccatctcttcgccggcttccatttcttgcctgccagtcactctcgtccgccgcagatcgagaagccgccaccaaaccccccctccaccaccgtatgaccatgacagcccagcagcaccggcaccccaagcgccgctgcgtcgccctctccctttctccgtccctcgcgcgcatccccggcgcccccacgccgccgctcgactcgctggccgacgagcttctcttccttgtcctggaccgcgtggcccaggccgacccgcgggcgctcaagtccttcgcgctggcctcccgcgcctgccacgccgcggagtccagccaccgccggacgctccgcccgctccgcgcggacctcctgcccgccgcgctggcgcggtacccgaccgcgacccgcctcgacctcaccctctgcgcgcgcgtccccgacgccgccctcgcctccgccgccgtctccgggtcctcctccgccctccgcgccgtcgacctctcctgctcccgcgggttcagcgccgcgggcgtctccgagctcgccgtcgcctgcccgggcctcgtcgacctcgacctctccaatggggtcgacctcggggacgccgcggcggccgaggtggcgcgggccagggcgctccggaggctctcgctggcccgctggaagccgctcaccgacatgggcctcggatgcgtcgccgtcgggtgcacggagctgagggagctctcgctcaagtggtgccttgggctcacggatctggggatccagctcctcgccctcaagtgcaggaagctcaccagcctggatctctcctacaccatgatcacaaaggctagcttgcctcccatcatgaagctacccagtcttcaagagttgacactggtggggtgtattgcgatcgatgatgatgctcttggtagtcttgagagagaatgcagtaaatcactacaggtgcttcatatgtctcagtgtcagaatatcacaggtgtgggagtttcatccatcctgaagtcggtacccaatctattggaactggaactttcatactgctgtcctgtcactccttctatggtgagaagcttccagaagcttgctaaacttcagaccctgaagctggaaggctccaaattcatggccgatggactaaaagccattggaacctcttgtgcttctttaagggaactaagtctgagcaagtcatctggagtgaccgacacagaactctcttttgctgtgtcaaggctaaagaacctgctgaagctggacattacttgttgtcgcaatatcactgatgtttcactagcggccataactagttcatgctcttctctcatctctatgaggatggagtcttgtagccgtgtttccagtggagcactccaactgatcgggaagcactgttctcgcttggaagagttggaccttactgacagtgatttggatgacgaaggtacttactgaactggctactgaattattcttccctggatggacctaaagccgactctgaatattttctgtgcaggattgaaagctcttgccagatgcagcgaactttcgagtctaaaaattggtatttgcttgaagataagtgatgaaggtcttacccacatcggaaggtcttgcccaaaactccgcgagattgatttgtacaggtgtggaggccttagcgatgatggaattattcaaattgcgcagagttgtccgatgctagagtctatcaacctatcatactgcacagaaataacagaccgctcactgatttcactatcaaaatgctcaaagctgaatactctggagattcgtggctgccccagggtttcatccatcgggctctcagaaacagcgatggggtgcaggctgctttccaagcttgatattaagaaatgctttgggattaatgatgctggaatgctttacctttcccagttctctcatagcctccgtcagataaacttgtcatactgttcagtcaccgatattgggcttctttccctttcttgcatatccggcctgcagaacatgacgatcgtccatgtagcgggtataacgcctaatggcttggcagctactcttatggtttgtggtggtttgacgaaagtgaagcttcatgaagcattcagatccatgatgcttcctcacatgataaaaaatgttgaggcacgcggctgtgttttccaatggattgataaaccattcaaggttgaggtggaaccttgtgatgtatggaagcaacagtcgcaagacgtgcttgtacgatgagaattgagttgaccctcgagcatgtggctatcgtggaaatcatggcatgcatcgttatggatggatgggttgttggctggcaatgtcatccgcgcaagtgattcctgtgtttgagcataggtcttgatgttgttgtatactggtataagcaagtgattcctgtgtcatccgcaagtgaagttgctgtatagaatactaccatgtaaagatgtcgatacggaagggatgagaaaatggttttgaaatttagtacgatatgccttttcct

SEQ ID NO: 108199 - DNA, 725 bp, Zea Mays
tcgagcttctccctcgcgcttggatccggccgttaacgcctagccatatgttctttttcccccagctcgtggatgtcgttgttccgtgtgcttggccttcagagttcgtcggccatcacgacatccccgacatccccgtctatcgcgccatgctttggttgttgatctgcgcagttcctattcgacaatcggttccgtctccgtcgaactcatattcgtcatcccgccaaactccttcaacactgccccaccccgtcgtcgttgttccgtcgcctcgcttcgacgccagtccctacgtgctgtctccgacttgtgttcgcgtcgacaaaagaatcccaagaaaatatagagaagcaagctcctggtcgatgcccaagtgctcggtgaaaggccagaaccagaatcatcgtcgtttatgcggagttctacttaatatagagagattccaagagttgtggatggaaaagaaagtgaagctccattccatactcgtcagttgtttgatcgaagacttcaatcgaagactgtcatcgttcccgcaaacactgaatcaagttgataacggtgagctaaatcactatttttactatagattttatgatcgtgaaataagacgcgtagtttgtgtatgaagtttaagttagaaataccagtgatgcgaggtgtgcttcgttgtatttagttatcaagtatatttgaactagttctattttgcagagtgtagt

SEQ ID NO: 108200 - DNA, 2185 bp, Zea Mays
aggcaggcccgcatcgcgttcgatttccaaccaatcacactccgaccactgtgaccacacgctcgcgcgcccatggcggcgacctcgccgacgccgacgctggcgaagcctgcagccgccgcgcacgcccgagccccgtccgcgggtcccagacgtgtctccttgacctcctgccgctgccaccgccgccgctctactccgtctcggtggaggagtctcccacgatgcagtcgccgtggtgggaagccggtcgtcacagaggtcatcgacgcggcggcaccggataaggggccagagactgggagcaagggagaggaagagaaggaggccgtagcggggcgcggggcgccggggtggctcaggcttgacggggttgcagcggacatcctcgccatcgccgcgcctgccgtgctcgcgctcgccgcggaccccatcacggcgctcgtcgacactgccttcgtcgggcatatcggttcagctcaacttgcggctgttggtgcatctacttccatattcaatttggtatccaagctgtttaatgtgccgctacttaatgtcacaacatcctttgttgctgagcagcaggcaaaggatggcaattcgaacactggaggtgaaattctcacctaggagatgaatttttgacgccactagagaaggcaaggcaaccaaagaaggttcttccggcagtgtcaacatccttggctctagctgctggcattggattactggaaatggtagctctgattgttggatctgggaccctgatgaacatcattggtattcctgttgattcaccaatgcgagcaccagcagaacagtttcttacactgagggcacttggtgctccaccgatcatagtggcacttgcagctcagggtgcatttcgtggatttctggatacgaggacaccattgtatgctgtgggtgctggcaacctattaaatgcattacttgatgtggtacttatttttccacttggtctaggagtaagtggtgctgcactggccaccgtgacctctgagtacttgacagcaatcatcctcctttggaagttgaatgatgaagtagatctattgtcatggaatataattgaggatggagtcatccgctacctgaaatctggtggtctactaattggcaggacaattgcagtattcttgacactgacactagctacatccctggctgcaagggaagggcctgttccaatggcgggctatgagatatgcttgcaagtgtggttaacaatttctctgctcaatgatgctctagcccttgctggccaggctctacttgccagcgaatatgcaaaagggaattacaagcaagcccgcacggttttatacagagtcctgcaggttggtggtgtgactggttttgtccttgctgcttccttatttgttggatttggatctttgtccttgctgtttacagatgatccagcagttttagatgttgcacggtctggagtgtggtttgtcaccatttctcagccggtgaatgctattgcattcgtggctgatgggctctactatggtgtttctgactttgcctatgctgcatattccacgttttttgcgggagcggtctcatcaatattcctactattagctgctcctaattatggtctcggtggcatatgggctggtcttactctatttatgagtttgcgtgcagttgctgggttctggaggttagggagcaaaggtggaccttggaatgttatcttatctggtcagatagtaagtaaaacaaagatatgaccagattcgattgttcaattgatctcccaccgctagcaggtcggtagcaagaaatgtgcatcctgctgcaggtcatatatagctgacaagcaatatatagcaaaaaatgtgcatcctgcgtgacagggagctgatgcatctctgtggaagatatacgcttgtagttggtgttggatagctgggctatcttgtggctgttgtaggggctcacagctttcaactgtgttgtaccatatactgtataagaaagatctgttcagttataacgaaagaaagaaaactggcttcaaatagaatacaaaaggctgtgtaacgaaagaaagaaagccgagttcaaatagaaaatcccttcatgtaaatttcgttctggaaatcctccttttgaatgaagctttatccaacattctaggattggtaaa

SEQ ID NO: 108201 - DNA, 2174 bp, Zea Mays
aggcaggcccgcatcgcgttcgatttccaaccaatcacactccgaccactgtgaccacacgctcgcgcgcccatggcggcgacctcgccgacgccgacgctggcgaagcctgcagccgccgcgcacgcccgagccccgtccgcgggtcccagacgtgtctccttgacctcctgccgctgccaccgccgccgctctactccgtctcggtggaggagtctcccacgatgcagtcgccgtggtgggaagccggtcgtcacagaggtcatcgacgcggcggcaccggataaggggccagagactgggagcaagggagaggaagagaaggaggccgtagcggggcgcggggcgccggggtggctcaggcttgacggggttgcagcggacatcctcgccatcgccgcgcctgccgtgctcgcgctcgccgcggaccccatcacggcgctcgtcgacactgccttcgtcgggcatatcggttcagctcaacttgcggctgttggtgcatctacttccatattcaatttggtatccaagctgtttaatgtgccgctacttaatgtcacaacatcctttgttgctgagcagcaggcaaaggatggcaattcgaacactggaggtgaaagagatgaatttttgacgccactagagaaggcaaggcaaccaaagaaggttcttccggcagtgtcaacatccttggctctagctgctggcattggattactggaaatggtagctctgattgttggatctgggaccctgatgaacatcattggtattcctgttgattcaccaatgcgagcaccagcagaacagtttcttacactgagggcacttggtgctccaccgatcatagtggcacttgcagctcagggtgcatttcgtggatttctggatacgaggacaccattgtatgctgtgggtgctggcaacctattaaatgcattacttgatgtggtacttatttttccacttggtctaggagtaagtggtgctgcactggccaccgtgacctctgagtacttgacagcaatcatcctcctttggaagttgaatgatgaagtagatctattgtcatggaatataattgaggatggagtcatccgctacctgaaatctggtggtctactaattggcaggacaattgcagtattcttgacactgacactagctacatccctggctgcaagggaagggcctgttccaatggcgggctatgagatatgcttgcaagtgtggttaacaatttctctgctcaatgatgctctagcccttgctggccaggctctacttgccagcgaatatgcaaaagggaattacaagcaagcccgcacggttttatacagagtcctgcaggttggtggtgtgactggttttgtccttgctgcttccttatttgttggatttggatctttgtccttgctgtttacagatgatccagcagttttagatgttgcacggtctggagtgtggtttgtcaccatttctcagccggtgaatgctattgcattcgtggctgatgggctctactatggtgtttctgactttgcctatgctgcatattccacgttttttgcgggagcggtctcatcaatattcctactattagctgctcctaattatggtctcggtggcatatgggctggtcttactctatttatgagtttgcgtgcagttgctgggttctggaggttagggagcaaaggtggaccttggaatgttatcttatctggtcagatagtaagtaaaacaaagatatgaccagattcgattgttcaattgatctcccaccgctagcaggtcggtagcaagaaatgtgcatcctgctgcaggtcatatatagctgacaagcaatatatagcaaaaaatgtgcatcctgcgtgacagggagctgatgcatctctgtggaagatatacgcttgtagttggtgttggatagctgggctatcttgtggctgttgtaggggctcacagctttcaactgtgttgtaccatatactgtataagaaagatctgttcagttataacgaaagaaagaaaactggcttcaaatagaatacaaaaggctgtgtaacgaaagaaagaaagccgagttcaaatagaaaatcccttcatgtaaatttcgttctggaaatcctccttttgaatgaagctttatccaacattctaggattggtaaa

SEQ ID NO: 108202 - DNA, 1371 bp, Zea Mays
gtgttcttggtctgcttgatagcagggtgcagcatctgctggttcaacacggtctgcttcgttctctgcatccgcagcttctctgcgagcaaccgctccctagccctctccctctcaataagcttcaacggactcagcgctgccttctacactctctttgcgaatgccctctcccctttctccccagctgtctacctcctcctcaatgcaatcctccctcttggtgtctctgttcttgcactcccagcgatcctcctctgccaccaaaatgacggccatgtccaaagtgcgcccaggcatgacgggcgtgtcttcctcggtctctacatcctcgcattcatcaccggcatatatctggtggtctttggatctttcaccgcgaccagctctactgcatgggtcatcctcacaggtgccatggtcctcctcgcccttcctttcatcatccctgcctgctccagttgctcatatgtggatacagatggccctgaccctgcatcgccactaaaccatgatgacccacataagccactcctaataagtaacaatcatcagatggagtccaatgccatgatgcaaaatccaaaggagaaccagatgcagggcaattgttgtggaacagtgatgggcaagggccgcctggcgacactcggtgaagaacacagtgcaaaaaagctcattcggtgtgtggacttttggctctactacacagcctacttctgtggagccactgttggcctggtatacagcaacaacttggggcagattgcgcagtcattgaaccagcagtcacagctcaccatgctccttgctgtctactcatcctgctccttcttcggtcgtcttctctctgcactacctgaccttcacaggaagatgtcacttgctcgcacagggtggcttgctgctgcattggtccccatgccaatggcctttttccttatgtggaagcaacaagatggaagcaccctggtagcaggaacagcactaattggtctaagctcagggttcatctttgctgcagcagtgtcagtgacctccgagctctttggacccaatagtgttggggtgaatcacaacattcttattaccaatatcccgcttggctcactcctctatgggcagattgctgccatggtatacgatgcaaatggccaaaagatgacagtagtggataaccgcactggcattgttgacaccatgactgtgtgcatgggggtgaagtgctactcaaccactttcttcgtgtgggcttgcatcacatttctggggttagcatcaagcatagttctattcatacgaacaaagtcagcttatgacactgctgctagtcggtcaagttgtaagcaccttcaccaagtttccagttag

SEQ ID NO: 108203 - DNA, 507 bp, Zea Mays
atgggcggccgaggtggcggggaggaggagggggtggcggacggcggccggcatgggcggaggacgaacgtcggcggcggcggaggggaggacagcagggacgaggggtggcggcggtggtcggtgctggtggcgacggtgtggatccaggcgctgacggggaccaacttcgacttctcggcctactcgtcggcgctcaagtcgtcgctgggtgtctcgcaggaggcgctcaactgcctggccacggcgtcggacctgggcaaggcgctggggtggtcgtcgggcctggcgctgctccacatgccgctccatgccgttctcatggtctccgccgcgatggggctcgccgcctacgccgtgcagtactactgcctggcgttcgccggcggccctgctgcgggagcgggagcgtcgtcgtccgtggccgtcccctaccctctggtgcggctacggcgtgtcaagctcatgttcgagttcgactcgatcgttgccgagccaaataaataa

SEQ ID NO: 108204 - DNA, 1290 bp, Zea Mays
atggagatgagagggctggttctggttttggtcatggtcatggtcatggctcctctacctagctgcaaggcggctgatcatgattttgggacagagggtgaatacatcatggtgagacgtagcacactcacagtcctggtggtctttgcgttgctagtagtcggcgtcgccatcggggtcaccaggtggctgaggaggaaagcgaaggaaaccaccgctacagaatcaccagcagcgaagctatcatcgcagtcgtcgcagggcggccacaggcaggtagcagcagtagcagcgcatgcgcatgcgcatggcagtggcacggaggcgagcggcaggtggtcgggcctgtacaggttcaccagggaggagatcgagagggccgtcgactacgcgagcagcaggatctacctcggctccggcagcgcggggcaggtgtaccagggggtgctccccagcgggcagctcgtcgccgtcaagcacatccacaggacggccatgtccgggtccttcaccagggaggtggagcagctgtgcaaggtcaggcaccccaacctggtgtgcctcttcggctactgcgacgaggagggcgaccagtacctggtgtacgagtactgcgccaatgggaaccttgcccagaacctactcaggagtgactccgtgctcccatgggaaacaagggtgaagatcctgagggactgcgcatccgtcctgaggttcctccacacgcaccctgacggatgcatcgtccacagagacatcaagctcaccaacatcctgctgacagagaagaaggtgccgaagctgtccgacttcgggctggcgaagatgctggagatggaggagaccaaggtgttcacggacgtgagaggcaccatcgggtacatggaccccgagtacatcacccactccaagctcacctgcgccagcgacatttacagcttcggcgtcgtcaccctgcagctcctgtccgggaggaaggtcatagaactcgacatcgttgcgcgtgattcactcaccaagaaggccaaggatgtagtgagtgggaagaagccactggaggagttcatagacccacgtgtgagggacgatgtcgtcatagaagatttcgtgctgatactgaagatcgcagtcctctgcgtcgcgagctcaagcgtaggacgccccaccataaaggacgtgttcgaggagatggacagagccctgagaagtacagccgtaaagactagagcaaggaaggagatgaacgcggcaagtttgactgctcagtatgcaaaggtgttagacgtgtag

SEQ ID NO: 108205 - DNA, 364 bp, Zea Mays
caggagcggacgtggtgagcagcctacctggtgtaccaggcgaactcgcgcacgagggaccccgtctacggctatgcgtgggcgccatctcctacctccagcagcaggtctcccatcccatctcgccctcgccaaggcccagatcatcatctgcgtccagatgcagcaagacgacggtaacacacagtccgcttcagctgctgtcgccgttgccgcgcaaaaaaatttggaccaccaccagcagaagatggaatgcgaggtttatggtggcagcagcctgcccgtgcagaatggcctgatgacgaacacgttggacagcaccggtgcggttcatcagcagcagatgttgggcagctttgggaac

SEQ ID NO: 108206 - DNA, 486 bp, Zea Mays
ttatatatcacaagaggaagttcaacatttcatgttctaccaggaaaggacaattacacggtatattgtgccactgcgtttattgtgatcgacgatcacaagaaagcaaatcaaatttttattgtgagtgtcatttccatccctctcaacttctcaagcatcagcgtgaaacaagttgccatggatttgcttaggaactaactgcattagtaaaactgacataaaaataaaactgcacatccgcttcaaattcaacgagttaatggcttccaagattgtttgctacaaatggacttaaaatcaggttgcaggactcttctgttgtgtatgcatagtattctttgccgttgtccacattatatctcagagataccactgcccagtcatgttgcaggtggcaaatttcttaaaatcaggttgcatgttgcaggtttcttgatgctgttgtccatgaacagccgcatctgctcattctccggtttcacc

SEQ ID NO: 108207 - DNA, 1609 bp, Zea Mays
caatattattattcaggttgatgacttggaagaagtcagtgagtactaccagaatagaggatgcttcagtgaacttattgctctcatggagagtggtcttggacttgaacgtgcacacatgggcatcttcacagaattgggagttctgtatgctagataccgctctgagaagcttatggagcacatcaaacttttctccacccgtctcaatattcctaagcttattcgagcctgtgatgaacagcagcactggaaagaacttacctacctgtacatacagtatgatgaatttgacaatgcagtcaccactattatgaaccactctcctgatgcatgggatcatatgcagttcaaggatgtttgcgttaaagttgcaaacgttgagctatattacaaggcagttcacttctatttgcaagagcatcctgatctcatcaatgatatgctgaatgtgcttgcacttcgtttagatcataccagagttgtagacataatgcgcaaggctggtcaattgcatcttgtgaaaccatatatggttgcagttcagagtaataatgtctctgctgtgaatgaagccttgaatgagctttatgttgaagaggaagactatgagagactccgtgaatcagttgacatgcatgacaactttgaccaaataggtcttgcccagaagctggagaagcatgaattgcttgagatgaggaggattgctgcctacatttacaagaaggctggcaggtggaagcaatccattgctctatcaaagaaagataacatgtacaaggattgtatggagacatgctcacaatctggtgaccgtgaactgtcagaggacttgcttgtgtattttatcgagcagggtaagaaagaatgctttgcttcttgcctcttcatttgctacgacctgatccggccggatgtcgctcttgagcttgcgtggatgaacaacatgttggactttgccttcccatacctgttgcagttcatccgtgaatacactagcaaggtggatgatttagtgaaggacagaattgagtcacagaatgaagaaagagtcaaagagaaggaggagaaagatcttgttgctcagcagaacatgtatgcgcaattgcttcctcttgctttgcctgctccgccaatgcctggcatgggtggccctccacctccgatgggtgggatgggcatgcctccaatgggtggaatgggtatgccgccgatgggccctggtccgatgccagcattcgggatgccagcaatgggaagctactgagatgtttttgcagagagcttagacgatgatttgaatcgtccctgtgtaagcgaaggtggaaacttcattggagttgtagatggttacagtttggaattaatattctttatggtaccagaatttttttggcaagtgaaaccttagccagagtctgagaattgcaacctgttataccgtaggatcggataggatgagggtgattaggttggttgagcgagctgttgaaagctggtatcatttgtatagtgtgatgaaaactttgtagacattttgcttgtataatactcctacttgttggcacagtgaaggacaaacaaatgtatgctgacttgttatgtc

SEQ ID NO: 108208 - DNA, 244 bp, Zea Mays
gatcctacacttgctgttgttgcttacagacgtggacagtgtgatgatgaacttattattgtcaccaacaaaaactcattattcaagctgcaagctaggtatgtggttgagagaatggatggtgatctgtgggataaagttcttcagcctgagaatgaatatagaaggcaactcattgaccaagtggtttccactgcattacctgagagcaagagccctgagcaagtgtctgctgctgttaagg

SEQ ID NO: 108209 - DNA, 509 bp, Zea Mays
ggacccagagatccatttcaagtacatagaagcagcagcaaggactggacaaatcaaagaagttgaacgtgtaaccagggagtcaaacttctatgatgctgagaagacaaagaactttttgatggaagcaaaactacctgatgcccgtccactgattaatgtttgtgaccgctttggttttgtgccagatctcactcactatctgtacacaaacaacatgcttcgatatatcgaaggctatgttcaaaaggtgaatcccgggaacgctcctttggtagtgggccagttacttgatgatgaatgccctgaagattttatcaagggcttgatcctctctgttcgttctctccttcctgttgaaccactggttgatgaatgtgagaagaggaatcgcctacgtttgctcactcaattcctggagcacttagtgagtgaaggtagccaagatgtgcatgtccataatgctcttggtaaaatcatcattgacagcaacaacaatcctgagcatt

SEQ ID NO: 108210 - DNA, 1176 bp, Zea Mays
ctgtttggttccgtcgcgtcgcgtcccgtgctcagatcagatctctcctctcccccgaccccgagtggagtgcctccctccccccctcccgctccagactagcggagagagatctcggcaccgccgttcgtcgccatggcggcggccaacgctcccatcgccatgcgcgaggcgctcacgctcaccagcctgggcatcgcgccgcagttcgtcaccttcacccacgtcaccatggagtcggagaagtacatctgcgtccgcgagacctccccgcaaaacagtgtcgtcatcatcgacatggccatgcccatgcagccgctccgacggcccatcaccgccgactccgccctcatgaaccccaacaccaggatcctcgccctgaaagcccaaatacctggaacaacacaggatcaccttcaaatatttaacattgaggctaagactaagatcaagtctcaccagatgccggagcaggtcgtattctggaaatggatcactcccaaactgttgggtttggtgacacaaacatcagtttaccactggtcgattgaaggtgattctgagcccaccaagatgtttgataggacggctaatctggcaaacaatcagatcatcaactatcgatgtgacccagcggagaagtggcttgtacttattggaattgcacctggagccccagagaggccacaactggtgaagggaaatatgcaacttttctctgttgatcaacaacgtagccaggcacttgaagcccatgcagcgtcttttgcaacatttaaggttgttggtaatgagaatccatcaacccttatttgtttcgcctcaaagacaactaatgctggacagatcacttcaaagttgcatgttattgaactgggtgcacagccagggaaacctggtttttctaagaaacaagccgacctcttcttccccccagatttccaggatgattttcctgtagctatgcaggtttcacaaaagtatgggcttatctatgtaattactaagcttggccttttgtttgtatatgacttggaaactgctgcggcagtttacagaaatagaatcagtccagaccctatattcttgacggcagaatcttcctctactggtggattttatgccatcaacagaagggggcaggttttacatgccacagttaatgatgcaactgtt

SEQ ID NO: 108211 - DNA, 1852 bp, Zea Mays
agtttgacgacccacccactcacacgccgaaccgacgccgacagctgccgcctgccggacccaacaacaatcaacaaagcctacaaaatcacaactccacctgccacctgccgcgcggccactatccagcctccttcggtccttccccttccccagcagcaggctccggccgcagccatgcccaagccaccgccgcccacctccgacccctcgctccccaccaccaccaccacctcgacccccaagtcgtcgtcccgccctgcccccgcggggctcctcgatccgctcgccgcctccgggcgctccctcctcgcctcggcgcggcgctccccggtcaccacgctcgccggcgccttcttcctcctcgcgctcgtcatgtacggagaggacgcccgcaccatcgccgagctctccatcgacgactacctctacccggacgccgatctctacaacgtctccggcctgccgccccttgcgttgcccccgcctacctgcgacctctccagtggccgctgggtcttcgacaacgcctccgtcccggcgtacagggagaaagactgcaccttcctcaccaagcaggtcacctgcctcgccaacggccgccccgacgatatgtggcagtactggagatggcagcccagtgactgctccctccccacgttcgacgcccggagattcatggaggcgatgcgcgggaagcggctcatgttcgtgggggactcgctgaaccgcaaccagtgggagtcgctggtgtgcctggtgcagcccatcctgtccaagggcaggaagaagatcgtcaagcggggctccctcaacaccttctacgccaaggagtaccgggccacgctcgagttctactgggcgcccttcctcgtcgagtccaactctgacaaccccaacttccacagcatcaaggaacggatcatcagtcccgagaggatcgaggcgcacgccaggaactggaaggacgttgattacctcatcttcaacacctacatctggtggatgaacaccgccgacatcaaagtcaggagaccgaactcgaggtattggtctgagaacgacgaggttcccaggattgaggcgtatggtcgggtgttcaagacgtggtctgattggctcaataacaacatcgatcctgcccgcacgtccgtcttcttcatgacgatttctccaattcacatcagcccgcagaattggggaaacccgggagggatcagatgcgtgaaggagacgcttccttatcagaactacagccaacccctggatctttaccatgatatgcggttgtatgacctagtgatcaaggttgccagctccatggagaaggtcccggtgtcagtgatcaatatcacaaagatgtcagattaccggaaggacgcccacgcgtccgtgtacaccatccggcaagggaaactgctgacgccaaagcagaaggcagacccagagaaattcgcggactgcatccattggtgccttcccggcgtgccggacgtgtggaaccaaatactctacacgaggattctttcaaaatcaccatggcgttctaattttagtccccctccgtcccagtccacacctcttcctccccaatgattggagaatgtaggattatcctttttgttttactttttaggttagattgagtataggttagcggagaaaggaaaatggatgtgctgattactgatggtatgtaagaaggttcagctgaagtgtaagttagttgtgagtcagccaattcaggaaacaacagcgatctagtacaaggtgcaccatggatatgatactatactatacaccaagtatatgccactgcgttgctatggaatcattatatctatatgttcct

SEQ ID NO: 108212 - DNA, 1286 bp, Zea Mays
ctctcacatcatcatcatatctctttaccccttcttcccagcgacaagagaaaggattagaaaaaggaaagatccatggacatgatctccggcagcactgcagcaacatcaacaccccacaacaaccaacaggcggtgatgttgtcatcccccattataaaggaggaagctagggacccaaagcagacacgagccatgccccaaataggtggcagtggggagcgtaagccgaggccgcaactacctgaggcgctcaagtgcccacgctgcgactccaacaacaccaagttttgctactacaacaattatagcatgtcacaaccacgctacttttgcaaggcttgccgccgctattggacacatggtggtaccctccgcaatgtccccattggtggtgggtgtcgcaagaacaaacatgcctctagatttgtcttgggctctcacacctcatcgtcctcatctgctacctatgcaccattatcccctagcaccaacgctagctctagcaatatgagcatcaacaaacatatgatgatggtgcctaacatgacgatgcctaccccaacgacaatgggcttattccctaatgtgctcccaacacttatgccgacaggtggaggcgggggctttgacttcactatggacaaccaacatagatcattgtccttcacaccaatgtctctacctagccaggggccagtgcctatgctggctgcaggagggagtgaggcaacaccgtctttcctagagatgctgagaggagggatttttcatggtagtagtagctataacacaagtctcacgatgagtggtggcaacaatggaatggacaagccattttcgctgccatcatatggtgcaatgtgcacaaatgggttgagtggctcaaccactaatgatgccagacaactggtggggcctcagcaggataacaaggccatcatgaagagcagtaataacaacaatggtgtatcattgttgaacctctactggaacaagcacaacaacaacaacaacaacaacaacaacaacaacaacaacaagggacaataaggttagtgtgccagaccgtggaagcgttgctgctataaataatgcaattgggtagtagtacccagtgaaatcaggagagactagtagcctagggtgcattttgatttatttagttttggtcaagatgacaagtcatcatgaatcaccctttttattcatttgcatgttttgatgagagttcatttgcagtaagctatatatcattggataattaatcatttggttggatcatc

SEQ ID NO: 108213 - DNA, 4268 bp, Zea Mays
ccccaaccacaaggagtcaaggaacaggtcggggtccagccatccgaccccttgaatccgcttgccctcctgcttgatcccgccgccaccatctcaaccgcccactccttcctctccctatagggttccctgccgctcctgcgaatcgagcaatcggagacccccgggccgccctccaatgcgagacgaccatgagcgacgatggcgaccgaacctgcccgctctgtgccgaggagatggacactactgaccagcagctcaagccatgcaaatgcggctatgatatttgtgtttggtgctggcaccacatcatagacatggctgagaaggaggaaacagtgggccgctgccctgcatgccgcacatgctatgacaaggacaggatcgtcaagatggctgccacttgtgacaggacggtggcagataaaaatgtagagaagaagcacaagacccaaaaggttaagccaaaggcagcacccacagcagcagcaacatcaaccgtagaatcaaagaagcatctggctagtgtcagggttatccagagaaatctggtgtatataattgggctacctgcacatttatgcaacgagagtgtgcttgagtgtagggagtactttggtcaatatgggaaagttttgaaggtttcagtttcccgtccgactgggcctccctctcagcaggcatcagcaaccagcaatattagtgtgtatattacttatgcgaaagaagaggaggccatccggtgtattcaggctgtacacaattttgtcttggaagggaaagtgttaagggcatgtttcggtactacgaagtattgccatgcatggctgcgaaacatggcatgtgggaatccagattgtctctatttgcatgatgtaggcagtcaggaggatagttttactaaagatgagatcatctcagcatatacaaggactagagtcccccagatggcatctagtgtttcgcaaagacgtacaggcactgtgttacctcctccaggagatgatttctctcacagtgcggtggtttcagccaagcatacattcaagaatggaacacttaataccaccagtcagcccagactttcacctccaaacagtagttctgggaggtccacgcttccaccagctgcatcatgggggcagcgtgatttgaatgccaggataacagctactggagcgacatcatcacaatctcatacaaaaccaaaatcagaatcacagagtaatccattttcaagttcttcagcaatttccagtacaaaaacaccctcttcatggaatgatgatacaagtacagcagcaaaaatgcctgaaggacagcaagtgtcagaaaaagagtctaaaaccttgcagccgtataagcctggtatttcaaaggaaacacaagctctatcgtcactggagtcatcactggacatagacttctcaacaataccttcagcttggaatgatgatgacattgtagtatcagatgggatgccaaaaggaagcgatgaaaatcaagttccaaataaaaatggtgagctaacccatccagcatctaagtcactggttttatctaagaaagacatagaaatgaacattaccagcaaaaatccttcagattttttatcaagtctagcaatatctaaattagatgtaagtactagtgatggtgaccactcagataccaatattactcctaaaagccttacttcaaatgctgtagaatgccaatcttgtcatgctgctggggagaaaatgttggaggatattggatccaaggacatcgacatggagaagatatcttctcagatatcttcagtaacattaggtggcaacgataagattcagagtatggcaggaaatcagcaaccagatgtaatgccatgcacatctattgatgtgcccatggatcagaattttggcagagaccgatctcatctcaatcttaacgagcttttattgccttcagaaaataaggatagtagtctttcttgtcaatatagttctgataagcgtcttgcttggagtttgaagatgcaaaattgtagcgttactcctttaaatgatacaatagactctgcaatgctcactgacaaaccttatagtatactgctggaaggttcagagaaaccatcatatccaccatttgttgaatttcctagtacatgggatacctcattgtggaatgatacaaaaaataacgctgcatcgacgattgacactataacttcttcacagatgcagacagggttttcttcaatcgataacacttatgccttgctaaatggaggtcaagatgggctaggtactgtatatacacatgataatgtttctgtatatacacgtggacgtggtaatgtttctggacatcctggaatgggaagtcatcagcatagagcaatgggttcagtaagaactgatagtataggaagttttgacaagaccataagcgtaaataaggatgagagcagaataatttctgatacgttgtcagagtttaatccatgggatgattcatattcgactgctaacaattttgttaggatgcttagggaatctgaaaataatgatgttcagtgcactgcgccttcatggaaatcaggaaccgggagcaaacagtccagattttcatttgctagacaggataaccaaggaaacttgttggattcatctctcagaaactgtggtattggtactgagcagaatttcagtttgctaccccagaattctcgaagaaatatttaccagaatggtcttgcattccaatctctagagaatgaattttcaaatagtaactttcctggtctattagatatggcaactactggtacatcaatgtctaaaatatctgctcccccaggattttcagcaccaacaagagtaccccctcctggattttctactgcatttccatcccaggatagtttgaaccccactcctgggtttccttctgggattttgtctcatgatgggtctatccccctttctagattcccttcattttcttctggagtttcagctcaggaagtgtctaagctccctactagactgccttctccattttcttctagattttcatcacaggatggtcctgatcccccttctagattccctttttcttctgggttcacatcacaggatgggtctaatcagttgtatggctcaacaaacccagaaaatcttctcgggggtactgttctgggtgtcgacggtaatcattatcaatctcagtttggaaggcactcaagtgacatggagtttgatgatcctgctatattagctgtgggcaaagggctgatgcctggaattggcgattcagggctggagatgaaaaatactcgtgcttcacagttgcaaccagcaagtagtgatccaagatttcagctacatgtacagccaaatgtgcagtctcatcaaaacatgagattcacagaccctgtgcaagatggtttgaaccatatgaatgataattacctggcatccagatttttagctcagaaccatggtcctctatctccttatgtgcagattccgcaacaacccagaaactcgcaggttacaaatggtcactgggacgggtggagtgaatcgagacaagggaataacattcctatgtcagacatgtccaggatattatatccaagtgaagtgaacaagttgcacatgctgggttcaaacgatatccataacagagcctttggaatgtgattgtctcctgggataatgtgtgactttgagctgacatattcgcttggggcgttttgtggaagtaactggttgcacaaaacatagtatacctgaggtggttaatggtgttgtgcttatgagctggcacacaatatttattgctattggagttgaccaaaatgaaccttagttttggtccagccagttgaaattaccaggttcattctcgtctatgatttgtgacgcttgaatgaaaagaacgagaagaacaaggcagctgaagttgaaatagatatagagatatgtctatcatgggatttggggcgacctgtgagtgaaagaagcttaggtgtggcagtttgtttttcttgtgtctgtacatgatgatattggtcggtggttgtagtataatttggtgatcggcggtggctgtattaacttgtagtggttgctcttgctccctcttgcttgtttatgttaattaagggaattgaggtgaaggtctagtgttacccatagcataataatatacgatacataactggtttctttgctagcattacttcatttgtttcaacaacagcaaaaaagaaa

SEQ ID NO: 108214 - DNA, 4485 bp, Zea Mays
caggcgcaggcacagcgcattgcccccctccttgtccagcgcccccaaccacaaggagtcaaggaacaggtcggggtccagccatccgaccccttgaatccgcttgccctcctgcttgatcccgccgccaccatctcaaccgcccactccttcctctccctatagggttccctgccgctcctgcgaatcgagcaatcggagacccccgggccgccctccaatgcgagttcctctccttccccctactcaactttccccttttcggctcgattcactacaatctcatgggaattttgccgcaccgccctctcccttcctctccaatgttgttaataatattggacccgtgcgtgcgtgcgtgtatccccgtaggccgtagcagagcacaatccggtggtatttaggactgatatagatttctgccgatagatttaaagttggatggttgatttgttagaatcgggcaaggacgaccatgagcgacgatggcgaccgaacctgcccgctctgtgccgaggagatggacactactgaccagcagctcaagccatgcaaatgcggctatgatatttgtgtttggtgctggcaccacatcatagacatggctgagaaggaggaaacagtgggccgctgccctgcatgccgcacatgctatgacaaggacaggatcgtcaagatggctgccacttgtgacaggacggtggcagataaaaatgtagagaagaagcacaagacccaaaaggttaagccaaaggcagcacccacagcagcagcaacatcaaccgtagaatcaaagaagcatctggctagtgtcagggttatccagagaaatctggtgtatataattgggctacctgcacatttatgcaacgagagtgtgagttcacatccagatttgatcaagtcgtgtgatgtgttcattgttttcaagtcgggcgacttgctggtcgttctggctgaccgacttgggtgattaatcgcgattaatcacgattaatcagacaacttgggggactaatcgcgattggtccaaaccgacttggacgattaattgcgactaatcgtgattattcggagacttgaaaacagtggatgtgtttttaaattttacttctcacaccaactctactgttattacttgtttaggtgcttgagtgtagggagtactttggtcaatatgggaaagttttgaaggtttcagtttcccgtccgactgggcctccctctcagcaggcatcagcaaccagcaatattagtgtgtatattacttatgcgaaagaagaggaggccatccggtgtattcaggctgtacacaattttgtcttggaagggaaagtgttaagggcatgtttcggtactacgaagtattgccatgcatggctgcgaaacatggcatgtgggaatccagattgtctctatttgcatgatgtaggcagtcaggaggatagttttactaaagatgagatcatctcagcatatacaaggactagagtcccccagatggcatctagtgtttcgcaaagacgtacaggcactgtgttacctcctccaggagatgatttctctcacagtgcggtggtttcagccaagcatacattcaagaatggaacacttaataccaccagtcagcccagactttcacctccaaacagtagttctgggaggtccacgcttccaccagctgcatcatgggggcagcgtgatttgaatgccaggataacagctactggagcgacatcatcacaatctcatacaaaaccaaaatcagaatcacagagtaatccattttcaagttcttcagcaatttccagtacaaaaacaccctcttcatggaatgatgatacaagtacagcagcaaaaatgcctgaaggacagcaagtgtcagaaaaagagtctaaaaccttgcagccgtataagcctggtatttcaaaggaaacacaagctctatcgtcactggagtcatcactggacatagacttctcaacaataccttcagcttggaatgatgatgacattgtagtatcagatgggatgccaaaaggaagcgatgaaaatcaagttccaaataaaaatggtgagctaacccatccagcatctaagtcactggttttatctaagaaagacatagaaatgaacattaccagcaaaaatccttcagattttttatcaagtctagcaatatctaaattagatgtaagtactagtgatggtgaccactcagataccaatattactcctaaaagccttacttcaaatgctgtagaatgccaatcttgtcatgctgctggggagaaaatgttggaggatattggatccaaggacatcgacatggagaagatatcttctcagatatcttcagtaacattaggtggcaacgataagattcagagtatggcaggaaatcagcaaccagatgtaatgccatgcacatctattgatgtgcccatggatcagaattttggcagagaccgatctcatctcaatcttaacgagcttttattgccttcagaaaataaggatagtagtctttcttgtcaatatagttctgataagcgtcttgcttggagtttgaagatgcaaaattgtagcgttactcctttaaatgatacaatagactctgcaatgctcactgacaaaccttatagtatactgctggaaggttcagagaaaccatcatatccaccatttgttgaatttcctagtacatgggatacctcattgtggaatgatacaaaaaataacgctgcatcgacgattgacactataacttcttcacagatgcagacagggttttcttcaatcgataacacttatgccttgctaaatggaggtcaagatgggctaggtactgtatatacacatgataatgtttctgtatatacacgtggacgtggtaatgtttctggacatcctggaatgggaagtcatcagcatagagcaatgggttcagtaagaactgatagtataggaagttttgacaagaccataagcgtaaataaggatgagagcagaataatttctgatacgttgtcagagtttaatccatgggatgattcatattcgactgctaacaattttgttaggatgcttagggaatctgaaaataatgatgttcagtgcactgcgccttcatggaaatcaggaaccgggagcaaacagtccagattttcatttgctagacaggataaccaaggaaacttgttggattcatctctcagaaactgtggtattggtactgagcagaatttcagtttgctaccccagaattctcgaagaaatatttaccagaatggtcttgcattccaatctctagagaatgaattttcaaatagtaactttcctggtctattagatatggcaactactggtacatcaatgtctaaaatatctgctcccccaggattttcagcaccaacaagagtaccccctcctggattttctactgcatttccatcccaggatagtttgaaccccactcctgggtttccttctgggattttgtctcatgatgggtctatccccctttctagattcccttcattttcttctggagtttcagctcaggaagtgtctaagctccctactagactgccttctccattttcttctagattttcatcacaggatggtcctgatcccccttctagattccctttttcttctgggttcacatcacaggatgggtctaatcagttgtatggctcaacaaacccagaaaatcttctcgggggtactgttctgggtgtcgacggtaatcattatcaatctcagtttggaaggcactcaagtgacatggagtttgatgatcctgctatattagctgtgggcaaagggctgatgcctggaattggcgattcagggctggagatgaaaaatactcgtgcttcacagttgcaaccagcaagtagtgatccaagatttcagctacatgtacagccaaatgtgcagtctcatcaaaacatgagattcacagaccctgtgcaagatggtttgaaccatatgaatgataattacctggcatccagatttttagctcagaaccatggtcctctatctccttatgtgcagattccgcaacaacccagaaactcgcaggttacaaatggtcactgggacgggtggagtgaatcgagacaagggaataacattcctatgtcagacatgtccaggatattatatccaagtgaagtgaacaagttgcacatgctgggttcaaacgatatccataacagagcctttggaatgtgattgtctcctgggataatgtgtgactttgagctgacatattcgcttggggcgttttgtggaagtaactggttgcacaaaacatagtatacctgaggtggttaatggtgttgtgcttatgagctggcacacaatatttattgctattggagttgaccaaaatgaaccttagttttggtccagccagttgaaattaccaggttcattctcgtctatgatttgtgacgcttgaatgaaaag

SEQ ID NO: 108215 - DNA, 101 bp, Zea Mays
gttcgttcagtcagtcgttgtgaactcttttctaatcgatcacttcattggccgtgttgtatcgatacatattggatgcagtaaacaataacatcagttag

SEQ ID NO: 108216 - DNA, 1175 bp, Zea Mays
gtgtccatcttcgaattcgagctcctccatcttccttcaccctcctctctctcgctgtttgaggagaactacctgctcctgctccctcttccgctcctccgcgctcccgctcgccatccccaggcttcatttcggacggggatggacgactacgcccgggagatgatggagctgaagacgctcgtcacccgcaccctcgagaagaagggcgttctcgccaagattagggctgagctaagagcaagcgtgtttgaagccattgaagaggaggatcgggtgatggagaatgatgatggcggtaatcctgctttgcttggtagctgtaatgaccgggctaagcaactgcatgcttcaccttcaggtaggttactaactgcacttgtttgcgaatacttggagtgggcgcaattaagtcacacaatgaaagtttacttgccagagtgtaacctgcccaaggacttctggaagaatgaactgaaagacttctctaacaaaagtggagctgaagggagcaggagtgctgaaagtggtccactgcttttagatgttctcgaagaatttgtctcaagcaaggatgggcggcaggaggatgatgagttcagaatctgatccatcactaaatgctgaacatcggagcatgaggagggcaccatcagcatcagttgggaatctgcctcctatggggagacctatctcttcttcgcagcaggcatcagatcgcagaggggggtcttcagtttccaacacaaggaaagatgagtacaactggagatacgataccaccgatgatatatctgaagaggtgctgcgggcatcgactgccctagaaagtgttcagctagaccgcaaatctcggaatctgccgacatcttggaggcattcaggggatggcgccgagtaacaagaaggctttggagctggttgcttgacttgaccgaccctgtatcatgtaatttgtatgccactcatttgtggtgcttggattgctgctatcttagaaaaagaagtggtaaactggttatgtatggttgtcttgtaacgaacaaaacaaatcaaagagttaggtgccgtttgttttacatatttgtaacgtgatgggtaactgtgatgggtaactgataacgttaaaccatgtttgtttaagtccaaccgtaatcagataccacattaaaaat

SEQ ID NO: 108217 - DNA, 2192 bp, Zea Mays
gtgtccatcttcgaattcgagctcctccatcttccttcaccctcctctctctcgctgtttgaggagaactacctgctcctgctccctcttccgctcctccgcgctcccgctcgccatccccaggcttcatttcggacggggatggacgactacgcccgggagatgatggagctgaagacgctcgtcacccgcaccctcgagaagaagggcgttctcgccaagattagggctgagctaagagcaagcgtgtttgaagccattgaagaggaggatcgggtgatggagaatgatgatggcggtaatcctgctttgcttggtagctgtaatgaccgggctaagcaactgcatgcttcaccttcaggtaggttactaactgcacttgtttgcgaatacttggagtgggcgcaattaagtcacacaatgaaagtttacttgccagagtgtaacctgcccaaggacttctggaagaatgaactgaaagacttctctaacaaaagtggagctgaagggagcaggagtgctgaaagtggtccactgcttttagatgttctcgaaggttatctgaaatatgaggtttatctcttgcgtgatcattaacagaagcaaaaatcatccttttgtttctttatgttttccgaaaaagaaaaaagggggaaagctccttgtgtagtgtgcccaattcttttgtccctactctagaaaactgtgtagtcctgtatggatcaaggtaacaaatctctggctataggtaccgctatagtcagttctagctgttttagacactacaccactatttgtacccacattcatcttagcctgttttagccaggtattagccttatgggaactctgcaactagtatggatcctcttatgcattatgttcggtatgcagaaaaggtagtatattgagttggagcaataatccttcatattattggcgtcttgcttaatcgatctgtccaaaaaattggattgtttgccacaactacaatacgcatcaaggtattgccttagaacaaaaagtaggtgttattattctggaagcttagggagataggtttatcaagatcaagcacatcttcacaatttgtaaattttctagaagctgaaatattttgagaatgtagatcaatgattcttggaataaaccagaatggatacaaattgatgtactgttctctgagtttggtcggttgttttacactgcatgcatgagatttatatttacagtgcatcatcattatcattgtactgagatccgcttatatgtgatttttttcaatctcaacttattgatgaaaggcctgtactcaaggtctccttttgatggtatgtggtgcatttatgctgctttcttcctatgacctttagttcactgcacacacaaaacttgattcttttttccagcttgactttcactgtccttgagcaagtaaagttgatttgcctattatacttcattaatttacattttttatattattaacctccaaatacagtcagtatgctctagtttaagttttggttttctacagcatgctgtggtcatttaatcatattgttttggtcagaatttgtctcaagcaaggatgggcggcaggaggatgatgagttcagaatctgatccatcactaaatgctgaacatcggagcatgaggagggcaccatcagcatcagttgggaatctgcctcctatggggagacctatctcttcttcgcagcaggcatcagatcgcagaggggggtcttcagtttccaacacaaggaaagatgagtacaactggagatacgataccaccgatgatatatctgaagaggtgctgcgggcatcgactgccctagaaagtgttcagctagaccgcaaatctcggaatctgccgacatcttggaggcattcaggggatggcgccgagtaacaagaaggctttggagctggttgcttgacttgaccgaccctgtatcatgtaatttgtatgccactcatttgtggtgcttggattgctgctatcttagaaaaagaagtggtaaactggttatgtatggttgtcttgtaacgaacaaaacaaatcaaagagttaggtgccgtttgttttacatatttgtaacgtgatgggtaactgtgatgggtaactgataacgttaaaccatgtttgtttaagtccaaccgtaatcagataccacattaaaaat

SEQ ID NO: 108218 - DNA, 1114 bp, Zea Mays
gtgtccatcttcgaattcgagctcctccatcttccttcaccctcctctctctcgctgtttgaggagaactacctgctcctgctccctcttccgctcctccgcgctcccgctcgccatccccaggcttcatttcggacggggatggacgactacgcccgggagatgatggagctgaagacgctcgtcacccgcaccctcgagaagaagggcgttctcgccaagattagggctgagctaagagcaagcgtgtttgaagccattgaagaggaggatcgggtgatggagaatgatgatggcggtaatcctgctttgcttggtagctgtaatgaccgggctaagcaactgcatgcttcaccttcagagtgtaacctgcccaaggacttctggaagaatgaactgaaagacttctctaacaaaagtggagctgaagggagcaggagtgctgaaagtggtccactgcttttagatgttctcgaaggttatctgaaatatgagaatttgtctcaagcaaggatgggcggcaggaggatgatgagttcagaatctgatccatcactaaatgctgaacatcggagcatgaggagggcaccatcagcatcagttgggaatctgcctcctatggggagacctatctcttcttcgcagcaggcatcagatcgcagaggggggtcttcagtttccaacacaaggaaagatgagtacaactggagatacgataccaccgatgatatatctgaagaggtgctgcgggcatcgactgccctagaaagtgttcagctagaccgcaaatctcggaatctgccgacatcttggaggcattcaggggatggcgccgagtaacaagaaggctttggagctggttgcttgacttgaccgaccctgtatcatgtaatttgtatgccactcatttgtggtgcttggattgctgctatcttagaaaaagaagtggtaaactggttatgtatggttgtcttgtaacgaacaaaacaaatcaaagagttaggtgccgtttgttttacatatttgtaacgtgatgggtaactgtgatgggtaactgataacgttaaaccatgtttgtttaagtccaaccgtaatcagataccacattaaaaat

SEQ ID NO: 108219 - DNA, 1192 bp, Zea Mays
gtgtccatcttcgaattcgagctcctccatcttccttcaccctcctctctctcgctgtttgaggagaactacctgctcctgctccctcttccgctcctccgcgctcccgctcgccatccccaggcttcatttcggacggggatggacgactacgcccgggagatgatggagctgaagacgctcgtcacccgcaccctcgagaagaagggcgttctcgccaagattagggctgagctaagagcaagcgtgtttgaagccattgaagaggaggatcgggtgatggagaatgatgatggcggtaatcctgctttgcttggtagctgtaatgaccgggctaagcaactgcatgcttcaccttcaggtaggttactaactgcacttgtttgcgaatacttggagtgggcgcaattaagtcacacaatgaaagtttacttgccagagtgtaacctgcccaaggacttctggaagaatgaactgaaagacttctctaacaaaagtggagctgaagggagcaggagtgctgaaagtggtccactgcttttagatgttctcgaaggttatctgaaatatgagaatttgtctcaagcaaggatgggcggcaggaggatgatgagttcagaatctgatccatcactaaatgctgaacatcggagcatgaggagggcaccatcagcatcagttgggaatctgcctcctatggggagacctatctcttcttcgcagcaggcatcagatcgcagaggggggtcttcagtttccaacacaaggaaagatgagtacaactggagatacgataccaccgatgatatatctgaagaggtgctgcgggcatcgactgccctagaaagtgttcagctagaccgcaaatctcggaatctgccgacatcttggaggcattcaggggatggcgccgagtaacaagaaggctttggagctggttgcttgacttgaccgaccctgtatcatgtaatttgtatgccactcatttgtggtgcttggattgctgctatcttagaaaaagaagtggtaaactggttatgtatggttgtcttgtaacgaacaaaacaaatcaaagagttaggtgccgtttgttttacatatttgtaacgtgatgggtaactgtgatgggtaactgataacgttaaaccatgtttgtttaagtccaaccgtaatcagataccacattaaaaat

SEQ ID NO: 108220 - DNA, 312 bp, Zea Mays
gggacaatcacgccattataataataacttttgatttaaaatgcaattgagacgcacaactaagcaaataagcaggaaaccgtaccacaaagtattatcatattacatagtgttatttagtcaacaacaaacatggtttactgaccaaagttttttaaaagaaaagaaactaatgaaaatgtgtagcagactgggtaattgtacgatctcatatgaaatgagttaaaaaactgtgtaagaaatatctagggaacaccagagcatgctagcacaacactacatcaagcaagtgtggtgttatagtaccgtaat

SEQ ID NO: 108221 - DNA, 622 bp, Zea Mays
ttttttccttcattcggagtaatttatgtcatgtcattagggcataaaattaacagatttcacaacagccactcagagcacacacattgagtggtccaactatttccatctaggcaaactagcagagtaactgataggactacaacaaggggcagcaggctaagctagatagttaggaaagagcacctgcacctggctgtctccattagtggatatacgggacctggtactgtactgggtagccattgccgtaataaggtccatgggcaggttgcatcgggtaagacgctgaactcatcattggaggaagatgagcctcagcaccatacacaaactgcctctcgtaagggttggagggatgcctctctggggttgctgggtagaagctcttgtcagcaaagcctgtagcacggggtgcaaaggtcgatccattggcacgaggcctcttggactgtggcttggctgcttcaacagccctcctcttgtctgcctttgctttctctagctgcaaaacccttttctgaagtgggtccacagggtactgctcctcaagtttatgatcttcaatgcacttaatgacagatttcagtgcacacaactcacgctcattcatctcattctg

SEQ ID NO: 108222 - DNA, 722 bp, Zea Mays
gtggaagatatcagaagaaacataacagaataatatgatagcggcggcgcggtctacgcgttctagactcccctctgaccccctgacgatagcgtcgaagatgtccacaaccagatccgcgtccctgctcgcgctgctcctcctggtctctgcgaccgccgccgctgccgggacgagcaagggccgcgcgggggtgcggccgtgccaggatctggcgacgcggggccagtgcgcggcgagcggcgggtgccggtggtgccgcagcgaggcgctcgacgacatgtgcttcgaggccatcgaggcgtggcgccttccgcgccaggtgttctcctgcgacccaccctccggtgccgcccacgcccgcttgaactgaagtaatgccgcggccggccgccggcgaagctatgttatgctatcgccttggtcgggatcgctcgatctgatctcgtttgtcgccaggcctccgttgttttctttgctggatctgagatatacaatagcgtgtttcatgctgctgcctgtctggtctgcggttctttcattcattgattgtgctgcccatcatactctcgattctcaaagtccaatggcctgtcatttgtattctcaaaattatgttaatgagcacgatcgtaccattccagagtcttgaacagccgtgatgtccaaatgatgcacgtgatcatcttgacatgcgggctgagagaaaaaaaaaacaactt

SEQ ID NO: 108223 - DNA, 1704 bp, Zea Mays
acgacgggactcggctcccctacggcccacgccacgtcaccgcggtccgcacgcgccccacggcttccgccgcctcctaaccctagaatcttcgagaagcacccggcgaagagcgcgctgccacggcgctttccggaaacttcttggagagagagagagagagagagacggccccgcagcggcggaggcggagatgggggcgtcggatctagaccggcagatcgagcagctgaagcggtgcgagccgctcacggaggcggaggtcaaggcactgtgcctcaaggccatggagatcctcatcgaggagagtaacgtgcagcgcgtcgacgcccccgtcaccatttgtggagacatacatggacagttctatgacatgaaggagctgttcaaagttggaggtgactgcccaaagacaaactatttgttccttggggattttgttgaccgaggattttattctgttgaaacttttttgcttcttttggctttaaaggttaggtatccagaccgtattaccttaatacgaggaaaccatgagagcagacagatcacacaggtttatggattctatgatgagtgccttcgcaaatatggctcagtcaatgtctggagatattgcactgatatattcgactatttaagtttgtctgcacttattgagaacaaaatatttagtgtccatggaggcctttctcctgctatcacgacactggatcagataagagtaatagaccgcaagcaagaagtacctcatgatggggctatgtgtgaccttctatggtctgatccagaggacactgtagatggttggggactaagtcctcggggtgcaggattcctctttggtggaaatgtggtctcatcatttaaccattcaaacaacatagattacatttgtcgtgcacatcaacttgtcatggaagggtataaatggatgttcaatagcaagattgtaactgtatggtctgctcctaattactgctacaggtgtggcaatattgctgcaatcctagagctggatgagaacctgaataagcagttccgcgtatttgaagctgctccacatgaatcaagaggtgttcctgctaagaggccagcaccagattactttctgtgatgctacacagcgaacgcttgagcttactgtgctttcaagcgctggacctcatgttgcaagaagagctcaggccctacagctttccagccaggaggtggttttcaggatgtgtaaattgagtgtcatcttctcccttcaggtccatgatttgtaagagagttggattttggcatccagttttttcacagaacatcacccatttgagctggagaaatacgcccttgcgaaggggtttcatgtgatgtgctaaaagtacacgttgtaagatttttttgcgattgcataccccctagaaaaaccgttcctggaatatgtggcaatcaggaaatgtgtcgatgctctggaaagtgtaggagatttttgtagtagtcatttgcgcgtgctgttagggactagggagcatgtggtcaggggacactagcactagcttgtcggcatgcaatggtgtattgtaactgtctttatgcagcatctctaattcaaatagctaactacatttgatgtcttcttctgagctgtcgtgttcatataaattcgttttattggatataaaatatatgatttaataatgacacttagatgttcac

SEQ ID NO: 108224 - DNA, 1619 bp, Zea Mays
acgacgggactcggctcccctacggcccacgccacgtcaccgcggtccgcacgcgccccacggcttccgccgcctcctaaccctagaatcttcgagaagcacccggcgaagagcgcgctgccacggcgctttccggaaacttcttggagagagagagagagagagagacggccccgcagcggcggaggcggagatgggggcgtcggatctagaccggcagatcgagcagctgaagcggtgcgagccgctcacggaggcggaggtcaaggcactgtgcctcaaggccatggagatcctcatcgaggagagtaacgtgcagcgcgtcgacgcccccgtcaccatttgtggagacatacatggacagttctatgacatgaaggagctgttcaaagttggaggtgactgcccaaagacaaactatttgttccttggggattttgttgaccgaggattttattctgttgaaacttttttgcttcttttggctttaaaggttaggtatccagaccgtattaccttaatacgaggaaaccatgagagcagacagatcacacaggtttatggattctatgatgagtgccttcgcaaatatggctcagtcaatgtctggagatattgcactgatatattcgactatttaagtttgtctgcacttattgagaacaaaatatttagtgtccatggaggcctttctcctgctatcacgacactggatcataagagtaatagaccgcaagcaagaagtacctcatgatggggctatgtgtgaccttctatggtctgatccagaggacactgtagatggttggggactaagtcctcggggtgcaggattcctctttggtggaaatgtggtctcatcatttaaccattcaaacaacatagattacatttgtcgtgcacatcaacttgtcatggaagggtataaatggatgttcaatagcaagattgtaactgtatggtctgctcctaattactgctacaggtgtggcaatattgctgcaatcctagagctggatgagaacctgaataagcagttccgcgtatttgaagctgctccacatgaatcaagaggtgttcctgctaagaggccagcaccagattactttctgtgatgctacacagcgaacgcttgagcttactgtgctttcaagcgctggacctcatgttgcaagaagagctcaggccctacagctttccagccaggaggtggttttcaggatgtgtaaattgagtgtcatcttctcccttcaggtccatgatttgtaagagagttggattttggcatccagttttttcacagaacatcacccatttgagctggagaaatacgcccttgcgaaggggtttcatgtgatgtgctaaaagtacacgttgtaagatttttttgcgattgcataccccctagaaaaaccgttcctggaatatgtggcaatcaggaaatgtgtcgatgctctggaaagtgtaggagatttttgtagtagtcatttgcgcgtgctgttagggactagggagcatgtggtcaggggacactagcactagcttgtcggcatgcaatggtgtattgtaactgtctttatgcagcatctctaattcaaatagctaactacatttgatgt

SEQ ID NO: 108225 - DNA, 261 bp, Zea Mays
tggtgctcgaagattccgatctgctcctgaaatcggtcgtaacttgtgctaaataacatgcatatcatttttgcatgcacggttttccatgtttcgagtgacttgcagttcaaatgtgaatttttcgaagaaattcaaataaacgaactaaatctaatagttatagaaaacacttttataattgtgccaaaatggtacatgtaggtctacatagtgtaggaacataccacaaaaagtttggttggcaaaataaaaaataaa

SEQ ID NO: 108226 - DNA, 1050 bp, Zea Mays
acaaaagccaattgatcttggtggtctaggggtgcttaaatcttgaatacatgagctgggcgctgcaaataaaatctgatatggataaaccttggaggacttgacattcctgtacattttaatgcttctgcatcgtttgctattgctattgattcccatgtcagcagcggcaggaacactttattctggagtaatagatggttgctggggtatcgactaccgagtggaggatcttgcgcttgctgtggttactgcagtaccacagataattcaaaagcgaacggttgcagaagcacttcatgatgatcactggataagtgatgtgcatgaagggctgtctatggtgggcatgtatgaatacctccagctcagggatgttcttcggtacaccatgctaaccctagtggaggacctgcatacttgtagatttgagacctctgggaacctttcctccaagtcagcttaccatgcagtcttcaaaggttcaatcccttttgaaccatgcaccgcctctgaaaaacttgggctgtagctaaatgcaatctttctctagttggccatcagaaacagatgttggacagcagaccgtttggcatagatgtctacccatccaaaccaatgcactctcactgatgagaacactcaacaccttcatctcatgtgttctttcccaggatttttggttcagagttctggaacaattgggattacagacatgtgtaccgagtagtgctgaaccaactttcacaggttggtggcataagtttatcaagcgtgctccaaaggagaataaagtttatcatgggtgctccaaaaaagaataggaagggcatcaacgtggtgattgttttgggagcttggctactttggaaacatagaaaatcagttgtttttgaaggaaccaggcaaccagcataaatttgggtgttatactgttattctccagtccttcagggaagaacatcacctttgcagctttgctgctttgcgggagtgtgaggagtgtgaggtctccaatctttatgtcaaggtgttgtgataactgataac

SEQ ID NO: 108227 - DNA, 593 bp, Zea Mays
ttcttttttatttatataaaataaaagatgagcattctaagtaattagcagggagttacataaactccgtccagttggccgttatatatacatacatacagggatagtacaagcatggcgatacacgcccacttggttaattagaaatcacaacaatcgcggatacagttattagaatcccgctctctattcgccccggtcaagcctgcagccagtgactgcaagcaggaggcaccattaccaagagcttctcttcgggtcactggcgcgcgccctcatggaccttcgatctggatgctgctgaatgaatgggcgagaccgccgcttcccctcaaattctggagctctgctttgatcgtctccgcaatcttggcctcctcaaggccaggcgagggcacatccacgtggaccgagccttgttttctgggaccaacggagtcctgattcagagattgctgctgcttcatgtagttgtacagctgctggtggaaagggtggtcgtaggagtagcaatctactccatccagcgagtcgctggatgaacctgacccttctctcttgcagaagtgcggaagtgactcgtagtccatgac

SEQ ID NO: 108228 - DNA, 286 bp, Zea Mays
tcgtgccaggaccattcacactccagtcccagttcatgttcgacatgcttaccaaaatgctgcaattgcggcaggtcatcgtgcgtcagggcgaacttccatacggcgttaacttgttgcgccgtttcagccagagaagcgacttgtgtgaaagtcggacgctgttccggcggcagggtttgcgcccagttagatgtgcgaatgacatgcccggtcgggtgctcatagaccattgcatcatcgacatacatcagaccgtgaatgtggtgttcattcagcaccccca

SEQ ID NO: 108229 - DNA, 2227 bp, Zea Mays
attgtagatttctgctgtgggtcaaatgattttagccggcttatgaaagaaaaactcgacaaagttcagaaaaagtgccatttcaagaattatgatcttatccaaccacagcatcacttctgctttgaaaagagggattggatgactgtgcaaccaaatgaactgcctcgtggatcccaactaattatggggcttaatcctccttttggagtaaaagcaagtcttgcgaacaaatttattgacaaagcattgacattcaagcctaagctcattgtactaattgtccctaaagaaacaaaaaggttagataagaagaagataccttatgatttgatttgggaagacagtgagtgtcttgctgggaagtccttctatttgcctggttctgtggatcttaatgataatacagttgaagggtggaatgcatccgcgccacccctctatttgtggagtcatcctcattggacaaagaagcacatgcaagtggctgaagagcatggtcacacttgcatggggaagatagcttcccatgttgaaaagagaaatctgtcagatgatctgcccgtgaggaaacaatctgaggctgcaaacaaatggaactccagatcagggaaagagactacatgcaatgacagaaaggacaatctacttgatgatgttactgctaagaagcaagcaggacctgaagaagaaaaggaaactctagggaagatggaccaccatgtgaaaaaggctactataccagatagccttacagtgaagaaacaaactgaagcttccagcaaagctctctctcattgtggaaatgatagaaagattggcaggtacagcagcaggaaatatgatgactggagaagtaagcggacacctgatcacgaagagagcttcccacctgaaaagcaagtggaagttgcatatgaggagacaaaagttattattccaagcaaaaagattactcataacgaacaaagcggtgcttgccgtgaaaatagaaagaattcttgtgtggaggaaaccaagaacgtggagtacaactatgagcagcagactgcagcagggatgaggttcagagagggagaggattctgacatgagtatctcacccccctcgagaccagttgaaccctttgatatgatagctcaccccattggctctctgacaaaagaaccttttgaccctgtgctcaatagaggggctactcatcaggacagttatgcagtaaccaaagaggaatacctgggtcaatttaagaggaaaaacgaccgtacctttactgacattgatgatagctcaaggatgaggggctccagcatcgaagaagtgaccaggccctatattgctgctccaaccagtgatccctacagcttgcggtatagaggagatggcagcttctacaggcatccgagctcagaggatttaaacactacaggcatcagtgcaggatatggacaaattggtggtgacagttacccacaagcaacaggctcgcaaacacataatactagaatgcatggtggaacaagtgatgataattacctgtcggcgagatactcccttggatattcaggttctcgctttagccaaccagcttcaactgttcccgcttttgggctctcaggtgcaagttcacaacgaggctcagtaatagacaagtattcctatgggctctcgggtcccactggaccacaggattctggtattaacagatatgctccaccggacgacggaacgagcacaagatccaagagctccttggctgaacaacagtacccgttcggacaatctggctcttccggtggcgagtggcctcatatctgatcgctggaacttgttgtcgaagtttttttttcaaggcaaaaactgtgggaagttctccacggtacttcattttcatttttagaggggattacatgttatcaaaatcatgcagcttttgacctgacctgggtgtaaattggagtaaaaccacaagcatctatccatgcggggctggtgttaaaaagcaaagttgtttcttataaaactgtctacagcagtctatccatgatttacccaaaattactgttttgtactgtagactgcattgtttgcataatgaagtttgaatatagatgaggatgggtaagagatagactaaggtagtttcatcatacatataagagttgtaatgacatataagtttgaatatagatgaggatggctatccgaggacatgccctttgcacag

SEQ ID NO: 108230 - DNA, 537 bp, Zea Mays
ccaaactgatttggcaaaagggcaaagcaatgccaaatggatacatgtctccagtggcccattgcataaagcgcaatgaacttggtgaggccaaccccttttttgtaaattgtccgcggcgagtactttctcccttgccattgtccatgcaaaaaccttgcacttgttttcagcatgtgctctctagattaggctagaccggaaaggtccgaaggagcctctaaactggatacggaatgctgagcaagtggagtatgttccgtctgtcgtccatctccagagaatggagtccctcatgccaggtgtaaggtgggtgtcctgggttctgttccaaagggagacaaactcatgtatctgggctgcagtggtgatcccgcctcgcagtgcattgatccagtgataagctcggagctccatgtagactgatccatttttcatcttggtcatcgcaaagagactaggagctaagtggcgtggcgcctctccatcaagccaagcgtcatgccagaaacgacatttatggccatctccaacgac

SEQ ID NO: 108231 - DNA, 249 bp, Zea Mays
atgagggcggcggcgctcagcacagcagtcagcactcagcagtccatctccagtccagcaagcagaggagggcgtccagcaagcagaggagggcggcggcgctcacagcagcagcaagcagaggagggcggcgctcagagcagcagcaagcagaggagggcggcgctcagagcagcagcaagcagaggagggcggcgacgctcagagcagcagcaagcagaggagggcggcggcgctcagagcagttag

SEQ ID NO: 108232 - DNA, 2256 bp, Zea Mays
atggtgatgtcggagtcggacgacgacgacgacgagccccagctcaacgcggtggagagctactacttcgttgactccacgaacgacaacgagcctgtctgcttctccactctgcctttcctgttcggggacactgatgatcttcctgactgcaagaaaaggctggtgctgcgcgggactggtggtgacccgggcgtcaaggtgtacagtgaggtggtggcctggagtctggggctcgaggggaagcaaccccagtttgcggtgctcacagcagaaggcagacgttgggttcgtctcgttaggcccttgaacagctacgaggagatgatcaggactgtgctgatcacagcgcatatgctgcattttctcatgaggaagcctcatgagccagagagaacgctgtggaaccacctttgcaaagttttcaacaagtttgacgttagaccctcagaggacgatttcaggaaccacatctcactgatgaagcagtttgtggcaaaagatcctatcttagcaaaatcagaggggagtctcccccatgagtggggtctgacgaagggaaaaactaaagctcagttcttgcttagctacgttatgcctagagctgtgttatgtaaagttgtaaacattgtccttaagacgattttgcgagtatttgttgaaggaaaatctggaaaaattttcactgaggctggtgcagaccatattgatgttaagcagccattcataactgatgatgaggacatagatgagatgattgtggaagatgccgataatgaatctgatgaagaggaggatggagatttgtttgattcaatatgtgctatttgtgacgacggaggagacatattatgctgtgatggtccatgtatgcgctctttccatgcaaaagaaggaagtggtgaagactcctattgtgatacccttggctacactgaggcagaagttgaggcaatgaaattatttctgtgcaagaactgtgagtataagcaacaccagtgtttcatctgcggagtgttggagccttcaaatggagcagcagctaaggtttttttatgtaacaatgctacatgtggacacttctaccacccgaaatgtgttgcccagcaacttcatcctaataacattgatgaagcctcagaattggagaagaagataacagatgggttttcatttacatgcccaattcactggtgctttcattgcaaaggtttggaggatagaacacaagggcctttgcaatttgctgtttgcagacgctgtccgaagtcatatcacagaaagtgtttaccaagagaaatttcctttgatgaaattgaagagaagggtgtcatcatacgggcttgggaattatcaaaaatgattttgatatactgcctgaaccatgagatcgatagtgaacttgagacacctgtcagagatcatataaagtttccaaggattgaaaaaccacttcaatttgtaaagaagggagctaacttgttgcctaagaagaaaaagaggacttacagtgagtcaattcttgagcaacctcccaaagatactgtgaaaatgaaaagcaaggttcgcatgcaagaaagcgagcaaaacaaacacgacaccagagaagtttctgtgaagagtttcactcaaaacgttgttgacacacctgtaaagaaaaaaggcaagttgaaagagaataaacagttgccttatgtggccaaggatcattttgtaagcagtccaaaatctgtgaaagagcaagaacaagagttggtacctttgcccttatctggaatcaggaagagttcatttcctaaagtggacagtgaaattgaaaagagggtgattagcatactgggaaatgaaatctcttcgttgacaataaaagatgtaacaaggaactgcagtttgccatcaactcatgtatactctggcagaccaactgacaagatgccactaggaaaaattgagcgttctgttcaggctgtagaagctgctttaaaaaagctgaaaaatggaggtagtgtcaatgatgctaaagcagtatgtgaacctgatgttttaagacagcttgcaaggtggcataccaaactcagagtatatatatcaccttttattcatggcacaaggtatagttcttttggtcgacattttacgaaggtggagaaacttgttgagattgttgatagacttcactggtatgtggaatctggtgacatggtatatttttttttctggtataagcagccatcaattgacgtttccctcttttga

SEQ ID NO: 108233 - DNA, 2457 bp, Zea Mays
atggtgatgtcggagtcggacgacgacgacgacgagccccagctcaacgcggtggagagctactacttcgttgactccacgaacgacaacgagcctgtctgcttctccactctgcctttcctgttcggggacactgatgatcttcctgactgcaagaaaaggctggtgctgcgcgggactggtggtgacccgggcgtcaaggtgtacagtgaggtggtggcctggagtctggggctcgaggggaagcaaccccagtttgcggtgctcacagcagaaggcagacgttgggttcgtctcgttaggcccttgaacagctacgaggagatgatcaggactgtgctgatcacagcgcatatgctgcattttctcatgaggaagcctcatgagccagagagaacgctgtggaaccacctttgcaaagttttcaacaagtttgacgttagaccctcagaggacgatttcaggaaccacatctcactgatgaagcagtttgtggcaaaagatcctatcttagcaaaatcagaggggagtctcccccatgagtggggtctgacgaagggaaaaactaaagctcagttcttgcttagctacgttatgcctagagctgtgttatgtaaagttgtaaacattgtccttaagacgattttgcgagtatttgttgaaggaaaatctggaaaaattttcactgaggctggtgcagaccatattgatgttaagcagccattcataactgatgatgaggacatagatgagatgattgtggaagatgccgataatgaatctgatgaagaggaggatggagatttgtttgattcaatatgtgctatttgtgacgacggaggagacatattatgctgtgatggtccatgtatgcgctctttccatgcaaaagaaggaagtggtgaagactcctattgtgatacccttggctacactgaggcagaagttgaggcaatgaaattatttctgtgcaagaactgtgagtataagcaacaccagtgtttcatctgcggagtgttggagccttcaaatggagcagcagctaaggtttttttatgtaacaatgctacatgtggacacttctaccacccgaaatgtgttgcccagcaacttcatcctaataacattgatgaagcctcagaattggagaagaagataacagatgggttttcatttacatgcccaattcactggtgctttcattgcaaaggtttggaggatagaacacaagggcctttgcaatttgctgtttgcagacgctgtccgaagtcatatcacagaaagtgtttaccaagagaaatttcctttgatgaaattgaagagaagggtgtcatcatacgggcttgggaattatcaaaaatgattttgatatactgcctgaaccatgagatcgatagtgaacttgagacacctgtcagagatcatataaagtttccaaggattgaaaaaccacttcaatttgtaaagaagggagctaacttgttgcctaagaagaaaaagaggacttacagtgagtcaattcttgagcaacctcccaaagatactgtgaaaatgaaaagcaaggttcgcatgcaagaaagcgagcaaaacaaacacgacaccagagaagtttctgtgaagagtttcactcaaaacgttgttgacacacctgtaaagaaaaaaggcaagttgaaagagaataaacagttgccttatgtggccaaggatcattttgtaagcagtccaaaatctgtgaaagagcaagaacaagagttggtacctttgcccttatctggaatcaggaagagttcatttcctaaagtggacagtgaaattgaaaagagggtgattagcatactgggaaatgaaatctcttcgttgacaataaaagatgtaacaaggaactgcagtttgccatcaactcatgtatactctggcagaccaactgacaagatgccactaggaaaaattgagcgttctgttcaggctgtagaagctgctttaaaaaagctgaaaaatggaggtagtgtcaatgatgctaaagcagtatgtgaacctgatgttttaagacagcttgcaagaccaaactcagagtatatatatcaccttttattcatggcacaaggtatagttcttttggtcgacattttacgaaggtggagaaacttgttgagtttgttgataagtgctactgtgctatcctcatggaaaatataatttcaagactcgagaataagatatgaatgccgcacgtgttagggtctgtttggataaaagggctaattgctaggtgctaaaaattagctctagtgcatgtgcatccaaacaggagatctaatagctgaactatttttttttggctaagtctttaactagttgttagtcaactaggtagccaaccactgattgactatcagtcattcccttcatataattccatatcattatacttcattaatgtaataatgttcttctttc

SEQ ID NO: 108234 - DNA, 1030 bp, Zea Mays
atccgccgcgcgacgcgtctcgtcagcgccgccagccccgtcagaatgtctaagaagagggggctttcgttggaggagaaacgggagcaaatgcttcaaatattttatgagagccaggaattctttctgcttaaggagctagagaaaatgggtcctaaaaagggagtgattagtcagtctgtgaaagatgtggtgcaaagcctggtggatgatgatcttgtcttgaaggataaaattgggacttctgtgtacttttggagtcttccaagttgtgctgggaaccagctgaggaatacttacaacaagctggaatctgacctttcaaactctagaaagcgttacatggaccttgttgaacacagagataacttgaaaagaggccgggaagactctgaagagagggaagctgctttggaggagctgaagactgtagaactacaccataagaaactcaaggaggaactggctgcatatgcagatagtgatccagctgcagtagaagcaatgaaggatgctactgatattgctcattcagcagctaacaggtggacagacaacattttcactttgcaacaatggtgttcaaccacattcccagaagcaaaagaacaactggaacatatgtacagggaggttgggatcacagaagattttgagtatttgcagtgatgtccaacagcctattacagcgtcgaaaatgtgccacggaatgttggatcgatcacagatgcaagtttatcatgttggtgctgtgagttatctgcagtaaatagattttgtatatttcacatgcttggcaacaatgaccgatatggccacatgcatgttagggactacttttcctagatgctaccaagtggctagactataccgaaggctcctgctatgcttgaaaactttaccgaaggctcgattttattggatgtagtggctagactatatcatgaaatgtatatttctttgctgatggaaagaacaacaatagcttggcatctggaaataaaaatactgccctaaaaatagctgaaaa

SEQ ID NO: 108235 - DNA, 690 bp, Zea Mays
atggatggtacaggtgacctcttcaaggacgcggccttcagatctaagtgtagttgtaggttgtctaagaagagggggctttcgttggaggagaaacgggagcaaatgcttcaaatattttatgagagccaggaattctttctgcttaaggagctagagaaaatgggtcctaaaaagggagtgattagtcagtctgtgaaagatgtggtgcaaagcctggtggatgatgatcttgtcttgaaggataaaattgggacttctgtgtacttttggagtcttccaagttgtgctgggaaccagctgaggaatacttacaacaagctggaatctgacctttcaaactctagaaagcgttacatggaccttgttgaacacagagataacttgaaaagaggccgggaagactctgaagagagggaagctgctttggaggagctgaagactgtagaactacaccataagaaactcaagaggatgctactgatattgctcattcagcagctaacaggtggacagacaacattttcactttgcaacaatggtgttcaaccacattcccagaagcaaaagaacaactggaacatatgtacagggagtatgctgcctgacttccagttgattaagtatgtttcattatgcaatgtgatttacccacaagtgtcaaggacattggtgcctctgtgtctatag

SEQ ID NO: 108236 - DNA, 295 bp, Zea Mays
agaagaattaagcaagatcgagttaactcatctagttacagggcacagtgtaatgtcgatcgcttaattagtttgatctgcaaggtgatgatgcacaccgaagaaaggattcttcttcggatgtgtgacgacttgcaactttttttaaggtgtacatacagtgctagcaggggtagagaagatatttaggaactataagaatagtggagaccctgcttgtttgtttgggcttcccttttgttcctaacttatgcaccaacaacggctgaacatcgtgtatctcctctgaatataa

SEQ ID NO: 108237 - DNA, 1550 bp, Zea Mays
atccctaggtacggccactacaacagtgcagagcatctgaagcgtccgattgtctttgtctccatagcagcgttggtcttcgaggtgagaagtcagcgaaggcaaatctgaagtctgcttgattgcttgagtcagatctgatccagtctttcggcaccgagaaggcgagaaccgaggaggagaacatggcgggtgacggcaacggccgcgcggagcttccccggatcgcggtgatcggcgccggtatctttgcgcgcacgcagtacatcccaaggctccgcgagatcgcgcacctcgtcgtcctcaagtccatctggagtcgcacccaggaatctgcaaaggcggccgcggagcttgctcgtgacttcgcgcctgatatcgagtgcaaatggggtgatgcggggctggaggagatcatgggagatagttcaatcatgggcgttgctattgttctcgctgggcaagtccaggttgagctttccctaaagatgctcaaggctggaaaacacgttattcaagagaaacctgcttctggatcaacaacagaagcagaaactgcactgtcaatctaccactcatttcaaaacctgttcccgcataaacccatttgggcagtcggagagaactacagatttgagcctgcctttattgagtcaagcaagctgatcaatgatattggggatatgatgcacatccaagttatcatcgaagggtcaatgaacagttcaaatccatatttcaatagcacctggagacggaattttgtgggtggtttcattctggacatgggtgttcacttcattgcaggactacgaatgcttgtaggttcagaaatcacaagcgtatcttctatctcccgtcatgtggatatggctttgccgccaccagataacatatgttccctcttccaactggaaaatggatgcgctggtgtctttgtgtttgccgtcaattcaagatcaccaaagatattatggcgggtcgatggaacaaaaggaacaattcaggtagaacgtggagttgatagtggaaaacatggctaccaggtgttattctctggtgaaaatgggcagtgccagaagacattttacccgttctgtggagtgaatgaagaactgaagacgtttgtccatgacatgttggaagctggcaaagatggagatcacaaggctgcaccccgtggttcttatgtcgaaggcgcccgtgatgttgccgtgctagaagccatgttggaatctagtgcgaagcaaggagccccagttcaagtgaagagattctaacagatccgaaatgtcacataaaagagactacgtttcttctagggtgatttgtccattggatcatatattttcggtagtaaaatgaacattgttccaaattcatgtacataccgtcgaggttatatattaaatatatatgtgaaaaaatgacatacattagaaccaccattcctacactcgtaaaaatcatgtaccttttcttatacactagatatgttgccctattagatattataaatattagtttttttacgggaaatacgaaagaga

SEQ ID NO: 108238 - DNA, 962 bp, Zea Mays
cgctatatatacctataccccccgacaggagagggaacatagcgaacaaacatcgagtacagtcggctaggtaatctggtggtacgacgacatggcggccaccagcagcaagtcgtcgtcgtcctcgagctcggcgcagcgggcagctgccgcactgctcgtggccgccgccgtggcggtgtccgtcctggtggtgggcgcggcggcggtgtgcgacatgagcaacgagcagttcatgtcgtgccagcccgcggcggccaagacgacggacccgccggccgcgccgtcgcaggcgtgctgcgacgcgctggcgggggcggacctcaagtgcctgtgcggctacaagaactcgccgtggatgggcgtctacaacatcgaccccaagcgcgccatggagcttccggccaagtgcggcctcgccacgccgcccgactgctagcagtgtgctagccaagccaagccaagcaggaaggcccccggcattgctagctgtacgtgtctgtgtgtgcatctgcagcagggtgcaggcaggggcccgtacgaagccaaacactactggatctctgcacgtacaacgaagcgttattattatagggacctggcgccgtctatcgatctggcattcactgattcacatgctatgtttcatgtttcattgcgtgccggccggcactcgtttggggtgtttgtccctaaaagctgcttcagactactgaatacccaaattttcaatccgtttctacgacaaccgctttaataaaaatcgtttaaaatcaatgtaaatatagaatccgtgacttcctatattctaaagttaatttatagacctctttatcttcttccatacgtaattaatatacagaaattttattcacagttaaatttcaaaaataagttcgttagagaaaacctgaaccaaacaaactcttcgttgcagcacagagaaacacacaaaaacggct

SEQ ID NO: 108239 - DNA, 935 bp, Zea Mays
cgctatatatacctataccccccgacaggagagggaacatagcgaacaaacatcgagtacagtcggctaggtaatctggtggtacgacgacatggcggccaccagcagcaagtcgtcgtcgtcctcgagctcggcgcagcgggcagctgccgcactgctcgtggccgccgccgtggcggtgtccgtcctggtggtgggcgcggcggcggtgtgcgacatgagcaacgagcagttcatgtcgtgccagcccgcggcggccaagacgacggacccgccggccgcgccgtcgcaggcgtgctgcgacgcgctggcgggggcggacctcaagtgcctgtgcggctacaagaactcgccgtggatgggcgtctacaacatcgaccccaagcgcgccatggagcttccggccaagtgcggcctcgccacgccgcccgactgctagcagtgtgctagccaagccaagccaagcaggaaggcccccggcattgctagctgtacgtgtctgtgtgtgcatctgcagcagggtgcaggcaggggcccgtacgtacgtgtctctttctctctctcatcttgtcaccgtacctatctagagtgtgtgtgttcgtactaattaaaatgttcttgtcgtcgtcgtctgtgcatgcatgtaccatgtcgtcgtgcatgtctattatgtgtgtgtcgtcgtgtcgatcggtacgtatagatgcctgttgttagcatgtgtgtcattacctagtcgtgtgtagtgtatgtatgtgcttgccgggcaaaagttgcatctagctaaacagtagtattacttttgtttgtcttcgatctcaggtgaatttgtatctgcaggaagccaaacactactggatctctgcacgtacaacgaagcgttattattatagggacctggcgccgtctatcgatctggcattcactgattcaca

SEQ ID NO: 108240 - DNA, 774 bp, Zea Mays
acgcgtccttctctctggaattttcagccgccgcccctcccaaatccccttctccctcacgtctctttctctccatccactgccgttctcatttcttgcacgcagcagcaacacaagccgcaccctcctcctcctgcggtaggtcggcgaccccattcccctgctcctctcatggctgcctctcctccatcccctctccatcttctcccatacaagaagccatggcgcccctcctccccttgttttccatggaaaccccaaccatctactcctccccatggctgcgcctcccgtaggttttcgtacaatcgcagcagcagcggatatggaatcatctcaatgtcgtgcccacagcatgctcaatgaaatgtcgcagcgagttacacctagatctgtgcagccctggcccgcgatgtcgtgacccttggtgagatcccacaatatttctcaacttgtttcctcacccaacgtcgttccttgctaataatcgatgtatatgtgtggatattgtgaggagaaatctgaggtcaattagtgaagaagcgaggcccgtatgtattgctcgtcaagtgttcagtcgaagacttcaatcaaatgtcgtcgtggttcgtgtgatgatcgagtcaaattgcaatatggtgagttgattcgctatttttgttcttagttcgatgatgggattagcagctatattgttgatgaacaagtcatgtttgaattgcagatttatgtgaatagtgtattggtttatatatatgcgatgttacatggcga

SEQ ID NO: 108241 - DNA, 779 bp, Zea Mays
acgcgtccttctctctagaattttcagccatcgcccctcccaaatcctcttctccctcacgtctctttctctccatccaccgccgttctcatttcttgcacagggcagcagcaccagccgcgccctcttcctcctgcggcaggtcggcgacccatgcccctgctcttctcatggccgcctctcctccatcccctatccatcttctcccatgcaagaagccatggcaccccttctccccttgttttccatggaaaacccaagaacctactcctccccatggctgtgtctcctgtaggttttcgtacaatcgcagcagcagcagatatggaatcacctctatgtcgtgcccacggcatgctcgatgaaatgtcgcagccagttacacctagatctatgcagccccatcccacgatgtcgtcgacccttggtgagatcccacaatgtttctcaacttgtttcctcacccgacggcgttccttgctaataatcagtgtatatgtgtggatattgtgaggagagatctgaggtcaattagtgaagaagcgaggcccgtgtgcattgctcgtcaagtgttcggtcgaagacttcaatcaaaggtcgtcgtggttcgtataatgatagagtcaaattgcaatatggtgagttgattcgctatttttgttcttagttcgatgatgagattagcagctatattgttgatgaacaagtcatgtttgaattgcagatttatgtgaatagtgtattggtttatatatatgcgatgttacatggtgatgtta

SEQ ID NO: 108242 - DNA, 2180 bp, Zea Mays
accggccgcccgcaaggaatggcggcagcgatcatcatgcctccacatacagacccaccacggccagccacagcgagtaatcccaccgctcccgcttcccatccccaacgccagcgagacgccccgacaccgtccctacgcgcgctcttcctccgcgccgtggacccttcccgcccctcgtcatggtccacggccgtcgctgatcttctctcctccggtgaccccgtcgccgcgctggccgtgttcgctgccgccctccgagccaaccccgctgcgctccggccggccctgcccccagcccttcgcgccgccgccgccgccacctccctctccgccggtcgccagctccacctcctcgcgctccgctcgggcctcttcccctccgacgcctactgcgcctccgccctcctccacatgtaccaccattgcttccgtcccctcgatgcccgcagggcgttcgacgaaatccccacccccaaccccgtcattgtcactgccatggcgtccggttgcatgcgcaacaacctcgtatataccacgctctctatcttccgctccatggtggcctctggttctgcgggagtggtcgacgaggcggctgcactggtagcgctctctgcatctgctcgtgtccctgaccgtggcattaccggtggtattcatgcacttgtctccaagattggcttggacgggcagacaggggtagcaaacacgataatagacgcgtatgcaaagggcggtggtcatgacctgggggctgcgaggaagctctttgatatgatggatagggatgtggtgtcctggaacacgatgattgcattatacgcgcagaatggactgtcaactgaggcacttgggttgtatagcaagatgctgattgtgggaggtgatgttagatgcaatgcggtaaccttgtcagccgtgctattggcctgtgcgcatgcaggggcaatacaaactggaaagcgcatccataatcaggtggtaagaatggggttggaggacaatgtctatgttgggacttctgtagttgatatgtacagcaagtgtggaaaagttgaaatggcatggaaagcctttcaaaaaattaagggaaagaatatcctttcatggtctgccatgattgctggctatggcatgcatggatatggccaagaagcccttcatgttttcactgacatgaggaagtcagggctaaagccaaactacataacctttatcacagttttagctgcttgcagtcatgctggtcttttgagtgagggccgttattggtacaataccatgaaaactgagttcggaattgaacctggtgtcgagcactatggatgcatggtcgatcttcttggccgtgctggttgtcttgatgaagcttatggccttattaaagaaatgaaagtcaaacctgatgctgctttgtggggagctcttcttagtgcatgccgaatatacaaaaatgttgagttggcaaaaatttgtgcagaaagattgtttgagttggatgcaactaactctgggtattatgttctcttgtcaaatatatatgcagaagctggaatgtggaaagaagtggaaagaatgagagttctggttaaaaccagaggaatagaaaaacctccagggtatagctcggttgagttgaaaggtaaaacccatttgttttatgttggggacaagagtcatccacagtacaaggaaatctatgcttatttggagaaattgcttgagagaattcatgatgcaggctatgtaccaaacacaggttctgttcttcatgatttggatgtagaagagagagaatccatgttgcgcatccatagtgaaaagcttgctgttgcctttgccctgatgaactctgtacaagggtcagtaatccatgtcataaagaatctccgggtctgcactgattgccatgcagcaataaagattattacaaagcttactggacgagagataattattagagacctaaagcgctttcatcatttcaaggatggattatgctcatgtggggattattggtgacattatgcaaagaagcttagtttgtgatgccatattggtagtatcagaatatcacaaattgagataactgtttacgatactctcagtgcatctgtccatccaggacacaaaggccaatacatcagtgagatagtttataacttctcaacctgatt

SEQ ID NO: 108243 - DNA, 276 bp, Zea Mays
atggcgttggttgcagcctgcacaaataatctgatgcctgcatggcaggaaaaccaccgaaacctcctcttccaagcacatggcacattcctgctcccgctgtacagaatcatcgatcacaaaacctgggtggcgcatgaagtttgcgacgctcagaggcttgcttctgctagacatctcacctacctgctgtctcagattcttgatattggtctgcagccattcctggtggttgcgcgcttccagcaacagacaactagaccttgctcttcctga

SEQ ID NO: 108244 - DNA, 118 bp, Zea Mays
gttgttgttaaatgaaagaaaggtacaggaggaaggactgtacagacaaggaagagaggagagctctacaaacctgacttgcctaggcatagaaagaaaagagagtcaaacaaaagag

SEQ ID NO: 108245 - DNA, 2987 bp, Zea Mays
caaacgctcacatatggcccgccacagcccgctgctgcttctccgccgacggcgcggcatccccaccccgtcgtccctcctcgtcctccgccaccggcccttcgcctcctctccctccccacccgcaccctcaaccccctcgtccgcctcctctaagccccccgccctttccgcccgcctctccttcgtcttcgatcagctcgatgccctcgaccgctcccgctcctccgagctctcggcccgcgatgccgccctccgccgcatccagtcctggcgccgccccgtgccgccgcctgaggcaccgccgctggatgccgatccaggcccggagccggagcaggatggtcagaaggaagctgctctggcgtcggcatctgccgatgaggtggggatgagcatgaaggaggtattgcggagggaggtggagctggtgcacccctggcgcgaatggatcgaactgatggagcggcttgctcagcagaggtacttcgaccttgggcgggcctgtggtgccgatgagagctccatggccgccgctgtgcccttggacctctcagaggtcagtgaggaggtggggttggacttctccagagactggactactgtcaagaacgcctgcatgaacttcggccgagaccggtttgacatcctcaagtcattgcctaggaaggatcttcagatattggttggccatgggtgccctagcatggatgcaaaagtggtgttttctgcaaaactgataagaaaacatgtccatcttgatgagggcgatgtatgtagttcttgtaatttacgaaatgaatgcacgaggggctatatccttacacgtaaagaagatgaagttcggactcttgatgttatgcgcattttattgatctatggttttgatcacgtaaaggaaactgtagagaacaaacctctgctcaaattaaaatctttgaagaatgttgttcggaaattaatacatgagattgtcaagttgagtgctgttcctatcgatcctaatctcccaccacctgtaataaagaagcctcctattaaagtgaagcaaccacctcccccaccaaagaagcgagtgggacgtgatgatgttgagatgaagaaaggagattggctctgccctaagtgtgattttatgaattttgcaaaaaacactgtttgcttgcagtgtgatgctaagcgtcccaaaaggcaactcctccctggagagtgggaatgccctcggtgcaatttcttgaactataggcggaatatgtcatgtttccattgtgaacatgaccgtccttcagatgagtatgccaacagacaaatggaagcaaagcaatctgcactgcggaatagattagaaagacctccacgcaaatctgatatttctagtgcatggaactttgattttgaagataacgagtcagatggtgcagatgttgcggcgtttgaatatgctgattcatctaaggtgaggagggagagctcatcagcaggcagcatgtcgtatagaggtgtttccaagggctctgatgatgaggaatatagaatggctgaaacaatgactacaggacgggggaataagttctcagaaagagatagcttgccatcttcaagagatggttttaatgattttgatgatgaagatgatgacattgacagttatgaacttgacttgtcaaaaggtagtcacacaggtggagtgtcaaggatgagttattcggatcttgagagtgcttctgattcagaaggttttagtgaaattgataatagtagagagtccagatatggtaatagtaaagagtccagatatgataatggtagagagtccagaaatgataataatagagagtccaaatacgcagccaaggttgaggatgaatttgaggatcatcattccctgagatcgactcatcttgctgattcctggcaaaaaaccagaggtcggagtggttcgaatgactacagaagggcatcttttggatcagagagtgatgatgagatcaattcttatccggacgaggacattgacaaaggtcctagaaataatggaagccgtagtcagggaagtaccaacagagcttctgttaggcacaatgcacttgcctacagtgatgatgaaccattttctgatgatgtggattctggtatggctgatcggttcgggcctaggcagactaagtcttccacgaacatcaaggataacttccgtgacacaaggcgtaacttgaatggaagacgttctagtggggaccgttatggtagaacagaacggaatgagcgggaccgttatggtagaacagaacaacggaatgagcgggaccgctatggtagaacagaacggaatgagcggttcaacaattttgacatgcaccgtggcggttcagtcttggataagggccgtggggctaggggtaaccagttagatagtggttcaagaggtttacaaagaaacgcaagaagaaattgggatagaagtggtggctttgacggcaggcacaagggtgtttaaataataatagcaagagtggtatcttaagtaccaaatggcaaccagtgatatccttcatgtgaccttatccaatgccgagggtatttcaatccagctgagcatggctcttatgattccaccatgtgtccatgaccactcttccataatgctacttcaccctgcgacagaggctatggcgattcctctccatctgcacttccatttcaagcattgcacctctctgtctgcttgtttgttacatgtcattgcatcagtcagagcggtcgaacctgaagagctctggaactgggttcgttatttggttcactcatgccgcacaggtacaattttagactactagttagtctccatattgttttgcagagatgcatcaacaggattgtacctcgaattatgagagcaataaaactatacacttcaaacttaatgtgataccaaatgtaacgatgttgaagcgttttggtcgagttatagattctcgttgcaatat

SEQ ID NO: 108246 - DNA, 2587 bp, Zea Mays
caaacgctcacatatggcccgccacagcccgctgctgcttctccgccgacggcgcggcatccccaccccgtcgtccctcctcgtcctccgccaccggcccttcgcctcctctccctccccacccgcaccctcaaccccctcgtccgcctcctctaagccccccgccctttccgcccgcctctccttcgtcttcgatcagctcgatgccctcgaccgctcccgctcctccgagctctcggcccgcgatgccgccctccgccgcatccagtcctggcgccgccccgtgccgccgcctgaggcaccgccgctggatgccgatccaggcccggagccggagcaggatggtcagaaggaagctgctctggcgtcggcatctgccgatgaggtggggatgagcatgaaggaggtattgcggagggaggtggagctggtgcacccctggcgcgaatggatcgaactgatggagcggcttgctcagcagaggtacttcgaccttgggcgggcctgtggtgccgatgagagctccatggccgccgctgtgcccttggacctctcagaggtcagtgaggaggtggggttggacttctccagagactggactactgtcaagaacgcctgcatgaacttcggccgagaccggtttgacatcctcaagtcattgcctaggaaggatcttcagatattggttggccatgggtgccctagcatggatgcaaaagtggtgttttctgcaaaactgataagaaaacatgtccatcttgatgagggcgattttacggacaagaattgtgttatttctgactactgaaattttgactactaccataggctgcgcctaaaaaatgaaactgaaatggattatgtatgtagttcttgtaatttacgaaatgaatgcacgaggggctatatccttacacgtaaagaagatgaagttcggactcttgatgttatgcgcattttattgatctatggttttgatcacgtaaaggaaactgtagagaacaaacctctgctcaaattaaaatctttgaagaatgttgttcggaaattaatacatgagattgtcaagttgagtgctgttcctatcgatcctaatctcccaccacctgtaataaagaagcctcctattaaagtgaagcaaccacctcccccaccaaagaagcgagtgggacgtgatgatgttgagatgaagaaaggagattggctctgccctaagtgtgattttatgaattttgcaaaaaacactgtttgcttgcagtgtgatgctaagcgtcccaaaaggcaactcctccctggagagtgggaatgccctcggtgcaatttcttgaactataggcggaatatgtcatgtttccattgtgaacatgaccgtccttcagatgagtatgccaacagacaaatggaagcaaagcaatctgcactgcggaatagattagaaagacctccacgcaaatctgatatttctagtgcatggaactttgattttgaagataacgagtcagatggtgcagatgttgcggcgtttgaatatgctgattcatctaaggtgaggagggagagctcatcagcaggcagcatgtcgtatagaggtgtttccaagggctctgatgatgaggaatatagaatggctgaaacaatgactacaggacgggggaataagttctcagaaagagatagcttgccatcttcaagagatggttttaatgattttgatgatgaagatgatgacattgacagttatgaacttgacttgtcaaaaggtagtcacacaggtggagtgtcaaggatgagttattcggatcttgagagtgcttctgattcagaaggttttagtgaaattgataatagtagagagtccagatatggtaatagtaaagagtccagatatgataatggtagagagtccagaaatgataataatagagagtccaaatacgcagccaaggttgaggatgaatttgaggatcatcattccctgagatcgactcatcttgctgattcctggcaaaaaaccagaggtcggagtggttcgaatgactacagaagggcatcttttggatcagagagtgatgatgagatcaattcttatccggacgaggacattgacaaaggtcctagaaataatggaagccgtagtcagggaagtaccaacagagcttctgttaggcacaatgcacttgcctacagtgatgatgaaccattttctgatgatgtggattctggtatggctgatcggttcgggcctaggcagactaagtcttccacgaacatcaaggataacttccgtgacacaaggcgtaacttgaatggaagacgttctagtggggaccgttatggtagaacagaacggaatgagcgggaccgttatggtagaacagaacaacggaatgagcgggaccgctatggtagaacagaacggaatgagcggttcaacaattttgacatgcaccgtggcggttcagtcttggataagggccgtggggctaggggtaaccagttagatagtggttcaagaggtttacaaagaaacgcaagaagaaattgggatagaagtggtggctttgacggcaggcacaagggtgtttaa

SEQ ID NO: 108247 - DNA, 2858 bp, Zea Mays
tgctttcgatgttcttctgtgattcgatcccccacaggccacagccagaggccagagccgaaaccaaatattcttccgccgccggccgactgctgcattcaattccccttcgcgccccgaaagccgaaccaacgagcctcgcaggtcggcggtctcgattagggaggaggaagggagtggcccctgatctgggtggcgggcgagatgaggctactgcgggtcgccacgtgcaacctcaaccagtgggcgatggacttcgacaccaacctccgcaacgtcaaggagtccatcaagcgcgccaaggctgctggggccgtcatccgcgtcggccccgagctcgagctcaccggctacggctgcgaggaccacttcctcgagcaggacaccaccgcccacgcatgggagtgcttaaaggacattttaactggggactatacggacaacatcttatgcagcataggaatgccagttattttcaatagtgtgcggtataattgccaggtcttctgcctaaatcgtaagataatcatgatccgaccaaagatgtcccttgcaaatgatggaaattatcgggaattccgttggttttctgcttggacatttaaaggcgagattgttgattttcagctccccgttgaagtctcagaggcaatatcccaggatacggtgccttttggttatggatacatgcggtttatagatgtgtctttggctgctgaaacctgtgaagagctctttacagcaaacgctcctcggattgacttagcattgaatggtgttgaggttttcatgaatgcaagtggaagccaccatcagttaaggaagctcaatcttcgtattgattccataaggagtgcaacccaaacatgtggcggtgtttacatgtatgctaatcagcagggttgcgatggtggccgcctttattacgatggttgttgctgcattgcggtaaacggtgatttggtaggccagggatctcaattctcgttgaaggatgtagaagttctggatgctctggtagatcttgatgctgtatcgagttatcgagcatctgtttctagtttcagagagcaagcaagccacaaaacaaatgtaccttttgtgaaggtaccatataaactttgccaaccatttcggagtggaatggttccgacttctccagttgagattatgtatcactgtcctgaagaagagattgcatttggacctagttgttggctatgggattatttgaggcggagtcaagcatcaggatttttgcttccactttctggtggtgcggatagttcatctgttgcggcaatagtcgggtgcatgtgccaacttgtcataaaagatatagagaaaggagacgagcaagttaaggcagatgctcttcggattgggcagtataaagatggggcaattcccatggatagcagggaactggctaaacgtttgttttatactgtttacatgggaactgaaaatagttctgaagatacccgatcacgtgccaaaaggctagctgaggagattggttcattccacttgaatgtacccattgatagtatagtatctgcttttctttccttgtttgaaacattgactgggaagcgaccacgctacaaggttgatggggggtcaaatactgagaatctgggattgcaaaatattcaagcccgaatcaggatggtgttagcctttatgatggcttctctaatgccatgggtccacaacaaatctgggttttatcttgttcttggaagctccaacgtcgatgaagggttacgtggttatttgacaaagtatgactgcagttcagctgatgtaaaccccattggaagtgtaagtaagcaagatctgagagcttttttacgatgggcagcaattcatcttaagtattcttccttggccgaggttgaagctgcaccacctactgccgagcttgagccaatacgagcaaactacaatcagttggatgaaatagacatgggaatgacatatgaggagctgtctatatatggaaggttaaggaaaattttccgatgtggtcctgtttcaatgtttcagaacctgtgccacagttggtgtggaagattatctccgtctgaagtggctgacaaagtaaagcacttcttcaagtactacgccataaaccggcacaagatgactgttttgaccccatcttatcatgctgagagctattcaccagaagataataggttcgaccttcgccagtttctttacaactcaaggtggccctaccagtttcggaagatcaatgagcttgtgcaagagatggacaaagatggcaaatggggaacttctgcagaagggaagctgggagcgcagacaggtgcacagggaactggaatgggagtggtggcagcggggtctgccaatcccagtgccggcttctgaagagaaccatactaacgcgtggaagctagttcctccagtttttcggccttgacagaataatgcaccagccgtccagcccccaccccaggacacgggctgctaatgttaatttgtctgcttggttcccttgtactgcatcacttctccctgctagagagctggaatccccacaaaattttaggctaccagttctgtttcttccatttgtcatagtacgatctacaaagtatcaaccaaagaacatgtgaaaaataagatggaatccctttaatcagattgtttgtccgaagtggcatggcgatgaaaaggaaaacatcagtataaagaactagttactcataattctttgttctgtaaagagtcctttctaaataatgctgtgtgcatgatgatgatgatgtgatgtgatttctaccatgacttcaaagaactcaatatttgcaccttaactctcc

SEQ ID NO: 108248 - DNA, 1903 bp, Zea Mays
tgctttcgatgttcttctgtgattcgatcccccacaggccacagccagaggccagagccgaaaccaaatattcttccgccgccggccgactgctgcattcaattccccttcgcgccccgaaagccgaaccaacgagcctcgcaggtcggcggtctcgattagggaggaggaagggagtggcccctgatctgggtggcgggcgagatgaggctactgcgggtcgccacgtgcaacctcaaccagtgggcgatggacttcgacaccaacctccgcaacgtcaaggagtccatcaagcgcgccaaggctgctggggccgtcatccgcgtcggccccgagctcgagctcaccggctacggctgcgaggaccacttcctcgagcaggacaccaccgcccacgcatgggagtgcttaaaggacattttaactggggactatacggacaacatcttatgcagcataggaatgccagttattttcaatagtgtgcggtataattgccaggtcttctgcctaaatcgtaagataatcatgatccgaccaaagatgtcccttgcaaatgatggaaattatcgggaattccgttggttttctgcttggacatttaaaggcgagattgttgattttcagctccccgttgaagtctcagaggcaatatcccaggatacggtgccttttggttatggatacatgcggtttatagatgtgtctttggctgctgaaacctgtgaagagctctttacagcaaacgctcctcggattgacttagcattgaatggtgttgaggttttcatgaatgcaagtggaagccaccatcagttaaggaagctcaatcttcgtattgattccataaggagtgcaacccaaacatgtggcggtgtttacatgtatgctaatcagcagggttgcgatggtggccgcctttattacgatggttgttgctgcattgcggtaaacggtgatttggtaggccagggatctcaattctcgttgaaggatgtagaagttctggatgctctggtagatcttgatgctgtatcgagttatcgagcatctgtttctagtttcagagagcaagcaagccacaaaacaaatgtaccttttgtgaaggtaccatataaactttgccaaccatttcggagtggaatggttccgacttctccagttgagattatgtatcactgtcctgaagaagagattgcatttggacctagttgttggctatgggattatttgaggcggagtcaagcatcaggatttttgcttccactttctggtggtgcggatagttcatctgttgcggcaatagtcgggtgcatgtgccaacttgtcataaaagatatagagaaaggagacgagcaagttaaggcagatgctcttcggattgggcagtataaagatggggcaattcccatggatagcagggaactggctaaacgtttgttttatactgtttacatgggaactgaaaatagttctgaagatacccgatcacgtgccaaaaggctagctgaggagattggttcattccacttgaatgtacccattgatagtatagtatctgcttttctttccttgtttgaaacattgactgggaagcgaccacgctacaaggtatttcttcaacatgacatcactttactagattactgcaatgcagcgaacataaaaaaactagagcaaccaaggaggaactaggtggcatttcattaagaagaaaatagtcacccaaatttggacttgaacagctttctgtgcaagaacaatagatttgaatttatgtttattcaccttctcatagtattttagtttgtggccaacaaagattgttgaactggaattttttcttaataccccttaacagtatgccatgcatttttttgctataattatgaaatgtggcctg

SEQ ID NO: 108249 - DNA, 1727 bp, Zea Mays
tgctttcgatgttcttctgtgattcgatcccccacaggccacagccagaggccagagccgaaaccaaatattcttccgccgccggccgactgctgcattcaattccccttcgcgccccgaaagccgaaccaacgagcctcgcaggtcggcggtctcgattagggaggaggaagggagtggcccctgatctgggtggcgggcgagatgaggctactgcgggtcgccacgtgcaacctcaaccagtgggcgatggacttcgacaccaacctccgcaacgtcaaggagtccatcaagcgcgccaaggctgctggggccgtcatccgcgtcggccccgagctcgagctcaccggctacggctgcgaggaccacttcctcgagcaggacaccaccgcccacgcatgggagtgcttaaaggacattttaactggggactatacggacaacatcttatgcagcataggaatgccagttattttcaatagtgtgcggtataattgccaggtcttctgcctaaatcgtaagataatcatgatccgaccaaagatgtcccttgcaaatgatggaaattatcgggaattccgttggttttctgcttggacatttaaaggcgagattgttgattttcagctccccgttgaagtctcagaggcaatatcccaggatacggtgccttttggttatggatacatgcggtttatagatgtgtctttggctgctgaaacctgtgaagagctctttacagcaaacgctcctcggattgacttagcattgaatggtgttgaggttttcatgaatgcaagtggaagccaccatcagttaaggaagctcaatcttcgtattgattccataaggagtgcaacccaaacatgtggcggtgtttacatgtatgctaatcagcagggttgcgatggtggccgcctttattacggtatctcaaaatgtcgttatttgtgctcttgcagattttttctttgttatctgattcatgatgtaattatattttcaggcctggtgcagtggtgagagtatctcactgagtcaccaggtcttgggttcgaagcagcctctccgcatttgcagggtaaggcttgcttcggtttatcccttccccatacccctgtttgggagccttcgtcactaggtctgcccttctatattttctgacgttcattattaaaacctatcaactaacttattattatctccaacatgacattggtgattttttaattcttttatacctgatttgaatgtctgttttcatccacatgatattatccactgaacaaacaaaactggggagcaaaatgttttgtcctctcctttgttgtcggaggttgcagtactgaagctgtatgtaggatacatggcatgtctgtttggacctagtggttttgggtagcctgacagaggggctgtgatgttatgaatggaattcttagaagtattcttacaaataactcatgtagctattcctcataattgctgatggctgggggcagtaggtgcttatccatgaatccagtggcagatccaggatttaatcaaaccctaggctagttttaatataccaaaagtataattggcacaaactttattgccacaaactgtttggttacataaatggagaatagttttgaatcctaagtagctagaagcacggatatcttccatatattgtagcacttatgcacgactaagcttgtacaaagcaacttaaacaaaag

SEQ ID NO: 108250 - DNA, 873 bp, Zea Mays
acaaacacacaacagccgccgcgcacgcgatcgacgacgacggccgccggatagttagctcctccttgcagctagcttctctagctaataattctagctagccaccaccacctgctgccttagccagagacaaagagagagccatggccaccgtgaacgccacgacgacgacggcagggtccggcaagcagaccgacgcggcgccgtcccctccggcggcagcggcggcggcgtgcagaagcctctccggcgccgacctggccctcagggtgctcctgttcgcggtgacgctgtcggggctcgtcgtgctggccaccgccaagcagaccgtgcgcgtcccggtcccgcagattccagggctcgtcctctcgctcccggccaagttcaaggactcgccggcgctcatcctgctgtcgacggccttcacctcgcttaagctcctctccggctcatctcccagcaggactctcttcctccttgttctgttcgatgtgttctatgcagctatcatggcttcggcgaccggctcagcgggtggtgtagcgtggatcgggctcaagggcaactcacacaccaactggaacaagatctgcaacatctacagcaagttctgccgtcacattggcagctctgttttcctgggcctcatcgcctccgtcgtcctcgtcctgcttaccatcctcaacgcccactccttataccgccgcagtcgctagttaaggaattgatgaatatgcatatatgcatgggatgtgatgagtgacatggcatctattttgtattgcagcagtagtctctgcaatcgaacaatgtagagcgtgagctgtatcttgtactgcatgttagaaaattgtgtgcttttaagattagaaa

SEQ ID NO: 108251 - DNA, 912 bp, Zea Mays
acaaacacacaacagccgccgcgcacgcgatcgacgacgacggccgccggatagttagctcctccttgcagctagcttctctagctaataattctagctagccaccaccacctgctgccttagccagagacaaagagagagccatggccaccgtgaacgccacgacgacgacggcagggtccggcaagcagaccgacgcggcgccgtcccctccggcggcagcggcggcggcgtgcagaagcctctccggcgccgacctggccctcagggtgctcctgttcgcggtgacgctgtcggggctcgtcgtgctggccaccgccaagcagaccgtgcgcgtcccggtcccgcagattccagggctcgtcctctcgctcccggccaagttcaaggactcgccggcgctcatatatctgctcgtggcgctctgcgtgacgtgcttctacagcctgctgtcgacggccttcacctcgcttaagctcctctccggctcatctcccagcaggactctcttcctccttgttctgttcgatgtgttctatgcagctatcatggcttcggcgaccggctcagcgggtggtgtagcgtggatcgggctcaagggcaactcacacaccaactggaacaagatctgcaacatctacagcaagttctgccgtcacattggcagctctgttttcctgggcctcatcgcctccgtcgtcctcgtcctgcttaccatcctcaacgcccactccttataccgccgcagtcgctagttaaggaattgatgaatatgcatatatgcatgggatgtgatgagtgacatggcatctattttgtattgcagcagtagtctctgcaatcgaacaatgtagagcgtgagctgtatcttgtactgcatgttagaaaattgtgtgcttttaagattagaaa

SEQ ID NO: 108252 - DNA, 1741 bp, Zea Mays
gcatccaatacgacaggcatgcacgcacgtcaatcaacaggggggcatcatggaatcgaataataaataaagcaggattcccccacagtttgatccgccgaatataataaaataaaaatccagcagcatttctcccccgcccatacgacgacgacggccactcggcgcagtgatttggggcgccccgcaaagcggtggctccaccggccagcgcatcaaaggccctgtggaatatggcgccgcgccgcttgccggggccgggcccgggccctcctcttatatacggcgtggcgagcaaaccccaaaccctcgcaggcagaaggcaaacgcggctgcgagcgcggcgcccctctcccactccccagcagccgccagcccgcacacccctccctcgcgcgctcagggtttcggaatggaagccgaggcggcggccaagaggacgcgggacagcggggaggacgccgccgcggcggggatctccgccgtcatcccgggatggttctccgagatcagccccatgtggcccggtgaggcgcactctttgaaggtggacaaggtgctgttccaagggaagtcagactaccaaagcgttatggtctttcagtcctctacgtacgggaaggtgctcgtcctcgatggagttattcaggtgacggagagggatgagtgtgcgtaccaagagatgatcactcacctgcccctttgctccatcaaagaccccaagaaggtgttggttattggagggggtgacggtggtgttctgcgtgaggtttcacggcattcctctgtggaacaaattgacatctgtgaaattgacaagatggtggtagatgtctccaaacaatttttccctcatttagctgttggatttgaagaccctcgtgtgtcattacacattggagatggggttgcctttttgaaaaatgctccagaaggtacttatgacgcagtaattgtggactcatctgatccgataggtcctgctcaagagctttttgagaagcctttcttccagttggtggccagagctttgcgtccaggtggagttgtatgcacccaagcagagagcatatggctacatatgcacattattgaagatattgttgtcaattgtcgacaagttttcaaaggctcggttaactatgcttggacaacggtgcctacataccctagcggagttattgggttcatgctttgctccaccgaagggcctgctgttgatttccagcaccctgttttcaacatcgaggaggatgagcatcctatgaaatcaaagggaccccttaagttctacaactcggagatccacacggcatcattctgtttgccttcttttgcaaagagggtaatcgagtcaaaagcgaactagatgtgaagggtatctccaagggctaagtaccttaggcgcgcaacacagaatttgttgtagtgtgaaaagcggatgcctccctcccttttctcccactttgatgaatagtataagcacaggagatgagatgcaacagttatcggagttatcggtctacatggtcctgaccagtcgtatgtctcggctgcctggtgcagctatgaaaacgttttgcaatagcttttttcggcagtcctcacatcatcacggttgtgtttccgcttccatatctgaatggaatacatatacgtatgaaataaaactgtgtaatggctgttgctcggatccttttcaaaacaggttcagctctcgtcgagtgatttgtaggtcctt

SEQ ID NO: 108253 - DNA, 101 bp, Zea Mays
tgcaaagcccattcacatttccattctcggcggtcacgtgtctttctcattccccctcccacaaagctcattctcattcccacgtgcatcccacgcctagc

SEQ ID NO: 108254 - DNA, 1256 bp, Zea Mays
ctgggccgtggttgtgaccacctatacccgacagagcgaggtgtgcactgcgtttggcggggcctgcccgacgcacgccggcacgccgagccggtagcagaggatccccgttcgcctccctacaacctgacccccccacggccccacccccctccgtcggcgacagggcgagcgccgccgcccttgtcttcgccggcgacgagcatcgccaggggactaccgattgcagggcggttgcggagatgggggctgatcagaaaccacgacaagccttgccattcggaactggggcttctacgacaccgtcaaaggcagcctaggcctgcagctcatgtcgtccatgccgcctgaccgggacacaaagccgctgctcccgagaggtgccttgctgcagcagcatggacatcacaatgccgcacaccagctccacgcgcagcaatcacaacatcatcgtgactatgctggcggcacatcctgacccggacacaaagccgcctgtaaagaagaggtggcaggttcggcagcctaagtcactgaagcctaggaagcctaagaaggctgctgttccaccagagaatggggcacttaatgagcatgcgccccgaaggaggggacctaagaagactgtggggatggtgattaatggtattgagttggaccttgctaacataccgacaccagtgtgctcatgcaccggagctccccagcaatgctaccgatggggcgcaggtggctggcagtctgcatgctgcacaacttctatttcaacgtatccactgccaatgagcacaaagcgccggggcgctcgaattgctggaaggaagatgagccaaggtgcattcaaaaaggtgcttgagaagcttgctggcgaagggtacaaccttgctaatccaattgacttgaagacgttttgggctaagcatggcacaaataagtttgtaacgatcaggtaaaatgacatagtatgtttctagctttgtaggttgtagagctgcagttaggcccgatttattgcttttatgtctatgtaagaatctgcagaaatttgtagtagtagtagtagcagcagcatgtagcaatgtttagttttaaatgacttagttgtaatgtctatcttgagcttcagatattgacccgactgaagcctgtttgtatccttcactttgcaaattgtagtttaccctgtacccataattgtctctaatttagggcatggaatttaatgcattaattaaatctgtgtggaagtaagcact

SEQ ID NO: 108255 - DNA, 1323 bp, Zea Mays
ctgggccgtggttgtgaccacctatacccgacagagcgaggtgtgcactgcgtttggcggggcctgcccgacgcacgccggcacgccgagccggtagcagaggatccccgttcgcctccctacaacctgacccccccacggccccacccccctccgtcggcgacagggcgagcgccgccgcccttgtcttcgccggcgacgagcatcgccaggggactaccgattgcagggcggttgcggagatgggggctgatcagaaaccacgacaaggttcgggttttctcctacagattgcgatctctagaggtggatttgcttttcctcacattctgagatggaagccgatgatggcagccttgccattcggaactggggcttctacgacaccgtcaaaggcagcctaggcctgcagctcatgtcgtccatgccgcctgaccgggacacaaagccgctgctcccgagaggtgccttgctgcagcagcatggacatcacaatgccgcacaccagctccacgcgcagcaatcacaacatcatcgtgactatgctggcggcacatcctgacccggacacaaagccgcctgtaaagaagaggtggcaggttcggcagcctaagtcactgaagcctaggaagcctaagaaggctgctgttccaccagagaatggggcacttaatgagcatgcgccccgaaggaggggacctaagaagactgtggggatggtgattaatggtattgagttggaccttgctaacataccgacaccagtgtgctcatgcaccggagctccccagcaatgctaccgatggggcgcaggtggctggcagtctgcatgctgcacaacttctatttcaacgtatccactgccaatgagcacaaagcgccggggcgctcgaattgctggaaggaagatgagccaaggtgcattcaaaaaggtgcttgagaagcttgctggcgaagggtacaaccttgctaatccaattgacttgaagacgttttgggctaagcatggcacaaataagtttgtaacgatcaggtaaaatgacatagtatgtttctagctttgtaggttgtagagctgcagttaggcccgatttattgcttttatgtctatgtaagaatctgcagaaatttgtagtagtagtagtagcagcagcatgtagcaatgtttagttttaaatgacttagttgtaatgtctatcttgagcttcagatattgacccgactgaagcctgtttgtatccttcactttgcaaattgtagtttaccctgtacccataattgtctctaatttagggcatggaatttaatgcattaattaaatct

SEQ ID NO: 108256 - DNA, 750 bp, Zea Mays
aaagaaataaattccgtggtgattttcgatctcatgaatgacaaatgttataaataattacattctgtgttttagaacctattttcctggtcactgagttcatactcatcaattattatgatgtggtgtcaacactaacgtgcaggctcttgcaaaggatgttccatggagattaaagggtccacgtgttttagagatcattgaagcgattgacagtaatacagatgggctagttgattttgaggagtttgttgctgcaacactacacgtgcatcagctggtggaacatgatactgagaagtggaaatcattgtctcaagctgcatttgataaatttgatgttgacagagatggctacatcacacctgatgaacttagaatgcatacaggaatgaagggttctattgatcccctcctggaggaggctgacattgacaaagatggcaagataagcctagatgaatttcgccggctcttgaagactgcaagcatgagcgcacgcaatgtacaaactcctaggggtgttcgcaagtcatagttttctgttttttgtagttcacataactgaactagagagcagcagcacatgtgattggagaaaggcttttccatgtaaattagacaatcaataatacacatgaatggaggtaatccgtagttgttccttgaaaacgagcactgtattcttgctattgcaatactatgtttggtttgttcccagcaagttctgcagttgagctttccatgctc

SEQ ID NO: 108257 - DNA, 2003 bp, Zea Mays
gtcatcttgacgggcagccaaggtgtcgcggcgggccaagtcgcagacgcggagccaccgccattttttttactcccgaaaccaggcaggagggaggaggcgacgacatcgccatcacaccagatcactgaagaagagagaggcgcgtcgagtctccccaaagaacgagctagtacaaagtctcctcttcctttgactccgaatcccctagaccattgatggttgcgggggcaccggaaggagccactgacgatgggcctctgctcctcctccaccgccgcccgggccgcctccgaccccggcgccgcagccgcgggtgatgccgccgcggcaaagaaggggcgcgggatcgtcgcgtgcgggaagcggaccgacttcggatacgacaaggatttcgaggtgcgctactcgcttgggaagcttttgggccacggccagttcggctacacctttgccgccgtcgatcgcgcctccaccgagcgcgtcgccgtcaagcgcatcgacaagaataagatggtccttcctgttgctgttgaagacgtaaagagagaagttaaaatcttaaaggcattacaagggcacgaaaatgttgtacacttttacaatgcattcgaagatgacaactatgtttatatagtcatggaattatgtgagggtggcgagctacttgatcggatattagccaagaaagatagtcgttacagcgagaaagatgctgcagtagttgtccgacagatgctcaaggttgcagctgagtgccacctgcatggtttggttcatcgggacatgaaacctgagaacttcctattcaaatcaaaaaaggaggactcgccccttaaggctacagattttggtctttcagacttcataaaaccagggaggcaattccgtgacattgttggaagtgcctactacgtagcaccagaagtactcaaacgcaggtcagggccagaatccgatgtttggagtataggtgttataacctatattttgctgtgtggaagacgaccattctgggacaaaacagaagatgggatatttaaagaggtcttaaaaaagaagccagatttccgccgcaagccttggtcaaacattacttcgagtgcaaaagattttgtacaaaaattactagttaaggatccccgtgcaagactaactgctgcacaggcattatcacatgattgggtgagagaaggaggaaaggcatctgaaatacccttggatatatcagtattacataatatgcgtcagtttgtgaaatacagtcgtttcaagcaatttgctttaagggcattagcatctacattaaactcagaagagatgtctgatcttcgtgatcaattcaatgccattgatgttgacaaaaatggaacgattagtcttgaggaactgaagcaggctcttgcaaaggatgttccatggagattaaagggtccacgtgttttagagatcattgaagcgattgacagtaatacagatgggctagttgattttgaggagtttgttgctgcaacactacacgtgcatcagctggtggaacatgatactgagaagtggaaatcattgtctcaagctgcatttgataaatttgatgttgacagagatggctacatcacacctgatgaacttagaatgcatacaggaatgaagggttctattgatcccctcctggaggaggctgacattgacaaagatggcaagataagcctagatgaatttcgccggctcttgaagactgcaagcatgagcgcacgcaatgtacaaactcctaggggtgttcgcaagtcatagttttctgttttttgtagttcacataactgaactagagagcagcagcacatgtgattggagaaaggcttttccatgtaaattagacaatcaataatacacatgaatggaggtaatccgtagttgttccttgaaaacgagcactgtattcttgctattgcaatactatgtttggtttgttcccagcaagttctgcagttgagctttccatgctc

SEQ ID NO: 108258 - DNA, 1464 bp, Zea Mays
atggcctcccgaacgccccgccgtcctccgctacctaaacgctccaccatcctggtaccgatgttcggcgactccgacggatctaaggacaccagcgccgccgtgccagggtccaacccgtcggagccgcccttccccagccgggagctcacgctcagcagctacctttgcgacaaggcgctgcccgccgcggcggggccatcctcgtcgcccaaccccgaggcggcggctggcccggccgaagaggccgcggccaacgccaagctgtgcgtcgagcgggatatgctccacctcaccgcgcccaagcgcggggatccgcccggcgatgactcctccgtggtaggggcctcccagcagccgtcctcctccctgctgcctcagtcgcagctcgcgtcattcctccaggtcgatggagatctgcggtgcgtgagcgctgcggccgcctccgcgcgcagtgcctgccgcgcccgcgccgccccgaggcggatctacagcgccaacacggggcgcacccggagcatcaactccgacgacctgtcgtattcctactcggtgttctcgcacaacccgagctgctccctcacgcacaactccaccgacatctacaccgccggggagggcacgaacggctccgtccacagccggttcaacttccgccccatgggtgacggcagcgtcgccttcgcctcagcgcagctcaaggagggcactgcgtccttcttccccatggagctccccgcgagggcggcagcggcgctcagcgctagcggcagcttcgacggtagccgtggagggatgcactcgtcacggcctgataggatcttgcgggagattgtgtcggactccatgcttgccatggctcaggtcctgcaggatttcccctgcgaaaccctggaggtgctgcgggagacagtgcggagcatggttgatgctccggagaagagggacaagctgtcaagcctgccgaggaagctggagcgtcgctcggacctgaccgcggaggtattggggcgggcaaacaagacgcagctggagatcctggtggccatcaagaccggcatggccacttttgtaactggtaagggccgagtttcggtcagcgagcttgtggagatgtttctaaagacacggtgccgcaacatgaactgcaagagtgccgtccctgtggacgattgtgagtgtaagatttgctccaccaagaaagggttctgcagtgcatgtatgtgcccggtgtgccagaagtttgattgtgctgcaaatacatgcagctgggttggatgtgatgtctgctcccattggtgccatgctgcatgcgcgctagagaagaacttgataaggccagggccaacattgaagggggcgatgggcacaaccgagatgcagttccagtgcctcggctgcaatcatgcttctgagatgtttgggtttgttaaggaggtgtttaattgctgtgcggagaactag

SEQ ID NO: 108259 - DNA, 861 bp, Zea Mays
atggcactccacattcatgaaaatgtcaagttaacggcagaaatgctgtcaaaagcactatcatctagagcttcaagctttgggtccattcctcaaacctttcttgtacttggagacctgaaacagtatgagagagtaagggtatctaccgacatcattgcctcgaaaaggcaccgaattggattggttttggacatcgtcggcgagagcaacctcatcgacaaattcttctgctatctcggtggcaaccaaggagggcaattcacacagtcaggattatcacattgccccaaaggcccagacatcatcaagtgttcattctttggaacctgcccactaagcttgcaccgtgatcctggtgtggagattggattggttttggacatcgtcgacgagatcaacctcatcgacaccttcttctgctatctcggtggcaacgcacggttgttcgatgactatcgcgatgaagattattatgtgctaccacggaagtttagtattgtcgctcgagtagaagttaaattccccattgaaccacgttatcgtgatagacaacatttcattttgtctgacatcaatggagccaagatcgaggcaatgacaagttcgtacgagacagtcaagcacttcaacaatttgctacatgaaaagcatgttttcaagatgcacaatgtagatttcagtattagtatgggtgaacatcagtttcgacatataagtggtccaatggaattgtatctcaccagacaaactgtcgtggagccgtacacagttccatttcaaatgccgccattcccaaaacatatattcttgagtcttgcagatattgccgaactaccaaataggcaaataggactttag

SEQ ID NO: 108260 - DNA, 423 bp, Zea Mays
gaagttgggaatggtgctaatactcttttttggaaggatcgatggattcaaggacagagggtggcagatattgcgccaagacttcttcaagttgttccgaaaagaaaaatcaatacaaggacagtgcaagaagctattactggaagagcatggatgtcggatattcgaggggccctatctgtgggggcaattgttgattatcttcacctttggaacttattgttaactgctgaattaaggccgaatgttgaagataagcatatttttaggctggctgccaatggaaaatattcagcgaaatctgcctacgaggggttattcattggctcgattccttttgaaccgtacgaggggttattcattggctcgattccttttgaaccgtacgagaggatatggaaaacctgggcgcctcctaaatgt

SEQ ID NO: 108261 - DNA, 981 bp, Zea Mays
actgcacctgctggctgctgttgccgtgccgtgccgcgcctgcgttgcgtaccatcgcgccgcggcaggcacctcaacccctggcgatggccatgcggtcccggcctcgccgctccgccggccacctataccacctccgcctcccccggctcctcttcctcctcccgttcgctctcctcctcatcctcctcgcgcgcctccccgcgctcctccgccgcgccaacgcacacggccgccagtgcatgccagccgccaccgaccgccccatccccttccctcaccccgtcccggacccccgcctcagccttgccatagtcaccctcgccgacgaggacgccggcgggccgggcgcgcgccggtccttccgcggcgtgctggcggcatccgcgcggaacaaacgcgcctacgcggcagcgcacgggtatagcctcgtcgcgctccccgcctctgccgtcgaccccagccgcccgcccagctggagcaaggtcctcgcgctccgcgcccacctccgccaccaccactggctcttctggaacgacgcggatacactggttactaacccggaaatcccgctggagagaattttattctcagtgatcggacataataattttgttgagtcacctgatcttgttctgacagaggatttcggtggtgtgaatgctggagttttcttcataaggaggtcaaaatggagtgagaagtttttggatacatggtggaaccagacatcatttatacagtttggttctacgagaagtggagataatgcagcactcaagcatctcatagatcacttatcagctgaagaaatgcaagagcatgttcggattgtaaaaatgcagtgcctcttcaattcctacccgtggatcctcacattgaaatcggtgcaccgcctgatcttccacctgcccactacgtggaaaggttccactttctctcgttcactctactagtctacattgcatatgtaatgagggt

SEQ ID NO: 108262 - DNA, 1354 bp, Zea Mays
tcattcacctgcctcttcatctcagcctcacgccacgcacgcaatggctggcgttcgtctcgtcggcgtgcgtccgtcccctggccgtctggagaggtgggtggggagtctaccggacgcgggtagccggggcggtcgccccaccttgccgatacgaggtgtccgctcctatttcattcggtccattccgcctctcggaagagttgagagaggagtaaggaaggcgaggacctcgcgccccgcgatgggcggcgacctgtacgccctcgacttcgacggcgtcttgtgcgacagctgcggggagagctccctctcagccatcaaggctgcgaaggtgaggtggccgtcgctgtttgagcaggttgacgccgccatggaggagtggatagtggagcagatgtacacccttcgtccagtggtggaaacaggatatgaaaacttattgcttgtaaggttgcttgttgagatccagatacactctgttcgaaaatcatcagttgcagatgggcttagcatccaagaaatattggagaactggtcaaaactgaagcccactctcatggatgagtggcaagaagatagggaatctcttgtagatctctttggccgtgtaagagatgactggattgaaaatgatttttcgggctggataggtgctaacaggttttatcctggaacagctgatgcattgaagctttcaagctccgaagcatacatagtcacaacaaaacagagtagatttgctgaagcgctactcaaagaattggctggaatagactttccctctgaaaggatatatggccttggcactggtccgaaggttaaagttctccagcagctgcagcaaatgctgcagcaccaaggcctaaaacttcatttcatcgaggaccgactagcgactctgaagaatgtgatcaaagaaccagcactggacaattggaacctctacctggtgaaatggggatacaacacacagaaagagagggaagaaacagaggctataccaaggatccaactcattgatctaccagatttcagtaggcagctcaaataactaccaatggcgtcgacttgtgaatcttggaaactttgtttttgtttggtatacgtaactaatgaacagcagaaatacttgatttttcgattggatatcgttgttcacatatccgtgtactgattttttttccaagcattctcggtaaactgagacgtcatgccgtgagcccgcgcacgggcttcacagctcataacgagaatcgttgcgggaaaagcacttacctcctcaactacaactagaaaatatgatgtctcgactgtgtttggtttaagaaacgaggtattacattatttactt

SEQ ID NO: 108263 - DNA, 1347 bp, Zea Mays
tcattcacctgcctcttcatctcagcctcacgccacgcacgcaatggctggcgttcgtctcgtcggcgtgcgtccgtcccctggccgtctggagaggtgggtggggagtctaccggacgcgggtagccggggcggtcgccccaccttgccgatacgaggtgtccgctcctatttcattcggtccattccgcctctcggaagagttgagagaggagtaaggaaggcgaggacctcgcgccccgcgatgggcggcgacctgtacgccctcgacttcgacggcgtcttgtgcgacagctgcggggagagctccctctcagccatcaaggctgcgaaggtgaggtggccgtcgctgtttgagcaggttgacgccgccatggaggagtggatagtggagcagatgtacacccttcgtccagtggtggaaacaggatatgaaaacttattgcttgtaaggttgcttgttgagatccagatacactctgttcgaaaatcatcaatgggcttagcatccaagaaatattggagaactggtcaaaactgaagcccactctcatggatgagtggcaagaagatagggaatctcttgtagatctctttggccgtgtaagagatgactggattgaaaatgatttttcgggctggataggtgctaacaggttttatcctggaacagctgatgcattgaagctttcaagctccgaagcatacatagtcacaacaaaacagagtagatttgctgaagcgctactcaaagaattggctggaatagactttccctctgaaaggatatatggccttggcactggtccgaaggttaaagttctccagcagctgcagcaaatgctgcagcaccaaggcctaaaacttcatttcatcgaggaccgactagcgactctgaagaatgtgatcaaagaaccagcactggacaattggaacctctacctggtgaaatggggatacaacacacagaaagagagggaagaaacagaggctataccaaggatccaactcattgatctaccagatttcagtaggcagctcaaataactaccaatggcgtcgacttgtgaatcttggaaactttgtttttgtttggtatacgtaactaatgaacagcagaaatacttgatttttcgattggatatcgttgttcacatatccgtgtactgattttttttccaagcattctcggtaaactgagacgtcatgccgtgagcccgcgcacgggcttcacagctcataacgagaatcgttgcgggaaaagcacttacctcctcaactacaactagaaaatatgatgtctcgactgtgtttggtttaagaaacgaggtattacattatttactt

SEQ ID NO: 108264 - DNA, 1187 bp, Zea Mays
tcattcacctgcctcttcatctcagcctcacgccacgcacgcaatggctggcgttcgtctcgtcggcgtgcgtccgtcccctggccgtctggagaggtgggtggggagtctaccggacgcgggtagccggggcggtcgccccaccttgccgatacgaggtgtccgctcctatttcattcggtccattccgcctctcggaagagttgagagaggagtaaggaaggcgaggacctcgcgccccgcgatgggcggcgacctgtacgccctcgacttcgacggcgtcttgtgcgacagctgcggggagagctccctctcagccatcaaggctgcgaaggtgaggtggccgtcgctgtttgagcaggttgacgccgccatggaggagtggatagtggagcagatgtacacccttcgtccagtggtggaaacaggatatgaaaacttattgcttgtaaggttgcttgttgagatccagatacactctgttcgaaaatcatcagttttatcctggaacagctgatgcattgaagctttcaagctccgaagcatacatagtcacaacaaaacagagtagatttgctgaagcgctactcaaagaattggctggaatagactttccctctgaaaggatatatggccttggcactggtccgaaggttaaagttctccagcagctgcagcaaatgctgcagcaccaaggcctaaaacttcatttcatcgaggaccgactagcgactctgaagaatgtgatcaaagaaccagcactggacaattggaacctctacctggtgaaatggggatacaacacacagaaagagagggaagaaacagaggctataccaaggatccaactcattgatctaccagatttcagtaggcagctcaaataactaccaatggcgtcgacttgtgaatcttggaaactttgtttttgtttggtatacgtaactaatgaacagcagaaatacttgatttttcgattggatatcgttgttcacatatccgtgtactgattttttttccaagcattctcggtaaactgagacgtcatgccgtgagcccgcgcacgggcttcacagctcataacgagaatcgttgcgggaaaagcacttacctcctcaactacaactagaaaatatgatgtctcgactgtgtttggtttaagaaacgaggtattacattatttactt

SEQ ID NO: 108265 - DNA, 756 bp, Zea Mays
agacaaattggctgttagattaactttatatagaatcttggaattaacgacatgtaatatggcctttgtcctttgcaggtacaccatggtggtgctggcactactgctgctggtcttaaggctgggcatggttcatgccagaggattgggtgcaccacctatacccgtggagcaattacaattgcattcgctgattgatgcaatcaaatttatgattgatcctaaggtaaaggaacgagctgttgagctagcgaagtcaatcgaatcagaagacggtgtggatggggctgtaaaatcctttttaaaacatcttccacagaaaagggattccgagacgacaccaactgcgccagagccaacgttcgtgcaccggctgcttcaccctgtaaacagatgctttggcatggcatcctaaccccgcatttcaaagaacctgctttgattttgtggcatcaccggaacaagttgcaccacatgctaaaggagaaggggggagcaccaacatcgctagccagtcgttacatcctatataaatattaaaagaatgcaggtagggctactagttattcatatactgtaagttttttgaatctttattatatttgtatagcttgtggtcagtgtggataatacggtaacttgagactgcggctcctcaaaaatgtttgtcattacccacattttttttctttttaaaatactggtgtatatagattacagaactaggctggcctttgggttgctgcggaatttcat

SEQ ID NO: 108266 - DNA, 1978 bp, Zea Mays
ttcgcatcccgttccgtgagaaacctccgtccgcgttccccgtttctctctcctttgggctttggctccgagcctccgatgactctcgtggcgtggcccgcttggaggttggtcttctagaggagaccttgcccctcgagagggaggaagtgaaggaaacttccagaagcctttcccgcagccgatgaaggaaaccagcagcagccatgtcggcggccccggcgctgaggacgtctgttcctcgtccgtgtccaacaattgtttcccacaagatgagggtacaagctccagcgaaatgatcaatactgaatgctctgagacgtcctcagaggtgtcgggttctgaaagaacaagacctgaacatagcaaaaaagcatcttctgtacttgctaaaaatgtttagtcgaatggctacattgaaagatgatggaactgtagttgtcgatatccctactactattgaagctgcatcacttgatcttcattcagaggatcaccaggatgtggcctttggtggcgaacccttggactcttcagatcttcaggatagaccaccaatgcaaattgctatgctgattgttggtacaagaggggatgtgcagccattcatagctataggaaaacgtttgcaggactacggtcatcgtgttagattagcaacccatgccaacttcaaggacttcgtgatgactactgggttggagttttatccccttggtggagacccaaaaattcttgctggattacagggttggtaatttgagcagacatggttaagaacaaaggattcttgcctgcaactccatcagaaattcctatccagcgcaagcagattagggacattatattctccttgcttcctgcttgcaaggacccagacattgatactggtgtttcttttagtgcagacgccataatagctaatccagcagcatatggacatgtacatgtggcagaggctctcaatataccgattcacataattttcacaatgccgtggacgcctacctgtgaatttccgcatcctttctctcatgtgaagcaacctgctggatatagactttcataccagattgttgactcttttgtctggcttggcataagggatatgataaatgatctccgaaaaaggaagttgaaattgagaccagtcacatacctaagcggtacacatgcttattcgaatgatattcctcatgcatatatctggagtccttaccttgtccccaaaccaaaagactggggacctaagattgatgttgttggattttgtttccttgatcttgcttcagattatgagcctcccgagacccttttgaggtggttagggagtggtgacagtcctatttatattggttttggtagccttccaattccagaaccagataagttgacaagaatcattgtccaagcacttgaaatttctggacagagaggtatcattaacaagggttggggcgggcttggaaacttggaagaatcaaaggaatttgtgtatgtacttgataatgttccacatgattggctctttttgcaatgcaaagctgtggtacaccatggtggtgctggcactactgctgctggtcttaaggctgggtgccccactaccatcataccattctttggtgatcaattcttttggggcagcatggttcatgccagaggattgggtgcaccacctatacccgtggagcaattacaattgcattcgctgattgatgcaatcaaatttatgattgatcctaaggtaaaggaacgagctgttgagctagcgaagtcaatcgaatcagaagacggtgtggatggggctgtaaaatcctttttaaaacatcttccacagaaaagggattccgagacgacaccaactgcgccagagccaacgttcgtgcaccggctgcttcaccctgtaaacagatgctttggcatggcatcctaaccccgcatttcaaagaacctgctttgattttgtggcatcacc

SEQ ID NO: 108267 - DNA, 1526 bp, Zea Mays
tcgagcagcgccatggcgacggcggcggtgccggcctctcggacaggctccggcggcgtcgtgcggcggcggcggcggcgcgtgctgatgttcccgctgccgttccagggccacctgaacccgatgctacagctggccggggcgctgcacgcgcgtggtggcctggacatcaccgtcttccacgccaccttcaacgcacccgaccccgcgcgccaccctccggggtaccgcttcgtccccgtcggcgatggcgtgccgtcggccgacctcgtcccgtccggcgtcgacgccgacatccctggcgcgctgctgcggatcaaccgccgcctgcgggagccgttccgggactgcctgcgtcaggctctcgccctccccgaggacgacggcgacgagggcggcgcgccgccggcatgcctggtggtggactccaacctgcgcggaatgcagctggtggccgaggagctcggcgtgcccacgctcgtgctgcgcaccggcgccgccgcatgcctcgtcgcctacttggcgttcccggcgctctgcgacaagggcctcctcccaccgacatccaaagacaagtcccagctggacataccgctagacgggctcacaccactacgcctaagagacatggtgttctcgcccactactacacatgcgaacatgacagagtgcctaaaatgcctggtcgacgcaacgaggagttgttccggcgtcatattcaacaccttccgagacctggaggactccgacctccagaggatcgccaatggcgtcgtcggagtgccgatctatcctgtcggccccctccacaagatctctccatgcaccgaggacagcttactggcgccggaccgggcgtgtctagagtggctggacaagcaagaggcggactccgttctgtacgtgagctttgggagcctggcacgcgtggacggaaaggagctgctggagatagcatggggcctggccgacagcaagatgccattcctgtgggttcttcgccacggcttgttggacaaagtgaggaggcttcttcttcccggcggcttcgaggaggcgacgcgcggaaggggggtggtggtgccctgggtcccgcagcaggaggttctacggcaccgtgcagttggcgggttctggactcatagcggatggaactccactctggagagcgtctgcgaaggtgtcccgatgatgtgccgaccccagttcgccgaccagatgataaatacgaggtacgtgcaagaagtgtggagggtagggtttgagctagatggcgaccagctggagaggcgcaagatcgcgggggctgttacaaagctgctttgtacggaggaaggaaggcgtatgagacagagggccagagatttaagagacaaagccatcgagtgcgtccaggaagaaggcgcctccaagtctgcaattcagctattgatagatcgcatagcgtcattttagttgtgttccatgacaagacagttaaattgtatgacgccaatgctacagggctcaatataatgtatgtgatg

SEQ ID NO: 108268 - DNA, 183 bp, Zea Mays
atgaaaaacacactgatgatgctagattatccatcgccgcacttcaacaacaaagtccagtgcatttcccaggcacaggaacacgagcaaaaaggggaggctctagaagcccatggtccaatacgaccaaaaactattacagcaactggaaatttcacagctaacattttccactggagttaa

SEQ ID NO: 108269 - DNA, 696 bp, Zea Mays
atggccatcgcagggctgcgcctgctcgaggagcgcgcccaggaggcgatcttagcgtcttgcagggatgttctacgagcctctgggttccggttcgaggacgcgtgggccaaggtgatcccaggctcggataaaggtgtatatgcttgggttgcggcaaattatgctcttggaaggcttggaggggatcctaacaaaaccgttggaataattaaacttgggggcgcttcagctcaggcaatacttggtaatactcgagcatcagagatcataaagcttgctccttttttggctccatttaccagtcgagtcaaaatattcactagcagccacagcaaccgcggtgctgtggaggacgcctccgcgctcgccaactcccttggcgtgctttgcaaggcctgcaagcctgagcacttgaccatgtcaccaaggtttcattgttatagagctaccaggcggccttctccttttgtgcaacacacagttgccatatttgaggatgatcttggctgctcctgcaaattgattctagaactagaacaacttgcccaaatgaaggatggcaaggcctttgctgaatctttggagtctctgtcaaatgttatgtgtaatgttcatgactatctaatccatgtggcattaaggtggaacattttcatcagtatgctgaaacgacagtggaaactcagtatctga

SEQ ID NO: 108270 - DNA, 543 bp, Zea Mays
tggctgacggataatgggtcatgctaccgggcttatgaacacgccaggtcgcccggatggttgggactgaaccgaagaacacggcggtgcggagtccggagagtaaacggaatagcagagagcttcgtgaaaacgataaagcgtgactacatcagtatcatgcccaaaccagacgggttaacggcagcaaagaaccttgcagaggcgttcgagcattataacgaatggcatccgcatagtgcgctgggttatcgctcgccacgggaatatctgcggcagcgggcttgtaatgggttaagtgataacagatgtctggaaatataggggcaaatccactaactccatctacgcaaccgcgggtgggattaggacctatcatcacctattagaaggtacgaacgtagtgtacatgcattacatgtctatattaaactatactcggttatatatgttagaggatggaggaccatgagtggatgtacacgggccgcgttcgacgtaatgatgtcaccccagaatggattaggaagaccgatgctttcg

SEQ ID NO: 108271 - DNA, 1201 bp, Zea Mays
ttttcaatttggcataagaactccagcttgcgttggggaagggcgcgtccctgagagacgaaggaagagagcctaggactgactcactgacccgaacccgttcccggcgggacttcctctcgaatcgtcccagtcgagaccctagttgccccacgaaccgaggatccaagatgagtttcctgttcgggaagaggaagacgcccgccgagctgttaagagaaaacaagagaatgctagatcgatccatcagggaaattgagcgagagagacaaggattgcaggcccaggagaaaaagctcatcactgagatcaagaaaacagctaaagaaggccagatgggagctgtcaaagtaatggccaaagatcttattcgcacccggcatcagataacaaagttctaccaactcaaatctcaactccaaggagtttctctaagagttcagacactaaaatcaactcaagctatgggtgatgccatgaagggtgtcacaaaggcaatgtcccaaatgaacaggcagctaaatctaccaggattgcagaggataatgcaagagtttgagcgacagaacgagaggatggagatggtgagtgaagtgatgggagatgccatagatgatgctttggaaggagatgaggaagaagaagaaactgaggagcttgtgaatcaagtacttgatgaaattggcattgatatcaaccaagagcttgttggagctccgtcggccactgttgctcaacctgcttctgtgggaagggtcgcccaggctgaaagtgctgggaatgctgacagtggtatcgacgctgatttgcaggcaaggctagacaatctgaggagaatgtaggtgctacactagcaaaaagagtagtgccttcaagcactgttcctgcgaatgtgaatgaatacctgatcgatcaaagcggttacaagccaatgtgtatgttgaaatgaatgaagtgttcaatatgccggtagtaataacaaatgatgattatatatttattacatgtattgtcatatgcaattcttcccctctttttacttttttgtgcatgcgtggttagaatttttaatttttgcttttttcggcacgcaacacacatttctcctatgtatggctagactttttattttttctttgccacatgtagcacacatttttcatttttttgcatgtttgctgcttcatttattgtattcaca

SEQ ID NO: 108272 - DNA, 2797 bp, Zea Mays
ggccacgccaaggatggaggagcagccggtggctaaaattttggctggctccgcgggcgcacgtcgtttagcgtttccgctcgccttgggaccttgcccctggccctccgagatgccgggaccggccgtggaggcagcggccaggggcggcggctgctgcgggaagacggccggcaagtgggagaagacgtacctggatgtcctgggcatctgctgcaccgctgaggtggcgctcgttgagcggctcctggcgcccatcaacggcgtgagggcggtcaccgtcgtcgtcccctcccggaccgtcatcgtcgaccacgacacggccgccgtctcccagttccacatcgtgaaggttctgaacaaggcgggcctcgaggcctccgtccgagcctatggcagcagcgccggcgcccccgggcggtggcccagcccgttcatcgtggcctgcggcgtgctgctcgcggcgtccctgttcgcgccgctcctccctccgctgcggtggctggcggtggcggcggcctgcgtggggtcccagcccatgctgctgagggcgttcgcggcggccggcaagctcaccctggacatcaacatcctgatgctcatcgcggtggccggggccgtggcgctcgggagctacacggaggcgggcgccatcgtgttcctcttcaccgtggccgagtggctggagacgctggcgtgcaccaaggccagcgccgggatgctgtccctgatgtcctcggtgcccaagaccgtggtgctcgccgagacggggcaggtcgtcggcatgggtgacgtggcggtcggcacggtcgtcgcggtcagggccggggacgtggtccccgtggacggtgttgtggtcggcgggcagagcgaggtcgacgagagcagcctcaccggcgagtccttccccgtgccgaagcaggcgcagtccgaggtctgggccggcaccatcaacttggatggttacatctccgtgcggacgacggccctcgccgagaactcgacggtggcgaagatggagaggctggtggaggaggcccagaacagccggtccaggacgcagcggctcatcgactcgtgcgccaagcactacacccctgccgtggtcgtcctcgccgccggggtggtcctcgtgcccgtcctgctgggagctcccgacctggagcactggttccggctgtccctggtgctgctggtgagcgcgtgcccgtgcgcgctggtgctgtccacgcccgtcgccaccttctgcgcgctcctgcgggcggccaggatggggctcctcgtcaagggaggcaacgttcttgagtcgctgggcgaggtcagggtcgccgcgttcgacaagaccgggaccatcaccagaggcgagttcagcatcaaggacttccttgtggtgagggacaaggttcaaatgagccagctactttactgggtatctagcatcgagagcaaatcaagccacccaatggctgctgcacttgtcgagtatgcccagtccaaatctatacagccgaagccggaggacgtgactgagacttgcatctaccatggcgagggcatctatggggccatcaatggaaaacacatctacatcggaaacgaaaggatcatggcaaggtcctcgtgtcgtcaacaagaagctggccaccgagaaacagatggcctcaaaggcgtgtccgttggtctcgtgatctgcgacggcgatctcgtgggcaagttttcgctctccgacacctgcaggaccggggcggccgaggcgatcttgcagctgcgatcaatggggatcaagtcagtgatgctcaccggggacagcgaagcggcggccaagcacgcgcaggagcagctcggcggcgtcctggaggagctccactcggggctcctcccggaggacaaggtccggctcatccgggggctccaggcgcggcacggggcgacgctgatggtcggcgacggcatgaacgacgcgccggcgctcgccgcggcggacgtgggcgtgtccatgggcctgtccgggtcggcggccgccatcgagacgagccacgccacgctcatgtccggcgacgtcctgcgggtgcccaaggccgtcaggctcgggcgccgcacccgccggaccatcgccgtcaacgtggcctcctccgtcggcgccaaggccgccgtcctggcgctcgccgtcgcgtggcgccccgtgctgtgggtggccgtgctcgccgacgtcggcacgtgcctgctcgtcgtgctgcacagcatgctgctgctgagggacgcggcccgcgcgcggcggaggtgcggcggggcgtccaaggcgtgctgtgctacggcgtgcaaggcgcccaagacagcgtgctgcgctacggcgtccaaggcgtgtggcgcgacgacggtgaagcctgtggccacgaggccccagcccgcgggcgcagggaagaaggccgataggccaggaggtgacaagcatggtaatggtaaagacgactgccatcgttgctgccacaagcagagcaagctgcccgaggacgccgtcgtgatcgccataccggtacgagccgtggagcaccggaaggacgcggccgctcacgagaaggcggaaggcaacgccgccgggggatgctgcggtggcgctcccgcttcggccgcgtgctgcgcggaagcacacggtggcgaggacgaggtgtgcattgtcatcagcgcgaggtcgccctgctgcagcacggcgaggagtcggtctgcttctcccaaggacgccatgtgctgcggctccggtggtaaagacggcggcgccatctcagcccttgtgtgctga

SEQ ID NO: 108273 - DNA, 3192 bp, Zea Mays
cgaatgcagaagtggctcacagaacctccaatcttgtcgctgatcagtggacgccgtcgttgtcgctgcagtccttgattctggccaggacaggagcagcggcggcgatgggcagtgtcgaggagaggctgctgccaccgccgccggccaggagcgcagatgctggcgccggcggcgcgaagagtggcaagtgggagaagacgtacctggacgtgctgggcgtgtgctgctccgcggaggtcgcgctcgtggagcggctcctgaagccgatcgacggcgtgagggcggtcaccgtcgtcgtcccctcccggaccgtgatcgtcgagcacgacctcgccgccgtctcccagtcccacatcgtgaaggctctcaacaaggcggggctggaggcgtccgtccgcgcgtacggcagcagcggggtcgtcgctcgctggccgagcccgtacaccgtcgccagcggagccctgctgctggcgtccctgttcgcgccgctgctaccttccctgcgctggctggccctggcggcggcctgcgccggcgcgccgccgatggtgctcagggcgctggccgcggggctcgccctggacatcaacgcgctgatgctcgtggccgtggccggcgccgcggcgctcggcgactacgcggaggccggcgccatcgtgttcctcttcaccaccgcggagtggctggagacgctggcgtgcaccaaggccagcgccgggatgtcgtcgctcatgagcatggtcccgcccaccgtcgtgctcgcgcagacaggggaggtcgtcggcgtgcgcgacgtcggggtgggcgccgtcgtcgctgtccgggccggggaggtcgtgcccgtggacggcgtggtcgtcgacgggcagagcgaggtcgacgagagcagcctcaccggcgagtccttccccgtgcccaaacagccgcaggcggaggtctgggccggcaccatgaacctggacggctacatagccgtgaggacgacagctctggccgacaactcgacagtggccaggatgcagcggcttgtggaggcggcgcagaacagcaggtccaagacacagcggctggtcgattcatgcgccaagtactacaccccagccgtggttgctgttgcagctggcgtggctcttgtcccgctgctgctggggccacggggagcgcaggacccgaaacggtggttccagctagcgctggtactgctggtgagcgcgtgcccgtgcgcgctggtgctgtcgacgccggtggctacgttctgcgcgctgctgcgggcggcgaggatgggggttctcatcaagggcggggacgttctggagtcgctgggcgagatcagggtcgcggcgttcgacaagacgggaaccatcactaagggcgagttcagcgtccatgggttccatgtggttggggacaaggttggaatgagccagcttctttattgggtgtcgagcattgagagcaagtcaagccacccaatggcaaccgcactcgtcgagtacgctcagtccaaatccatccaacccgagccgacaagcgtcactgacttccgtatctaccctggagagggcatatccggagcgataaacggaaggcaaatcttcattgggaacacaaggatcatggcaaggtcctcctgctacgcagcaggagcaggtccggagatggaaggccagcaaggtgcgtcgatcgggcatgtgatcgtcgacggcgaccacgtggcggcgttttcgctctcggacgactgtaggaccggcgcggcagaggcgatccgtgagctgagatcgatgggcatcaggtcggtcatgctgacaggggacagcaaagcggcggcgtcgcgggcgcagcggcagctcggcggcgccctggaggaggtccactcggagctcctcccggcggacaaggtcgcgctggtcggggacctcaaggcgagggccgggccgacgctgatggtcggggacggcatgaacgacgcgccggcgctggccacggcggacgtgggcgtcgccatgggcctgtcgggctcggcggccgccatggagacgagccacgccacgctcatgtccagcgacctcctccgggtgcccgcggccgtccggctcgggcggcgcgcccgcgcaaccgtcgccgccaacgtgatcgcctccgtgggcgccaaggccgccgtcctcgctctggccgccgcgtggcgccccgcgctgtgggtggccgtgctcgccgacgtcggcacgtgcctgctcgtcgtgctgcacagcatgctgctgctctgggacccagctggcgcgggctggcggaggaggggtgggggtggggaccccgaggcgtgccgcgcgacggcgcggtcgctggccatgaggtctcagctcgccgaagcgtccaacggcgcggccggaaccgctcagggacgacgaccaggcggtgggaccaaagcaggctgccattgctgtcgggagacaagcgagccgtctgagcaggaccacacggcggtggtggtcgacataccggcaccatccgctgagcgtcctggtgttgtggcgccgaccgccgccaccggatgttgcagcagctccgcccgcgaagcttgtgctactccaaccaccgtgactactgtgaactctgcgccacgaggttgctgtggcggcattggcgaaggagacacccgcgagaatgcaaggacaagctgctgcaccgatgcccgtgactctcctaagaaggcagggcaacaatgcaacgcaaggtgttgttcttggggcaaacaaaatactctcaagtgtcaagcgcaggatacaatctcaaatctcaagtgaaatactgactgttctgttcatgcaacaagaccaaaagctttccgagtgttcagatcgactgggttgctcgtgaagttttcaacattgagagtgatcaaatccttagctgcttgcttttgtctctctattttctccttgtgtatttttaagcgtttatccatgaacaaagtatcggtactagggtactactaaaccaaggtatttaggctgtttggctcaggtttaaaaatgcttccactgtcaaaaggtagaacgtcaattaattgcgtgtttggtagaaataagctagtccatcatatttctactcctcactttcatgtttggtttgtggaatagaatagagtactatcccgtctaatttataattcgtttgacttttttactcaaa

SEQ ID NO: 108274 - DNA, 233 bp, Zea Mays
ctttctctctctctctctctctctctcttgtagctcgacctcatctgcgcgaccaaaggcaccatggactgggttcagaagctcaagtgggacggcctcaacagtttcctgagctctcccagaacgcccatctactgcaacaagtaggggcagtccggcacccaggccttcgtcaagtcctacaagaacctcaacttctactggatactcgaagccgaacacatggtaattaa

SEQ ID NO: 108275 - DNA, 125 bp, Zea Mays
ctttccaactctggctctagttcttaaaaaaacagcttcttccttatttttagaaagcactacagaaaaatatcatgtttggttgggatacaactcctcttgcagcttacgatgtaaaagaaaaa

SEQ ID NO: 108276 - DNA, 462 bp, Zea Mays
atgacgatgagctcctccagtattaataagcaagaagggccgaagctattcagctcgaggatcctgtcaagggatcgctcgagcgtggccaacgcgtccttcagggtatactacagcctcggcgccggcaccgtgccgttcctgtgggagtccaagccaggcacgcccaagagctcctccacccctgcctcgggagccagcgcagtgccgccgatctcgccgccgccgccctaccagcagaagccggtgtcccagtccatggccgataaggcgaagttcaggaggaggaggccagcagcctcttcttggcctcccggaggttgttggatcatcggctgcctgaacctgaacgtcaggagacggtcgccgcagccgtcgccaacggatcaccagcagcgacgttgccttggcgtcgtcgacggcgacgagcggcggtcgcggcgttccaccatgtgcttctga

SEQ ID NO: 108277 - DNA, 2284 bp, Zea Mays
gtcactgactcactgccactcccactgtgctgccgcaacggcactggatttttgtgagtccgcggctccgcgctcgcttctctctctctctctcccccctttctgccgctcactctcgctcgctcgctcgctcgctcttctactgcgggctggcggcggcggcggcggcgactgggcgagccgcgagcgcgccgcccttcgccaggtcttcgccggccacttcgcgggcgagggcgaccaccgacgagcatccaccaggccgctgaggaataacaaagatgtccgccggcggagtcctgagggcagagttatcttccaggacgccgccgttcggcctgaggctatggattgtgattggcatctgtatctgggcgctaatcctgttcatcctaggcttcatgtgcttctggtccctacaccggaggaagccgggcaagccctgcgacaaggttccgctgtcccaaatccctgacgtctccaaggagattgcggtggacgaggcgcgggagcaagctgttgtccacagcctccgtgtgcaggagagccacacactgtccgtgcaggagaagaagcactgcgaaaaggattcggggaaaatgctcgcgcacctggttaggagcaagtcgagcgatgcagataatctgagccagtgcagctccgcgttccagtgcgaaagggctgggagctcgtattctggtgacgaaggcagctcgggcaatgctaggaggcagtactctcagaccgtctccgcgtcgccattggttggtctccctgagttctcgcatctgggttgggggcattggtttactttgagggatttggagcatgcgacgaatcggttttctaaggagaatgtcattggagaaggtgggtatggagtagtttaccgtggccgcctcataaatggtactgatgttgcaataaagaagctccttaataacatgggccaagcagaaaaggagttcagggttgaagttgaggcaattggacatgtcaggcataagaatcttgtccgccttcttggatattgcgtggagggaatacacaggatgcttgtgtatgagtacgtgaacaatggaaatttagaacagtggcttcatggtgccatgcgtcagcatggtgttcttacttgggaagcccggatgaaaatcattcttggaattgctaaggcgcttgcttatttacatgaagccatagaaccaaaagttgtgcaccgtgatatcaaatctagcaatatcctagttgatgaagaattcaatggcaagctttctgattttggattggccaagctcttgggtgcagggaagagtcatatcacaactcgagttatgggaactttcgggtatgtggcccctgaatatgccaacactggtctgttaaatgagaggagtgatgtctacagttttggagtgctactactggaatcagttactgggagggacccagttgactatggtcggccagctaatgaggtacatctggtcgagtggctcaaaatgatggttggcacgagaagagctgaggaggtggtggatcctgacatggagttgaaacctgccactcgggctctgaagcgtgcccttctagtggcactgcggtgtgttgatccggactctgagaaaagacccactatggggcaggttgtccggatgctcgaggcagaagatgtcccgtcacgggaggaccgccggagccggaggggccacagcggtaacgcagacagcgagtctaaggcaagctcaagtgagttcgagataagcagtgatcgaagagagttggggccgtccgcgaggttccagtcctaacccctgacgagaactcggttttggactagcgatgaacatcagatgagcggtgtgtgtgggggggggggggggggggctggttggtaggaggtaggaaggccattgcatttcattttcgcgaggacatttgcattttgtactgtgtagagatcggaagggcattgcatttctggaggggtaggcattatcctttggtagtaggcagcttagaatgcagagggagatgactccccctgagacgaaagattcagacttgctgtcgtgaatcttggtgttctgttggtgcggacggcagcagcttcagcttgtacagacatttctttctctgtcgtttggttattaggacttgttgggtagtaggaacattaaggtctctttcgtaatgtgatgaatgacttgaaccatcaacctcttgtaatcttcttagtccattggccaagctagagttctgtgaagctccatcttcagcatgggaatct

SEQ ID NO: 108278 - DNA, 1451 bp, Zea Mays
tcatcacccttcttccgccggaaggaaaagagaaaaacacacactctctttccgagctctctcgctgtctctcacccagccgccaccatgtcaggcctctacaaccagggcttctcccctgcaagaaccctctccccccagattaggagcaaccccgacgctgatagccagtacttggccgagcttctcgccgagcaccagaagttggggccattcatgcaggtgctgccgatatgcagccggctgctcaaccaagaaatcatgcgggtgtcaagcatggttcatgaccatggatttagtgatcttgacagacgccggtttagaagtcctagccctatgtcttcaccgattgtccggcctaatctacatggaaatggttttggtccttggaatgggatgcaccaagagagattgggctttcctcctcctggaacaagtatggactggcaaggagcaccaccgagccctggctcttatattgtcaagaagatcatgcgcttggaagttcccgtcgactcttaccctaatttcaactttgtgggacgcattctagggccaaggggtaattctctaaagcgagttgaatcatcaactggctgccgtgtttttattagagggaagggttccgtcaaagatacagaaaaggaggacaaacttaaaggaaaacctgggtatgaacatctgaacgagccactgcatatattaatcgaggctgagttaccagcgaacattgttgatacaagactgagacaggcacaagaagtcatggaggaattgctaaagccagtggacgagtcacaagatttgtacaagaggcaacagctgagggagttggctatgctaaactctactctgagagaagacagtcctcaccctggaagtgtctcccctttcagcaacggcggcatgaagcgcgcaaaaccaagccagtagagaaaggtttcaggctctcctccaccctcctccactccagtcgttcttggtgcagcaccagcaaggtgtgcctgcccttgaacctgcgctgcttcgtgtcgtgggtgcttgtgtaagaaaaaaaaggtatatgcattttgctgctgctggacggacaggtggtcgagacgaggaggaaatcgctggtcgttgaactgtctccatcttcggtggatccggccattttgctgctgtaaggtgatgggcattcgttctattcgttactgactgttgaccagattatgatgccgtggtttcaggggagactagctatgcctatggccctgataattagtgtgagctggttcgtttaggtgtttaattagtttgtattattattattcgcgttacgttgtggagtagtagcaaacgtcacagctggtgatgcactccgctctgacagtttgatgaggacagctttgaataaaccatgtgaattcagaatgttactgaaacggtgggacgtccgttctatgcct

SEQ ID NO: 108279 - DNA, 1126 bp, Zea Mays
tcatcacccttcttccgccggaaggaaaagagaaaaacacacactctctttccgagctctctcgctgtctctcacccagccgccaccatgtcaggcctctacaaccagggcttctcccctgcaagaaccctctccccccagattaggagcaaccccgacgctgatagccagtacttggccgagcttctcgccgagcaccagaagttggggccattcatgcaggtgctgccgatatgcagccggctgctcaaccaagaaatcatgcgggtgtcaagcatggttcatgaccatggatttagtgatcttgacagacgccggtttagaagtcctagccctatgtcttcaccgattgtccggcctaatctacatggaaatggttttggtccttggaatgggatgcaccaagagagattgggctttcctcctcctggaacaagtatggactggcaaggagcaccaccgagccctggctcttatattgtcaagaagatcatgcgcttggaagttcccgtcgactcttaccctaatttcaactttgtgggacgcattctagggccaaggggtaattctctaaagcgagttgaatcatcaactggctgccgtgtttttattagagggaagggttccgtcaaagatacagaaaaggaggacaaacttaaaggaaaacctgggtatgaacatctgaacgagccactgcatatattaatcgaggctgagttaccagcgaacattgttgatacaagactgagacaggcacaagaagtcatggaggaattgctaaagccagtggacgagtcacaagatttgtacaagaggcaacagctgagggagttggctatgctaaactctactctgagagaagacagtcctcaccctggaagtgtctcccctttcagcaacggcggcatgaagcgcgcaaaaccaagccagtagagaaaggtttcaggctctcctccaccctcctccactccagtcgttcttggtgcagcaccagcaaggtgtgcctgcccttgaacctgcgctgcttcgtgtcgtgggtgcttgtgtaagaaaaaaaaggtatatgcattttgctgctgctggacggacaggtggtcgagacgaggaggaaatcgctggtcgttga

SEQ ID NO: 108280 - DNA, 518 bp, Zea Mays
tcatcacccttcttccgccggaaggaaaagagaaaaacacacactctctttccgagctctctcgctgtctctcacccagccgccaccatgtcaggcctctacaaccagggcttctcccctgcaagaaccctctccccccagattaggagcaaccccgacgctgatagccagtacttggccgagcttctcgccgagcaccagaagttggggccattcatgcaggtgctgccgatatgcagccggctgctcaaccaagaaatcatgcgggtgtcaagcatggttcatgaccatggatttagtgatcttgacagacgccggtttagaagtcctagccctatgtcttcaccgattgtccggcctaatctacatggaaatggttttggtccttggaatgggatgcaccaagaggtaggcgtaaatattaatcgctgaaataagcttccttttgttaacatgtttcttttaacattttgatagcagggacaaaatcatggatataatgctctataaaatgtaat

SEQ ID NO: 108281 - DNA, 1777 bp, Zea Mays
tcaaaatccgtctctattcggtccaatacatttcaattcatatggattagaaataacccaacaagtccttaaatgggtgttacacatgcccataaacatgttatacgtagtactgtactctcaaaattaccgtagcttacataatttcccgtacacaggaaagtgaaacacagcatggttctcatttatctctcggtcaagctttcgtcgacatcagcatccaccatagcggccgaccgccacacccaaccatcgcggcccctgccccttccccgttcgtccccttcccctggccgccgccgcccccaatcccacctcctcgcgctcgcccccctccctttgaccccacccgctcccgagaagcttcgtcgccttgactctctatttatcccccgatcgccaagaacaactccactccgctcccccatttttttctcacctcccgtggcagcagccggccaacacccgcaccgcagtccacagcaagaaccaagccacagcgaagaaaagatccaatggtgatggcgccggcggcggcgcagcagcagcggcgccgcgacgcggaggcggagctgaacctgcccccgggcttccggttccacccgacggacgaggagctggtggcgcactacctctgcgcgcgcgccgcgggtcgccgccccccggtgtccatcatcgccgaggtcgacctctaccgcttcgacccctgggacctgcccgagcgcgccctcttcggccgccgcgagtggtacttcttcacgccgcgggaccgcaagtaccccaatggctcccgccccaaccgcgccgccgggtcggggtactggaaggccacgggagcggacaagcccgtggagcacggtggcaggacggtcggcgtcaagaaggcgctcgtgttctaccacggcaagccgccgcgcggggtcaagacggagtggatcatgcacgagtaccgcctcgccgacgccggcgcccgcgcccgcgccaggaagcccggcaccggcacgctcaggttggatgactgggtgctctgccggctgtacaacaagaagaacgagtgggagaagacgcagcagcagcaggagaagaagcagaatcagaagcaaatggagtcggaggcctcgctctcgcactcccactcagacacgcggacgccggagtcggagatcgacgacgacccgttcccggagctggcctcgctgccggcactcgacgacatgatgggcccagcagcagcagcgcctgccggcgccatcttgcccaaggaggaggtggaagacttgggcggcctcggcggcgacgactggctcgcgggcatcaacctcgacgacctgcagatcccgggcgaggccgacttttatggctccatgctcgtgtcgccgatggccgccaagatggagcaggacgccgccggcttcccgttcttctgagaccttctgcgcaacgcaaactgtgtatagttcagatttcttcaggattcggagaaaaaaacagttctgctgatatctggttgtagtggtttagtgcacaagcagcagtatgccggtcagttaagattgaagtccattgtagttcatcaccacttgagctgtgactgtgataagtgacagcattctttcatttctggtctgctaattcttcaatggtcagaatatagtttgtggccttcccagagtggtcacaccactgtggagccttgagatggagtaaattttttcttcaaggtttacggtttacctctttaaaatatcttagtactgtttctatttggtggttcaga

SEQ ID NO: 108282 - DNA, 963 bp, Zea Mays
ccccacccgctcccgagaagcttcgtcgccttgactctctatttatcccccgatcgccaagaacaactccactccgctcccccatttttttctcacctcccgtggcagcagccggccaacacccgcaccgcagtccacagcaagaaccaagccacagcgaagaaaagatccaatggtgatggcgccggcggcggcgcagcagcagcggcgccgcgacgcggaggcggagctgaacctgcccccgggcttccggttccacccgacggacgaggagctggtggcgcactacctctgcgcgcgcgccgcgggtcgccgccccccggtgtccatcatcgccgaggtcgacctctaccgcttcgacccctgggacctgcccgagcgcgccctcttcggccgccgcgagtggtacttcttcacgccgcgggaccgcaagtaccccaatggctcccgccccaaccgcgccgccgggtcggggtactggaaggccacgggagcggacaagcccgtggagcacggtggcaggacggtcggcgtcaagaaggcgctcgtgttctaccacggcaagccgccgcgcggggtcaagacggagtggatcatgcacgagtaccgcctcgccgacgccggcgcccgcgcccgcgccaggaagcccggcaccggcacgctcagggtaagcggcgagcacctcgcagtctcgcgccgaattttcttccttggtttcatctcctcgttataaggaatcaccaccggccaccgggatgctgacgcgctgttcgatcgactctcctgcagttggatgactgggtgctctgccggctgtacaacaagaagaacgagtgggagaagacgcagcagcagcaggagaagaagcagaatcagaagcaaatggagtcggaggcctcgctctcgcactcccactcagacacgcggacgccggagtcggagatcgacgacgacccgttcccg

SEQ ID NO: 108283 - DNA, 476 bp, Zea Mays
tttttttctgcagttcctagattatgtgttgtgtctctgtcgtcatgcatacttactcatctgcactggctggctgcagaaaccttaattattagtttttttttctccggatgcatggatcgacgacactgcagggctaacacacaaatcatgcatgtgcatagtacaccgatggatatgcatggatcggatggagagtgatgctactaactagttgatggaatggaagagctatcaaccgatcagtgatggtctagttttgcagcagtagttcatcagaattcattcaattcaaaagggagggaaaaggatgaacatctagcttacaaataatacactagtacgtagctagctagtgcaccaattagtggagtctgaggcgggaagcatcgaattaaaaagcacgaacaaatcagcggcataaacaaaaaaaatctggacaataaaaaataaatcagtaacaaagacaaaaaata

SEQ ID NO: 108284 - DNA, 1408 bp, Zea Mays
cggcgtggtcgcgggctcgcgacgatgctcctggcggggcgagcggcgctgcggcggtgctctgacggcccggcctccggacgagcggcgctgcggcggcccggccttcggacgagcggtgctgcgggctgcggcggcggggctccgggcgtggctacggcgggggtccgggcgggccgcggcggcagcggggctccggacgagcggcacggcggcctgcggggtgcgggctgcaggctggagcgggagggtagaggactagagggactgagggaggatgttcacgtcttcacgggactggctggagctgggcggctgaagctgggcgcctgggggtcgcgtactcgcagcagtgatggacctctactttactgggccgcgaccggggctgcagcccaggcagccccggtcggagatccgcccctagttgtgttacgagctttattatggcggttggaaagaactgtaccccttgaatttctagaatgcaaggaaggaatcattcgcctgctagccctgagacaaattgtttatgggcttgagtccaacccatatgtggagcaggcctgcatccgtggaacatttccgtggtgcagcttgctgctcatcgtcggaccagtagccatcacgtcgcgcatggctaggccctcatactcctcatctgacttggtcgagtgttcgtccatagagccgacatctatctgcaagtaccctgtgacgtggaagaacattagctttgcagtgggtagctcacactcaaaacttcacccaatttacagtcctgctaacattgggatggcttttacgaagctaccgggccttgaaagaatggagatctcaaaatgcaatgcaaggataggtgaaaacaggtttagtaatgcagagtcaatgaacacagtaagatgtcagaaacaacagttgttgagtggcatgacctatgtaatggaaggtcagaaacagattggtctaagcagctctcaagttgggaaaccagctctggatggttatgggggccaaggtgatcatcatctgcagcaacccacagttcgtttgatggattcactgctttatccatcatgcctgtggaattttggtaatcagtttgttcgtcaagctgaactcaataaggcagctacaaatcaaagaatagaagctgaggaacaaaacattctatgaagattaaagaataaccaatcaatgaaaatattaagggccaaagtcagacgttaaggatttttttacagggaaaacaaagaaattattaagggccttacattatacattttactcagttagaagttgttattactgatcactgaaacaaaagtaattgaatcaggaaaaaacaatgagatgttattactgctggcaacagtttggaagaaacctcttagtgggtcattaatca

SEQ ID NO: 108285 - DNA, 264 bp, Zea Mays
gtgctcgataagggggttccatgatgtacttccatgatgtatgtggccataagcacatttgccccaatgattatcaaacaaagatagttagtcaaaaaacactaaaaatagatttgttgccccaatcactatggagattttctaccaagaaggggtcttagtgtcccatacacatctagtagttgcatcaactatccatgacaagatcaaacaactgacatcgatggagggacacaaaattcttcatttgaaggatactaacac

SEQ ID NO: 108286 - DNA, 342 bp, Zea Mays
cagacaggcaattgaaaaagagaattgatcttttttatgggcgaagtgttgaagatggctttggcgaaggaaatatcttgttagtgcatcaagtaagtggcgacatcacaacccctacaagcttgtgccttaaaacaagaggatacaagaagttggagtgcttttgtgaaggcttttgcgaatcacttgaagcgttagtactttttgtgaatgattttgtaaagtgtttgcaaatatgtgcaaaacataataacatgtgtaggttttgtgaatgattttgttgtggtgcttgttgatggtttatgtgatgtggatctatcattgtgcaatactaattaaatt

SEQ ID NO: 108287 - DNA, 1390 bp, Zea Mays
cgaggagcagcctatgccggccctaaacccgtgtccccctcgtttccgctcttctgctcctcgcgccgccgcagcgacccgacgacaggtaatggcttccgccgcggtgctccggaacgccggatctcgccgcctcttctcctaccccaccctccgtgctgctgcaatctcgggacccgccgtgctaccagatgcgcccgtggcggcgtcggtggcggcccagccgcccccgctggcctggacactctgggcgatgtccatggccaccttcacacgcacgaagccccatgtgaacgtcggcacccttgggcacgtcgatcacggcaaaaccagtctcactgccgctattaccaagggaatatcaactacaaggaatttgcttgcagatgatgctatggtgcctatctcctctcctttgactcctccactaggtgacagtgaagaaactgacaaaaagggggctgtggtaaaacgcctaaaggtccaagccataaaaaaagatatcaaacagagtcccaagaaggtgaatctagtagcaaagctggttcgaggtatgcgtgtagaagatgccctactgcagctgcaagtgactgttaaaagggctgccaaaaccgtttaccaggtgatccattctgctcgggccaatgcatctcacaaccatggattggatcctgataagctcattgttgaggaggcctttgtgggaaagggacttttcctgaagagagtgtcttaccatgccagagggaggtccggcattatggtgcgaccaaggtgcagactgacagtggtggttagagaagctacagctgaggaggaggcaaagatcgccaaactcagggtgagcaactacaagaagctgaccaggaaggagcagcagcttatgcctcacaggctcatcgaggttagcccgaggtggattcgcaagaggaaagcggaggctggtgctacggcgtagtactttatgtatgcagaacctgcattcactgctttgcacatccgaggagcgaacatgccttccctggcacaaatacttgatcctctctcggtgtcgattcacgcaaacgggttacaaagctaggcttggtttgttttgctctaaatccatgtggattggatgtgtttaaatcgcaaacaagtcaaaatcctttataagtttttctaatctcatcaaatccacatgggatagagaataatcgaacaagaccgtaggtggattcgactatttggtaatcttggtcgtttggagtctaggaagagaggaaaatgctatgtattttagcgatgtgcattgtagccaactaaaacctcgccaaagcattggatgtgcatgagacacgtaccattgcttctacaatttcatgcaactattggtttcagctggtttcaa

SEQ ID NO: 108288 - DNA, 91 bp, Zea Mays
ggcatctggaggcgacatatgtagtataccgctagatacatataaggagagagcacgcaagcagagaaagaagcctagccgtagcagctcc

SEQ ID NO: 108289 - DNA, 1076 bp, Zea Mays
acgacaacgacaaaagccatgttggcgcccacggccgccgcggtgtcagctgccactgccaccaccaccctcccaaggccaccgccatcgtccatcgacctaaggcggccgctggaacgaggcatggcgctccccctgcaaccgtcactgccgccgccactgctgctggtcagtgccaacaataggcacaaggccgtggtggtgatgggcgccacggggaccggtaagtcgcgcctcgcggtggacctcgcgctccagttcggcggagaggttatcaattccgacaagatccagctacacgcaggcctggaggtgaccacgaacaaggtgacggaggaggagcgcgccggcgtgccgcaccatctgctcggggtggcgcaccccgacgtcgagttcacggccgccgacttccggcgcgaggcgtcccgcgccgcgggtgcgatcaccgcgcgcggccgcctcccgatcatcgccggcgggtcgaactcgtacgtcgaggagctcgtggacggcgacggccgcgcgctccgggagggctacgactgctgcttcctctgggtggacgtgcagcccgccgtgctgcatggctacgtcgcccggcgcgtcgatgagatgtgcgctcgcggcctggtggacgaggtcgcggcggccttcgacccgcgccgcaccgactactcgcgcggcatctggcgcgccattggcgcgccggagctcgacgcgtacctgcggtggtcgggagacgagggcgagcgcgcccggctgctggcagccgccatcgaggacatcaagtcgaacacccgccggctgtcgtgccggcagcgcgccaagatccagcggctggccaagctgtggggcgtccggcgcgtggacgccacagaggtcttccggaggcgcggcgatgcggccgatgaggcctggcagcggctcgttgccacgccgtgcatcgacgcggtgcgctccttcctgcgcgacgccgccgtcgtcgctgcggccaatgatccgccggcagccgaagtagtgcccgtgtttgctcccgcgtcggcagctgtcgtcgcaggataactaatgacagctgc

SEQ ID NO: 108290 - DNA, 2934 bp, Zea Mays
gattatgtaagaaaagaaaaaccacgattttcaatattatgaaaccattgttttaacttaaaaaacttgtctaaaaacagcaaccaattatatgctacttgctgtaaatataaaatgctacaaaaaataaataaaattgttctgaaaataagatcaatcataaaaccacctaacaagaaactgaaaagtaaaacttcgcaagaaaaatgtgggcaggcgctcaagattcatgtgtccagcgaccgagaaaacccccaaaatgtgctttaccttctaaaaataggctccccaagaaacccacggacaacagagtagcttaaacacgcgctcgcgtacagcgaagaaatggcgatggcgatgcagccatcttagtccccttccctgatcccctctccctctccttctccatggccgcccctcctctggtgtttgtcgccgctgccatagccgcgctcgccatcttcgtcctcgtcctcgtcgtcttcgccttccggcgatggtggtggtggcggcggcagcgccgcccgctccaggccgcggcggaggcctcgaccccggtcgctgtccaggaggaggatatagataggcctcttctttccgaaaatcgggacgatcactctagacaaagtaattattttcttggaagttctgtaggagaaccttcaaagattcaatcaaataggagtaacatttcgcctagaagtcatgcaattgctgatacagggaggacttatccagatgaatgttgtgctacacaaggagaaactcatgtaatcaatattgaaaatgatacttctgaagagtttcgattaggaagcacgttaagacggacatcaccagcaaaattgacaacacctgctcagaagcacagaagggtttctggagatgactatcataatggaagtgttcctctgaaggatagtacatatcatagtagcctagatttagaggtcatagctggtccatctcatggaataagctgttctcggcagtcaagtaggccttctatgctcccaataactcttggaagggttcccccaagtgatttagtgttaaaggactctgaagtatctgggaaacatgctcagataaactggaatgcaaagacattaaaatgggaacttgtggacatgggcagcttgaatggaactttcttgaactcccaggcagttcatcatccagatgctgagtctaggcattggggtgaacctgctgaacttgcacatggtgatattataactctagggacttcatctaaactatctgttcaaattacactgcaaaatcaacgagttcctgctggtgttggtatggcatccgatccaatggtggcacgtagaagtggaaagaaacttccaatggaagacataagcttttgccagtgtcctctgcagggtgttgaacattttgggctctttggaatttttgatggacatggtggggatggagctgccaaagctgtcagcaagattcttccagaaaatctgggatacatgttatctcatcctgaaacaaaagaacgagtgcagtcatgttctgatgcttctgatgttcttagatatgcttttactttgacagaagatgcaatcgatcatcagtacgagggatgtacaggcacagcacttcttatttggtttgatcaaaataaagattgttttgcccagtgtgctaatcttggtgattctgcttgcgtaatgagtgtcaatggaaagacgatcgatatgactgaagatcaccgggtagctagcgcaactgaaagagctaggatagcaagaactgggcagcccctgaaagatggggaagtccgtcttaatggactgaatcttgcgaggatgtttggagacaagtttcttaaggagcaagactcacgcttcagctcagaaccatatctgagccaagctgttcgtatcaccaaagcgtgcacagcttttgccgttattgctagtgacgggctttgggatgtcatcagcacgaaaagggcggtacagcttgttgttgagggaacggagaggtactctggtgacagcgcctcagcggctaaagtagccaaccgcgtgttggacgaagctaggagcttgcgaaccaaggacaacacatccttaatatttgtagattttgacattctgagaacagatccttgtatcgccaaatgacatgtcagattcaagacacctttccgtgaaccatcttcctggctgcttatatagctccaagttttggtccacccattcagttttttagtgagatgtgatatatatattcagctgtagattggcataggagcagagtccataccatgtaatctggtgcatgcttttagactctagtgcgtgcgcgctgcctgcgtgtgggtgtgtgtgtgagggggattgtcaatgagaaggtcttcatggagaaacttcctggtcaattttcaatagagttagaattttggaacaagagtttcttggccactgaccccctcaatcttgtctgaagaacgtcgggagaaacttggtgctagacccagttgctgccacgtggacagcattgagcctgagtttttgtcaagtctggaatccttttaccgcattggtgaacttcggtgttggatcactcatccattctaaatttgaaactagtttttgttctatgaattcaggaagttttggctcatttttttaccacaaaaaaatatcaacacttgtgccagaagtattcaagggacaatctagatattggcaaccaacgtgcaactgaattcctactccctagataggccttgcagagataagagaagatggggatgtacaagatcgaattagggtttaggttgatgagttacgtctaataataatatattaattccctgagaaactgaggagccgggtggccaaatccatgcaggaaaatttgatgaaagactatgatttaatcgtcgtcatcaggcatggg

SEQ ID NO: 108291 - DNA, 2510 bp, Zea Mays
gattatgtaagaaaagaaaaaccacgattttcaatattatgaaaccattgttttaacttaaaaaacttgtctaaaaacagcaaccaattatatgctacttgctgtaaatataaaatgctacaaaaaataaataaaattgttctgaaaataagatcaatcataaaaccacctaacaagaaactgaaaagtaaaacttcgcaagaaaaatgtgggcaggcgctcaagattcatgtgtccagcgaccgagaaaacccccaaaatgtgctttaccttctaaaaataggctccccaagaaacccacggacaacagagtagcttaaacacgcgctcgcgtacagcgaagaaatggcgatggcgatgcagccatcttagtccccttccctgatcccctctccctctccttctccatggccgcccctcctctggtgtttgtcgccgctgccatagccgcgctcgccatcttcgtcctcgtcctcgtcgtcttcgccttccggcgatggtggtggtggcggcggcagcgccgcccgctccaggccgcggcggaggcctcgaccccggtcgctgtccaggaggaggatatagataggcctcttctttccgaaaatcgggacgatcactctagacaaagtaattattttcttggaagttctgtaggagaaccttcaaagattcaatcaaataggagtaacatttcgcctagaagtcatgcaattgctgatacagggaggacttatccagatgaatgttgtgctacacaaggagaaactcatgtaatcaatattgaaaatgatacttctgaagagtttcgattaggaagcacgttaagacggacatcaccagcaaaattgacaacacctgctcagaagcacagaagggtttctggagatgactatcataatggaagtgttcctctgaaggatagtacatatctgcagatagtagcctagatttagaggtcatagctggtccatctcatggaataagctgttctcggcagtcaagtaggccttctatgctcccaataactcttggaagggttcccccaagtgatttagtgttaaaggactctgaagtatctgggaaacatgctcagataaactggaatgcaaagacattaaaatgggaacttgtggacatgggcagcttgaatggaactttcttgaactcccaggcagttcatcatccagatgctgagtctaggcattggggtgaacctgctgaacttgcacatggtgatattataactctagggacttcatctaaactatctgttcaaattacactgcaaaatcaacgagttcctgctggtgttggtatggcatccgatccaatggtggcacgtagaagtggaaagaaacttccaatggaagacataagcttttgccagtgtcctctgcagggtgttgaacattttgggctctttggaatttttgatggacatggtggggatggagctgccaaagctgtcagcaagattcttccagaaaatctgggatacatgttatctcatcctgaaacaaaagaacgagtgcagtcatgttctgatgcttctgatgttcttagatatgcttttactttgacagaagatgcaatcgatcatcagtacgagggatgtacaggcacagcacttcttatttggtttgatcaaaataaagattgttttgcccagtgtgctaatcttggtgattctgcttgcgtaatgagtgtcaatggaaagacgatcgatatgactgaagatcaccgggtagctagcgcaactgaaagagctaggatagcaagaactgggcagcccctgaaagatggggaagtccgtcttaatggactgaatcttgcgaggatgtttggagacaagtttcttaaggagcaagactcacgcttcagctcagaaccatatctgagccaagctgttcgtatcaccaaagcgtgcacagcttttgccgttattgctagtgacgggctttgggatgtcatcagcacgaaaagggcggtacagcttgttgttgagggaacggagaggtactctggtgacagcgcctcagcggctaaagtagccaaccgcgtgttggacgaagctaggagcttgcgaaccaaggacaacacatccttaatatttgtagattttgacattctgagaacagatccttgtatcgccaaatgacatgtcagattcaagacacctttccgtgaaccatcttcctggctgcttatatagctccaagttttggtccacccattcagttttttagtgagatgtgatatatatattcagctgtagattggcataggagcagagtccataccatgtaatctggtgcatgcttttagactctagtgcgtgcgcgctgcctgcgtgtgggtgtgtgtgtgagggggattgtcaatgagaaggtcttcatggagaaacttcctggtcaattttcaatagagttagaattttggaacaagagtttcttggccactgaccccctcaatcttgtctgaagaacgtcgggagaaacttggtgctagac

SEQ ID NO: 108292 - DNA, 4188 bp, Zea Mays
atggccacgtcggcgccgccaccgtcctccgcgccgtggctggagtgggccgcggagtataccaaggcggcgcaggccgaggcccgcccgccgccggagtgggcggcgcgggtggcggcggccgctgcggcggcgggcgagagtgaggacgtgccctggtccgcggggctcgcggaggtgctggcgcgagcgctgttccccggcggcggcggcggcggtggcggggctgccccggcggccgccgcttggaagtacgcggaggccgcgctcgcggcgcggcttgcgtccccggcgctcctcctcgcgctcctctccaccagggtaattcctcaccggctttccaggccaatggagtatagactctaccttgagctcttgaaaagacatgggttcaacttccatcatcagatgaaagcagcaaatttcagaaagatcatggatataatagagcggaatcttagactttccaagatatttggcatctctacatgtgaaccaggggtttttgttgtgcatttcattctttgtattatatggcagttgattgatgttgttctggatgatgagggcctactagagttaactccagagaagaatgctcaatggccaacaaggcctgaagatgtgagcacatttgaaggaacttttactgaacaaagaactgagaagatcaaaaagttacagaagatgaacactgtaacaactatggagctcattgagcatcttcttcgcgataaagtaattactcgtatcctatcattggcacgcgaaaacatgcaatctcactggggggcatttactaaccggttgcacttgcttgcaacaaactcatctaccttgcaaaattcagcaatatccttggaaccatttcagcatttgattctaggtgattgtgatgcatatggtgaaactaaacataatgtgcataaaagattccaccaaatagtggcttctaaccctctatcttcaccaaatggacgatgtcttggtgctagctattctgcactatggattcctattgatatgtatcttgaggattgtctcgattgttcaattgctgcaacaaattctattgagattttaagtggtttggtcaaggctcttcaagcagtcaataggtcgacttggcatgatgctttcttggccctctgggtagcttcacttcgccttgtacaaagagaaagagaaccaattgaaggtcctgtacctcacctagacacccggctgtgcatgttgttgtctatcacaacacttgcgattgctgacataattatggaagcagattcactttgcaatgaaacagaactcaacagtcatgtgaatgagaagaaagcaattggtaatctacgcaatgaattgatgctaagcttacagatacttggtgattatgaaagcttgctggttcctccttcatgtgtcatcccagcagctaatcaagctgctactaaagctgcaatgttcatttctggaatcagtataaacaatggctacatggataatgtcaatgggatgaactatactggaaatatgcgacatttgattgtggagtcatgtatctcaaggcagttgctggatacatcagcttactattggcctggttatatcatgaatcatgccaactctacatctcatacactccctagtcaacttgctggttggtcatccttcatgaagggtgcaccactgactcaaccactggttaatatgttggtatcaactcctgcttccagcttggcagaggtcgacaagttatttgaagttgcagttgatgggtcagatgacgacagcatttcagctgccactgttttatgtggagccacccttttacgaggttggaattttcaggagcatacagttcggttagttgttaaactgctctcaccatctgatccaattgataattctggaagagagagccaattgataaagcttggtccaatgctcaatgttattctttcaggaatatcggccgtggactatgctccaatcttctcgttccatggcctgattccagagctggctgcttctcttatggcaatctgtgaagtatttgggtgtctttctccaagtgtttcctggacactgagaactggagaggaaatatctgctcacacagtcttctcgaatgcatttattcttctgttgagactttggaagtttaaccatccaccacttgagtattgcataatgggagatggtgctccagttggctcgcagctaactcctgagtatcttctgctgttacggaattcccaggtcctatcttccagcagtttgtcaaaacaacgaaacggacaaaggcaatcacaagtatcaacttcacacccatcatctggaaatcctatttttatggactcgtttccaaagttgaagttatggtaccagcagcaccaagcttgtctggcctcaactctctctggacttgctcatgggacacctgtacgtaacaatgtggatagccttcttaatcagatgttcagaaaagctaataaaggaggcacatcaataggttctttatctggaagtagcagcataagtaattcttccagtcctggtggggatgattcacatctttggcctcagttgccagcttgggagatactggaggctgttccttttgtggttgatgctgctcttactgcttgttcccatggaagactatttccacgtgaactggccacaggcctgaaggatctggctgatttcctccctgcatctcttgctacaatagtaagctacttttccgctgaggtgacgcggggtgtctggaagcctgcatccatgaatggatcagattggcctagcccctctgtgaacctatccatggttgatgagcacatcaagaaaatcgtagctgctaccggtgttgatgttccaaagctagttacaggaggaagctcttcaggtacacttccgttaccattggctgctttcgtgagcctcacaatcacatacaagcttgacaaggcatcagagtgtttcctcaaccttgctggtccagctctagagaacctggctgcaagctgcccttggccaagcatggcaatcgttgcagcactgtggacccagaaggtgaagcgatggagcgatttcctaatattttcagcttcgcgcactgtgttccaccacaacaacgatgcagtcgtccagctcctccgaagttgcttcgccgctacccttggcatgtcttcgacatcagtatgcagctgtggaggtgtcgccagccttctgggccacgggtactgccctggtggtttctcgccagttgcgccaggaatcctctacctccggatattccggtgcatcaaggactgctccatactcgccgaggacatactctcccttctgatgctctcagtgaaggatatcgcagaaacaactgtgcccagacaaaggccagacaagctaaagaagaccaagtacgggatgaggcatggccaggtatctctttccgctgcaatgacgcaggtgaaggtggcggcatctctgggggcgacactcgtctggctatccggcggcacggctctcgtccagtccctgatccaggagatgctgccgtcttggttcctgtccgcgcagaacctggatcagggcggggctagcggaggcgtggtgtacaagctaggcgggcacgcgttggcctacttcgcggtgtactcggggatgttggcctggggcatcgaccagacgcccgtgtcccggcgccgcgagagggtcatgcggtcgcacctggggttcctggcgagcgcgctggccgggaagatcttcctcggctgcgacctctccctgtggcgagcctacgtctctgggttcctaggactggtggttgaatgcaccccgtgctgggtgcaggaggtggacctgagggtgctcaagcgcctgagcagcggcctccggcactggggcgaggatgagctcgcggtggcgctcctccgccgcgccggtcccgaggctatgggcacagccgcggagatgatcttgggcagggagttgtgacgccgatgcgcgcgcgcgccgcgcggcgtatgctgttcgtcagcgatgatgcagtttttgtatataatcggttaaaatctggccatgtgtatgctcacgggtaatatttgaatgattttatctgtaaaactgttaagacgttttgatctctctaatactaaccttcatctacccgtttgcaaaaaaaagaaa

SEQ ID NO: 108293 - DNA, 897 bp, Zea Mays
aaaccaacccagcagcacagcacctgcagggctgcagcagacaccactccagcagcctctctctctctctctcctcaccggcacggcactccacgcggcggcaggagcacccaccgccactgacgggcgggggggaacacgcgcggccatggccacgtcggcgccgccaccgtcctccgcgccgtggctggagtgggccgcggagtataccaaggcggcgcaggccgaggcccgcccgccgccggagtgggcggcgcgggtggcggcggccgctgcggcggcgggcgagagtgaggacgtgccctggtccgcggggctcgcggaggtgctggcgcgagcgctgttccccggcggcggcggcggcggtggcggggctgccccggcggccgccgcttggaagtacgcggaggccgcgctcgcggcgcggcttgcgtccccggcgctcctcctcgcgctcctctccaccagggtaattcctcaccggctttccaggccaatggagtatagactctaccttgagctcttgaaaagacatgggttcaacttccatcatcagatgaaagcagcaaatttcagaaagtgtgcctttcccctctctgactgctccctgtattttcttaacactatgctcaagtcagtggtctggaatgagaatcagagtaataggtgtagtgttcaatgtaatttagcattattcttaatggccttaaaaataagcatttcagtttcaggtgtttgtaattgtaataaggtttacacttgtatatacaccttgttgtgtgatgtctctgtagtggattagtggtcatatcttaatggccttaaaataagcatttcagtttcaggtgtttgtaattgtaataaggtttacacatgtatatacaccttgttgtgcga

SEQ ID NO: 108294 - DNA, 761 bp, Zea Mays
aaaaatatgcttatgatcatgaaaaaatgttcacacttactatgtctcatttttcagcaagagtgtgaggaattagccaggaaggtagctgacctaacaactgagaatagtgctctcagagcggaacttgacaacctgaggaaggcttgccaagacatggaagcagaaaattcacgtctattggtgagcacggtaccaagtgtcacaaccacactgggaatgagcatcgagccgccaaaggcgcagcagcatcatgacgacgagggccagctccacaagaaatctagtaataacagcaacgggaaaggaagccacaaaccggaggctaacactaggtgagagacaggtgaatgagaaagtgacagagatgagatgaggtgtttcctatctaaccacaacacccatcatcaaccagtgcgttttcacagcccgctggggggccatgtagagtcgccccccactgcagccatgtattatttatggctcgccgcggtgtgcgttgtgtgtttttttgtgtgtgtgtcgtgtaaacctattgatgtagctattgtaacaaaaacctagagagcctagaatttttatgtctgctaactcctgatgaggggggatgtaaccggccaatttggtgcctggtcgatcgtttagatgaaatgcgagcaaatatcatttgatagcctgcctcgccttgttgttgttttggattttttttgcgactttgcgggagtcttttatacaggctattgaattttcgatggtgcttt

SEQ ID NO: 108295 - DNA, 1660 bp, Zea Mays
cccccggtaggctcaccgccggcgacgcgcacgcgtcccaccgcacccaaaccgaccgccacagctgctcgctcgcttccgcccaggaccagagggggggagcctccagatctcggcgcgccatggcgtcgtcctccgacgagcagcccaagccgccggagccgcccgccgccgccgtggtcgccgcaccgccgcagacgcacgccgagtgggccgcctcgctccaggcctactacgccgccgcggggcacccctacgcctggccggcgcagcacctcatggcggcggccgcggcgggggcgcccttcggcacgccggtgccgttccccgtctaccacccaggcgccgccgcggcatactacgcgcacgcgtccatggccgcgggcgtcccttacccgacgagcgaagctgtcgccacggtggcggcggccactgcgccggaagggaaaggcaaggggaagggcgggggcgcgtcgcctgagaagggcagctctggggcgccctccggtgaggacgactccaggagcagtgacagcggcagcgatgagtcgtcagagacgagagatgatgacactgaccataagggttcatctgcgcccaagaaaaggaaatctggtaacacgtcggctgaaggtgaaccgtctcaagctgctgttgtgcgctatgctacggttgagtcgccatatcccgcaaagggaaggtctgcctcaaagcttccagtgtctgcacctggcagggcagcgcttcctagtgccaccccgaatctgaacattgggatggacatttggaatacttctcctgccttggctgttcctgcagtgcagggggaagcgaatcctgggttggcgcttgcccgacgtgatagcgttactcaactggatgaacgtgaattgaagagggagaggcggaaacaatctaacagggagtctgcaaggagatctaggttacgcaagcagcaagagtgtgaggaattagccaggaaggtagctgacctaacaactgagaatagtgctctcagagcggaacttgacaacctgaggaaggcttgccaagacatggaagcagaaaattcacgtctattggtgagcacggtaccaagtgtcacaaccacactgggaatgagcatcgagccgccaaaggcgcagcagcatcatgacgacgagggccagctccacaagaaatctagtaataacagcaacgggaaaggaagccacaaaccggaggctaacactaggtgagagacaggtgaatgagaaagtgacagagatgagatgaggtgtttcctatctaaccacaacacccatcatcaaccagtgcgttttcacagcccgctggggggccatgtagagtcgccccccactgcagccatgtattatttatggctcgccgcggtgtgcgttgtgtgtttttttgtgtgtgtgtcgtgtaaacctattgatgtagctattgtaacaaaaacctagagagcctagaatttttatgtctgctaactcctgatgaggggggatgtaaccggccaatttggtgcctggtcgatcgtttagatgaaatgcgagcaaatatcatttgatagcctgcctcgccttgttgttgttttggattttttttgcgactttgcgggagtcttttatacaggctattgaattttcgatggtgcttt

SEQ ID NO: 108296 - DNA, 1657 bp, Zea Mays
cccccggtaggctcaccgccggcgacgcgcacgcgtcccaccgcacccaaaccgaccgccacagctgctcgctcgcttccgcccaggaccagagggggggagcctccagatctcggcgcgccatggcgtcgtcctccgacgagcagcccaagccgccggagccgcccgccgccgccgtggtcgccgcaccgccgcagacgcacgccgagtgggccgcctcgctccaggcctactacgccgccgcggggcacccctacgcctggccggcgcagcacctcatggcggcggccgcggcgggggcgcccttcggcacgccggtgccgttccccgtctaccacccaggcgccgccgcggcatactacgcgcacgcgtccatggccgcgggcgtcccttacccgacgagcgaagctgtcgccacggtggcggcggccactgcgccggaagggaaaggcaaggggaagggcgggggcgcgtcgcctgagaagggcagctctggggcgccctccggtgaggacgactccaggagtgacagcggcagcgatgagtcgtcagagacgagagatgatgacactgaccataagggttcatctgcgcccaagaaaaggaaatctggtaacacgtcggctgaaggtgaaccgtctcaagctgctgttgtgcgctatgctacggttgagtcgccatatcccgcaaagggaaggtctgcctcaaagcttccagtgtctgcacctggcagggcagcgcttcctagtgccaccccgaatctgaacattgggatggacatttggaatacttctcctgccttggctgttcctgcagtgcagggggaagcgaatcctgggttggcgcttgcccgacgtgatagcgttactcaactggatgaacgtgaattgaagagggagaggcggaaacaatctaacagggagtctgcaaggagatctaggttacgcaagcagcaagagtgtgaggaattagccaggaaggtagctgacctaacaactgagaatagtgctctcagagcggaacttgacaacctgaggaaggcttgccaagacatggaagcagaaaattcacgtctattggtgagcacggtaccaagtgtcacaaccacactgggaatgagcatcgagccgccaaaggcgcagcagcatcatgacgacgagggccagctccacaagaaatctagtaataacagcaacgggaaaggaagccacaaaccggaggctaacactaggtgagagacaggtgaatgagaaagtgacagagatgagatgaggtgtttcctatctaaccacaacacccatcatcaaccagtgcgttttcacagcccgctggggggccatgtagagtcgccccccactgcagccatgtattatttatggctcgccgcggtgtgcgttgtgtgtttttttgtgtgtgtgtcgtgtaaacctattgatgtagctattgtaacaaaaacctagagagcctagaatttttatgtctgctaactcctgatgaggggggatgtaaccggccaatttggtgcctggtcgatcgtttagatgaaatgcgagcaaatatcatttgatagcctgcctcgccttgttgttgttttggattttttttgcgactttgcgggagtcttttatacaggctattgaattttcgatggtgcttt

SEQ ID NO: 108297 - DNA, 1345 bp, Zea Mays
ctttttgctccccttccctccctcccaacgcagcgcagcgactgctgctgcttccccacaccgccccccggtaggctcaccgccggcgacgcgcacgcgtcccaccgcacccaaaccgaccgccggaagggaaaggcaaggggaagggcgggggcgcgtcgcctgagaagggcagctctggggcgccctccggtgaggacgactccaggagcagtgacagcggcagcgatgagtcgtcagagacgagagatgatgacactgaccataagggttcatctgcgcccaagaaaaggaaatctggtaacacgtcggctgaaggtgaaccgtctcaagctgctgttgtgcgctatgctacggttgagtcgccatatcccgcaaagggaaggtctgcctcaaagcttccagtgtctgcacctggcagggcagcgcttcctagtgccaccccgaatctgaacattgggatggacatttggaatacttctcctgccttggctgttcctgcagtgcagggggaagcgaatcctgggttggcgcttgcccgacgtgatagcgttactcaactggatgaacgtgaattgaagagggagaggcggaaacaatctaacagggagtctgcaaggagatctaggttacgcaagcagcaagagtgtgaggaattagccaggaaggtagctgacctaacaactgagaatagtgctctcagagcggaacttgacaacctgaggaaggcttgccaagacatggaagcagaaaattcacgtctattggtgagcacggtaccaagtgtcacaaccacactgggaatgagcatcgagccgccaaaggcgcagcagcatcatgacgacgagggccagctccacaagaaatctagtaataacagcaacgggaaaggaagccacaaaccggaggctaacactaggtgagagacaggtgaatgagaaagtgacagagatgagatgaggtgtttcctatctaaccacaacacccatcatcaaccagtgcgttttcacagcccgctggggggccatgtagagtcgccccccactgcagccatgtattatttatggctcgccgcggtgtgcgttgtgtgtttttttgtgtgtgtgtcgtgtaaacctattgatgtagctattgtaacaaaaacctagagagcctagaatttttatgtctgctaactcctgatgaggggggatgtaaccggccaatttggtgcctggtcgatcgtttagatgaaatgcgagcaaatatcatttgatagcctgcctcgccttgttgttgttttggattttttttgcgactttgcgggagtcttttatacaggctattgaattttcgatggtgcttt

SEQ ID NO: 108298 - DNA, 1167 bp, Zea Mays
atgaaaggcaaggagaatggagagcattatgaattgtcacctcaggttttaaatgaatgggctcctaaatcggctgccagaaatggttctggagaccacaacaacggatcacctgtggttactgaccatcaagacagcatgatactagaaggaaaccctaaaatcactccagttgtgcctaagagcatacacgatgggaagaaacctccaagggaaaactgcaagaccattccagttgtgccagagaaagagattaatgaaaagaaggccagtacttacagaaccattccggtcataaaggaaagtgatgagaagaagattggcatgagggaaaagagggagttaaaggaggccaacagtgctgaaatggttgaagagaacaggaaaacaaaacacaatgactcatcagtagttaagcattcaaaattgcccccagtatgcttacgtgtggatcccttgccaagaaagaaacctggaaatgattcttctaggtctcctagtccaccaaggaaggatactgacaacacgaagaaggacgtggaggaggcccagagccagatcctggagcctaaacagtctagtacaagtaaggatatcactgtgtctgaagtgaaagaaaaatcgccttatgaaatgaagaaggaagttgggtttagaaatgaaacagtggaagttgcttctgttgaacatctgcaggaggaagaagctcccacaagtaaagatggccaaaaggtccaagctgctagcactacagttggtgatcaagaaaatgcagccctgaagagcatagaggaagatcatgtgcaagaaaatgctggtgcaggaagcttgaatggatgtgacaaaagaaaaaatgaagatgggacagtgattgaaagtgaaactgcgaaagatgatgccagaacatatggagttaatttgtcagaatcagatgttgcagttcgtattcagtctgcctacagagggtatgatgttcgaaaatggcaacctttggataagctcaggaagatcaagcatgtgcatgaacagatgcaagttgtgaggaagcagattcaatgccttttagattcttgcagtaagccaacacaaaaagagcaagtggccataggtgaaactattatgaatttactcctgaagcttgacgcaatccaggtatatttttcatag

SEQ ID NO: 108299 - DNA, 710 bp, Zea Mays
ttttcatatttaatgttatatattcagctcataccatacatgaatttgcaacgccatgtacttgttgatggcaaggtcaggactgacaagacctaccctgctgggttcatggatgtcatttccatccctaagacaaacgagaactacaggctgcttccgtcttcacccaatcagggatgaggatatcaagttcaagctctgcaaggtgaggtctgttcagtttggccagacaggcatcccctacctgaacacctacgacggccacaccatccgctaccccgacccgctcatcaaggccaacgacaacatcaagatcgatctggagaccaacaagatcatggacttcttcaagtttgacgtcggcaacgtggtcatggtgaccgacgggaggaacaccgagcgtgtaggagtgatcaagaactgggagaagcacaagggaagcttcgaggtcatcgacgtgctgcttggagctttttgctatgtctagttttctcctatttgttgtacaggaaaacatagaatggaattcaaatttggtggtcacaaaagtgtggagacttgaattcatataaagttaggcttaacattagtgcaaacagttgtatttgagtttagatttagagtacacttatgtatgcgttgtttgacaatgcttatttatgatatattgaatggtacttatttatattatattaattataatgttgttc

SEQ ID NO: 108300 - DNA, 115 bp, Zea Mays
cttccttgaaatttgtactatttgttcatctagcctctacaaacttacttcatgcatagatgtaccttttttggactatttactacttttttgtgggttaaatgccttcctagcc

SEQ ID NO: 108301 - DNA, 1781 bp, Zea Mays
cggggctccgagccattcgatctccaatcggacggcctagacggctcccttcctctccttgccacacttgcgctcctctccgagttgtcgtctccgtcgctgctggctgctgcgccactcccccagccccgagatctgctcaacaatggcgacgcggcgccacatcctcctcctcgccgctgccttcgtgtcccttctcgcgctcgaggctgtggagggcctcgaagaggggccccgcgggcgccggctgctggtcctgctggacgacctggccgtgcggtcgtcgcactcggccttcttcggctcgctccaggcgcgcgggttcgatctcgaattccgcctcgccgacgaccccaagctctcgctgcaccgctacggccagtacctctacgatggcctcgtgctgttcgccccctccaccccacgttttggtggatcagtggaccagaacgcagtccttgaatttattgatgctgggcttgatatgatcctggcggcagattcctctgcctctgatcttattcgtggcattgcgacagagtgtggggttgattttgatgaggatccagaggcaatggttattgaccacattaactatgccgctatggatgttgaaggcgatcacaccttgattgttggtgatgatcttattcagtcagatgtcatactggggtctaaaaagattgaggctcctgtattatttcgtggaattggacacacggctaatccatcaaacagtttggttctgaaagtcctatctgcctctccatcagcatactcagctaacccaaagactaagttatcgttgcctccatcgcttactgggtcagctatatcactggtttcggttatgcaggcaagaaataatgctcgggtgctgctatctggatcacttgatctttttagcaaccggttcctgaagtctggtgttcaaaaggctggtagcaaaacgagatacgagagagctggaaatgagcaatttgtgacagagacaagcaaatgggtcttccatgagagggggcaccttaaggctgttaatgttaagcaccacaaggttggggagaccaatgaaccaggcatgtaccgcattaacgatgacctggaatactctgttgagatctatgaatggtctggaacaagctggaagccatatgttgctgatgatgtgcaactccagtttttcatgatgagtccttatgttctgaaaactatgtcgaatgacaacaagggtttatactcaacatccttcaaagttcctgatgtctacggagttttccagttcaaagttgagtaccagaggctgggatatactggtttgtcttttacaaagcagattccagtgcgcccttacaggcataacgagtatgagaggttcataacatcagcgtacccatactacactgcctcattttcaacgatgtgtgctttcttcatattctcgcttgtgtacctgtaccacaaataaaggactcacgggagcgcacaagtttctggaggctgctgatgcgacctagatctgtggccaagtgttacccggtgcaattttatggaatcatatatttgtagtaggccaacttagctagaattagacgaccgtgaccgcaatcatgggaaatttactcgtgctagtaggatgttcgatctgccccacaaattttttttgttcggatccttctgatcagcacttgtgaaaacgtttacagtctgtagcattgaaaggatgacgaagcatgtagtgattttgaaactactgctcttgctcagttcttcctcgttgcacg

SEQ ID NO: 108302 - DNA, 309 bp, Zea Mays
atctcccgcagcggttccccctaaatactccccctataccccactaccactataaaatatcattttctataccaactattaactttttatctactaacaattactcgtggacccacagcccagtgtttagggtgatgaacagtgacacactagatctagggggagagagaagtggaccgacacgtagggggcgctgtaggggcaccgttgcggtcataggatgccccctacagccgacatgcaaggggagggggggcggtagcgtcgaccgctgcagtcagtctaaagcatctcatatttggttcatgt

SEQ ID NO: 108303 - DNA, 696 bp, Zea Mays
atgtttttactttctttctctctcttctcttcttctgcccgaaggacaggggtggcggcggctgccagctctcaaccgcggccgtgtccgtgctccgatggtggtggtgcgcccgagcccgggttcctttgggccggagctgcgaggcggtgccctgtgcctgcgtggctgtgctgcggctacgccgctctgtggctgtgctgcggctacgccgctctgcgcctgcgtgctcgtgccgtggctggtgcacacactgcaactttcaacagcacagtccttcaacttcgacacatgcagggcgacagccagtggccgtgcgcctgctcacggcggcggcgtgcaccatcgacaaggcccacacccatgtgttcgcatgctctggcgcggcggctatggctcataaagtttcacggtaattacaaaaacatgactaaagcttgttcacatgccagtatgccatgtgcttgaccagtagtgaaagtgtcaactcctctctgcttctttctgttaggctgcagcgccgaagccattagaacatatgacgctttttcttcctggcttctttgtaatttgcatgtcagcttcaagccaacagataaaatatgctatagagatgtttttcttttgtttcatgtgtgcatttgtgtttatgcccgtcggaagagaaatgggctaaaaaatgcagaaactttctaa

SEQ ID NO: 108304 - DNA, 94 bp, Zea Mays
acggcggttggccgatagtgcgcgcggcggtggaccgtcggccggtgggtgcggtggccgtggctccccgacctcgacatgcggtggcggcggt

SEQ ID NO: 108305 - DNA, 829 bp, Zea Mays
ctaagtcggcaataggaataaaggtcgaaatcttgtttaacctgccctattagcaaatatacattccattgtggaccatgggctgtacaaatgtttttttttaaaacttgtttgcaaacatggatgtttcctatgttcaatagctaagtcagcaaggcttaggcaagcgaaagaggaggcagagagggaaatagccgaataccgtgcccagatggaggctgagttccagaggaaggtcgcagagagcagtggtgactctggtgcgaacgtcaagcgtctcgaggaagagacaacggcgaaaatcgaacagctcaaccagcaggctgcaagcatctccccagatgtcattcagatgcttctgaggcatgtcaccaccgtgaagaactgagaagtgctgctcccaaactatgctcatcggtctatttatttttgtcagagcaggtgaggaataataatatggcccttgtaccagtaattctttttttaactacggaataagccgcagcagctttagcggcaaccgtgactgttactaccagaacttgccattatttggtataatcggcaaattaaataatattgttttatattggatttttgaacaaacttttttttgctgattccctacctggtgtttctgtttcatttcttgtatgagatctgcaaattcatcatggagtgaaagccgctcgacatggaaattcatggtgttgctttttttttatgtgcaaactgtgagttgttttggaaaagagaacaagaaaaatggttatgttcttggtgaactagaaactccgaagaaaaatggttatgttcttggtcaacgagt

SEQ ID NO: 108306 - DNA, 1360 bp, Zea Mays
gcgtgacatggcatgccatggtggggctcctgtttatccgtgtaagagtcattagcgtggtcgaatatgttaattttaaaaattaaaatgttataaactagttttaaattttatttgtaaacagtttaaaaaaattaaaaatatcctgtgcaggtggaggcgtggagccaccgagccacgttgtatacgcggatcacggatcaccgtcctcctcgcccgctcattgcttgcctccagtctccagagaacgcgatttgttctgttgttcggtccccaatcttcgcctccgctccgcccgccccgacccagatcaggtaaccccgtgccgagattcctgcgtctcttctctcctcttcgtcgcggatcactcgccgcggagctgggacactttccgtccacgcggatcgctggtcctgcgccgtgcggtcggttcgctgacatgatccctggatcccaaatctttctcgccgagctactgtgatgcgtgttattgaaatacgtcgcggcggatttgttggtgcctctgccgcgtgccggaatatctggataacggcatggaagtacacagctggcattgagctgagagatggacgccaacaggcgccaaggtgggattcagcagttgctggctgcggagcaggaggctcagcaaattgtgaatgcggctagagctgctaagtcagcaaggcttaggcaagcgaaagaggaggcagagagggaaatagccgaataccgtgcccagatggaggctgagttccagaggaaggtcgcagagagcagtggtgactctggtgcgaacgtcaagcgtctcgaggaagagacaacggcgaaaatcgaacagctcaaccagcaggctgcaagcatctccccagatgtcattcagatgcttctgaggcatgtcaccaccgtgaagaactgagaagtgctgctcccaaactatgctcatcggtctatttatttttgtcagagcaggtgaggaataataatatggcccttgtaccagtaattctttttttaactacggaataagccgcagcagctttagcggcaaccgtgactgttactaccagaacttgccattatttggtataatcggcaaattaaataatattgttttatattggatttttgaacaaacttttttttgctgattccctacctggtgtttctgtttcatttcttgtatgagatctgcaaattcatcatggagtgaaagccgctcgacatggaaattcatggtgttgctttttttttatgtgcaaactgtgagttgttttggaaaagagaacaagaaaaatggttatgttcttggtgaactagaaactccgaagaaaaatggttatgttcttggtcaacgagt

SEQ ID NO: 108307 - DNA, 1098 bp, Zea Mays
gcgtgacatggcatgccatggtggggctcctgtttatccgtgtaagagtcattagcgtggtcgaatatgttaattttaaaaattaaaatgttataaactagttttaaattttatttgtaaacagtttaaaaaaattaaaaatatcctgtgcaggtggaggcgtggagccaccgagccacgttgtatacgcggatcacggatcaccgtcctcctcgcccgctcattgcttgcctccagtctccagagaacgcgatttgttctgttgttcggtccccaatcttcgcctccgctccgcccgccccgacccagatcaggagctgagagatggacgccaacaggcgccaaggtgggattcagcagttgctggctgcggagcaggaggctcagcaaattgtgaatgcggctagagctgctaagtcagcaaggcttaggcaagcgaaagaggaggcagagagggaaatagccgaataccgtgcccagatggaggctgagttccagaggaaggtcgcagagagcagtggtgactctggtgcgaacgtcaagcgtctcgaggaagagacaacggcgaaaatcgaacagctcaaccagcaggctgcaagcatctccccagatgtcattcagatgcttctgaggcatgtcaccaccgtgaagaactgagaagtgctgctcccaaactatgctcatcggtctatttatttttgtcagagcaggtgaggaataataatatggcccttgtaccagtaattctttttttaactacggaataagccgcagcagctttagcggcaaccgtgactgttactaccagaacttgccattatttggtataatcggcaaattaaataatattgttttatattggatttttgaacaaacttttttttgctgattccctacctggtgtttctgtttcatttcttgtatgagatctgcaaattcatcatggagtgaaagccgctcgacatggaaattcatggtgttgctttttttttatgtgcaaactgtgagttgttttggaaaagagaacaagaaaaatggttatgttcttggtgaactagaaactccgaagaaaaatggttatgttcttggtcaacgagt

SEQ ID NO: 108308 - DNA, 713 bp, Zea Mays
gcgtgacatggcatgccatggtggggctcctgtttatccgtgtaagagtcattagcgtggtcgaatatgttaattttaaaaattaaaatgttataaactagttttaaattttatttgtaaacagtttaaaaaaattaaaaatatcctgtgcaggtggaggcgtggagccaccgagccacgttgtatacgcggatcacggatcaccgtcctcctcgcccgctcattgcttgcctccagtctccagagaacgcgatttgttctgttgttcggtccccaatcttcgcctccgctccgcccgccccgacccagatcaggagctgagagatggacgccaacaggcgccaaggtgggattcagcagttgctggctgcggagcaggaggctcagcaaattgtgaatgcggctagagctggtagtgttttctcatccttttctagtatacatgtcattgcaaatctcgcttagggttagataacagcaaccttgtgaatgtgttcgttccagtcacttagagtgtgtttagttgaggagtgaaagtgaatagagcggttctattcctattttctggatctttgatttccaacaaaagatgagcggagcggttcctggagtctttatatgaaaatttaccataatagttggaatgctctcgctccacaaaaacgaccggacgcgatcgctctctcggacgcgagcgctctcctccctctcct

SEQ ID NO: 108309 - DNA, 2654 bp, Zea Mays
gccgttcacattgtggggaaacgtacggccattcccgttccccgccgcccctcgcctccgctgcacgcgatcgacgatccacagccaccacctctgcgttccccaccggagcatcttcaccaatcaccactgggctggctcccgcgttccccactggatttctgcacccagcgcttcttctgaaatttagaaggcggtggaaccgtcaaatcaaatggagggatcctcttacgcgtcaaggagctacagcgaactagctgccgcagcttccggaggtggaaggacgctgagggtaataccgctgcggcatccgctgggttctctgtcgacgtcttccacgtcgccgtggtggcgggcggtggtgggaagggctcggggcatggggccgcttgattgggcggaggcggccttgccgtgtgtggcgtggacacggaactacagatggaagcaggacctccaggccgacctcgcctcgggcatcaccgttggagtcatgcttgtgccccaggcaatgtcatatgcaaagctggctgggctgcacccaatttatgggctctacacaggctttgtcccgttatttatatatgcaatatttggctcgtcacgacaactagcagtaggtccagtggcacttgtttctcttcttgtatccaatgttcttgggggtatagttaattcatctagtaagctgtacacagaattagccatattactggcattcatggttgggatattggagtgcttgatgggactgctaaggcttggttggctcattcgtttcattagccattctgtaatatctgggttcactacagcttcagccattgttattggtttatcccagataaagtatttcttaggttacaacgtcacaagaagcagcaaaattataccactaattgagagcataattgcaggagctgatgagttctcctggcctccgtttgtgatgggatcaatttttcttgcgattcttctaattatgaaaaatacaggaaaatccaataaaagattgcattttctaagagtttctggtcctcttacggctgttgtgcttggaacaatttttgtgaaaatctttcatccaccagccatatcagtggttggtgaaataccacagggtcttcccaggttctccattcctcaaggatttgagcatctaatgtcacttgtgccaactgctgtactaatcactggtgttgctattttggaatctgttggtattgctaaagctttggcagcgaagaatgggtatgagttggactctaacaaagagttatttggtctgggaatagcaaatatctgtggttcattcttctctgcatatcctgccacaggctccttttctaggtcagcagtgaatcatgaaagtggggcaaaaactgggttatctggaatcataatgggcataatcattggtggtgctctcttatttatgaccccattatttactgatataccccagtgtgcattggctgcaattgtgatttctgctgttactggcctggtagattatgaagaggccatcttcttgtgggctattgataagaaagatttctttttatgggcaatcacatttatcacaacattagtttttggcattgagattggcgtccttgttggggttgcattctcattggcctttgtgattcatgagtcagcaaatccacatatagctgtcttgggccgtttacctggcactactgtgtacaggaatacattgcagtaccctgaggcttatacgtataatgggatagtagtggttcgaattgatgcaccgatctactttgccaacattagctacatcaaagacaggttgcgtgagtatgagctcaatcttccaagttcaaacaagggacttgatgttggaagggtgtattttgtgatcctcgagatgtcccctgttacatatattgattcgagtgctgttcaagctcttaaagacttgcaccaagaatacaaagcacgccatattcagattgccatagctaacccgaaccggcaagtgtaccttctgttgtcaagatcgggcatcattgacttggtaggagctgggtggtgctttgtgcgagtgcatgacgccgtgcaagtgtgcctacagcacgtgcagaattcatcttcaaatgcgttgaagctacccgtgcaggcatcaggcgtgttgaccgattctgtttcgactcctaaaccagagcagcagcatcaaaagcagcacggcctcttcaaggacctatggaaggcacaggacagtaacgcggatgctggtggtgaggtgcagccactgctccggcaaaaccttgtgtaatactcctacaaaatacggagtacttcctgggatggactcacgccctcgctggcctatacatatacgtgtttatttatttgtctatgttgttgttaacatggtatcgtggtgaacaaaagaaactgaacatgccattgttactgtggtgtggcgttttttgtacacttttgatacctaaatggaactcctatgatttgggtctggaaagggtgtgtgaagatgttttgttccaggttttggagttccgctcccagattggcttgacaagcatgttaattccatgaactctcttccacaaaaacagtacagctgattatcagttttatgtttagaatgagaaaatagccctggc

SEQ ID NO: 108310 - DNA, 106 bp, Zea Mays
ttttttattggaaaaaagttgtaggtgaaacccctacaacagcaagaaattatatatatattaaaaagaaaatagataaggtgaaaccatcaaaggggaaaagaaa

SEQ ID NO: 108311 - DNA, 1072 bp, Zea Mays
gataggcattatatttggttcttatgaagtagcatgacttgcatatttattaatttactgaagtgttgtataatatattgcatccacatatgatgaaacttcgatggattgcttcaggtattgctattaaggtctttttcatctcatgcacataactattaagctgctcaaatttctttatttggtaattaattaaaattttcaaccatgtcatattgcatacaaattgccaactctttttgcacaaatgcacatgctcaattgcgataatgtcatatggtatgtcaaggatttgtggtcaatgcaaactaaatcgttttcttatttatatgttggcacttgattattcgtatttgtcactgtgatcattttttttctcaattgttttgctggctgctgtttcaaatcaggtctatactgctaagatggatttgagtgatgaggctgatttggaagattatgtttgcagaccggataagatcagtgctactgatgttgagttggtttcatggcacataccaagatttttatgcatttgttgttttctaagtattgtattgctagggtacttatgtcctgtgctggccaaagctgtcaaaaccatgagaaaggcagagaaggtgcttcttatagcaaagccacattggtagaccaacagttggagaggaaggtgttgtgatgagcatcatcttgttctacatcatcactaatgaactggttgaacttttggttgctttggtgaatggaggcgacagcatgcagattgccatgtccggatgttatgcgggacctatgtttaatacacttgctggtttgggtacattgttgctagattgatctgggctcttgttatgctgccgagaggtgacatgtagcctaacaagatacttggagttggcctcattgctctttactcaaattttctttttattagagtaagcaatgttggtggaatattgctactacctagagttagataattatttgcttgtaaagttgggatttacatcaaagtacttgcccatggcttccatttttataaatgaaatgaagttatacagtgttgctctgt

SEQ ID NO: 108312 - DNA, 895 bp, Zea Mays
gtaatggcaactaatagggcagatactctagatcctgctttgctgtgaccaggtagacttgacaggaaagttgagttcccttgtcccgattggcggcaaaagaggcttgtgttccaagtctatactgctaagatggatttgagtgatgaggctgatttggaagattatgtttgcagaccggataagatcagtgctactgatgttgagttggtttcatggcacataccaagatttttatgcatttgttgttttctaagtattgtattgctagggtacttatgtcctgtgctggccaaagctgtcaaaaccatgagaaaggcagagaaggtgcttcttatagcaaagccacattgtgagattctatttcaaagttcgattattcttctataactttcatgtctaatttctttgaattatgacacttcgttaaacttcctcgcttcaaatgcatatggatttggtgagaagggtagaccaacagttggagaggaaggtgttgtgatgagcatcatcttgttctacatcatcactaatgaactggttgaacttttggttgctttggtgaatggaggcgacagcatgcagattgccatgtccggatgttatgcgggacctatgtttaatacacttgctggtttgggtacattgttgctagattgatctgggctcttgttatgctgccgagaggtgacatgtagcctaacaagatacttggagttggcctcattgctctttactcaaattttctttttattagagtaagcaatgttggtggaatattgctactacctagagttagataattatttgcttgtaaagttgggatttacatcaaagtacttgcccatggcttccatttttataaatgaaatgaagttatacagtgttgctctgt

SEQ ID NO: 108313 - DNA, 707 bp, Zea Mays
agcaccaaccgccatccccgcccgccatctgcgcgcgtctggccgtctctctcgcccccgttctcctctctgctatccgcgcccaaatctcaccgtatgtgcgcgtctccatctgcgcgcatctccccagatccactctactcgctccaccacgccgaccccgacccgacaccggcaaccacacggatccactgtgctctccatggccatgaaagggaacgatcttgcgccgacctcaaccaggctctccatggaaggtccgcgtggttccctctcctgcatcccatgatccggatgccgccacaccatggtcgatggtcggggccgtcgaatccggatgcccgcgctctgcgtcgcgtggatcttctagatcacgcgggagctcgaccacaagtccgacggcgagaccatgaagtggctgctagtacatgcttgtcatgctctcccctccacaccccacctcggtaagacagccccccactgccagcactgatggagccacagtaatagcggatctcatccatgcctgcctttcttgttaccgtggctagcacttgattggcccgtccggttaattgttaattgttggacatgaataaccaaagcagttagaggcagatcgtgcgggtacagcgccttggctgccgagatcaatgggggcatcctcgccgtcggcaggcccaggcagcactgagttgtgctctgct

SEQ ID NO: 108314 - DNA, 560 bp, Zea Mays
agcaccaaccgccatccccgcccgccatctgcgcgcgtctggccgtctctctcgcccccgttctcctctctgctatccgcgcccaaatctcaccgtatgtgcgcgtctccatctgcgcgcatctccccagatccactctactcgctccaccacgccgaccccgacccgacaccggcaaccacacggatccactgtgctctccatggccatgaaagggaacgatcttgcgccgacctcaaccaggctctccatggaaggtccgcgtggttccctctcctgcatcccatgatccggatgccgccacaccatggtcgatggtcggggccgtcgaatccggatgcccgcgctctgcgtcgcgtggatcttctagatcacgcgggagctcgaccacaagtccgacggcgagaccatgaagtggctgctagtacatgcttgtcatgctctcccctccacaccccacctcgttagaggcagatcgtgcgggtacagcgccttggctgccgagatcaatgggggcatcctcgccgtcggcaggcccaggcagcactgagttgtgctct

SEQ ID NO: 108315 - DNA, 150 bp, Zea Mays
agcatgactttaaagttacgaggcgtccgcaacgccatcacggcggcccacggtggcaatcggcgaaggtgaattttggaggcgagagcgagatgccgggagcctgcgggttacggcatgggcagatccagaatcggagatggagagaga

SEQ ID NO: 108316 - DNA, 177 bp, Zea Mays
ttttcgcgggggacgtccactgaccatgacacaaacttctcaaataagcaagccaagctgctcaagacgcagaagttcgcgtccgagcttgaccatctggtggatacgtcaaaggtcaagttggacgtgatgaagccctggattgccaagcgggtcactgagctacttgagttcgac

SEQ ID NO: 108317 - DNA, 1281 bp, Zea Mays
atggcaaacattaggcagctaagcctgaatccgctttgtggcgcctatgcgcccgcagcaaccaacgaggcaacggatcgagttcctctccgaactccaactctgcgccgcaatccactcaagaaggttagccctcgtggtctcggatttggataatcctccgccgaggtatgaaacaggaggcggccaccagcatagtggtgacccaggaggacgtcctgcaccactacaaggagcctccaccccgccgcgaggacgatccgccagcactggctgcgtcgctgtcgttgccgtcgtcactgtcggaggacgatggcgacgccatgccgcagccatcttcatacgcggtcttgccgcgccgggaaggcgagctggtgtctgcggaggagctgctgctggtgccgccgctcaacttcgccatggtggaccacggcgtgtaccgctccggattcccggacgcctccaacttgccgtttcttgagacgctccgactccgctccgtcctgtgcctgtgcccggagccatacccggaggctaatctggagttcctccgtgcccacgggatcaagctcttccagttcggaatcgacggctccaaggaaccatttgtgaacataccagaagatagaatccgtgaagctctagaagtcatcctagatgcaagcaaccatccggttcttattcactgcaagcgaggaaagcatcgaaccggctgtgtggttggatgctttaggaaattgcaacgctggtgtctaacttcaatatttgacgaataccagcgttttgctgctgccaaaacaagagtttctgacctacggttcatggagctatttgatgtatcgagcataaagcatttagcatttgagtcgtctgtatgatagtaacattggtgcatgataacaactcaatactggttccattacggtgtcatctttttcatttaagaaaaaaaatcatttctaaaaatgctaccttattactccctccatccccaaatataattcgttttagactaaatatatattaattaattaatctataaatattatttgtatttgtatgtatatattcattatcattgtggacggaaaaaaagtctatattttgagacagagcgagtatttttttagcataatggtttgggagaggcaagtcataagaataagtcctgactacatgtggttattatcagttcatatatgtgataatggcagcttaatatctgttgctaagaaaatggacgaaatcgctcgagtctacttcattgtgggagttcttttt

SEQ ID NO: 108318 - DNA, 1314 bp, Zea Mays
atggcaaacattaggcagctaagcctgaatccgctttgtggcgcctatgcgcccgcagcaaccaacgaggcaacggatcgagttcctctccgaactccaactctgcgccgcaatccactcaagaaggttagccctcgtggtctcggatttggataatcctccgccgaggtatgaaacaggaggcggccaccagcatagtggtgacccaggaggacgtcctgcaccactacaaggagcctccaccccgccgcgaggacgatccgccagcactggctgcgtcgctgtcgttgccgtcgtcactgtcggaggacgatggcgacgccatgccgcagccatcttcatacgcggtcttgccgcgccgggaaggcgagctggtgtctgcggaggagctgctgctggtgccgccgctcaacttcgccatggtggaccacggcgtgtaccgctccggattcccggacgcctccaacttgccgtttcttgagacgctccgactccgctccgtcctgtgcctgtgcccggagccatacccggaggctaatctggagttcctccgtgcccacgggatcaagctcttccagttcggaatcgacggctccaagcttagttttggacttttgatactgaaataacaggaaccatttgtgaacataccagaagatagaatccgtgaagctctagaagtcatcctagatgcaagcaaccatccggttcttattcactgcaagcgaggaaagcatcgaaccggctgtgtggttggatgctttaggaaattgcaacgctggtgtctaacttcaatatttgacgaataccagcgttttgctgctgccaaaacaagagtttctgacctacggttcatggagctatttgatgtatcgagcataaagcatttagcatttgagtcgtctgtatgatagtaacattggtgcatgataacaactcaatactggttccattacggtgtcatctttttcatttaagaaaaaaaatcatttctaaaaatgctaccttattactccctccatccccaaatataattcgttttagactaaatatatattaattaattaatctataaatattatttgtatttgtatgtatatattcattatcattgtggacggaaaaaaagtctatattttgagacagagcgagtatttttttagcataatggtttgggagaggcaagtcataagaataagtcctgactacatgtggttattatcagttcatatatgtgataatggcagcttaatatctgttgctaagaaaatggacgaaatcgctcgagtctacttcattgtgggagttcttttt

SEQ ID NO: 108319 - DNA, 1259 bp, Zea Mays
atggcaaacattaggcagctaagcctgaatccgctttgtggcgcctatgcgcccgcagcaaccaacgaggcaacggatcgagttcctctccgaactccaactctgcgccgcaatccactcaagaaggttagccctcgtggtctcggatttggataatcctccgccgaggtatgaaacaggaggcggccaccagcatagtggtgacccaggaggacgtcctgcaccactacaaggagcctccaccccgccgcgaggacgatccgccagcactggctgcgtcgctgtcgttgccgtcgtcactgtcggaggacgatggcgacgccatgccgcagccatcttcatacgcggtcttgccgcgccgggaaggcgagctggtgtctgcggaggagctgctgctggtgccgccgctcaacttcgccatggtggaccacggcgtgtaccgctccggattcccggacgcctccaacttgccgtttcttgagacgctccgactccgctccgtcctgtgcctgtgcccggagccatacccggaggctaatctggagttcctccgtgcccacgggatcaagctcttccagttcggaatcgacggctccaagaagatagaatccgtgaagctctagaagtcatcctagatgcaagcaaccatccggttcttattcactgcaagcgaggaaagcatcgaaccggctgtgtggttggatgctttaggaaattgcaacgctggtgtctaacttcaatatttgacgaataccagcgttttgctgctgccaaaacaagagtttctgacctacggttcatggagctatttgatgtatcgagcataaagcatttagcatttgagtcgtctgtatgatagtaacattggtgcatgataacaactcaatactggttccattacggtgtcatctttttcatttaagaaaaaaaatcatttctaaaaatgctaccttattactccctccatccccaaatataattcgttttagactaaatatatattaattaattaatctataaatattatttgtatttgtatgtatatattcattatcattgtggacggaaaaaaagtctatattttgagacagagcgagtatttttttagcataatggtttgggagaggcaagtcataagaataagtcctgactacatgtggttattatcagttcatatatgtgataatggcagcttaatatctgttgctaagaaaatggacgaaatcgctcgagtctacttcattgtgggagttcttttt

SEQ ID NO: 108320 - DNA, 745 bp, Zea Mays
atggcaaacattaggcagctaagcctgaatccgctttgtggcgcctatgcgcccgcagcaaccaacgaggcaacggatcgagttcctctccgaactccaactctgcgccgcaatccactcaagaaggttagccctcgtggtctcggatttggataatcctccgccgaggtatgaaacaggaggcggccaccagcatagtggtgacccaggaggacgtcctgcaccactacaaggagcctccaccccgccgcgaggacgatccgccagcactggctgcgtcgctgtcgttgccgtcgtcactgtcggaggacgatggcgacgccatgccgcagccatcttcatacgcggtcttgccgcgccgggaaggcgagctggtgtctgcggaggagctgctgctggtgccgccgctcaacttcgccatggtggaccacggcgtgtaccgctccggattcccggacgcctccaacttgccgtttcttgagacgctccgactccgctccgtcctgtgcctgtgcccggagccatacccggaggctaatctggagttcctccgtgcccacgggatcaagctcttccagttcggaatcgacggctccaagttgtcgacacagaatggctgtcacactcatggctttgatgctggcagtggctaatgttcgccaaatcttccccgttgtacttttattctgatatattctgcctttgtaaccgcaatttattaaaagatatagatatatgtcttgcc

SEQ ID NO: 108321 - DNA, 1871 bp, Zea Mays
tccattaaaactcttaagtgtcgcttagtcacccaattaatatcatcaactatggttgggtaccgtcacaatgcacgaggattagactagtttgaactaaaacgcgacaaataaaaaagaacggaaagaacggagagaacgttatatcaattttttacttgtactaaatagtcaaataagatgtctaaaaaattaaattgcagtatattttaggaaaaaaaatagagctcatcgcctcttaaaaatccttttaaccatcgaaggttagtgacttatttcgagagaggagtacgttttaagccggtgctccatgtgtcccgtcccgtgtcccgtcccgtctacgttttaagctgcgagcgagatctgctttcacagcgtggctgaccagcagatccgtcgttgccggaacccacgctcgccggctgcgaatgcatctgtagcctgctcttcgtccacacggacaattggacgagctagactctgcgtcgccggcgatggggtgctccttctcagggctgaacgcactgtacgacaccgtcggcggtcggggtggtgacgtctgggttaacgactaccacttccgcgtgctccgcaggctcggcgatgccggccctgcgggctcgtcggtcttcctcgtcaaggaggtcgtcgccgccgcaaccgcctccgacggcacggctgggtcagagcccggcgcctcagggatcgccgggaagaaaggcatcgacccatcacacatctcagctgacgggacatatgctctcaagaaagttcttgttcagagtgatcagcacttagagcttgttcagcaagagatccgagtgtcctctcaattcagccatccaaatttacttcctcttcttgaacatgccatcgttgctgtcaagggtgttcaggatggatcccagaactatgaggcctacttattattcccagttcatttagaaggaacattacatgatataactaaaaccatgcttgaaaagaaggaattcttcccaacaattactgttctccagatatttcgccagctttgttctggattaaagcacatgcacagttttgatccaccatatgcgcacaatggggttaaaccagataatgtcctcataacacagaggaagcagtctcatctagcaattttgatggattttgagagtgctggtccagcaagaaagactattagatcacaagctgaagctttgcagttacaggaatgggcttcagagcactgttcttctcattaccgtgcccccgaactatgggagtgtccaagtcatgctgacattgatgagaggacagatatatggtctttgggatgcactttgtatgctatgatgtatggaaagtctccatttgattatgagcttgatgagtcttctggtgaaagcttgcacagtgttattaaaaatgtacagattaaatggcctgaagaagcgggatctacataccctgattccctccgccagtttataacttggatgctgcagccacatcccgcagttcgtcctcatattgatgatatcataattcatgttgataaacttgtcatgaagtactctaattaaccgctacaccaagccgcttctccaccagaaaaaagaatcattattatgtaagtctacacgattcattagcaaaatgtgatatgtatgttccttgatagctattactgtattaaacgagaaaaggacattctgctgtagtcttcaaccattcgtggactcgccattgttcatgagtatgttatctatagatgttttttttgtatgcccgacagtgttaccgggttaataaatgatacagtacctcttttatagttataatggtgccctcattgtgttgttcatggtgctatacgatcctgcata

SEQ ID NO: 108322 - DNA, 1862 bp, Zea Mays
tccattaaaactcttaagtgtcgcttagtcacccaattaatatcatcaactatggttgggtaccgtcacaatgcacgaggattagactagtttgaactaaaacgcgacaaataaaaaagaacggaaagaacggagagaacgttatatcaattttttacttgtactaaatagtcaaataagatgtctaaaaaattaaattgcagtatattttaggaaaaaaaatagagctcatcgcctcttaaaaatccttttaaccatcgaaggttagtgacttatttcgagagaggagtacgttttaagccggtgctccatgtgtcccgtcccgtgtcccgtcccgtctacgttttaagctgcgagcgagatctgctttcacagcgtggctgaccagcagatccgtcgttgccggaacccacgctcgccggctgcgaatgcatctgtagcctgctcttcgtccacacggacaattggacgagctagactctgcgtcgccggcgatggggtgctccttctcagggctgaacgcactgtacgacaccgtcggcggtcggggtggtgacgtctgggttaacgactaccacttccgcgtgctccgcaggctcggcgatgccggccctgcgggctcgtcggtcttcctcgtcaaggaggtcgtcgccgccgcaaccgcctccgacggcacggctgggtcagagcccggcgcctcagggatcgccgggaagaaaggcatcgacccatcacacatctcagctgacgggacatatgctctcaagaaagttcttgttcagagtgatcagcacttagagcttgttcagcaagagatccgagtgtcctctcaattcagccatccaaatttacttcctcttcttgaacatgccatcgttgctgtcaaggatggatcccagaactatgaggcctacttattattcccagttcatttagaaggaacattacatgatataactaaaaccatgcttgaaaagaaggaattcttcccaacaattactgttctccagatatttcgccagctttgttctggattaaagcacatgcacagttttgatccaccatatgcgcacaatggggttaaaccagataatgtcctcataacacagaggaagcagtctcatctagcaattttgatggattttgagagtgctggtccagcaagaaagactattagatcacaagctgaagctttgcagttacaggaatgggcttcagagcactgttcttctcattaccgtgcccccgaactatgggagtgtccaagtcatgctgacattgatgagaggacagatatatggtctttgggatgcactttgtatgctatgatgtatggaaagtctccatttgattatgagcttgatgagtcttctggtgaaagcttgcacagtgttattaaaaatgtacagattaaatggcctgaagaagcgggatctacataccctgattccctccgccagtttataacttggatgctgcagccacatcccgcagttcgtcctcatattgatgatatcataattcatgttgataaacttgtcatgaagtactctaattaaccgctacaccaagccgcttctccaccagaaaaaagaatcattattatgtaagtctacacgattcattagcaaaatgtgatatgtatgttccttgatagctattactgtattaaacgagaaaaggacattctgctgtagtcttcaaccattcgtggactcgccattgttcatgagtatgttatctatagatgttttttttgtatgcccgacagtgttaccgggttaataaatgatacagtacctcttttatagttataatggtgccctcattgtgttgttcatggtgctatacgatcctgcata

SEQ ID NO: 108323 - DNA, 1784 bp, Zea Mays
tccattaaaactcttaagtgtcgcttagtcacccaattaatatcatcaactatggttgggtaccgtcacaatgcacgaggattagactagtttgaactaaaacgcgacaaataaaaaagaacggaaagaacggagagaacgttatatcaattttttacttgtactaaatagtcaaataagatgtctaaaaaattaaattgcagtatattttaggaaaaaaaatagagctcatcgcctcttaaaaatccttttaaccatcgaaggttagtgacttatttcgagagaggagtacgttttaagccggtgctccatgtgtcccgtcccgtgtcccgtcccgtctacgttttaagctgcgagcgagatctgctttcacagcgtggctgaccagcagatccgtcgttgccggaacccacgctcgccggctgcgaatgcatctgtagcctgctcttcgtccacacggacaattggacgagctagactctgcgtcgccggcgatggggtgctccttctcagggctgaacgcactgtacgacaccgtcggcggtcggggtggtgacgtctgggttaacgactaccacttccgcgtgctccgcaggctcggcgatgccggccctgcgggctcgtcggtcttcctcgtcaaggaggtcgtcgccgccgcaaccgcctccgacggcacggctgggtcagagcccggcgcctcagggatcgccgggaagaaaggcatcgacccatcacacatctcagctgacgggacatatgctctcaagaaagttcttgttcagagtgatcagcacttagagcttgttcagcaagagatccgagtgtcctctcaattcagccatccaaatttacttcctcttcttgaacatgccatcgttgctgtcaagggtgttcaggatggatcccagaactatgaggcctacttattattcccagttcatttagaaggaacattacatgatataactaaaaccatgcttgaaaagaaggaattcttcccaacaattactgttctccagatatttcgccagaggaagcagtctcatctagcaattttgatggattttgagagtgctggtccagcaagaaagactattagatcacaagctgaagctttgcagttacaggaatgggcttcagagcactgttcttctcattaccgtgcccccgaactatgggagtgtccaagtcatgctgacattgatgagaggacagatatatggtctttgggatgcactttgtatgctatgatgtatggaaagtctccatttgattatgagcttgatgagtcttctggtgaaagcttgcacagtgttattaaaaatgtacagattaaatggcctgaagaagcgggatctacataccctgattccctccgccagtttataacttggatgctgcagccacatcccgcagttcgtcctcatattgatgatatcataattcatgttgataaacttgtcatgaagtactctaattaaccgctacaccaagccgcttctccaccagaaaaaagaatcattattatgtaagtctacacgattcattagcaaaatgtgatatgtatgttccttgatagctattactgtattaaacgagaaaaggacattctgctgtagtcttcaaccattcgtggactcgccattgttcatgagtatgttatctatagatgttttttttgtatgcccgacagtgttaccgggttaataaatgatacagtacctcttttatagttataatggtgccctcattgtgttgttcatggtgctatacgatcctgcata

SEQ ID NO: 108324 - DNA, 1075 bp, Zea Mays
tccattaaaactcttaagtgtcgcttagtcacccaattaatatcatcaactatggttgggtaccgtcacaatgcacgaggattagactagtttgaactaaaacgcgacaaataaaaaagaacggaaagaacggagagaacgttatatcaattttttacttgtactaaatagtcaaataagatgtctaaaaaattaaattgcagtatattttaggaaaaaaaatagagctcatcgcctcttaaaaatccttttaaccatcgaaggttagtgacttatttcgagagaggagtacgttttaagccggtgctccatgtgtcccgtcccgtgtcccgtcccgtctacgttttaagctgcgagcgagatctgctttcacagcgtggctgaccagcagatccgtcgttgccggaacccacgctcgccggctgcgaatgcatctgtagcctgctcttcgtccacacggacaattggacgagctagactctgcgtcgccggcgatggggtgctccttctcagggctgaacgcactgtacgacaccgtcggcggtcggggtggtgacgtctgggttaacgactaccacttccgcgtgctccgcaggctcggcgatgccggccctgcgggctcgtcggtcttcctcgtcaaggaggtcgtcgccgccgcaaccgcctccgacggcacggctgggtcagagcccggcgcctcagggatcgccgggaagaaaggcatcgacccatcacacatctcaggtgtctctctcatacataaataaaggtatcgagatccgactgttgttccttgcggcgacgtgcgaatgggtttggatctggggtctatccggcctgctggacagtggaatgacatttgttcacggttggatggattatttcacaattcatggtgaagatcattttaggcctccttgttcggtgtgccgttcttgttccgtgtgagaattaagatcatgatccttttttctcttcaaattgcatgcttcgtttccttagctgcttgatgtaaacaatattagtttctgtaaatgcacttttgaatttcgttcttaccatattttagagtcac

SEQ ID NO: 108325 - DNA, 2076 bp, Zea Mays
gttttctccctctgctttccccactcgtccgctcctgcttcccgccgccatcgcccatgacgccggcggcaccggcatccgccgcggacgcgcttgcgcagatcctgcaggacctcctgccttcggttctgctggccgcggcgtcggtcagggcgctccactcgcggtggcgcgcgctccaggcctccctcctcgcgttgcagtcctcgctcgtctccgcgcccgcctccgccccgtcccacccgctcttcgccgacctggtggccgcgcttctcccagccctccgttccctccacgcgctctctgtccggtgccaggaccctgggctccccggggggcggctgcggctacagagcgaccttgacatggtgcctgcgtcggcggctccgcacgcagacaagtccctcttcgtccgtgacgcctttgcccgcctccagatcgggtcgctggacctgaagctaaaggcgctagtgtcgctgctcgacctgctgggtgacgaccctactgcggaggccgcgcagatcgtcgccaccgaaggggacgttgcggcgctgctccgtttgcttgacgcgtcgtcccactcggcgctgcgggaccgtgcggtcacggccgtggcccaccttgcgaccgcctgcgctgcgtcccggagggtggtcttcgacgaaggcggactcggcccacttctgcgcgtgctcgactcaggctcaccgcccgccacgcgtgagcggtctgctgcggccattgtggccatcactggtgatgccggcagcgcgtgggctctatcggcttatggtggattgcccatcttgattaatgcttgccgtcctgggtctggatcccccgcattgcaggcatttgccgtggcggcaattaagaatgtttcttcagtcgatgatgtgcgctccactctggtggaggagagtggtttgcctgttcttgttgacctgcttgccagtggcactgctgagacgcagaagagtgctgctctctgcctctgggcacttgcttcgatgggagaccataagacacagaaccagattgtgcaagcaggtgcattgtcgccactcctacaagcactgcatatcgcctctgatcaggacctccatgattctgtactgcgtgctatacacgcacttacatcagcccctgctgccaccagaatcctttgttcatcgccactgttctttgcacgacttacagacctcatatgcagctctggtagcttcctgttgcaacaaatggctgctgatatgattgctgatcttgcacctactgtgagcgatgacacaaagaggtgcatggcaccatgcattggtacactgattaagctgatggaggtggctaagccagcaacaatacaggagtcagctggtcgtgcactgcttgctctgtttaccttgaagtctaataggaagggttttgtcagggatgagaagagtttaacaatatttgtgcggatgcttgatccccggtttcaggagactgataagaagtatccactctcgatctttctagttcttgccatgggtggcgggaacgggacacgacgacgacttgttgatgctggttcttgtcagcatctacagaagctggctgatgctgatgtgcctggtgcaaagaaggctttgcagaggatatctaacaatcgtcttaaaagtttgttttccataggatggcaaaactagtccatatgctgcactgggttgaagagcagcccaagactgcagatgtggagagcctctaccaaatgacagaagaacgctcaagtatttgtttgagtaggagttatgatagtacaagaacatcaagcgagagagttctcagtttctctgcggctaaaggtggccagtagatggtattattaagtacaagtagtatgttaacaagctggaagcttggacgtggcattttaggaagcgtctaaaagcttctttggtttgctcctttccgttttcccttgtattttagctttttttttctttctttcttctgttttataattgtggctctcaccatctactttgtgaaaatttgtttgtgttgatttggaatgaagcaaggaattgatctgtgtca

SEQ ID NO: 108326 - DNA, 2239 bp, Zea Mays
taaatcgtgtccgtccgttgctgcagacccaccccgcgctccatgtgatgtgtagtgttttctccctctgctttccccactcgtccgctcctgcttcccgccgccatcgcccatgacgccggcggcaccggcatccgccgcggacgcgcttgcgcagatcctgcaggacctcctgccttcggttctgctggccgcggcgtcggtcagggcgctccactcgcggtggcgcgcgctccaggcctccctcctcgcgttgcagtcctcgctcgtctccgcgcccgcctccgccccgtcccacccgctcttcgccgacctggtggccgcgcttctcccagccctccgttccctccacgcgctctctgtccggtgccaggaccctgggctccccggggggcggctgcggctacagagcgaccttgacatggtggcctcctcgctctcgctcctcctgcacgacctctcgctgctccttcgctcggggctgctctccgtcgactccgagctgtccattcccactgacatcgtactgcaggtgcctgcgtcggcggctccgcacgcagacaagtccctcttcgtccgtgacgcctttgcccgcctccagatcgggtcgctggacctgaagctaaaggcgctagtgtcgctgctcgacctgctgggtgacgaccctactgcggaggccgcgcagatcgtcgccaccgaaggggacgttgcggcgctgctccgtttgcttgacgcgtcgtcccactcggcgctgcgggaccgtgcggtcacggccgtggcccaccttgcgaccgcctgcgctgcgtcccggagggtggtcttcgacgaaggcggactcggcccacttctgcgcgtgctcgactcaggctcaccgcccgccacgcgtgagcggtctgctgcggccattgtggccatcactggtgatgccggcagcgcgtgggctctatcggcttatggtggattgcccatcttgattaatgcttgccgtcctgggtctggatcccccgcattgcaggcatttgccgtggcggcaattaagaatgtttcttcagtcgatgatgtgcgctccactctggtggaggagagtggtttgcctgttcttgttgacctgcttgccagtggcactgctgagacgcagaagagtgctgctctctgcctctgggcacttgcttcgatgggagaccataagacacagaaccagattgtgcaagcaggtgcattgtcgccactcctacaagcactgcatatcgcctctgatcaggacctccatgattctgtactgcgtgctatacacgcacttacatcagcccctgctgccaccagaatcctttgttcatcgccactgttctttgcacgacttacagacctcatatgcagctctggtagcttcctgttgcaacaaatggctgctgatatgattgctgatcttgcacctactgtgagcgatgacacaaagaggtgcatggcaccatgcattggtacactgattaagctgatggaggtggctaagccagcaacaatacaggagtcagctggtcgtgcactgcttgctctgtttaccttgaagtctaataggaagggttttgtcagggatgagaagagtttaacaatatttgtgcggatgcttgatccccggtttcaggagactgataagaagtatccactctcgatctttctagttcttgccatgggtggcgggaacgggacacgacgacgacttgttgatgctggttcttgtcagcatctacagaagctggctgatgctgatgtgcctggtgcaaagaaggctttgcagaggatatctaacaatcgtcttaaaagtttgttttccataggatggcaaaactagtccatatgctgcactgggttgaagagcagcccaagactgcagatgtggagagcctctaccaaatgacagaagaacgctcaagtatttgtttgagtaggagttatgatagtacaagaacatcaagcgagagagttctcagtttctctgcggctaaaggtggccagtagatggtattattaagtacaagtagtatgttaacaagctggaagcttggacgtggcattttaggaagcgtctaaaagcttctttggtttgctcctttccgttttcccttgtattttagctttttttttctttctttcttctgttttataattgtggctctcaccatctactttgtgaaaatttgtttgtgttgatttggaatgaagcaaggaattgatctgtgtc

SEQ ID NO: 108327 - DNA, 2183 bp, Zea Mays
gccccgctttacagctttccttcctgcggaagtaaatcgtgtccgtccgttgctgcagacccaccccgcgctccatgtgatgtgtagtgttttctccctctgctttccccactcgtccgctcctgcttcccgccgccatcgcccatgacgccggcggcaccggcatccgccgcggacgcgcttgcgcagatcctgcaggacctcctgccttcggttctgctggccgcggcgtcggtcagggcgctccactcgcggtggcgcgcgctccaggcctccctcctcgcgttgcagtcctcgctcgtctccgcgcccgcctccgccccgtcccacccgctcttcgccgacctggtggccgcgcttctcccagccctccgttccctccacgcgctctctgtccggtgccaggaccctgggctccccggggggcggctgcggctacagagcgaccttgacatggtggcctcctcgctctcgctcctcctgcacgacctctcgctgctccttcgctcggggctgctctccgtcgactccgagctgtccattcccactgacatcgtactgcaggtgcctgcgtcggcggctccgcacgcagacaagtccctcttcgtccgtgacgcctttgcccgcctccagatcgggtcgctggacctgaagctaaaggcgctagtgtcgctgctcgacctgctgggtgacgaccctactgcggaggccgcgcagatcgtcgccaccgaaggggacgttgcggcgctgctccgtttgcttgacgcgtcgtcccactcggcgctgcgggaccgtgcggtcacggccgtggcccaccttgcgaccgcctgcgctgcgtcccggagggtggtcttcgacgaaggcggactcggcccacttctgcgcgtgctcgactcaggctcaccgcccgccacgcgtgagcggtctgctgcggccattgtggccatcactggtgatgccggcagcgcgtgggctctatcggcttatggtggattgcccatcttgattaatgcttgccgtcctgggtctggatcccccgcattgcaggcatttgccgtggcggcaattaagaatgtttcttcagtcgatgatgtgcgctccactctggtggaggagagtggtttgcctgttcttgttgacctgcttgccagtggcactgctgagacgcagaagagtgctgctctctgcctctgggcacttgcttcgatgggagaccataagacacagaaccagattgtgcaagcaggtgcattgtcgccactcctacaagcactgcatatcgcctctgatcaggacctccatgattctgtactgcgtgctatacacgcacttacatcagcccctgctgccaccagaatcctttgttcatcgccactgttctttgcacgacttacagacctcatatgcagctctggtagcttcctgttgcaacaaatggctgctgatatgattgctgatcttgcacctactgtgagcgatgacacaaagaggtgcatggcaccatgcattggtacactgattaagctgatggaggtggctaagccagcaacaatacaggagtcagctggtcgtgcactgcttgctctgtttaccttgaagtctaataggaagggttttgtcagggatgagaagagtttaacaatatttgtgcggatgcttgatccccggtttcaggagactgataagaagtatccactctcgatctttctagttcttgccatgggtggcgggaacgggacacgacgacgacttgttgatgctggttcttgtcagcatctacagaagctggctgatgctgatgtgcctggtgcaaagaaggctttgcagaggatatctaacaatcgtcttaaaagtttgttttccataggatggcaaaactagtccatatgctgcactggggtaatgattgatcttgtcttgacctctcttttttttttctaatgtgttgtcttggcctaataatttagaagatgaatgtttctagggaaatttggatccataccattaaaagatcaccactttggatccataccattactatctcacttacatgtgggtccacatgagtcaatgacatgtggggtccatggtatatatctaaagtttggatcttttaatggtatagatccaattgttccatgtttctaccatcgttgcttgcaattagaaacattggcgtttac

SEQ ID NO: 108328 - DNA, 615 bp, Zea Mays
atggaagctgatcctgcgccgacgagcgtgatggaggaggaggtcctactacgcttccctcccgcgctccagcccaacccgctcctctgcagttggcaagagtaccctagtcgcgctcatgtttgcaaggatgaaagagtccgtgattatttctcagaaatcttgtggctgcacgaccatgattttacagacgacgagctagctttcagacaaggatatgcaatggaacgtcaaaaccaagtgtcaaacttgaacaaaggcaggcgagtgctagttgttatagaactatctggagacctctatgaagatgcttggaataggtcgtatcttgcttccaaatggagcctttgtagcgggagtaaactcataggtacaagccgttctgacaagattgtaaagtttgggacaacacgggctctgactctgaacagtttgtcccatgcggcatactggtatttcttcaagtatcaccggtcttcccaagaggaggttccagagataagaatccaagatgtgttgtatggaagcatcaagagacatggaaaatttgaggtcctagcatggagatctcagatacctccctactacagctatgtccatgcttgtgagatttag

SEQ ID NO: 108329 - DNA, 1211 bp, Zea Mays
atccacctcaaagattatgtggtgacggatcggccgccggtggcatatatcgtcgtcatcacttcaccacttgcgtcacaccagctgcacagcacatatatagcatatgagatttcggtggtggcgctccagacaataatggccgcctccgacaagcaggacctgatgaggctttcagcggcggcgctcctgctggcgctggccgcggctggcagcgtctgctcggcgcagcagctccgtcgcaactactacgcgagcgtgtgcccgaacgtggagtccatcgtgcgcgacgcggtggcgaagaagtaccgggagacgttcatcacggtgggcgcgacggtgcacctcttcttccacgactgcttcgtggagggctgcgacgcctccgtggtggtggcgtccacgccaaacgccaccgcggagaaggaccaccccatcaacctgtccctggcgggcgatggcttcgacaccgtgatccgggccaaggccgccgtggacgccgtgccgcggtgccggaacagggtgtcctgcgccgacatcctggccatggccacccgggacgccatcgcgctggccggcgggcccgcgtacgcggtggagctgggccgcctggacgggctgtcctccacggcgaccagcgtgaacgggaagctggcgccgccgtcgtttggcctggaccagctcaccgcgctgttcgcgcgcaacgggctctcgcaggccgacatggtggcgctatcggcggggcacacggtggggttcgcgcactgcggaaccttctccgggcgggtccgcgcggcggacccgacgctgaaccggagcctggcggagaagctggcggcgtggtgccccgacggcgtggacccgcgggtggcggtgaccatggacgtggtcacgcccagggtgttcgacaaccagtacttccggaacctgcagagcgggatgggcctcctggcgtcggaccaggtgctgtacacggaccccaggtctaggcccaccgtcgacgcgttggcccggagtaaagtggcctttgaacgggcctttgtggaggggatcacgaagatgggccggatcggggtcaagacgggtgcccaagggaacatccgacgtaactgcgcagtgctcaattgaccgacctgatgatgtttgttgccctgcgcttgtactatctatgaacaaatttgccgtgtgtttatatatgaacaaatttttca

SEQ ID NO: 108330 - DNA, 579 bp, Zea Mays
gcatcgcagcagggagcagctcacaaacgcaggggagagctagcagagcaacaaacaatggccaagagcggcacggaggagtggcgccgcaacgccgacacgcacaagatgagcgcggaggaggtgcgcgcggcaggggtggaggagtcgatgcgcccgccgggccggggccccggagaggtgctgcaccagcgcggccgccgcccgctgccgtacggcccgggcaccatggcgctggtggggttcggtatcgtcggcgtcgtcggctaccttgtcttgtaccagaaggccaggtccggcacgccggccactgaggtggccaaggtcgccgtcggccacggggaccccgccgccggccgggacccggagaagcgccgcgagggctcgcgtgaagccaagtagctcggtccgttgtaaccgtaatagcaggatgtagcgtgcgtgttgtgttcggtagggtattcagttctgtttttctgctttgcgaaagactgaataagttctctccatcgtcccggaatgaagaatctcaactcttgatttcagttggaaaaaaaaacgacactagaaataaatctc

SEQ ID NO: 108331 - DNA, 1430 bp, Zea Mays
cgcaaatatcttcttaccccaacgtcgcccaaaaacccttgcggcgtcgcactcacactagcgaccaacccccaaccccagaccttcctctccggcggcggccggcgcgcgcgcgagggagatggaccgcccttccggcacatcgtaccagcgcttcccccgcgttcggatccgcgagctcaaggacgactacgccaagttcgaactccgcgacaccgacgctagcatggccaacgccctccgccgcgtcatgatcgccgaagtcccaactgtcgccatcgatctcgtagagatcgaggttaactcctccgtcctcaacgacgagttcatcgcccaccgtctggggctcatcccgctcacctccgccgccgccatgcaaatgcgcttctctcgggactgcgacgcttgcgacggcgacggctcctgcgagtactgctccgtcgagtttcacctctccgtgcacgccaccgactccgaccagacgctcgaggtcacatccaacgacctgagatccatggaccccaaggtctgcccagtcgaccaagcacgcgcctaccagcacgcgctcggaggcaccgacccctttggagccaatgcctcgaacgaaaacaggggcatacttattgtaaagctgcgtcgggggcaagaactaaggcttcgtgccatagctaggaaaggaattggcaaggaccatgccaaatggtcaccagctgctaccgtgactttcatgtatgagcctgacatacgtatcaatgaagaactaatggaaacattgacggtggaagagagaataagcttgattgaaagcagccctacaaaagtatttgagcttgattctgccaatcaggtggtggtgaaaaacgcggaggcatacacctacgacgacgaggtgatcaagcacgccgaggccatcgggaagccaggcttggtggagatcaccgccaaggaggacagcttcgtcttcaccgtagaaacaaccggcgccatcacagcctacgagctgatcatgaacgccatcacggtgctgaggcagaagctggatgccgtccgccttcaggacgacgacggcgaccttggcgagctcggcgcccaccttggtgggccttaggagctttgagcaagaaggaatcgccctgtggccttcctccctcccacctgcctacgtaggcctatctaactgctgtgcgtgctagtcgatcgatcgaaaccgaacggttctgataaaccttatggtgtctaaagctccagatttatggattgccaaacacccagcaccgaattccagtttgatttccttgcccgccttgttttcgtgcgggtgacatctgcgccgtgaatttgcatgcttgcgcgtcttgttattgctctgtggtgtgtgtactatctaacttttgtgtgtgtgaggtgaatgcagagttatttgcaggttc

SEQ ID NO: 108332 - DNA, 1000 bp, Zea Mays
cgcaaatatcttcttaccccaacgtcgcccaaaaacccttgcggcgtcgcactcacactagcgaccaacccccaaccccagaccttcctctccggcggcggccggcgcgcgcgcgagggagatggaccgcccttccggcacatcgtaccagcgcttcccccgcgttcggatccgcgagctcaaggacgactacgccaagttcgaactccgcgacaccgacgctagcatggccaacgccctccgccgcgtcatgatcgccgaagtcccaactgtcgccatcgatctcgtagagatcgaggttaactcctccgtcctcaacgacgagttcatcgcccaccgtctggggctcatcccgctcacctccgccgccgccatgcaaatgcgcttctctcgggactgcgacgcttgcgacggcgacggctcctgcgagtactgctccgtcgagtttcacctctccgtgcacgccaccgactccgaccagacgctcgaggtcacatccaacgacctgagatccatggaccccaaggtctgcccagtcgaccaagcacgcgcctaccagcacgcgctcggaggcaccgacccctttggagccaatgcctcgaacgaaaacaggggcatacttattgtaaagctgcgtcgggggcaagaactaaggcttcgtgccatagctaggaaaggaattggcaaggaccatgccaaatggtcaccagctgctaccgtgactttcatgtatgagcctgacatacgtatcaatgaagaactaatggaaacattgacggtggaagagagaataagcttgattgaaagcagccctacaaaagtatttgagcttgattctgccaatcaggtcaacttgttttctctagtaattctgaattattttcttgtcttgacctatcattgatgtgatccatagaattcaatatttatcattgttggtactctatagttccatgctgcaactatgatactattcaataactagttcctaatattggta

SEQ ID NO: 108333 - DNA, 723 bp, Zea Mays
attaaaatgatgaaccctgccatttgtacacttctttactgaaatagcatcatccccaatgaaacacaaggaatcaaaaggcaatggtatacagagtatctatacagcacaaaccaatgcccatttttcatgcctctgcaaacctgcgctgcttatactacaacagtacaacttgtgcacctctcccttgagagagaaaaaaagttcatacggcaatcaaagttacagcatgatcaggcccatctacttggacaacccacccggtgcatggtgatggtcacacaaaccatatcaagcaaagagccgccgccttctccgcctgcctgccgccttcatctccgggccgtcggcagactccccatgcaccacctcgtccaccagctccttgaataccgacctctcgatctccagcaccatcccagggagctccctgctgaagctcgtccatccctgcagcctctgcaggatctctgcgtcaggtatcacgccgccttccatctggcaggtggacgatcgctccgtacccatgccttcgatttctgaagatacaaacttcagcagttgctgcccgctaagagcctttgcaggtggatgatccttcgctccggtggaggaactgaccgcgtaaactgtggtttccttctcaaacttctggaggagaagctcgttcgcggtgtcaaacaccagcttccggtgcgctctcttgggatcagacttggcgcc

SEQ ID NO: 108334 - DNA, 120 bp, Zea Mays
cttcgctgatgtctcgggaccaccagattttctgaggcacagggttgccgagccagaggaagggacggaggccctcggtgtactcgatcgccgtgggaaagaggggagcaaacagccgcc

SEQ ID NO: 108335 - DNA, 3805 bp, Zea Mays
atggcagcggcggaggacgcagagggcgaccgcgtgattgaggtcgtgtcagcgggggcactctaccaccgcggcggcgactgggagcgcaaatactggagctgctcgaggggcaaggaccggtacccttacccagtgggttaccatgccgtccgccattttactggaatatcctatgctatggaaatccaacagggacctagaggtccaatattcctggttacatccaccgaaggagatacagcgatagggcagacccctgatatcgcttggaagaacttccagaaaaagactggggctaaactttttgggttcaaaaatgcatctattcagagattgcttcgtgagcttatagtagattcaactggagcagttgaacttaacgagccttgtgaagtcacttctgaggctggtgcacatttagtttgtaaagatgcatctgatgtttctgaggctgaagatccatccgtttgcttaggcatggaaagtggaactcctaaaagaagtatagagcccagccaggtggaaaataccttggcagtccactacccggacatgttaacagcagttgataagtgcaatgtatccacacataaaaatacaaatgaaggagatactgtaggtagagcactgttgcaagatgtctctgattcaagatgcacacttccattgctggaagaagtccctaagaatgcacaatccacttctcttgatgataatttgggagagtcttctctagtttcatctcaacaagttggtttatcttctggttcttatttgaactctgaaaagtctgatatagaattggctgagaaggaagtagcaaagtctatgatgtctattttgcttccccaagctattccccttctcatgaaaagttacaaaaggaagaaattcaagcataaaaatagagaaaactctactgtttcagtgaaaacagtttcagcttacaatccatctgatagttgctgccgaggtgtgactgtaccaacaattgtgggtgaaggtacaaatggaaatagttctgaaatgtgtgaccatgggggatctcatcatgacaaggttaaaaatggctttgccaatgaggactgcagaaatgacgacttagtggttaaattagatgagatgaatgattatgttgcagatagttttgaggatgatgcacaaattttgggcgacaacacaacaaaatcaatgggtaaccatcatcattattctgagtatgtgctctctagggggcctaatgagaagtcaaagctgctaaatggtaaaagtgaagtttttgagtatcaggctagtgtgcataatggcaaaagggcacctgatgtggtatacaatcatgaaaatggacaatatatgttgtctgattcgcttgttgcttgtctagaggatgagttcggtggggaagatagttcccaccctgcaaactacaaccagtttaatggcgatgttaaacaattcgagcagcaatttaaggagcttacagctgttataaaaaatggctcatcagttccggtggatgtttcataccacaagaacactgataatggatcaattaatgtttgtgcacaagcttttgctagaaatggtccaggagtttcgaggaatgaggagtgtttagcaaatatcttgcctgctccagttcattctaatgcacataatgatgctgtaacgagtggtaagcatgatgtgagttcaactttgaatttgccacctgcatgtgaggcaaaatctactttgttggtcatgcgagatggacaacatcatactgaagtgccagcaattgatcagaaggaaaataggttccacagtgtaagctacaaatgcacaaaatctgatgataatactagttttcattctgagaatgttgagtttgttgacaaacatgttgcttttgagtcaccagacaatggcatgtattctagtgatggttcacaaagagcaatcaccactgaaggttggcctgctggtgatggagttaaagcagatgaagaaaatctgcttggcaaagtggaagaatgtcaaattagatataaaaatggtaataagaacacaatactatctgtctatggggaaggtaatgtttgtgaacacatacctacaaagggtgaaaatgatgtttttcatcaccaaccatctcatgccctttctacgactaattgtacacatggtttagtatctgaagacagaacacaagcaaggccagatcatcacctagagctggtgggatgctacctgcatccaatgcctgtcttgtctgtcatgttaaacactaaaaatcataacagcctctatatttatgtattgtgtggccttttggagagctgccaaaggttcctttatgtttactctatcaatcccaaagaccagaaagatgtgtcaccatgttttgttggttacactccccttgtactgcccaccttggaccattcttcaacaggaaattttctgtttggaagatctggtttgcattttacacctgatggccagtttctggtcctcctgagcagcatcaaaataccttcttgcaggatgcaaaacattgattgcttgtgcccagtctgcaacttgtgtcaatgtgaagataattctttaaaaattgtatctgttaactcgggctatgcttcacttgtaaccaatttgatgccttatgggacagtgtcgtgcattctgatatttgaaccaaattacattgtagctattgaagacagcagaaacctgcatatctgggaaatggttgatgggtggagtgagatatctgagcagtatatgattcctagtttgggtaacatgggtcctatactggagcttacaaggatgccaaaaaacacatctctcattattggccatgatggcgaaggcggtttttgtttgtgggacatctccaagcgcacactattggcgacttttgcagctccaggaaacactgtcttccagattctgccagttggcttatgtagtttgcaggaggatattattcatgctccagttgatgacatagataaaaatctacaagtgatcacagtcggtgacttgtacagaaaaaatgtcagggtgaactttgtgacgccgccaagacaagatatagcagtttgggtcctgatttcttgtgcttctgtggctgagtatcaacatgatcttcaagccaaggaaaacagtgcacgatggaggtttgctctgttagcgaagaagagagtttttatcggaaatgttttggatacaagaattactgctttagatgcctgcggtaactacggatacgctgggacacatggtggtctgctgtatctgtgggaattgtcttcggggagaaaagtgacgggaacacagtgtttcaacagtggacgagtctcctgtgtttctgttgattccaaatcaggtgcagtggcagtgactgatggtggatgccatgtattactctacacacaggacaaggtacaggcggctgatgacggagcagatgggcgcatacctgtttaagatgaataaaagtagtcattgtggcaagctaatagaagttctgcaattttgtatataatgcttacattttgctgtgtctatgaggttttggtctgttgcacttattttttcttatgcaacacagcaaggatagtttgctgtatgttgctccatctgcttgacctgttaagtacactgtagatgtctatgtcagcaggtatgtatcctctttgtgaatatagacgatagatgctgtaacaccagactcaagggccaggaagcatgattaaaaactcgccagaccttcgtgccttgctggtcctttcagctagagaggttggctttc

SEQ ID NO: 108336 - DNA, 3184 bp, Zea Mays
atggcagcggcggaggacgcagagggcgaccgcgtgattgaggtcgtgtcagcgggggcactctaccaccgcggcggcgactgggagcgcaaatactggagctgctcgaggggcaaggaccggtacccttacccagtgggttaccatgccgtccgccattttactggaatatcctatgctatggaaatccaacagggacctagaggtccaatattcctggttacatccaccgaaggagatacagcgatagggcagacccctgatatcgcttggaagaacttccagaaaaagactggggctaaactttttgggttcaaaaatgcatctattcagagattgcttcgtgagcttatagtagattcaactggagcagttgaacttaacgagccttgtgaagtcacttctgaggctggtgcacatttagtttgtaaagatgcatctgatgtttctgaggctgaagatccatccgtttgcttaggcatggaaagtggaactcctaaaagaagtatagagcccagccaggtggaaaataccttggcagtccactacccggacatgttaacagcagttgataagtgcaatgtatccacacataaaaatacaaatgaaggagatactgtaggtagagcactgttgcaagatgtctctgattcaagatgcacacttccattgctggaagaagtccctaagaatgcacaatccacttctcttgatgataatttgggagagtcttctctagtttcatctcaacaagttggtttatcttctggttcttatttgaactctgaaaagtctgatatagaattggctgagaaggaagtagcaaagtctatgatgtctattttgcttccccaagctattccccttctcatgaaaagttacaaaaggaagaaattcaagcataaaaatagagaaaactctactgtttcagtgaaaacagtttcagcttacaatccatctgatagttgctgccgaggtgtgactgtaccaacaattgtgggtgaaggtacaaatggaaatagttctgaaatgtgtgaccatgggggatctcatcatgacaaggttaaaaatggctttgccaatgaggactgcagaaatgacgacttagtggttaaattagatgagatgaatgattatgttgcagatagttttgaggatgatgcacaaattttgggcgacaacacaacaaaatcaatgggtaaccatcatcattattctgagtatgtgctctctagggggcctaatgagaagtcaaagctgctaaatggtaaaagtgaagtttttgagtatcaggctagtgtgcataatggcaaaagggcacctgatgtggtatacaatcatgaaaatggacaatatatgttgtctgattcgcttgttgcttgtctagaggatgagttcggtggggaagatagttcccaccctgcaaactacaaccagtttaatggcgatgttaaacaattcgagcagcaatttaaggagcttacagctgttataaaaaatggctcatcagttccggtggatgtttcataccacaagaacactgataatggatcaattaatgtttgtgcacaagcttttgctagaaatggtccaggagtttcgaggaatgaggagtgtttagcaaatatcttgcctgctccagttcattctaatgcacataatgatgctgtaacgagtggtaagcatgatgtgagttcaactttgaatttgccacctgcatgtgaggcaaaatctactttgttggtcatgcgagatggacaacatcatactgaagtgccagcaattgatcagaaggaaaataggttccacagtgtaagctacaaatgcacaaaatctgatgataatactagttttcattctgagaatgttgagtttgttgacaaacatgttgcttttgagtcaccagacaatggcatgtattctagtgatggttcacaaagagcaatcaccactgaaggttggcctgctggtgatggagttaaagcagatgaagaaaatctgcttggcaaagtggaagaatgtcaaattagatataaaaatggtaataagaacacaatactatctgtctatggggaaggtaatgtttgtgaacacatacctacaaagggtgaaaatgatgtttttcatcaccaaccatctcatgccctttctacgactaattgtacacatggtttagtatctgaagacagaacacaagcaaggccagatcatcacctagagctggtgggatgctacctgcatccaatgcctgtcttgtctgtcatgttaaacactaaaaatcataacagcctctatatttatgtattgtgtggccttttggagagctgccaaaggttcctttatgtttactctatcaatcccaaagaccagaaagatgtgtcaccatgttttgttggttacactccccttgtactgcccaccttggaccattcttcaacaggaaattttctgtttggaagatctggtttgcattttacacctgatggccagtttctggtcctcctgagcagcatcaaaataccttcttgcaggatgcaaaacattgattgcttgtgcccagtctgcaacttgtgtcaatgtgaagataattctttaaaaattgtatctgttaactcgggctatgcttcacttgtaaccaatttgatgccttatgggacagtgtcgtgcattctgatatttgaaccaaattacattgtagctattgaagacagcagaaacctgcatatctgggaaatggttgatgggtggagtgagatatctgagcagtatatgattcctagtttgggtaacatgggtcctatactggagcttacaaggatgccaaaaaacacatctctcattattggccatgatggcgaaggcggtttttgtttgtggtatgtctagcatctcagttgtcacttgtgtattgtgcagtgccagaggaaattattgctgttagcatgtttgtttatatttaatgcccgctgactgtattttatgtctgctggcttgcctgggatgcttcccttgcttgttgcctgggtttcccctctttcttagctacatctcggcttgttacctgagattcttcctctttcttaatatcagcttagtctctcttataaatccttgtaacctctcgaccttttcaataaataaaatacatagaagcatgtttatgctctttcatggtatcagataa

SEQ ID NO: 108337 - DNA, 1057 bp, Zea Mays
gttggccacctcaccttccagtgccgcaacttcctctccgtcaaggacctggacctggacgacgcccaggccgctgcacaggcagccgcgcaggccaagttcgacgaaataaaaaagaaggctgctgctggtggggacgcagatgaggcttctgatgacctcgaagaggaggaagaggacagcgattcctctgattcagacgtcgaccctgagctggagaagataattgctcagcgcgagcgtgccaggaatggaggacggaggcacaggcaggaagagaagtcgttgagccaccgctataggagcagcagcagcaagagaaaatcaaagcacacaaggagttggagaagtgatgatactgaggatgaagaggaggaaggcagaagaggcagggacaggaagaagaggtccagcagatcgaaaaagcatgaaagatcagatgaggctagcagtgatgactctgactcagataggcagagacacaggaagagcaggaagaacagatcagatgaggctagcagcgatgactctgactcagataggcataggcgcaggaagggcaggaaggacaggaagagaaggaggagggagacgccaatgtcaccgcaagcggagccatcaccaaagggatgcatctgactgtgacaaaggtggcagtgattatgcagatgaaaagaagcaatcgagcaggcggaggaggcaccgccagtcagaaagcagtgggttggatgaggatgagcggcgtgatccccgaggagcaaagcgatctgaggagaagaacagggaccgcaagaggagctaaagaggagcattgaattggtaattcctatttgatgatgttattgagttcctctatttgtcagctggttcgttgccttgtcataagtttgacacatttgaaacatgatgcttaatatgtgtaccaatatagcatgccctgtattactgcatgtctctctgaactatacttcgagtctattatgtgtttaggatttgataattgatatattgtcaaggatttttaatatgatgcattcagttagccttcccccgcaat

SEQ ID NO: 108338 - DNA, 469 bp, Zea Mays
acattgatgttgtttgtcgaggcctgcgggtagacggtagagacaccactctgtggtagccgcatcggacgaggagcaccatggactggagggcgggctttcggagatgcggatggcgggcactgcatattattgtggaaggtgagcgatagtgcgcgatagaagcgagagcgagatggggaatgctgtgagccaggcggcttgcgcggttcaggcgaggaagtccggcggggacgcacctacatgctactggcggcactcacggagacgagctccgggatgacgagtagctagcggtggagcttcgcagggaggccagccgcgcgtggcagcgaggccgctagagaggggagatcggggctacgcgcgctaggttggcggagcgcgtggagaggggagttgggggcggcgagcgccagaagagggagggcggcacagatgtttcgtcgcggcgggaaagaaaaaaaaa

SEQ ID NO: 108339 - DNA, 131 bp, Zea Mays
cacctccctttcactctttaaatgggctattggacttttatatatcaaattttggagttttaaaaacattaccatatttatactaccgtaatacacattgttatctgctaattaaactaaaaaataattaa

SEQ ID NO: 108340 - DNA, 157 bp, Zea Mays
ctcttcatcatcacttgtaaaaaaagtaacataaaacacagaagaacacaaattggcaagagaaacatataccaatatttcctaacaactaaatatatcgtggataaagaaaattggcaaaagaaacatgaacaacctttcttagcgaccttcttcc

SEQ ID NO: 108341 - DNA, 106 bp, Zea Mays
gaatttgtatattatgtagaaaatgtttccattctatgtataggtcaatcaactatatatatagattgtatattaggagccctgggcttccaataactagaggaag

SEQ ID NO: 108342 - DNA, 1953 bp, Zea Mays
cttgctcttccagtcagtcgtccttggctcctcttcttccccacacaaacacaacggaatagtcccgaccatactggaaaaccggcgaacttggaaagcaagtcaacaagagtatggcgtccatggagagcctgatcgggatgatgaaccgcatccagcgcgcctgcaccgccctcggagaccacggaggaggaagcgacttgcccaccctctgggagtcgctcccaaccatcgccgtcgtcggaggccaggaattgtcacgcgaaggcctttagtgttgcagctgcaacagacagaggatggatctcaggaatatgcagagttcttgcatatgccgaaaagaaggttttcagactttgttgtgaacttaacaatgattgatcttcctgggttgacaaaagttgctgtagagggacaatctgaaagtattgtgcaagatatagagaatatggttcgctcatatgttgataagcccaactgtattattttggctatatctccagcaaatcaggatattgcaacttctgatgcaattaagctctcaaaagaagttgatccaacaggtgaaaggacgttcggtgtgttgacaaaactggacttaatggacaaaggaacaaatgctctcgatgttcttgagggaagagcctatcggctgcagaatccttgggttggaatcgtcaatcgctcacaagcagatattaataggaaggttgacatgatttcagcgagggaaaaagaaagggaatattttgaaacaagtcctgactatgctcatttatcaagtcgtatgggttctggatatcttgctaagcttctttctcagcatcttgaatctgttatcaaagcacacattcctagtatcacagcgacaatcaacaaaactatagacgaacttgaatcagagctggacatcatagggagagctgtggctgctgatccaggggctcaactgtacaccatactggacctctgccgtgcttttgaccgtgttttcaaggaacatcttgatggagggaggtcaggtggagatagaatatacggcgtgtttgaccataagctccctgctgcttttaagaagctttccttcgaccgctacctgtcggtgcaaaacgtgaagaaggtggtttcagaagcagatggctatcagccccatctcatggcacctgaacaagggtaccggcggcttattgagaagggcatcaactatttcagaggaccagctgaagccacggttgatgcggtccacgttgttctaaaagacttggtcaggaaatccataggggagacagagcaactcagaagatttccgacgcttcaagcagcgatcgcgaccgctgcaaacgaagccctggagcgattccgggaggacgggcgcagcacggcgcttcgtctggtggacatggaggctgcgtacgtgacggtggagttcttccggaagctccctcaggatcctcctgctgatgcgcctgctagcaaggctggaggcaagccttcagcggagccggcggctgcgccgcctcctgaccgctacggtgacgggcacttcaggagcatcgcctccaacgtgtcccagtacatccggatggttggagacgagctcctgcagaagatccccaaggcagctgtccactgccaggttcgcgaggccaagaggtctctgctcaaccatttctacgtgcagatggggaagaaagaggctggggagtttgggcatatgctggacgaggacccggcgatgatggagcgccggcagcagtgcttcaagaggctggagctgtacaaatctgccagggatgaggttgattctgtggcatgggggggcagcagcagataggtcagtggaagcattgtattcgtagggatattcttgttgtatatacaatacaattctatatatattacggtattacatactctaaaaacaaaaaatgatataatttataataaaaaata

SEQ ID NO: 108343 - DNA, 2168 bp, Zea Mays
agtcagtcgtccttggctcctcttcttccccacacaaacacaacggaatagtcccgaccatactggaaaaccggcgaacttggaaagcaagtcaacaagagtatggcgtccatggagagcctgatcgggatgatgaaccgcatccagcgcgcctgcaccgccctcggagaccacggaggaggaagcgacttgcccaccctctgggagtcgctcccaaccatcgccgtcgtcggaggccagagctcgggcaagtcctctgtacttgagagcattgttggcaccgattttcttccccgaggatcgggaattgtcacgcgaaggcctttagtgttgcagctgcaacagacagaggatggatctcaggaatatgcagagttcttgcatatgccgaaaagaaggttttcagactttgcccttgttcgccaagaaattgctgatgagacggataggctgactggaaaaactaagcaaatatctcctgtccctattcatctcagcatctactcgcccaaggttgtgaacttaacaatgattgatcttcctgggttgacaaaagttgctgtagagggacaatctgaaagtattgtgcaagatatagagaatatggttcgctcatatgttgataagcccaactgtattattttggctatatctccagcaaatcaggatattgcaacttctgatgcaattaagctctcaaaagaagttgatccaacaggtgaaaggacgttcggtgtgttgacaaaactggacttaatggacaaaggaacaaatgctctcgatgttcttgagggaagagcctatcggctgcagaatccttgggttggaatcgtcaatcgctcacaagcagatattaataggaaggttgacatgatttcagcgagggaaaaagaaagggaatattttgaaacaagtcctgactatgctcatttatcaagtcgtatgggttctggatatcttgctaagcttctttctcagcatcttgaatctgttatcaaagcacacattcctagtatcacagcgacaatcaacaaaactatagacgaacttgaatcagagctggacatcatagggagagctgtggctgctgatccaggggctcaactgtacaccatactggacctctgccgtgcttttgaccgtgttttcaaggaacatcttgatggagggaggtcaggtggagatagaatatacggcgtgtttgaccataagctccctgctgcttttaagaagctttccttcgaccgctacctgtcggtgcaaaacgtgaagaaggtggtttcagaagcagatggctatcagccccatctcatggcacctgaacaagggtaccggcggcttattgagaagggcatcaactatttcagaggaccagctgaagccacggttgatgcggtccacgttgttctaaaagacttggtcaggaaatccataggggagacagagcaactcagaagatttccgacgcttcaagcagcgatcgcgaccgctgcaaacgaagccctggagcgattccgggaggacgggcgcagcacggcgcttcgtctggtggacatggaggctgcgtacgtgacggtggagttcttccggaagctccctcaggatcctcctgctgatgcgcctgctagcaaggctggaggcaagccttcagcggagccggcggctgcgccgcctcctgaccgctacggtgacgggcacttcaggagcatcgcctccaacgtgtcccagtacatccggatggttggagacgagctcctgcagaagatccccaaggcagctgtccactgccaggttcgcgaggccaagaggtctctgctcaaccatttctacgtgcagatggggaagaaagaggctggggagtttgggcatatgctggacgaggacccggcgatgatggagcgccggcagcagtgcttcaagaggctggagctgtacaaatctgccagggatgaggttgattctgtggcatgggggggcagcagcagataggtcagtggaagcattgtattcgtagggatattcttgttgtatatacaatacaattctatatatattacggtattacatactctatcggggagagtacacggttaattcatgaatttctcgtgctagctgatggagattgtccgtaatgcttattaaataaaaataatcatatgcaagtc

SEQ ID NO: 108344 - DNA, 2113 bp, Zea Mays
cttgctcttccagtcagtcgtccttggctcctcttcttccccacacaaacacaacggaatagtcccgaccatactggaaaaccggcgaacttggaaagcaagtcaacaagagtatggcgtccatggagagcctgatcgggatgatgaaccgcatccagcgcgcctgcaccgccctcggagaccacggaggaggaagcgacttgcccaccctctgggagtcgctcccaaccatcgccgtcgtcggaggccagagctcgggcaagtcctctgtacttgagagcattgttggcaccgattttcttccccgaggatcgggaattgtcacgcgaaggcctttagtgttgcagctgcaacagacagaggatggatctcaggaatatgcagagttcttgcatatgccgaaaagaaggttttcagactttgcccttgttcgccaagaaattgctgatgagacggataggctgactggaaaaactaagcaaatatctcctgtccctattcatctcagcatctactcgcccaaggattgaaatgtctttttccagttgtgaacttaacaatgattgatcttcctgggttgacaaaagttgctgtagagggacaatctgaaagtattgtgcaagatatagagaatatggttcgctcatatgttgataagcccaactgtattattttggctatatctccagcaaatcaggatattgcaacttctgatgcaattaagctctcaaaagaagttgatccaacaggtgaaaggacgttcggtgtgttgacaaaactggacttaatggacaaaggaacaaatgctctcgatgttcttgagggaagagcctatcggctgcagaatccttgggttggaatcgtcaatcgctcacaagcagatattaataggaaggttgacatgatttcagcgagggaaaaagaaagggaatattttgaaacaagtcctgactatgctcatttatcaagtcgtatgggttctggatatcttgctaagcttctttctcagcatcttgaatctgttatcaaagcacacattcctagtatcacagcgacaatcaacaaaactatagacgaacttgaatcagagctggacatcatagggagagctgtggctgctgatccaggggctcaactgtacaccatactggacctctgccgtgcttttgaccgtgttttcaaggaacatcttgatggagggaggtcaggtggagatagaatatacggcgtgtttgaccataagctccctgctgcttttaagaagctttccttcgaccgctacctgtcggtgcaaaacgtgaagaaggtggtttcagaagcagatggctatcagccccatctcatggcacctgaacaagggtaccggcggcttattgagaagggcatcaactatttcagaggaccagctgaagccacggttgatgcggtccacgttgttctaaaagacttggtcaggaaatccataggggagacagagcaactcagaagatttccgacgcttcaagcagcgatcgcgaccgctgcaaacgaagccctggagcgattccgggaggacgggcgcagcacggcgcttcgtctggtggacatggaggctgcgtacgtgacggtggagttcttccggaagctccctcaggatcctcctgctgatgcgcctgctagcaaggctggaggcaagccttcagcggagccggcggctgcgccgcctcctgaccgctacggtgacgggcacttcaggagcatcgcctccaacgtgtcccagtacatccggatggttggagacgagctcctgcagaagatccccaaggcagctgtccactgccaggttcgcgaggccaagaggtctctgctcaaccatttctacgtgcagatggggaagaaagaggctggggagtttgggcatatgctggacgaggacccggcgatgatggagcgccggcagcagtgcttcaagaggctggagctgtacaaatctgccagggatgaggttgattctgtggcatgggggggcagcagcagataggtcagtggaagcattgtattcgtagggatattcttgttgtatatacaatacaattctatatatattacggtattacatactctatcggggaga

SEQ ID NO: 108345 - DNA, 2367 bp, Zea Mays
gtccttggaatggcttggcttccttcgctaggaggttttctttctttccggccgactctgtttcttcgaaccttgctcttccagtcagtcgtccttggctcctcttcttccccacacaaacacaacggaatagtcccgaccatactggaaaaccggcgaacttggaaagcaagtcaacaagagtatggcgtccatggagagcctgatcgggatgatgaaccgcatccagcgcgcctgcaccgccctcggagaccacggaggaggaagcgacttgcccaccctctgggagtcgctcccaaccatcgccgtcgtcggaggccaggtgttgctcgtctcaatttctctccggtcctccatcctcccatccctcttgatggatatatattattgataacttcttttttagtacaacatggatttaatagcattaataattgcttgttccttctacttttgctgataaattcttgcatggtctggtttactgatccaccagcaatatattttttttaatccgtgcaacagagctcgggcaagtcctctgtacttgagagcattgttggcaccgattttcttccccgaggatcgggaattgtcacgcgaaggcctttagtgttgcagctgcaacagacagaggatggatctcaggaatatgcagagttcttgcatatgccgaaaagaaggttttcagactttgcccttgttcgccaagaaattgctgatgagacggataggctgactggaaaaactaagcaaatatctcctgtccctattcatctcagcatctactcgcccaaggttgtgaacttaacaatgattgatcttcctgggttgacaaaagttgctgtagagggacaatctgaaagtattgtgcaagatatagagaatatggttcgctcatatgttgataagcccaactgtattattttggctatatctccagcaaatcaggatattgcaacttctgatgcaattaagctctcaaaagaagttgatccaacaggtgaaaggacgttcggtgtgttgacaaaactggacttaatggacaaaggaacaaatgctctcgatgttcttgagggaagagcctatcggctgcagaatccttgggttggaatcgtcaatcgctcacaagcagatattaataggaaggttgacatgatttcagcgagggaaaaagaaagggaatattttgaaacaagtcctgactatgctcatttatcaagtcgtatgggttctggatatcttgctaagcttctttctcagcatcttgaatctgttatcaaagcacacattcctagtatcacagcgacaatcaacaaaactatagacgaacttgaatcagagctggacatcatagggagagctgtggctgctgatccaggggctcaactgtacaccatactggacctctgccgtgcttttgaccgtgttttcaaggaacatcttgatggagggaggtcaggtggagatagaatatacggcgtgtttgaccataagctccctgctgcttttaagaagctttccttcgaccgctacctgtcggtgcaaaacgtgaagaaggtggtttcagaagcagatggctatcagccccatctcatggcacctgaacaagggtaccggcggcttattgagaagggcatcaactatttcagaggaccagctgaagccacggttgatgcggtccacgttgttctaaaagacttggtcaggaaatccataggggagacagagcaactcagaagatttccgacgcttcaagcagcgatcgcgaccgctgcaaacgaagccctggagcgattccgggaggacgggcgcagcacggcgcttcgtctggtggacatggaggctgcgtacgtgacggtggagttcttccggaagctccctcaggatcctcctgctgatgcgcctgctagcaaggctggaggcaagccttcagcggagccggcggctgcgccgcctcctgaccgctacggtgacgggcacttcaggagcatcgcctccaacgtgtcccagtacatccggatggttggagacgagctcctgcagaagatccccaaggcagctgtccactgccaggttcgcgaggccaagaggtctctgctcaaccatttctacgtgcagatggggaagaaagaggctggggagtttgggcatatgctggacgaggacccggcgatgatggagcgccggcagcagtgcttcaagaggctggagctgtacaaatctgccagggatgaggttgattctgtggcatgggggggcagcagcagataggtcagtggaagcattgtattcgtagggatattcttgttgtatatacaatacaattctatatatattacggtattacatactctatcggggaga

SEQ ID NO: 108346 - DNA, 1144 bp, Zea Mays
gccgtccatagttgttgtctctccagcccccatctcagttctgtcatctatcggcgagcagatttgagaccaaggctaggaggcacggtagaaaagacagcagcaaatcacaaagaaagcccactggtagcgtaggtcaacagacatgggcagggctccgtgttgcgacaaggcaagtgtgaagaaaggaccctggtcgcctgaggaggaccgcaagctcaaggagtacatcgacgagaatggcaccggcggcaactggattgctctccctcacaaagcagggctgaagaggtgcggcaagagctgcaggctgcggtggctcaactacctgaggccgaacctaaagcatggcgacttcagtgatgacgaggacagaatcatctgcagcctcttcgctaccattggaagcaggtggtcgatcatcgcagcgcagctccctgggaggacggacaacgacatcaagaactactggaacaccaagctgaagaagaagctcgtgcacggccttgagcgttacaccgcacacagcctgagccaacgcagcagctctaccgtgtcatcgtcgtcgtcagcggcggtggcggcgtcgccagcagaagctgctcccatcgtgccgctgcagcacctctcgtcacctcacgattattctcacctcatctatagcggcggcggcggcggctacggcgcctcaagcatgtcgacgtccctcctctccgccgccgccgccgccgccgccggtagccgcgaccgcgagcagcagacattgagaacagatgcgccgtgtttggtggacagcggcggcggcggcggcggccatggcatctattttgacgagacatgcgcctccgccatcagcggaagcagcgtcgtccatgggcttggcacgggaaacttcgtctttggcggccttcagttgttgcaggcccaggcactgttgcttgccacctccggtgccgctaaccagctggatgaaccatacagctttgccgcctcctgctgctatggcgaggaggcagcagccgccgatggttaattaattagacttagacgtctgacgacggccgggcggcgccaatggcaccaccgctggtacaactagctagcagctttttttttctacgacagcacctacggcgagaggaca

SEQ ID NO: 108347 - DNA, 1746 bp, Zea Mays
gcacacgcgcacacagtaggcacaggtttggaagccgcgtggagactggaggggaaggtcccgtcgtctccaccttccccactggcaccgccccccagccgagccgccacagcccacagggcaggcagcccgtgcccggcgtcgttttcccggaccccgcgtgcgtgctaacattcgcacgtcaagtccgtatttataccggccgcctacctcccggtgttgctccagttcgtggagtggagtcaccacagaatcaaagaaaagctttcccccgatcctctcgcggacaccagcgatgggttcccgctacgaggtggaggtcaccgtcggctccgcccgggacctcaagaacgtcaactggcgcaacggcgacctcaagccctacgccgtggtgtggatcgactccggcagcaagtgctcgacccgcgtcgacctcgacaacggcgagagcccggcgtgggacgagaagctgctcgtcccgctcccgcccacctcccgcctcgacgacgccgtcctctacgtcgacgtcgtccacgccaacgccgcccagggcgtcaagccgctcgtcggctccgcgcgcctcccgctccgcgacgtcctcgacgacgccggggtcgggggcaaggcctcgcgcagcctccgcctcaagcgcccctcgggccgcccccacggccgcctcgacgtccgcgtcgccgtcaaggagccgtccaggtactacgaccccaacccctacccggcccccgcggcctacgccaacacgggcggcggcacccgtgacccctacggctcgtccgctgctgctgccggcggctactacggctccggaggcggatacggttccggtggtggcgcctacggtggcggcgcctacggcgccgcgcagccctacaccgcagcgcccccggcggggtacccttccacctacggcgccgcgccgccgcctcagccagcggcagcgtacggcgctcctcctgccgctgcatacggcgctcctcctgtcgccgccaccgccgcgtacggaaccggcgccgttgcttccgacgggaagaagaagaacaagatggggatggggacggggctggcagtgggcgcggcggcgggcgtgctcggagggctggcgctggccggcggggcgagctacctggaggacaagttcgaggagcgcgtgtcggagcgggtggaggacaacctggagagggaggagtcgtacggcggcggcggcggcggctacgggggtggctacgacgactatggcggcaacgacgactatggcggcgacgacgactactgatgggtcctgatcctccgatcgtttgcccggctgctacgcttgccatccacctccaccttcgtctcgctgtcctagatgtttgctgtatgaatcgcatagtagatcatgttctctattcctgccttcagtttcttttctcagttgtggtttatcgcggcggggttgatgttgagatttgagatcctcacctgaggaatggaaaaatgctcacctgaggaatggaaaaatggtaagggcttgttcggttattcctatcccatgtggattggatgggattggaaaaaattatgaaagattttaacttgtttgagattgaaatccatccaatcccacctaatccacatgaattaagagcaaaacgaatatgccctaaattgattaattcggttgctactccttcgtcttggcaagtttaggatgtatcaatttgtgcgaatagttgatgttaccaaagg

SEQ ID NO: 108348 - DNA, 740 bp, Zea Mays
ttaactgatgccattcaaaaagtagacagcattactttggcatattatgtttggcactagagtaaaataattattcatatctttttaatcaggaatttttattgtggttcttccatatttagctcagtagtgaagcttggttgtattttgcaggatggaaagaagcaatagccgccgatcacgtgaaacttgttgtgtcctgaaaactaaaggaatggcagaataaagaaattctgttgagggcaacagcatggaagctccggccgacttgtcgccggatcccacagccctacaacataggtggttcttatctagcctgcagggtgctatgaaagtttggatgtcaagtttgtgttgcggcatgaatggttgtaaaatggcaggtgcattttgcagctgatttgagattgaagcagagggttctagttttacaaggggacagcttgtgtgatgggatctgtttttggtaaggaaaaaaaagagtgatttgaataatggtttggtcgcacaagttcctaatcttttgtactcgttagagtctgctaaacacgaaatgcatgtgtgttgaacatgttgtgcttgcgggttgcggctttcatattgtcccagttctttctgctgtcagttcacgtaactcgcgttcattttgtatcgcttcgtgctgtataacccgtactatttgcaatctattctggaagtctgcagaaactaagtaatttatagattgaactatttgatga

SEQ ID NO: 108349 - DNA, 2664 bp, Zea Mays
gcagaaccaagcgaagcatggtgaggcagctgccacacatccgaaaagggcgtagcgccagcgacgtgagccgagtggagatcagatgcaattaaccgcggctggagatcgatgagggggaaggattagtgttggtgcgcggcgagggatttcgtcgaacactttggcagcggggcacgcggcctgccgcagatcttgctggtcactgttcccgcgatcgactggaaaggtgtgctagtacattttgtgggcctatgtggtctgttgaaagagaggggaggagacaacacaaccctcgcccctcgtcttcattcgctcgtccgatcaggaaggacggtggatgaaaaagcgccctgcacgcctgaacaatcggcattattgttcactatctccttttgttttccctctcccgttcatctctctcctctttggccttcctttccttgcgacgacgactgggacgagcgccccccgcgcttctgcaggcgagcaccccgccaccagtcggagatgaacgcgtccaggaaatccagccatctctccagcaaggacagtgcagagaccgcgagggatatcatcaccacgtccggccaaatccaacccctcaaaatcccggacgctgttgctgcgctcgcacaggctgctgcaaaggcaaatggtgagaccgagaaatatcttccagggtggccgttgttctcgcctcctaaggtgcagttggacaagtgtaccaagtgctccagagaattctgttctgcaatcaacttccggaggcacacacgtgttcatcgtagatccctcaagatagatagggattttccaaagaatagagaccttctcgctgcattctggaataaactcactgtggatgatgccagcaaaattttgtccttgacaggtgttgttattgagggtgtaactggttcatcaattttgacagcactgtcatcatggatgtgtaaaccagggtatgcttcgttgccagttgcatatgccagagctggcagtgagcttctggatctaattcaagcaaagccttcaatgcatctgcctgtttcatcggatgaactatttagtttgctcgatgaagcaagtgaaaaaacatttctttgcacaaatacagctgcttgtatacagaagtttttatttgatggagaggtagaaaaaattgcaactgagttgaaaaatgttgtttcgtgcgctagttacatgcttgaacaaaagctgcttgaagcatggtgtgctgataagactgctgaagcattaagatgccagaagttgctggaggatgaagaggaagctgctcagaaaaggcaagccgaactgatggaaaggaagcggatgaagaaacttaggcagaaagaacagaggttaaaaaacctcaaggatgaggatgcgacagttcagtcacctgaaatcatggatgatgcgacatgttctactgccattcaaagtgtgaattccatttatgatcctgactgttttgagcaagaagaatcgcagtatcttcaatttccagcactaattactttggaaactgacaatgattttaatgtggacctaccagtagaagatatcagttgtgatttggggcctgaaatggataaaggtgttgtattaaggcaacaagttgtttcaaggcatcatttaggcagaacggagaagcttgctgaaagtagcattttatctggttccgtagttacttcaaagcatgcagctttagcaaggccttcaaattacaaggatccaaatgtctgttctgcaccaagtagaaacaaaacttgtgaattgaaactacggtctgagattgaagaacagtgccaaaaacatgagttagatgtagatgaacgtggcattggtcctagcaaaaactctcgtgtgctaataggatctataattgtcgcaattaaagattgtagtgaacacttgctggacttaggttccaagaatgacccagtacctcccaatgtaaagacaaagaaacatgcatcagtcaaggtggtgcaacaagttacccatgagggaaacagaaatgaaggtgttcctgatagtgataaccgttctagcctcagtgttactacagatgaaatcagttattcaacctgctgcgatgcagatttggcagtggatgaacatttacaatgcaccacgttttccagtgaagaagcgacagcctttctttctcaaagatggaaagaagcaatagccgccgatcacgtgaaacttgttgtgtcctgaaaactaaaggaatggcagaataaagaaattctgttgagggcaacagcatggaagctccggccgacttgtcgccggatcccacagccctacaacataggtggttcttatctagcctgcagggtgctatgaaagtttggatgtcaagtttgtgttgcggcatgaatggttgtaaaatggcaggtgcattttgcagctgatttgagattgaagcagagggttctagttttacaaggggacagcttgtgtgatgggatctgtttttggtaaggaaaaaaaagagtgatttgaataatggtttggtcgcacaagttcctaatcttttgtactcgttagagtctgctaaacacgaaatgcatgtgtgttgaacatgttgtgcttgcgggttgcggctttcatattgtcccagttctttctgctgtcagttcacgt

SEQ ID NO: 108350 - DNA, 2542 bp, Zea Mays
gcagaaccaagcgaagcatggtgaggcagctgccacacatccgaaaagggcgtagcgccagcgacgtgagccgagtggagatcagatgcaattaaccgcggctggagatcgatgagggggaaggattagtgttggtgcgcggcgagggatttcgtcgaacactttggcagcggggcacgcggcctgccgcagatcttgctggtcactgttcccgcgatcgactggaaaggtgtgctagtacattttgtgggcctatgtggtctgttgaaagagaggggaggagacaacacaaccctcgcccctcgtcttcattcgctcgtccgatcaggaaggacggtggatgaaaaagcgccctgcacgcctgaacaatcggcattattgttcactatctccttttgttttccctctcccgttcatctctctcctctttggccttcctttccttgcgacgacgactgggacgagcgccccccgcgcttctgcaggcgagcaccccgccaccagtcggagatgaacgcgtccaggaaatccagccatctctccagcaaggacagtgcagagaccgcgagggatatcatcaccacgtccggccaaatccaacccctcaaaatcccggacgctgttgctgcgctcgcacaggctgctgcaaaggcaaatgatcttccagggtggccgttgttctcgcctcctaaggtgcagttggacaagtgtaccaagtgctccagagaattctgttctgcaatcaacttccggaggcacacacgtgttcatcgtagatccctcaagatagatagggattttccaaagaatagagaccttctcgctgcattctggaataaactcactgtggatgatgccagcaaaattttgtccttgacaggtgttgttattgagggtgtaactggttcatcaattttgacagcactgtcatcatggatgtgtaaaccagggtatgcttcgttgccagttgcatatgccagagctggcagtgagcttctggatctaattcaagcaaagccttcaatgcatctgcctgtttcatcggatgaactatttagtttgctcgatgaagcaagtgaaaaaacatttctttgcacaaatacagctgcttgtatacagaagtttttatttgatggagaggtagaaaaaattgcaactgagttgaaaaatgttgtttcgtgcgctagttacatgcttgaacaaaagctgcttgaagcatggtgtgctgataagactgctgaagcattaagatgccagaagttgctggaggatgaagaggaagctgctcagaaaaggcaagccgaactgatggaaaggaagcggatgaagaaacttaggcagaaagaacagaggttaaaaaacctcaaggatgaggatgcgacagttcagtcacctgaaatcatggatgatgcgacatgttctactgccattcaaagtgtgaattccatttatgatcctgactgttttgagcaagaagaatcgcagtatcttcaatttccagcactaattactttggaaactgacaatgattttaatgtggacctaccagtagaagatatcagttgtgatttggggcctgaaatggataaaggtgttgtattaaggcaacaagttgtttcaaggcatcatttaggcagaacggagaagcttgctgaaagtagcattttatctggttccgtagttacttcaaagcatgcagctttagcaaggccttcaaattacaaggatccaaatgtctgttctgcaccaagtagaaacaaaacttgtgaattgaaactacggtctgagattgaagaacagtgccaaaaacatgagttagatgtagatgaacgtggcattggtcctagcaaaaactctcgtgtgctaataggatctataattgtcgcaattaaagattgtagtgaacacttgctggacttaggttccaagaatgacccagtacctcccaatgtaaagacaaagaaacatgcatcagtcaaggtggtgcaacaagttacccatgagggaaacagaaatgaaggtgttcctgatagtgataaccgttctagcctcagtgttactacagatgaaatcagttattcaacctgctgcgatgcagatttggcagtggatgaacatttacaatgcaccacgttttccagtgaagaagcgacagcctttctttctcaaagatggaaagaagcaatagccgccgatcacgtgaaacttgttgtgtcctgaaaactaaaggaatggcagaataaagaaattctgttgagggcaacagcatggaagctccggccgacttgtcgccggatcccacagccctacaacataggtggttcttatctagcctgcagggtgctatgaaagtttggatgtcaagtttgtgttgcggcatgaatggttgtaaaatggcaggtgcattttgcagctgatttgagattgaagcagagggttctagttttacaaggggacagcttgtgtgatgggatctgtttttggtaaggaaaaaaaagagtgatttgaataatggtttggtcgcacaagttcctaatctttt

SEQ ID NO: 108351 - DNA, 2167 bp, Zea Mays
atggacgaggaagaggtccatatcgcagttgggaagaactcaagaaaggagaaagccaacatactgtgggccgccgccaatttccccagggccaccatcgttcttgtccatgttcactggccctccaagtggatgcctttcatgggtggcaaagtgctatacaagttcgctgatgagaaggagaaggagatgcatagaggcagagaaatgaaagtaatggtcaatatgttatcacagtacaaaaaaatgtgcgggacgagaaaggttagtgcacattaccttacacatgatgacactgttgccggtgttgtgaacctcataaagaagctcaaaattaaaagaatagtcatcggttcaaggaacatgtcaaggcaagttgtggttcgccagtgctgtcaggtttggctggtactcaacggcaaacacatctccaccagcaatgatcacctggaatatagtgaaaatataggatatggaggggggagctcaggtattttggcatctatacatgagctaggtgaggaatctgacggctacgtgacaccacgaagtgatcttgtagacgaaaccatggatgaggagtcggctgaaatgaatgattctgatcaattagtaacggaagatgaaacattgactgaacaaggcacagaggaatcagtcacttctgaagacatggaaaacttttttcaagagaatgctgatcagtctgatgagatacagaatttcagaaacatagctgacaaggctgaaaaaatcatggaggaaatagaccggctgcaaaagaaactgaaacagctgcaaggagaggagcgtaatcacgacgagaggagcttgtcacctagacaaatggctgcgtcactgaagcgaaagagtctatcagagcctagatatccagagctgcagattccagagaacattgaacaattctcgatgtcgcaaatcgaaaaggcgaccgacaacttccactcaagaaatttcatcggaggaggaggttatggcccagtctacaagggaaaagtgggcagcacatcagtggctattaagctgctgaagcctcgtggtagacaaggtttctcagagtatcagcaagaggtggtggtgctgagcaaattggagcacccacacatcgtgaggctgattggcgtgtgcccggagtcgtgcggcctggtgtacgagcacctccccaacggcacgctcaaggacaggctctccaagggcctcctgtggaaggaccgcgtcaggatcctcggcgagctgcgctctgcgctggcgtacctccactccaggcggccccacgccatcatccacgccgacgtgaagctgaccaacatcctcctggacgccggcaacgcgagccggctgggagacttcgggacggcgcgggcggtgcacgtgaaaccgctggaggaggagaccatcggccgccgcacgaacccgatgggcacggcggggtacatggaccccgtgttcttcatgaccggcgagctcacaacggagtcggacgtgtacgcgttcggcatggtgattctgcagatgctcacggggctgctggatctcaacgtcgcggagcaggcgcgcgaggcggtgaagatggacgccgtgcacagcgtgctggacgcgtccgccgggccctggccggaggtgcaggccgagaagctcatgaagctggcgctcaggtgctgcagcctggagaggaggcggcgaccggcgatcacgtccgatgccgagtggagatcgctcgacatcctacgggctatggtaaacccagctagtaaatcctggaaatggaattcccatgccagctgaatttactgtatgtatgcacctcccagtacatgccttgctgtagcctgcagatgccatgaaacacagtaggggtagctagtgattcttcttgtgattagatatagataagcaaaaatctaagaattgatgtgcattactagaatataagtattcaggggtagtacagtagagaaacaagagatggagcagacagaaatcatgctacatatgaagcagcaattggttagccaagatgatgatggtgcacggttattttttgggaaatctgcacctactcatgttcagtgtcccttgcaggatgcagaaatattatgtgtatattggtagacggtaatataaatctgactatgcacgttttgtt

SEQ ID NO: 108352 - DNA, 396 bp, Zea Mays
atggatcctctgaagccagtactccgtcgtgccttgcgttccagatttctagccgtctgtctcatcgagtcatcgtcgacccctctacctatctcacgtacagcacagcctcttctgcaggtcaggcgtcgtgccgatgccgaaggtccaatcgccattcaccggcgcgccaggatccaaggctgtcatgccatatggacatatacattggatgtttcgtggggcagctcgaaagcaacccgctttgaagctgtggaaacaaaacacggctgcctagcttgccggccagggagatgcgataaactcccagctgatattctaatgggaaaaacctcatcggcaagcatcgaaagtcagttgccaggcatcctctaccgactcccaaagctgaattag

SEQ ID NO: 108353 - DNA, 1783 bp, Zea Mays
ctccttgcctcgtccgcttcccctttcctctctttcccccacccaatcattgatctcggcttgagcttcaactacggattgattgattgattgggttcctggcgttagtttggtagccgtgcccttcctcttgcttgttggttgccttcctcatcttctttcatgtgttggattggagtctcagctattcgtttctccctcttttcttgcagcgcgattccggcagaggagtagacggttccagcaaatttggtccaacaattctttgtttggccgcttgggctccggtctctcgattcttcgtagcttggtgggagggcgccggatccagcggccatcatggttgtcgacacggtcagcgcgagcacctccataatagccccccacctgttcgaccacaggtccaggggcgccggcgcttcccaccaccacctccgccggacgttccatgtcgtcgcctgccgacccctgcccaccgccttcgccggccgccgcctcgtggcccgggtcaccaggcagccgtcgtcgcgcctcgccgattggccggtcagggcgctggctatgggggtcacgaaggaggtcagggccagccctcgcagggagtaccgggggatccccggggatggtggagacatgggggacgttggggtcaccagccccacgccgtcatggcctccgcggaacagggcagatgaccccaagctgcataacccgctgctccgcctcgagcgcatgggctgcgggtggctcggcgtcatcttcgagtgggagggggtcatcgttgaggatgatgccgaattggaaaggcaggcgtggttgaccctggcacaggaggagggcaagtcgccgcctcccgcttttctgttgcggagagtcgaagggatgaagaacgagcaggcgatttctgaggttctctgctggtctcgggatccctccgagcttaggagattggccctgaggaaggacgagatccacagcagccttcgaggtggctcctaccaccagatgaggaacggttccagggagttcatgagcacgctcgccaattacaagatccctatcgctgtggtgaccacacgcccacggaaggttattgaggaagccattgaagctgtaggcgtgcgcagcttcttcgatgcggttgtgacagcagaagacgtgtaccggggcaagcctgacccagaaatgttcctgtacgctgctcagcttctcagtttcatcccggagaggtgcatcgtgtttgggaactccaattcggcggtggaagctgcgcatgacgcacgtatgaagtgtgtcgcggtcgcaagcaagcacaagatctacgagcttagcgctgcagaccttgtggtgaagcaactagacgagctatccgtcgttgacttgaagaaccttgctgatattgagtccccggagtttggcatggaacctgaaccagagatggaggaggaggaagtgcccccaccatcgacgtctgtgggtatagatgatctattctggtaagagaccaaattgtacatttgattgattcctctccagaacacagatgtattgttgtcaactgtcatagtgatcagaaagaagggcttatcatccttctgtaatcagtagaatgtgatatgtaaaaaatgttgtctagagctcacacactgtatatacatactcagaaagaaagctgggaactgaatatatgaatcagaacatttgaatctgcagttcctgaaacaatgtaacaccacaaggtttctgtcgccgaatcaaaacgacaatatatataataaaatta

SEQ ID NO: 108354 - DNA, 1683 bp, Zea Mays
ctccttgcctcgtccgcttcccctttcctctctttcccccacccaatcattgatctcggcttgagcttcaactacggattgattgattgattgggttcctggcgttagtttgcgcgattccggcagaggagtagacggttccagcaaatttggtccaacaattctttgtttggccgcttgggctccggtctctcgattcttcgtagcttggtgggagggcgccggatccagcggccatcatggttgtcgacacggtcagcgcgagcacctccataatagccccccacctgttcgaccacaggtccaggggcgccggcgcttcccaccaccacctccgccggacgttccatgtcgtcgcctgccgacccctgcccaccgccttcgccggccgccgcctcgtggcccgggtcaccaggcagccgtcgtcgcgcctcgccgattggccggtcagggcgctggctatgggggtcacgaaggaggtcagggccagccctcgcagggagtaccgggggatccccggggatggtggagacatgggggacgttggggtcaccagccccacgccgtcatggcctccgcggaacagggcagatgaccccaagctgcataacccgctgctccgcctcgagcgcatgggctgcgggtggctcggcgtcatcttcgagtgggagggggtcatcgttgaggatgatgccgaattggaaaggcaggcgtggttgaccctggcacaggaggagggcaagtcgccgcctcccgcttttctgttgcggagagtcgaagggatgaagaacgagcaggcgatttctgaggttctctgctggtctcgggatccctccgagcttaggagattggccctgaggaaggacgagatccacagcagccttcgaggtggctcctaccaccagatgaggaacggttccagggagttcatgagcacgctcgccaattacaagatccctatcgctgtggtgaccacacgcccacggaaggttattgaggaagccattgaagctgtaggcgtgcgcagcttcttcgatgcggttgtgacagcagaagacgtgtaccggggcaagcctgacccagaaatgttcctgtacgctgctcagcttctcagtttcatcccggagaggtgcatcgtgtttgggaactccaattcggcggtggaagctgcgcatgacgcacgtatgaagtgtgtcgcggtcgcaagcaagcacaagatctacgagcttagcgctgcagaccttgtggtgaagcaactagacgagctatccgtcgttgacttgaagaaccttgctgatattgagtccccggagtttggcatggaacctgaaccagagatggaggaggaggaagtgcccccaccatcgacgtctgtgggtatagatgatctattctggtaagagaccaaattgtacatttgattgattcctctccagaacacagatgtattgttgtcaactgtcatagtgatcagaaagaagggcttatcatccttctgtaatcagtagaatgtgatatgtaaaaaatgttgtctagagctcacacactgtatatacatactcagaaagaaagctgggaactgaatatatgaatcagaacatttgaatctgcagttcctgaaacaatgtaacaccacaaggtttctgtcgccgaatcaaaacgacaatatatataataaaatta

SEQ ID NO: 108355 - DNA, 1662 bp, Zea Mays
aaataaggtaggcagtttcccgaagcaacctcccgttcctccgcgacccagcgacgcctccgcggccgtccgatcgccctatccgccgccgcgcgattccggcagaggagtagacggttccagcaaatttggtccaacaattctttgtttggccgcttgggctccggtctctcgattcttcgtagcttggtgggagggcgccggatccagcggccatcatggttgtcgacacggtcagcgcgagcacctccataatagccccccacctgttcgaccacaggtccaggggcgccggcgcttcccaccaccacctccgccggacgttccatgtcgtcgcctgccgacccctgcccaccgccttcgccggccgccgcctcgtggcccgggtcaccaggcagccgtcgtcgcgcctcgccgattggccggtcagggcgctggctatgggggtcacgaaggaggtcagggccagccctcgcagggagtaccgggggatccccggggatggtggagacatgggggacgttggggtcaccagccccacgccgtcatggcctccgcggaacagggcagatgaccccaagctgcataacccgctgctccgcctcgagcgcatgggctgcgggtggctcggcgtcatcttcgagtgggagggggtcatcgttgaggatgatgccgaattggaaaggcaggcgtggttgaccctggcacaggaggagggcaagtcgccgcctcccgcttttctgttgcggagagtcgaagggatgaagaacgagcaggcgatttctgaggttctctgctggtctcgggatccctccgagcttaggagattggccctgaggaaggacgagatccacagcagccttcgaggtggctcctaccaccagatgaggaacggttccagggagttcatgagcacgctcgccaattacaagatccctatcgctgtggtgaccacacgcccacggaaggttattgaggaagccattgaagctgtaggcgtgcgcagcttcttcgatgcggttgtgacagcagaagacgtgtaccggggcaagcctgacccagaaatgttcctgtacgctgctcagcttctcagtttcatcccggagaggtgcatcgtgtttgggaactccaattcggcggtggaagctgcgcatgacgcacgtatgaagtgtgtcgcggtcgcaagcaagcacaagatctacgagcttagcgctgcagaccttgtggtgaagcaactagacgagctatccgtcgttgacttgaagaaccttgctgatattgagtccccggagtttggcatggaacctgaaccagagatggaggaggaggaagtgcccccaccatcgacgtctgtgggtatagatgatctattctggtaagagaccaaattgtacatttgattgattcctctccagaacacagatgtattgttgtcaactgtcatagtgatcagaaagaagggcttatcatccttctgtaatcagtagaatgtgatatgtaaaaaatgttgtctagagctcacacactgtatatacatactcagaaagaaagctgggaactgaatatatgaatcagaacatttgaatctgcagttcctgaaacaatgtaacaccacaaggtttctgtcgccgaatcaaaacgacaatatatataataaaatta

SEQ ID NO: 108356 - DNA, 1751 bp, Zea Mays
ctccttgcctcgtccgcttcccctttcctctctttcccccacccaatcattgatctcggcttgagcttcaactacggattgattgattgattgggttcctggcgttagtttgcgcgattccggcagaggagtagacggttccagcaaatttggtccaacaattctttgtttggccgcttgggctccggtctctcgattcttcgtagcttggtgggagggcgccggatccagcggccatcatggttgtcgacacggtcagcgcgagcacctccataatagccccccacctgttcgaccacaggtccaggggcgccggcgcttcccaccaccacctccgccggacgttccatgtcgtcgcctgccgacccctgcccaccgccttcgccggccgccgcctcgtggcccgggtcaccaggcagccgtcgtcgcgcctcgccgattggccggtcagggcgctggctatgggggtcacgaaggaggtcagggccagccctcgcagggagtaccgggggatccccggggatggtggagacatgggggacgttggggtcaccagccccacgccgtcatggcctccgcggaacagggcagatgaccccaagctgcataacccgctgctccgcctcgagcgcatgggctgcgggtggctcggcgtcatcttcgagtgggagggggtcatcgttgaggatgatgccgaattggaaaggcaggcgtggttgaccctggcacaggaggagggcaagtcgccgcctcccgcttttctgttgcggagagtcgaagggatgaagaacgagcaggcgatttctgaggttctctgctggtctcgggatccctccgagcttaggagattggccctgaggaaggacgagatccacagcagccttcgaggtggctcctaccaccagatgaggaacggttccagggagttcatgagcacgctcgccaattacaagatccctatcgctgtggtgaccacacgcccacggaaggttattgaggaagccattgaagctgtaggcgtgcgcagcttcttcgatgcggttgtgacagcagaagacgtgtaccggggcaagcctgacccagaaatgttcctgtacgctgctcagcttctcagtttcatcccggagaggtgcatcgtgtttgggaactccaattcggcggtggaagctgcgcatgacgcacgtatgaagtgtgtcgcggtcgcaagcaagcacaagatctacgagcttagcgctgcagaccttgtggtgaagcaactagacgagctatccgtcgttgacttgaagaaccttgctgatattgagtccccggagtttggcatggaacctgaaccagagatggaggaggaggaagtgcccccaccatcgacgtctgtgggtatagatgatctattctggtaagagaccaaattgtacatttgattgattcctctccagaacacagatgtattgttgtcaactgtcatagtgatcagaaagaagggcttatcatccttctgtaatcagtagaatgtgatatgtaaaaaatgttgtctagagctcacacactgtatatacatactcagaaagaaagctgggaactgaatatatgaatcagaacatttgaatctgcagttcctgaaacaatgtaacaccacaaggtttctgtcgccgaatcagtattccggatgctgattatattgttctctgcagtcttcttgccaaatattgtgattgaaattgcacttggtggaaataattagagtttgaatc

SEQ ID NO: 108357 - DNA, 969 bp, Zea Mays
aaagccaggaacagaactcaggcgttggtgattggcatctccctcccctaagccatggctaccgggcgacccatacgactcatgttggatgcctccctcctcctcgacccctcctccaccagggaggcggcggcggtggctctgtggcccggggtagaggagctgctgcggcggttgcactactccaacctgactgtggcaatctgctatgcagagggcatgccaactaatgagtcaggctttcttgaaaaggtcgcaagctcacacttgtttggctctatagcacttcttgtgaaaagtgggaatctttctctaactgaattaatgttagaatggagccgaacaagtttttgtttttatgcgacttcaagagttgacaaaggtttaatttctgagctccagaatcagaactggagagttctttctgtagctaatgaatgtagcatagaggttcctggtgttttaaatgttcaaaggctttagcagttgcttctcaccttggctactctaataaaaagggaactatgtgactcatctattctggtgattggatatataacgaaaaaatcccatgaggaagacttcgcaagggcaagttactttagagtttagagtgtaaatgaatattaacagctacttatgtattgggtaacaacatgaacatcatgctttttcatcttgcttacttacagagatgtggttctgtcacttctgtgactgttgccgtgtacggagacgaggacaagccaacgcttataatgtttacagagatgtggttctgtgaccgttgccgtgtactcaggctttatttcaacaggatttaaatatgagatgtagagtgattgatgtacatcacttcactaatcatgaaatctgtagaaggcgaaactactagccatatatgatatgcataatccatgtggtaaacattatcaatatcaaacaaattatttctaatggatttcgcgc

SEQ ID NO: 108358 - DNA, 1157 bp, Zea Mays
ccaattaaaaccctagacttcctggcgtgctataaaagcaggtggccgccgcctttgccttgctcaccctgcccttctgtgtacgaagccgacgagcagccgacgctaaagcttggtccggtgagcttcagagaaggggcgggtacgtcaagatgcagatcttcgtgaagaccctgacgggaaagaccatcaccctcgaggtcgagagcagcgatacaatcgacaatgtcaaggccaagatccaggacaaggaaggtatcccgccggaccagcagcgactaatcttcgcggggaagcagctcgaagacggccgcaccttggccgactacaacatccagaaggagtccacccttcaccttgttcttcgccttcgcggtggcatcattgaaccttccctccaggcgctcgcccgcaagtacaaccaggacaagatgatctgccgcaagtgctatgcacggctgcaccccagggctgttaactgccgcaagaagaagtgtggccacagcaaccagctgagggcaaagaagaagatcaagaactgaagcttgccaaatcggttccttgcatggtttgcgtcaacaagacgaagtttcaaagcttttgtagctgcataggctgctgcaacgtttttcagtcgtaactcgtgtgttcctgttcagggtcttcagcatgacataaatcgtttcagaagtctagtaatattattactatatggtgtcatgtcgtattgtggctcttcctttttgttgctgttgtgctgcagtagagggaaacgttccataattttctccaccgccaatttaatcagctagaaaacagagggaaacgcatgacataaatcgtttcagctggaaatttcgaagcgaaacatggtttaatactatggtcatgactcatgagtgtctaaataaagcaccacaaaactttccaacagctactacaaattttccttgaagtcaagaccttccaagagcatacatcattcaaagtgtttagggcactaaaaataaactgtgttaaatcatgtatttttgaggtgaattacattattagaaaagagaagtgtgagaatgatgtagaaaagtgtttagggcactaaaaataaactgtgttaaatcatgtatttttgaggtgaattacattattagaaaagaaaa

SEQ ID NO: 108359 - DNA, 934 bp, Zea Mays
gaagcattcaagcatcgacagtcgacgctgcagcaggaagccaaagaggagagaatccatcgagtcgaccaccgagcacggttagggcggcggggctcgccgtggccacagctcaggaatccaatcccccactcctcaccggcgcccgcgctctggctacttcctacgccaccaccgcccgctccggcctcggctcctcgagcaagctgccatggctgccgccgcgctgagggagcaactcaacgctctcctctcctccatgttcgcctcgggtctggtggacgagcagttccagcagctgcagatgctgcaggaagacgggggcacgccgggcttcgtcgccgaggtcgtcaccctcttctgcgacgacgccgacaggatcatctccgagctcgccgctctgcttgaccagcccatcgtggactttgataaggtggacgcctacgtgcatcagctcaaagggagcagcgccagtgttggcgctcagaaagtgaagtttacttgcatgcagttccgtcagttatgtcaggataagaacagagacgggtgcatcatggcattggctgttgtgagaaatgagttctatgatctgcgcaataaattccagactatgcttcagcttgagcagcaaatccaggctcaacaataaatcgaagcagaaagcgtagctgcatgtggcctcacatgataagtgtatctttaaagatgtagaccatgttctctgtgttcctacaattgtgacaaaatcatcgtcgttgaggtcggctcacatgcatgtaactgttagctataacaattattgtctaacgttgtccttgttactccacccgtttgtgttggattgccatcgaccatcatatgaaaactttttttttccaatcccctccaatccatgtgggatgagaataaccggtttcctggtaaacctgcaagt

SEQ ID NO: 108360 - DNA, 1774 bp, Zea Mays
tgccgaacacgaaatcagccaacggctcctttttcctctccatggccagtgccacagtagccatacacgtgtacaggcgcatcgaaccgagggctccaaaaaggaaggccccgaaaaaaaaaagaaaaaggaaaacggcgagagtggggaaaaaagggaagatagggaaatcagggatggaagcattcaagcatcgacagtcgacgctgcagcaggaagccaaagaggagagaatccatcgagtcgaccaccgagcacggttagggcggcggggctcgccgtggccacagctcaggaatccaatcccccactcctcaccggcgcccgcggttttataaatagattccctcgtcactgtcgcggtcgcggcttgatcggattcaactcacctaccccaccccctcgattccttcccagctctggctacttcctacgccaccaccgcccgctccggcctcggctcctcgagcaagctgccatggctgccgccgcgctgagggagcaactcaacgctctcctctcctccatgttcgcctcgggtctggtggacgagcagttccagcagctgcagatgctgcaggaagacgggggcacgccgggcttcgtcgccgaggtcgtcaccctcttctgcgacgacgccgacaggatcatctccgagctcgccgctctgcttgaccagcccatcgtggactttgataaggtggacgcctacgtgcatcagctcaaagggagcagcgccaggtaacatttcgcactggaattcttaatattcttgcggcatcttgccacttcccatgttacaaaactgtgaggtattgatgaatgggtagtttcaccaactggaacctgatgacggtaggacacctcttaaacgttactttgcttgtcatggtaaagcatctcagtttttcctgccttgggaattatgtgccctgtgcaacgttgaccttttggtgtagattggatctcaggttgctgtatcgtatctcaaacctcctaatataaaatccatattctgctgatcaatcccagagcctcatcttcagtggttgtgcgcttaccagttggactggtagttatcattattgtggcatgctaaaaaaatacttatcacgcttactcagaacttgtacggcagaccatttttacttccccatcaagcaagtcaagttgtcaacttcctgcagagttgagccttgaagttattaaaacttattatttcgttgttatgtggtggcttccattgctagatatgtgctttccagaatccttgtaactgaaccagtttgctggtatctgtctgatctgttccagtgttggcgctcagaaagtgaagtttacttgcatgcagttccgtcagttatgtcaggataagaacagagacgggtgcatcatggcattggctgttgtgagaaatgagttctatgatctgcgcaataaattccagactatgcttcagcttgagcagcaaatccaggctcaacaataaatcgaagcagaaagcgtagctgcatgtggcctcacatgataagtgtatctttaaagatgtagaccatgttctctgtgttcctacaattgtgacaaaatcatcgtcgttgaggtcggctcacatgcatgtaactgttagctataacaattattgtctaacgttgtccttgttactccacccgtttgtgttggattgccatcgaccatcatatgaaaactttttttttccaatcccctccaatccatgtgggatgagaataaccggtttcctggtaaacctgcaagt

SEQ ID NO: 108361 - DNA, 1201 bp, Zea Mays
tgccgaacacgaaatcagccaacggctcctttttcctctccatggccagtgccacagtagccatacacgtgtacaggcgcatcgaaccgagggctccaaaaaggaaggccccgaaaaaaaaaagaaaaaggaaaacggcgagagtggggaaaaaagggaagatagggaaatcagggatggaagcattcaagcatcgacagtcgacgctgcagcaggaagccaaagaggagagaatccatcgagtcgaccaccgagcacggttagggcggcggggctcgccgtggccacagctcaggaatccaatcccccactcctcaccggcgcccgcggttttataaatagattccctcgtcactgtcgcggtcgcggcttgatcggattcaactcacctaccccaccccctcgattccttcccagctctggctacttcctacgccaccaccgcccgctccggcctcggctcctcgagcaagctgccatggctgccgccgcgctgagggagcaactcaacgctctcctctcctccatgttcgcctcgggtctggtggacgagcagttccagcagctgcagatgctgcaggaagacgggggcacgccgggcttcgtcgccgaggtcgtcaccctcttctgcgacgacgccgacaggatcatctccgagctcgccgctctgcttgaccagcccatcgtggactttgataaggtggacgcctacgtgcatcagctcaaagggagcagcgccagtgttggcgctcagaaagtgaagtttacttgcatgcagttccgtcagttatgtcaggataagaacagagacgggtgcatcatggcattggctgttgtgagaaatgagttctatgatctgcgcaataaattccagactatgcttcagcttgagcagcaaatccaggctcaacaataaatcgaagcagaaagcgtagctgcatgtggcctcacatgataagtgtatctttaaagatgtagaccatgttctctgtgttcctacaattgtgacaaaatcatcgtcgttgaggtcggctcacatgcatgtaactgttagctataacaattattgtctaacgttgtccttgttactccacccgtttgtgttggattgccatcgaccatcatatgaaaactttttttttccaatcccctccaatccatgtgggatgagaataaccggtttcctggtaaacctgcaagt

SEQ ID NO: 108362 - DNA, 327 bp, Zea Mays
atggctagtgtcgtgcctgtgccgatactgccttcttgctctgtgattatacccgtgagggaccgatctggtgctccagctttgccgctcgtgagggaccgatctggtgctccggctttgctgcccgtgagggaccgatctggtgcttcggctttgccgcccgtgagggatcgatctggtgctccggctttgaacttgaagactcattctctaagctatatcttgatgatgaacaagttcaagctgacactccagggtcctctcatgcatctcaatctcagacacctactgacccacaaccacatgtggatgactgatcttatttag

SEQ ID NO: 108363 - DNA, 1562 bp, Zea Mays
aagcagcccaaagcctcaaacccaatgcgaggcccttgggccagcagcgccttatcacttcgcctccgtctccgtggcgcgcgcgctcgcacgaacacgagtcccatgtcgtccaccgcagcgcgcgtcgtccacccggctgccgcggcgccgccgcctccccgcccacgccgcctggcgcccgcgaggtgcgcggctggatccgcgacggacacggccaccgcgggtccgacaagggtgacgaccgtcagcaaccgcggggactccttggcgatatgccgggtgctcaacggcatgtggcagaccagcggagggtggggccgcatagaccgcgacgccgcggttgacgccatgctcgcgcacgccgacgccggactctccaccttcgatatggctgaccactatgggccagcagaggatttgtatggcatgttcatcaacagaattaggagggagcgcccacctgagtttcttgaagaagtcaaggggcttacaaagtgggtaccacccccggttaagatgacaagaagttatgttgaggataatatcaacagatccaggaagaggatggatgttactgcattggacatgttgcagttccactggtgggagtactcaaatccaggctacttggatgcgctaaagcacatcacagacctgaaggaggaaggcaagataaagactgtggccctaacaaacttcgatacagacagactgcaaataattctcgaaaatggaatcccagttgtgagcaaccaggttcaacattctatcgttgatatgcgccctcagcagagaatggcagagctttgccagctaactggagttagacttataacgtatggcacagtgatgggtggtcttttgtctgaaaagtttctcgacaccaatgtatcaataccttttgctggtcctcctctaaataccccatccttgcagaaatataagaggatggttgatgcttggggtggctggagcctgttccagactttgcttcaaaccttaaagaaggtgtcactgaaacacggtgttactatttcaacggttgctgtgaaatacatactgaaccagacgtctgttgcaggttccatggtcggtgtgagattgggactctctgaacacatcaaagacaccaacgccatattctcacttgaattggatgaagaggacatgaacatcatcactgaagtgtcgaagaggggcagaaatttgatcgatattattggggattgtggtgacgagtaccgagcttagttggccatgctgctgctgggctactacagacctatatactcgtgcccaattttgcacagctctaaatttttgcctatttgggtctagcggctcagcgcactgttgaggcaaccatatacctgaatgcctattattcaggcgctagcatgtaccctccagtcctcaacagccagttataaaactgtaaatacacagcgatgcagatcgctaatgtggtaacttgttcagtcctttttagcgattactgtcccaaacaaaatgcatttctgactatatctggacaagtgcttatctagatagtacatagc

SEQ ID NO: 108364 - DNA, 1620 bp, Zea Mays
aaagcctcaaacccaatgcgaggcccttgggccagcagcgccttatcacttcgcctccgtctccgtggcgcgcgcgctcgcacgaacacgagtcccatgtcgtccaccgcagcgcgcgtcgtccacccggctgccgcggcgccgccgcctccccgcccacgccgcctggcgcccgcgaggtgcgcggctggatccgcgacggacacggccaccgcgggtccgacaagggtgacgaccgtcagcaaccgcggggactccttggcgatatgccgggtgctcaacggcatgtggcagaccagcggagggtggggccgcatagaccgcgacgccgcggttgacgccatgctcgcgcacgccgacgccggactctccaccttcgatatggctgaccactatgggccagcagaggatttgtatggcatgttcatcaacagaattaggagggagcgcccacctgagtttcttgaagaagtcaaggggcttacaaagtgggtaccacccccggttaagatgacaagaagttatgttgaggataatatcaacagatccaggaagaggatggatgttactgcattggacatgttgcagttccactggtgggagtactcaaatccaggctacttggatgcgctaaagcacatcacagacctgaaggaggaaggcaagataaagactgtggccctaacaaacttcgatacagacagactgcaaataattctcgaaaatggaatcccagttgtgagcaaccaggttcaacattctatcgttgatatgcgccctcagcagagaatggcagagctttgccagctaactggagttagacttataacgtctgctctgtcccttcatatccctcatcctctgcctacgtagaacttacttttaaaagcttaaacacactatcgcttgatgcaggtatggcacagtgatgggtggtcttttgtctgaaaagtttctcgacaccaatgtatcaataccttttgctggtcctcctctaaataccccatccttgcagaaatataagaggatggttgatgcttggggtggctggagcctgttccagactttgcttcaaaccttaaagaaggtgtcactgaaacacggtgttactatttcaacggttgctgtgaaatacatactgaaccagacgtctgttgcaggttccatggtcggtgtgagattgggactctctgaacacatcaaagacaccaacgccatattctcacttgaattggatgaagaggacatgaacatcatcactgaagtgtcgaagaggggcagaaatttgatcgatattattggggattgtggtgacgagtaccgagcttagttggccatgctgctgctgggctactacagacctatatactcgtgcccaattttgcacagctctaaatttttgcctatttgggtctagcggctcagcgcactgttgaggcaaccatatacctgaatgcctattattcaggcgctagcatgtaccctccagtcctcaacagccagttataaaactgtaaatacacagcgatgcagatcgctaatgtggtaacttgttcagtcctttttagcgattactgtcccaaacaaaatgcatttctgactatatctggacaagtgctt

SEQ ID NO: 108365 - DNA, 1453 bp, Zea Mays
aagcagcccaaagcctcaaacccaatgcgaggcccttgggccagcagcgccttatcacttcgcctccgtctccgtggcgcgcgcgctcgcacgaacacgagtcccatgtcgtccaccgcagcgcgcgtcgtccacccggctgccgcggcgccgccgcctccccgcccacgccgcctggcgcccgcgaggtgcgcggctggatccgcgacggacacggccaccgcgggtccgacaagggtgacgaccgtcagcaaccgcggggactccttggcgatatgccgggtgctcaacggcatgtggcagaccagcggagggtggggccgcatagaccgcgacgccgcggttgacgccatgctcgcgcacgccgacgccggactctccaccttcgatatggctgaccactatgggccagcagaggatttgtatggcatgttcatcaacagaattaggagggagcgcccacctgagtttcttgaagaagtcaaggggcttacaaagtgggtaccacccccggttaagatgacaagaagttatgttgaggataatatcaacagatccaggaagaggatggatgttactgcattggacatgttgcagttccactggtgggagtactcaaatccaggctacttggatgcgctaaagcacatcacagacctgaaggaggaaggcaagataaagactgtggccctaacaaacttcgatacagacagactgcaaataattctcgaaaatggaatcccagttgtgagcaaccaggttcaacattctatcgttgatatgcgccctcagcagagaatggcagagctttgccagctaactggagttagacttataacgtatggcacagtgatgggtggtcttttgtctgaaaagtttctcgacaccaatgtatcaataccttttgctggtcctcctctaaataccccatccttgcagaaatataagaggatggttgatgcttggggtggctggagcctgttccagactttgcttcaaaccttaaagaaggttccatggtcggtgtgagattgggactctctgaacacatcaaagacaccaacgccatattctcacttgaattggatgaagaggacatgaacatcatcactgaagtgtcgaagaggggcagaaatttgatcgatattattggggattgtggtgacgagtaccgagcttagttggccatgctgctgctgggctactacagacctatatactcgtgcccaattttgcacagctctaaatttttgcctatttgggtctagcggctcagcgcactgttgaggcaaccatatacctgaatgcctattattcaggcgctagcatgtaccctccagtcctcaacagccagttataaaactgtaaatacacagcgatgcagatcgctaatgtggtaacttgttcagtcctttttagcgattactgtcccaaacaaaatgcatttctgact

SEQ ID NO: 108366 - DNA, 987 bp, Zea Mays
tttgtgagcaacagcattcaccttagtttttctccattttggtttcactccgtgtccctgtttcttcttttataataatactcaactaccaagctttttgttctgatttataccttaatatctgacatgcccaaaatttccatgcagactgacgcttcctttgaaacaagcgttcctggagtatatgccattggtgatgtggctaccttccctttgaagatgtacaatgagttgaggagagtggaacatgttgaccattctagaaagtctgcagagcaggctgtaaaggcgatcaagggcaaagagtccggtgaaccagttccggagtatgactacctgccatacttctactcccgatcattcgacctggcgtggcaattctacggcgacaacgtgggcgaaaccatcctgtttggcgacagtgaccccacctccagcaagcccaagttcggctcgtactggattaaggacggcaaggtcttgggcgccttcctggagggcgggtcaccggacgagaacaaggtcattgccaaggtggcgaaaacccagccgccggtcgctaacctcgaggagctcaagaaggatggcctccagttcgccagcaagatctgagacgctcccgttccatgtaaaattccgtgtcatcgtgaaggttcttctggagctctggtcatgattgagaaatgttctgctacagatgttatactacatacgtgactacactacatgatatattcggttttctgattgtgatatctgtacgtggctacactcacatgtgagatttgaataagtcctgcagcctcagggctcagctagcacagcacagaccacagataccctttttttttattattattgttctcgcccggtcgctcgcgtcctggcaggcactgaaatggcggcggccaccagctgcctcgcttcatcgcctcgcctataggctacgctggccgcgagctccaggcggaggagttggcatcccag

SEQ ID NO: 108367 - DNA, 1995 bp, Zea Mays
ccgcctacctcgaggaaaccagccaatggacagccaccacattttccgtgttcgcttcctagtttctattgatccaccgacatctgggcccggagcttctcgggcccccgtggcagccgttcgatcaagcacagagctggtgcttactagtatcgccactagagacgcctccacccgctcccactcgtcttctccctccctagtcgctccccaaatcggatctccaggccggcagaagttgagcggactgactggtcactgtagttcgatcgaatccgagtagggctgatacagttcgattcggcgggaggcatggcgtccgaaaagcacttcaagtacgtcatcctcggcggcggcgtcgcggcggggtacgcggcgcgggagttcgccaagcagggagttaagcctggggagcttgcaatcatctccaaggaggctgtggctccttacgagcgtcctgccctaagcaaaggttacctctttcctacgaatgctgcaagactcccaggattttatgtatgtgtgggaagtggtggagagaagctattgcctgagtggtactcagagaaaggcattgagctgatccttagtacagaaattgtcaaagctgatctttccaccaagactctgactagtgcagctggagcaaactttacatatgagatcttgctcattgctactggctcctcggtcataaagctcaccgattttggcacacaaggagctgattctaacaacattctatatctaagggaaattgatgatgctgacaagctggttgcagctatccaggcaaagaagggtggcaaggcagtggttgttggaggaggttatatcggcctcgaactgagtgcagccctgaagatcaatgactttgatgtcactatggtgtttcctgaaccttggtgcatgcctcgcctcttcactgccgatattgctgctttctatgaggcttactatactaacaaaggtgtaaagatcttgaagggcacgctagctgttggttttgatgctgatgccaatggtgatgtcactgcagttaagctaaaggatggcacagtacttgaagccgatattgttgttgtcggtgttggaggcagaccattgactactctcttcaagggtcaagttgctgaggagaagggtggaatcaagactgacgcttcctttgaaacaagcgttcctggagtatatgccattggtgatgtggctaccttccctttgaagatgtacaatgagttgaggagagtggaacatgttgaccattctagaaagtctgcagagcaggctgtaaaggcgatcaagggcaaagagtccggtgaaccagttccggagtatgactacctgccatacttctactcccgatcattcgacctggcgtggcaattctacggcgacaacgtgggcgaaaccatcctgtttggcgacagtgaccccacctccagcaagcccaagttcggctcgtactggattaaggacggcaaggtcttgggcgccttcctggagggcgggtcaccggacgagaacaaggtcattgccaaggtggcgaaaacccagccgccggtcgctaacctcgaggagctcaagaaggatggcctccagttcgccagcaagatctgagacgctcccgttccatgtaaaattccgtgtcatcgtgaaggttcttctggagctctggtcatgattgagaaatgttctgctacagatgttatactacatacgtgactacactacatgatatattcggttttctgattgtgatatctgtacgtggctacactcacatgtgagatttgaataagtcctgcagcctcagggctcagctagcacagcacagaccacagataccctttttttttattattattgttctcgcccggtcgctcgcgtcctggcaggcactgaaatggcggcggccaccagctgcctcgcttcatcgcctcgcctataggctacgctggccgcgagctccaggcggaggagttggcatcccag

SEQ ID NO: 108368 - DNA, 913 bp, Zea Mays
cgccaattgccaccaaaaactaaccgcctgctctttcaggggagcggacccggacgacgagccacgccgacgctagggtttggtttcgccggcctgcccggccatggacctgcccccgggcgccggccgtcgcaccacctactccctcctcccacagttccccgacgacgccgccgcacctgctcccgcccccgccaacatcctgcagcgccagtccagcggcagcagctacggcgccggcagctctatctccacctccagcgactacccattccacttacaaccccccgcctcggccgcgggggtcgcgccgcccggatcggcagcggcgcctcccggggcggctggctcgccctgcaagagctgggcgcagcaggccgaggagacctaccagctgcagctcgcgctcgcgctccgcctctgcgccgatgctgcgtgcgctgccgacccgggcttcctcgacccaggcgattcaggaagcgggaggggcagcggtaacgggagagccttcccgctcgcgcagcccgcgccctctgcggagtcgctctcgcatcgcttctgggtaaatggttcgctatcatacaacagcacaataccagatggattttacttgattcatgggatggacccctttgtatggtcactatgcactgatgtacaggaagagaaccacataccctccatggaatcactcaagtctgtccgtcctgatgatccttccattcaagccattcttatcgatcgaagaactgattttgaattaggtatgttggagagttatgcttccagcattctttccagttctgctgatgccaaagatgtggtaatccaactggccaaactcatatcttcaagaatggggggtacaacttccaatgaagagaacttgctaacgaataaaagcatttattca

SEQ ID NO: 108369 - DNA, 279 bp, Zea Mays
gtttagcgtatatgatagatgtctaatgtttgtgggtacgcgatgacccatacccacacgggtatgtgtaggggggtaaattcatactcattagtggatatgattgatccgacggagttatttttttgtcatgagtatgtgtatagggtattaatacccggtgggtatgtactcattgtcatctcggctctagcttctctggaggagccagagccgttttacatttcatttagaaaaatagtttgtacatgtttctttcaaatcaaataatgtatgaag

SEQ ID NO: 108370 - DNA, 626 bp, Zea Mays
tttggttgtcccgtactccaatgtacagacctaaaattacatgccaagaattaacgacagggttctaacaaaattgatgtcctatatctatggcgaaatgtcaaacaacatgcttctaacaaaacagatgtcctatacctgttggcaaaatggcaaacaacaggcttctaccaaaatagatgtccacccctcaccgcacgtgctgctagaaccacaaattttacagcattctcacagcaagggcatactcgtgcaagaactacaactgtggttctaaaccaactgcggacctaaatcaggaacgttacaacagaccaaccagtccacactacacgctgccacgcatgctcagtaggtgttctgcgggttgaatcgcctcctggcatcacgcttatagtacggtgtgtcatcaatggtcctcctcacgtactccatgaaaggctggggtgtacgaggagagaactgaccattagccggggatgcaggatcagccatggctgcgggatcggctgctggtgctcgtgctggtgtggatgctgtcatgctccctgatggtgcctgtctgataggtctctgcagcaacttaatgaaaagtgcaacagtgactattgtcacaatgatgcatg

SEQ ID NO: 108371 - DNA, 1703 bp, Zea Mays
cttttagtaagttcaatcattgaccaattcaaatgcacaattacatttgatgaaacctcttgtgtctttcaggagaggaggactaggagaaagattgggtctagagtcaggagtaatgggttgtggttcatcggtcacgaggagtcagcattgagagcagctgttgaaggggatgtgaaggagattctgctacatcatcgtaagtcggttgtaccccgtaatgtttaagggaatggacataagtaggattgtatgtgatgcatgcgaacttggcaagcatactagatccatttatcctagtactggtcttcgcagttgtgaatcgtttattctaatacactcatatgtttggggtccttgttcagtcacttgtgtgaatggtgcaaagtggtttgttacttttattgattgttatacttgtatgacttggatctatatactcaagcataaaaacgaggtgttaaagtgctttcaagactttcataaattggttgcaaatcagtttaatgcaaggattcaagttatcaggactgataatggaacaaagtatgtgaataataaattcagatcatatctatcagaacatggagttattcaccaaacaacttgtcctggaactccaccacaaaatggtgtagcagagaggaaaaatcgtcatttgttggaggtagcaatatctctcattgtttcagatgaatgtgcttaagtatttgtggagtgaggcagtaatgacagccacatacttcatcaaccgaatgccctcaagaatacttgatatgaaatcacctatggaacttatgttggtaaaaagtgactttcgagttccacccaaggtctttggatgtgtttgctttgtaaaagatcatcgaccaatggtgagcaagttagatcctcaagcagtcaaatgtattattgtgggttatacatctactcagaaagggtccaaatgttgggatcctattggtcggagactatttgtgagtatggatatgacattttgagagaaagatccatactacgcgaagaaggttgatctagatcacatcctggaggacttctctccggtcaatggaagggaccgtagagaggggagaatagtgccctggatgggaggggtgattgttggaggtatgattccataggaaatggaggaggggataactattgagatatcgaggagtaatgaaggtaatggggatcatgatgatccaactattgatattcaggaggagacagaggatggcgacacagtgatggttgggtcaatcccatgttctactgtagggaagttgaatgagaaacagggggagcaacctgattgttccattggaaggagggtgaataacaaacagggggagcaacctagagtatattattgaaggtggactaagaagcagccggagcaactacaactagaatgagttgaagcttcagtcccatatctctcttcatactcctctccagatccaactggtaatgtaccttcaatccatgtttctcccatcactgaacatgaagaattacctcttgcacaaagaagagttcctagagtaaatgctagaaaacctccttctcgttattgatatgaacatggcatcactaagtatgttccatactctagtgtctctcttgcatatagaaccttcattgcatctctacaaacaatatctattccgaaggattggaggtgtgccaaacaagat

SEQ ID NO: 108372 - DNA, 1368 bp, Zea Mays
ggacctacatgtcacagactctaatgcagtgcgggaggctacatataattagctgatgcagaaaataagaggagattgttcatcgagctgtcttgtccccctcttggcctcttctttccggcgatgggcgccggcgtcctcctcggcgacgccgccggcctgggggcccacctcgccgtacgccgccggaggacgcgcctctaccttcgcaactgggcctccaagcccctgcgcccctcggtctggctcggcgtggccgcctgtgtttcacagaatcgcgaccgccgtggccacgtgaccaggttctccgcctccgcctcgagcggcagtgacgagcccggggagctgtccgaggatgaggcgcagagggagtgggaagcggagctgaatcgccgactgaaggaggccgaggagatggaggagttggagcgcaccgccgagcagctgcaaagccaggccgccgccgaggcccccgaggagtcggaggaggagaagcgcgagcgtgtccgccgcgagctccagaaggtagcgaaggagcaagcggagaggagggagacggcgaagcaaatgtttgagttgggtcaaaaggcgtacgggaaaggaatgtatggacgatcaattgaattcttggaggctgcgctcactatcatacgtccctcctctctactcggtggcgagatccaaatttggcttgcaatggcatatgaagccaataggaggcacaaggattgcattgcattgtacaaagagttggagagtagccaccccatgatcaacatcaggcgccaggcagctgagcttagatacattttagaggcacccaagttgaagatatcaaatgacgaggtggtcacaataccacaaattgggagcagctgggattggtatgctggaacatggagtgacaaaatcaaggaacaagaggacaagaaaaggaagatgagtgctgctagcaaccaagttcaaccttctccaaacatctttggagacctctctttcttgcgaccgccaaatgaatggaagaagagtgcatgggtggttgttaccttgtggatccttttgataggaacagcaatctatctgcaatcatgaatggctcctgcagctctgaaacaagccattcacatctctgcgaggcactggtccatggttcaacagaacccagagatgtcgctaatatggccgtgtctcagactgttgcatttgttgtttttttttgctgcagtgtaaatactaactactgtaactagcaatacaagcagatgccatctagttcaattgattagaaatcaatctgtctgctcatatacacttgatgatattgcatctggagttgatttgatattaccgtggtaggagtttattcta

SEQ ID NO: 108373 - DNA, 698 bp, Zea Mays
atcgagctgtcttgtccccctcttggcctcttctttccggcgatgggcgccggcgtcctcctcggcgacgccgccggcctgggggcccacctcgccgtacgccgccggaggacgcgcctctaccttcgcaactgggcctccaagcccctgcgcccctcggtctggctcggcgtggccgcctgtgtttcacagaatcgcgaccgccgtggccacgtgaccaggttctccgcctccgcctcgagcggcagtgacgagcccggggagctgtccgaggatgaggcgcagagggagtgggaagcggagctgaatcgccgactgaaggaggccgaggagatggaggagttggagcgcaccgccgagcagctgcaaagccaggccgccgccgaggcccccgaggagtcggaggaggagaagcgcgagcgtgtccgccgcgagctccagaaggtcctactcctacccttaacctttagtaaccagagctcgccttccttcacacactcactagtcattcacttcacacgccaattcttcctcaccaaacacaaataccactactacacactcctcctccttcaagttccacatgttctctaccatttgtgacgcacatgcacctggttctagttttagcgctgtttgcaggagggtgagggtagagtgagacaaaatcattttgttgcgcgagctttgcaggtagc

SEQ ID NO: 108374 - DNA, 115 bp, Zea Mays
ccgacgcttgtgtgttgtcactgttgtgtgcatgtagtttttccgactactgtccggctaccgtccgttttcggtgaatattcgttcgtattcgttcgttttcgtatacccatat

SEQ ID NO: 108375 - DNA, 528 bp, Zea Mays
atgtctcttgccaggtcgtgccctctgcttccactacattggattatcggctggttgatgctcgcgttagcaccagcaccttgttcgcgctcgattgccgccgccgccgtagtgcgtgcacccccaaacatggctgaggtcgatccacacccaactcccgccgcccacctgtggacatggctgagatcggtccgcacacttccgccgccatgcgccaaagctgcgcccaaccacggatgtgtcggggttcgcaccgggcccagctcccgccccgctcgctccaagtccactgccaaggatgccagctatcgagcctgctccacgtacgacgccatggtcgcccacaccagtgccctattcaactccacaatgaagctcgtcaacatcagcaacaaaatggggatcaacaaggtcgtagtcgtcccacagatccactcttcgcctaagattcgtcgagttttgcaaatttggtggagattgatgctagggttctctggtttggagaggagaagtcaaaaaagaggctga

SEQ ID NO: 108376 - DNA, 101 bp, Zea Mays
gtgctaaaacaaaacaatctaagtctctgagattgttctctatcactaataagaatagaatgaggctgcactacttattttcctttaaatcagttacacgg

SEQ ID NO: 108377 - DNA, 202 bp, Zea Mays
acaaaagagtagcagggatttcgatagatgtttttttccctttgcgacacgactgactccactcctcattacagttccagtcaaaggacgcacgattgctcttatcaaccgcgccggcaagaggatggtggaggagacggtgtggcgcgcctactgaaaacggcaagggcggagcggatccatgattagggcaggcggagca

SEQ ID NO: 108378 - DNA, 4286 bp, Zea Mays
atggcgcggaagcacggctggcagctcccagcccacaccctgcagatcgttgcaattacagttttcttccttctggtggttgcgttttatgccttctttgtgccgtttttgggaaagcaagtagttgagtatattgcaattggcgtttatactcctgtggcacttgcagttttcatcctttacattcgatgcaccagtataaaccctgcggatcctgggatcatgtcaaagtttgaggatggccttatcaatataccaaccaatggctctggaatagaaggcatgaatttgccccagaaagtaaacaatgctacaggaacaaactctccaatgtctacttgcagaagttctctagatgggcattctaatcaaagaggttcatccataggggaggcaaacatgaatctaggatcacaactgccaaagaaaagatcaagctgttggttgctaggtgggcttctatgtgctacatttgtcaaggaagactgccgaaaaactgatgactcggagcagcaagcaaatggggaggaggctctgttttgcacattatgtaatgctgagtggctaaataactgtgttgggcggaagaattatttcacattccttgctctgatggcaatcagtcttatctggcttgcaattgaatttggagtgggaattgctgttattgtactatgttttgtcgataagaatgcatcaagaaatattcaagacaagttggggaatggcttgactcgtgctccatttgctgttatcgtggggattacaacttatgattatgttgttgcaatgagagctatgagtgaggcagctccagaggacgaggaaggagaaaatatcatttactcgccatcaaattcagcaacaactgggttcagtgtaggaagttcacttggtattcaccacaaaggtgcttggtgtactcctccaaggatatttatcgatcaggatgaagtgatcccacatctggagcctggaatggtgccttcaaccgtggaccctgatggtgctggatatccggaaagagcaaatagagccaagaaggcagtcaaaatcagtgctcgcagcctcgcaaagctcgataagaatgaggtaatgaaagctgctgcaaaagctcgggcatcatcctcggttctgcgaccaatagatgcccgccatggtcatgaagctgatgtcatctccagcggcagtgccagtgtcaggagcagcatgagtgttgactacagtggcacaaaggaatcaaacagcgagatgaaactttctccgcttcataactcatacccccaaagccttgcaagccaggatgaatacgataccggcacaccaaccgcaagcagtttaagcagtctggtcaacatccacaagcttgcatcccactctcagttcagtgctgcgcctcgccctgcacctccggaaagacctgtgccggcgatggtgcggccacctgttcccaccacacaaataaccaacccagggataccgcggccagctgttcccacaacacaaacaaccaacccgatgttccaatcagccacatcttatgttcgagagaaccgaagggcctctgtcgtctgggatcaagaggctggtcggtacgtgtcagttcctgcacagacaagaacgggaactggagccgacctgccagcaagaaacccacggttcttggcgaacccaagtggcgagccaagcagccatgtgaggggtgttgcacccggcaacacatcgtcctcagcaatgccgtcagggcagccttcggagaggctgacctactctgggcagtcgatattcttcggtggccccatgctgaacacccctagcctgggcgcccagaggaacgaggcaggcgcaagagcgcgtccggagggaagcagagatcctaatgcccagcagcgtgacatccggggtgagaaagcgaggacaggctccttgccagtatttgctcctgggacgatattgcagaggcagaaggggcaagcagataaaacctcgcgggctttgctagtttgcttcaccccttcccttctccccaccgcccccgtccccgtcccccaccactggcactcaggtgaagggattcctgtgccgccgcctgccctcgccttctgcctcccggcgcccactcggccttgcggataatttgcggctcggtcccgggcgtgctcagtctcggttccagtggccgcttcgatgtacctgaccgccgtttccttcccccccgcagccgccttctcgtcctcatcccagaagctgctgcctaggtcggccggggtcggccggcgtctggtggtgcgggcagacgtcaaggtcatatcgacgggcgaggcctgccgccgcgggctcgccgccggcattgacaagctcgccgacgccgtcagcgtcaccctcggccccaaagggaggaatgttgttattgaccaagatgatgtacctaaagtaattaatgatggtgtcacaattgccaaggctatagagctcccaaatgcacttgagcatgcaggtgccacgctacttcaagaaatagcatccaagacaaatagcgctgttggtgatggaactacaacggcaattgttttggctcgggaaatcatcaatcttgggttgttggcagttgccactggtgctaacccagttgcattgagaaggggtattgacaaagccgttcatgagctaattaagatcttgaagagtaaatgtatccctgtgagtacaaaggaggacataaaagctgttgcgtcaatatcatctggcaatgatgaatatgttggtaatctcattgctgatgcattggagaagataggtcctgatggtataatcaaaattgagtcatcatcttcaatatacactacagttgaggtgcaggaaggaatgaagatagacaagggatatatttctccatacttcatcacaaatcaagacaaatcaattgttgaattcgaaaatactagagtgcttttaactgatcagcgtgtgaatgatgttcaagagatacttcccttgctggagaagacaacacagttgagtgtccctttattaattattgccgaggatgtgtcgcatgaggtatattcaacactggttcttaacaaactgaatggattgctaaatgttgcggttgttaaatgtcctggtttgggagatgaaaagaaggccattctccaagacattgctattatgacaggtgcagatttctttgctagtgaccttggctggggtcttcatggcattacttctgatcagcttggtatggctcagaagatcacaataactagtgaatccacaactatcatagcacatccttcaatgagaccagagattgaggccagaatcatgcaactgaaaaaagatctagaggagacaacgagttcctatctaaaagaaaggttctctgcaagaatcgctaaactttcaagaggtgttggagtcatcaaggttggggcagccactgaagctgaactcgaggataggaaactgagagtagaggatgcaaagaacgcaacttttgcagccatcagtgaaggcataactcctggtggtggggtgacatatgttcatttatcaaagcatattcccagcatcatggaccttgtggacgacacagaggagaaaatgggtgtaaatatagttgggaaggcacttcttgtccctgctatgacgatagctcgcaatgccggggcagacggtccagctgtcgtggagaagcttctcgccagcgagtggcgggttggttacaatgcgatgactgacgagtttgaagaccttgtcgctgctggtgtggtggacccgtgcagggtcgcgagatgcgtgctccagaactctgcttctatcgcagggctgattcttatgactcaggctatgatgtttgacaagatcaagaagaagaagtctcccatccccgagattcctggtattccaccgcttcagataagccaaaaagctaaggcttgagctgttggatgctgccctggtgttgttggctggatgagttgtgttgacctaggaagcagcagaatgcccagtgagctgcccaaaccaggtagaacagtgagcacttggaatgcccatgttacactcgttatataatttggtggtcggtgcagtattacttgtcatgtctgcataaattttgcattggcgggtgagtcggcaaccaatttatgtctgacttgggaacgtaaacgaacgaatggttgatttgttgctacatagagggccccctttgggcatcatctcgagcaaagctattttgccttgtatctccctttgaaagcagatctgtttcatcaatt

SEQ ID NO: 108379 - DNA, 2855 bp, Zea Mays
gaactaccaccgggtgcgggtagctagcgggtagggtaccaaaacggcggcgctagaaaggaaaacctgccgtactgtcccctcttcccttttactgccgcctgccggccgcgagggagggagggacggaggtgctcatctgtgcggcggcttcggtgtcggtcccaggggaggcggggagccatggcgcggaagcacggctggcagctcccagcccacaccctgcagatcgttgcaattacagttttcttccttctggtggttgcgttttatgccttctttgtgccgtttttgggaaagcaagtagttgagtatattgcaattggcgtttatactcctgtggcacttgcagttttcatcctttacattcgatgcaccagtataaaccctgcggatcctgggatcatgtcaaagtttgaggatggccttatcaatataccaaccaatggctctggaatagaaggcatgaatttgccccagaaagtaaacaatgctacaggaacaaactctccaatgtctacttgcagaagttctctagatgggcattctaatcaaagaggttcatccataggggaggcaaacatgaatctaggatcacaactgccaaagaaaagatcaagctgttggttgctaggtgggcttctatgtgctacatttgtcaaggaagactgccgaaaaactgatgactcggagcagcaagcaaatggggaggaggctctgttttgcacattatgtaatgctgaggttcgcaaattcagcaaacactgcaggagttgtgacaagtgtgtggatggatttgatcatcattgtcggtggctaaataactgtgttgggcggaagaattatttcacattccttgctctgatggcaatcagtcttatctggcttgcaattgaatttggagtgggaattgctgttattgtactatgttttgtcgataagaatgcatcaagaaatattcaagacaagttggggaatggcttgactcgtgctccatttgctgttatcgtgggcatatttaccttactttcattggtggcatgcatacctttgggcgaacttctctttttccacataatattgataagaaaggggattacaacttatgattatgttgttgcaatgagagctatgagtgaggcagctccagaggacgaggaaggagaaaatatcatttactcgccatcaaattcagcaacaactgggttcagtgtaggaagttcacttggtattcaccacaaaggtgcttggtgtactcctccaaggatatttatcgatcaggatgaagtgatcccacatctggagcctggaatggtgccttcaaccgtggaccctgatggtgctggatatccggaaagagcaaatagagccaagaaggcagtcaaaatcagtgctcgcagcctcgcaaagctcgataagaatgaggtaatgaaagctgctgcaaaagctcgggcatcatcctcggttctgcgaccaatagatgcccgccatggtcatgaagctgatgtcatctccagcggcagtgccagtgtcaggagcagcatgagtgttgactacagtggcacaaaggaatcaaacagcgagatgaaactttctccgcttcataactcatacccccaaagccttgcaagccaggatgaatacgataccggcacaccaaccgcaagcagtttaagcagtctggtcaacatccacaagcttgcatcccactctcagttcagtgctgcgcctcgccctgcacctccggaaagacctgtgccggcgatggtgcggccacctgttcccaccacacaaataaccaacccagggataccgcggccagctgttcccacaacacaaacaaccaacccgatgttccaatcagccacatcttatgttcgagagaaccgaagggcctctgtcgtctgggatcaagaggctggtcggtacgtgtcagttcctgcacagacaagaacgggaactggagccgacctgccagcaagaaacccacggttcttggcgaacccaagtggcgagccaagcagccatgtgaggggtgttgcacccggcaacacatcgtcctcagcaatgccgtcagggcagccttcggagaggctgacctactctgggcagtcgatattcttcggtggccccatgctgaacacccctagcctgggcgcccagaggaacgaggcaggcgcaagagcgcgtccggagggaagcagagatcctaatgcccagcagcgtgacatccggggtgagaaagcgaggacaggctccttgccagtatttgctcctgggacggtccagaggaacccgccctttgacaaatgacctgctcctgctcatgaagtttatctgaagtgcgatgatgccgttacgctggaacacccccagcctgaagagttggcagatagttagggctgctctactggggttgccagacgggcggacaaggcagccgttggattgaaggctgctgccctgctggcactaggcaggtgctaacgagaaccacaaatattgctcgcagtcagtgctgacatttttcagtgttgcgggggcgatggagtgactgacgcacactgtgtttgtgttaggagttcatcagatacttgatgcgcgacagataggaagagctaatttctggcgatgtcaaacgctgatttgcagctgactttgtagcgtcgattgtggtcactgtgtggtgtgtgtgtgccatgggatactagtagacatgtgtaaaatggttagtcgaggtgcactttcggacactgctcgtgcgtacttgcttgcttgctagtaacaggtcttgagtttattcttgtagcatctccctttgtatggtgcgaaccatctctgcattttgttgtgct

SEQ ID NO: 108380 - DNA, 1287 bp, Zea Mays
tgtctcttccataagcgtagacggtagacctgccacagggctgggccaaccagtcccgatcgatcagccagcatggcgtcctcctccaaacggtcgctgccatgcgtgctcctcctcctcctcctcgctgtcttccaccacggctgctcgtcggcgagggcccacagacgtgccggcgacatggaggggagcatgagcaccgacgacagctcgatgatagagcggttccagcggtggaaggcggcgtacaacaagtcctacgccacggtcgccgaggagcggcggcggttccgggtgtacgcgcgcaacatggcgtacatcgaggccaccaacgccgaggccgaggcggcggggctcacgtacgagctcggcgagacggcctacaccgacctcaccaaccaggagttcatggccatgtacacggcgcccgcgccggcgcagctgcccgcggacgagtcggtgatcaccacgcgcgcggggccggttgacgccgtcgggggcgcgccgggccagctgccggtgtacgtgaacctgtccacctccgcgccggcgagcgtggactggcgagccagcggcgccgtgacgccgttgaagaaccaaggccgatgtggtacgcacaatccgtaactgacaccatcatcattctgtccttcctggcacctgtcatttgccaccagttgttgctcttgcctgtcccacatgcatgcatgcttgtcactgcgcaaaacacacatgcttttgtcctggatggacgggttcacccggagcgaggcgtcgctggccaacgccgtggcggggcagcccgtggccgtgtccatcgaggccggcggcgacaacttccagcactacaagaagggagtgtacaacgggccctgcgggaccaacctcaaacacggcgtcaccgtcgtcggctacggccaggaggcggccggcggcgacaggtactgaatcgtcaagaactcgtgggggcaggggtggggcgacggcggatacatcaggatgaagaaagacgtcgccggcaagccggaggggctctgcggcatcgccatccgcccgccctatccactaatgtgacatggtggtgtgcatctgttttcgttttaattatcattttattttattaattaaacaataaataagtagtcaacatatggatcgactcaaacatttgcagttacgtgtaccagtacacttgttgtaaataataatccatggcatctcgcgtgtaaactttattctggtgcgaaaacggcttctgcaaatgaaggtttgtacttgtacaatttt

SEQ ID NO: 108381 - DNA, 1467 bp, Zea Mays
atgggcaaggcgccccgcgcggggcactccttggcctcgacgaagaggggctcgacgaaggccgcggaggggagcggcgagaaggagatgagcagcgcgcaggaggaggagaagaagagcgacgtggagatgaggagcgatgagagcaggaccgaggccagcaacagcgccgcccaccaccggtgcccaagaccgcggagaacttccgcgcgctgtgccgtgacaaacccgttccgcgccgtgctcttccgggtggacaccgcgggtgctaactgcgccgggcgcctctgggacgcccttgccgccatcaccgacgaggacggacgctcgccttgcatgctccacatggacgtggccgtctactccaagctgtaccagctcagcttctctgacagggacttcctcgccgacttcaacaacgcaccagaatgggtcgacgtcacgaccccgggccccgtgccgctcgtcgtggccacgcggttcgacgagtgggtcacggagctgctgagcgcgctcgctgacgcggcggcggggcaaccgggtagggagtgtccttttgatcttaaagaagcaatatcaagtatctgttttgctgctccaagatgtgcagatctacatgaactgttacaacttaaaatgatctttgcaactaaatatgggaaggaatttgttgttgcagcttcagagttgatgcctgattgcgagggagcagaccatgcagaatttgtgaaggcagcaaccacagacaatgaggtacactttgtagaaaccagtgatacaagtgttgccgaagttctatttctaggtattacgtccgaggagaaatttgtgggcctcgttaaaagcgagctagataaatttgaaaagttcgatgggaaatttgaagaaaaggaaattttgcggtttgtggagctcaacaagtttcctctaattactgtattcactgagctcaattccggtaaagtatattcaagccctattaagctgcaggtcttcacctttgcagaggcttatggttttgaagatctggaatctatggttgaagaaatagccagagcattcaagacaaagataatgtttatatatgttgacactgctgaagaaaaccttgcaaaaccattcctcactgtttatggccttgaatcagaaaaaaagcctactatgtcacaaataactctaacttcttcaaggagaagcttactcaagcccttcggtacttcaaggatttcatcttttgatttattttcttatattcatcttgagtccatggagttcgacagagcacatgttattcaagcattctttgccagtgataggaataaggagctagcaacaaactaccttcttgagcatgctgggagtactgcttattacataacatgtataactctttcacttgtggatcaatgggccaccgagaagaagtccattgatagctgcaagctcatcttcacccaagcaaaatag

SEQ ID NO: 108382 - DNA, 116 bp, Zea Mays
gaaaactttggccactcgtcttattcaacaaaaaatgtgaaatattatttattttattataatttgttttatcacttatctatactatacttaaagcatcagtttcaacggtcgtc

SEQ ID NO: 108383 - DNA, 432 bp, Zea Mays
atgggaggtatagatgaatctgtgttggatcgtctctcgctggtcacagatatgacaaagcacatacgtgtccgggcctcaggtggaaggtccactgcatccgaacttgggcagttctcgcctgtctttgtttggttgttgcgagacttttatctggatttggcagaagacaacagaaaaattactccacgagattacctagagctagcattgaggcctgttcaaggtggaggaagggacatatctgcaaagaatgcgatacggaactccatccgtgcactttttccggacagggaatgttttacacttgtgcaacctgtgaacaatgagaaagatctccaacgtcttgatcaacttcctgtaagtatttcttcctttgaactacaactgctatttgtggccttgtacttaaaattctcagcaaatatcata

SEQ ID NO: 108384 - DNA, 314 bp, Zea Mays
gggtcgcagtgagccaccagcatgccccctcgtcgtgtgcgggcgagaacagggggtgccattgaaatccttgaccttttcgttattcgggacaatctaagggcttgggggattcattgggttgttatggtggttttcttggccttcccgggtgaagtaatccaccggagcaccagtaattgctcaccggagatagtgctccgccgtgggccgccatccgtcgtcaaccaagcatggcgcgacattattcaagcctgaggtttcgtgtcatctgaagagcaagttggtacctggaatctcaagtcccaggcaag

SEQ ID NO: 108385 - DNA, 1455 bp, Zea Mays
cctggatcaataatcatttgtctcttccataagcgtagacctaccacagggctgggccaaccagtcccgatcgatcagccagcatggcgtcctcctccaaagggtcgctgccatgcgtgctcctcctcctcgctgtcttccaccacggctgctcgtcggcgagggcccacagacgtgccggcgacatggagaggagcatgagcaccgacgacagctcgatgatagagcggttccagcggtggaaggcggcgtacaacaagtcctacgccacggtcgccgaggagcggcggcggttccgggtgtgcgcgcgcaacatggcgtacatcgaggccaccaacgccgaggccgaggcggcggggctcacgtacgagctcggcgagacggcctacaccgacctcaccaaccaggagttcatggccatgtacacggcgcccgcgccggcgcagctgcccgcggacgagtcggtgatcaccacgcgcgcggggccggttgacgccgtcgggggcgcgccgggccagctgccggtgtacgtgaacctgtccacctccgcgccggcgagcgtggactggcgagccagcggcgccgtgacgccggtgaagaaccaaggccgatgtgggtcatgctgggccttctcgacggtggcggtggtcgaaggcatctaccagatccggacggggaagctggtgtccctgtcggagcaggagctggtggactgcgacacgctggacgacggctgcgacggcggcatcagctaccgcgctctgcggtggatcgcctccaacggcggcatcaccacggagaccgactacccgtacacgggcaccacggacgcttgcaacagggccaagctctcccacaacgcggtcagcatcgccgggctccggcgcgttgccacccggagcgaggcgtcgctggccaacgccgtggcggggcagcccgtggccgtgtccatcgaggccggcggcgacaacttccagcactacaagaagggagtgtacaacgggccctgcgggaccaacctcaaccacggcgtcaccgtcgtcggctacggccaggaggcggccggcggcgacaggtactggatcgtcaagaactcgtgggggcaggggtggggcgacgacggatacatcaggatgaagaaagacgtcgccggcaagccggaggggctctgcggcatcgccatccgcccgtcctatccactaatgtgacatggtgtggtgtacatctgttttcgttttaattatcattttattttattaaacaataaataagtagtcaacatatggatcgactcaaacttttgcagttacgtgtaccagtacacttgttgtaaataataatccatggcatctcgcgtgtaaactttattctggtgcgaaaacgacttcttcaaatgaaggtttgtacgtgtaaaattttgtggtcactatcaagcaaaacaatcgtcatttactc

SEQ ID NO: 108386 - DNA, 952 bp, Zea Mays
atgttcagtattgtgaagcacttggagtctgcaaacacgatgttttcctttatttggtggatccttgggttctattgggtgtctgcaggtggtcaagctttatcacatgatgctcctcagctttattggctgacaattgtttttctggcatttgatgttttctttgtggtcttctgtattgctttggcttgtgtgattggaatcgctgtttgttgctgccttccgtgcattattggtatcttgtatgctgtaactgatcaggaggagggagcatctgaagatgacgtaaacaacctttccaaattcaaatttcggacaatgagtgatgcagacaagctagctgccggcattgcagcacctgtgggtggagtgatgacagagtgcggtaccaatcctcctgtcgaacatattctttcggctgaggatgcagagtgctgtatctgcctatgcccgtacgaagatggcgtggaactgcgtgagctcccttgcaaccaccattttcactgcagctgtatagacaagtggcttcacataaatgctacatgcccattgtgcaagttcaacatcgtcaagagcaatctccacagagaagaggtctaggtcaataaggaaaaaaataataatcatggcagcacatttcggcatgtcccatcccagctgtgctcgtcagtattgccacatttgccaactggagttgtgattacctgtcttgtagtcaagtcataaaagtcactggtgatgcgcaggtggttgcaatgtcggttctcgtgaatattccttgtaacagtttgctgcaggggctgtacattctcgttctgctcgatctgattgcattgcgatttatttgtacatgaacacgtgaccatgttggatcatgaaagcagtcagtcatttgtaaaatgattcatgaatcggaggctagtatgcaggctgctattagccaaatcctctc

SEQ ID NO: 108387 - DNA, 1054 bp, Zea Mays
cagtagtatcttgaacgtcgagcgaaccctacccatctccgcagtccacaaatccgcacccaaagcaagcccaacgaaacccagacggcaacgagacagttgtcatctcactccaccgcaccgtccgcgcacggctcgccggccgtcagtcacagcacgacaccatccgttcctggccttcctcctgtgcaactaccactcgcgtcaccgcggaaattaaccccgaaatccagcgccttcggcacgagcacgatcaggcctgcgcaggagatggggcggagaggggagccctactacgtcgaggcggtgccgccggtggacgtgaacaagaacacagagtggttcatgtacccgggcgtctggaccacctacatcctcatgctcttcttcgcctggcttctcgtcctctccgtctctggttgctccccgggggcagcctggaccgtcgtcaacctcgcgcacttcgccatcacttaccacttcttccattggaagaaaggaaccccttttgctgctgatgaccaaggcatctacagcagattgacatggtgggagcaaattgacaatggtcagcagcttactcggaacaggaagtttttaactgtggtacctgtggtgctgtatcttattgcgtcgcacttgaccgactacaagcagccgatgttttttctcaacacgattgcagttttcgtgctggtcgtggcaaaattgccgaacatgcacaaggtccgcatatttggaatcaatgcagacatctgaggacggctgcaagaagtacatggatgcgatgccatgatgttatgaacaagcagtgtgtttctcaaactcgacacaactgcctgtaatatatgtacaggtttagaaagaactgtaaatgaatgatactctaggatacaaggtttgcctgcagactgctctgtgttgccgttgccgctgctttcttttgagtttcactgaaagtggaaaccataacttgggtaaatgtaacgttcggttttcagcttcagcaagacaatagtttaccaacaaaagtgttttaaaaaaatccaaacaa

SEQ ID NO: 108388 - DNA, 1014 bp, Zea Mays
cccaacgaaacccagacggcaacgagacagttgtcatctcactccaccgcaccgtccgcgcacggctcgccggccgtcagtcacagcacgacaccatccgttcctggccttcctcctgtgcaactaccactcgcgtcaccgcggaaattaaccccgaaatccagcgccttcggcacgagcacgatcaggcctgcgcaggagatggggcggagaggggagccctactacgtcgaggcggtgccgccggtggacgtgaacaagaacacagagtggttcatgtacccgggcgtctggaccacctacatcctcatgctcttcttcgcctggcttctcgtcctctccgtctctggttgctccccgggggcagcctggaccgtcgtcaacctcgcgcacttcgccatcacttaccacttcttccattggaagaaaggaaccccttttgctgctgatgaccaaggcatctacagcagattgacatggtgggagcaaattgacaatggtcagcagcttactcggaacaggaagtttttaactgtggtacctgtggtgctagtgacatacattctaaggcgccttcttacaggtatcttattgcgtcgcacttgaccgactacaagcagccgatgttttttctcaacacgattgcagttttcgtgctggtcgtggcaaaattgccgaacatgcacaaggtccgcatatttggaatcaatgcagacatctgaggacggctgcaagaagtacatggatgcgatgccatgatgttatgaacaagcagtgtgtttctcaaactcgacacaactgcctgtaatatatgtacaggtttagaaagaactgtaaatgaatgatactctaggatacaaggtttgcctgcagactgctctgtgttgccgttgccgctgctttcttttgagtttcactgaaagtggaaaccataacttgggtaaatgtaacgttcggttttcagcttcagcaagacaatagtttaccaacaaaagtgttttaaaaaaatccaaa

SEQ ID NO: 108389 - DNA, 1527 bp, Zea Mays
cccaacgaaacccagacggcaacgagacagttgtcatctcactccaccgcaccgtccgcgcacggctcgccggccgtcagtcacagcacgacaccatccgttcctggccttcctcctgtgcaactaccactcgcgtcaccgcggaaattaaccccgaaatccagcgccttcggcacgagcacgatcaggcctgcgcaggagatggggcggagaggggagccctactacgtcgaggcggtgccgccggtggacgtgaacaagaacacagagtggttcatgtacccgggcgtctggaccacctacatcctcatgctcttcttcgcctggcttctcgtcctctccgtctctggttgctccccgggggcagcctggaccgtcgtcaacctcgcgcacttcgccatcacttaccacttcttccattggaagaaaggaaccccttttgctgctgatgaccaaggcatctacagcagattgacatggtgggagcaaattgacaatggtcagcagcttactcggaacaggaagtttttaactgtggtacctgtggtgctgtaagttccatctcatcctcttgcagttcacacatgaacaaattactctttagattctggaaaggaaattaatactaatcagtacaggcagtggttgtttgtgcaatcatattgcacttcattcctaattaacaattttgggtgtatcggttgcgataggatgtctctgcctattatagaaagcacaaaacatgctagagcatggttatacacttgtattgatgtcacattttttggattgacaaaaatgtgttaaatgacgtaaatgttgcattataaaaaggagtttattctttatagacaagaacaacaattaagagggtctgttaaacttttcagctaagttatctagccaaccctaaatattaggaaatttatgttccagctattatccaactacacttggtttctgctgttccttcaagaactaatttgttgcttgtgatccaaaagttaaatccagaaaaactaggattttcatgagcagtgcaaagttctggctgatgattaatcagttagtgcctgtcagtgctgcaaaggcagttgaactgggcatattattacacttcttttcctaagtgcagcatcttagcattttgtatgcaatttacaatatcattgtattttttttaaaccaagtcgatattgccatatagagtgacatacattctaaggcgccttcttacaggtatcttattgcgtcgcacttgaccgactacaagcagccgatgttttttctcaacacgattgcagttttcgtgctggtcgtggcaaaattgccgaacatgcacaaggtccgcatatttggaatcaatgcagacatctgaggacggctgcaagaagtacatggatgcgatgccatgatgttatgaacaagcagtgtgtttctcaaactcgacacaactgcctgtaatatatgtacaggtttagaaagaactgtaaatgaatgatactctaggatacaaggtttgcctgc

SEQ ID NO: 108390 - DNA, 836 bp, Zea Mays
cagtagtatcttgaacgtcgagcgaaccctacccatctccgcagtccacaaatccgcacccaaagcaagcccaacgaaacccagacggcaacgagacagttgtcatctcactccaccgcaccgtccgcgcacggctcgccggccgtcagtcacagcacgacaccatccgttcctggccttcctcctgtgcaactaccactcgcgtcaccgcggaaattaaccccgaaatccagcgccttcggcacgagcacgatcaggcctgcgcaggagatggggcggagaggggagccctactacgtcgaggcggtgccgccggtggacgtgaacaagaacacagagtggttcatgtacccgggcgtctggaccacctacatcctcatgctcttcttcgcctggcttctcgtcctctccgtctctggttgctccccgggggcagcctggaccgtcgtcaacctcgcgcacttcgccgtgagtccccaccctctatctcgtccccagtccctcgcccttctgattttgcgcatgtctatggatcgcttccgtccactgtatccctagatttggttgtgctggtacttggatttactaattatctccttcggtgtggattatttcttctccccaactgtttgtggccattcacttcccggcaggactttttgatttttgctctgcgtgtacgtgtttagccaaaaagattatgttcttggaattctagatttgccatgatgcaaaggcggtacctttctaggaaaagagtgacggatcatctgcaattaatcagtatatatgcccatggattgctacaaatataggtaagccgtggaagaaatatt

SEQ ID NO: 108391 - DNA, 168 bp, Zea Mays
cctctgccaccacaataccccaaaggcggtgatcacccaaccccaaaggaatatgcaagtgacatgtgttctgaagcctggcagaaagaaatcgccatagatcaggcaggactacaaactaaaatatatagcatgaacaactattggtgcttggcgtgaggagggggg

SEQ ID NO: 108392 - DNA, 1123 bp, Zea Mays
agtcgaatcgacaataacaccagccaatcatttgtcgatcctctgactttgacttccattgatcgcgagaatgctttggatgcagatataggaggtacaactgcgacgtcgtcgacagcgacagcgagtaccgcaaacacggaaactatatgccacaagcgcggtcgcaagactgctggtactggtcatttgaaacgacatcgtagtacttgtgcatctaaagctcaacgtgctgctaagactcaatctttgattcagtttaatgctgatggttctgttcgttcatgggactataatcctgatattgctcgtaccgagttgtgtcaattgatatgtactttagatcttcccctaggtattggttccactgctgcatttgaacgttacataaaacatgctcataatcctaggtttactactgtttgtagacaaacaaccactagagattttgtaaagttttataatcaaagtcgtacttcactaatagatgtattgaaatctagtgtttcatgtgttgctcttaattctgatatttggtctggaaatgctaaggaagattatattagtgtggttgctcattatgttaatgttgattgggttttggaaaagagggtaattggtatgaggttgattgatgtttcacataatggggctaatattgcagatcgtgttaaaactgttattgttgattggtaagtgagcccagaaaacggcttggggcaaaatttatgcatcgcctgaggtaagtgaggtaagtgatgcatctgcttcgagtttatcatttggctcccaagtttctgaattggcaatgtacttagatagtgacccaatcactatctttgatgatggatttgatattctaagttggtggcatgagcataaatctaattatcctatcatgtctcttttggctaaggatgttttaactgttcctgtttcaactatcagttccgagtctgtttttagtcttgctggcaggttgattgaggagagaaggcagtctctaagaagtgaaatggtggagattctgacttgcttaaaggattggcggctaggagagagtcgggagcagcacaacattgcaaacaacgacatggaagaacactacaagaatatgtacttg

SEQ ID NO: 108393 - DNA, 324 bp, Zea Mays
atggcgtcctggagcttttcaaagctgggtgtctgcctttccatgacctggcatgatatggtgtccaccctacatcaaaaggcatcctctaggcgcagcttggcgtcttctccgtgcagacttgccccaggcaggtgctgcatgggtgcgcagccgggaaaccaaaggcgcagaagcacagctgacagaactatggcaagtccattttacatcaccagtgattatgatccgaagactgatctagctcagaagggaaattttgaggaaccaggatggaagtatgcctactggccaaaccttcaaaacaatgtgatatgtcattag

SEQ ID NO: 108394 - DNA, 1348 bp, Zea Mays
atgacatccaattatccaattcgctctctggctcgcagtgcatacaacaggaatgacttccatacatccaaaattctatgggaatctgcattgtcgttgaactctttgattccagatggctggtttgcatatggcacagctgcatggaaggacaaggatcttgacaaagctgtggatgcgtttagtcgtgctgtacagatagatcctgagaatggagaagcatggaacaacatagcctgcctgcacatgattagaggaaaaagccaagcagcagtccaagcattcagggaagctgtaaagttcaagaggaatagctgggaaatttgggaaaattacagtaaagttgctttggacacagggaatattagactgacacttgaagctttgaaaactgtattgaatttatcctcaaacaagcagtttagtgttggtatattggacaaggtgatgacaatgcttgaagaacaatctccagattttgttgatactcacgaagcatcagatgatgcaaataaagatacaagacaatccaatcaattattagatattactggtgatatcctccagcagattgtgcgaagtggaggcagcaatgcagccatatggggtttgtatgcaagatggcataagaccaagggtaacctcatagcatgttctgaagctttgttgaagcaagttcgatcccttcagggctcaggattattgcatgaccaaatgaagttcgcaaagtatgctcaagcttccttaaagctttgcaaggtgtacatggaaatttcttcctcaactggaagccgacgagaattattaacagctgagatgcaccttaaaagtaccttgaaacagacgatggacttctcagacactgaggagtacaaagctcttgataactgtcttgaagaaataaagaacctgattgccgctactgcctaggttgttgcatccaagttttggacgctggttatgataatgtattgtccgtttctaattaagcatttctattgttgtcttgttgggaatcaagatcacattatcggactctgttagcacacacaaggatgccaagacaagtgaacctgcgccagagactggaagcgaagatggtgtgctgctacagccaagattaaaaaggaagcttaagcccaatagcaaggtgtccggcctagagtgggttcgttgactgtaatagtgtggcccagtcgttgtgccatatgtatggcttcagtctgtaaactgggacatcgaaaaaaagaacagaaaacactactgcctatcttcttcccctcttccaagtcttctccttccctgccgccgtcttgctttccccttcctcctggaagctaacagtggt

SEQ ID NO: 108395 - DNA, 1554 bp, Zea Mays
atgacttgcgccacccggagccccggcttcctccgcgaggccgagctccgcctcctccgctgcactctcccctcgctgccctcttccccgcccccacccgcttcccctccccctgcgcatccgctcggtcccgccgcggcctctgcgatcgctgccgttgaggccggcgactacgaggctgcgctcgccaccgccgcgccgcacttctttccggcattcgccccctctaggcctcctggctcagccgcgcagttctacgccgacctaggtgccgcagctcgggcgttcctgctggtcgatggggacggggcagcggcgggagaggggttcgattgcaggtgcgcagttgtgctttccgctgcagtggccgcgctgctcgcgttcacgcaacagaacgtgactggtcagatggatgtagttgagggaacaggcaactgtgttgacttggcttctattattacaactgacatgactatcaaatctgatttaccttttcatgttaacctaaacctgttggattttttagggagatgctatagtaatcttggagacacatgggatgcatgggcttctgacaatttagcttcttttggctctcatgttcatgggaaattttcactcttgcagttcattgtatttgcaaggcttttgtttaccagcgtacagagtctggatctctctgattgctggagcgtgtcatggtggttgtttagaatatcaatgttgcagcagaacatcttggatgagttatcatcgtctctgtttgatcaagtgcaagtgtacaagaataagatgttggatcattttggtgaactggaaaaggtttctacctactgggattgtttactgtctgatggagaaggttcttattttgtttcagctgctttcttagaggctggaatcgtggaatacaaatatggtcgggttgatgcttcaaggttgcatctcaatagcgcacaagaagcatgtggtctgcacctttcccttacagggatccttggtttccgaacaatataccaggtggatgcgaagtctcaaatggtgcttgttgcgaagaccaataagtcaggccctgatgaaggacaagtgacagaacccacagtagctcagaatgacaatgcagctttgaaaaatgcaaggagcttcgttcctgttgaagacgatgaattctgtgacatactaagaatgcccagactggtgcaagatgggagtaattctgccagtgaagacgccacgaaccccagtgcaaaaatatcactatcggctatacagcaggctgctgtacttgcacaatgcttgtatgtgagccggaggagtcgtgttgatgaaatgtctgggtgggagatggcaccatacatagagtcgattgattctcaggatgaatcttactttgtggtcaggagtttgtgcgatatactgcgtgttagatgggagtcaacccgcagtcggacaaagcagcgggcattactaatgatggagaatttgtttcactacatttttagcttccccatcactggagtatttgcagttccaggcttttctcttgagctttaa

SEQ ID NO: 108396 - DNA, 1512 bp, Zea Mays
gtttacaccgagggttctctctttgtctgttcactgttctactgggacgaccccaaatccccaaatcgaaaggggccgtccggctcagggtttctcgacggctccttgccctctccgccatggacgcacagcgagccctccttgacgagctcatgggcacagctcgcaacctaacggaggaggagaagaaggggcacaaagagctgaagtgggacgatccggacgtgtgcggcccttacatggttcggttctgtcctcacgaccttttcgtcaacaccaagagcaatatcgggccgtgctcgaggatccacgatccgaagctcaaggaaagctttgagaagtctcctaggcacgatacttatatgcaaaggtttgaggcagagcttgcacaacaatgtgagaaattggtaatggacttagatagaaagataaggcgtggtcgagaaaggctggctcacgattctgctgtgccaatgccaatccctggaaaattagctgagctgctttcagtgcgaaaagaacaggtgaagaagctgctggagcaaattgaggagcttggtgaggctggtaaagtggatgaagctgaggcacttatgagaagggttgacattttaaacgctgagaagacagctttagctaacgaagcagacaacaaagtagctatgcttgagaagaagatggaactttgtgaaacatgtggatcattcttagttgctgatgatgctcttgagagaacgcagtcccatgtgactgggaaacaacacattggttatggcatggttagggatttcctggcagaatacaaggcagcaaaagagaagacaaaagaggaagagcggcttgcaagggagcagaaagcagaggagcatcggaaacagaggggaaaagagtatgatagtgggggcagggatagagataccagaagggagaggtctggggagcgtgactttgaccgtgatcgtcagtatgagcgaagcagaggaagagatagggtttatgattacagggacagaggatcagaacaccgaagcaatcgctacagaaatgggagggattctgaaagaggtggacacagatacaggagtggtggtatgacaaatgaccgagggagaatgaggagcagatcacgttctccaaccaggcatggctatggaagatctagaagtccagatcattagctgcctagctggacatttagatagttttattcacagttgggactcatgaggtagacagttcccttctgctatttattactgtacaatgggttttattgaagtgtcgcacttttttaagtctctgatctgttgtaacagctctgttggaaccctacagtctccctattttgcatggggaaaaattcccaggtcggtatcgattgccatccccacattttttgtgtttctggcattctatatgcgctaaagctttgtttcaatatttggaatcggaagttaaatttagtaaggccggtactggatttcatatatggatgatgatgtttacagctta

SEQ ID NO: 108397 - DNA, 830 bp, Zea Mays
gtttacaccgagggttctctctttgtctgttcactgttctactgggacgaccccaaatccccaaatcgaaaggggccgtccggctcagggtttctcgacggctccttgccctctccgccatggacgcacagcgagccctccttgacgagctcatgggcacagctcgcaacctaacggaggaggagaagaaggggcacaaagagctgaagtgggacgatccggacgtgtgcggcccttacatggttcggttctgtcctcacgaccttttcgtcaacaccaagagcaatatcgggccgtgctcgaggatccacgatccgaagctcaaggaaaggtgatatctgtgaaccttaattgattggcatgtaataaagaaataaaaatcaacacgctttttgtataaaatacagtacgattttgtttatgttatctcttagcaatgtgttacgtttaggaagcaaaatagggtattggatagactgcaactaggtatagagaggccttgctattgggagccatatggcatgataccaaagtagatgatcatgttatatgaattgctagaatggtagtgtccagctagtttttcgttgtgaggattaagccgtcttatgttcttgttaggccacaagttttagtttgattggcacatcttttgtgtgaaattagacagcacattagaactgtgaaatgagataaattacgcatcctacaacaacaatgttctctcagttttatattaagacatcaaataagttgctcagcacaatatttagagaagtttgatgctatctggtgaggaagcaaggatggataattaacaaagggttcgg

SEQ ID NO: 108398 - DNA, 338 bp, Zea Mays
taaattctgaagtttgtgagtaactacaaagctaatttgttgagtctctatgcttcaataatgcctagctacattacagatgagttctctccagtttctactataacgtgtttaatgctggatacttataatcccataccgaatcatgcgttagattgtactttattctactataaggtaataattatagagcacagtagcacagtaaacattgttgtttctttgattcattttttacgaatctcttagttactcttttgtgtgtgtaagcttcctttcttttcttttactaggtttcaaaattcatggcatgctaatgtctgttcttagtgtcacat

SEQ ID NO: 108399 - DNA, 834 bp, Zea Mays
atgccccacaatctcggccagcccctgttgtacccccgcctgcctgtgcgccctcccacgcacgatggaagcagccaccatgcccctcccaccacaaccgtgcagcactattctgggcacggcgccccgcgcggggcactcctcggcccgcatctgcttgcggagattggcctcgacgaagaggggctcggcggaggctgcggaggggagcggcgagaaggagatgagcatcgcgtgggaggaggagaagaattgaagatcgacgcggagatgaggagtaggagaagcagcaggcgaagacgagcaccacgagctcgttcccctccaacagtgagcgctcctctagctctgcttgcaacaacctcacagaaggaggggtggagagcgacgaggagatacggcgggtgccggagatgggcggcgcgtcggcgttggcctcgtcgggcgccggtcccggacagcatcgctcctgctactgccgcaggcatactgggagccaggcatgcgcagttcgctcaactcttcttttcggatctcctcctcagcaacatgcggcgaagcctggtgttgggtggcatccgccagtacccaggcgatcaccatgccgctcccgcgccacaaatccccaccgacgtgaagactggcagcgaaacgccccgctctccatcacatgtgaccaagaagggcgacggagtcaagccaccgggtataaggctcttcgggcaggagatactgaccgaggagcagatgaaaggcagccacgatgggaaagcgaccaacaccacctctggtcgctctagagcgcccgagttcgggctggagcccgggcagtga

SEQ ID NO: 108400 - DNA, 117 bp, Zea Mays
ttagagcaggtcgttctgttgtaatttgtttcttcagggacttattaaatcctaggtttccatttgttctaacaactatgttttgcatgtaccagagatcaaacttcttgacttaac

SEQ ID NO: 108401 - DNA, 86 bp, Zea Mays
gtgacttctcatgccgtggctgctacagctgcatcatgcatgtaggggctctgtttccgggttgcatcattgacccgccaggcgcc

SEQ ID NO: 108402 - DNA, 1505 bp, Zea Mays
aaaaagaagtagacataagatagatctctccgcctctcctcgcccaacctcctccaacaagtaacattgaccgcaaacggatcatcgtccggtgcggtcaatgtaattaactaagcttctcaatcatacatagcttggcaaatgcctgagggctagctagacaaggtccgttgagctagcccctttgggaagaagggagaggaatggcgctggtggcccgttgagcgaggaagaggctattgagaacccgttaacaagaattgccagcagcatctggacaatcttgttaacagagttccaaaggttcaattccaagcggatacaatttccgagttggatcgagaagagtgcgtgcatccgtccgtccacgttcgtggttcgtataagctaggtttcatcaaccatgggcacaaagatgaagaaggggatcctgaagccgttccgctatatctcgaacatgatggacggtaaggagcctgaaatgcaaattgggctccccacggatgtaaaacatgtggcgcacatcggttgggatggtcctggatccaccaacagcggcagcagcaacaacaataatgccggaggagctcctagctggatgaaggattaccactcggcgccgctcgactcgtcctcctttaggagcgagagtgggggcacggctgctgcgaatccctgggcttctcaagagatagtcatggacggagcaagcatcggagagacctccttcagggacacgaaaagcgaggcgggcgggggcgacgactccccgccgtcccccgccacgcgccggacgagacgacagcaccgctctcgcggctcggccacctcctccatggacgacaccaccggcggcgagggcggcgccgaggagaaggagaagaggaaggagaagggcaagaagggcgcccgcaagaaccgcaagaaggacaagccggccgcggccgccgccgccgacgacgcctcggccacctgccaggacctccccgccgtccccaagaagtccaaccgccggaagaacaagggcagctccgaggccaacggcggcgccgcgcccaaggacaccgccacggccgcgccggaggagggggcggcggcgacgaccccacccgccgtggacgacgactaggggggatacgcgggtgatgatccaagaggctgcggcctcgtataccaactttcggagatcaaactaacatgccgaaaagtagtctgagctcaattcgcgtaagatcaagcggcggtcgatccatgtatacgtatatgaactcagaaagggcacatgcatgcattggggagtgtcacgtacattagcattctcaggagtgggtgtgcacgcacaaacgccattcgtttctctgtttctttctctaatactgttatactgagctgcatttttttcacctgttatcttgttcaagatttcatatataatataaagtatacgttgtgggggatatatctgtccctcgcgtatatatgtaactatatataaggtttttttt

SEQ ID NO: 108403 - DNA, 1300 bp, Zea Mays
aaaaagaagtagacataagatagatctctccgcctctcctcgcccaacctcctccaacaagtaacattgaccgcaaacggatcatcgtccggtgcggtcaatgtaattaactaagcttctcaatcatacatagcttggcaaatgcctgagggctagctagacaaggtccgttgagctagcccctttgggaagaagggagaggaatggcgctggtggcccgttgagcgaggaagaggctattgagaacccgttaacaagaattgccagcagcatctggacaatcttgttaacagagttccaaaggttcaattccaagcggatacaatttccgagttggatcgagaagagtgcgtgcatccgtccgtccacgttcgtggttcgtataagctaggtttcatcaaccatgggcacaaagatgaagaaggggatcctgaagccgttccgctatatctcgaacatgatggacggtaaggagcctgaaatgcaaattgggctccccacggatgtaaaacatgtggcgcacatcggttgggatggtcctggatccaccaacagcggcagcagcaacaacaataatgccggaggagctcctagctggatgaaggattaccactcggcgccgctcgactcgtcctcctttaggagcgagagtgggggcacggctgctgcgaatccctgggcttctcaagagatagtcatggacggagcaagcatcggagagacctccttcagggacacgaaaagcgaggcgggcgggggcgacgactccccgccgtcccccgccacgcgccggacgagacgacgcctcggccacctgccaggacctccccgccgtccccaagaagtccaaccgccggaagaacaagggcagctccgaggccaacggcggcgccgcgcccaaggacaccgccacggccgcgccggaggagggggcggcggcgacgaccccacccgccgtggacgacgactaggggggatacgcgggtgatgatccaagaggctgcggcctcgtataccaactttcggagatcaaactaacatgccgaaaagtagtctgagctcaattcgcgtaagatcaagcggcggtcgatccatgtatacgtatatgaactcagaaagggcacatgcatgcattggggagtgtcacgtacattagcattctcaggagtgggtgtgcacgcacaaacgccattcgtttctctgtttctttctctaatactgttatactgagctgcatttttttcacctgttatcttgttcaagatttcatatataatataaagtatacgttgtgggggat

SEQ ID NO: 108404 - DNA, 988 bp, Zea Mays
aaaaagaagtagacataagatagatctctccgcctctcctcgcccaacctcctccaacaagtaacattgaccgcaaacggatcatcgtccggtgcggtcaatgtaattaactaagcttctcaatcatacatagcttggcaaatgcctgagggctagctagacaaggtccgttgagctagcccctttgggaagaagggagaggaatggcgctggtggcccgttgagcgaggaagaggctattgagaacccgttaacaagaattgccagcagcatctggacaatcttgttaacagagttccaaaggttcaattccaagcggatacaatttccgagttggatcgagaagagtgcgtgcatccgtccgtccacgttcgtggttcgtataagctaggtttcatcaaccatgggcacaaagatgaagaaggggatcctgaagccgttccgctatatctcgaacatgatggacggtaaggagcctgaaatgcaaattgggctccccacggatgtaaaacatgtggcgcacatcggttgggatggtcctggatccaccaacagcggcagcagcaacaacaataatgccggaggagctcctagctggatgaaggattaccactcggcgccgctcgactcgtcctcctttaggagcgagagtgggggcacggctgctgcgaatccctgggcttctcaagagatagtcatggacggagcaagcatcggagagacctccttcagggacacgaaaagcgaggcgggcgggggcgacgactccccgccgtcccccgccacgcgccggacccgacgacgcctcggccacctgccaggacctccccgccgtccccaagaagtccaaccgccggaagaacaagggcagctccgaggccaacggcggcgccgcgcccaaggacaccgccacggccgcgccggaggagggggcggcggcgacgaccccacccgccgtggacgacgactaggggggatacgcgggtga

SEQ ID NO: 108405 - DNA, 1166 bp, Zea Mays
gttgtgaatccttacacaaagtatgcactgacgatgacgtcggtcgcattgtcgatagaggaagccctaccaaagaagatgcagagttacctggtcggaatgctcgttaggacattcctcgtcctctcaaccgttgcggtggctctgtttttcccttactttgccctggtgatggcgctggtgatggcgctgcttggatccgtgttcacaatgctcgtggccttgatactcccatgtgcatgctacctctccatcaagaagggcgcagtgcccttgtgggagatcatcctgggcgtgtcgctgtcgagggacctgatggcggtggcgggcgacgcgctcaagacgaacataaggacgttgggcccgctggtgctgccgttgtcggagcagctgctgttcatggcgacactggtcgccaagaagctgctcacaatgaagaaggtgaagccgtacatcccggacttcaaactggcgttcaagcacttctgcatccacgccagcggccgcgccgtgctggacgagctagagagcaacctggcgctcacggactggcacatggagccgtcgcggatgacgcttcaccggttcgggaacacgtccagcagctcgctctggtacgagctggcctacaacgaggccgaggggagcatccggcgctgccaccgggtgtggcagatcgcgttcgagtcagggttcaagtgcaacagcgccgtgtggagggcgctccggtcggtgaacccggcagaggagacgaacccgtggatggacgagatcgacaggtttcccgtggatgttcccaaggtctctaaggtttcaagcgactgaaatgcattgcttgcgtgaatgatggagcttgcaattgtttgatagaagatctggttggaatttttcatagttcattactatatagttgtaggagataggaaaggcgatcgacttctctaagcttgaattatacatctgttcatgttgtttctgtatggcactcgctcctggcctatctatatagttgactgctcggtgttctgacagttctactatctcactatctgtcgatggctcggctgatgttgatcactgttcttccacaaatgaaccatctgaacgatttgttggcccttcggcaattagggaatatatatgtgattaaattagcaatttagaaa

SEQ ID NO: 108406 - DNA, 1879 bp, Zea Mays
ctcagttgcattgcattgcattgcagtgtagcaggcatctccgtgggcaattgctggctggcctagctagctagaagtatctcatatccgggtataggagtatctctctcgctttctctagccatgacgctggtgaggatgccttgccgcctctgctgcttcctgctcgtcgtcgccgcctccgccgtctccgggcgggggcgggtggtcaccaccctcccgggctacgagggccgcctccccttccacctcgaaacagggtatgtggaggtggacgaggacgccggcgcggagctcttctactacttcgtccgggccgagtccggcgccgacgacagcgacaccccgttcgtcctccggatccccggcggccaacgctgctccgccttcagcggcctcgcctacgagataggtcccatcatgttcgtcgtggagccctacaacggcagcttgccgcgcctgcgctacaacccaaactcgtggacaaaggtggcgcatattctttttgtggattcgccagttggggccgggttttccttctccagagatgccaaaggctacaacgctggagcggtatcaaccacgctgcacttggcgaagttcctcaacaagtggttcaacgaccatcctgagtaccatgcaaatcctttctacatcgatggagaatcatacgctggaaaaattgtaccattccttgcacagatgatttcagaaggtattggagcaggaatgaagtcggcacctcgtctcaagggctatctagtgggcaacccgtccacagaggagcgtattgatgttagcgctagagtgccttgtgctcacgggtttgggattatatcacatcagttgtatgagatgatattggggcattgccatggagaggactactccaatcctgcaaaagagttgtgtggtcaggcactgaagaccttcaatgatctcacctcggaagttgcgcaaggccatgtactgcaggagaaatgcgtcgcggcgtcgtcgtctcctgtgctgaacgcaaacagcagggtggccggcggctcgtcgtcgtgggcctcagatggcaggaagatcctacgggaggaagaaatggtgggacgacgcggagtactgggcaagctatttcatccaccggctcttcctccattcagttgcagagtttaccggtactacctgtcgtatttctgggcaaacgacaggcgcacccgggatgctcttgggatcaaggagggcaccgtggatgagtgggtcagatgccacaacgacgaccaagagttgccttacgagagcgagctgaagagtgtcgtcaagtaccaccggaacctgacgtccagaggctaccgagccatggtatacagcggcgaccatgacctgctggtgccacatctgggcacccaggcctgggtcaggtcgctcaacttccccgtcgtggacgactggagggcgtggcatctcggtggccagtcagctggatttacaataacttactcaaacaacatgacattcgcgacgatcaagggcgccgggcatacagcacctgagtacgagccggagaggtgtttcgccatgttcagccgttggatcctcaaccggccactctaatccatcggtgaatgaagagattcgtgtgtaaatctttcttcacgaaactactggctataagatgtacgtggatggaataaaatgctggctatgaacccttgatgctgatgatatatactccatcagtgtggtgaagccagatatgtattgtaggaataaataaaagtacaaaacggatgtacaaaggtacgtacagtgccctctagctacgctacattagcaatatacacgttcatatacataattttcacgcggcatgcattgtagcagatggaaacat

SEQ ID NO: 108407 - DNA, 618 bp, Zea Mays
gcgcgtcgtacgttccactgcacacgaacggcgtacgcacgcatcaccaccaccaccaccaccaccccatcttcgtctccgcaccactctcttcgccggcgtgcaatgactacctcgacgcgcccttgcgccggcgcagcggccgcgttcctgctactagtgctcttctcctccgccgcggtgtccctggcaacggccgccggcagggagagcaagcagggccagcacgcagcgggcgcgagcgtgtacgtggtgatggtgaagccaccggccgagggcgtcgactccaaggcgtaccagatgggcatcctcgccgccgcgctcggcagcgaggagaaagccaagcaggcgctgatctacagctacaaggccgccgccagcgggttcgccgccaagctcacgccggcgcaggtcgccgcgttgcaggaacatcctgacgtgctgcaggcgctgcctgacgtcaagtacacactgcaggacagcaaccacctcaaccgatgatttcagtcgagcgtgctttccgacgaccttcaccaacctgcaggattagctgatgaccagcgctgccatatctagcttcaccatgtattactatctcgtaattcacgcgcatattat

SEQ ID NO: 108408 - DNA, 204 bp, Zea Mays
atgagccagctagaagtcctggctttggccatgtcccgacggcacctggaccgcgccatgaagctgtacaaggtcgccgcggagtcccaggtggtggccacggtggatgtgcagtcactcgacaatggtgccggcgtttggaattcgggcatggaagcgacgacggcggtcgtaggcttcagcgctggtgtgggcctgacctga

SEQ ID NO: 108409 - DNA, 791 bp, Zea Mays
ggaattaatgggagtatttcaggcatattaagtctgttaattgtattggactattgacgagaatataagatataaaatatttaggatgacacatgaattgtataactaggtttgtcatcaaggaacactgttgatgaagcttgcctacaagcttactggaatttatatttctggacagtgacacaacacattagcagatttatccaccatcgcttataaatccctatctatcacaaaattaatgtgttaatttttaattttatctatgtgtgtctactaaagtttgcttactgatggtcttcttgtatagtattgttgcagacatgtaaacaaaataggggagctttccctccagtttcagggagcaagaagccagctgaagatggtcaattggtcattcttgctgcagggagcaagaccccattgacgtcacaacgacgaagccaactatatcttaagttctctaattagttagataagggcgtctcataccaccctcatggttgtactgttttcccgggtggtcatccaacaaacagatccttacagagaggtatttagtgccacaagctcatcatcatatccagaataaaacatcgtatcataaacaagttcttatcatgttcattgattaaagtaaagcactagcataaagctaaccataatagcctaaaaggtaatcaaggacaaagtaaatagaaagctagtcaatccttagtttttaattatgtaatgcggggaaattaattataaatgaatatgacatgaatatgtcagaggatacttgtctt

SEQ ID NO: 108410 - DNA, 1167 bp, Zea Mays
catcactactcagtactgttctttctcaatctctcgtgcccactctacccaccccgccgccgccgtcacgccccagctggagcgccgctcgacactgccaagcccctgagcccccgccccggagcaccctcacactcccgcgctccttccctggagtgtcgtcgcacccctgtgccccttccccggagcgccgcgccgccatcggaggctcggagcctaggtgcccagccccatgcggccagcgagcactcgccgttgatcggcatgccccacgtgaccataacctcgctcctaggcgcccagcacggcgcagcggcaccagtgcccatgtcgtggccagcgaccgtcgcctccgagcggccagcccagccaagcgcccagccatcatgtttgtaaatgttctgtggcaacttcttttcctgtataatcagaagaattgttgatctgtgccaagcccggccaagcgcttcagcctccaggtttttgggtaaggaattggaaatcctcctccctccgttgtgacacattattgatagaaacatgaaggatgaagagtcttggacattgagatcatttttcactctaacgctaacaccggttattccagcataatcagaagaaaatattgacatagatcttgatacccagcaatcagtacaaacaggtgccttgataaggctaacgaaacacatgaaggatgaatagtatcgccaaacatgtaaattcctgtttggtgaagaacaggatgcactaggagatcctcatgaaggagaacaactggaattgatatcaacagcatattattgagtccgcaagagatatgggcaatggaggatgtggaaaaggtttattgaagaatggacattgctaggtattgttgcagacatgtaaacaaaataggggagctttccctccagtttcagggagcaagaagccagctgaagatggtcaattggtcattcttgctgcagggagcaagaccccattgacgtcacaacgacgaagccaactatatcttaagttctctaattagttagataagggcgtctcataccaccctcatggttgtactgttttcccgggtggtcatccaacaaacagatccttacagagaggtatttagtgccacaagctcatcatcatatccagaataaaacatcgtatcat

SEQ ID NO: 108411 - DNA, 306 bp, Zea Mays
atggcagttcgatcacatatatatatatatataaccgtgacgaagagcactgcagcagcaaaacatgctggatcgcgtggtggtgaattcgtgcgtacgtgtctcgatactcccctggacgacgggcggccacccagaccgccaccctgcggaacagcagcaaggaaggccctgcgggggcgaccgcgaggcgagcaatctcatctcattattctcatgtgttctcagttcgcccccgccggaactgccttgcatcgcgcttgttgccgtcgccgatcatcttccaggcatgggctagccggctag

SEQ ID NO: 108412 - DNA, 390 bp, Zea Mays
atggactggaaccctcaaagggagaaggaatctgaagcgcccattcgtcgtcggtggtggggcgagggtgccatcggggatggagaggagctccttggcaatgctcagatgaggagccctgaactcttgcggtggcccaaacgcggaggtggaggcgacgacagtgttcagctgggccctaacggggagagatgcggccccggcggcgtgtgcgatggtactcagggcgatggtgcggtgggggaggagaagcggcggcggcggtgcagcgtgttgggtgtggcgggcgaggcgccgagatggatgtggccacaggccgggatgccatgtgggccagcaatggtccgtgggtacgctagggttttcctgctctgcggtgggatggcctag

SEQ ID NO: 108413 - DNA, 2495 bp, Zea Mays
gctctattttggggagattttgcaacctctccctgactgcgccatttttttttctcgcctccaccaacgtcagctctccagtcaccagttggacaagcgggacgggacaacatcctcaccagccgcaatcctccactcctccccgcagccctcgaccctcgtcagcctctccagttcacctcgccgtctccgtcatgccccgcgagggtttggggaattttggagcggaggaggaggcgagggatggtggacaggaaggtttggttacggaaatggatgtggaggaatcctcgccgtcttcgtcgccgatgtcgtctccggccgggtcgtcagattccatagacctcaacttcctgccgtttctcaagagggagcccaaatcggagccgtcgtcaccagagctcgggcccctgccgctgcctgtctccctcacccagacgccgccgcagcagcatgcagcggcggcggctccagcaactgaggcctcggtgcctccgcctccggcgactcctgacctctcgtccgcgtcgatgatgaccccgctgcagtcgctgccgcctaacccagacgaggactcgctccttcgggagtactaccgccttgcgagactatatctctcgtctgcggggtccggggcgatcgtcccgacaccggcaccggaggcggccgcaccggcggtggtacagtccggggccgggtccgtcgtgaaaaagcgccggccgcggtcatcggagctcgtgcgggtctcctcgctcggtgtgcaggatcagatctacttccgcgacctcgtgcgccgggcgcgcatcactttcgagtgcctccgcgggctgctactcagggacgacgagcgtgctgagtccctcggcctcgctggtgccgccgggtttggcgttgccagggaccggcgccgcgcccgcgcagacatgcgtgccgcagcgctcatggcagaccacgacctctggctcaatcgcgaccgccgcatcgtggggccgatgcctgggatctcggttggtgacgctttcttcttccgcatggagctctgcgtgcttggcctccatggccaggtacaggcaggaattgattatgtcagtgcagggaggtcggcctctggggagcctatagccacatctataattgtatctggtgggtatgaggatgatgacgatcatggcgacgtacttgtgtacactgggcatggcggccgggatcccaacctccacaagcattgcgtcgatcagaagctggagggtggcaatcttgccctcgagcgcagcatggcttatggtattgagattcgtgtaatccgtgccgtcaaatcaagacgaagccctattggtaaggtatacttctatgatggcctctacaaagttgttgactactggctcgaccgtgggaaatctgggtttggtgtttataagtataaaatgctgcgcattgagggccaagaacccatgggtactgtgaattatcgagcagctgaacaacttaaggtggatgtgtttgctgtaaggccaacaggttatttcagctttgatatctccatgggccgagagaccttgccagttgcactctataatgatgttgacgatgatcaggacccactcttatttgagtatctaacacggccaatttttcctacctctgctgtccaggggaaatttgctgagggtggtggtggtggtggttgtgattgtgctgagatttgctcaattggatgtaactgtgcaggaaggaatggtggcgagtttgcatataataagactggaaccctgctacgaggcaagccactagtatatgagtgtgggccatattgcaggtgcccacctagttgtcctaacagggttagtcagaaggggcttcaacataggcttgaggtattccggtcaagggagactgggtggggagttcgttctttggatctcattaaggctggcacattcatttgtgagttcagtgggattgtccttactcaccagcagtcagaggtcatggcagcgaatggtgattgcttggtgcgtccaaataggttccctccaaggtggttggattggggtgatatatctgatgtgtaccctgattatgtggcgccagaccatcctgttattcctgagttaaactttgcaattgacgtgtcaagggcaaggaatgtggcatgctatttcagccacagttgcagtccaaacgtgtttatccagtttgtgctgtttgatcattacaatgtgtcttacccccacctaatgatctttgccatggaaaacattccaccattgagggaactaagcatcgactatgggatggttgatgaatggactggacaattaaccatgtagctggagtaacctatttaaaaggcagtgttctctttctttcttttccctttatttttggaattctcataatgcttcacctggggatcatcaagccaactggactaaaattcctcagctggtaattctccttattcctcatgtgctatttttctttgggtacttcat

SEQ ID NO: 108414 - DNA, 888 bp, Zea Mays
ggggaatcgaccgtggcgccctgcgcaccggctggggataatccgcgcggcatgcaatttgaggccattgcacccttggctcctactcactctctctccccatccgcgccagtccaaccaagtcagcacccgcgcgcggcaaggagttcacgcccatggcgagcaccaacatggcgtcggccacctcgcggttcatgctggccgcgggcgtgcccaccgccagtagcggcagcggccgcgtcagcttcgcctcggcgcccaaccggcttggcaggaggcttgtggtccgggccgatgaggagtccccggcagagccggcgccgacggcggaaggggagggcgccgtggccaccaagcccaaggccgagaagccgccgccgatcgggcccaagagaggcgccaaggtgaagatcctgaggcgggagtcctactggtacaacgggatcggcaacgtcgtcaccgtcgatcaggatcctaacacccgttacccggtggtggtgcggttcaacaaggtgaactacgccggcgtgtctaccaacaactacgccttggacgagatcctcgaggtgaaatgagtgaggccagtctgctcaaggaccccatgctcctgtgtgatttgtagttgtgaagtgaggctgctgcctagctgctacgttagctgctagcgtcacaacatcaatcttgtaatagcttaatctccacaatcatcatgtaatttattgcatgcttcattcaccgtggactcaataatctctcttgctctaaaatcgatgtattcgtttttcttgtgattttgtacatgcacataaatttctctctggaaacattgtttgtgctaacaacacactcatgcaatcaaactagctactccacgatattcagtgtgaa

SEQ ID NO: 108415 - DNA, 597 bp, Zea Mays
tctctctccccatccgcgccagtccaaccaagtcagcacccgcgcgcggcaaggagttcacgcccatggcgagcaccaacatggcgtcggccacctcgcggttcatgctggccgcgggcgtgcccaccgccagtagcggcggaaggggagggcgccgtggccaccaagcccaaggccgagaagccgccgccgatcgggcccaagagaggcgccaaggtgaagatcctgaggcgggagtcctactggtacaacgggatcggcaacgtcgtcaccgtcgatcaggatcctaacacccgttacccggtggtggtgcggttcaacaaggtgaactacgccggcgtgtctaccaacaactacgccttggacgagatcctcgaggtgaaatgagtgaggccagtctgctcaaggaccccatgctcctgtgtgatttgtagttgtgaagtgaggctgctgcctagctgctacgttagctgctagcgtcacaacatcaatcttgtaatagcttaatctccacaatcatcatgtaatttattgcatgcttcattcaccgtggactcaataatctctcttgctctaaaatcgatgtattcgtttttc

SEQ ID NO: 108416 - DNA, 261 bp, Zea Mays
atggtcggcgcttggcccccagctcgccgcgccctggactccctagccaccgcacctctgctcctccctgctcggcctccaacggcggcctccctgccgacgcgcccccgacgctgcgctgagctctctgcgccgcggttctccctcaacaagccccagccgagctcgccggcttctcctccgcgcgccctgctcgccctttgccgcgcgctcctcccttgtcgcgtctctctggtgccctacgctggccgcagctcgtag

SEQ ID NO: 108417 - DNA, 540 bp, Zea Mays
atgcgactgacggattgcgaggaggccagaggtgggggcacggacgcacgatgggcgccgtggatgggaggaggcgtcgaggttggaaggggcgcggtgatgggggcgaggcacgcgaggagaggatggaggcgcggcaccgctgcaatcgcgcgattcggaagccggatccctggcgcggaggtaatttgggagcggggcgcggctgccatgggcgattcgcgtcggatctctagcgcggaggtaatttgggagcggggcacggctgccatgaagcacgtgcgccatttaagggcgcggatagaggctgccatagatggcggtggactgcagagaggagagcgggggcgcagagatggcgggcgagagagacagcagagaggagagcagggtcggaccttccatggaaccacgcggaccttccctagatgtgttgattctccttccatgatagcggacgagagagcgggggcgcaagagaggagagagggcgacggatggcagaaccgtgcaccaaaaaaatgtggacgtctacactaa

SEQ ID NO: 108418 - DNA, 1433 bp, Zea Mays
agtgctaaagatacatcggagaaaggattgtagaataattaaaaaagaaagaaaatatctcctaatccctatcctcccgccgcccctacccctgatctttctctacagccaccgcccctgctcctttatctacgcgcgcagctttcctctgctcaagctccatcgcggctctctctcctgctccctcccatggccggcgcttggcccccagctcgccacgccctggactccctggccaccgcgcctttgctcctccctgctcggcctccaacggcggcctccctgccgacgcgcccccgacgccgcgctgagctctctgcgccacggttctccctcaacacgccccaaccgagctcgccggcttctcctccgcgcgccttgctcgccctatgccgcgcgctcctcccttgccgcgtctctatggtgccatacgctggccgcaactcgtagcttcacgctcgtcttcctccctgagtccctttcctatgctcaccatggccgtcgcgcctgcttcccctactcggatttagtccgtgccctgggctcccatggcgtgcccgactccagctccagcgcgcagccgaactcccctacgcagcgcgttcctccctgtctctccctcctctggccatggatgcttaggagcagtagtagccctagctcggcaacaccaataggctccctggaaccagcaccctgctccctgttgccatgagctcctgctcggattctgcccagctcgcccctgcctatgtcgcgcgggtttctctgaccccggcgttgtcgtttcagttgaccacaccggctgcgcagtggaagcgtggtgggcgcgagggtcggggactggccgattgtcgatctcctatttgccttggacagtgcctcgacgccccatcatagtagcccgtcggggaactctagtgtttgacgttaattctcggtcgtcttcaactttgtcttgccgtcgtcgttcagtcgtcccgtctcgatgccggtctctacgtgatgcctccgaattgtgatcacgcgaacaaaagaatccccaagagaagatgtccaaagattggatggtggtgtgcgtgaagttcgtgtagcacctgctatgcgctcgacaaattgtttgaatcggaaaatcattaccgatctcgaggattcgagtcagccattggaacggtaagctgatttgatattcttattgactggtctgatgaatggattggttgaattagttgttcatgaagattgttttattcttagcacaggtgcgttgtcgaggtattagatgtatgtcgtgatgcctcgcttcatgcatcaatggagtgtgtacataagtatgaagtggtcgtgtcacgcgaaactcaagtttaaaatgattattgtgtgaggagtggttaagtgaataataagtttagtgtctcgctcatatagctgat

SEQ ID NO: 108419 - DNA, 1506 bp, Zea Mays
gaatagatttaaaatgttgtctcaaagctgtgtcaataatatctgccaatggcttggcttgttttacaggtaaagctgaaggtgttctctttgaagatgcaggagatggatatgcattcacacagggagactatcttttgacatattatattgctgaactccactcatcagtggttactgtcaaaatcttaaaatctgaagggtcatggaagagaccaaaacgaaatctgaaaataaatatattgcttggtggaggtgctatgataagtacagatggtgttgatggtgaagtaatacaccttacaatgccttctgaatctgtagtgtcaagcttagttgcaaccagcgaatttgagcacaagaaacgaatggagatgattcagcctatacctgatatagaagagccatcggggcaggaaggtgctgagctatcaaaaatacctgttgatttgaaaagtggagactggttccttaagattgtaccatggattggaggccgtattatatcgatggcccatattccttctgattcccagtggcttcacagcagaattgagataaatggttatgaagaatacagtggggctgaatataggtctgctggttgcacagaagagtacaaagtcatcaggaggcaccttgaacaatctggagaggaggaatctatttgtatggaaggagacattggtggtggtctggttctccagcgccagatatccattttgaaggacaacccaaagattgttcagatcgactccagcattcaggcaagaagtgtaggagctggttctggtgggttttcaaggttggtctgtttacgagttcatcctacattcaccctgctgcacccaactgaggtagtagttgctttcacggccatcaatggttcaaagcaagagatctccccggaggcaggagaaataacattcgagggagacctcaaacccaacggagaatggatgctagtggacaagtgtgtcgggctgagcttggtgaaccggtttaatcccagggaggttagcaaatgctttgtgcactggggaactggtgatgtgaacatggagctctggtcagaggaaagaccggtgtctaatgagacgccgttgaggatttgccaccagtatgaggtgcagcaaacaacctaaacacctgcccgaagagcagaaataaaaataccaatttggaggatacttcagttgcttgcacttgttttacggtctctgtattgacggtcgcgcaccataacttccatggtattttggagtcgtgtcgttagtcattaccctcttggaggactttgggtctgctgaaaacatggttactcagcaatatctgctactgttcacgactgacattcaaagggttactcagcaatatatggataaaatttgtgttaaagataagttgtgtcgtgtgggttgagttatgtgtgttgtgttgtgctgtaccttcttctatctattaatggaaagatacgtagatctcctgcgtattcgagaaaaaaaa

SEQ ID NO: 108420 - DNA, 780 bp, Zea Mays
atggtagatgatctccattccattggttgcaaagcaatctggatgcttgacccagggatcaagaaggaggagggttactttgtttatgatagtggctcaaaaagcgatgtttggattcaaaaggcagatggcagtccattcgttggagaatatgcctcacatagtctacattcaggggaggtgtggcctggtgattgtgttttccctgactatacatctgaaaaaacacgagcttggtgggctagtttggtaaaggacttcatctctattggtgttgatggaatatggaatgatatgaatgaacctgctgttttcaaaactaccacgaagacaatgcctgaaagcaatattcataggggagatgctgatattggtggtgttcaaaatcattcatactatcacaatgtctacggaatgctaatggcaagatctacttataaaggaatggaaatgggcaatgcagctaaacgaccatttgttcttacacgagctggttttattggaagtcagcgttatgctgcaacatggactggtgataatctttcaaattgggagcatctgcacatgagtctaccaatggttcttcagttgggtctcagtggtcaaccattgtcaggtcctgatattggtggttttgctggaaatgctactccaaaactttttggaagatggatgggtgtgggtgcattgtttccattttcacgtggccatacagaaactggaagcattgaccacgaaccatggtcctttggtaaagaggctagatacgttcataggtag

SEQ ID NO: 108421 - DNA, 724 bp, Zea Mays
gatatataatatatgccctacccaattagtgttagggtttcagttggaatgggaaaccttgaccctaagtagggttgggattggtatatatatcaatatatgttggacctggcccattacataagggtgtggcagtaattacaaggggctaaccccaaaaccctagacgggtactctaacagtttccaatctaatatggtatcaactatcaagcctctctcttcttctctccctcccaccttctccccccctagatctagctgtcaggaaccccaccccagccgtcggccatggtcgagcccccttcctccccaagattggcgcagacgtgctgcctgccctcctcctcaccgccagccatgggcctgctcccttccccatggacgctccgcccgacctactcccccacgatgtcggtcgaggggacactcccctccacgcacccacatcgctcgctactggccgcgggcctccttctccatgatgctggccgcgggcatgctcccctccacgcaccgtccccctgcgctaccacctagtccacgccgaccctttgcgacgcctcttgtgcagcactgaccccttgcgtcacccctggccctcgccgggccctttcctgcttttgtgtaggcaacattgactctcctctcatcgcctcgtgcgccgcgtcaggcccctccagctccgcgcaaggagtctcctctgctcacgtgcccccagcact

SEQ ID NO: 108422 - DNA, 743 bp, Zea Mays
cgcatcactccgcctcgtcccccacttctcgcacttccgcttcagcttccaccgtgcccaagagtcacgaggcggcggcgggtcacgccgacgtactctcaggtgctgcggtgggactgcccctgctgctgccgcgggggcggcggaggggaggatggccgcggcgacggcggcggacatggtgtgggtgagggtgcttgaggatggcgtgttccggttcgacgcgtcggaggcggcgcgcgccgccgcggggcccagcctctcgttcgcggacccgcggcggcgggaggcgccgcatgacggggccgacatgcccgccgttgtcccggtatgcgaggtcgcggcggggggatcccagaaggtcgtgataaagcttcctcctgggacatctttctatggtactggagaagcgagtggcccacttgaacggactgggaaacgagttttcacatggaatacagatgcatggggttttgggccaggaaccacttcgttgtaccagtcacacccttgggttttggctgtcctccctgatggaaaagcattgggtgtccttgctgataccactcggcgttgtgagattgatttgcgacaagaatcaactataaagttctctgccttatctgcctaccctgtcatcacttttgggccatttaatactccagctgatgtcatgacatctttgtcgcatgcaattggtactgtgtccatgccgccaaaatggtcacttggctatcatcaat

SEQ ID NO: 108423 - DNA, 1711 bp, Zea Mays
aaccttaaacccacccgctccccgggcttctataagcagctccgctcgcgctccaccgcagcgaccgatagaacacgaccctgggaccggggctcagatcggatcgcatcagatcgaaggcgtccagaagtttccatcgggcgtcgccggtatggtgatccgcaggggttcttcgtacgccgtcgcggcacttctcgcgctcgcctctgtcgccgccgtcgccggcgaggtattcttccaggagaagttcgaagatggctgggaaagtcggtgggtcaagtccgagtggaaaaaggacgataacatggctggtgaatggaaccacacctcggggaaatggaatggagatgcagaggacaaaggtattcaaacctccgaggactacaggttctatgccatttcagctgaataccctgaattcagcaacaaggataagaccctggtgctgcagttctctgtgaagcacgagcagaagcttgactgtggtggtggttacgtcaagttgctgggtggtgatgtagaccagaaaaaattcggtggggacacaacttacagcattatgtttggaccagatatctgtgggtacagcaccaagaaggttcacactatcctgacaaaggatggcaagaaccacttgatcaagaaggatgtgccttgtgagactgatcagttgactcatgtttacactttgatcatccgtcccgatgcaacatacagcattctcatcgataatgaagagaagcaaactggcagcatctatgagcactgggatattcttccccctaagcaaatcaaggacccagaggctaagaagcctgaggactgggatgacaaggaatacattcctgaccctgaggacaagaagccagagggctatgatgatattcccaaggaaattcctgaccctgatgctaagaagcctgaggactgggatgacgaggaagatggtgaatggactgcccctaccattcccaacccagaatacaaaggaccatggaaacaaaagaaaatcaagaaccctaactaccagggtaaatggaaggcacctatgattgacaacccagatttcaaggatgatccgtacatttatgcatttgacagcctgaaatacattggcattgagctgtggcaggttaaatcaggcactttgtttgacaacatcatcatcactgatgatcctgcgttggccaagacttttgcagaggagacatggggcaagcacaaggaggcagagaagactgctttcgatgaggctgagaaaaagaaggaagaagaggaagccgccaagggtggcgatgatgacgatgatgacctagaggatgaggcagacgatgacaaggcagacgatgacaaggccgactctgatgccgaggatgacaaggactctgaggagcacgacgagctctagatgatgagtatgatagaggtggccactgacattggtgccgttggcctggatttatcagctcttccattttgttctccttttctgttatcagaaactttaggacattgttaagaagctgagggacagtatgggtcgtagcgcttagtcatttttcccattaaaatcgatagcactgcaggaagatcttttcccacaattgttatatttcatcctgatgttagatgtcagctgtgttagtttattgagaactgtttaattagtcaaaaaagaagaataatacaagcatttggttctattttctcc

SEQ ID NO: 108424 - DNA, 1820 bp, Zea Mays
atagaaaatgatattttatagtggtagtggggtatagggggagtatttagggggaactgctgcgggagatgaaaaaatagggggaaaaataggggggaaaagtaatataggggggaaaaatttagagctaacggttgcggatagcctaagaaatgaagaagaccggcaccgttagccgttggcagccttctgccccgcaccctccgcgtcgaacaccagatccggccaccgctccacctctgtccatctcacgccaacgcccactggcgtcctcgttcctccctgccggggagcggcggagagcttttcacctcgtcttagggacctctggcttccttccccctgccggcgatcggcggagatccgctgttctaacatcgtctcccgctgctgacttgtgaacaaggcagcagcatggttcagtttggaaacatgtcatcaaagaagatagagttggatcacaaggacatggtccatgattctgctatcgactactatggcaagcgccttgccactgcctcctcagactctaccgtgaagatcatcaacattggcgcggcaaatgccccatcccaggtccttgcaacgcttagtggccactatggtcctgtgtggcgtgttgcttgggcccatccaaagtatggcgctatccttgcttcgtgcagttatgatggccgtgtcattatttggaaagaggatgcacgaggcaattggtctcaagtccatgtgttcagtgacaacaagtcatctgtcaactccattgcatgggctccgtatgaggttgggctttgccttgcctgtgcatcttcaggtggaagaatatccatcttgacgatgcgagctgatgggggttgggatactgcaaccattgagcgagcacatcctgttggtgcgactgccatatcctgggctcctgcaacagattcaatagctggcacaggggagtttgtttacaagcttgtctcaggagggtttgactcggttgttaaggtctggggattcaacaatggtagctggaagctggagagtgctcttatctctgacatgcacacagattgtgtgagggatgtcgcgtgggcaccagttttgggattggccaaatcgaccattgccagcgcttcacaagacgggaaggttgtcatctggaccaggggaaaggatggagacaagtgggagcggaagctcatgcgtgactttggttcccctgtctggagggtgtcctggtccttgactgggaacatattatccatagctgctggtgggaacaatataaccctctggaaggaagggtcagatgggcaatgggaggaggtgatgaaggttgaaacataggatgtccgtcaagttttctgaagataaagtgtgttttactagtgtttcctgcagatccatgtttcgacgtggacaaagtttgccgttgtgcttcgacagaacatccaattcacttattttggtactttctgacgaggcaattatactcttggatggatcccgtgcgctttagagtggtaatttcagatcggtgagcctgtttagttctgtatatcctcaacttcttttttggtggaacatcagagctgctgcaagtaatgttatctaataagcactgtagcaatttctattgctgtttgtgctgcggctactgtagcgctgctctggtgcgcgccatcgtttgagttttattgatttgttgtgcaagcataacatagcaagattctataattcgttccgcgtgtcattccggtgatagatttatgacatttgaggaagggatatgtttgtaataaaaaagtaattcaatctagaacatataaaaaaca

SEQ ID NO: 108425 - DNA, 1788 bp, Zea Mays
gtgcaaacagaacggaacctctcggctccttcctcctctggtttgctgctgtcgcccgccacggcgcctcctccacttccagatcttcccgccgcccccaaaatagcgcccaccaaaaccctaccctgcccgcccgttccctctcatccctcgcggcccccgcccccgtccttccgccgccggactaataaaccctagccccaccgccgccgccatggcgggcccgtccggcgcctcttcctcctcgcgcggcgccggcgtcgtcgtcgaccgcttctacagcccgccccacgtgcgccgccagcagcaggaggagcagctgcagcggctcaagggcctggcccaggggcagcgcccgtcgtccccagcggcggggacgctcacgcccagggccgccaagcagaagacgccaccggctgagatgcctgtcccggtcaaggagtccgagaggcgggccgacgcgtcctccaagcccgtgtcagccccggcctacaccgccaaggcggctgcgacggctgacggggtgacgaccccgccgccgtcgcccgcgggactggatgaggctgggaatctcgacaggttcctcagctccaccacgccatctgtgcccgtgcactacttgcccaagaccagcatgaggggatggaggatgggtgatgttacaaattctcgaccatatttctgccttggagatctctgggaggctttcaaggagtggagcttttacggggctggtgtcccccttgtcttaagtggaggtgaatctgtgattcaatactatgtgccatacctttccgctatacagctgtacgcagacccttcaaagtttcaatcgaagatcaggcattcttgggaggaaagtgatggggaatctatggatactagcagcgaaggtagcagtgaaactgatgttaaccgattaagaagctcaaccgtggaaactctatgtcgattggagggtggctttcaaagggatggtgatgaaatgcactcaccatcgactcgcccaattttcgaatatcttgagacagatccaccatttggtagagagcctttaacagataaggtatcagttcttgcaagtaaatttccagatttgaagacattcagcagttgtgacctgctgccaaccagttggatgtctgttgcatggtaccctatctatagaatcccaactggaccaacactcaaggatttggatgcatgtttcttgacatttcattacttatcaacacctaccaaggatactgatcccagtacaccagcatgccccagatttgggggccttaattgcaatatggacgccgctggtaaactaacattgcccgtctttggactggcgtcatacaaattgaacagctctatttggtcgtcaaataggcctgaggagcatcagctcgtagcttcgttgatgcagacagcagatgactggcttcgccatcgccaagtgtaccacccagacttccgattctttcttacccattacaacacagcattgagatgacatgagatgatcgcatctcgctgtaaattgtctttattagtgtgttattatatgtggttggctgagccgggctacctgtaacactatgttgttgatcgcgtaacgtagcgcttctctgaacttttttggtatggttcagtagttcaagccagacagctaatttgtaacttctccaataattcttttgatgtaggtaatcttgtgggagtcacattatggagatctgtaaaacagaaactgatggttataatttttagaaacttatagactttacattgtttatc

SEQ ID NO: 108426 - DNA, 1802 bp, Zea Mays
gtgcaaacagaacggaacctctcggctccttcctcctctggtttgctgctgtcgcccgccacggcgcctcctccacttccagatcttcccgccgcccccaaaatagcgcccaccaaaaccctaccctgcccgcccgttccctctcatccctcgcggcccccgcccccgtccttccgccgccggactaataaaccctagccccaccgccgccgccatggcgggcccgtccggcgcctcttcctcctcgcgcggcgccggcgtcgtcgtcgaccgcttctacagcccgccccacgtgcgccgccagcagcaggaggagcagctgcagcggctcaagggcctggcccaggggcagcgcccgtcgtccccagcggcggggacgctcacgcccagggccgccaagcagaagacgccaccggctgagatgcctgtcccggtcaaggagtccgagaggcgggccgacgcgtcctccaagcccgtgtcagccccggcctacaccgccaaggcggctgcgacggctgacggggtgacgaccccgccgccgtcgcccgcgggactggatgaggctgggaatctcgacaggttcctcagctccaccacgccatctgtgcccgtgcactacttgcccaagaccagcatgaggggatggaggatgggtgatgttacaaattctcgaccatatttctgccttggagatctctgggaggctttcaaggagtggagcttttacggggctggtgtcccccttgtcttaagtggaggtgaatctgtgattcaatactatgtgccatacctttccgctatacagctgtacgcagacccttcaaagtttcaatcgaagatcagcgaaggtagcagtgaaactgatgttaaccgattaagaagctcaaccgtggaaactctatgtcgattggagggtggctttcaaagggatggtgatgaaatgcactcaccatcgactcgcccaattttcgaatatcttgagacagatccaccatttggtagagagcctttaacagataaggtatcagttcttgcaagtaaatttccagatttgaagacattcagcagttgtgacctgctgccaaccagttggatgtctgttgcatggtatgtctgtaaatgctcttggattctctgacatcattttcaatgcaactttttgagaggtaccctatctatagaatcccaactggaccaacactcaaggatttggatgcatgtttcttgacatttcattacttatcaacacctaccaaggatactgatcccagtacaccagcatgccccagatttgggggccttaattgcaatatggacgccgctggtaaactaacattgcccgtctttggactggcgtcatacaaattgaacagctctatttggtcgtcaaataggcctgaggagcatcagctcgtagcttcgttgatgcagacagcagatgactggcttcgccatcgccaagtgtaccacccagacttccgattctttcttacccattacaacacagcattgagatgacatgagatgatcgcatctcgctgtaaattgtctttattagtgtgttattatatgtggttggctgagccgggctacctgtaacactatgttgttgatcgcgtaacgtagcgcttctctgaacttttttggtatggttcagtagttcaagccagacagctaatttgtaacttctccaataattcttttgatgtaggtaatcttgtgggagtcacattatggagatctgtaaaacagaaactgatggttataatttttagaaacttatagactttacattgtttatc

SEQ ID NO: 108427 - DNA, 1810 bp, Zea Mays
ggagggaatcaaccaaccagaagcagccacggtccacggggggacggaacgggaagctgaaccaaacgtgcaaacagaacggaacctctcggctccttcctcctctggtttgctgctgtcgcccgccacggcgcctcctccacttccagatcttcccgccgcccccaaaatagcgcccaccaaaaccctaccctgcccgcccgttccctctcatccctcgcggcccccgcccccgtccttccgccgccggactaataaaccctagccccaccgccgccgccatggcgggcccgtccggcgcctcttcctcctcgcgcggcgccggcgtcgtcgtcgaccgcttctacagcccgccccacgtgcgccgccagcagcaggaggagcagctgcagcggctcaagggcctggcccaggggcagcgcccgtcgtccccagcggcggggacgctcacgcccagggccgccaagcagaagacgccaccggctgagatgcctgtcccggtcaaggagtccgagaggcgggccgacgcgtcctccaagcccgtgtcagccccggcctacaccgccaaggcggctgcgacggctgacggggtgacgaccccgccgccgtcgcccgcgggactggatgaggctgggaatctcgacaggttcctcagctccaccacgccatctgtgcccgtgcactacttgcccaagaccagcatgaggggatggaggatgggtgatgttacaaattctcgaccatatttctgccttggagatctctgggaggctttcaaggagtggagcttttacggggctggtgtcccccttgtcttaagtggaggtgaatctgtgattcaatactatgtgccatacctttccgctatacagctgtacgcagacccttcaaagtttcaatcgaagatcagcgaaggtagcagtgaaactgatgttaaccgattaagaagctcaaccgtggaaactctatgtcgattggagggtggctttcaaagggatggtgatgaaatgcactcaccatcgactcgcccaattttcgaatatcttgagacagatccaccatttggtagagagcctttaacagataaggtatcagttcttgcaagtaaatttccagatttgaagacattcagcagttgtgacctgctgccaaccagttggatgtctgttgcatggtaccctatctatagaatcccaactggaccaacactcaaggatttggatgcatgtttcttgacatttcattacttatcaacacctaccaaggatactgatcccagtacaccagcatgccccagatttgggggccttaattgcaatatggacgccgctggtaaactaacattgcccgtctttggactggcgtcatacaaattgaacagctctatttggtcgtcaaataggcctgaggagcatcagctcgtagcttcgttgatgcagacagcagatgactggcttcgccatcgccaagtgtaccacccagacttccgattctttcttacccattacaacacagcattgagatgacatgagatgatcgcatctcgctgtaaattgtctttattagtgtgttattatatgtggttggctgagccgggctacctgtaacactatgttgttgatcgcgtaacgtagcgcttctctgaacttttttggtatggttcagtagttcaagccagacagctaatttgtaacttctccaataattcttttgatgtaggtaatcttgtgggagtcacattatggagatctgtaaaacagaaactgatggttataatttttagaaacttatagactttacattgtttatc

SEQ ID NO: 108428 - DNA, 1841 bp, Zea Mays
gtgcaaacagaacggaacctctcggctccttcctcctctggtttgctgctgtcgcccgccacggcgcctcctccacttccagatcttcccgccgcccccaaaatagcgcccaccaaaaccctaccctgcccgcccgttccctctcatccctcgcggcccccgcccccgtccttccgccgccggactaataaaccctagccccaccgccgccgccatggcgggcccgtccggcgcctcttcctcctcgcgcggcgccggcgtcgtcgtcgaccgcttctacagcccgccccacgtgcgccgccagcagcaggaggagcagctgcagcggctcaagggcctggcccaggggcagcgcccgtcgtccccagcggcggggacgctcacgcccagggccgccaagcagaagacgccaccggctgagatgcctgtcccggtcaaggagtccgagaggcgggccgacgcgtcctccaagcccgtgtcagccccggcctacaccgccaaggcggctgcgacggctgacggggtgacgaccccgccgccgtcgcccgcgggactggatgaggctgggaatctcgacaggttcctcagctccaccacgccatctgtgcccgtgcactacttgcccaagaccagcatgaggggatggaggatgggtgatgttacaaattctcgaccatatttctgccttggagatctctgggaggctttcaaggagtggagcttttacggggctggtgtcccccttgtcttaagtggaggtgaatctgtgattcaatactatgtgccatacctttccgctatacagctgtacgcagacccttcaaagtttcaatcgaagatcaggcattcttgggaggaaagtgatggggaatctatggatactagcagcgaaggtagcagtgaaactgatgttaaccgattaagaagctcaaccgtggaaactctatgtcgattggagggtggctttcaaagggatggtgatgaaatgcactcaccatcgactcgcccaattttcgaatatcttgagacagatccaccatttggtagagagcctttaacagataaggtatcagttcttgcaagtaaatttccagatttgaagacattcagcagttgtgacctgctgccaaccagttggatgtctgttgcatggtatgtctgtaaatgctcttggattctctgacatcattttcaatgcaactttttgagaggtaccctatctatagaatcccaactggaccaacactcaaggatttggatgcatgtttcttgacatttcattacttatcaacacctaccaaggatactgatcccagtacaccagcatgccccagatttgggggccttaattgcaatatggacgccgctggtaaactaacattgcccgtctttggactggcgtcatacaaattgaacagctctatttggtcgtcaaataggcctgaggagcatcagctcgtagcttcgttgatgcagacagcagatgactggcttcgccatcgccaagtgtaccacccagacttccgattctttcttacccattacaacacagcattgagatgacatgagatgatcgcatctcgctgtaaattgtctttattagtgtgttattatatgtggttggctgagccgggctacctgtaacactatgttgttgatcgcgtaacgtagcgcttctctgaacttttttggtatggttcagtagttcaagccagacagctaatttgtaacttctccaataattcttttgatgtaggtaatcttgtgggagtcacattatggagatctgtaaaacagaaactgatggttataatttttagaaacttatagactttacattg

SEQ ID NO: 108429 - DNA, 1576 bp, Zea Mays
ggagggaatcaaccaaccagaagcagccacggtccacggggggacggaacgggaagctgaaccaaacgtgcaaacagaacggaacctctcggctccttcctcctctggtttgctgctgtcgcccgccacggcgcctcctccacttccagatcttcccgccgcccccaaaatagcgcccaccaaaaccctaccctgcccgcccgttccctctcatccctcgcggcccccgcccccgtccttccgccgccggactaataaaccctagccccaccgccgccgccatggcgggcccgtccggcgcctcttcctcctcgcgcggcgccggcgtcgtcgtcgaccgcttctacagcccgccccacgtgcgccgccagcagcaggaggagcagctgcagcggctcaagggcctggcccaggggcagcgcccgtcgtccccagcggcggggacgctcacgcccagggccgccaagcagaagacgccaccggctgagatgcctgtcccggtcaaggagtccgagaggcgggccgacgcgtcctccaagcccgtgtcagccccggcctacaccgccaaggcggctgcgacggctgacggggtgacgaccccgccgccgtcgcccgcgggactggatgaggctgggaatctcgacaggttcctcagctccaccacgccatctgtgcccgtgcactacttgcccaagaccagcatgaggggatggaggatgggtgatgttacaaattctcgaccatatttctgccttggagatctctgggaggctttcaaggagtggagcttttacggggctggtgtcccccttgtcttaagtggaggtgaatctgtgattcaatactatgtgccatacctttccgctatacagctgtacgcagacccttcaaagtttcaatcgaagatcaggcattcttgggaggaaagtgatggggaatctatggatactagcagcgaaggtagcagtgaaactgatgttaaccgattaagaagctcaaccgtggaaactctatgtcgattggagggtggctttcaaagggatggtgatgaaatgcactcaccatcgactcgcccaattttcgaatatcttgagacagatccaccatttggtagagagcctttaacagataaggtatcagttcttgcaagtaaatttccagatttgaagacattcagcagttgtgacctgctgccaaccagttggatgtctgttgcatggtaccctatctatagaatcccaactggaccaacactcaaggatttggatgcatgtttcttgacatttcattacttatcaacacctaccaaggatactgatcccagtacaccagcatgccccagatttgggggccttaattgcaatatggacgccgctggtaaactaacattgcccgtctttggactggcgtcatacaaattgaacagctctatttggtcgtcaaataggcctgaggagcatcagctcgtagcttcgttgatgcagacagcagatgactggcttcgccatcgccaagtgtaccacccagacttccgattctttcttacccattacaacacagcattgagatgacatga

SEQ ID NO: 108430 - DNA, 940 bp, Zea Mays
gtgcaaacagaacggaacctctcggctccttcctcctctggtttgctgctgtcgcccgccacggcgcctcctccacttccagatcttcccgccgcccccaaaatagcgcccaccaaaaccctaccctgcccgcccgttccctctcatccctcgcggcccccgcccccgtccttccgccgccggactaataaaccctagccccaccgccgccgccatggcgggcccgtccggcgcctcttcctcctcgcgcggcgccggcgtcgtcgtcgaccgcttctacagcccgccccacgtgcgccgccagcagcaggaggagcagctgcagcggctcaagggcctggcccaggggcagcgcccgtcgtccccagcggcggggacgctcacgcccagggccgccaagcagaagacgccaccggctgagatgcctgtcccggtcaaggagtccgagaggcgggccgacgcgtcctccaagcccgtgtcagccccggcctacaccgccaaggcggctgcgacggctgacggggtgacgaccccgccgccgtcgcccgcgggactggatgaggctgggaatctcgacaggttcctcagctccaccacgccatctgtgcccgtgcactacttgcccaagaccagcatgaggggatggaggatgggtgatgttacaaattctcgaccatatttctgccttggagatctctgggaggctttcaaggagtggagcttttacggggctggtgtcccccttgtcttaagtggaggtgaatctgtgattcaatactatgtgccatacctttccgctatacagctgtacgcagacccttcaaagtttcaatcgaagatcaggtaagaagatgatttatacaatcaaaatttgttttatgtttatttttgtcagacatgattttctgttcttcaatagccttgctttataaatgtgagg

SEQ ID NO: 108431 - DNA, 973 bp, Zea Mays
tgtgccattttctggcctcattatattcatttgcatcaatgatgcagcaccaaaaaatcctaattctaagctgacatactgctcgaaaattgtgggatggaggagagagcaaaatacttggaacataatgcgtgtgtgccgccacgatatcatcactcatgcagtcgaagcagtgctctgccccgaggtcggcgctggcgctggtacgctggcgccataagctggggcatcaggagacggggcgccgtaggcgggggcgccagccgacgagccgtaccctccggacggcgccgacgcatccgacggcggcagtgcgacctcggccgacatggagccggaagcctcggtgatgaggtccagcgtgacgcgcagcagcttctcaaactcgaagctcttggttatgcagacgttcttgatgtcgctgacgggggcgtccttgcaggcgtcctcgcaggtggcggtgccgccgagcgtggaggtgagccaggacttgacctcgaggaacctggcgtcggagaagtcgcgggagagggcgctgaggtgcgccacggcttcctcgatgtcctcggagcaggtgtcgatgcacttgtacaggacgtcgtcgtccttgatggcgttgagctcgtggtgcgcgaacgcggccacggtcatgcccacctcggccgacacgtacacgagcagctcggccagccggcgcggcgtgaccgccgtctccgcctggcactctgggttgtccttgagcgcgtgcatgcacaccttggggaacagcgtcttgttgcacgcctcctggaggtatccggggccgccggcggcgtcggtgatggcccgcacggcgggcgcggtggagataaggaggatgggaaagaagaggtgcgcgacggagcgagccatagccatggcgcgtcgcggcgggcgggcggagacggtgtgtgtgtgtgtgtgtcccctcctttgtggtctgtggttccaggcg

SEQ ID NO: 108432 - DNA, 96 bp, Zea Mays
gatcatgtagtagatatatatgttctctatgagaagtgtcgcagggctgaggttgcaacgtctgatttagttataaagtacttcaaaaacatcact

SEQ ID NO: 108433 - DNA, 1698 bp, Zea Mays
aaaaaatgacacgatcgcaggagaaaccaaagaaaagttcctttttctttattttcttcgtcctcttgttctcgactcgctgcccactgcgtcacccgaatcccttcgatccaatctccaaaccctaggcagcccgccatcagattgttaggtcctccttccttaaaccgcggcggccggccatgtcccacggcggcggcggcgggagggcgaaagtgacgccgaacctggcggtggacggcgagggcacgcggacgctcaatctcaccgtgctgcagcgcctcgaccacgccgttgaggacatcctcatcaccgcggctcacgtcacgctctacgacttcgacaccgacatcaaccagtggagccggaaggacgtggaggggtcgctctttgtcgtcaagaggaatgctcaacccagattccagttcattgtcatgaatcgcaggaatacagataatctagttgaagatcttttgggagattttgaataccaactacaagctccttatataatgtaccgcaatgctgctcaagaagttataggaatctggttttacaattcccaggagtgtcaacaggttgcaaatcttttcagcaggattctgaatgctttctcaaaggtggcaccaaagccgaaaattccttctgtccaaagtgaatttgaagagctggaagcagcaccttcgttggttgatggtcctctggaagcgcaaacgtcaaatatcatgtcaactactactcacgttcaagaggatcctttatctgcatttttcagtgcagctgcaaatgttggtggcaactctgctgtagctgttgcaaggcaaccaattcagccttttggtgctactccggtggctgcacatgcagctactagtatcactacaacacaatcgccaggcttgcattatttgcttccttcacaagcctcatcggtttctgggaggcctgctgatgctcatggtggcactggttctataggaaggtccacaagccttgtatatccgtcacttttctcaccattgacatcttcacagacgaaaatggtgcacactaattctgcagtaccaactgctccacctcaacatcctcggattgctcagcagccgcaaagtgctcccttgcttcagccttttccgttacctacggcttcatctccaccatatgggactccattacttcaaccgtttccgccacctaatccgtcgccatctcttgcatctgcaccagtcttgagcccagcgctgactagagacaaagtcagagatgcattattgagacttgtggagaatgatgaattcgtcgatttagtctaccgcgagatcatgaacagacagtaatggatttacaaggtcttcaacgattacagttggaggtttgcatgatcgacttgtttgcaggctcgtgcatgaagaagggcgaagatcgttccctctggccgcagactgctgatctgtgcggtcagtgaatgctgctgcttttgcatagaactgcaagatgttagtcagtcatttaaccaaatatgcagggcaaagtaacagggaaatcatatatctgggttagggatacaagaggttaacctagtgtttctttctttttgtggaccgagatcacaatccagtatctgtgttagtgagcctatgaccctatataatcaatgttatgtgggctgtcgcattgttgacccccgccaattaagcg

SEQ ID NO: 108434 - DNA, 1592 bp, Zea Mays
aaaaaatgacacgatcgcaggagaaaccaaagaaaagttcctttttctttattttcttcgtcctcttgttctcgactcgctgcccactgcgtcacccgaatcccttcgatccaatctccaaaccctaggcagcccgccatcagattgttaggtcctccttccttaaaccgcggcggccggccatgtcccacggcggcggcggcgggagggcgaaagtgacgccgaacctggcggtggacggcgagggcacgcggacgctcaatctcaccgtgctgcagcgcctcgaccacgccgttgaggacatcctcatcaccgcggctcacgtcacgctctacgacttcgacaccgacatcaaccagtggagccggaaggacgtggaggggtcgctctttgtcgtcaagaggaatgctcaacccagattccagttcattgtcatgaatcgcaggaatacagataatctagttgaagatcttttgggagattttgaataccaactacaagctccttatataatgtaccgcaatgctgctcaagaagttataggaatctggttttacaattcccaggagtgtcaacaggttgcaaatcttttcagcaggattctgaatgctttctcaaaggtggcaccaaagccgaaaattccttctgtccaaagtgaatttgaagagctggaagcagcaccttcgttggttgatggtcctctggaagcgcaaacgtcaaatatcatgtcaactactactcacgttcaagaggatcctttatctgcatttttcagtgcagctgcaaatgttggtggcaactctgctgtagctgttgcaaggcaaccaattcagccttttggtgctactccggtggctgcacatgcagctactagtatcactacaacacaatcgccaggcttgcattatttgcttccttcacaagcctcatcggtttctgggaggcctgctgatgctcatggtggcactggttctataggaaggtccacaagccttgtatatccgtcacttttctcaccattgacatcttcacagacgaaaatggtgcacactaattctgcagtaccaactgctccacctcaacatcctcggattgctcagcagccgcaaagtgctcccttgcttcagccttttccgttacctacggcttcatctccaccatatgggactccattacttcaaccgtttccgccacctaatccgtcgccatctcttgcatctgcaccagtcttgagcccagcgctgactagagacaaagtcagagatgcattattgagacttgtggagaatgatgaattcgtcgatttagtctaccgcgagatcatgaacagacagtaatggatttacaaggtacagtcctctccatcaggctagcttgtgtttggactctgtcattatctgttgtttagcctattccaagttatcctgtaaattattattgataaaatccttcggttggtggtgtttgtactattaatgtactttctacatctgtataaatggttataaaatctgtgctgtattcgtggcgcagaaaagttttgttctgagttgtatattgaaacttttgctcaaccgacctttttttttggg

SEQ ID NO: 108435 - DNA, 2110 bp, Zea Mays
gcttccactggactgcaagctgctgctgcccctctcgttgaagagatctcgtcgaaagccctctcggtctctcccgcggtcccgccccgtgccgtgcccgtgccctttctcccaatggccgcctcctccgacgaaccgtagcgccgcggacaaccagcaggtcgcttggttccagatccccactcagacacgtcacatcgcatggcggcgaacgcggcgcagcaggacccgcgcggccaacggcggctctgcggcgggggcgggggcggggccacggcgtgcgtgcgcccacgcgcctggtgctgctccttctccttctccggcgtgcccgacagccccgacctccgcccgctcccctcctcggccgcgtccccgccggcggggaggaagttgccgcccaagtccccctcggcggcgtcattctatggctcgccgacttcatacaggctagcgggcctcatcgacccgcgccgcatcctctcacccggccgcgtctcccctatcgatcacgacggcgcggtcccgccgcccctcccgctccctccgccgccgccgccggctgcggccgccgctgacgattcggcagttgtgatccccgcagagcggctggcgtcggcattgccatctgccacggtggcgccgtcgctggtcgccgtgcgggaggaggcagacgcggctgggatgctcgatctgaggttgttgctgcggggggcacacgggaggtgcgtcctcatggagctcgactccagcgtgctgtgcggctgtagcgacttcttcgccgccatggccccgcgcgaggatgctgctggcgctggtgggaagaggctcgaggtggacggggtggagaatttggatgctttctgcgccgctgtggagctcatgtacaatcctgatccaatagggtgtcttgcagctgctggtgtgtcaagggccatagatgtgcttgaggtatgctcctctatcatgttcagcaagggaatcaaatcatgtttgacatacatagaagctgttccctggaatgaaaacgaagaggagaagctgaagaacctctttgcaagattcacttttgacgaagcaatgtcccaggatatactggcaagattgcgtccgcacaactggaaaagctcagatgacctcactatacagcttattcaatctgtcactggaagcaccagcactgtggcaagaaaagacatgcaatctttggtaaatggtcttctaagcaaaagttcagtctatcaaaaggactcttcagggctaaacaaggagagtctgtaccagatatgttattcatgtcttgagtcactggttgatctctttgaagaggccagagaaccaacagattatacaggtcagattcttgtagttagagggagtaaaccactgattgagcgagtctctaggcaaacagagaacctcagttggctcttggatattctagtaaacaatgacattgcagaagaatttgtagaactgtgggcgaagcaagacaggctcattaggatgcacgaacaagcgtcagcgatggtcaggtatgagctaagccgaatatcagccgctgtgttcattgcacttggtaaaggaaaagttcagtgtcgtggcaatgtacgaagcctcgtctttcgtggatggttcagcacgatgttgttggattttggctggcttcagcgctgccccaaaggtctagacctaagatcactggaggagaatctagggcgaggcattttaaccctccctctgaggcagcagcaatgtttgtttgaagaatggttccagttctattcgaccaaaggtgctgagtgtccgaaccttattagggctttccaggtatggtggagaaggtctttcgttagatcgtcggtagaacctcaaaggtaagcttttttcttgatgtactagtatgtgttgtgtgtatgatttgtaagattggagctaaatgttttgtttactttagctcttcccattgtatgtgtatagttgggtgaatttgtttgaggatagcagctgtgatgtacagtttatcgcagatggtatggttcttaaatcaataaaactctatccggtcttatgtcgaacttttgtagtaaaatatatgctaatctatctaacc

SEQ ID NO: 108436 - DNA, 842 bp, Zea Mays
tagaggaacggaaaccatccatactgggtcatcctgttttgtcactttctgactctccagcctttttcattttgctcctctgttgcctcaattttttttatattttatactccagtcattgcaactggttatacttgaatttgtttcacaataataccatattacatttacatgtacttgattacttttgagcaaagcattcattggatcctcctttttgtgcaggctggggaattgcattcgtctctcaggactcgtgtttgcagttttgatatatttaacatgcttccctcaaaaaattgtagcaacttcgatagaattgagtcccttatgctgcagctattgagcatatcttattttggtaaagttaaacgagtttgtttgcaacgtgctttgatctttaaagtctagaatttttccggaacaaacttataaatcctccatgtgcccagttcttcagttgacatgctagatttctgaatgcagttgctatcttctggtcccataaataatagtactcacatcacatatgctggaacccagaagcatcacatatgccccaaccacccaagagtactacagtgctgggtgctcctcaactaagtgcggtggtacttcttctgtttctcatgtgcgcctaggaccatgcatggacagccttcagagcaactggcggtgaccacaagagagagaactgcctccgtgcatagttgatggctcgacgtcctaaaggggaggaaagcgtggttgatgtctctaaattttggtaagacaagcttggcctcttgttgccatggttgagttgcctacctgcctggacaagaggcgtcaacgagtgtgtc

SEQ ID NO: 108437 - DNA, 1773 bp, Zea Mays
atggagcaggagctgctgcagatcctgcggggcctgaaatcgccacgccacctgctgcagacccacgcccagctcctcgcccgcggcctctccgcgagcccgcgcctactcccggtcctcgtctccgccgcgttctccgtctccccctcgtccccgcgccaggccgccgccgcggcgatccttggcgctgccggctccggcgcctccaccgtagcgcacaacaccctcatcgagcgcctcgcagggatcggcggcggcggcggcggcggcggtcgtggttgctccgcggcggacgcgttggcggcctacgctgcgatgcgtgccgcaggggtgtaccccaacgggttcaccttcaccttcctgcttcgcgcgtgcgaatccttgaggcggctgttcctgtgccggtgcgtccatggacagatcgtgaggtgtgggttcgggtccgatgtggtcgtgcagaacgctctcctgaacgtgtactacaagtgcagcgacccgggtgatgttggaatcgctcgccaggtgttcgatgaaatggctaatagagacgtggtttcgtggaactccatagttggtgtgtacatgtcgaatggagacgcagcaggggccatggagttgttcgaggcgatgccagagaggaatgttgtctcctggaacactattgtcgctgcattcacgagggcgggggacatggtgtcagcacgtgctgtgtttgataggatgccgatcagagatgccatctcttggaatctcatgatctcagggtatgcaacaagtggcaatgttgaatctgcatggtcactttttgatattatggatcggaaggatgtagtttcctggactgctatggtctctgcttatgcaaagattggggaactagattcagctagagtgctatttgatcagatgcctgataagaatttggtttcgtggaatgcaatgattacagggtacaaccacaacttgaggtatgatgatgcactgtgcacatttcagcagatgatgcttgagggaagattcatgcctgatgaagcaacattagtaagtgttgtctcagcctgcgctcagctaggcagtgttgaatactgcaactggatcagttcttacattagtaaaagcaacactcatataaccgttgcattaggaaatgcactcgtagatatgtttgcaaaatgtggagatgtaggaagagcacatttagtttttaataaaatgaaaacaagatgtaccattacatggacaacaatgatatctggttttgcttataatggacagtttagagaagccctattggtctacaatgatatgtgcagagaaggagtcacactggatgatacagtctttgttgctgcacttggtgcttgtgctcatggaggtttgttgcaagaaggttggagcatctttaatcaaatggttgagtactgtcgcattgttccaagaatggagcactatggatgcatagtggacctacttggtcgagctgagttgtcagagtatgtcagcacaaagatagttgaaatggaaccttttaattctagttatcaagtgttggtttcaaattgtagtgccctagagggaaggtgggacagtgtgatggatgctcgcagaacaatgcgtgattgcggagttgagaaaacacctggtagtagcttgattcaggtaggaaatgaggtacatgagtttttggctaaagacacaaggcacaagaaaaggaaagagaaaatgaactgtattttatttaagattgatggggccaccattgacaccagctga

SEQ ID NO: 108438 - DNA, 2929 bp, Zea Mays
cagcacccagtatgatttggttggcaaaggatgttttctccagaataatgaaagtttagcttctggttcattttattgtctggtcgatcttttttatactgtgataaaatggggaagcactcagctgaatctggggttagtatgttgttgcatggagacttggacatacaaataattgaagcaaaatgtctccccaatatggatctcatgacagaaaggatgcgaaaatgctttactgggtatggagcttgcagcaatgattgtgggaagtcggaaccaccacacccggacatgagaaagatcatcactagtgatccatacgtttcagtttgtctgtcaggagcaacggtggcacaaactcgagtcattgccaactcggagaaccctaaatgggatgaacacttctatgttcaagttgctcattcagttagcagagtcgagtttcatgtaaaggacaacgatgtttttggggcagagcttatcggcgtggcttcaataccagttgagcacatcatgccaggtgatttggtcggtggctggtttcccatttctggtcagtacagtaatcctatgaagccatctcctgagctgcatttgtctatccagtataagccaatcgacacaaacccactatacaaggatggagttggtgctgatggccatcagagtgttggtgtcccaaatgcatatttccctcttaggaagggtggtaaggtcacactatatcaagatgctcatgttcctgacaattttcaacctcatattgagatggatgatgggaggacatatgaacaaaacaaatgctgggaagatatttgtcatgcaatcattgaggctcatcaccttatctacatagtcggctggtccttgtatcaccctgtgaagcttgtaagggaatcaacaaaacctgttcccaatggaaacccagtcactattggggaaattttgaaacgcaaagttcaagaaggagtccgtgttatagtgttgctttgggatgataaaacatcacatgacaaatttctcttaaaaacagatggtctcatgcatacacatgatgaggaagctcgaaaatatttcagacattcaggtgtccattgtgtgttgtctcctcgctatgccagcaacaaacttagcattttcaagcagcaggttgtaggaactttgtttacacaccatcagaaatgtgtcattgtagacacccaagccacaggaaacaatcgaaaaataactgcttttattggtggtctagacttgtgtgatggcagatatgatacacctgaacacaggcttttcaaggatttagatactattttcaaggacgatttccacaacccgacattccctgttaataagaatggacccagacagccatggcatgatttacattgtaaaattgagggtcctgctgcatatgatatacttacaaactttgaacagagatggagaaaatctgcaaagtggaaagttagcgtcagaagagctgtgagttggcatcatgatacattggtaaaaattgatcggatgtcatggattgtttccccctcttcagatgaattaaatgcacatgtttgtgaagaaaaggaccctgaaaactggcatgtacaggttttccgatcgattgattcaggatctgtaaaaggattcccaaaacttgttcaagaggctgaatcccagaatcttgtctgtgcaaagaatctgcagatagacaaaagcatacacaatgcatatgttaaagcgatcagatctgcacagcacttcgtctatattgaaaatcagtactttattgggtcttcatactactggtctgcacaccgaagtgcaggtgctgagaacttaataccaattgaattggccataaagattgcaagaaagattaaggcaaaggaaaggtttgcagcatacattgttataccgatgtggcctgaagggaatccgacaactgccgctatgcaggaaatcctctattggcaggggcataccatgtccatgatgtacaagattgtcgcagatgctctacgaaaggagggtttacatgaaaggcatccacaggagtacctgaacttctattgccttggcaaacgtgaagtctcgaatgaagttccgacgacaggcaattctaatgagaactctgcagtgcgtttgtcccagaaattcaagaggttcatgatctatgtgcactcaaaagggatgattgtggacgacgagtatgttctcatcggatcggccaacataaaccagagatccatggacggctcacgggacacggagatcgccatgggtgcataccagcctcactacagctgggctggaagcggcaggcctcccagaggacaggtgtatgggtacaggatgtctctttgggcggagcacctgggcacagtgcaggagtgtttccgccggccagagtccgaggagtgcgtgcagcaggtgaaccagatggcagatgacaactgggcgagctatgtctcgccgcagatggcggatatgaagggccacctcatgaagtaccccgtgagggtcgagcaggatgggagggtggggccgctgcatgggcaggagagcttcccagacgtcggtggcaaggtgctggggacgcactcgtcgctccccaatgcgttgacgacgtgagtactgagttggatgtagctcgaagaagctcgaaggtggcaggctggtaaatggtgagctgaagctctgctcgtcagaatcactggacgtggtgcaacaaggggttgatacattggaaagttgctgatccgatttctagctttaaggctgtttgtatgtatatttatattgaaaaagcgaaagatgtgatatccaagatgaatggagactaatgagaaaatgtttgcttcaattagcttgtggttacaactgattatatattgaggacaaaaaccttcaaaaaacgatcctcttcacggtt

SEQ ID NO: 108439 - DNA, 1263 bp, Zea Mays
cagcacccagtatgatttggttggcaaaggatgttttctccagaataatgaaagtttagcttctggttcattttattgtctggtcgatcttttttatactgtgataaaatggggaagcactcagctgaatctggggttagtatgttgttgcatggagacttggacatacaaataattgaagcaaaatgtctccccaatatggatctcatgacagaaaggatgcgaaaatgctttactgggtatggagcttgcagcaatgattgtgggaagtcggaaccaccacacccggacatgagaaagatcatcactagtgatccatacgtttcagtttgtctgtcaggagcaacggtggcacaaactcgagtcattgccaactcggagaaccctaaatgggatgaacacttctatgttcaagttgctcattcagttagcagagtcgagtttcatgtaaaggacaacgatgtttttggggcagagcttatcggcgtggcttcaataccagttgagcacatcatgccaggtgatttggtcggtggctggtttcccatttctggtcagtacagtaatcctatgaagccatctcctgagctgcatttgtctatccagtataagccaatcgacacaaacccactatacaaggatggagttggtgctgatggccatcagagtgttggtgtcccaaatgcatatttccctcttaggaagggtggtaaggtcacactatatcaagatgctcatgttcctgacaattttcaacctcatattgagatggatgatgggaggacatatgaacaaaacaaatgctgggaagatatttgtcatgcaatcattgaggctcatcaccttatctacatagtcggctggtccttgtatcaccctgtgaagcttgtaagggaatcaacaaaacctgttcccaatggaaacccagtcactattggggaaattttgaaacgcaaagttcaagaaggagtccgtgttatagtgttgctttgggatgataaaacatcacatgacaaatttctcttaaaaacagtaggattctttcctcccgtagaacctcttcatttcctactttgctgaaattgatatatatcgaaactattttactattttgcttaaatggtcgtcaaggggtagacagatagcaaacatgcactagatagtactcttgtctatttaccagatgataatgatgaaaggaagaatcaagaatgtaataactgaaaaggtagatgtattttgatgatgtgtaattccttactt

SEQ ID NO: 108440 - DNA, 219 bp, Zea Mays
atgagcgcccagtatatgctacagcaccggcgcccctggccctgccgcctgcgccgctcgttgccctgtgcactccgcgggcctcgggaatggccaaccaggacatttatcggtttgcccaccctctcctctcttctcttctctctcgcccgctctccctctctcccttctctccggcttccgattgggtattgtttattggcttctggctttaattaa

SEQ ID NO: 108441 - DNA, 637 bp, Zea Mays
ctttgggaaggagtttactcatgccattgaagcgaagcaggttgcggcacaggaagctgagcgtgctaagttcattgtcgagaaagctgaacaagataagagaagtgcaattatcagggctcagggagaggctaagagtgcggagctgattggtcaagccatagcgaacaaccctgccttccttgccctgaggcagattgaagctgcaagggagatctcccacaccatttcggcctcagccaacaaggtgttcctggacttcaacgacctgctgctcaacctccagcagctgaatgtatcggagcaagcagaagaaatgatgtcacaacgttattccctttcttctgaattttgcagtcagtagtggatgcctttgtaccagacattgtggaggaacgctcggtttggatgtagtttcgccaatcttcctgttatgtggaacttgcgagtatttgctcaaaggcaagcaagctgacaggttttgtttaaacgtaactacaggatgagaaagttttcaataaggaacaaattctgttatgccaccaggaattacccctattgagagaaaattctcaacatgccactataattttaccatttgtcatctatcatcataaatgtcctaatgtttttctac

SEQ ID NO: 108442 - DNA, 192 bp, Zea Mays
atgcccgtcgcctaccccgcgcgacaccagccgccgcctaccccgcgcgacaacgtccgtgatgcccgctcgtccacacgtctacaccgtgcccccgcctccgtcattcccgccccgcccgtctccagcgtgcacgccgcctccttcccgataatgccgccgcttcccccacccccgtccatgcccccgtga

SEQ ID NO: 108443 - DNA, 1584 bp, Zea Mays
tacgttttactgtattaaattacgagcattagaagtttaagatgactctgttgttgtatccgtctgattgatattttaatttttacaataaatctagttcgagaagttaaaccaaaccccttattttagagaccaaaccaaaaaccaggaaaaaaaatccacaaaggcacaaagatggaaaaggtgtattggactctttttaaagctaaaaaaacagttcaaaagattgctgcttttcgcttcagtgctgctccgattctgtttcagaagattaacaatttgaaattgtgacgatcctaattgccatcttctcgataataatgaggaaaaaaagattgacgcgcttttcgtgtcctcagaaactgcgggtttgctgaaattctcctccactttcccaagcaaagaacaaagaaccgcccttgttctctgcgactctgcccggccggtctccgaggcgggcggagggaaccagagagcaaggcgaggagcgcggaagggctgagggaaggggcggcggggcatggctcgccggccggcgtcgtgggagcagggcggcgacgagtacgactatctcttcaaggtcgtgctcatcggcgactctggcgtggggaagtccaacctgctctcccgcttcaccaagaacaccttcgccctcgactccaagtccaccatcggcgttgagttcgccacgcgcacactccaggtggagaacaagattataaaagctcaaatctgggacactgctgggcaggagaggtaccgagcaattacaagtgcttactatcgaggagctgtcggggcgttgctagtctacgatgtcactaaagtaatgacatttgagaatgtgaagaggtggttgaaggagctccgggaccatgctgactcgaacatagtcgtaatgctcattggcaacaagactgaccttaggcacctgcgctctgtcgccgttgaggatgctgcaagctttgcagagagcgaaggtttgttcttcatcgagacctctgcgctcgatgcgacaaacgtcgagaaggccttccacaccgttctagccgagatctaccggataatcagcaagaagcccctgtcttcggaggagtctggtttggggtccggtaacctcagagagggacagtccatccaagtgtcagccacaaattctggcgcccttacgtcgcggtgctgctcttcttagagccacgcccaccaggatcatctgaagaacaacagttcgtcaagaaggtcctctcttccgagtcgaaatatttactcccctttgtgtgaacaataagcgtagatttaaagaatgtcagactcagacgctgactatatatacttgacctgcatagtcatgttccgtcgagaggtgctgtgggagaaaagttgtattgctctcgagcatagaagaaggctgtgtgtatcagaccccagcaaagctgcttgctattaaccgtggcagggtagtctctgtgattttgcagctataattttgttgggggttagttactatgactgcggagggtgtcgtggcttgtggcaacttgattcccgacgtattatagaatcctctttgctatccgtttggca

SEQ ID NO: 108444 - DNA, 1782 bp, Zea Mays
gtcggtttcctttttccatttcatccctcccactccgtggtccgtgcggcctcctctgccggcccgcagcccgctcggcaaccagacgtccagacctctttgggcgaccgtgactcgagccgttggagatccacactttcctccctccatcgtttctcgatctctcgaccgggcgagggcgacgccgcccgcgcgcgcgccatggatgtggagtacgacgtgatcgtgctgggcaccgggctcaaggagtgcatcctcagcggcctcctctctgtggaccgcctcaaggtgttgcacatggacaggaatgactactacggcggagactccacatcgctcaatctcaatcagctctggaaacggttcaagggtgaagaaacaccgcctgcgcacataggagctagcagagactacaacgttgatatggttccaaagtttatgatggcaaatggtaccttggttcgtgtgctcattcatactggtgtcaccaagtacatgtccttcaaagctgtggatggaagctatgttttcaacaagggaaagatccacaaggttccttctactgacatggaagctctcaagtctcccctgatgggattgtttgagaagcgaagagctgggaaattcttcctttatgtccaagattataaggaaaatgacccaagtactcataagggttacaaccttactaaactaacgacaaaagaacttatctcaaaatatggtttggatgataatacgatagacttcattgggcatgcagtggctcttcatagagatgatagctacttgacagaacctgcaattgacactgtaaaacggatgaagctttatgcagaatcagtggctcgctttcaaggaggatcaccatatatttatcccttgtatggtttaggagaactgccacagggttttgcaagacttagcgctgtttatggtgggacctacatgttgagtaagccagagtgcaaggtcgaatttgatgatgaaggcaaagtttgtggtgttacctcagaaggggagactgcaaaatgcaaaaaggttgtctgtgatccttcctacctacctgacaaggttaaaaaaattggaaaagtttttcgggcaattgctatcatgagccatcccatcccaaatactgctgaatctcactcagtacagatcatattaccacagaagcaacttggccgcagatcagacatgtatgttttctgctgttcctactctcataatgtcgcatcaaaaggcaaattcatcgcattcgtgtcagcacaagcggagactgataatccagagaaggaactaaagccagggatcgatcttcttgggaaggtggacgagttatttatcgacatatatgacagatatgaacctaccaatgactcatcagcagacaattgtttcatctcaacaagttatgatgccacaacacactttgagtccactgttatggatgtactttccctttacacaaagatcaccggaaagactgttgatctcagcgtggatctaagcgctgctagtgctgctgaagatgatatgtgatacttatcgtagtgctatgtggcgtagtgtggaaaatatttaattaagctttgctttggcaacgattattaggttcacctttatttttccaattgttgttattagctgtgttgtgaccatgattaaagattgcatgctgtaaatttgaaggcattttttttatcaaaagttgttaacgcggtgatccgtgtttagatttttgaagggtaactacactggtggtatcaaaactaaaaaaaa

SEQ ID NO: 108445 - DNA, 6086 bp, Zea Mays
atggcaggggagctggggcagcagacggtggagctgggcgcggtggtgcggcgtgcggcggaggagtcttatctcgctctgcgggagctcgtggagaagtcgcaggcggaggccgaggggaagggcatcggcgccggagccaatggcagctggcagcggtccgacaccgagaagaagattgacttgctcaagttcatcacacgcacacgccagcgcatgcttcgtctccacgtccttgccaagtggtgtcagcaggttcctttggtccattattgtcaacagctcggatcaactctccacagccatgaaacatgcttcacccaaacagctgactcgctgttttatatgcacgagtgcttgcagcaggctcgggctcctatgttcgatgttccttctgctattgaagtcatgcttacagggggttatcagaggcttccaagatgcatagaagagataggaagtcaacataaactttccccagatgaagaaaagcgcgctctgcgaaaattagatgctagcgtgcggtacagagtacttgtgacaccaagacctaaagaagtatctaatgtttcagtaactgatgggatagctgttttccgtgtggatggagaatttaaaattcttcttacattaggttaccgtggtaatgtagacttatggaggatattgcatatggagttactggttggtgagaagaagggtcctattaaactggatgaaagtaggagatttgctcttggtgatgatatagaaagaagaatggcagcttctgagaatccctttgcagtgctatatgctatacttcatgaattctgcatctctcttgctatggacactattattaagcaagctaatgttcttcgacagggaaggtggaaagatgccataagatctgaactcatctctgacagtgccactgtacaaacgggaaatactcctctaatgcagcttgttcaagatgcggagttcgattcaagtggttttaagatacctggcctgaaagttaattactggctagatgagaaaagcactagcacagcagaacctgattcatctccatttattaaaattgaggcagggctggacatgcagataaagtgtcagcatagttcatttatacttgatccatttacagataaagaggcgagcctttctcttgatctaagttgcattgatgttgagcaacttattttgagagcagtttcttgcaataggcacacacgccttcttaatattcagagacaactgtgcaaaaatgtccaaatttttcagtccccaaaagatgttgtcttgacacgagatgttgcagcagcgaaggacccaatgatgaatgcggagaagggtttctcagattgttttgggaatgaagtgcttcaagtaagggcatgtggtcaggcatatgttagtcttggaataaatatcaggagtggccgctttctcctccaatcaccagaaaatatattaccccgtgctgcacttatggactgtgaggaagctctaaacaaagggagtacatcagctaccgaggttttttcaagccttaggaccaggagcattctccacctacttgctgcaactggaagtttttttggccttaaggtttaccagcagtctcagggcactctgaagattcccaagaccttattacatggctcagatttgatggtcatggggtttccacattgtgcaaatgcctattatctgttgatgcaacttgataaggacttcaggcctgtttttcatttgcttgagacacagtgtgatgcaaatggtaatactaatgcaagtggagatgtgaaagaagctattagatataacaaaatcaatataggacagatgcaaatacttaaaaatgagatgaatgagaacccttttgatgtgaagctgcaggccctacaaagtttagtggactctgctgacatgatggagagtgatcttcctgtccaaaatgcaattgaacctcttccactacttcctgcttgttcaccatcattttcatctattgttgatgaggttttcgaatatgaacgtggttctactgctgcgcagaatcgttgtcttccagttgatattcaaggaataaatgctagggttgtctcaccaatgcatgatggatgcttatcttatacccaagctaataataacatgaatgttcatcctaatgtcagtttgaatagctatttcccaagtaactttagacatttacaaggtacaaacacattttcttcaaaccctgtaatgtctatgaccaaattgtcaggttctaattctaatcatgacctgtgctcgctaagctctccatatgactatgacattgcaggtgcaaataaatcacttcagcttgtgccttcaagattagggaagctcatcactgctggttctgatggtgcatctaggaaacactatctttcagatttcttatcaagtatcccttcattacgaggactgcaacctagtgagccaagaaagcggagaaaaaaaacagaatcagtgcagagtctcctgcctttgcaggcacactcttctaatttgcaatcaagaggcagtctcacctatggagatgttcttgctgaaagaaataattgtgttccggcaactatatatgcttctgtgctactacatgtcataagacactgttcattatgcatcaaacatgcccaactcactgctcagatggattcccttgcgattccatatgttgaagaagttggtctgcggagaccatcgtctaatctttggttgagattaccttttgcacaggatgattcttggaaccatatatgcttgcgccttggtaaggctggaagcatgtcttgggatgttaggataaatgatccacatttcagggaactttgggaacttaatggaggaagcaccaaaacacaatggggtgttggcattcgcattgcgaatagctcagaaatggattcacatatctcatttgattccagtggtgttgttttaacttacaacactgttgaggcagatagtgtccagaagcttgtgtcagatttacgccgactttcaaatgctcgttcttttgctcttggaatgaggagactgattggtgtgaaatttcaagacaagctagatgacaaccagttaaccatggaggtgaaatcacaatctgttaataaaggtaacagtgatgctgctgacaagctatctgagcaaatgagaaagacattcaggattgaagctgtcggtctaatgagcttatggtttagctacggcaccatgcctatggtacacatagttgttgaatgggagattgctaaggctggttgcacaatgcacgtttctccagatcagctttggccacacacaaagtttctggaggatttcgtgaatggtggagaggtagcatccttcttggattgcattcggcttacagcaggaccattacttgcccttggaggtgcaattcgtcctgcaaggatgcctgttgctgtctcatctggatatagctctatgccaaaacagccgaacatccccacacaagggcctttagtaaatggttcatcttcaactatacatcacgcacctggcccctcaaatgctgcatctgcccatttaggcagtcataaccttcatgctgctgccatgctttcagctgttggacgcggtggacctgggcttgttcccagttcattactgccttttgatgtttcggttgtacttcgtgggccatactggatacgcattatatatcgcaagaaattttctgttgacatgcgctgctttgctggggatcaggtttggctccagccagctactcctcctaaaggtggaccttcagttggtggatcgttgccatgcccacagttccggcctttcataatggaacatgttgctcagggtctaaatgctcttgaacccaacttcatgaatgctacacaggctagtggacacttaaataacaatgcaggagttccacaaactgctcctagtgcaaatcgtttaaatgctacccctggtgtttctatggtcaggccaacatctggtgttgctaaccatgtagcagccagtttgagtcgagcaggaaatgccatgttggcttcttcggctcttgcttctggtattagtggaacttctgtgcgacttactgctggagctggtctccctgttcacatgaaaggtgaactaaacacagctttcataggactgggggatgacggtggatatggtggtggctgggttcctttggcagctcttaaaaaggtgctgagagggatcctaaagtacctaggagttctatggttgtttgcacaattgcctgaacttttgaaagaaatactaggatcaatcttaaaggacaatgaaggtgctctcttgaatttggatcaagagcagcctgcactccggttctatgtcggaggatatgtatttgcagtaagtgtacatcgggttcaactgcttctacaagttttgagtgtgaaaagatttcaccaccagcaacagcagcagcaggctcaaagcaatgctcaggaagagctagcagcagttgaaatcaatgaaatatgtgactactttagcagacgtgttgcctccgaaccatatgatgcttctagagttgcttcttttatcactttgcttacattaccaattttggttctgcgcgagtttttaaagctgattacatggaagaaaggtctttccccggttcatggggacattgctactgcacagagggctcgcatcgagctttgtttggagaatcactcaggatcagcttcgtctgataacaccgagaacagcagtttagccaagagtaatattcatcatgatagagcccacagttcagtagaatttgccctgacatttgtacttgaccatgctcttattcctcacatgaatgtagctggaggagctgcctggcttccatattgtgtatctgtgaaacttcgctattcttttggggacaacaatcatatagctttccttgctatgaatgggagccatggtgggagagcctgctggttgcagtttgaggagtgggaaagatgtaagcagaaggtttcaagagctgtggaaactgtgaatgggtctggtgtagctggagaggtaggccaaggaaggctgcgaatggttgcagagatgatccaaaagcagcttcaactctgtctacaacagctaagagatgacccactttctgcaggctcgactgcatcatgaacttgcttggaatgagctctatcaaggccattgatgtctgtcatattcagcatggcctttggctttgttaacgtgtagatgtgaaggaatacacatttggtagcagtgacagtttcgcctgaggcttgctcagatgacaattttgtacagtataaatggtggcggttgactctgatggacctttagttagcccatttgaacgtggcctgtaacatagctagggtgggtaataatgtgccaaggtggaattgctcagggatgcaaaatgatcttcgggaattggttgtctgtatcatctactgtaatcgtgtcctttttctccctttctgatggatagttcatttttggattcgttatcatctttcttctgtctgtactatgttaatctagacattggtggatctggtatatgtgttgttgtacatgatatattggcactggacttgagactgacgcatttgacgtcttagtattagcaggacatctctagttgtgttcagagtgattggacacaaaaaatattgcttggagcttttctttagggctagtttgggaacttaaatctcgaccccatagattcctggagaagatttgagttcccaaactagttcttaatgtttcttttttttttctattgcatcttcttagtaaatgatgtttttgtaactgtaaaaaccgtgccggtcaagattgatacctggatggataagatgatgttgggtcagatttcttgctcatggttaggaaattgatgtgagcactctggccagtttgtttgaaactgatattcgtgagttgtgattggaagcgtatggataggctttttaatcgtgttaaccgtcatacgggtaggcctttttagttctcgtgcttctacgtttgggacacaggtgtcagtttttgtgctttaa

SEQ ID NO: 108446 - DNA, 694 bp, Zea Mays
atcttcccgagctgagccaccaccagtcctccgttcccgagctggttcgccgccgccgtccgtcgtcctgctgttgcagcaccttcggaggcaagtcgagccgcaagtcagcgccacctccactactgcgatgacctcccccagctctattgtcgttcccctcgccattccgagcctccaccgagctccacccaccatggccgcacctcccacacagcagctcgcccgtcgacccgttccccaaaatctcgccccgactaggcctgctgaagagccgatcctggaggacgaccagctagagcctgctgaccaggagcccgacgtcgaggaggagtacgcgagtgaagaggatcctgactttgtgcccgacgagtagcgcgttcctacacccaagtcccctgtggtgccattgtgttgtagcagacgccatgtccgatgaggagctcgcagtcgcgttcttcgccaccactattttatttctagtttctattatcgtattattagaatgtgctaaataaaagccttgtatgttatggcaccacttgagcattttactggaactctgtattctattaaatctatgcatatttagtttcggtcattagaccgggtcgcttcacttatttgggcggcctcaccagaatcgtaatcctcgttgcctacctgtggtacctgtgctccatactcaacaata

SEQ ID NO: 108447 - DNA, 468 bp, Zea Mays
atggccgcacctcccacacagcagctcgcccgtcgacccgttccccaaaatctcgcctcgactaggcctgctgaagagccgatcccggaggacgaccagctagagcctgctgaccaggagcctgacgtcgaggaggagtacagcagtggggtaagtgttggtgcatgcgctaccgtggtggtagacttgcgaccgagttgtcatggtgacatctcagaagagaaactttgggagcaagctgaccaccatagcaagctcctgagggacatatccttggtggaccgtgtcaagcgcaaagaccctcacccccagaactctgatggaaccaacatgcttgaaggaaccccggtgtacctgttccaaccccgtagaaggatttgtggaccggcatcacccacacctcctgcatcgcctcggacagatgatgaagaaggccctagagagaccatcgtagggaccaatgtttaa

SEQ ID NO: 108448 - DNA, 1318 bp, Zea Mays
ggtacatcatattaataagagtgtaaaggctttcattctatcaatttttctaaaatacaaaatgcatttcattgtagttaatgatgaacttataatgatgaacttctaatgttcctaaattctatggcttctcccagtctcgacgattcacgataaaataactattattcttttaagttaactattatttaaaattagccgccatggtgaaattggtagacacgctgctcttaggaagcagtgctcaagcatctcggttcgaatccgagtggcggcattctcgaaaaagaatacaataaattagaaaatggattcaattcaaaatttccaattttgtaatgggaccttatcgttatgctatttgcaactttagaacatatactaactcatatctctttctcaaccatttcaattgtgattacgattcatttgataaccttattagttcgtgaacttaggggattacgtgattcgtcagaaaaaggaatgatagctacttttttctctataacaggatttttagtctctcgttgggtttcttcgggacattttccattaagtaatttatatgagtcattgatcttcctttcatggactctgtatattcttcatactattcctaagatacagaactcgaaaaatgatttaagcacaataactacgccaagtactattttaacgcaaggctttgccacgtcgggtcttttaactgaaatgcatcaatccacaatactagtacctgctctacaatctcagtggttaatgatacatgtcagtatgatgttactaagctatgcaactcttttgtgtggatccttattatccgccgctcttctaatcattagatttcgaaagaatttcgatttcttttcactaaagaaaaatgtttttcttaaaacatttttctttagtgagattgaatatttatatgcaaaaagaagtgctttaaaaaaacacctcttttcccgtatttccaaattattacaaatatcaattaactgagcgtttggattcttggagttattgtgtcattagtctagggtttactcttttaaccgtgggtattctttgtggagcagtatgggctaatgaggcatggggatcctattggaattgggatcctaaggaaacttgggcatttattacctggaccatatttgcaatatatttacatagtagaaaaaatccaaattggaagggtacgaattccgcacttgtagcttcgataggatttcttataatttggatctgctattttggtatcaatctgttaggaataggtttacatagttacggttcatttacattaccatctaaa

SEQ ID NO: 108449 - DNA, 9064 bp, Zea Mays
tggttcacagatacctaaaatctattttattatgatccatttcgtgaaaatatagattatgccaaagatgccaaattgctttcttttttctttttattctaactcaaaaaagaagaagaggaaaaaattgcaatgatttaaagcgagaacttgttcttaggtaaatcaattgggagatgcttctctagagtgtcccatatcagttttccatcttccatacaaaaactattaatttgcataagatcttcttcagtcttactcaaaaggtccaatagtgtatgtatattggcccttttgagacaattatacgttctagaaggcaattctaattgatcaataaaaatacaattcaatggaattccttttttgtttttctttagattagtgaatcttttttgaaaggttaaaaggggtggagttaacctgtttttattttcttcgaaactagtgccctcttcctctgtgtgtagaaaaggaagaaataaatcaatcaaattacgagaagcttcataaagcgcttctttaggagttaaacttccatttgtccatattctaaaaaaagtatctcgtgtttttcatttccattcccacaagaaaaaatactataattcacatttcgaacaggcatgaatacagcatctataggataacttccatcttgagagttctttctgagttccgtatgatatgcgcgatctctcttgatctgtaactcaatacagaaatcaacgggttctctcaagttagctataggttgtgtcgtatcaacgatttctacggaaggcggtaagattatatcttgagcggttatgtatctaggacctttgacgcaaattgatgcgtctataactccatagagattacttctcaatacaatttctttcaaatttagtaaaatttcttgtatggattcttcaatacctactattgtggaatattcatgtggcacgttcccaaatttggcgcgtgtgatacatgttccttctatttctccaagtaaagctcttcgcaaggcaataccgacagtatccgcttgaccttttctaagcggagacagaatgaaacgaccataataaagacgtttactatctactcttgattcaacacacttccactctagtgtttgagtggatcctgttatctcttctcgaaccataacagactagtattatttgatcattgaatcgtttatttctcttgaaagcggtttcattttttttacagacgtctttttttaggaggtcgacatccattatgcggcataggtgttacatcgcgtatataacttaaccgtacaccacttttagcaatggctcgtaatgcggcatctcttccgctaccagcaccttttaccataacttctgctcgttgcaaacccactgtacgaatagcatctactgctgttctttgaccagcatagggtgatgcttttcttgagcttttgaatccacaagtacctgcggaggaccagaaaacgacccgaccttgtgggtctgtaacggttataatggtattgttgaaactagcttgaacatgaataatcccttttgttattctacgtgcactcttccgtaaactaaaacgggcattcctacgcaaaccaatacgcactttcttacgtgaacctatttttggtatagcttttgtcatattttattatctcataaatatgagttagaaataacaaaaagaaaaaagatacaaagatatccgtttcaggttaaaatatatcctttactttcatttttttatttgcaatttgggcatttccgtgggtactttttactttaattagaaagaaaagctattagaaagaaaagcttctttttcgaaagattacccctgtctttgtttatgcttcggattggaacaaatgactctaattcgcccacgcctgcgaatcagtcgacattttgtacaaattttacgaacggaagctcttattttcatatatatgggtattcctttcttaaactatgaatctattcttttggaaaaaaataagtctcttcacttaaattttgaaacttggaagttattaccccagaaaaacctaatcctttgaatctttggtatccttcaaatcttcagtatccttcgagtcttcggtacgcttcgaatccttatggggaagtctataaattatacgacctttgctggaatcataacgacttatttcaattttgaccctatcccccatcagtattcgtatagaactagaccggatctttcctgaaatatagcccaggatgatcgtgtcattctctaggcgaacacggaacattccgttgggtagggcttccgtaactaaaccttcgaaagtgacttttgcttctctcgggttttttttctctactattttttttctgtcatatatttttctcctatttttctatttttattttcaaaataggaagttcgagatagaatttgggtactataggtggggccattaccatatataacataaaacttctcccccaattctgtttagtcgagcttctcgatctgtcattatacctcgagaagtagaaagaatagcaattcccattccgcccaaaaccttaggaattccctgatagttggcataaattcgtaagccaggtcggctgatacgctttaaaaaggttctagttctatatattccctttctagtctttctcctttgatgtcgcaaagttgaaaccaagaaatatctgttactttcctgatgtttccgaacactttcaataaaaccctctcgtagaagtattttaacaatgttttcggtaatatttgtggatactactcgaacagttccttttttattcatgtctgcgtttcttatagaggttagtaaatcagcaatagtgtccttgcccataagactctaattctaggttcctcctaatttttctataatcaacatgttttcccttttctttaaatttaggattttaaagcatatacgtgagacaaaatctactaattttttctttgatctatatctcgtctactagtatttataatacttcaggagctaatgaaactattttagtcaaattcaattctcttaattctttggcaaccgcgccaaaaactcgagttccttttggatttcctttttgatcaatgataactgctgcattgtcatcatagcgtattattataccgtcgtcgcctttgaattctttacgtgtacgtacaattacagctcgaattacttcggatctttctagaggcatttggggcactgcgtctttgattacagcaataataacatcaccaatacgagcatatcgctgattaccagcggctcctatgactcgaatacacatcaattttcgagctccactgttatctgctacatttaaaagggtctgaggttgaatcatattatttggatttccatttgttatttcaatgcaaaaggatgaaagaaatattgtctttccagaaagaaaaaccagggttttttatcttcaatattcctttttggggttctatatctctaatcgaagaaattgacttcgtatgggcattttactggcagctatagagatagctgctctagctacagtttcggatactccgctcatttcataaagtattcgacctggtttaacaacggctacccaatattcgggggatccctttcccgagcccatacgtgtttctgtgggtcttattgtaaccggtttgtcgggaaatatacgcacccatatttttccaccacaacgtgcatatcgtgtcattgctcttcgtcctgcttctatctgtctcgcggtgatccaagcgggttcaagtacttgaagagcatatctaccaaaacaaatatgattgcctcggcaggattttcccttcattcttcctctatgttgtttacgaaatctagttcttttggggttatagtcgatggttctttcttagttccatctctactacaaaattggacatgagagtttcttctcatccagctcctcgcgaatgaaatgagaaagcgtgcgaatgtcatttctctaattccataatattcaaaaatattatagatagatacacatcaatatataatagaaaaagttaggttttttggattttgactttcttaaacttaaaaaagaaaaataaatatatagtcaagaaagaagatctagaaatatatccaaattcaatatttatataaaatgtaatccttccttttttggaatctccttttttttattcttattgaatcgtggtaaagtattctaatccaataaggatttcgcgggcgaatatttactctttcctgtcttatttgttaatttagaaccttatcaaataaagcattttttttggtttgttccgccatcccacccaatgaagtattaggattcttttcaataaaatcctatgtagtcataggttttgtcgtttccacagcttctcctttaatggttaggtttgaatcctgcaatggagcttccaatttttttttccgagtcaattttctcagttttattaacccgactgctctttatttattgctttatatttttatttgttgtttcaaaagtcaagttacgatttcgaattctctctttttttgagaattttattatattgatgctttatcacattgcctttttttatgatgtaattcatagaccatacatatgggaatcctatatctttcttattcttcttccttctatctatcatccctccttttatccacatccctttagttttgcttcacagcctagaatcaggtttcttttgtagagaaaaaaatgcagttgctacaactatatgatagatctactcatttttgatagatgtatttattcacatagtgactgtttcttagttaggatctcgacaatacgaagcaataggttggttattagttaattttctatcattactaagttttttttccatttttgaccctaaagaaaaaactaacgagtcacacactaagcatagcaattatattaaaagatttcttaattttcattaaatcatatagaaagagggatactttcttcttttttttagggatttttggaaaaacaaggttcttgtcttttttattctatcactgggcggaatgggaagacatggttagttattcttcttctacgaatatccaaattttgacacctaatactccatagatagttcgaattggatagcagcaataatcaattttagcgcgaattgtttggaggggtagtctacccctttttgatgcattcggcacgtgcaatttcttttcctgctagacgacccgcaatttggatttttattccctttatatccgcttttttagttaattcaatagcttttttcattgcttttcggaatgaaactctattttttaattggaaagctatatattccgcaagaatattaggttgtctataaggttctttaaccttttcgatagcaatattaagtctctggtttacagaattaacttccttttggagatctttctctaattcttcgattgctccctttttctttaataagttggggaatccaatatggattatgacgtggattgtatcgatttctttttgaatttctatatgtgtaattacttcagaacttgagtctgattccatttttctattcgagccttttttcctattcttttgtatatagttcttgatacaattccgtatttttttatcttcctgtagaccttcagaataattttttggttgtgcgaaccaaaaggaatggtgattttgggttgtaccaagtctgaaaccgagtggatttattttttgtcccatatttttctattatatttctttttttttactgggaatcgaaatcttagattgatctaaagattattttgatttctttactatatttagtacaattgttatattacacatcgtttttttatagaataactacgtcctcgagctcgaggtctgaattttttcataatagtactcctactgacttcggctttagtgatgaataaattcgttttgtcgaaatccctataatgagtagcatttgctgctgccgaataaaccaactttaagatgggatacgatgctcgataaggcatgagattcagtatcataacggtttcctcgtagtaacgccagcgaatctcatctagaactctttgtgctttaaaaacagacatatgtatgcgtttttgtgctttgaaaacccgttcgaatttaagtagacgatcggttggaacttttcttgcgagttttctcagccccttcttcttctttatcctaggggtatactttaccaatttgaaacttgtcataaataaggttattacccgcctacctttactttatttgattatttgagtcctataaattttgtttattctgaatctttctattctgaaatcaattaacgacgagatttagtatcctttcttgtactttcataactcgtgaaatgccgagtaggcatgaattcccccaatttgcgacctaccataggatttgttatgtaaataggtatatgttcttttccattatgaatcgcgattgtatggccaaccattgcgggtagaatgctagatgcccgggaccacgttactattatttctttctcctccttcatattgaccttttcgatttttgccaataaatgacgagctacaaaaggattcgttttttttcgtgtcacagctgattactcctttttttcattttaaagagtggcatcctatgtccactatctcgatcgaggtatggaggtcagaataaatagaataataatgaatggaaaaaagagaaaatcctttagctggataaggggcggatgtagccaagtggatcaaggcagtggattgtgaatccaccatgcgcgggttcaattcccgtcgttcgcccatcgcattattgcaaattccaaaaatgcaattttccatattcctagttacgtatttacttacttacggcgacgaagaataaaactatcactatattttttccttttcctagttcttcttccaagcgcaggataaccccaaggggttgtgggtttttttctaccaatgggggctttcccttcaccacccccatgggggtggtccacagggttcataactacccctcttactatggggcgtttacctagccaacacttagatccggctctacccaaacttttttggttcaccccaacattacccacttgtccgactgttgctaagcagttttgggataccaaacggacctccccagatggtaatcttaaagtggccaatttaccctcttttgcaatcagtttcgctacagcacctgctgctctagctaattgcccaccccttccatgtgtgatttctatgttatgtatggccgtgcctaagggcatatcggttgaagtagattcttcttttttctcaaaaaaccccttcccaaactgtacaagcttcttccaaagcatacggctttctagatgtatatgacgatctctagacagatggatcttatatgaatcgtatgatgaagtaccacatgagtggatatatagaaaaggaatccaaatccgccgaatcgctcatgttatgatcttctacatcctaggtctccgcgttccgtcatctggcttatgttcttcatgtagcattcagatcgaatgactctatgaaattacgtcgatacttccacatattatgggtaacgtaggagacatccctattttcacccgggggtcttaattaccactgcttaactttcaattcgcctctgaccatcaaattaaatgtgaataacccgtcctcctctctttgaaacaaggggcgcttccggttctgtgcgtgcttcaaacaattttgtcttctccatattaccatatctctagagtcaataattttctatgaggaactactgaactcaatcacttgctgccgttactcaacagttttctgttgaggtctatcccgtagaggtagtcaaattggatcagtgatcgatttctaggtttcgtcgtaaacctaattggttacttccaattacgtaaatcaatagttcaaaccgcactcaaaggtagggcatttcccattgatataggaacttttgtaccagaaacaatagtatctccaattatagcccctctgggatgtaaaatatatctcttctcaccatccccatagtgtatgagacaaatgtatgcatttcgattagggtcgtattctatggttatgattctaccagatatgtctttttgattccgtcgaaaatcgattttacggtataggcgcttatgacctccccctctatgccttgcggtaatgattcctctggcattacgacctttaccacaacggtgccgtccatggatcaatttatttcgtggattggatttcacttgcctgtctacggttcccttgcgtgtgctcgggataggtgttttgtataaatgtttcgccgtattattaagtattctcctttagttcgtttctctatctagaagtggaatagaataacccggttgaagggtaatgatcatacgtctgtaatgcattgtatgtcccagaataggtcccattcttctaccctttccgggtagtcgatggctattcatagctactaccttaacaccaaagaagagttcgacccaatgctttatttctgtcttagtgaatcccgattcgacattaaaagtatattgattctttcccaataaacgaagactcttttctgtaaatactgcgtatttgattccatccataaatcgactttccccccctatgctctgagttccagtatcgataagaattcgagttcttattgttcttatgttatggtatgaatataccataccaattcgttatgtatgaatgatggatgagattccatggatagagagctaattccaatagaccgttcccgttcgcgtgcatccagcaggaattgaacccgcaaatttaccaattatgagttgggcgctttaaccattcagccatggatgcttaacagggatcatcgtacatcgtaaataaccaattttcatatagaaagacatatcatagaaaaatgaaatcgaaaatattcagagatggcaaatattcggagatgactatgaaaacacctctccggat

SEQ ID NO: 108450 - DNA, 5978 bp, Zea Mays
acgcttcgaatccttatggggaagtctataaattatacgacctttgctggaatcataacgacttatttcaattttgaccctatcccccatcagtattcgtatagaactagaccggatctttcctgaaatatagcccaggatgatcgtgtcattctctaggcgaacacggaacattccgttgggtagggcttccgtaactaaaccttcgaaagtgacttttgcttctctcgggttttttttctctactattttttttctgtcatatatttttctcctatttttctatttttattttcaaaataggaagttcgagatagaatttgggtactataggtggggccattaccatatataacataaaacttctcccccaattctgtttagtcgagcttctcgatctgtcattatacctcgagaagtagaaagaatagcaattcccattccgcccaaaaccttaggaattccctgatagttggcataaattcgtaagccaggtcggctgatacgctttaaaaaggttctagttctatatattccctttctagtctttctcctttgatgtcgcaaagttgaaaccaagaaatatctgttactttcctgatgtttccgaacactttcaataaaaccctctcgtagaagtattttaacaatgttttcggtaatatttgtggatactactcgaacagttccttttttattcatgtctgcgtttcttatagaggttagtaaatcagcaatagtgtccttgcccataagactctaattctaggttcctcctaatttttctataatcaacatgttttcccttttctttaaatttaggattttaaagcatatacgtgagacaaaatctactaattttttctttgatctatatctcgtctactagtatttataatacttcaggagctaatgaaactattttagtcaaattcaattctcttaattctttggcaaccgcgccaaaaactcgagttccttttggatttcctttttgatcaatgataactgctgcattgtcatcatagcgtattattataccgtcgtcgcctttgaattctttacgtgtacgtacaattacagctcgaattacttcggatctttctagaggcatttggggcactgcgtctttgattacagcaataataacatcaccaatacgagcatatcgctgattaccagcggctcctatgactcgaatacacatcaattttcgagctccactgttatctgctacatttaaaagggtctgaggttgaatcatattatttggatttccatttgttatttcaatgcaaaaggatgaaagaaatattgtctttccagaaagaaaaaccagggttttttatcttcaatattcctttttggggttctatatctctaatcgaagaaattgacttcgtatgggcattttactggcagctatagagatagctgctctagctacagtttcggatactccgctcatttcataaagtattcgacctggtttaacaacggctacccaatattcgggggatccctttcccgagcccatacgtgtttctgtgggtcttattgtaaccggtttgtcgggaaatatacgcacccatatttttccaccacaacgtgcatatcgtgtcattgctcttcgtcctgcttctatctgtctcgcggtgatccaagcgggttcaagtacttgaagagcatatctaccaaaacaaatatgattgcctcggcaggattttcccttcattcttcctctatgttgtttacgaaatctagttcttttggggttatagtcgatggttctttcttagttccatctctactacaaaattggacatgagagtttcttctcatccagctcctcgcgaatgaaatgagaaagcgtgcgaatgtcatttctctaattccataatattcaaaaatattatagatagatacacatcaatatataatagaaaaagttaggttttttggattttgactttcttaaacttaaaaaagaaaaataaatatatagtcaagaaagaagatctagaaatatatccaaattcaatatttatataaaatgtaatccttccttttttggaatctccttttttttattcttattgaatcgtggtaaagtattctaatccaataaggatttcgcgggcgaatatttactctttcctgtcttatttgttaatttagaaccttatcaaataaagcattttttttggtttgttccgccatcccacccaatgaagtattaggattcttttcaataaaatcctatgtagtcataggttttgtcgtttccacagcttctcctttaatggttaggtttgaatcctgcaatggagcttccaatttttttttccgagtcaattttctcagttttattaacccgactgctctttatttattgctttatatttttatttgttgtttcaaaagtcaagttacgatttcgaattctctctttttttgagaattttattatattgatgctttatcacattgcctttttttatgatgtaattcatagaccatacatatgggaatcctatatctttcttattcttcttccttctatctatcatccctccttttatccacatccctttagttttgcttcacagcctagaatcaggtttcttttgtagagaaaaaaatgcagttgctacaactatatgatagatctactcatttttgatagatgtatttattcacatagtgactgtttcttagttaggatctcgacaatacgaagcaataggttggttattagttaattttctatcattactaagttttttttccatttttgaccctaaagaaaaaactaacgagtcacacactaagcatagcaattatattaaaagatttcttaattttcattaaatcatatagaaagagggatactttcttcttttttttagggatttttggaaaaacaaggttcttgtcttttttattctatcactgggcggaatgggaagacatggttagttattcttcttctacgaatatccaaattttgacacctaatactccatagatagttcgaattggatagcagcaataatcaattttagcgcgaattgtttggaggggtagtctacccctttttgatgcattcggcacgtgcaatttcttttcctgctagacgacccgcaatttggatttttattccctttatatccgcttttttagttaattcaatagcttttttcattgcttttcggaatgaaactctattttttaattggaaagctatatattccgcaagaatattaggttgtctataaggttctttaaccttttcgatagcaatattaagtctctggtttacagaattaacttccttttggagatctttctctaattcttcgattgctccctttttctttaataagttggggaatccaatatggattatgacgtggattgtatcgatttctttttgaatttctatatgtgtaattacttcagaacttgagtctgattccatttttctattcgagccttttttcctattcttttgtatatagttcttgatacaattccgtatttttttatcttcctgtagaccttcagaataattttttggttgtgcgaaccaaaaggaatggtgattttgggttgtaccaagtctgaaaccgagtggatttattttttgtcccatatttttctattatatttctttttttttactgggaatcgaaatcttagattgatctaaagattattttgatttctttactatatttagtacaattgttatattacacatcgtttttttatagaataactacgtcctcgagctcgaggtctgaattttttcataatagtactcctactgacttcggctttagtgatgaataaattcgttttgtcgaaatccctataatgagtagcatttgctgctgccgaataaaccaactttaagatgggatacgatgctcgataaggcatgagattcagtatcataacggtttcctcgtagtaacgccagcgaatctcatctagaactctttgtgctttaaaaacagacatatgtatgcgtttttgtgctttgaaaacccgttcgaatttaagtagacgatcggttggaacttttcttgcgagttttctcagccccttcttcttctttatcctaggggtatactttaccaatttgaaacttgtcataaataaggttattacccgcctacctttactttatttgattatttgagtcctataaattttgtttattctgaatctttctattctgaaatcaattaacgacgagatttagtatcctttcttgtactttcataactcgtgaaatgccgagtaggcatgaattcccccaatttgcgacctaccataggatttgttatgtaaataggtatatgttcttttccattatgaatcgcgattgtatggccaaccattgcgggtagaatgctagatgcccgggaccacgttactattatttctttctcctccttcatattgaccttttcgatttttgccaataaatgacgagctacaaaaggattcgttttttttcgtgtcacagctgattactcctttttttcattttaaagagtggcatcctatgtccactatctcgatcgaggtatggaggtcagaataaatagaataataatgaatggaaaaaagagaaaatcctttagctggataaggggcggatgtagccaagtggatcaaggcagtggattgtgaatccaccatgcgcgggttcaattcccgtcgttcgcccatcgcattattgcaaattccaaaaatgcaattttccatattcctagttacgtatttacttacttacggcgacgaagaataaaactatcactatattttttccttttcctagttcttcttccaagcgcaggataaccccaaggggttgtgggtttttttctaccaatgggggctttcccttcaccacccccatgggggtggtccacagggttcataactacccctcttactatggggcgtttacctagccaacacttagatccggctctacccaaacttttttggttcaccccaacattacccacttgtccgactgttgctaagcagttttgggataccaaacggacctccccagatggtaatcttaaagtggccaatttaccctcttttgcaatcagtttcgctacagcacctgctgctctagctaattgcccaccccttccatgtgtgatttctatgttatgtatggccgtgcctaagggcatatcggttgaagtagggcatttcccattgatataggaacttttgtaccagaaacaatagtatctccaattatagcccctctgggatgtaaaatatatctcttctcaccatccccatagtgtatgagacaaatgtatgcatttcgattagggtcgtattctatggttatgattctaccagatatgtctttttgattccgtcgaaaatcgattttacggtataggcgcttatgacctccccctctatgccttgcggtaatgattcctctggcattacgacctttaccacaacggtgccgtccatggatcaatttatttcgtggattggatttcacttgcctgtctacggttcccttgcgtgtgctcgggataggtgttttgtataaatgtttcgccgtattattaagtattctcctttagttcgtttctctatctagaagtggaatagaataacccggttgaagggtaatgatcatacgtctgtaatgcattgtatgtcccagaataggtcccattcttctaccctttccgggtagtcgatggctattcatagctactaccttaacaccaaagaagagttcgacccaatgctttatttctgtcttagtgaatcccgattcgacattaaaagtatattgattctttcccaataaacgaagactcttttctgtaaatactgcgtatttgattccatccataaatcgactttccccccctatgctctgagttccagtatcgataagaattcgagttctt

SEQ ID NO: 108451 - DNA, 1341 bp, Zea Mays
cataaacaccataaaaaagagctcatttaccatccgcaggagctcccttccagacgcttccgctcttctctctctgcttccggcagaaatcaaggcagtattaggatggtgacccggcgcctcttcgcgcgactctaccggcattgcgccggcgcagcggctgcgtcatcagccgcggggcggcaccggggggccctggcagcggcggccgtggagcagttcgccggttcctccctgcctgtcggggttccaaatattttgaatcatcatttcagatactcaaccagcatttttcaaaagattggtttctcgtctgtttcaccacaacaaagtgatgatgaggttaatgagctgaaagaccacgaaagggccttagatggatcaagtgaagattgtccatctggaagtattgaaggccttgatctgtcgagagatgatttggtgaagctagttcgtgagaaggatgaattgttgaagtccaaagatggtgaaatcaaagatatgaaggataaggttttgcgcagctatgcagaaatggaaaatatcattgctcggacaaaacgtgaatctgagaactccaaaaaatatgcagtacagaacttctctaagagcctgctagatgttgctgacaatttggctagggcatcatctgttgtcaaggaaagcttctcgaaaattgatacctcaaaagattctgctggagctgtcccactactgaaaaccctgctggagggtgtggacatgactgagaagcaacttgcagaggtcttcaagaagtttggagtcgaaaaatttgacccgctgaatgaggaatttgatcctaacaggcattgtgcagtttttcaaattcctgatccttcaaaaccaccggggaccgttgcttctgttgtaaaggtgggctacatgttacacgatcgcgtcctccgccctgccgaagtcggcgtcactgccacggagggaggtgcgcatgcaactgaagaggcagagaagccggaggagaaaacagcgagggactaaagttagccgtggtttagtcaaggaggattgaatgccgtttctgtttagagtttgagaaacatgaatgaatgcagaaaacttttggccgtgttcgacacggggagaaagtttagcaagcaggctggcgccttttttttcttgtttggaacttggaatgaaatccattttggggtttggagcaaccctgcatgtcgtacaacaccttctgcctgctagtatgaccgttgaccttgagggatgggcatgaggcccttggccgatactaaagagctgtgctgccgtgatcggctttctgtggcttaaatgttcggcagcgttttcacc

SEQ ID NO: 108452 - DNA, 2798 bp, Zea Mays
ccggccctcgacgctcttcctctttcttcctcctcgcgtccttcttccctcgcttccgtttcctttcaaaccctaagtccgattacccgttcaaaaccctaatcctagctccccagcctcctccccactgcgtccccacactgctccgcgtcatacctcgcgacttccgcgcccccgcgcgcccggccctcccactcggccctcgcggacctagggtttctcccgggccggagctgctcgttcgttcactgcctttgggcgagccggtgcgggcgggtggttgggcgaggaggtggtgggcggagatgagatgaggttgcagcggctgtgggggcggtgtgaactatgagtaggctctcgttcaggccgcggccgctcgacatccataagaagctccccatcctcaagtctgtgcgggagttcgaggatgaggagccaggggtcgcgccgctttcttctgcgagggctggggtgctgctgcggcactcaggaactgagctccccgcgtctggggcgaacaagacgacagagggcgagggaagtcaagcacccagtaagaaaaatgcccaagaaatacctacaccgcagtttgatgctgtggacacatatgaaagggactatactcgcacctttgcacaaccgacatcttatatacgtggaagaggagccagagctgagatcggtgaatttgtcgagtatgacctggacaatgaagatgaggagtggcttgaagaattcaataacgagcggaagaatataaaccctgaaaagttggaggtccttctattcaagttggaagttttggaccacaaagctcgtgaaagagcaggagccataacaccaactttcataggaccagtgccagtcctcttgcagctagatgctgctatagaggctttgcagtacttgtctgttcgatatgccattttccaagctgtatataactactggaaaacaaagagggagcgatggcaaaaacctattcttcgacgtttgcagccgcctccaccagtgaatgatacaaatccatacaatgtcttcagaccaagagaaaaggcccatcgtcttcatacaagaaggatgcaaagaagggaaaacagtatccaatcattcgaaaaactccgcctggtgcgacacaacttggagcaagcaaaagcactaatggatgctttgattaagagggaggagacaaagcgggaggccatggaatgccaggttaacctgcaacgcgttcagatgaaatataagcatgaggcccagcttgttgaggataggactaccttgtctggcttccagcaaactaacagcagatttgaatcgagtgatgatgattatgcgaattcagatgacacaacaactgaacaaccatatatacgtccagctgttttccatcctaggtttcctgctaacaagctatctgtgatccctccacttcgcataaagcgtgaacgagaactaaaaaggaggactcagcagaatggctgggcatttaaacgggatcctgaggagccagtattcttattcacaagacctcttgatccggagaagttgatcgcagcaggtatcaagccaccaccagatcctcctattgagaatggtgccacatcgccaccatttcggtgtcgaggtaggattggacgaggcggccgcatcatctttgatcggtggaatcctcttctccagacaccaattgaccaggagacctcttattatgtgccgtacggtcacaagcccccctcacctgaaggttaaagcagtttttcacatgcacatagtgcttaatgtcactggcacagctatgaaatttttgaagcccccgagcaattggcccttggagagcccatttgtgactacctgagttgtgagttcagtggatctgatggaaaggcaagaaggctccttgataagcagcagcctcagtggaagattgagagtgtattgtgggggtatattggggctagcatttctttctcagatgtggcttggtcatcttttttcatagctgttgtaaaattattgcagtgtaggtgaaagagtagattttttttgtctaatcttggcatttagggtcagtatttatatcatgctctctcaattgattattcatttggagtagaggaaatcattctcgttgctacgcccagcttttctgtataatgcttcaacaccttgttgcatgtattcaactaatgcgcacacgtgtatatactgtaactcgatgtgcattggccttttgtggcaaatgtcactagtcagtaggttagggagagaatggtaatggaaggggttcgacaatgatatttaatctgttgttgaaatgttgctgcgcaactcagctcttgtaactgcacagattcagtttttttgttgtgtaacacaaagtcaacagacagctggtcattatcaggactgttatatgttctgattcttcctgataacacttcgttggagaattgcgttgaatgcagcaagggttcatcatgctcgtgtgttagcaacaatgcgacctggtgtattcagaagaataggcatgttacaattaaatcgactcagtttctgtcaatcttgcccatgctcatgtcagtagtcaagacagctgaaatggtattgttttgagctgtttgtctgtaaggtcatttctgctggtgctcatgccttggacatgacgaattgagatgttctgttcaaatgtttggctgcgaggcgttgcctcaggaaatattactgggcataggcacaggtctgaagcagtaaactgttgcattcacagagcgtgtagtgtttgtgcttttggtagc

SEQ ID NO: 108453 - DNA, 941 bp, Zea Mays
tcttcctccctcccgttttcgtagcatcccatattcccatgtcatctacccaacccataggccatagctaccggaagatgagagctccagctcctcctgttcccgcgctgctctcccgctgctcctcgcctccctcctcggccccgctccgcctcctcacctcctctcgcacgccggccgccttccgcccgcctccggccgtcgcccgctctgtctccgtctccgtcgatgcgccggcggccgccacggagccggctgtcttgggcgcgccctcctcgatgccgcgccgtcgcctcatcctcctccgccacggggagagcaccgccgggggccgctccactagagatcatgacagacctctaagcaaggctgggagagctgacgcaatcagcgtttctaataaactccaacaaatgggatggataccggagcttatcctctgcagcgacgcaatgcgtacgaaggaaactcttaagatcctgcaagagcatgtccaaggattgtctgaagcagtagtgcacttcatcccaagtttctactccattgcagcaatggatggccaaactgcagagcatttgcagaaggcgatctgtgaatattcgagtgatgagatcttaaccgtgatgtgcatggggcataataaaggatgggaagaagcagcctctatgttttctggtgattcagtagcgctcgagacatgtaacgctgcgttgctggaagctgcaggcaaatcatgggttgaggctttttctgtggctggtctggggggatggaagcttcatggaattgtaaagccatgagttgtaactaaaagctaggtgtaatttctgtagctgtttcttaattcttgttaacttttgtgtagttgtttttacgtgccactgaagagcgtggataaatagatgagatgaatgaattcttccacgagaaaaaaataaaaa

SEQ ID NO: 108454 - DNA, 3047 bp, Zea Mays
ctcgggtctcggctctcgccgtcgccactcgccgcgagcgagatgcagggcctagccgtatcatgccagcttcctcctgctgcggccgcagctcggtggcggccgcgcgcttcttcctctaatagggaagcagttttacaatgttggaagtatgaattaagtcaagaccactatttgggaggccccctaaggataggtcagtctcaaggaagtttgcacagacatcgctctacaaattttctcagaccagctgctgcagctatttcagttgaacaagatgaagtcaatacttatcttccaaaaggtgatatgtggtctgtgcacaagttcggtggaacctgtatgggaactcccaaaagaatccagtgtgttgcaaatatagttcttggtgattcttctgagaggaagctgatcattgtttccgcaatgtccaaagtaactgacatgatgtacaaccttgtacaaaaggctcagtcacgggatgattcatatgcaatagcactggcagaagtttttgagaagcatatgactgcagcaaaggatcttcttgacggagaagatcttgcaagattcttgtctcagttgcattcagacgtcagcaacttgcgagccatgctccgtgctatttatatagctgggcatgcgacagaatctttctctgactttgttgttgggcatggagagttgtggtctgcgcagatgctgtcgtatgcaataaagaagtctggggcaccctgcagttggatggatacaagagaagttctagttgtaacacccagtggttgtaatcaagtagaccctgattacttggaatgtgagaagcgacttcagaaatggttttctcgacaaccagctgagataatagttgctacaggatttattgcaagtacagctggaaacattccaacaactctaaaaagggatggaagtgatttctcagcagccatagttggttctcttgtcagggcacgccaggtcactatttggactgatgttgacggggtatttagcgcagatcctagaaaagttagtgaggctgtgatcttaagcactctgtcttaccaggaggcctgggaaatgtcatattttggggcaaatgttttgcatccgcgcaccattatacctgtgatgaaagacaacattcccattgttattaggaacatgttcaacctctctgcccctggaaccatgatttgcaagcagcctgccaatgaaaatggtgatttagacgcatgtgtcaaatcatttgctactgtcgataatttagcacttgttaatgttgaaggaactggaatggctggcgttccaggtacagcaagtgctatatttagtgctgttaaggatgttggagctaatgttatcatgatatctcaggctagcagcgaacattcagtatgctttgctgttccagaaaaggaagttgctgtagtttctgctgagttacatgataggtttcgtgaggcattagctgcagggaggctgtctaaggttgaagttattaatggttgcagcattcttgctgctgttggtctgaggatggccagcactccaggagtcagtgcaatactttttgatgcattagcaaaggcaaacattaatgttcgagcaatagctcaaggttgcagtgaatacaatattactgttgtattgaagcaacaagattgtgtaagggctctgagagctgctcactcaaggttcttcctctccaaaaccacacttgctgttgggatcattggacctggtttaattggtggagcactccttaaccagttgaagaatcagactgctgttctcaaggaaaatatgaacattgatctgcgtgtcattggaataactggctcaagtacaatgcttctgagcgacacgggaatagacttaacccagtggaaacagcttctacaaaaggaagcagaaccagctgatattggtagttttgttcatcatttatctgataatcatgtatttccgaacaaagttttggtggactgcacagcggatacaagtgtggcatcccactattacgattggttaaagaagggtattcatgtcatcacgccaaataagaaagcaaattctgggccacttgatcagtacctgaaattacggactatgcagcgtgcctcatacactcattacttttatgaagcaactgttggtgctggcctcccaatcatcagcaccttgcgaggtcttctggagacgggtgacaagatactgcgtattgagggcattttcagtggaactttgagttatatatttaacaatttcgaaggaacaagggcgtttagtgatgttgttgccgaagcaagagaggcgggatacactgaacctgacccaagggatgatctatctggaactgacgttgcccgaaaggtcgttgtcctcgcgagggaatctggtctgaggcttgaactttctgacattcctgtgaagagccttgtgccagaaacacttgcatcatgctcgtcagcagatgaattcatgcagaagctaccgtccttcgacgaggactgggccaggcaacgcagtgatgctgaggctgcaggcgaagtcctgcgttacgttggagcgttggatgcggtgaacaggagcggacaggtggagctacgcaggtacaggagggaccacccgttcgcgcagctctccggctccgacaacatcatcgccttcaccacgtcgaggtacaaggagcagccgctgatcgtgcggggtccgggtgccggcgcggaggtgacagccggtggcgtcttctgcgacattctgcggctggcgtcttacctcggtgctccttcttgagcttctactagctacaggtgccagtttcaggaagcagacggagacacactgccatgcatgatgcctcccctccgtgtttgggctatgctcacatgttgtaatgttgttctgaataagtgccaggaaataaggcctctagcgtatgtcgagagagagaggtcgttcggctttggaatagccgattaggtgttgtttttgctgcatgatgcaaatgaattatcgtaccaatgaagggatgtttgcttgtgcct

SEQ ID NO: 108455 - DNA, 608 bp, Zea Mays
gccgaagtcccatggcgctcctctctgccggcgctctgctctgttctccctactcggcgcccagcccctctgctcgctcgtcgccgttgcagtcgagctccaccttccctggctgctgcccggccgagcttctccccgagctccctgccttggccgcgtccccctcagtccacctctctgctcggccatggaagacacgccgcagccctggttccagctcgcgatgctccctgcacgccggagtcgcccagctcggccacctacctccctgtgcgcgacctcctccagctccctgtttctccatggtgtcttcctctgttggctcgccggcttcctgctccctgctcgcccagcgcacgcttctccttgtgtgtcatgcctgcgtgctgctcgccccagctcccagccatggcgtcggccaaagctcctgcgcgttgtgtgcccagctcccttttccgcgtgtgcgcgcttggctcgcttttctgcgcgcccagcgttctgctcccgctcgtccctgcgcgccgagctccttgcgcggtccttcctcgagctcgccctgtgcgcgctacaagtttccttctccaatcgtcgcgcgctccttgctcctc

SEQ ID NO: 108456 - DNA, 109 bp, Zea Mays
catgagagtttggtatatactttgcaaggcgatacttctacacaagcaccaaagaaatgaaaatattggttgtaatcaagcatcttgtaatgaaaatgtaatcttgtaa

SEQ ID NO: 108457 - DNA, 501 bp, Zea Mays
atggccacggcgcaggcgcggcgtgcatctccggccaggcgcgaccgcctccttcgagcacgaaccggccccggcgtgcgcgcacatccccgccagcggcggtggcagtcaggctcgactgcatcctccaccgagccggcctcctcgccgacctccaccgagctcctctcctcgccggccatggaggccgtcgtcccaactcctccctcacctccccttggtgctcggcctccaccaggtcatggccttcaccacctccccatcctggcccctctcgcccacgccatcttctccatgtttcctctacaacagccgatgctcttcctctctctgcttcctctccggccgtctggctccctgctcggcgggcacaagccctcggacgccccgcgatctgcctccaacccccatgacggtcgcggtctccagccagctttcccactgttgctacctctcccaggtcaccagccaagcttcggatccatggtgctcggcgcctga

SEQ ID NO: 108458 - DNA, 406 bp, Zea Mays
aaggtaatcatatctgatcacttaaacataagtgcacagcttcgaagttgttagtgacacaagtacatatcaaattttaatagcctatacctgatacgccaaagtgtgaccatttaagattcctctggatctcagctcccccatgatcaaagaaatacaatcctccatctgatctctgtaaggatctccagcatcctgaacatagggcttcattccaggacaggatattgacgattttgatctctggtggtgttccaatagtgctcggctagatgggctgagtcagaagggctttgactctttggtcgctctgggtgcttggatgttgtggaagcatagaaatggtgtggtctttaatggttcctccccaagcctggtggtggccgttcgactggccagggaggaa

SEQ ID NO: 108459 - DNA, 1703 bp, Zea Mays
catccgcccactgccaaacggccccacaagctcagcgcggcggcctcgtcgctgcataaagcccctacctaactccaaatctcgccagcgccaggcctcgccgagccggtggaaacctcgtgatctccgccgcctcgagccctccgcgcgcctcttccagagcaccatccactcttcggtggcgaggccgcggctccccgagacgggcaatgcagagcgcggctgccatcgggctcctacggccatgtgccgcgcggccgctcgccgcctacactagcccacgccgcggcgccggcgcgtgcagcggcggcacccagccgctcatcacgccccgcggcatccgcctctccgcccgccccggtctcgtgccggcctcgccgctggaggagaaggagaaccggagatgcagggccagtatgcacgcggcggcgtcggccggagaggaagctgggggagggctcgccaagacgctgcagctgggggcgcttttcgggctctggtacctcttcaacatctacttcaacatctacaacaagcaggttctgaaggttttgccataccctataaacatcacaacggtgcagtttgctgttggaagtgccattgctttgttcatgtggatcactggtatccataaaaggccaaagatttcgggtgcccagcttttcgctatccttcctctagctattgtccataccatgggcaatcttttcacaaacatgagccttggaaaggttgcagtgtcatttacacatactataaaggccatggaacctttcttctcagttctcctttcagcaattttccttggggagttgcctacgccatgggttgtgttgtctcttcttccgattgttggtggtgtagctttggcatcccttactgaggcctcctttaactgggctggattttggagtgcaatggcttcaaatgtaaccttccagtcaaggaatgtgctaagcaagaaacttatggtgaagaaagaggaatctctcgacaacattaacctattctcgatcattacagtcatgtcattcttcctgttggccccagtaaccttacttacagaaggtgttaaagttagtccagcagtgttgcagtctgctggtttgaacttgaaacaggtatacacaaggtcattgattgctgcattctgcttccatgcataccaacaggtatcatacatgatcctcgccagggtatccccagtcacacattcagtgggcaattgcgtcaagcgtgtggtggtcattgtgacctctgttctgttcttcaggacccctgtttctcccatcaactctcttggtaccgggatcgctcttgctggagttttcctatactcgcaattgaagagacttaagcccaagcccaagactgcttgatcatatacatttgtaggtccattcaatagaactttggaagttatgctatgtcattggagtgatcagtgagtgccgtagttagaatgataagcctctccgttttgttaccagttgggtggataatttatgatttacttgctagcatttttggacggatttgttcgtgtattaataattttgcagggatggttgtcgttgtgatgtttgctgtttatagacctgaaactgaactgcgatgtttcattggactatcttcaatcgtgacactaaattaagatagtagatacaatagtttggagagatatttggaaatatgttttc

SEQ ID NO: 108460 - DNA, 1077 bp, Zea Mays
catccgcccactgccaaacggccccacaagctcagcgcggcggcctcgtcgctgcataaagcccctacctaactccaaatctcgccagcgccaggcctcgccgagccggtggaaacctcgtgatctccgccgcctcgagccctccgcgcgcctcttccagagcaccatccactcttcggtggcgaggccgcggctccccgagacgggcaatgcagagcgcggctgccatcgggctcctacggccatgtgccgcgcggccgctcgccgcctacactagcccacgccgcggcgccggcgcgtgcagcggcggcacccagccgctcatcacgccccgcggcatccgcctctccgcccgccccggtctcgtgccggcctcgccgctggaggagaaggagaaccggagatgcagggccagtatgcacgcggcggcgtcggccggagaggaagctgggggagggctcgccaagacgctgcagctgggggcgcttttcgggctctggtacctcttcaacatctacttcaacatctacaacaagcaggttctgaaggttttgccataccctataaacatcacaacggtgcagtttgctgttggaagtgccattgctttgttcatgtggatcactggtatccataaaaggccaaagatttcgggtgcccagcttttcgctatccttcctctagctattgtccataccatgggcaatcttttcacaaacatgagccttggaaaggttgcagtgtcatttacacatactataaaggccatggaacctttcttctcagttctcctttcagcaattttccttggggaggtaagtttctgttcaactctgaagcctaatagtaactacacaactctctgcgatatgataaaatctttcttgctttcctatgacaaatgagtgattttgcagttgcctacgccatgggttgtgttgtctcttcttccgattgttggtggtgtagctttggcatcccttactgaggcctcctttaactggtatacaatacaggcaccttagattgaatacaagcaaggatgcttgttgtgcaaattacatttgtctttttcta

SEQ ID NO: 108461 - DNA, 685 bp, Zea Mays
acaatcttagccggcacccccgccaagaatggcacgcctcgccggcgtggcagtggccctagcagccatcgccgcggtggtcggcgcccacgagacgtactacgcgtccgtggagaaccgcctcccggcgctgggcatgaagctggcgtgccacgcgatgggcgggttcctgacggagctcagcgtggtgccgcgcggccgcgtgccccacggcagggccgggcgccgcgtcgccgagctgctggtggagcgcggccagcacggctgggttcgctgcaactgggcgtacgcgggcaactacgtggccgggatcacggtgctggactcacggtggcccgaggctgggcggtgccaggaccccgccggcgaaggcctgtgccgcgtcgtcttcgagaacgacgtcgtgctcctcaagacgcccgcccgcggcgtgcgcgtgctcggcgacctgcccatcaagcgctgtcggcgacactggatgctgttcagcaccgagtgcacgtaccccgaccaccgctacccctacgccggtcgccggctcgggagcgccttcgaatacttcgccgtctgatttacagatttagtgctcgcttttatgaggggtgccaaccatttgaggagccaaattttgtagatctttttttccaaagggcttccaaaacgatacaaattacaaagacaaata

SEQ ID NO: 108462 - DNA, 829 bp, Zea Mays
aaacaagattccaagatacaaagcatgtattatatgatcagaactgtaatggcttgtattagttgcaggtgaaagatatctataaccatggataatttcagtcttagaggtaacaatagttccacaggctaaggatgatgagcgccttattcttgccagcgacgacctctagaatgtaatgtcaaatgaagagttatgtgaagttgctcgcaagtagatacttctgtggcacaaaaagaatggcacaagttcatcatcgtccccatgggttagtgaattccgcaaacccaactactcaagcggctgtggaatgcttgtcaaagcttgctcttcaaaaggggagcgaagacaacatcactgtcgtcgtagttgacctgaaagcatagcgcaagttcaagagcaaaacctaaccatgatggcttcatgtacaattatagctacaagttgctaggaacctatagatttggagaatccaaatttggtcactttagttcactgccttagcacattacttagcctagatttttaaagccatttggcctgccaaagggctatattccccgtatatggtacaaaatgcaaaatttgtctaagggtttatgtttcttgaccgtggtgatggtcctatttttattcttctttcttcattgcgttgtattctttttgttaagatgcgcaaccaagtatctgtcaatgtattttttgagcttgtagggtacaaaagaaacaacgtgttataaagggtatgtatcctgcctgtctgaatttgggaaatctatcaattgcatcatctggtaaaacaagaatggactcaaaattgggatactag

SEQ ID NO: 108463 - DNA, 2133 bp, Zea Mays
acgcgaaagcaaaacgccaaacaggctcctctgaaactcccagagccggtagaggcacgccactccgcagtgtcagtcactgcccccccatcacgccgcccgccctttctcggccgttgccgcgagctcgctccgacccaccgccgatggcgacggcgatgggcgcgatggccgccacctgcatggcctcgatcccggccgccgctacgttccccggtgatctcggcgtcggacgacgccgagcggttgtaccagggtggcgcgccggtgggagacggctgcgtgcgacgccgcctgcccggaggccgttcctgttctcgccgaagggcgtttcggactcgcggagctcgcaaacgtgccttgatccggacgccagcacgagtgttcttgggatcatccttggagggggtgctgggacaaggctgtatccactgacgaagaagagggcgaaaccagcagtgccgttgggcgccaactacaggctcatagatatccctgtcagcaactgtctcaacagtaacgtctccaagatatatgtgctaacacagttcaactctgcttcgctcaaccgccacctctcgagggcctatggaaacaacattgccgggtacaagaatgagggattcgttgaggtccttgcagcacaacagagtccagagaatcccaactggtttcagggtactgcagatgccgtgcgtcaatatatgtggctatttgaggagcataatatcatggagttccttattctggctggagatcatctgtaccgtatggattaccaaaagttcattcaagctcatagagaaacagatgctgatataacagttgcagccctgccaatggatgaacaacgtgcaactgcatttggtcttatgaaaattgatgatgaagggaggatagttgagttcgcagaaaaaccaaaaggagagaagctgagatcaatgatggtagacaccactatattgggccttgatcctgaaagggccaaagaactgccttatattgctagtatgggaatctatgtttttagcaaagatgtgatgcttcggcttctcagagaaaattttcctgcagcaaatgactttggaagtgaggttattcctggcgcaacagaaattggattaagggtgcaagcttacttatatgatggttactgggaagatattggtactattgaagcattttataatgcaaacttgggaataaccaagaagcctgtaccggattttagcttctatgatcgttctgctccaatttatacgcaacctagatatttgcctccttcaaaggttcttgatgctgatgtgacagacagtgttattggagaagggtgtgttattaaacattgcacaatcaatcattccgtagttggactccgttcctgcatttctgaaggtgcagttatagaggactctttgctaatgggtgcagactattacgagactgagaatgataagaatgtcctttctgagactggtggcattcccattggtattgggaaaaattcacatatcagaaaagcaatcattgacaaaaatgctcgcattggagaaaatgtgaagataatcaattttgataatgtccaagaagcagtaagggagacagaaggatattttatcaaaagtggaattgtcacggtgattaaagatgctttaattcctagtggaacaatcatataaagtcagccaacaccatgtatataaggttgggttgcatcatatggtgatcgccaatgtgcatcaagttctctcatcccttgcgagaccatgcttatttccattgcaaaatcatcaagctctgcatcaacttgttgtggataataatgaaataataaatggtgccattccatggcaacatttttctgtcagtagtttatgaggcactgttctaaatgtactgttgagtggaatttgaatatgtatgcttttgcaatcgcacacctaaataccttgtgcttatactccttgttacctaaatatgctcactgcattgcccaaggaatcagatgaaaaatgtcatgcataacatgatttttgttagattgttgtaaagcttacataagtttcttctagcctcagagagatgtttagagtggaaaaagaatgaacctaaaaacaaataaattacaaaaca

SEQ ID NO: 108464 - DNA, 2210 bp, Zea Mays
gcagcctccgcagatcaccgcactccccccgcacggcaccagtgacgcgaaagcaaaacgccaaacaggctcctctgaaactcccagagccggtagaggcacgccactccgcagtgtcagtcactgcccccccatcacgccgcccgccctttctcggccgttgccgcgagctcgctccgacccaccgccgatggcgacggcgatgggcgcgatggccgccacctgcatggcctcgatcccggccgccgctacgttccccggtgatctcggcgtcggacgacgccgagcggttgtaccagggtggcgcgccggtgggagacggctgcgtgcgacgccgcctgcccggaggccgttcctgttctcgccgaagggcgtttcggactcgcggagctcgcaaacgtgccttgatccggacgccagcacgagtgttcttgggatcatccttggagggggtgctgggacaaggctgtatccactgacgaagaagagggcgaaaccagcagtgccgttgggcgccaactacaggctcatagatatccctgtcagcaactgtctcaacagtaacgtctccaagatatatgtgctaacacagttcaactctgcttcgctcaaccgccacctctcgagggcctatggaaacaacattgccgggtacaagaatgagggattcgttgaggtccttgcagcacaacagagtccagagaatcccaactggtttcagggtactgcagatgccgtgcgtcaatatatgtggctatttgaggagcataatatcatggagttccttattctggctggagatcatctgtaccgtatggattaccaaaagttcattcaagctcatagagaaacagatgctgatataacagttgcagccctgccaatggatgaacaacgtgcaactgcatttggtcttatgaaaattgatgatgaagggaggatagttgagttcgcagaaaaaccaaaaggagagaagctgagatcaatgatggtagacaccactatattgggccttgatcctgaaagggccaaagaactgccttatattgctagtatgggaatctatgtttttagcaaagatgtgatgcttcggcttctcagagaaaattttcctgcagcaaatgactttggaagtgaggttattcctggcgcaacagaaattggattaagggtgcaagcttacttatatgatggttactgggaagatattggtactattgaagcattttataatgcaaacttgggaataaccaagaagcctgtaccggattttagcttctatgatcgttctgctccaatttatacgcaacctagatatttgcctccttcaaaggttcttgatgctgatgtgacagacagtgttattggagaagggtgtgttattaaacattgcacaatcaatcattccgtagttggactccgttcctgcatttctgaaggtgcagttatagaggactctttgctaatgggtgcagactattacgagactgagaatgataagaatgtcctttctgagactggtggcattcccattggtattgggaaaaattcacatatcagaaaagcaatcattgacaaaaatgctcgcattggagaaaatgtgaagataatcaattttgataatgtccaagaagcagtaagggagacagaaggatattttatcaaaagtggaattgtcacggtgattaaagatgctttaattcctagtggaacaatcatataaagtcagccaacaccatgtatataaggttgggttgcatcatatggtgatcgccaatgtgcatcaagttctctcatcccttgcgagaccatgcttatttccattgcaaaatcatcaagctctgcatcaacttgttgtggataataatgaaataataaatggtgccattccatggcaacatttttctgtcagtagtttatgaggcactgttctaaatgtactgttgagtggaatttgaatatgtatgcttttgcaatcgcacacctaaataccttgtgcttatactccttgttacctaaatatgctcactgcattgcccaaggaatcagatgaaaaatgtcatgcataacatgatttttgttagattgttgtaaagcttacataagtttcttctagcctcagagagatgtttagagtggaaactgtcatcttagatgtgtgagtttcaggtgaccaaaagagtgaattggagccaatactttttttgcac

SEQ ID NO: 108465 - DNA, 2108 bp, Zea Mays
tttgattaaccgagagattcaagaactttatatatatggttgtgttacttgtgcacaagaacttgagttgaaaaatcagtaagctcacattgataaggctttagaagtgtgccactaaaatcttggaatacatggcaaaagaaatactctgtgtctgggcttaagactagattagcgacgcagaaaccgcatgaaagctaacggaatcgagactgagaaagacaaatgtttggatttggtccagaactgataaaaccaacgagcgacctggcacaagaagcaaggggatccgtggaacatgagcgaggcagggtcgctggcctaccggcgagaggaggaaaaagcaatccaagcagagacaggcggatctccagttgtcccctccacgccgcgctagcccagagggcggggcaacggcgacgcctccctgcgagggaggaatggcctcgggcctggctctacgccgacggtggcgccgctcgccgacggcgaggcgcgagaaactaggaggtggcggcatcttcaggaggatgctacgaatatccgccctcagtcacccgtgtaccaagcaatatcttgctacctggagaaagtcagctaccacaagactggaccaccaatttcccttgtcaccaccagtaccaccatatccgacaacactagcaaagacagccatcaccgcgccctcaggcttcgccgatttgtcagttcaagaggacctccgcttgagctcatgcgacttgtggaggagcagcggcggacattccatgcctgatggggaaggggaaggtttgcctcctggactgtgcgagccgatggagctgacggaaagctggttgaacaccgacgagctcaacgtgtccgtggggccgccacacatgaccacccctccaggggatatctccgggagatcagggtcagagatgctgaagccacttgaagcgaactgttcggtgaccatcttgcacgcgctctccaggatactgtcgatgtacttctgaaacgcttccattctgatctgcacgcgcttttggacctggtaatggtaaaaccagccaacgattgtaatgagcaaggccttgtatgcagctgtggctgttacaaataaatgcatcccgcattatattgggctcagatatgctccatagggagcagatatcctgaaggtcctattgtccataatcagcctgctcaccgcagttaattgtttcagttaaggtcagcctcctaaactaattgtttatttcctgagattccgtttttttacttttagcaagaaaccatttaatcaacacagtattcgcaaacctgaaagcacccttcaagcaagaacacaaatattgtagaaaatttcaatggtgaattcataactccttcagaagaattgacttattccattaacgagactgtcctttcaactagcaccacaaatgcagctcactagttaaattgaatatatggataagtgaagcctaaggattctgcatcgtccgataaagaatctattaataaaccctagtccaagcttcacttctgagctcaatgaatgtgacaaaagcaaaactactgcagaaaatacaagagttggcattttctcgcttcacgcaattcaggaaactaatttaagagcatgatagaacaaataatcagaattacctccacttgttcatgcagtcttctttggacttccatctgcgctctcagtgcttctttaacttcttggcttctgcagcaagtaatcataacatcaactctttcgaatcaatcacagtaaatagtctgagagtactcagtctacagaaaacgaagaagaataaactaatatgctggacaaggaaaagctgatgaaccatactctttcatatcctgggcaggaactctaggggacacgctcattccactttgagcatctagaagataggatgctgcaggttgggaaagttaagcgcaaaaaggaggtcagaaaattagtacgagaacaaaaggagctctttcactgctttcaaactttagactaagaaaaatggatagcttgaacacatgccatatggtaagaagttatatacatgtcacaagacatacatgtgttttcctctatttatttcatt

SEQ ID NO: 108466 - DNA, 942 bp, Zea Mays
aacttgagttgaaaaatcagtaagctcacattgataaggctttagaagtgtgccactaaaatcttggaatacatggcaaaagaaatactctgtgtctgggcttaagactagattagcgacgcagaaaccgcatgaaagctaacggaatcgagactgagaaagacaaatgtttggatttggtccagaactgataaaaccaacgagcgacctggcacaagaagcaaggggatccgtggaacatgagcgaggcagggtcgctggcctaccggcgagaggaggaaaaagcaatccaagcagagacaggcggatctccagttgtcccctccacgccgcgctagcccagagggcggggcaacggcgacgcctccctgcgagggaggaatggcctcgggcctggctctacgccgacggtggcgccgctcgccgacggcgaggcgcgagaaactaggaggtggcggcatcttcaggaggatgctacgaatatccgccctcagtcacccgtgtaccaagcaatatcttgctacctggagaaagtcagctaccacaagactggaccaccaatttcccttgtcaccaccagtaccaccatatccgacaacactagcaaagacagccatcaccgcgccctcaggcttcgccgatttgtcagttcaagaggacctccgcttgagctcatgcgacttgtggaggagcagcggcggacattccatgcctgatggggaaggggaaggtttgcctcctggactgtgcgagccgatggagctgacggaaagctggttgaacaccgacgagctcaacgtgtccgtggggccgccacacatgaccacccctccaggggatatctccgggagatcagggtcagagatgctgaagccacttgaagcgaactgttcggtgaccatcttgcacgcgctctccaggatactgtcgatgtacttctga

SEQ ID NO: 108467 - DNA, 222 bp, Zea Mays
atgttacatttgcagatatggacctcggtggttttctccacattaggaaagctggaagagccttttgaactcagtttttttgctaacagtggtgttatggtgaaacagagttttgtgtgtatgtaccaacagctaaaatgtaaacacgacattatcatagttgagtacagaaataattatctcttatatcttattgcaaaatctgaaacagttctcttgtag

SEQ ID NO: 108468 - DNA, 422 bp, Zea Mays
tgtaaaaaatcattgcttatgctactcaggaaatcagaatttgttgtttataagctcaaggagatggggaagatttctgaaaaagatatcatgatgatctgcgaccaattccagaggctggacacagggagctgtgggaagattaggctttcagatcttctggagagccatcacttggttccagaagccagggacaagaaaaaggggaagaaatcttaacaggggtgtcataggatgtacacagaaattgtagaacagtgttaaaattttgggactagaaaatacaccaaatcagcaagggtgggacatgaggcattcttctacgcggaaacagtaggatagttccgtagtagttgtggcccaggtatgatgctacctagaaatggtggaatgaccattgctgctaggaggcggctgtaaat

SEQ ID NO: 108469 - DNA, 104 bp, Zea Mays
ggtctcaagattcattgttcaattatttgattgcaactgacctaagaattgatggagattccgtaaatgctaatttatgtggcaactatacaaggggcctttgc

SEQ ID NO: 108470 - DNA, 1311 bp, Zea Mays
atggacacggagccgctgctgccgacgcacctcctccacccgctgccggagcactcggaggtgtcccacttctcctcaccgccctcccccgcctgcccatccccggcctccttctacaaggaccgcatcatcttcggcgcacacccgccgccgccgccgccccctccgcctccgccgccgcgctcgcaccgcgcccaccaccgccacagctccgtcgacggcctccacgaccttgacctgccctccggctcctcgtccatgccctcgccgccgtcggacccggaggacccttccgccggcggcggcgcgccctccctcctcgaattcatcgctggcgcccgcaccaacctccaccgctcccgcaccgccccggccatggcgccgctcagcgccgtggcgctcgcggccgccgcggcggccggggaccagactccggcgccgcccaagcgcccctccatcgtgctgcacgccttcctcttcctgctcgcctacctcgccctcggcgtcaccttctacgccgccgcgcccgccaacttcacctcctcggcggggcccacgcaccccgtcgccgacgcgctctacttctgcatcgtcacgctctgcaccatcgggtacggggacatcacgccagcgacgcccgccgccaagctcttctccatatccttcgtcctcgtcggcttcggcttcgttgacatcctcctctccgggatggtctcctatgtgctcgatctgcaggagcacctcctcatcaccgcgctcaataacccaacctctgcgcgcaagcaccgccacaactacatctttgacatcaagaagggcaggatgcgcatccgtatgaaggtggcgctcgcgctgggcgtcgtggctgtctgcgtcggtgtcggggctgcagttctcaggaaggtggagagccttgggtggctcgacgccgtctatcttgcagtgatgtcggtgaccacagtcggttatggggatcaggcgttccagacactagctgggcggctttttgcatccgcttggctgctcgtgtccaccctggctgtggcaagggcattcctctacttggcagagatgaggattgacaagaggcaccgagccatggctaactgggtgctgtcgagggacatgaccgtgtctgaatttcttgctgcagacatagacaacaatggatatgtcacgtaagtccatgacttcacattttcctgcttgcatttactacctatagcaagattatgtccaaatgatttcctaattttgccgaggacacatcaatcatccattcatataccatgcaaatgggtggttttaagt

SEQ ID NO: 108471 - DNA, 100 bp, Zea Mays
cgagaggccaggttcaggtacgttctctcatagagcacgacatgtggcgcgttcactcctttctcttcagcttagaacttcgaaggaaggagaatagcac

SEQ ID NO: 108472 - DNA, 225 bp, Zea Mays
atggcgggcggtcgcctggcggtggcggcctggcgtgcgagctggagtctggagagtggagaggacagaggagggcaggagcaggagacgcgggccgctggcgagcgcgctgcggcgctggagcctggagaggaggtgcggccgcgtggtacaaggacgaacgacaggagagccaagcgtcggctggagctagggttggggctgggcgcgacgatgggcctctag

SEQ ID NO: 108473 - DNA, 2773 bp, Zea Mays
acacaatctactctccgttggatggccaaccttgtgctgatcatgatagggcaacaggtgaaggtgtgcagccacaagaatacgtcttgattaaaatggaggtgatatcaccttttcctcccaagctgaagtcattggaagggaggaaggtatacttggcagctgctacactaagacccgagacaatgtatggacagacaaattgctgggtccttcctgatggaatgtatggtgcttttgagattaatgacactgatgtcttcatccttacagcaaggtctgcttttaatcttgcataccaacacctatccagggtccctgaaaaaccaacctgcttatgtgagctatctggcagtgatttgattggtttgccactgaaatctcctcttgccttcaatgaaacaatatatgctcttccaatgctcactgtcttgactgacaaaggtactggcattgtgactagtgtccctagtgattcacctgatgatttcatggcactgcaagatttagtcacaaagccagcattgagagcaaagtatggagtgaaagatgagtgggttcttccttatgagattataccaataatccacattcctgaatttggagacaagtcagcagagaaggtttgccatgatcttaagattaaaagccagaacgacaaggagaagcttgctgaagcaaaaagaatgacatatctgaagggatttactgatggaacaatgattgtaggtgagttcagtggtagaaaggttcaggaagcgaaaccgctgattaaaagtaagcttttggaagaaggcacagctgtgttgtatagtgagccggagaagaaggtcatgtctagatctggtgatgaatgtgttgttgccctcactgatcagtggtatataacttatggcgaggctgaatggaagcagaaggcagtcaaatgtttggaccgcatgaatacattctcaactgaaacccgcaatggttttgaacatacgctgggctggctgaaccagtgggcttgttcacgttcatttggactcggtactcgaattccatgggatgagcagttccttgtagaatctctttctgattctactctatacatggcttattatacagttgcacaccttttgcaaaatggtaatatgtatgggaaagaaatatcttcagtaaggccagaagaaatgacagatgaagtctgggatttcgtgttttgtgatggcccggcaccaaaaagcgagatccctgccgctctgttgaacaagatgaaacaggaatttaagtattggtatccatttgatatccgtgtgtctggtaaagaccttattcaaaaccatttgacattctgcatatacaatcatacagcacttcttcctgagcaccactggcctattggtttccgctgcaatgggcatctaatgcttaactctgagaaaatgtccaagtccacagggaatttcctaactctggaagatgccataaaaaagtactcttctgatgccactagatttgcccttgctgatgctggcgatggtatggatgatgcaaattttgtcactgaaactgcaaattctgctgttatgaggcttacaaaagaaatttcatggatggaggaggttacagctgctgaatctaaattaagaactgggccgcccactacatatgctgaccgtgtgttttcaaacgagatgaacattgcaatcaaagaaactgagaagagctacaatgctttcatgttcagagacgccctgaagtctgggttctatgacctccaattggctagagatgagtacaggctctcttgtggtgcagcaggcatgaaccgtgatctgttgtggcgatttatggatgtccagaccaggcttatcacccccatttgcccacattatgccgagcacgtgtggcagaagatcatgaagaaagaaggctttgcaataaaagctggctggccagtcgcagacaccccggatcctacactgagaattgcaaataaatacctgcaggattccatagttttgatgaggaaactgcttcagaagcaagagtctggttctaagaagcctaagaagggagctgcaccggcacctccgtccgaggaaaagaagatgagcattggtctcatatatgtgaacgagcactactctggatggaaagagcagtgcttgagggtgctgcagtccaagttcgacagccaaagccgctccttctcacccgatcaggaaatagcagaagctctgaaggagtgccccatcgggcaggaaatgaacctgaagcaggttcagaagctgtgcatgcccttcatcaagctgaagaaggacgaggcaaaggaggttggtcctcaggcgctggacttgaagcttccattcggtgagatggatgttctccgggagaacttggagctgatcaagaggcagctgggccttgagcaagtcgaggtgctctccgcttccgacgaagctgctcgcgctaaggctggtgaacatgcttcgctgctagagaagaacccaccatcacccggcgaccccatcgccatcttcctcagcaaacagagctgaaaactgaacttgcatatggcccttttgttatttacttcgccgcacatttgcctcttttttgttttttgtttttgtgaaaccagtttcgtgtctgtcaacagagtatgttgtccttcggtttggtgaaaccagttttttttttctgtcaacagaatatgttatccattgtctgtgtaaaccagttcggctattgtcgacaaagtatgttaaggtgatgcggctttacatca

SEQ ID NO: 108474 - DNA, 612 bp, Zea Mays
aaagccgcgacgcctcaaatgctatatattattgattgatgaacagaaagtgaacatggatgcatggcaacacaagagatgaggtgggagaaaatataaaaggtacagtgacaatatgtgagataacataggcttgcatatagttgtactaattaataatctatgtatgcctagcttcgtcgtccttgcataagaaagtattcctgccgacgatgttgctgcgactgcgagtaatattccatgccgaactcgaaatcccggccggaaggctccactgggtgttgaagcgcgcgggggggcgccacgtcagaagctgccggcggagtcggaggagccttcgtcgccgttggcaccaccatgctcagtgcagacgacgacgatggatcatcatccgtttcgtacctcctggatgatggtacatcgccatcaggtttggcaagttgtgtgctcttgctaactggtggcaatggcgaacaagaaccagcatcatacgccttggcaggtggcggcagcggcggcggcggcggcacacactgacgacgaggaactatcgcctgcagcggtggcggcgtgtcgtataccgtaatcgtcggaggtcgaggcgggtgcggt

SEQ ID NO: 108475 - DNA, 318 bp, Zea Mays
cgtttataaaataaaatgacaatatgcactagttttggtcgggtttaaaaaacccacgggttcacgggtttgggtactataggaacaaacccgtacccatgaacccgtcgggtatacatttatgcccattaacaaacccatgggtatgaaaattgacccaaacccataccctaatggggtaaaaacccatcgagtttcgggtttcgggtacccattgccatctctagttgttgacgaccctgcaattctttttctgccaacatagaaagatggaacaagcgttgtatagaatgatattctttataatcaacaatatcc

SEQ ID NO: 108476 - DNA, 2043 bp, Zea Mays
aactgcagcttgctcgctgacttgccgccggcgagccccgctccgagcatctccgctgctgcttctgccgaatcccagagctccttctcccgcttgccccctttccctcctgtcacattgattcgattttcgtcgcccatggagctacaaattaagtgtaggaaccaattaaaagcttgccaaaactagggcggcggcatcagcattcagcaataccctaggcgggctctcctcgcctccacagctccaggaagccgacccagagcagcacagcgccgcccattctgtctctctcggtctcggcagcgtaggcagcgtcaccctccgcttaaaccaccagcaccagctgctggtgcgccgccccgcccggcaccgccgctcctctacctcttcctggtggattggtgagaggaagccctaacttggcctctcttgaatcaactcggcggtggctttgagtcagtaggtgttgttttgcgctcttattcaaaacccaaatctgtccctcctctcagattattgtgagtttatccctgccccaatccatctgtccatggtccgcgtgggcttgtcttccgcgcccggggtcaatctgacagagcaaatcgataatgtttttgaccaactgatcaacaagatagaacatgcggattttgatacgcggcctttcttgaaacaattgaatgtgttaggccgctatgaaccaatcaagcggaatgtatattgcactaagagacgcattgaagattatggcatttcttgtcactgtaagccttctcctggttcatcagttgtgtgtggcagagactgccattgtggcatgcttttctcttgctgttcatcacaatgtgaatgtgatgacacatgcaccaataaatcattccagcacagacctcttaagaaaaccaaattgattaagacagagaaatgtggtcatggattggttgctgaggatgaaataaagaaaggagaatttgttattgagtatgttggagaagttattgatgacagaacatgtgagaataggctatggacaatgaaaaggctgcttgacactgacttctacctttgtgaggtcagtagtaatatggtcattgatgcaacaaacaagggaaaccggtcccgattcataaaccatagctgtgaaccaaacacagcgatgcagaaatggactgttgatggagagaccagggttggaatttttgcacttcgtgacataaagataggggaggagctgacctatgactataacataatgtacagatttgtccagtttggagcagctcaagtttgtcattgtgggtcttcgaactgcagaaaaatgctaggcacgacgaagtattcaggaagctcacagaatcatcatgccaagaagaaaaagcggaaaacaagttgtgagaattgcatacagcagtttcttcggctgtggcatccacataaaaaaatgtatgttggttgttggataattgacttcgatcaagaaactaaaatgcatactctgaagttcaatgatctccatactgaaaagttcaatttgaaggaagaagaatggcacttcttagaggtcgattttgatgaagattgatcattgaaggtaactgcaagagttggctgccatggtttgtgacagggttgccatggtttgctgcaccgccggcctactagttgggggttcatttgcgatggcagcatagacagacggacggccatttttcttccattttggagtaatagtccaagcctgaactgtgacattcgtgcatgcttatacgtgaaagtgtacctgagagcagattatacgtgaaagtgtatcagcgttgcatatgcatggacggttgggtcccccagcgttttttttggtgctgcggcgatgcttgctgcctcgacaaacaagcatgtttcaagcgcctgcagctcatgtggtggcctacaaccgcaaccccccttccgttaccatcttccttctactacagtacagtactgtttccaacaacacatcaccaaccaatactacactacacaactacggcacagaaaataaaa

SEQ ID NO: 108477 - DNA, 2098 bp, Zea Mays
gtcagtgatggctagacttctcactccctcccagcttcttcggacgcttcgcttgtctaatcgctgcaactgcagcttgctcgctgacttgccgccggcgagccccgctccgagcatctccgctgctgcttctgccgaatcccagagctccttctcccgcttgccccctttccctcctgtcacattgattcgattttcgtcgcccatggagctacaaattaagtgtaggaaccaattaaaagcttgccaaaactagggcggcggcatcagcattcagcaataccctaggcgggctctcctcgcctccacagctccaggaagccgacccagagcagcacagcgccgcccattctgtctctctcggtctcggcagcgtaggcagcgtcaccctccgcttaaaccaccagcaccagctgctggtgcgccgccccgcccggcaccgccgctcctctacctcttcctggtggattggtgagaggaagccctaacttggcctctcttgaatcaactcggcggtggctttgagtcagtaggtgttgttttgcgctcttattcaaaacccaaatctgtccctcctctcagattattgtgagtttatccctgccccaatccatctgtccatggtccgcgtgggcttgtcttccgcgcccggggtcaatctgacagagcaaatcgataatgtttttgaccaactgatcaacaagatagaacatgcggattttgatacgcggcctttcttgaaacaattgaatgtgttaggccgctatgaaccaatcaagcggaatgtatattgcactaagagacgcattgaagattatggcatttcttgtcactgtaagccttctcctggttcatcagttgtgtgtggcagagactgccattgtggcatgcttttctcttgctgttcatcacaatgtgaatgtgatgacacatgcaccaataaatcattccagcacagacctcttaagaaaaccaaattgattaagacagagaaatgtggtcatggattggttgctgaggatgaaataaagaaaggagaatttgttattgagtatgttggagaagttattgatgacagaacatgtgagaataggctatggacaatgaaaaggctgcttgacactgacttctacctttgtgaggtcagtagtaatatggtcattgatgcaacaaacaagggaaaccggtcccgattcataaaccatagctgtgaaccaaacacagcgatgcagaaatggactgttgatggagagaccagggttggaatttttgcacttcgtgacataaagataggggaggagctgacctatgactataaatttgtccagtttggagcagctcaagtttgtcattgtgggtcttcgaactgcagaaaaatgctaggcacgacgaagtattcaggaagctcacagaatcatcatgccaagaagaaaaagcggaaaacaagttgtgagaattgcatacagcagtttcttcggctgtggcatccacataaaaaaatgtatgttggttgttggataattgacttcgatcaagaaactaaaatgcatactctgaagttcaatgatctccatactgaaaagttcaatttgaaggaagaagaatggcacttcttagaggtcgattttgatgaagattgatcattgaaggtaactgcaagagttggctgccatggtttgtgacagggttgccatggtttgctgcaccgccggcctactagttgggggttcatttgcgatggcagcatagacagacggacggccatttttcttccattttggagtaatagtccaagcctgaactgtgacattcgtgcatgcttatacgtgaaagtgtacctgagagcagattatacgtgaaagtgtatcagcgttgcatatgcatggacggttgggtcccccagcgttttttttggtgctgcggcgatgcttgctgcctcgacaaacaagcatgtttcaagcgcctgcagctcatgtggtggcctacaaccgcaaccccccttccgttaccatcttccttctactacagtacagtactgtttccaacaacacatcaccaaccaatactacactacacaactacggcacagaaaataaaa

SEQ ID NO: 108478 - DNA, 1987 bp, Zea Mays
gtcagtgatggctagacttctcactccctcccagcttcttcggacgcttcgcttgtctaatcgctgcaactgcagcttgctcgctgacttgccgccggcgagccccgctccgagcatctccgctgctgcttctgccgaatcccagagctccttctcccgcttgccccctttccctcctgtcacattgattcgattttcgtcgcccatggagctacaaattaagtgtaggaaccaattaaaagcttgccaaaactagggcggcggcatcagcattcagcaataccctaggcgggctctcctcgcctccacagctccaggaagccgacccagagcagcacagcgccgcccattctgtctctctcggtctcggcagcgtaggcagcgtcaccctccgcttaaaccaccagcaccagctgctggtgcgccgccccgcccggcaccgccgctcctctacctcttcctggtggattgattattgtgagtttatccctgccccaatccatctgtccatggtccgcgtgggcttgtcttccgcgcccggggtcaatctgacagagcaaatcgataatgtttttgaccaactgatcaacaagatagaacatgcggattttgatacgcggcctttcttgaaacaattgaatgtgttaggccgctatgaaccaatcaagcggaatgtatattgcactaagagacgcattgaagattatggcatttcttgtcactgtaagccttctcctggttcatcagttgtgtgtggcagagactgccattgtggcatgcttttctcttgctgttcatcacaatgtgaatgtgatgacacatgcaccaataaatcattccagcacagacctcttaagaaaaccaaattgattaagacagagaaatgtggtcatggattggttgctgaggatgaaataaagaaaggagaatttgttattgagtatgttggagaagttattgatgacagaacatgtgagaataggctatggacaatgaaaaggctgcttgacactgacttctacctttgtgaggtcagtagtaatatggtcattgatgcaacaaacaagggaaaccggtcccgattcataaaccatagctgtgaaccaaacacagcgatgcagaaatggactgttgatggagagaccagggttggaatttttgcacttcgtgacataaagataggggaggagctgacctatgactataaatttgtccagtttggagcagctcaagtttgtcattgtgggtcttcgaactgcagaaaaatgctaggcacgacgaagtattcaggaagctcacagaatcatcatgccaagaagaaaaagcggaaaacaagttgtgagaattgcatacagcagtttcttcggctgtggcatccacataaaaaaatgtatgttggttgttggataattgacttcgatcaagaaactaaaatgcatactctgaagttcaatgatctccatactgaaaagttcaatttgaaggaagaagaatggcacttcttagaggtcgattttgatgaagattgatcattgaaggtaactgcaagagttggctgccatggtttgtgacagggttgccatggtttgctgcaccgccggcctactagttgggggttcatttgcgatggcagcatagacagacggacggccatttttcttccattttggagtaatagtccaagcctgaactgtgacattcgtgcatgcttatacgtgaaagtgtacctgagagcagattatacgtgaaagtgtatcagcgttgcatatgcatggacggttgggtcccccagcgttttttttggtgctgcggcgatgcttgctgcctcgacaaacaagcatgtttcaagcgcctgcagctcatgtggtggcctacaaccgcaaccccccttccgttaccatcttccttctactacagtacagtactgtttccaacaacacatcaccaaccaatactacactacacaactacggcacagaaaataaaa

SEQ ID NO: 108479 - DNA, 934 bp, Zea Mays
gtcagtgatggctagacttctcactccctcccagcttcttcggacgcttcgcttgtctaatcgctgcaactgcagcttgctcgctgacttgccgccggcgagccccgctccgagcatctccgctgctgcttctgccgaatcccagagctccttctcccgcttgccccctttccctcctgtcacattgattcgattttcgtcgcccatggagctacaaattaagtgtaggaaccaattaaaagcttgccaaaactagggcggcggcatcagcattcagcaataccctaggcgggctctcctcgcctccacagctccaggaagccgacccagagcagcacagcgccgcccattctgtctctctcggtctcggcagcgtaggcagcgtcaccctccgcttaaaccaccagcaccagctgctggtgcgccgccccgcccggcaccgccgctcctctacctcttcctggtggattgattattgtgagtttatccctgccccaatccatctgtccatggtccgcgtgggcttgtcttccgcgcccggggtcaatctgacagagcaaatcgataatgtttttgaccaactgatcaacaagatagaacatgcggattttgatacgcggcctttcttgaaacaattgaatgtgttaggccgctatgaaccaatcaagcggagtatccttgccaactagacttttgaatcttcactgtaatataggagtattgtttttctcaagataatttatttgcacatttgcctcgtttaattcttactgttcatcatcaaaatatcatattctgacacgtccttgttcaacatattcaaactttctattctatgcctcttttatcagtcaagttagtatttcatccaacatatcctgtaacttgactacattacatagtcctagcctgaagtagaaatcagtgcaggaac

SEQ ID NO: 108480 - DNA, 1450 bp, Zea Mays
ccctccccccaccatcagcagaccaccaccaatcacacacaccggccggccagctctctagctcttcctccaacacttgttgctccgctcccatcccctcaagcctctcttcactgaattttctggtcgccatgcacagctactacagagccatgcacccgtacgctcacccgtaccagcaccatgccgccgccgttgcccccaccaccaagcactacggccactgccatgatgccgaggaggaggacgaccatcagtccatgctgctcctctccctgtggcctcccggccaccaccaccacagcgtcgccgccgctgcttcctcggcgtgctcgtctcctcccaccatctgcgccaccaccagcagcaccagcaccagcaccacctccatggccgcctcctccgcttcttcttaccctttttgcctcacccaccaaagccattacaatggcggcggatctgcagggagcagcagccacagtagctgcttcctgttccaccacgagcaccagcagcaggaggagcccgatgtgagcatatcgctgtccatagccccgccgcgcagcaacaacgacgcagcttcctgtggtggccgtggcttcgctgccccgtcgaccgtgacgacgccggaggtgcccaccagccagtactggatcccctccgcctccgagatcctggtaggctccacgcagttctcctgcgccgtctgcaacaagaccttcaaccgcttcaacaacatgcagatgcacatgtggggccacggttcgcagtaccgcaagggctccgagtccctgctacgcggcgccattatcacggtgggcacggcggcggcgtcgtcgtcgtcgtcgctgacgcgcctgccgtgctactgctgcgcggaggggtgccggaacaacatcgagcacccgcgggcgcggccgctcaaggacttccgcacgctgcagacgcactaccggcgcaagcacggcgcccggccctacgcgtgccgccgctgcggcaagcgcttcgccgtgcgcggcgactggcgcacgcacgagaagaactgcggcaggctctggttctgcgcctgcggctccgacttcaagcacaagcggtcgctcaaggaccacgtccgatccttcggcggcggccacgcgccgcgcgtcgtcgagtccgtcgccgtcgaggacgaggaggaggaggaggacgacgatgatggcgacctgcagactttcgacgacgacaacgccaacggcgccagcgaagaacccagcgacatggccgtcgtctagaggcttgcttcttcattaattagatcgatgtggtactatagtatgctagctactctagtactccaccgatggacataagtagttctaatgtgctgctcatgcatctcttagccgatcgcgctgtctgattagctatatatagatttcatttcagtagcgctatatatacactacctttc

SEQ ID NO: 108481 - DNA, 85 bp, Zea Mays
cgacgcttgaagaaggacctaatgtgagcttttacatacttgatgaacagcttgagctcttgagcaaggtgttgaatgcagggga

SEQ ID NO: 108482 - DNA, 2042 bp, Zea Mays
attgtcattgtgtgatacctgctaccaccggccaccagctctataaattggtgcaactattggctgcccccatcatatcgatcagctcttgcaaccttatctccattgcattgcattgcattagtagagggagatccatggccagagaaatggagaaggcaaagaaggccgcatcttcccctaagagctcaacaattagtactggtcccaagagcccggtgaggaatggaggaggatcgtctccccctcataagaaaaacactactactaccgaggcacgtggacggaaacatgagcagcaaaacgttcgaaaaggaggagacacgttgtctcatgacgagagcaaaccacgccgttcctcatcaactgcggcacaaacctcacccaagagatcaccgagacacgaacaacccctgagctacaacaggctccacactgaggagagagcaataaggcgagctggctacaattatcaggttgcaagcaagataaatacccaggaaatcattcgcagatttgaagagaagcttgcacagttgatggaggagcgcgagataaagctgatgaggaaggatatggttcccaaggcccaactgatgccagcatttgacaagccattccacccacaaaggtcgacgaggcctctgacggtgccaaaggagccgagtttcctgaggctgaaatgctgcatcggtggggagttccatcgccatttttgctacaatggagccaacaacaaggccatcaagtcgtagtccatacataatacatgcatgcagagagatatacacacatgtgcctccctacactacagtaaccggaaacaagccgagtgtctgaagctacaataccgatcagcattctttttgccgccgccgttgcatacgtttccaacagaactactgtataacccacgcaatccatgcatatatacatagaagttgcacatgtacgcacaaatttttcacgtacgtagcacacacagatgtggttaatcgcatgctgatgatgtaattaaatttcgcctgccgttcccccacttctttttctttgtcttttacattttccatccctctaggttaagttctcttttcctcatttagctagcttgttccatgcatgtatatttttgctggcataaataaaaagctttcatatatatatatatatatatatatatatatatatgactaggtatgtgcccgtacgttgcaatggaagtaaaaaaagttagtataaaacataaatacagaacaacaaacatcactataatataaaaaaaataaaaaataaacaacaataaatatgtcgtgaattgtaatcaacatctcatgctggtacacacagtcatcaaagtggagttgaatatcccgaattgcttggtttactcggtccatcacagaagggatcatcagctactgccaatataatgaacttcaaaatcattagaaaattttgcctcgccacttggtccgtcaacatgccctcctgtgcctggttccccccatcaatccccctaagaatcaaaacccaatatgtcaggcacaaaggaactttttctttacaagagattagacaagagagaagtatgcataatgattgcagaaacgtctaaatctatactacctattaagactctaaggggtaggctgcctctgacatgttctgccttccagcgatctggaccgtccaatacgccataaagtccctctgtcgtccgatgtgtgcgccctcttccccgatgcacacctgctcgcgatccctgttttgcctcccctattcggatccaaaaccctaagcggcggcggcgcggtgcccgcagcctggatcccaagtcctgctccccctgtcaagcagtcgttcctccactatgcttacctatcccacgccgcgtcagcctccttgtccgccctcccgctcccccggggaccgttggtcgtcgctttccaggggcctcgacgtgcccaacctgacgaagcgatgcgggaggttcgtctctaccacgccctgccccaggcgcttcgacctccgccttcacatcc

SEQ ID NO: 108483 - DNA, 3124 bp, Zea Mays
cgtcgccgtttcggtctccggaaaggaaagcaaaagagaaggagggggcgagagaagaaactgatttttggcgaggccaagccgggggtgggattaccgggagcacgctgactgggatcacggcggatggcggcggcggataggcagttggtagttgccgtcgaggggaccgcggcgctggggccctactggtccaccattgtggcggagtacgtcgagaagatcgtgaggagcttttgtgcaagtgaactgccaggccagaagcttgtgggtactccgcctgaacttgcattagttgtttttcatacccatggaccttacagtgcttttgatgtgcagcgaagtggatggacaaaagatgtcgatgctttcctatcatggttatctggaatattgttcagtggtggaggattcagtgaagcttctacttgtgaaggtcttgctgaagcattgaagatacttcaaggcaatcctaatacaacccaaggtcatcaaaaccatgaagcacaaaagcattgcatacttgtcgctgcaagtaatccttatcctctgccaacacctgtatactgtcttcctactcaaagtactgatcacaaagagaacattgagacatcaaaagaaccttcaattgctgatgctgagaccgttgcaaagtcatttgctcagtgctctgtctcattgtcagtgatatctccaaaacagcttccaacattaaaggcaatatacaatgcgggcaagcgaaatcttcgggctgctgatccatcagtcgaccatgcgaaaaatccacacttccttgttttgctctctgagaatttcatggaggcacggactgctcttagtcgccctttacatggaaacttggctccaaatcaaaccataacgaagatggacacggcacctgcagtgactatgccaggaccaacatcaaatggcaactcctcaggccgtcaaccaattgttggaggtatttctaccacatctgttaaagtggagccaacaaccatgccaccgatagtttctgcacctgctttctcgcatgtaacgcctatttcaaatgtggcttcacaaggaatatcagcactgcaaacctcatcaccttctcttatttcacaagaagcaaatatgggaaatgataatgtacaagaacacaagcctataataaacccagttcaacaaccgattcggcctggtggtcatggcagcctcctcaacaatctgtcacaggttcggttgatgaactcaacttctttaggaggaggagctacctcgatgggactgcctaacatgggagcaacaccaatacaagtccacatgtcaaacatgatatcaagcggcatgacatcaacaccctctgtcatctcctctatgtctggacctggacaacctattagtactcaacagatggtacagagcacagctcttggttcgtttggctcaaacactcctactgttacaggcaattcaactattgctgtatcatcctctttgactaacaaccaaagcagcatgggcatgggtcaatctgtgcaatctgtggcacagggaggcttggtgtctggttcacaattaggacaaggtggaattgttgcaaaccaaaatgtgatgagcacccttggacctacagctatctcttcaacgcctgcgatgatgccgacacctgggatggtcccacagacaggagtcaattccttaggtgtgaataacaattctgctatgaatatgcctattacgcagcagcatgccaatgcccaacagccgccaccaaagtacgtcaaaatttgggagggaactttatctggccaaaggcaaggacagcctgtaataatttgtaaactcgaaggttataggagtggaacagcgtctgaaacacttgcagcggactggccagaaacaatgcagattgttcgcctcatagcccaggagcatatgaacaacaaacaatatgttggcaaggcagactttctagtttttcggactttaaatcaccatgggtttcttgtacaactacaagagaagaagctgtgtgctgtgatacagttaccatcgcaaactctgttgctgtcgatggctgacaaagcaggtcgtttgattggcatgctcttccctggggacatggtggtgttcaaaccgcaggcctcaactcagcagacaccaatgcagcaacagcagctacagcaatttcaacagcagcagcagcagctgcaacaacacatgcatatgcagccgcaaggcctcccacttcagcaatcacagatgcaactccagcaacagcagccgcagatgcaaccgatgcagcagcagcaaccttcgcagatgcagcagcagatgcaatcgatgcagcagcagatgcagccaatgcagcagcaaatgcagcatcaacagcaacagatgcagcatcaacagcaacagatgcagcaaatgcagcagcagcagcagcaacaacaacaacaacaacaacagatacagcctcagcagcaacagatgcagcaaatgcagcagcagcagcagcaacagatgcagcctcaacagcaacagatgcagcaaatgcagcagcagcagcaacagatgcagcctcaacagcaacagatgcagcaaatgcagcagcagcagcaacagatgcagcctcaacagcagcagcaaccccagatggtgggtacaggaatggggcagcagttcatgcaggggcacaatcgggcagtgcagatgatgcaagggaagattacgccacaggggccgggcagcatgcctgggggaggcttcctaccttaagcaccttttatcagcaggcatcagatgaattgagggtttacactgacccaagtgttgagatgtcaacttcatttgacagggttagggaatagtcactcggggagtgttgctaaaacttaatctgaaaacttaagcatccctgtcaccgataggtaaatgccagatgtccatgcataggtgcatactttatgatatggtggtgtactcgtaatcttgagtgactttatggcattgttgtactagccgtaaactattaggtataacagaattattatttaaactacagtaaaataagtgacctgtgttgtttagggtttaaatggtacgttaaataggtagttgaatcatttaagca

SEQ ID NO: 108484 - DNA, 948 bp, Zea Mays
ttaacacattatgtgacattgacataaatatatttagatgacaaaaccaaaattcagctaatataagtatagctgccgactaccagaagcattcaaacaaaagtttcagaaggattggaggggcaacccaaagtccatggaagggtggcatcaaacaaacagcttgggtgtggacagctcaagatcttgttggagctgatcacacagtctagcatgaagggccatgacataacactccgcttgatgccgagcgctccctcctagactgatctgcgccgatcagcgtggtggtgtgctgccgtctatctgtctgtctggctctctcaaaggcataacactatgcctgcctgtcctcgatcgccttgtgtgtgtgtgtccttgtctgttccggcgtcgtcttccggccagcgcccatgtgcgccatcgctgtcctgtccccgcggtaaaaccgaacgcgcaagcacactcccagtcccggcagcaccaataaactcaacctcgccggcgggcagggcggggtgaagcaaagcagtagacgagagtttggaaagcgggaggtgaggaggcacgacgtaccgggacgaggaggcctagcaggggagatgcgatgcgaggagctggtgccatagtgggctactggtcactgccggcgcgttgtgcattgccctggtccccgcctccccggaccggaccccggccgccccctcccgcggtcccgcccggcctccgctccggactctcttgcatatgggactgtgagatgacccgccgcgcgccgcgtaaaaacctctgggcatcgagccacttccgggcgtggcagtggcactagggtcggtgcaggcacatcgggggagggcggctcggccagggctcagccgttgctgctcggtcgggacagagaggagcgaggcgagggaagggaggagaggtgaggggagagagaagagg

SEQ ID NO: 108485 - DNA, 300 bp, Zea Mays
atgctaacaagacatttccgtcaccaaagccatcttcaacacttcgccgggacgaggaggcctagcaggggagatgcgatgcgaggagctggtgccatagtgggctactggtcactgccggcgcgttgtgcattgccctggtccccgcctccccggaccggaccccggccgccccctcccgcggtcccgcccggcctccgctccggactctcttgcatatgggactgtgagatgacccgccgcgcgccgcgtaaaaacctctgggcatcgagccacttccgggcgtggcagtggcactag

SEQ ID NO: 108486 - DNA, 727 bp, Zea Mays
ataaatgtagcttttcgtcgatccttggtgggtaataatcttatggcttggcagcagcttatagccttggttaccaatactcaactaaacgatcaaagggatatttttatttggtccttacatcagcatgggaagttcacaatgtgttctatgtataagtctctggttaggccacaagtggttccaagaaatcatcccatttgaaaaatcaaaattcctctcaagattaaaatctttatgtggtaccttataaataatttagccctaacaactgataatttagtgaagaaacaatggaaaggctgcctacgatgtgtagcatgtacgttaaatgaatccattcaacatctgttctttgactgccatattgctaaatgtgtttggcgttgtattcaagttgcgtttaatatttcacctcctaagaacattgatcatttatttacatagtggctttatggggttgatatgaaacttagcaataaaatttggtttggagcgagtgctatatgttgggcgatatggctttgtcgaaatgatgagcttttttaaaaatgcacaagttcctactcctatgctggtacttttcaggggcacatactggatgagacaatggatgctgctgctaaagcaagaagacggattacaagtaaagcagggatgcaggctgcttgaagtcgcaatgatgcaaatatttgctaaaaatgactggaactttagtaatcgattg

SEQ ID NO: 108487 - DNA, 513 bp, Zea Mays
atgtcaagtggaagctcgtttgggtcgagccagtggactcagagatccaggtcggcggaggatgacctggacctggacctccaggccgagatggagaagaggaggaaacgaaggaaggagtccaaccgagagtcggctcggaggtctaggctaaggaagcagcaacaccacgacgacctcacgtcacaggtagaccagctgaagggccagaacaagcagctcaacttggcgctgagcacgaccagccaaaacctcgtggcagtgcaagcgcagaactctgtcctgcagacccagaggatggagctggccagcaggctgggcgccctgaccgagatcctctggtgcatcagctcaagcaccggcactgctgctcctcctacaaacccagccatggtgaacggcggcgtcacgacgacatggagctggagcgacgcctctggtgatattcttggcgccagcgcatggaaccaccagcagcagcagcccatagacgcgtaccggtgctattattag

SEQ ID NO: 108488 - DNA, 851 bp, Zea Mays
tttttttttacattgtgatggctctatcatctaaagtttgtgttgtcattgcctattacactacttcagggtcttttgctggtctaggcttccttgcatggtacttagctgggaaactcacagcctttgaccgcaaagggcatattgcgaagctatgcattgtgttcctgcctctccttactgccgcacttgtggctgtttctcgagtggacgactactggcatcattggcaagatgtatttgcagggggtcttataggtcttacagttgcttcgttttgctacctacagtttttcccatatcctttcgatggcgatgctttgtggcctcacgcatacgcggtccggttagccgaggaggggaacagcagaaatgcgaactcatacagcgtgagaccaaccgaaatcgaaacagtcgatattcctgggcacggtgggatcatcaccctaagagatactctaaacgatgtggagtctggcagtgccaggagattgtgagatgggtctgcaggtgtggagattgatgtctcagataccatgggagttgcttgcatatgtgtacaggtagatctattgtagagctgttgactgctgccaccgtgataggggagggttgtttagacgggcctggcagtaaatttacttggtagggtgctgtttcttctgagaacctttggcttttgtttgtatatatgctcttatcaaagtgttgagttcagagttgtggttaaagtttgtttgctgacactctttgtaaccagtttggtcgctgcattcagcaactatgatctgatcagatgttgcccagtctactgttgttcttatattaagcgtgaaattcatttgtcacca

SEQ ID NO: 108489 - DNA, 1451 bp, Zea Mays
attgtttcctaccatttttcctttatgtccctctctctctctctctctctctctctctgcctcttagcttgtttcacgcattctggtaggagacgaggatcgaggaggcaccgatccgtagcggcgatatcgtagagccgctggtctcacgccgcaccgagacaatggcagaccagttagggtcttacactattagatcccatggaatgatattggcaaggttgcacatgtatgactggataatacttctcctccttgctgtcatagacgggctgttgaatataattgaaccatttcaccgttttgttgggaaagacatgatgactgacttgagatatcctatgaagggcaatacagtgccattttgggctgttccactgattggaattatactgccttgggccatctttgttgggatttacttcaaaaagaagaatttttatgatttgcaccatggcatactggggattctatactcagtgctgataactgcagtgattactgatgcaattaaggatggtgttggacggcctcgtccagattttttctggcgctgtttccctaatggaaatgatgtttatgataacattactactggtgttatatgcaatggagtgaagagcgtaatcaaggaaggccacaagagctttcccagtggacacagttcatggtcttttgctggtctaggcttccttgcatggtacttagctgggaaactcacagcctttgaccgcaaagggcatattgcgaagctatgcattgtgttcctgcctctccttactgccgcacttgtggctgtttctcgagtggacgactactggcatcattggcaagatgtatttgcagggggtcttataggtcttacagttgcttcgttttgctacctacagtttttcccatatcctttcgatggcgatgctttgtggcctcacgcatacgcggtccggttagccgaggaggggaacagcagaaatgcgaactcatacagcgtgagaccaaccgaaatcgaaacagtcgatattcctgggcacggtgggatcatcaccctaagagatactctaaacgatgtggagtctggcagtgccaggagattgtgagatgggtctgcaggtgtggagattgatgtctcagataccatgggagttgcttgcatatgtgtacaggtagatctattgtagagctgttgactgctgccaccgtgataggggagggttgtttagacgggcctggcagtaaatttacttggtagggtgctgtttcttctgagaacctttggcttttgtttgtatatatgctcttatcaaagtgttgagttcagagttgtggttaaagtttgtttgctgacactctttgtaaccagtttggtcgctgcattcagcaactatgatctgatcagatgttgcccagtctactgttgttcttatattaagcgtgaaattcatttgtcacca

SEQ ID NO: 108490 - DNA, 1732 bp, Zea Mays
tttttttttgtttaaagaaaagaatttgaaacagagatcaaggagtggggaggttgcaatgcaagggggctctgacacccgtggcgcgtggttacctaccgctaccggcaagcgtgattatcattgacagactggggcgacgcctcctgagtcctgacgcctgttcaaataaaatcgaattcaaatgttcactaccacccatcccgaaagagccccagcccgcagggagtcaagtagtcaaccgttctgcccgctccccctcacacaaaaggcaaaccacccgccaccgtcggcagacggcaactactttcatttcgtcgtcgtcgcccgcccccacccgctcctccactccaccaccaccggacagatacggatgtctccgcccgcacatccacttcacaaacgaaaacccgcagcaaacgctagcagcggcggcgccggcagttggtagccgcgaccgagacacggcgggtgacctgccccgccgcagtcggggtgtatgtattaccaccgccagaattccaggagacaatggcagaccagttagggtcttacactattagatcccatggaatgatattggcaaggttgcacatacatgatgactgacttgagatatcctatgaagggcaatacagtgccattttgggctgttccactgattggaattatactgccttgggccatctttgttgggatttacttcaaaaagaagaatttttatgatttgcaccatggcatactggggattctatactcagtgctgataactgcagtgattactgatgcaattaaggatggtgttggacggcctcgtccagattttttctggcgctgtttccctaatggaaatgatgtttatgataacattactactggtgttatatgcaatggagtgaagagcgtaatcaaggaaggccacaagagctttcccagtggacacagttcatggtcttttgctggtctaggcttccttgcatggtacttagctgggaaactcacagcctttgaccgcaaagggcatattgcgaagctatgcattgtgttcctgcctctccttactgccgcacttgtggctgtttctcgagtggacgactactggcatcattggcaagatgtatttgcagggggtcttataggtcttacagttgcttcgttttgctacctacagtttttcccatatcctttcgatggcgatgctttgtggcctcacgcatacgcggtccggttagccgaggaggggaacagcagaaatgcgaactcatacagcgtgagaccaaccgaaatcgaaacagtcgatattcctgggcacggtgggatcatcaccctaagagatactctaaacgatgtggagtctggcagtgccaggagattgtgagatgggtctgcaggtgtggagattgatgtctcagataccatgggagttgcttgcatatgtgtacaggtagatctattgtagagctgttgactgctgccaccgtgataggggagggttgtttagacgggcctggcagtaaatttacttggtagggtgctgtttcttctgagaacctttggcttttgtttgtatatatgctcttatcaaagtgttgagttcagagttgtggttaaagtttgtttgctgacactctttgtaaccagtttggtcgctgcattcagcaactatgatctgatcagatgttgcccagtctactgttgttcttatattaagcgtgaaattcatttgtcacca

SEQ ID NO: 108491 - DNA, 1887 bp, Zea Mays
tttttttttgtttaaagaaaagaatttgaaacagagatcaaggagtggggaggttgcaatgcaagggggctctgacacccgtggcgcgtggttacctaccgctaccggcaagcgtgattatcattgacagactggggcgacgcctcctgagtcctgacgcctgttcaaataaaatcgaattcaaatgttcactaccacccatcccgaaagagccccagcccgcagggagtcaagtagtcaaccgttctgcccgctccccctcacacaaaaggcaaaccacccgccaccgtcggcagacggcaactactttcatttcgtcgtcgtcgcccgcccccacccgctcctccactccaccaccaccggacagatacggatgtctccgcccgcacatccacttcacaaacgaaaacccgcagcaaacgctagcagcggcggcgccggcagttggtagccgcgaccgagacacggcgggtgacctgccccgccgcagtcggggtgtatgtattaccaccgccagaattccaggagacgaggatcgaggaggcaccgatccgtagcggcgatatcgtagagccgctggtctcacgccgcaccgagacaatggcagaccagttagggtcttacactattagatcccatggaatgatattggcaaggttgcacatgtatgactggataatacttctcctccttgctgtcatagacgggctgttgaatataattgaaccatttcaccgttttgttgggaaagacatgatgactgacttgagatatcctatgaagggcaatacagtgccattttgggctgttccactgattggaattatactgccttgggccatctttgttgggatttacttcaaaaagaagaatttttatgatttgcaccatggcatactggggattctatactcagtgctgataactgcagtgattactgatgcaattaaggatggtgttggacggcctcgtccagattttttctggcgctgtttccctaatggaaatgatgtttatgataacattactactggtgttatatgcaatggagtgaagagcgtaatcaaggaaggccacaagagctttcccagtggacacagttcatggtcttttgctggtctaggcttccttgcatggtacttagctgggaaactcacagcctttgaccgcaaagggcatattgcgaagctatgcattgtgttcctgcctctccttactgccgcacttgtggctgtttctcgagtggacgactactggcatcattggcaagatgtatttgcagggggtcttataggtcttacagttgcttcgttttgctacctacagtttttcccatatcctttcgatggcgatgctttgtggcctcacgcatacgcggtccggttagccgaggaggggaacagcagaaatgcgaactcatacagcgtgagaccaaccgaaatcgaaacagtcgatattcctgggcacggtgggatcatcaccctaagagatactctaaacgatgtggagtctggcagtgccaggagattgtgagatgggtctgcaggtgtggagattgatgtctcagataccatgggagttgcttgcatatgtgtacaggtagatctattgtagagctgttgactgctgccaccgtgataggggagggttgtttagacgggcctggcagtaaatttacttggtagggtgctgtttcttctgagaacctttggcttttgtttgtatatatgctcttatcaaagtgttgagttcagagttgtggttaaagtttgtttgctgacactctttgtaaccagtttggtcgctgcattcagcaactatgatctgatcagatgttgcccagtctactgttgttcttatattaagcgtgaaattcatttgtcacca

SEQ ID NO: 108492 - DNA, 1818 bp, Zea Mays
tttttttttgtttaaagaaaagaatttgaaacagagatcaaggagtggggaggttgcaatgcaagggggctctgacacccgtggcgcgtggttacctaccgctaccggcaagcgtgattatcattgacagactggggcgacgcctcctgagtcctgacgcctgttcaaataaaatcgaattcaaatgttcactaccacccatcccgaaagagccccagcccgcagggagtcaagtagtcaaccgttctgcccgctccccctcacacaaaaggcaaaccacccgccaccgtcggcagacggcaactactttcatttcgtcgtcgtcgcccgcccccacccgctcctccactccaccaccaccggacagatacggatgtctccgcccgcacatccacttcacaaacgaaaacccgcagcaaacgctagcagcggcggcgccggcagttggtagccgcgaccgagacacggcgggtgacctgccccgccgcagtcggggtgtatgtattaccaccgccagaattccaggagacaatggcagaccagttagggtcttacactattagatcccatggaatgatattggcaaggttgcacatgtatgactggataatacttctcctccttgctgtcatagacgggctgttgaatataattgaaccatttcaccgttttgttgggaaagacatgatgactgacttgagatatcctatgaagggcaatacagtgccattttgggctgttccactgattggaattatactgccttgggccatctttgttgggatttacttcaaaaagaagaatttttatgatttgcaccatggcatactggggattctatactcagtgctgataactgcagtgattactgatgcaattaaggatggtgttggacggcctcgtccagattttttctggcgctgtttccctaatggaaatgatgtttatgataacattactactggtgttatatgcaatggagtgaagagcgtaatcaaggaaggccacaagagctttcccagtggacacagttcatggtcttttgctggtctaggcttccttgcatggtacttagctgggaaactcacagcctttgaccgcaaagggcatattgcgaagctatgcattgtgttcctgcctctccttactgccgcacttgtggctgtttctcgagtggacgactactggcatcattggcaagatgtatttgcagggggtcttataggtcttacagttgcttcgttttgctacctacagtttttcccatatcctttcgatggcgatgctttgtggcctcacgcatacgcggtccggttagccgaggaggggaacagcagaaatgcgaactcatacagcgtgagaccaaccgaaatcgaaacagtcgatattcctgggcacggtgggatcatcaccctaagagatactctaaacgatgtggagtctggcagtgccaggagattgtgagatgggtctgcaggtgtggagattgatgtctcagataccatgggagttgcttgcatatgtgtacaggtagatctattgtagagctgttgactgctgccaccgtgataggggagggttgtttagacgggcctggcagtaaatttacttggtagggtgctgtttcttctgagaacctttggcttttgtttgtatatatgctcttatcaaagtgttgagttcagagttgtggttaaagtttgtttgctgacactctttgtaaccagtttggtcgctgcattcagcaactatgatctgatcagatgttgcccagtctactgttgttcttatattaagcgtgaaattcatttgtcacca

SEQ ID NO: 108493 - DNA, 705 bp, Zea Mays
atggaaaagaggagaaagtcgttggtgaggagcttggtgtggacgacgcacttggaggaggttggtgtggacgacgcacttggtgtggaccagcagaacatccccgcggcggccattaggggagctcggagaggggcgacgctggtgtccttggatccatcggcgtcgacctcgcgagctagggcaagcgcagatccggacgtcttgttgggggcgacgctcgaagcgggggcgcttggaattgggcgagacctgcgatccaacgacggtcacacgcgcgtagccggtagacggccaacgcgcgcagatggcaggcggggatggtggcgagatttggagattctccttccgagggaggagcggatccgacggcatggacagcagaggctctgctcgcgggcgtgggatccgggggcggaggctctgctcgcgggtggctggaagacacgcgcagagggcgtggacagcagagaggagagcgggggcgagggagatgccagacgcgcgcagatggagggcggggatggcggctggtgctgcgcggagcggagggtgtcgcaggtgggaggcagaaccgtgcgccattacgttgtgaacgtctacactacgttcttaagtagtagtagagatatagctcgtgactacacccaaatcgagttttggttatgttcgtacattcaaaaagcttcaagaagattgatttaa

SEQ ID NO: 108494 - DNA, 113 bp, Zea Mays
agttttcttttacattactcatcatactttcacagaattaataaatagaaatggacttcgatggaagaaaccagaccaacaatgtatagaaagatgcagttacaaaaggaaag

SEQ ID NO: 108495 - DNA, 1704 bp, Zea Mays
gctgtggcgcagcccagtaggccatcgttcactgttcgcacacacgggacacggcacgccgcaggccgcagcgcgcgcgagagggagccggagccggctgcctgcttgaacgcctggtaacacggcctctcgcttcccctcccaaactttccctaccccgaccgccgatcctcctcgccttgacgtccaagagccccggtccgatgggtcgtccgccgagcgccggtgctccggcgttccgcttcctcccgtccgaggtggcggagatggaggcgcgcctgctgcagctcaacaacggcatccccacccgcgccgtgctgcagaccctcgcggataagttctccgcttcgcccgagcgcgctggcaaggtggccatccagcccaagcaggtgtggaactggtttcagaacagacggtactcacaccgggccaaaactcccagggccgcgtcgtcaccgccggctaagatgacgccctcgggagctgatcaccaccagcatgccgctaacgcctccgccttcagggctgctcagctctcttctgttgctgctgcgcaccacggttcctcctctacagggaagaatcctgtggaaagtgtctcagttgagtttgaggccaagtcagctcgtgatggtgcatggtatgatgttgctgcctttctttcacataggttgtttgaatccggtgacccggaggtgcgggttcgtttttctggatttggggcagaggaggatgaatggatcaatgttcgcaaatgtgtgcgacaacgttctcttccatgcgaggccacagaatgtgttgctgtgcttcctggggacctgattctttgttttcaggaaggtaaagatcaggctctctattatgatgctcatgtccttgatgctcaaaggagaaggcatgacgttagaggttgccgttgtagatttcttgttcgctacgaccatgattcttctgaggaaattgttccactgaggaaggtgtgccgccgaccggaaactgactacaggcttcagattctgcatgctgctagagcggcagccactaatgcagatgttcacactccacccaaagaggttaaggtggagttggcgtccactgataagagcccagccgagcagaaaccccataagcagcacaagatgatggacgtgaacactgatgaggtgaccatggtctccaccttggagcaagatgagacaccaggcaagactgtagcccccgtaccgtcagcaactgcagaaacccgcaattcaagttcggacacagtgatgaaaggtgctgaggcttcctcggtcgttgaagatgacgatgaagtgcaggcagttgacaagatgaaagaggggtagggttttttttttctgtcaccttttgttatctaggtcagtgcctgtcttaattaccatgtagcatcttaatggcctcagaagcttgtttgaaggcctatgtgagcctttgccttgcctacacctttttgtttggtcgatgatatggtgaaatggaacctggctgggatggttctgtttctccgagggacttttgttatctgtggtcttccttctccagcgtgggcagaggggcgccagagactgcgggtttcgcttcaggatctcagggtaaaatgtgtagctgttcgattgattgtttgcttcactccattgagcgttgttcgtcaataataatttattggagtagtccttgctagtt

SEQ ID NO: 108496 - DNA, 366 bp, Zea Mays
atgggtttgacagtggattcaccgggagggatatcgaataatgaagttgtacgcttcaaagtagcttttaagacaacatcatctatcggatttgtcgccggtcagacatctcacaaagatgaagttgagatgtatgcgctgaatcctccttacaacaatcctgttagcactaacctgtctagtctcgacaaagcatgcttcttggaaagtcgacagctgatttggaaaacctgcaaagtctatccacaattggttacaaatactgtaaagctttacaaggctacattaggcaattgttttgaaatagctgaatgggattggggcccaatagagttctccatcacggcaaaacattttggccagtaa

SEQ ID NO: 108497 - DNA, 2600 bp, Zea Mays
gctactgctactacctacagtacggtgctgccgcctcgcctctcctctccgtccttccttttccgctttgcccgctttcctccttttctctctctttttcgcctttgctgctttgcggcctttgttcaaggttcgacgacacgtccgactccgatcggcggtttcatcgcctcatcggcggccgcgggcggcatctcccttggcttccccccctccactttgctcgctgcttgttcgcttgcgtgcgcgctttttactgttccgcagtcagtcgccaccacatccattctccgtcttcttcctcgcccgccgacccctgaccctgaggccctgaccaccgccgctgcgcccgctgacatttgtctccccggtcgccgaagaggcgaacgtttacgttgctggattcgcgtttatcttcccccgcattacttaccgttgccccacgtcagaggatctcgttccgctcctggagcctgcttggcttctcttgacttgggctttcgcagcgctgctggctgttgctacgtcccctcgctcttcctctcctctgctctgctctcagggtcgcttccttcctctgcccagattgattgttctcgaggttcagatcttggacttggaccctttcgtcggctactcagagttccagaacccgtcccgcgcttgttccagcagattcagagatggccgaggtgaagcctgaggacatggtgcatcatctgcccatggaccagctccagggactggagtactgcatcgactccaatccttcatggggcgaagggatcgctttgggcttccaacactacatactgtccttgggcactgctgtcatgatccccacgctgctggttcctcttatgggtggaaatgatgatgacaaggccaaggtggttcaaacgctgctgttcgttactgggatcaagacgctgctccagacgctattcggcactcgtcttcccacagtcatgggaggttcatacgcttacgtggttccaatcctctccatagtccgtgacccctcgttcgcgcgtatagctgatggccacactagattcctgcagactatgagggccgtacaaggttcactgattgtatcctcaagcatccaaataattcttggatatagccagttgtgggctatatgttctaggttcttcagcccacttgggatggttcccgtggttgcactggtggggcttggacttttcgagagaggattcccagtggttgggaaatgcgtggagattggtcttccaatgcttatcctatttgtcgcgctttcccagtatctcaagcacgtgcatattcgtcatgttcctgttttcgagaggttctcattgctgatgtgcatcactcttgtatgggtatatgcccacatcctcacagcaagtggtgcatacaagcacacagcacttgtcacccagatcaactgtcggacagaccgtgccaatctcatatcttcatcacaatggataagcattccataccctttacaatggggtgcaccaacattcagtgcagaccatgcatttggtatgatggcagcggtgatggtttctttaatagagaccacgggagcattcaaagctgctgcacgattggctagtgcgacacccccaccagcatatgtcctgagcagaggcattgggtggcagggcattggcaccctactagatggcctgtttggcactgggactggttctactgtttctgttgagaacgttggtctcctaggatcaacgagggttggtagcagaagagtgatacaaatttctgctggtttcatgatcttcttctccattcttggaaaatttggagcactttttgcctccattcctttcacaatattcgctgccatttactgcgttatgtttggaattgtcgctgctgtggggctctcctttatgcagttcaccaacatgaactcgatgcgcaatctcttcatcatcggtgtctcactcttcctgggtttatctataccagagtacttctctaggtattccacaagttctcaacaaggcccagcgcacacaaaagctggatggttcaatgactacatcaacactagcttctcatcaccacccgccgtcgccctcattgtagcagtactccttgacaacacacttgatgtgagagatgcagcaagggaccgaggaatgccatggtgggcgcggttcaggacattccgtggcgacagcaggaacgaagagttctacactttgcctttcaacctcaacagattctttccaccgacttaagccaaattgccattgagaacacgctgcatgtcaagtggtccactcaagcaagcattgcctaacaatgaggtctgcttctgatagagtagaacaacaaaaggctcgacaaaggaagaactaattccctgttaccaatcgattgtacataaaacaaaactgtttaggttgaccaccggtgtcgaatcagaatgccatattttgatgtaatatgagtttagagatcttatgaacaattttcaagccttatatgcaagctagcttttaaaccgtgttttcatggcttagtggcatggtctggtgtctgatccccaaaaagctatagaaggtatattgcaagaa

SEQ ID NO: 108498 - DNA, 2694 bp, Zea Mays
gctactgctactacctacagtacggtgctgccgcctcgcctctcctctccgtccttccttttccgctttgcccgctttcctccttttctctctctttttcgcctttgctgctttgcggcctttgttcaaggttcgacgacacgtccgactccgatcggcggtttcatcgcctcatcggcggccgcgggcggcatctcccttggcttccccccctccactttgctcgctgcttgttcgcttgcgtgcgcgctttttactgttccgcagtcagtcgccaccacatccattctccgtcttcttcctcgcccgccgacccctgaccctgaggccctgaccaccgccgctgcgcccgctgacatttgtctccccggtcgccgaagaggcgaacgtttacgttgctggattcgcgtttatcttcccccgcattacttaccgttgccccacgtcagaggatctcgttccgctcctggagcctgcttggcttctcttgacttgggctttcgcagcgctgctggctgttgctacgtcccctcgctcttcctctcctctgctctgctctcagggtcgcttccttcctctgcccagattgattgttctcgaggttcagatcttggacttggaccctttcgtcggctactcagagttccagaacccgtcccgcgcttgttccagcagattcagagatggccgaggtgaagcctgaggacatggtgcatcatctgcccatggaccagctccagggactggagtactgcatcgactccaatccttcatggggcgaagggatcgctttgggcttccaacactacatactgtccttgggcactgctgtcatgatccccacgctgctggttcctcttatgggtggaaatgatgatgacaaggccaaggtggttcaaacgctgctgttcgttactgggatcaagacgctgctccagacgctattcggcactcgtcttcccacagtcatgggaggttcatacgcttacgtggttccaatcctctccatagtccgtgacccctcgttcgcgcgtatagctgatggccacactagattcctgcagactatgagggccgtacaaggttcactgattgtatcctcaagcatccaaataattcttggatatagccagttgtgggctatatgttctaggttcttcagcccacttgggatggttcccgtggttgcactggtggggcttggacttttcgagagaggattcccagtggttgggaaatgcgtggagattggtcttccaatgcttatcctatttgtcgcgctttcccagtatctcaagcacgtgcatattcgtcatgttcctgttttcgagaggttctcattgctgatgtgcatcactcttgtatgggtatatgcccacatcctcacagcaagtggtgcatacaagcacacagcacttgtcacccagatcaactgtcggacagaccgtgccaatctcatatcttcatcacaatggataagcattccataccctttacaatggggtgcaccaacattcagtgcagaccatgcatttggtatgatggcagcggtgatggtttctttaatagagaccacgggagcattcaaagctgctgcacgattggctagtgcgacacccccaccagcatatgtcctgagcagaggcattgggtggcagggcattggcaccctactagatggcctgtttggcactgggactggttctactgtttctgttgagaacgttggtctcctaggatcaacgagggttggtagcagaagagtgatacaaatttctgctggtttcatgatcttcttctccattcttggaaaatttggagcactttttgcctccattcctttcacaatattcgctgccatttactgcgttatgtttggaattgtcgctgctgtggggctctcctttatgcagttcaccaacatgaactcgatgcgcaatctcttcatcatcggtgtctcactcttcctgggtttatctataccagagtacttctctaggtattccacaagttctcaacaaggcccagcgcacacaaaagctggatgggttcgtatttttctctatgtacttcaaaattcaaattccaacttaaacttagctcccagcgaaaagaagaaaacatctagcatgatatagtaactcgaagctgatgcattgtatactgttaaagctgagtttgaagtgttgtgcattttgtttgtttgttgcagttcaatgactacatcaacactagcttctcatcaccacccgccgtcgccctcattgtagcagtactccttgacaacacacttgatgtgagagatgcagcaagggaccgaggaatgccatggtgggcgcggttcaggacattccgtggcgacagcaggaacgaagagttctacactttgcctttcaacctcaacagattctttccaccgacttaagccaaattgccattgagaacacgctgcatgtcaagtggtccactcaagcaagcattgcctaacaatgaggtctgcttctgatagagtagaacaacaaaaggctcgacaaaggaagaactaattccctgttaccaatcgattgtacataaaacaaaactgtttaggttgaccaccggtgtcgaatcagaatgccatattttgatgtaatatgagtttagagatcttatgaacaattttcaagccttatatgcaagctagcttttaaaccg

SEQ ID NO: 108499 - DNA, 2615 bp, Zea Mays
gctactgctactacctacagtacggtgctgccgcctcgcctctcctctccgtccttccttttccgctttgcccgctttcctccttttctctctctttttcgcctttgctgctttgcggcctttgttcaaggttcgacgacacgtccgactccgatcggcggtttcatcgcctcatcggcggccgcgggcggcatctcccttggcttccccccctccactttgctcgctgcttgttcgcttgcgtgcgcgctttttactgttccgcagtcagtcgccaccacatccattctccgtcttcttcctcgcccgccgacccctgaccctgaggccctgaccaccgccgctgcgcccgctgacatttgtctccccggtcgccgaagaggcgaacgtttacgttgctggattcgcgtttatcttcccccgcattacttaccgttgccccacgtcagaggatctcgttccgctcctggagcctgcttggcttctcttgacttgggctttcgcagcgctgctggctgttgctacgtcccctcgctcttcctctcctctgctctgctctcagggtcgcttccttcctctgcccagattgattgttctcgaggtacgcacgcacgatgctgcctgcctgctgcgcttgattaccctttcccgtttccccctctcacttccagaaaccgagcctctccaccaggttcagatcttggacttggaccctttcgtcggctactcagagttccagaacccgtcccgcgcttgttccagcagattcagagatggccgaggtgaagcctgaggacatggtgcatcatctgcccatggaccagctccagggactggagtactgcatcgactccaatccttcatggggcgaagggatcgctttgggcttccaacactacatactgtccttgggcactgctgtcatgatccccacgctgctggttcctcttatgggtggaaatgatgatgacaaggccaaggtggttcaaacgctgctgttcgttactgggatcaagacgctgctccagacgctattcggcactcgtcttcccacagtcatgggaggttcatacgcttacgtggttccaatcctctccatagtccgtgacccctcgttcgcgcgtatagctgatggccacactagattcctgcagactatgagggccgtacaaggttcactgattgtatcctcaagcatccaaataattcttggatatagccagttgtgggctatatgttctaggttcttcagcccacttgggatggttcccgtggttgcactggtggggcttggacttttcgagagaggattcccagtggttgggaaatgcgtggagattggtcttccaatgcttatcctatttgtcgcgctttcccagtatctcaagcacgtgcatattcgtcatgttcctgttttcgagaggttctcattgctgatgtgcatcactcttgtatgggtatatgcccacatcctcacagcaagtggtgcatacaagcacacagcacttgtcacccagatcaactgtcggacagaccgtgccaatctcatatcttcatcacaatggataagcattccataccctttacaatggggtgcaccaacattcagtgcagaccatgcatttggtatgatggcagcggtgatggtttctttaatagagaccacgggagcattcaaagctgctgcacgattggctagtgcgacacccccaccagcatatgtcctgagcagaggcattgggtggcagggcattggcaccctactagatggcctgtttggcactgggactggttctactgtttctgttgagaacgttggtctcctaggatcaacgagggttggtagcagaagagtgatacaaatttctgctggtttcatgatcttcttctccattcttggaaaatttggagcactttttgcctccattcctttcacaatattcgctgccatttactgcgttatgtttggaattgtcgctgctgtggggctctcctttatgcagttcaccaacatgaactcgatgcgcaatctcttcatcatcggtgtctcactcttcctgggtttatctataccagagtacttctctaggtattccacaagttctcaacaaggcccagcgcacacaaaagctggatggttcaatgactacatcaacactagcttctcatcaccacccgccgtcgccctcattgtagcagtactccttgacaacacacttgatgtgagagatgcagcaagggaccgaggaatgccatggtgggcgcggttcaggacattccgtggcgacagcaggaacgaagagttctacactttgcctttcaacctcaacagattctttccaccgacttaagccaaattgccattgagaacacgctgcatgtcaagtggtccactcaagcaagcattgcctaacaatgaggtctgcttctgatagagtagaacaacaaaaggctcgacaaaggaagaactaattccctgttaccaatcgattgtacataaaacaaaactgtttaggttgaccaccggtgtcgaatcagaatgccatattttgatgtaatatgagtttagagatcttatgaacaattttcaagccttatatgcaagctagctttta

SEQ ID NO: 108500 - DNA, 1347 bp, Zea Mays
gaagattttcccccatggcgccctcacccctgttcctcctagcgtccgggctctgctcgtcctcggccatggcggacgccgtcgccatttttccccttggtgctcaccggtcgagtcccagccccagcgccgtgaaactccctgcgcccccgtcctcttccccagtcgcgagctccttttctcttctccatggcgcgcccaagctccctctgctttcttatcctctttccagcgcgcgtaggcttcctctgggattctttgtttgccgacttaatcttccagccgagcgcagtgcttcttcctcctcagccgtcgcccaagtcttcttcttctacgcgcacagggttctcctctgcgcatcctctgactctcccagcgccgtggcttctctgagttcgtcgctggaaacgcaccgtcctctgctcgttcggtgcccctctctccaagcttccatggcgccttggagccccagctcggccgacggccgggaggacgcgctgggtctccctctgctcggtcgtctccctcctcccgctccagctcccctgtgtgccgtggatctcgcgcccctgcccaagtccggctgcctgcgcgctccttcttccttttcccctgtcagccgcatctccttcgggcgttccgcggtatactggctcacgcagatgctcgatgcccaatccctgcgtcgcgtccattctctgctcttcctgttcgccggcagaagctcccagccgagcgttccttctcttcgccgcgcgcccagccgtcgaagctccctgccatcgtcgttttcggccctgccgttggtacaacatcgtttgctgttgctagttgatgcaacgttgccgtccttcgacgccgcgccgtgagcagcgacttcgtcgatccgtcattttgacagggtacttgcgctgctctcctgtgtatgtgatgattggaaaaggagtcccagctgatgaaggattaaggaacgaaagctttagtacaccccgcctgccagctgatcgtcgtacatcctgaaccagggtttaatcattttctttgtgaagttcgagccgattataattttggaaggagattggtgctgaagtcgaagctagcagcccctttattcttcgtcgtcaacccacgccgcgtcgcgacatgcccgtcgatcccgacgatctatctgccagatgcgtgccacttgtgttgagctccaaagcccctgtcgagctcttcccctgaaagccgccttcgagcacaatccctgtcatgtgtttgatgggaagtctgaaccaatgttcatcgtcgatctacgattatcaaatcattctggtcatagtaagtcgatgagttattcagaat

SEQ ID NO: 108501 - DNA, 888 bp, Zea Mays
atgggtaacacattgagacgctcggtacaggacattgatcgccagcttttgattgtgggtgaccacaacatgcgtagcttcttggagcgtttatctaggcgcctacgtggagctgctgctcgctgtggctgcaggaccaatgttgcacattacgttcatgtaccgttgtatagccacacaacaatgccatctataagattggacgttggcttggactatgatcagaatgagatcagaccttcacagattctgaagtttttaggaggaaaggctttaggaggaaaggctttatattactatatatacgcttgtgcaaagcaaggaagggcggagatatctcgcatgatctggaagccgccgccgtcgaatgaaagcatcacaaatggccacttggagacaccgacaccgtcgtgcacagaggtggcgcagaacgacgctgcaagggtgccgcgcggggcacacacgaaggcagtgacggatggggagggcaggcacgaggaagtgaagccggaactggatgggacgcggcgccagagtttgaggatgcggcggaggagcttgagcgacgtcactgcaaggtccggcgagcaacaagcctggtggcggtggcggcggcaggacgaggaaaagcgcgagagcgcaagagaagacgcgaaggcggcgagacgacgacaggagcatgtggtggcgagcggcgtgaggagggtgaggatgcacagcagcacatcctccgctgtgcgttttagacacgaggaagggtctagactctataggaagctgcttcagcagtccaccgtcctgcttaaaccgccccttattttagataccaagaaaaaatggagcggtcatgttgattttttatgtctatttcgaattgacaaatggtag

SEQ ID NO: 108502 - DNA, 890 bp, Zea Mays
catctttgaccgtggtgtcgacgagctccgcctcctcgccccttctgctgaggcccacgtcggcgtatttctgccatagtcgacaaccaataggagcgtaaaactggagctagggattgcatttgttgcaggtacatgtcatacatgaatggacatgggcaggcactcccactgagggtgcttcttggctttgtctgcagaggcttgctgatacttggcataggatattgttaattccagtgacaggtggagtagttgtgggaatgctagatcttgatagcgagacaacgttcttcggtgtttttgatggtcatggaggtaatcacaatatgtgctttttatgttccgttgaattagactgcctacgaggaataccattatgccaagtatttatagaacctaactttaacattacacaacctcataccattgctttacttaagaagagtagctgtcaaattctgtacagaatacctgcataatcaagttctcaaaagtgaagcctattcagttggtgacctaggtcctactgtcctaataaagcttaaatatttgttatatgtatacaacaaacacaaagtttattgtgtaaatgctttgttgatagtggctttctaattgaacatatatccctataactgcatatatgtattgagtatgataatgttatctgcatttaaatggatctgtgggtaagactcatatgaatgaacagtcgtccagaggccattttgtatttaaattaaatatatccgaatctaatgaggtagaatggaacattcacaattatcataccaagatctactaaaatatagtgttccttatgctctctttcagactggcgacaatccctttttagacaaatattttgcatgctaaataactaatcc

SEQ ID NO: 108503 - DNA, 1063 bp, Zea Mays
cagcaacgaacaggcagcttctccggcccccctcctcctcattcttctatcatagctagctagctagctagcttcacatcagcagctacatactcacactcaccgatagatacagacctcagagcaccacactcctagctcagagcacgcatccgcatggacagcctcttctccccgcgctgcgtgtgggtgaccgggcccatcatcgtgggcgcggggccgtcggggctagccgtggcggcgtgcctgcgcgagcagggcgtgccgttcgccgtcctggagcgcgccgactgcatcacctcgctgtggcagcggcgcacgtacgaccgcctcaagctgcacctgcccaagcagttctgcggccagctcctgcgtatgccattcccggacggctacccggagtacccgacccgccgccagttcgtcgactacctcgagcgctacgccgccgagttcaagatcaagcccgagctcggcaccgccgtgctgtctgcgcgctacgacgagacgtcgtcgggcatctggcgcgtcgtcaccaacggcggcgacatgaagtacatcttccatggggccgccgctggacatacggctggtggaagccggcgccttcgacgcgctcatggacctgttggtcagccagggcggctccatcaaccagtacgagacgccacggtgcatcgagccgggcggcgccgcgctggagctgctcgactccaaggccaccgcctcgttcatcagcccgtgccccgtgtaagctttcgggcttctggtgactgaggttgttccgagctcgatctgctactctaaagctagctaatcctctgctggatctaaataatctgagaattttcgtctgggttatcccgccccgttacattgtacttttgtgaggctttgctactatgcaaagaagcctttttcttatatgagatcgttcgtgatcatcaattgcctatctgtcttccctcttctacggctttactccatcacttgacgacttttgtgtgtgtgtgattgacggagcgcatggattatataacaataaaagaaagtaaagagagag

SEQ ID NO: 108504 - DNA, 195 bp, Zea Mays
tacccgtacccatcaaaaaaatttctacccatcgggttactcatatatgctcgcgggtataaaatcttacccatacccacgcgggtaaatcttacccatacccacgcgggtaattttacccgtcgggtaatccgtacccgctagaaaagtcttaaattccaatatactaatcactcaaaatattaaataaacata

SEQ ID NO: 108505 - DNA, 1291 bp, Zea Mays
agaagaccaatggctttggaggtgcaggtgatagagtcgtcctttgtggtgcccagcgcaggtatgccgagacggggactttgggtctcttcactggacctcgaccgtgccaacagaggctacacgccgacggtatacttctaccaccgctccaccgacgccgcagccgctggcaacgtttctgatgcgacgagcaggctcaaggactccatggccaatgctttggtgctcttctacccccttgccggccgcctcggcgtcgacaaagatggccggatcgagatcgactgcaacagcgagggcgcgctcttcgtcatcgcccgctcggaactgaccatggatgacttgaagaacttggagccgtctcccgagctcacaaggctgtttgttcccagaatccccagcactgatgaacagccttcgtccatcatattagccgtacaggtgactctgttgaaatgcggagggatgtcgctagggacggcgctccaccacgtcgctgtggacgggacaagcgccttccacttcttccagacatggtccaccatctccagggacggcgacggcgccgccgtggagccgccctgccacgaccgcaccctcctccgcgcacggcgcccgccctccgtccaccccgacgcgctctcggtgttctgccccaagatgagcttcgccgagccatccggacccaccgcaagcaaggtcttcgtcgtctccgcggaccagctcgcctccctcaagcgcgccagcggcagcgagaccacgttctgcgcgctgaccgccctcgtgtggcagtgcacgtgcgtggcgcggcggctcccgccggcagccgaggcgcgcgtctccttctcggcgaacatccgccgcagcacgcggccgcccctccccacccgctacttcgggaacgcgctcgtgcccgtgttcgccgccggcgcggcgggggacgtcgcgtccgacgcgctggagtccgtcgccggccggatcaggcgcgccatcagccgggttgacgacgagctggtgcggtccgcggtcgactaccacgagctgttcgggatcgactaccggctgcagaggggcatcctgccggcgacggagctgcggatggtcagctggcttggaatgccgctgtacgacgcggattttgggtggggcaggccgtggagggcacgtgcacctcatgaacaacggcccggcgctggacagtggcgtccgcgtcctcgcgtgcttggaggctgcacatatggaggagttcgagcgactgctctatgcaaagctcgtcgtctagcctttt

SEQ ID NO: 108506 - DNA, 1578 bp, Zea Mays
aaaaggcccaaacattcactgatatcccatgttttgacacgagcggtgggacgtgctgacggagatgggtggcgccgccgccgccgttcttgccgtcgcagccgcacgccggaaatctggtcccttcgtatccttgttctccagggcggcgcgcaggctccacgatgctgtagagactgcagcggcggaggaggacatggcggggacgcggagtccgcggcggcggcggcggagcagcagcagcctccttcttggaccggaattccccgacacctgggacccttcatcgcgtgacacgacgccgcagtctcctccgcggtgtgcccaagctgattatgatcgcactgcatccattattgatggcaagtccattgcagaggacatgaggttacatattgctgaagaggtctgtcaaatgaaatgttcagttggacacgtgcctggtctagctgttgttttggttggtgatagaagagattctgaatcatatgtgcgatacaaaacaaaaggctgtgaggaagttggtattaaatctttgttggcgaagttgcctggaaactgttcagaagatgaagtgatggattcagtgtcaagatttaatgaggatccatctgttcatggcatcctagtgcagttgcctctaccagagagacatcctgtttcatgctcaatacgaactactcccaagtccctccattccaaatttttatggatgaggaaaagattctgagcatcatcagtctgaataaggatgttgatggtttccatcccttaaatgttggcaatcttgcactaagaagccgaaatcctttgtttgtgccctgtgctgcaaaggcttgcattgaattattgctccaatctgggattgaactgatgggcaagcatgtatctgtcattgggagaagcaaagttgttggattgccaacttccttacttttacagcggcatcatgccactgtcagtgttatccatgccttcacaacaaatccagaggctattacccgcgaatctgatattgtgatatcagctgctggagtggccaatcttgtaaggggaagctggttaaagcaaggtgcagtggtgattgatgttgggacaaatccaatcgaggatccaaccagtgactacggttatcgcctaactggggatgtctgcttcgaagaagcagtgaatgtggcctctgctataactccagttcctggcggagttggaccagtaacgattgccatgcttcttggcaacacacttgattcagcaaaacgcgtttatggcctaagtgactgaaactgacccccctctgaactgtaattttgtcgtgcttgtcctttgtaaactagttctcttctcttttcaacctcccgtcgctctctattttagctgtaggaggagggctgggatgtaccatattcttgctcaataagtattgtattagctgtgtccattaggtaagtttttttgtgtgtgaccatattagcctgttacctatataaccaacacacaatagcaggaacatgtcttcagacacgatttatttgcatttttttataagagaaataggcctgactgacaacattattg

SEQ ID NO: 108507 - DNA, 1529 bp, Zea Mays
gtggcccaaaaggcccaaacattcactgatatcccatgttttgacacgagcggtgggacgtgctgacggagatgggtggcgccgccgccgccgttcttgccgtcgcagccgcacgccggaaatctggtcccttcgtatccttgttctccagggcggcgcgcaggctccacgatgctgtagagactgcagcggcggaggaggacatggcggggacgcggagtccgcggcggcggcggcggagcagcagcagcctccttcttggaccggaattccccgacacctgggacccttcatcgcgtgacacgacgccgcagtctcctccgcggtgtgcccaagctgattatgatcgcactgcatccattattgatggcaagtccattgcagaggacatgaggttacatattgctgaagaggtctgtcaaatgaaatgttcagttggacacgtgcctggtctagctgttgttttggttggtgatagaagagattctgaatcatatgtgcgatacaaaacaaaaggctgtgaggaagttggtattaaatctttgttggcgaagttgcctggaaactgttcagaagatgaagtgatggattcagtgtcaagatttaatgaggatccatctgttcatggcatcctagtgcagttgcctctaccagagtttatggatgaggaaaagattctgagcatcatcagtctgaataaggatgttgatggtttccatcccttaaatgttggcaatcttgcactaagaagccgaaatcctttgtttgtgccctgtgctgcaaaggcttgcattgaattattgctccaatctgggattgaactgatgggcaagcatgtatctgtcattgggagaagcaaagttgttggattgccaacttccttacttttacagcggcatcatgccactgtcagtgttatccatgccttcacaacaaatccagaggctattacccgcgaatctgatattgtgatatcagctgctggagtggccaatcttgtaaggggaagctggttaaagcaaggtgcagtggtgattgatgttgggacaaatccaatcgaggatccaaccagtgactacggttatcgcctaactggggatgtctgcttcgaagaagcagtgaatgtggcctctgctataactccagttcctggcggagttggaccagtaacgattgccatgcttcttggcaacacacttgattcagcaaaacgcgtttatggcctaagtgactgaaactgacccccctctgaactgtaattttgtcgtgcttgtcctttgtaaactagttctcttctcttttcaacctcccgtcgctctctattttagctgtaggaggagggctgggatgtaccatattcttgctcaataagtattgtattagctgtgtccattaggtaagtttttttgtgtgtgaccatattagcctgttacctatataaccaacacacaatagcaggaacatgtcttcagacacgatttatttgcatttttttataagagaaataggcctgactgacaacattattg

SEQ ID NO: 108508 - DNA, 1030 bp, Zea Mays
tgtgtatatgtctgaacatgacagtaaatagcctcataaaccttcaatccaaattttgtacatctgagagaattacatgatataaccctctaacacttgctgcctaccaatgagagatgggcatttaccgagtggaacataacccattgtgacataaaaaaagaaaaggttagactctttgctcccagtaagaaaacatcagtagctccaattacaacacttttagcagggtatgttacgcagtgagggattgggaggattctaatgtcaactagtgtggaacagtagcgcatatgaaccatacaacgaagccatgaatatcaatgacaccgtgaaaagtaagttttttgtcccaacttggaatcaaattcttaacctctaaatcatgtctctggagtaccaacataatctaatagccaccaggttaggcagcacaagagtcatattttcagttaccaatcatatgaccggggtgagtatatagttcctttaatccttttcatggtcacaagtgatttaggatgaacagcaccctgccttcttcacagcagagacatcatccttgccaccaacattgatggtttgccctcttggtggagcagcagggtcatcgccaatgtcaagggccttcttgctgacgacacgatagatctgagttaggacctcggtgaaagcgctctcaacattcatggactccagcgcggatgtttccatgaagaaggtcatttccctctcagcgaagcccttggcatcctccacggatacagctctaaggtgtcgcagatcagctttgttgccaacaagcattatgacaatgtttgcatcagtgtgatcccggagctcctttaaccacctctccacattctcaaaggtcacatgacgtgtcacatcatacacgacaagtgcaccaacagcccctctatagtacgcacttgtaattgcccgatacctgcaaaagagaggatggatgatatatggcaaaattaagctccatccaaagaaatttcggtagcgaaattaggcaataaat

SEQ ID NO: 108509 - DNA, 1415 bp, Zea Mays
cccccccccgcatcacggccgaacgctttaaaaggtgcgcccggcaccactggacgtctggaccctcctcctctcaactgttctctcgccgccgttctagttccgctttgcttgaggtgcacgtggcggtggaagcttcccgggcggtggcggttgttggttcatgtcgatggcgcaggtgtgctgcgactcggccgtaacggcggcaccggtggccgggccggaggcggaggcgagggccagggcgcgcgccgagaggcgccgccgggccgcggaggccgggaggtggaagcacgcggcggctgctggcacggcagccgcagatgccacgaggaagcggagcctcgaggccggggagctgctcgtggcgcggaagcacggggccgcgtcggtggccggccgccggagggagatggaggacgccgtgtccgtgcgcgagtccttcgccgcggagggcgacgccgacggcggcgggaggcgcgacttctacggggtgttcgacggccacggctgctcgcacgtggccgaggcgtgccgggaccggatgcacgacctgctcgccgaggagctcgccgctgccgacggttccggctccgcggcgacctggaccgccgcgatggaacgcagcttcgcgcggatggacgccgaggcgatgtcggccggcgggagcgccgcctgccgctgcgacccgcacaagtgcgaccacgtgggctccaccgccgtggtggccgtcgtggaggagcgccgcgtcgtggtggccaactgcggcgacagccgcgcgctgctgtgccgcgggggcggcgcgccgccgctgccgctgtcgtcggaccacaagcccgaccgccccgacgagctggagcggatcgaggccgcgggcggccgcgtcatcttctgggagggcgcgcgcgtgctgggcgtcctcgccatgtcccgcgccatcggggacggctacctcaagccgtacgtctcgtccgtgcccgaggtcacggtcaccgaccgcgccgacgccgacgagtgcctcatcctcgccagcgacggcctctgggacgtggttagcaacgaggccgcgtgcgaggtggcgcgcgcctgcctccgccgggggcgggccaggtggtgcgccgaggccgccgcgctgctcaccaagctggccctcgccaggcgcagctccgacaacgtctcggtggtcgtcgtcgatctccggaggagggatcactagctagctctgagcagttagtactaatacagtagtaggatggtgcacaaaaggatctcgcgggtgtgtgctaattgtttttctgtctttctcgtcaaaagttattttttgctgctctccctgaatcaaaaagttcagaggagcccttagattaattattgtggtggaaccggaatttgatccgggtaccatttgggatgaa

SEQ ID NO: 108510 - DNA, 1168 bp, Zea Mays
tattctaagtttatacctgataacacatttgcacatacttgatgcatttgtctatggtattttctttttataaagtgaatcatcttgacaatgaaatagtgcatttatcagttttgtaatgggacatcactcctcaagtatccagaaggtaaactagatgtatttctcatacatcaattgggcaagtttgagatatagttgtcccaatttgtccagaaatttatttacctgtacctccacaagtacataatgcgctcgaccacattaatgttgttgttaagagtcaaacgatggtttgtgttcacaactgaaaccattggattttgtttttgacatctcaaggaggtattaaccgagagcttgctgccgcaaaaaagatttctcacatctgagatcgagagaagaaagcattttcaaggttgttccaaccctcaggagaagggtgacaaaatacatttctataatcacattttgttattttccttataaaagtgagaatagctgatctgttgatgtgcttggccttaagactgcttttgcaaccttcatgggtaaggctggcccatcggatcctcagcgctttccgttcattttggtcgggaacaagattcattcagatggcgggagcaaacggatggttccggagaagaaagcgagggaatggtgcgcctccaagggcgatattccatacttcgagacctctgcgaaggaggaccacaacgtcgacactgctttcctatgcatcgctaggctcgccttggagcatgagcatgaccaagacatttacttcaagacagttgcagaacaagtcccggacactgaacagacaagcagatgtgcttgctaggagccagccatttcctagaaggctggaactacgtggatgttactgaaggactggcccccgatatgttccctcgcagtttttcttttgagctccagtaactttattactgttctgtgttgctctcactggattttagcacttctgtaagttgtcatcttttaaagttaagaatttttacataagtcttacacatcgaacaaatccaccatatacattaagatgcaatgcttatcgaccactcaagtaatatgctcttgtaacctaaattaatcaaaattgggaaataatcagcaaccgacttgtactaaggtagaaaaataa

SEQ ID NO: 108511 - DNA, 181 bp, Zea Mays
agcttctactgtactaaggagggtgttggataatccagcactccaggactgtcaagaaaataatggatttggagacatgatggatgaagatgttataagcaatatttcagttcgcttgaagttaagccttactgtttaggacttcactctcccagtgacacctactttacctgctgttttt

SEQ ID NO: 108512 - DNA, 495 bp, Zea Mays
atggccgtcctcgaccgggttctcgccgccggcagagctcaccctctgcctccgctgttccatcaccttcctcttcttcttggtgctctggaaaggcccgtcggtgacgtcgctggtgggcgtcgccgagagcggcgaggcgaggccggcgtcgcccgcgggccgcttctgccgccgggcaccgtcgaggttggaggatgtgatgaggccgatggagcgctcggtgagggagaagatctgcgaggccaggtgcttgcacaggtccggggacccgccgaggtgcacctccagctgcctcaccagctccttgatgtggctcagctccgtcaccaccagcccgccgcagctgcctcctccactgctattgacgccgccgcctacgacgcccatctccatctccgtcgacgccatgggacgatggtgagaaatgccctcttggttgtgttggcaggccgtccaggtaggactggactggagcgaggtacgcggcggtga

SEQ ID NO: 108513 - DNA, 1240 bp, Zea Mays
tgctttctttgcttccaaattaactgcgaaggcaaagccgtgccgaaggcctcgccgcgccgctcccacacactacaccctcgccgccgctgagactcggcaaactgcctcccgttccatgggctgcgtaggatccaccccggccaccaaagatgccgggggaagtagcgatgtcaatcatggcactaagagagtgaggaaacccaaagcttggaagcatccccaaccgataaccatggcccagctcaggcagatgcgtgaggagttttgggacaccgctcctcactacggtggtcagaaagaaatctgggatgcccttcgagttgcatcagagtctgaggtatcccatgcacaggctgttgtggaaagtgcaggcataattgtttctaatgccgatctgactctctgctacgatgaaaggggtgctaagtatgaattgcccaagtatgttttgagtgaaccaaccaacctgatccgagacagctgaacggcagccggccgtaggaagacccaccgatgtaaaaactgtaaatgactgcagatgccgccaaattggtcccttgcttgtggtaactggagtgcctcgagtaaccttcagatttgctttggcaactttcggcaatagggttttccagttctagtgttcagataaaaaaaaacttttgcgtaccctcgtctattgttcttggttctactgtaaacatgagtctgcttagaattctttggagcgagaatgctgctgagattgttctcgtccactatcatgatacaagctggagcatacgttttagaaacttgtcacatctcgtgcaactaattatattattatgtggtctggtctgacatttgaaatgaaatgcatgataaggagcaaatcgcaatctaatttttacattatcgcaacatatccgatgatactggagttttacattattatcatgagaatgatgctgattcatctagtggtagtgttgcgtggagtctgagaacctgaaccggctgaatgcctcctccatcgccatcaccatcgccagcaggtccagatccatccctcctccgtcttcgtcggcgacgctcctctcgcagagcgcgaaccggcacaccgggcagctgccgtgcccctgcacccagggagcgatgcacccctggtgaaacgtgtggttgcagggcgtgaccgcaacctgctctccaggcaggaacgtctccaggcatatggtgcagaccttctcctcttcactgg

SEQ ID NO: 108514 - DNA, 1286 bp, Zea Mays
ccggaaacgggagtctggagcatttccgagttgtctccaccgcgcaagcgacgagaaggcggcgcgccaccaccgctgctggcctgccgccacgactcgccggcagactaggctcctatggcgcgccgccgcgtgctgctcttcctcaagcccttcgacgtataccctccccgcccgtacgtcggagctgcggcctcttctcccacctctgcgccctcgtcactgccgcaaccgcgcgccgccaaccccaaggtcttgagctatctggatgataggtgcagagttcacaaggacactattgatctctgccagagtgtcttacagcgcaagtcccttgactggattgctgtgcagcgcaatcatttgtgtcagccaatacgtgatgtggatcttgtggttgctgtcggcggcgatggcacccttctccgggctagccattttttggatgattcagttcctatattgggtgttaattcagatcctacttgtactaaggaggttgaggagctatctgatgaatttgatgcaaggaggagcacagggtatctttgtgcagctactgcaggaaactttgagcagatacttgatgtgacgcttgatggcagtaggcgccctttggagctgtcaaggatatcggtgaaactaaatggaattcagctgccgacttatgctctgaatgatatattggtgtcacacccttgtccagcaagtgtgtcgcgcttctcatttaggaaaaggaacaatacaggagagaactcgcgtttaattaattgtagatcaagcggtctgagggtctcaacagctgctggatcaactgctgccatgctatcagctggaggatttacgatgccattatcaagccgtgagcttcagtatatgataagggagcccatttctccaatggatgccgacaaagcaatgctccatgatgttcttaagcaagaacaacacatgcatgtcgtgtggtacaatcaagagggtgctgtttatgttgatggttcacacgtagtgcattcaattcagcatggggactcacttgagatatcctcaggtgctccgaccttaaaagttgttttgccagaacatttgctaaagatgggacctgaatggtgaaataacaatatttttgtgatgttccttatctatttaatatgatataggagttgagcagtgagctgagttattgggtgcttaagcggtatcaatccatgttcatgtagtgactgacagttaaacgctatcagatgaagcattagtgacaaatttgcgaggttttgtttgtagat

SEQ ID NO: 108515 - DNA, 895 bp, Zea Mays
ggttaagtcagagtcatgtgtgatgacgttacttacggggtgaatgcgtatcgaaatattttatgtcgtgcaatatgattagaaaggtgaaggatagacagggtgtttcggaaatgttagccaatagattcggacaagcgtgatagaggttgagtcacttatgttataaaattgatgctcgacatgtagggtctcctaaaatgtggcgttttaggtgactcgtgtgttatccaatttaagttgagctacggttaagaaacactgtttaatcgactccaacccatattttgagttacgatgtctaaaatggtttgctaagtcttatatggcattagccaactcatgttaagtaagagttgatggtgtaagtgattgttatatatgttgtgtctcgaatggtgataataataggcaagccgacgtgtatgctgtctagcgggctgtgtcgttgctctagctagccgacccgttagatgactttagttaagcttgtagtcatggtgaattgcttgttgtggtctaaatgggtatggttatggtcacgggtaaaagtagtagtgctcatgtggggtctaattgaaaacgcaaatcgttgggtgattatcgtgaagaatgcgtgttaattggttgtagtaattttagtgcactaaatgatttggataaaatttgtaagtctatttgttagtcctcatttaattaattcaactctaacgaatggtaaagtgttagaataattcaagtacttagaacgcggcaattcttgaattgtataggagctgaaatttattgattgctgttttggactgcacgcgctgttttagttgtgctgtatgtttaatgaactaaattgtgttttctgtagatatgtgctatagaaaagtggtagataacttta

SEQ ID NO: 108516 - DNA, 793 bp, Zea Mays
ctttttcaaccactgtaccttgcagtttagccctgttagcagcattagagatgactttcgatctggttttttcaaggtctttaatttctttcaccagacgcttctcctcagataaaggtatgctctcatgtacgatgcgatcattcagcatcttgatctaggaggagcaatgtcttcgatagaagagcataaacctgcactctgtgctctcatggcattgttttcctcacgaaacttgcccaagctgttccgaagaggctccatctcctttatcttctcattcacaactccattatattgcttgttctcagcgctcaatggcttcagctccgcgataatactggagcgctctgcctacaactcttactgcctcgataagtttagaacgagcttggatcttcttctggaattctttgtcagcttgctcgagttttgccctcagtttaggatcctcaaatgagcggaccttgatgaagtagaaggcataagtttgcttaggttcaggccactcatccttcacatccgttggaggtgccagatcagtgacattggtagttgtctctgaaccaaaaacagctgcctcctcacgttctttagcagttgctttgctttccttctcttggaatagattcacatcatcagatactttgatctctgctggtgctgcttcagcaccaacgacctccattcccatacccctgcagctacagaaaaaagaacattagatacctgggcaccaggcgtagtgagacagcggctgtcgcccagtcgccgccgagagggtcagagggat

SEQ ID NO: 108517 - DNA, 1314 bp, Zea Mays
cttatgcagaaacgtataggacggggcattatgagaattgagatacctaaagcgaaaggcattattccagatgtcaatatatgcttcacgtcaaaattacatgggatatatcagtcgcagtatatatagagagagcgagatctagcaaagtcgcaaccaaaaccaactgtatcttaggctccacgaaatatatataaactaacatcgaaaatgaacaggacttttctccgatccttcacgtctcaaaagcagaccatgcactctttcttctcacctgcaaaattggtctccacatcatcaaatggcctggcgggggggagtacacgggcctcatccactcagttgctggtattcgctgggaggtagtagtactggtagtatcccagcaccgcaaggagggcaactagcacagcagccaccatggcagctgggccagcccatgaccagtaggactgagccttcttcctcttcaggatcgccttgggtagcggggccttgctccggctcaccacattcctgtaccgggcactctccttctgttctttctttaccgtggtggaagctggggccacttcttgttccgctggggcttccatggcttcgtcagacttggcatccgattctgagggctcatcagtgtcagctgcaccagatttcttcttggctttcttctcctctttctgaaaaaaaaattatacttccttctgtgctcgggccacagcttttgctgcctgcttctcagcctgcctcttcttcctctccaaggcaagcttgttcttctcaatctcctcctgcctcttcatctctttcaacttcgccacatcagcccccgtaggctttgccttctccttcgggggctcggcctcataatcatcatcagcatcgagagcagcttttgccttgtgcaactggacaggtccttttgaaggagcttcaatcttggaagcattatctgcctgaggagcaggcacttccttgacttgttttgcaggcaattttacagggaacggctctggctctggagctggcgcctgtgactcgataaatatgggcttctcatcaggattcctcatccgaccatctcgagtcagctgtcggctgtttagggaggtgaggattctcttctcgtagtcctctctgaaggccttactttcacaccattggctcatgaatttgtcgacctattaaagcatcaaatgtttagtacagaaacacgtgggcatcacatgagattgagccattaatatcaacatatttagaagcatacctcagccttgtggagctcttgcagttctgatagcatattcctcaaag

SEQ ID NO: 108518 - DNA, 208 bp, Zea Mays
ctaaaacaaaaaaaatgaaaaaattatcgaatttgttttcgaatccataccgaattttatatctatcatttaagaaaatatatgatgaatttaaggattaacttttatgaatctttacaagctcaatgttataaacaagaatacaaatttatatattgcaatatatatcctatttattcgcaatcaaagaaaaacgataaaaaactaa

SEQ ID NO: 108519 - DNA, 3427 bp, Zea Mays
tcggcgaaaggacgcggagaaacgcgaacatcgttgatagcgacatgctcacggacagaaatggaggccgatctccacgtggtttgtgctgatgctgcacgggattggtagagaggcagaccgtgctaacgttgtcgcagtagacaggagtggtgcacgcgaggggctgtggagctcatgaagaagttgacggagccaggaagtctcggccacaccattggccacagcgcgatactcggcctcagcgctagagcgggagacgacgggctgccgcttcgagggaggggaggggcctggtggtgacagcagcaggggaggagggggtggcggctgctgtgggagggagaggaaaacctagctagataccatgttaggagaatgaaaccttaaccctaatatgggttgggaatatattaatatagttgagtatgtgggccaaggcccattacagaagagaaatacacaggtacgctaacatttttcatcaaacagcttggcaggcgtgcagaatctatggtgttgcccttggaattcttgcagcaattcaaggcatcagattttctctgatcctcaagagtatgaggcatggcggagtaggaatctgaagcttcttgaggctggtctacttgttcatccactcgttccattgaacaaatcagacagttctgtgcaacggttgcggcaaattatacggggtgcatatgataggccacttgaaactgggaaaaactctgagtcaatgcagggtctacgtacttgtgtcatgtcccttgctggaagatctcatgatggtacttctgatggatgccactgggcagatggcttcccattgaatctccatctgtaccaaacgttggtagaagcttgctttgataatgatgagggcactgtggttgatgagatcgatgaggtgatggagctcttgaagaaaacctgggttattcttggaattaatgagttgctccacaatctttgctttacttgggcattgttcaaccattttgttatgtctggtcaagtagatatcgagctactttctgcagcagagaaccagttagctgaagtggctaaggatgcgaaaaccacaaaagatccaaattactgtaaagtattgagctcaacattaagctcaataatgggctggacagagaaaagacttctggcatatcatgaaaccttcaatacaagtaatattgagtctatgcaaggcattgtctccattggagtgtcagctgcaagggttcttgttgaagatatatcccatgaataccgccgtagaagaaaagaagagactgatgtagctcgaagcagggtagagacatacataaggtcttcactacggacagcttttgctcaaagaatggaagaagcagattcaaaacgatcatcaagaaaccctactccagttctttctatccttgcgaaggacattagtgacctagctacgaaggagaaaaaattgtacagtccaatactgaagacatggcatcctcttgcttctggtgttgctgttgcaacccttcattcttgttatggaaatgagctgaagcagtttgtagctgggcttacagagctgacccctgatacagttgaagtacttaaatcagcagacaaattagagaaggaccttgttaatatagctgtagaagattctgtggatagtgatgatggaggcaagtcactaatcagagagatgccgccatatgaagctgaaaatgcaattgctaatctggtgaaagtgtggataaaagaaagagtagacagactaaagggatgggttgaccggaatttgaagcaagagacctggaatccaggtgccaacagggataattttgctccctcttccgtggagatgcttcgagttattggtgaaacgttggatgcatttttccaattgcctataccaatgcatccggctcttcttcctgatctgacagttgggctcgacagaagcctacagctttatgttgctaaagcaaaatctggctgcggagcacgaaattcttttatgccccaactacccccactaacgcgatgcgaggttggctccaagttattattcaagaaaaaggagaagccacaaaatctgcaggttcgtgtatcacaaaatggagcatcaaacggaaatgatcccttgggccttcctcaactctgtgtgcgcctgaatactcttcagtacatccgtggtgagtttgagaatctagagaagaaaattaaaacgagcttacgaaatgttgagtcagctcaggcagatatcactgatggattgaacatcaagtttgagctttgccaggcagcctgtcaagaaggcattcagcagatttgtgagacgactgcatataaggtgatgttttatgacttgggacatgtcctctgggacaccctttatgttggtgatactgcatcaaacagggttgaggtactgttgagggaacttgaccctgtccttgagacggtatctagtatggtgcacaacaaagtgcggaaccgtgctattactgcactgatgaaagcaacttttgatggtttcttgctggtgcttcttgctggtgggcctttgcgtactttcacccgtcaagactctcagataatagaagatgacttcagggccctcagagatctgtacttagcagatggggatggtttgccagaggaattagttgacaaggcatcctcccaggtcaagaatgtcctgcccctctttcgagcagactctgaaagtctcattgagcgattcaaacgcatgatggttgaatcgaatcggcctgcgtccaagaacaggttaccattgcctccaacaacagggcattggagtccaaatgagcctaacacagtcctgcgagttctgtgctaccggaatgatgagacagctacaaagttcctcaagaaaacttacaacctaccgaagaagatttgacttgtgggatagatcacaaaccatatgtacatgttcctgtcactacaaaaaggtttctctatgcctgtcacattctctggctgaggaccccgaggaaataccccctgtaaagtttccacatcaaaggtttcaagtgatcatcagcaagaaggtttattctgtggtgctgtagagatgtgactgggtgttttcggtggttcgtgtcattgataggttttgcggtgaagggtggatttacttacagctcgatttgttcattatattatatgtttgcctaatccagttcttttgctgaccttgcgctcgtgtaatttggttcattctagtctgcaacagctaaatccagcgtgtgaataagttgtgtactcgcgtgacactgtccggtgcttttgctgtgacaatatgcggggagcatttgtatattttactgcatcgtgcactccatctctctccatatcctcgttggatccgttcttcagtcaatcgatcctgttcaaagtgagaataata

SEQ ID NO: 108520 - DNA, 675 bp, Zea Mays
tccggcggcggaagcagaagtggaaggaagcaggcggccaccatggtgaagggacgcacgggacagcgcgtcaggctctacgtccggggcaccatcctcggatacaagaggtccaagtcgaaccagtacgagaccacgtcgctcattcagatcgagggggtgaacaccaaggaggacgtcgcgtggtacgctggcaagcgcatggcgtacatctacaaggctaagaccaagagcagcgagacccgctacaggtgcatctggggcaaggtcacccgcccgcacggcaactcgggcgtcgtccgcgccaagttcaagtccaacctcccgcctgagtccatggggcgcaaggtcagagtgttcatgtacccgagcagcatctaaggtttttgttggagtaaaggtggactctaaatggccatgcttagttcttctctctgagcttaaaatgccatgtgttggcaacttagattgttcatgtactgaacctgttgaagttctaccaaaatttgttgtcgaacggctgaacagttgtcctaatgttatgctataaacagagcttatttccccccgtgccatcgctgtatgattgcagtattttttctctcgccaaattttatagacatattttacacttgtttgcccatgttcgtctatcacatctgaaattgttggaaa

SEQ ID NO: 108521 - DNA, 680 bp, Zea Mays
tccggcggcggaagcagaagtggaaggaagcaggcggccaccatggtgaagggacgcacgggacagcgcgtcaggctctacgtccggggcaccatcctcggatacaagaggtccaagtcgaaccagtacgagaccacgtcgctcattcagatcgagggggtgaacaccaaggaggacgtcgcgtggtacgctggcaagcgcatggcgtacatctacaaggctaagaccaagagcagcgagacccgctacaggtgcatctggggcaaggtcacccgcccgcacggcaactcgggcgtcgtccgcgccaagttcaagtccaacctcccgcctgagtccatggggcgcaaggtcagagtgttcatgtacccgagcagcatctaaggttaggtttttgttggagtaaaggtggactctaaatggccatgcttagttcttctctctgagcttaaaatgccatgtgttggcaacttagattgttcatgtactgaacctgttgaagttctaccaaaatttgttgtcgaacggctgaacagttgtcctaatgttatgctataaacagagcttatttccccccgtgccatcgctgtatgattgcagtattttttctctcgccaaattttatagacatattttacacttgtttgcccatgttcgtctatcacatctgaaattgttggaaa

SEQ ID NO: 108522 - DNA, 799 bp, Zea Mays
tccggcggcggaagcagaagtggaaggaagcaggcggccaccatggtgaagggacgcacgggacagcgcgtcaggctctacgtccggggcaccatcctcggatacaagaggtccaagtcgaaccagtacgagaccacgtcgctcattcagatcgagggggtgaacaccaaggaggacgtcgcgtggtacgctggcaagcgcatggcgtacatctacaaggctaagaccaagagcagcgagacccgctacaggtgcatctggggcaaggtcacccgcccgcacggcaactcgggcgtcgtccgcgccaagttcaagtccaacctcccgcctgagtccatggggcgcaaggtcagagtgttcatgtacccgagcagcatctaaggttaggtatgatccacagacgtctgttattctctatttgtttggctggttgatcttgaatttgttgtttgctatcaaatgagatggcaacgaattctgcttagtttgcactcgacattgctgtagaggctagatctttaggttgtaaacgcatcatagtttgtggttacggttgtttgttaggattaggaggcacattgagtctgtagcagcaaatagtccctattcagctgagaatcatggtagtttggctattgtggtttgttgtgctcatgttgatactggcctgaattcggtgagcttattatagctggctgagggagtaattaactttagtgaagaacgcaagttaaaaacttttcactgttcttcactctagtcaaggaaaatgacatggtcctcatcaatcaacaagtaa

SEQ ID NO: 108523 - DNA, 1492 bp, Zea Mays
cgcaaactgggcttatatttctacatgagctacagtgccatactggacacaacaaacagtaaatagcaactaaaccacaactagttcaaacaccacacctgctgacattacagcatcaaaatcagagtcaggtgtatgagtctaacgcaccaacaactatttgcaatggagaaggcaataacattctttcctgcggaaagtaactccaagttcgctatacacctcaagcgaacagtattgagccaaaaccgacacatgctaatgctattctaaaattagatactcgggaaaccactaatgacgctggtccactcacacttgctcctccagaacctgaactatcatgtgtgctgctgctcagcaagaaagatgcttgttgtacaggatttgccaacaaatcggtgatcctttgtatatgctgaaggcaatcattaccagtccatccgcaaattcaatgctcaatagaaggatataactgaaagagttgtcgatcccagctgcagcctcacatatctccctcaaacaccggcgtagtaactaccgaaaactgcacacgtcctcaggaccatttacaatcgatcagctgcaagctcaacatgaggtgacaaagtgcgacatgtgtatgttacatcattacccataacgaaatgagggcttacagtacggcgtcgcaattatggtcactagacgagcaaatcccatccaccgcgcgagcaaggcagcaaagcacaatgcggagcgagtatgcgggtgacatgagagagagacgtttaccgccgtgcgtgctggcgctgctggtggaggtgtcgaccttggacctcggcggcggcggcggcggcggcggcgggcatgttccgacgggccagaggcggatgcagcaaccggtggagacggcggtgtcgtcgtcggcgcccttggggtccgcgcggcgcctactgctgccgcggcggctgcggcggcaccagccccagcgctccctctcctccccggagctctcccacccgtcgaactgccccagctccggcggcgcgagccccataagactagggacttacctcctccgcctcctcctaatcagaacccggcaatggcccccggcaccacctctccgggcggcaagagcaccagatcggcgccgggtaatctccgcctcacgcgctgacgagcaccaagcggcccgcccgctagccgcccgagccgctggggaagagaagaataaaaaagtcactggttcccgcacgcggaagcaccgcgacccagcctccccaccgaatcacgccgggtctcgggcgccggccgcgcgattccgccgcatcgggcgtgtgtctcgcacgaggagcacctcgcgaagcccagcacggaatcaggtgcgcgcgcaagcccagcagccacggacaccgccgccgcgcgtgagctgagccgagcctagtggagcgcctcccagggaaggacagcgccgtccggcggcggcggctgtggcggtgtggccgtg

SEQ ID NO: 108524 - DNA, 882 bp, Zea Mays
tttttttttcttcttccgtcgtcgatgaatcaagtttggataattggattcgtggcgtaaccaatcccaataaagaattgcttcgtccagttcttcaacctaggtgacactgacacaaggcatggtcgggaattgatcgaggtttctgcacctgcagggctgcagcccacttgtccactccaatacaagagccgggacggcggggcgggcggatcggccatggcgcctccgaggcaaggggaggagcatgcgggcgccggcgccggcgctgcgggccccggcacacgtgatggcgcggatgttctcgcagctcgactgcgttgacctcggaagctgttccctcgtctgcaaggtaccctcagtgcagattagcctgcaggaggccatctcttatctgcgccgagacatccttgacagctccaggaccgtgggggatgaacaccgaagaggacttggaggaggccccaatctccctcatggtgtcaaagtactgggtgaccaggaccatgtccatgatgtccttggcagtggtgcctggaacgttctctgagaaggcgagcacactgtccctcagcccatccacaatggcctggcgctgccttgcaatacccacgccagccaggtacttggattccgcctctccctcggctttcttgatctggagtatcttctcagcctcagctttctcactggctgccaccctcatcctagcagctgtgccatgcagccaaaagggtagcatgtaagattagtcaatgtaattagtagatgctgatggcttagcaaatggccaaattctgtattgccaatttaatctgatgcggtgcttataatatgatgaaaattgaagagtaaagtactcgcctgcattgatctcgttca

SEQ ID NO: 108525 - DNA, 746 bp, Zea Mays
tttttttttcttcttccgtcgtcgatgaatcaagtttggataattggattcgtggcgtaaccaatcccaataaagaattgcttcgtccagttcttcaacctaggtgacactgacacaaggcatggtcgggaattgatcgaggtttctgcacctgcagggctgcagcccacttgtccactccaatacaagagccgggacggcggggcgggcggatcggccatggcgcctccgaggcaaggggaggagcatgcgggcgccggcgccggcgctgcgggccccggcacacgtgatggcgcggatgttctcgcagctcgactgcgttgacctcggaagctgttccctcgtctgcaaggtaccctcagtgcagattagcctgcaggaggccatctcttatctgcgccgagacatccttgacagctccaggaccgtgggggatgaacaccgaagaggacttggaggaggccccaatctccctcatggtgtcaaagtactgggtgaccaggaccatgtccatgatgtccttggcagtggtgcctggaacgttctctgagaaggcgagcacactgtccctcagcccatccacaatggcctggcgctgccttgcaatacccacgccagccaggtacttggattccgcctctccctcggctttcttgatctggagtatcttctcagcctcagctttctcactggctgccaccctcatcctagcagctgtgccatgcagccaaaagggtagcatgtaa

SEQ ID NO: 108526 - DNA, 489 bp, Zea Mays
atggcttcagggtcttctaggggcaagggtgcgggaaatgagagacgaaaggatggagggaagttaactccaatgtgtttcgatggccctcttggtccagatttttttgaagaggcggtttttaactttccagttcaaagtaaaaaagatttcaacaaagagcattcattggtcaaggagaattgtgggttcactcgttgggtagatcctcgtccgattttccctcatgcggaatacatatcctacctacagaataggatatttgatctagagagggaagtaagcaacagaaatgacgaggaagaaagagacaacaacaatggtggtgcttcacaggtgcaagtatgtccagatccatattgttgctgcccttgtcacaacaagaatgttggtcctccgtcgtctccaccgcacccacagcagacaacaacaattggaggatactatggagaagggtccacacaatttggaatgtgggagcactactag

SEQ ID NO: 108527 - DNA, 235 bp, Zea Mays
atttcatttgggtcccttcagattttagcagttggcgctgaacctgtgctctcccgtctcacaataaacggaacagtcctttcacaaataaaatgtgctcctcagtgtgcgttttctgtctccatccattcatctggaatagcagctgttgctggatacggaggtctggtggatgtgatctcagaagttgggagccgccatctgtgcacatttggtagccggggaaaagatcaca

SEQ ID NO: 108528 - DNA, 422 bp, Zea Mays
ctaacagtttaacaacatcagctatcttctgaacttcagctggacccacatctgggcatgatgtatagccaaagtacatcagattccactttccccgaagctttgattcagtcacctcactgttttctgtatcatacagcttaaatggccctcctattgcaggtctattggtagtacatcttttgggaacattggtctgtcctgaactcttaccgaagggaactgcacgcctctcatcattgtaatgaacaaatgtggctatcccagcaaaagcaagcagagcagatggctcaatgtaatatattaatggctgagaggttgactcattctgttcggaaaactgtctcattggcctatcatacttggagcttcccccactagaatagcctctggaatggtaaacccgcacaggtaggatccta

SEQ ID NO: 108529 - DNA, 1751 bp, Zea Mays
ataacttcaaaaaaaaaaatcaaaaatggttccctcctgttctgttcggaattgagatggtccaattttgcaacgcaatgaaagatgacatcataaaactatggaagacaccaggagagacaacctctttgtctgtcgctccctcgaggaaatgtatgccgtcctaaatgctgcaggcagagagaactccactgagggcacatcaaaccgagaaagcggcaatcgaaaacgatgcgtcgatggcaaaagcaagagcctcctcaagctgacagagtggccgcctgcctgcctgccgtacaactgtacgagctgccgagcacggggcaggtagcacccaacaaaagcgagcgcaaagctgcctgtcagcgcgcctgcttctcctcaccctcgaccctccctccctttcttgctaaagcaagccgccgccgcttctgctcctgcaagctctatatttccaggcctgctacagtgcacccatcgccagcatgaagaaggcggtgtcagtgagaggaggtgggaagggaggcacagcccctacggacctcctggtctgcttcgccgctcggcagcacctggcgctgatgcccaagcccatctgcagtccgtctcgggccaccatggacaaggcagccgccgcgcgccggcgccagctccagctccagctgccgggcgccagcgctgctgcaggtggtgcgagagtgcgcggcgggagtagcccgatgttccgggggtccaaggcgaagcagagggcggaggaagaagaggagccgcagtcgcccaaggtcacgtgcgctggccagatcaaggtcagccggcccaagaaggtgaagccggcctcgacggcagcggcgaagcacagtagcgacggcgccggcggcgccaggagctggctcaccgtgatggaggagatcgagcggcttcacggccgcaggaagaaggcgggctggctcgagaacctcgggatcaggcggcacgcgctgccgttcgtaggcggcgcgctccggagcctacggtccaaggcacgctgctttggttccctccatgccgcggccgtggactcctccgttgactccgacggcaacggcaatggcaacgacgcggcggggcgtggaagtgagcgcggagccggagggagcgccgcggccagcgtattctacaagtggctcatggtgctcgaaggcgaccaggagcccctggagcaagacgaaaccaggtacgacgaggaattcggtcagggagaagacgtcgagcggcaggtgggaaaggagacggacgagggcacgaacgggccgacgtccgcgccgccgccgaacgcgctgctgctcatgcgctgccgctcggcgccggcgactgggctgtccatgtccagaaggaggacgtgtgagcagttggctggcgtggtcgaacaagggaaaggggccgcgggcggcgtgccgggagacgctgaaacagaggaggacaaggaggagctggcgttcacgtgcacagcgcccggcttcatgaagctgtcactggacatcgccaaggagacgtgggtcgtcggtggccgggacccgatcgcgaggagccggagctggaagaggtgaccgccaacgccaaggcgccaacatgcgccgcatgcgcgacgccgacgaggatgacgtggaggcggaacccatcgtgctgccttgtacagatcgcttcactaatttctgtgctggaacatatataaactcatgtttcgtaaatgtttgagttttaatctttgcatt

SEQ ID NO: 108530 - DNA, 211 bp, Zea Mays
tttgagttcatgtgacttattttagaaacttgagctcataaactttctcttatttggtctctgtatgatggaattatgtcattttataatctttgttcgttcagtcagtcgttgtgaactctattctaatcgctcactgcattggccgtgttgtaccatgatatattgcatgaagtaaacaataacatcagttagtcaaataaaaaaaata

SEQ ID NO: 108531 - DNA, 1849 bp, Zea Mays
gcgtcaccccgtcgcctcccctcccgcaggccgcatctataaaaaaaagcgagctgcgatcctcccgcctagtctcctcaacgcatccacgacgacaacaccaatcattcctttccaatctgcagccagcctctgatcgccgtcgaccgaccgatcggatgccgatggcgaagccgagcgtggcggtggcggaggcttccggcgtcccagcgcaggcgtcgtgctcgtgcccctgcccggggacgacgctgttcccgtacccgccgccgcgcggcgccagcgggatcgcagccgccgccgtgcgccgcaagtgcttgcaggcggaggtgggcggcggcgcctgctggggcgtggagtccatgcgggcgtcgtcgcccacgcacgccagggccgcagccgcgctcgccggcgccggcgccgacgaggaggaggagcgcgccgcctggatggcgcggcacccgtcggcgctgggcaagttcgagaggatcgtggcggcgtccgagggcaggcgcatcgtcatgttcctggactacgacggcacgctgtcgcccatcgtggacgaccccgacgccgccttcatgagcgagacgatgcggatggccgtgcgtagcgtcgccaagcatttcccgacggcgatcgtgagcggccggtgccgcgacaaggtgttcgggttcgtgaagctggcggagctctactacgccggcagccacggcatggacatcaagggtccggccaaggcctcttcttcccggcacgagaaggccaaggcaaaaggagtcctgttccaaccggcaacggcgagcgagttcctgcccatgatagaggctgtgcacgagcgcctggtagagacgacgcgcagcatacccggggccaaggtggagaacaacaggttctgcgtctccgtccacttcagatgcgtcgacgaaaagatgtggggcgagctgtgggagtcggtgaagggcgttctgcgggagtaccccaggctgcggctgacgcaggggcggatggtgctggaggtgcggcccaccatcaagtgggacaagggcaaggcgctcgagttcctgctcgagtcgctcggcttcgcgggctgcaccaacgtcctgcccgtgtacatcggcgacgaccgcaccgacgaggacgccttcagggcgctgcggcgccggggccagggccaaggcgtcggcatcctggtgtccaagcaccccaaggagaccagcgcctcctactcgctccaggagcccgccgaggtgatggagttcttgctgcggctcgtcgagtggaagcgcctctccaggctgagtcggacgcaatgagacgatcgacgcaacggaccaagctaactgatgcggccaagtgccagttagtagggtgtgtgtaacaactaacaagcaagcatgcgcgtacattattgcccaatagctagtgcgtgttcaattattaatataccgacctgccaagagcatgggtttgttaatcgggaacatatctggtgcaaatcaactcctctgtgcaaacatgcaaacttttaatctaggccacatgatgttgataaaatggacaaaggggcgtagataattttacacttaaccacccactactaatcacactttttcaaatccccctcccactccccccgcacggctccttggaccaacattatgtggttcagattataagttttcacggttacgcggaggagttgttttgcagcagatatgttcccttgttaatcaacgtggatgcatacaagcaaacccaagggcatgcatgtacgatgcaattattgcaatggacgcgaatcatccagtttctatataatttattatactgccatatcagcattttagtg

SEQ ID NO: 108532 - DNA, 658 bp, Zea Mays
ttcatcaacaaaagcatgtgtcaccttgcttctatagagaagtatgtggaaaattttgccacatttgttccaattcttctattcaatcttgaactagatacatttcggtatgtctcatatatcccaaaccattgcttatttatgaggcagtggcttatgcaattcatgatacaattctaccgggggcttatggggtttccccaaaaggtttgcactaccggtttctttcttagttcatcccagtattttatatcagacgacatgactattcgaagtcatttggttggtaatgtcatccctatttatcagcactgacaactactgatctactgaattactgtttgtaaaggccccgtcatgctgaagcaagctgatggttcatatgcatgtttcgtagatagtgaagctcggttcactttgggacaggcgaaagaactattgagagttattggtttacaagaagagggaagctcccttgaatttctaagaggatacaagaatgctacatggtgggaataggacgttgatcagtgatcaggagaagtcgcatgcctggcgaacttgaggtgctgcacctgctcgctggatgcttttctgatttggaactgggaataatttttttcccaacgagtgtccatgtcttgttgtatgtaacaga

SEQ ID NO: 108533 - DNA, 1105 bp, Zea Mays
tccgcatccaatcgttcatgcacttgtctccccctccacatcgcgtgagtacttttccctatgcccggtgaactctctcaccctcgccactcggccattggtgcgcgcgggcgtcgaggaatcaccacgcaagcgacaggagtcgggactggcgtcggacgacaaggattcgaattgacgacgacaacgatcgtgtttggtgcgtcatgcggttgagttgttggctaggtgtccctcccccatcgccaccggatcgagcggcggtggtccagggaagcgcggatccggcggagtccatcggctcgcgcgactctgcaacgctagatcctcgacgccgtcgacgtccatgagctgcgtcgacgaccggcgaggtggagcgtagaagaagcattcatcgatccacacgacatcgtcgtagatctccttcctccaacaatcacggccaagcgaaacaccttcgtctcggatggttaatcccatgcaatttacacaactcatgcaaatgggagtagaacctgtcagggatgcaaaccttggagacccaccagttttcccatagtcacaagcagaacaaccaagtggaaatcaaccttcaaggtgtaaccagagggggaagcaataccacttcagtattgaggagtacaaaatcttggtttcttgctggcttaatgtcagccttgatcctatatttggtgctggacaatggaaggcgtcattttggaggactatagaataaaactacaactctcagaaatcaacaggacatccagtccgcacacttaggagtttggaatggaggtaactacagctataaacctttacaatagcatcgaatgcaagcctataatcaccacccattgctgggagattcttagaaatgaggcaaaatggttggatttgtagaggaaggctactcaggtcatggaagagttggtaaagagaaagtagtatatgttccagactccataaatggcgatgacgaaactgatgacactagtcgaggaacttagaggcccatgggaatggacgctgcaaaggctacaaaaagaaacgtttccaatgaaaccttcatccaatctagctcagagtacacgagtttgatgtt

SEQ ID NO: 108534 - DNA, 816 bp, Zea Mays
ctactttcttggacttatctgatgctaaccaactctccacaattctcccatttcaatcttattctctaaccttatcccagttcgtctcaatcttattctctagccttatcccagcctggccgttgcctctcgctccctattatgcccatgacatggaacaatgtcattgctttcttttgctgtgaaatcgaacatcatggttgcatttgaataaaatctttggcttatgtgtgaacaatttcttttgaggaaatgaaccttgccttgccaatatttggcctgtatgaaaatggacaaccagtgggattttctgcaatcatttggggacatgcaacaggttaatcccatgcaatttacacaactcatgcaaatgggagtagaacctgtcagggatgcaaaccttggagacccaccagttttcccatagtcacaagcagaacaaccaagtggaaatcaaccttcaaggtgtaaccagagggggaagcaataccacttcagtattgaggagtacaaaatcttggtttcttgctggcttaatgtcagccttgatcctatatttggtgctggacaatggaaggcgtcattttggaggactatagaataaaactacaactctcagaaatcaacaggacatccagtccgcacacttaggagtttggaatggaggtgggagcaagacaacgaattcgaaagccattatattttagtttacatgaaaatcgaagtgggcacaacgacagggacaaactaagatttcagtccttaatgttatgcttaatgtattgtgaaataatcaagtacctacttcctattgta

SEQ ID NO: 108535 - DNA, 1798 bp, Zea Mays
aatgacacgcgggcaccatatgccacctgccgtccctcgcccccaccggcaccgacccccgccttcttcaaaaactttattcgccgaaaccccttgccacctcgccgccaccgcccaacaaacaggcgcgacgacctctactctacctcgtcgccaccgccgtcaccggtcaccgccgccatataagtaaacgctcgcctcgtcctcctcccagactcgccaccctccgcctccgacacatggcccagccgcacctcgtgctcccctcgccgaggcccctcctccccgccgccgccactccatcgcgccgcgccgtcgccgtccgcgcggcgctctccaccgcttcgccgcccgccaaggccgcggcgggagcggaggcggtgcggtcgatccgcgcgcgccagatcgtggacagccgcgggaaccccaccgtcgaggtcgacctcgtcgccggggacggacgcctccaccgctccgcggtgcccagcggggcgtccacggggatctacgaggcgctcgagctccgcgatggtgacaaggccgtgtacggcggcaagggcgttctccaagctgtgcgcaacatcaacgaggttatcgcgcctaagctcgtgggcgtcgatgtgaggaaccaaagtgatgttgatgcaatcatgctagacattgatggaactcagaacaaatccaagttgggtgccaatgctattctcggagtctccttgagtgtgtgtagggcaggcgctggcgcaaagggggttcctctgtataaacatattcaggagcttgcaggaattaaggagcctgtcatgcctgttcctgctttcaatgtaataaatggaggtagccatgctggcaacaatttggccatgcaggagttcatgcttttacctgttggagcagctacatttgctgaagctcttcgtatgggcagcgaagtttaccatgtcctgaagggcatcattaaggcaaaatatggtcaagatgcatgcaatgtcggagatgaaggaggttttgctcctaatgttcaagacaacagagagggtcttgtcttgcttatggatgccattgagaaggcaggctacactggaatgatcaaaattggaatggatgttgcggcatcagagttccttacaaaggatgggaactatgatctaaactttaagaatcagcctaatgatggagtccatgttctttcagcccagcatctgggtgatctgtacagagattttgtcaaggatttccctattgtatcaattgaggacccttttgatcaggatgactggagttcatgggcatcattgcagtcctcagttggtatccaaattgtgggtgatgatttacttgtcacaaacccaaaacgaattgcagacgctattgacaggaaggcttgcaatgctcttttactaaaggtcaaccagattggtactgtcactgaatcaattcaagctgccctggattcaaaagctgctggttggggtgtgatggtcagccacagaagtggtgaaaccgaagacaacttcatcgcagatttggctgttggcttagcaagtgggcagattaaaactggggctccatgccgcagcgagaggctggccaaatacaatcagcttctgcggattgaagaggggcttggcaacgtgcgctatgcaggggaggcattcaggtctccataagaaatagactttaaatcaccgcgcgtgtgtgagaaagtgccagctttatatggacaagactattcagagaggataatgaatgagagctaataatttttttacacaaaatcaaccttggcttgcttcct

SEQ ID NO: 108536 - DNA, 2459 bp, Zea Mays
atgcaatctgccgccaggctcttcgctgcggccgcgccgggaagcccgcgttctctcctattcctgcgcggcctctgctctgcctcgccggctggacagccggatccgcggccctatccggccccggaccccgaccccgaccccgacccgcggctcgttggcgctctctgccgtgtgctcagcgacttccgcgggccgcggcacgacctccgcgccgcgctcagcggattcgcgccccgcctcacgcccgcggcggcggctgccgtcctgcgccgctgccgtaaccttcccgtgccctccctccggttcttcctcttcgcggctgcgatgccggggttcacacaccttccggactcgctcctcatcctcgccggctcgcttgcgggggcgcggctcttcccgcttctgcgctctctgctctccgatctcccgcggtctgcgctctcgcgggacctgtttccgctgctgttccgcgcgtacgcccgcgccggtctacccgaggatgccatccgagctttctcctccatggagaggttctgtttcctgccgacggtcgctgatctccactcgctgctcttcacgttatcgcataatggcctggtggagcacgcagaggcattctttagggagtcgccatttcagtttgatctctcggccaaaacttataccatcctgatctctgggtgggctgttgttgcgagtccagtgaaggcccaaaagctgtttgacgaaatgattgagagaggggtccaacctgatgtgcctgcctataatgcgttgattgacgccttgtgtcgaggaggggatgttgcacttgctcaggagcagctaaaagatatgcaacgcagccgtgggcttgcccctgatgctgccacttacggcccattccttcgatctgcatgtgcgtcaaaggatgcccgtgctgctcttcgagtgctagataggatgcgtgcacgcagccttacaccaaatgtattcacctataatgctgtcattcggttactgtgtgagttgggagaggttgatgaggcttataatatcctcaatgagatggcaacttatggggagaagcctgatgtctggagctacaacactctgcttaatacacattgtaagctgaaagaggtgaataaagcgttgcggctcatttcaaggatggatgatagctcatgtttgcctaatcggcactcttacaacatgattctgaaaatgttgcttgcgataggaagggttgatagggcaattgaggtttgggatgggatggaaaaacatggtttctacccaggagcagctacttatgctgttatgatccatgggctgtcttgcaagaagggtagagcagaggaggcctgcagttattttttgaggatggtagatgagggtatccctccttaccaggctacttgtcaggttctgagggataggctgctcaggcttggcttgcgagatgatcttgagatgctcactgataggatgcgacggagcacatcctgcacaatacaagatttggcaagtatcatgtgcagtaagagggcagaggaaactagaaatctgaaatgcgaccatgaattctcttgccttgatcttgctgagagccagtggatggagaaatggaaaataggagacacctcctcgtagggggaggtttaatgggtataagaatctctgttatcccgttgatgatggcactcataacttggctagttggctctgcaatttcttactgggctatcatggattcagatccatcatcacagaacccaacagatatgactgcatttgtccagaacctccttggacagatgcaaacaaggttcgagtccatgtcgcagaacattgtgtcaaagatagatgaaatgggaaccaagattgatgagctcgagcagagcatcaacgatctcaaagctgagatgggcactgagacgccggtcaagaagcctgatgagccaaagcctgctgactctgcctaacttgggtgtaacccagagattgttgtgtgaagatttgatgatggtgtgacaaatttcagcagtacgtgatcgtatctgttttcatgagtcctggcagttatgtagacacgaacccatcgtatgaaagatgaatccatgtttgggctctccagacatcaacgcatgttcttagcttttctgtcatctttcggcaactatttgtttgactgttataagatgttatgcaacatctactccatttgaagtaattgtcttgtgtagagcagtctgctgctgcttgtttgctgataactcatggcggctgttgtctgttttgtccaaatgacatcgaacgtacgagtcatatgagcttatgtcggttgtgccgtttattggcacaatctggcgctgcaatactggcaaatttaccgtgtggttgtggtggactgatactttggatatcatacgaatatcctcgacttgtggagtggggaaccatgataaaaaaag

SEQ ID NO: 108537 - DNA, 1383 bp, Zea Mays
aatgtgttatgtggtactatcctagtattgctactttattcaatgatccatgatattattgaatggatgattgaatgatgctcaatcttttgtaatgatatttagattgatatacttgatgtttgtatattgtattattttgataaagttttaatctttatgagtacaagtgactcgatgggagacccatacccacatgggtatgaatatggggataaatctattgtcattagtgaatatgggtgatccgacgagtttatttttttacaggtatggatatgagatagcattgccaatgccgtctctaatcacagctccaaacgataaaaaccgaacgtctcagagctttgcctgggccaagcagcctttgttccttcgaaaccctgcctggctcgcttttggtagcccacgcgaaccgggccgcttttcagccctccgctcctgcgtcctccccttccactcgtatacaaccacccacctgagccgcacccacgctcaccgtacctcctccgaatccgccgaccgccggcgagcccctcctcctccacgacacgcgcttccccggctatcatggattcagatccatcatcacagaacccaacagatatgactgcatttgtccagaacctccttggacagatggtgagtgcctttggataaggtttcattagcatctccttcaaataatttaccaccgtctcccactcacttgaacgctgataattgcagcaaacaaggttcgagtccatgtcgcagaacattgtgtcaaagatagatgaaatgggaaccaagattgatgagctcgagcagagcatcaacgatctcaaagctgagatgggcactgagacgccggtcaagaagcctgatgagccaaagcctgctgactctgcctaacttgggtgtaacccagagattgttgtgtgaagatttgatgatggtgtgacaaatttcagcagtacgtgatcgtatctgttttcatgagtcctggcagttatgtagacacgaacccatcgtatgaaagatgaatccatgtttgggctctccagacatcaacgcatgttcttagcttttctgtcatctttcggcaactatttgtttgactgttataagatgttatgcaacatctactccatttgaagtaattgtcttgtgtagagcagtctgctgctgcttgtttgctgataactcatggcggctgttgtctgttttgtccaaatgacatcgaacgtacgagtcatatgagcttatgtcggttgtgccgtttattggcacaatctggcgctgcaatactggcaaatttaccgtgtggttgtggtggactgatactttggatatcatacgaatatcctcgacttgtggagtggggaaccatgataaaaaaag

SEQ ID NO: 108538 - DNA, 1296 bp, Zea Mays
aatgtgttatgtggtactatcctagtattgctactttattcaatgatccatgatattattgaatggatgattgaatgatgctcaatcttttgtaatgatatttagattgatatacttgatgtttgtatattgtattattttgataaagttttaatctttatgagtacaagtgactcgatgggagacccatacccacatgggtatgaatatggggataaatctattgtcattagtgaatatgggtgatccgacgagtttatttttttacaggtatggatatgagatagcattgccaatgccgtctctaatcacagctccaaacgataaaaaccgaacgtctcagagctttgcctgggccaagcagcctttgttccttcgaaaccctgcctggctcgcttttggtagcccacgcgaaccgggccgcttttcagccctccgctcctgcgtcctccccttccactcgtatacaaccacccacctgagccgcacccacgctcaccgtacctcctccgaatccgccgaccgccggcgagcccctcctcctccacgacacgcgcttccccggctatcatggattcagatccatcatcacagaacccaacagatatgactgcatttgtccagaacctccttggacagatgcaaacaaggttcgagtccatgtcgcagaacattgtgtcaaagatagatgaaatgggaaccaagattgatgagctcgagcagagcatcaacgatctcaaagctgagatgggcactgagacgccggtcaagaagcctgatgagccaaagcctgctgactctgcctaacttgggtgtaacccagagattgttgtgtgaagatttgatgatggtgtgacaaatttcagcagtacgtgatcgtatctgttttcatgagtcctggcagttatgtagacacgaacccatcgtatgaaagatgaatccatgtttgggctctccagacatcaacgcatgttcttagcttttctgtcatctttcggcaactatttgtttgactgttataagatgttatgcaacatctactccatttgaagtaattgtcttgtgtagagcagtctgctgctgcttgtttgctgataactcatggcggctgttgtctgttttgtccaaatgacatcgaacgtacgagtcatatgagcttatgtcggttgtgccgtttattggcacaatctggcgctgcaatactggcaaatttaccgtgtggttgtggtggactgatactttggatatcatacgaatatcctcgacttgtggagtggggaaccatgataaaaaaag

SEQ ID NO: 108539 - DNA, 1989 bp, Zea Mays
aatgtgttatgtggtactatcctagtattgctactttattcaatgatccatgatattattgaatggatgattgaatgatgctcaatcttttgtaatgatatttagattgatatacttgatgtttgtatattgtattattttgataaagttttaatctttatgagtacaagtgactcgatgggagacccatacccacatgggtatgaatatggggataaatctattgtcattagtgaatatgggtgatccgacgagtttatttttttacaggtatggatatgagatagcattgccaatgccgtctctaatcacagctccaaacgataaaaaccgaacgtctcagagctttgcctgggccaagcagcctttgttccttcgaaaccctgcctggctcgcttttggtagcccacgcgaaccgggccgcttttcagccctccgctcctgcgtcctccccttccactcgtatacaaccacccacctgagccgcacccacgctcaccgtacctcctccgaatccgccgaccgccggcgagcccctcctcctccacgacacgcgcttccccggctatcatggattcagatccatcatcacagaacccaacagatatgactgcatttgtccagaacctccttggacagatgcaaacaaggttcgagtccatgtcgcagaacattgtgtcaaagaatatccttatctgctttaaatttattatctttattctgtttgtcttttcaagaaaatgtgaaaaatagagctccgagataagtttctaccagtgcagtcattattgttttgatgttctttaatatagtaatatctgatgccatgcttctgtaatgccaatatgcattttggatgctggtatatttaacaaatcattgcccatggacgatattttttaggtgtgtttgtgcaagcttgtaacgttctataactgaaacaaaccagctatacatacacacaaaatataccattatccatacaatattcttgttccattttgagaatctgtctcctgaccttgataactgtttttttgtgctcttctgttagccctgtagttattgttttcttggagcatacacatgctccatacaaaataacgaaaagtcgaaaaccatggctatattttgcttacgtttttctaatatatttttctggtctataaaagaataaaacagaagtctgagacatgcaaaagaatatttcttacaaagtgatattgcgtgatttttttgccaagctattcagaaccaaacgttccattaggattgaaggaaaataccacttttgctgttataattgtatcatcatgatttgttaaactgcacgatgaccattcttagttacactcaagtatgttcaagagattaaattgaaggttctaatgcattcttgtagtataatgttgagtctgctggtgcactgagatttcacaattgttttgccatcgcactatcacagtatgatccaacgacatcattttacttgttgataatttgaagcgcttatttgtggaatttacataggaatgacagaagttattgaaaatctattttatcattagctatatatgcacttgtctgccacaatcttccgttttctttaactacacttcactagatgaaatgggaaccaagattgatgagctcgagcagagcatcaacgatctcaaagctgagatgggcactgagacgccggtcaagaagcctgatgagccaaagcctgctgactctgcctaacttgggtgtaacccagagattgttgtgtgaagatttgatgatggtgtgacaaatttcagcagtacgtgatcgtatctgttttcatgagtcctggcagttatgtagacacgaacccatcgtatgaaagatgaatccatgtttgggctctccagacatcaacgcatgttcttagcttttctgtcatctttcggcaactatttgtttgactgttataagatgttatgcaacatctactccatttgaagt

SEQ ID NO: 108540 - DNA, 584 bp, Zea Mays
cacttcccttcagaccagttaaggcttcgttcgtttctacccaaccagaccaggttgaggctggattggagctcaatccagggacggtcctggattggagccaagtctccaggggtctggaacaaatcccgcgagactaaggagcggcggcggcgcaaagaagacgagtcatcctcctcgtcgtcgacgacctctactgctggcgagcttctctccgattgtccctgctccagcaagagtaggcgaggacgagcctcccccatcctaggtgttggtgcctgactcattttatcaagacaggaaatattggtcatatggagatagttctgcacagcgttctgagtctgcatgtgccagtatgagctatatatatgttgcatttctccatgtttgggctcagcatgtaatagaactgaaggaaggttgttgcaagacttgtatggcatgcttaaatttctggataaaatctagcttatactaagtctattacatgtttaaatttttgaaaaaaaatgtatcgagaattggatggaatgcttaaatttctagagaaatgacatgttctatgcttaaatttctggatt

SEQ ID NO: 108541 - DNA, 1451 bp, Zea Mays
gcaaggatttggaccaaaatcgcccatccaaacggccactcggtagcttcgaacggcccagttcatggcgatggcgacgaggtgtcggcgatggcgccgacgccgacggcccatcccttgacgagctgcagcaggatctcgttccacgtgtcgatgggcccgggcaggcaccagtgcacacagtcgttgggcatccgatccttcgcaccctcggcgaacgggaacgcccgggtgtacaggcccgggtgcccgtccgggcgcatcgccgccagccgcgtcacctgcagcgcctccaccgccaggcccgccccgcgctcactcgcgtccgcgccggccgcggcgacctcctcgaccccggcgcgcagcatctccagatccatgtactccatctcccgctccccgcgcgcgtacggctgagtgcgcacgcacgcggtcgggctgtcccaatccccctggaagtgcgcgggcgagaacgtcgtcaccacagccagccgggggcgcgcgggcgaggacgtggcggcgacgcgggatatgacctcgcggagcgcgttgcggacggcgaggcggaacacgccgaagaagcccgtctccgtgcggttgggctccgggcatcgatggcagccgatgacggcgccacggtcgtagaacatggccgagttcaggtaccactgccccgccgacagcaccaccacgtcgaaacccgggaccgccgccgcccaccgctcgtcgggctggtcgaagtagatccggttgtggtccagccctcccgccgccgccggcgacttgggcctctccgtgccgttcactaggaacggtgaccagaacaccgacaccgtcgcgttgtgcgacgggaacgcccagcgccggaacttgcggagctcgtcgccgtccccgtccccgtcgccgccgccagcgccgcgcaccagctgggccgggaacgcggaggcgagcaggcacaccagggactcgcactggttccgcgcgagcgagtcgccaacgaaggccacgtggcgaccgcgcaccgcgctcaggaactcctccgggtcgaacggcggcagcgcgcacccgcgcgggcgccaccgccagtagatgtaccccgtgtccggccgcccgtgcgcctcgcagttctggccggccttgatcgtctcgccgcagctcgacccgttgtaccgaggacctgccgcggcccgcacccactccccgtccgagtaatcgcaccgcgctgccggagcctcctccgcctgctgcggccgtgacggggaggtggcggcgccggtggtgggaggagaggggagacggggaggaagagataggaggtagtggatgagggcgagggggacgagggcgtagagcacgaaggcgatggcccgcttggtgaggatggaagacgagctgaagtggtggcaagggcaagtactggaggcacccatggagatggatccaagatccaa

SEQ ID NO: 108542 - DNA, 145 bp, Zea Mays
aatgtatttgatgccctatccctccattgtagactcttcacatacagggtatcatctgtcctccatgtagtgaattgtcagttgtgttcatgtgccctgagaaccacttgtgctctcttcgttccttcgctcagctgatttgttt

SEQ ID NO: 108543 - DNA, 967 bp, Zea Mays
ggaaaaaacccagcgccctccccaccgccgcccgcctccctcgcctcctatcggaatccatcccgatggcgcaaggcaccgtgccgtccgcagccggggccggcggaggcggctgcgcctcggcccccgccgtctccacgaccccccctggcacgccacgggcctccgcggcagccgcgccgccaccgcctcctccctccttcgcgactggattctactacgccgtggagctctacttcgacccggcgctagagaaccaggtgctcaaggcgtggaacgcgctggcgcggcggcaacttggcagccgcctcatcgacgcggccgctcgcccgcacctcccgctgctccacctccccgccgccgcgctcccgccgcctggcaccggcgcgggcggggacccgctcctccgcctcgcaccctcgctccgcgcgctcgcgtcgcgcctcgacccgctcgcgctcgcgctctcctcgctcgccgcgctcccggcctccgccacctcctctccacacgacaacgttctcttcctcgcgcccactccgtctgccgcgctgctcggcctccatgcgcagctctgcgaactgctgcggaaggacgctggcgtcgagatccccgacccgttccggccggaccactggctaccacggtgcgccgtcgccatcgacgtgccacgcggccgcatggccgaggccttctgcgtgctccgagagctaaagctgctccccgtctctgggtacgggatggacatcgcgcttgtcgaggtcggggcaaccgtcagggagctcgtgtgctacccgctcggcggcagcggtagcactggagccgactgagagggagccccctgttttatgccaagatgatcttcttgctgcctgattttctgccatctgcttaccacccgtggtaagtttacacctaaatgaactttggttttttcatccctggggacatatggctggtcaatgat

SEQ ID NO: 108544 - DNA, 1602 bp, Zea Mays
gatctcgggtcctggtcacgggaaggtatcttggaagagctggatacaaggaaagttgtgagggcggccgccgccggccttggaattagttcgttctttcaactggagctatactagtaggagggcatttaagatgttcaacatagtttcgtcgtggaacaagaggcggagaagcaggtcactcgaccagctaaatccctgggtgtacaagccggctgagctatggcaggcgaaggagcaggagcaccaccacccgccgcccaagaagcgcagctgcaccatggtgttcacgctcaaggagatggaggaggcgaccaacctgttcagcgaccgcaacctcatcggcaagggaggcttcggccgggtttacagaggcgtgctcaaggatggccagatcgtcgccgtcaagaagatggagctgccgacttgcaagcaggccgacggcgagcgcgagttccgggtggagatcgacatcctgagcaggctagaccaccccaacctggtcacgctcatcggctactgcgccgacggcaagcaccggttcgtggtgtacgagtacatgcccaggggcaacctccaggacatcctcaacggcattggggaggtgaggatggactggccgctgcgcctgcggatcgcgctgggagcggcgcgggcgctggcctacctgcactccagcacggccgtcggcgtccccgtcgtccacagggacttcaagtccagcaacatcctcctcaccgaccactacgaggcaaaggtagtaggtcaccacatcctccttcacgttccggccacggccatatatctctgctctactgctatccacatctgaatgcgtttcgccggccggccggccggatcggatcggaacccctgcccagatctcggacttcgggctcgccaagctgctgcagcaggaccaggacctgcacaccaccaccagggtgctgggcacgttcggctacttcgaccccgaatacgcgctgacagggaagctgacgctgcagagcgacgtgtacgcgttcggcgtggtgctgctggagctgctgacggggcggcgggccatcgacctgagccaggggccgcaggagcagaacctcatcgtcggcatccaccaggcggtgggcgaccgcaagaagctgcgcaaggtggtggaccgggacatgcccaggggctcctacacgctggagtcggtgtccatgttcgccgcgctcgccgcgcgctgcgtctgctttgacagcgccggccgcccgcccatgcaggactgcgtcaaggagctccagttcatcatgtacgctaacatgaagatatgatcactctcgcgggtgcaaaccgcgcgtgggttttctttacttttgagacggggggcggggcatgcggatgcggctgctggattgcaattgcaggtccgcagcttttgtttggttgatgaaacgaattgtctaaaagggctttatacagttacatagtagtgcttgtttggtagagcttgtagctctagccaaaccagttctactagtgatttctcccatgaagtagatctgtgtgactctgatttatccagttagaaaaaacgttcgttagaataatttttattggtat

SEQ ID NO: 108545 - DNA, 3345 bp, Zea Mays
gtcctcacgttccctctctctctctctctttctctctctcccgctttaggtttgcctgtgttgggtagagtcgtatagcgtggagaagaggcttggtgccaagaaactggcatttcgatttggggagtggctaaattcgtcgctgtggaatcatggttctgaagtcgcacacaaatctgctagatatgtgttgtgaagatgtgtttgacttccaacaacctttaagatctcctcgtcatgtggtgaactctcctggcatcatatctgaccctgattgggaaagtagtaatgatggcaactcagttggttctatgcctttttgttttaagagaaagattattgttgcaaatttccttcctgtgatctgtgcaaaaaatgaagctaccggagaatggtcctttgccatggatgataatcaactgcttgttcaactcaaagatggttttccaattggtaatgaagttatttatgtgggtagtttgaatgttcaagttgatcctattgagcaagatcgagtttctcagaagctcttcaaggaacacagatgcgtacctacctttctcccagctgaactccagcatcaattctatcacatattctgcaaacagcacttatggccacttttccattatatgcttcctgtttgtcatgacaaagatgagctctttgaccgttccctttttcaagcctacgtgcgggccaacaaaatttttgctgacaaaattgtggaggcagtcaattcggatgatgattgtgtgtgggttcatgattatcacctcatgcttatcccaacccttttaagaaagaaactgcaccggatcaaagttggtttcttcctccacagcccatttccctcgtctgagatctataggacactgccagtgcgggatgaaattctaaaatcacttcttaatgctgacctcattggctttcaaacttttgactatgcccgccacttcctttcatgttgcagcaggcttttaggccttaattatgagtccaaacgtggccacataggtatagagtacttcggccgaacagtgagcctcaagattcttgctgcaggtgtacatgttggccggcttgaggctacattgaggttgcctgctacaattaaaaaggttcaagaaattgagagtagatatagtggcaagttggtaatattaggtgtagatgacatggacatctttaaaggtatcagtctaaaactgcttggcttggagcttcttctggaaagaacacctaagcttcgaggcaaggttgtccttgtacagattgttaatcctgcaagaagcatcggaaaagacattgaggaagcgaaatatgaagctgaatctgtagctcaaaggataaatgataaatatggttctgctaattacaagcctgttgtcctcattgactactcaatacctttctatgaaaagatcgcattttatgctgcatctgactgctgtattgtaaatgctgtgagggatggcatgaatttgataccgtatgagtacaccgtatgcaggcagggaaatgaggagcttgataagctcagaggtcttaataagagctcatctcacacaagcacacttattgtgtctgaatttgtgggttgctctccatcacttagtggagcattcagggtaaatccttggagtatggaagatgtggctgatgcattatacagtgtaacagacctgacacgatatgagaagaatctgcgccatgaaaagcactatcgctatgtcaggtctcatgatgttgcttactgggcacgcagctttgaccaggatctggataaagcatgcatagagcaatacagccaaagatgttggacaactgggtttggtttaaattttagagttattgccctttcacctgggtttagaagactgtctctagaacacctagcctcgtcttataagaaggctaacaggaggatgatattcctggactacgatgggacccttgtgccgcagacatcacacgacaaatctccaagcgctgaacttatctctacccttaacagcttgtgcagtgatatgaagaacacagtatttatagtcagcggacgaggaagagattccctaagcgagtggtttgcttcatgcgagaacctcggtatcgctgccgaacatggttactttatcagatggaacaaagcagctgaatgggagacaagcttctcaggtatttattctgaatggaagctcatcgcggaccctatcatgcatgtatacatggaaacaactgatgggtccttcatagagccaaaagagagcgctttggtatggcactatcagaacacggatcatgactttggctcgtgccaggcaaaggagctagtgagccatcttgagcgagtcctatcgaacgaacctgttgtcgtgaggcgtggccatcagatcgtagaagttaaacctcagggagttagcaaggggatttccgtggacaagatcatccggaccttggtcagcaaaggggaagtaccagaccttttgatgtgcatcggaaacgatcggtcggacgaggacatgttcgagagcatcaacagagccacctccctttccgagcttcctgccgctccagaagtattcgcctgttccgttggccccaaggccagcaaggcaaactactacgtcgatggctgcgacgaagtaatcagactgctgaagggtgtcacagccgtttcgctccaaaaggatactgccggccatagccatgcggcattcgaggatacgcttgaggttgtcagctgatccacacaagtagtcagtcagctcaaactagctacgtccagtgtgttcagcgtgccaatctcaaatctccactgcatgcaagccactcatcactccaaaccatatgtgccaagtggaactctaaattggacggagacaagtatcgccattgctgacacagagacagaacagcggtcacaaactgcaagttcgagcgaatggcgtcgcggttgatgattcactgacgacaacggaaatcacaaaccgcaagttttcaattcgtaggctaagacaactagtgggacgccatacattttgtaggcggctgatctggtggtgaaagggtggatgtccctgctagagccccagcttacggcatctgggagagccttggaagttggaccccgacgcttgtgctgcactgaggactgttacactattttctttgtacagaacaaacaggtgtggttaggcgattagcgctgtgacgattgattgtaattcacccacgtaccattgaggaaattaatggctgcgatggtgaagcgccgtgcgcatggcacattgtatgacgttcactcagtgttcggttcgagtttaaagtaggatgatgcggggt

SEQ ID NO: 108546 - DNA, 499 bp, Zea Mays
gagaccaaaacatatataaatagacagaagtagtacatgatatttatcttcaactatagagctttttttttggaacaaaggaaaagtgaagtaattttgaagcattggaattctataggtggcattttttggaacaaagaaaaattgaaggaattttgaatcattgaaatcctataggtggccctttgaaacaaaggactgagtttctataaattctataaaattctatggaatagacttgtcggcgttttggacccgggagaccctcaaccggaccgactagtgaattttgtgccgcgtgcccctgtccagatgggttgatgcaagatggaacacaagaggagggatgaagcttatattatcttgtaccggaggtgcttgcagtaggggttacaagcttcacgagagagggaacgggccccaggcctcctgaggagttagtgttgcggagtggagctcgatgtttgagtgagtccgcctccgttgttcttgctgtccg

SEQ ID NO: 108547 - DNA, 1366 bp, Zea Mays
caaacccacacgaattgccgccaccaccccacacgacatcctacaaccccagcctcattccaccgggcccgcacctcagaccacaggtggacgaggccacctgccggccagcttctccggccaccaccgtcgaccgtgtaaaacttgcactgacgaagcctaccttcttatccggcggcggggccatggggttctcgctgtaccccaccaagtcgtcgacgcgcacgccgtggagcaccagcttcttccgccacaagttcccggccgccgcggtgtccttctgatcaggctagctccggccgcccggcggtcgacctcgctccgcgcttcaagaagaggtggaggagcgtacatacagacaccgacaggtgtttctctttggcggcggattcgttggaggagcgccgccgttggtgggtggtgcggcggacgggcggcgcaagcggccgttccagctgacggcgcacgatgagctgcagctgcagctgcagctccagctggacgacgagctgtgcggcctggactacgagctccatgggccgcagcaggagcggacaacgaagcggcggctgacggcggagcaggtgcgggagctggagctgagcttcgaggaggagaagcggaagctggagcccaagcggaagctggagcccgagcggaagagcgagctggcgcggaggctcgggatcgcgccgcgccaggtggccgtgtggttccagaaccgccgcgcgcggtggaggagcaagcagctggagcaggacttcgaccgcctcagggccgcgcacgacgacctcatcgccggccgcgacgcgctcctcgccgataacgatcgtctccgctcacaggtgatcacgttaactgagaaactgcaaacgaaagagtcggcggcggcggcggcagagcctggagagcagacagttgccgcccaagcgacagcctacgctgtcttggaaggagacaagctctgctccggcagcgctgcagcgccggcggcggcagggaccaacgacagcccggagtcgtacttcgccggggcgcgctcgccaccgtcgtcgccagaggacgacgaccgcgccttcttcttccccccggacgccctgctcaacaactgggcatgggtatggaacgatcggcagtattaggggatgcacgcatatggctaggagtgcaaagttgactaaatttgctggttctaaatgtcatatatatcacccttgatcaaacgaacatggttcttataaagtttattaattacctgttggttctgtacttgattccttgttagatacggatgttccatgtcttcattatcatcgagaagatgttctatttcatccctaacctggtaagataccataaataaatg

SEQ ID NO: 108548 - DNA, 1380 bp, Zea Mays
ttaccggttacaaacccacacgaattgccgccaccaccccacacgacatcctacaaccccagcctcattccaccgggcccgcacctcagaccacaggtggacgaggccacctgccggccagcttctccggccaccaccgtcgaccgtgtaaaacttgcactgacgaagcctaccttcttatccggcggcggggccatggggttctcgctgtaccccaccaagtcgtcgacgcgcacgccgtggagcaccagcttcttccgccacaagttcccggccgccgcggtgtccttctgatcaggctagctccggccgcccggcggtcgacctcgctccgcgcttcaagaagaggtggaggagcgtacatacagacacgtacgtgagtgtgcgagtacaattggcagcttcttttttttttttttttttggtccgtgctagtgcttggcgcatggaccccgctagtagcctgatcagcagctccgcggtaccattccctgctgccggcgatggcggcggacagcgacaggtgtttctctttggcggcggattcgttggaggagcgccgccgttggtgggtggtgcggcggacgggcggcgcaagcggccgttccagctgacggcgcacgatgagctgcagctgcagctgcagctccagctggacgacgagctgtgcggcctggactacgagctccatgggccgcagcaggagcggacaacgaagcggcggctgacggcggagcaggtgcgggagctggagctgagcttcgaggaggagaagcggaagctggagcccaagcggaagctggagcccgagcggaagagcgagctggcgcggaggctcgggatcgcgccgcgccaggtggccgtgtggttccagaaccgccgcgcgcggtggaggagcaagcagctggagcaggacttcgaccgcctcagggccgcgcacgacgacctcatcgccggccgcgacgcgctcctcgccgataacgatcgtctccgctcacaggtgatcacgttaactgagaaactgcaaacgaaagagtcggcggcggcggcggcagagcctggagagcagacagttgccgcccaagcgacagcctacgctgtcttggaaggagacaagctctgctccggcagcgctgcagcgccggcggcggcagggaccaacgacagcccggagtcgtacttcgccggggcgcgctcgccaccgtcgtcgccagaggacgacgaccgcgccttcttcttccccccggacgccctgctcaacaactgggcatgggtatggaacgatcggcagtattaggggatgcacgcatatggctaggagtgcaaagttgactaaatttgctggttctaaatgtcatatatatcacccttgatcaaacg

SEQ ID NO: 108549 - DNA, 801 bp, Zea Mays
aatccagcaaggcgggcagacgagccgagagtgagacaaccatggcgtctctggccctccgccccgtcatcccggccaccaccgcttcatccaggaccctcacgatcgtcgttggctcccgctcctgccacgctgccacactccaccgtggctttcgctcgcggcgcctcatcacctgcaaggcggagccgagcggcggcaacagcaccctcgagctgggcgcaggggccgcagggctggcatcgagcgcggtcgtggcgtggtccctctacacgctgaacacgacggggtgcggcctgcctccaggccccggcggcgccctcggcgccgcggagggggtcagctacctcgtcgtggcgggtctagtcgggtggtcggtcaccaccaaggtgcgcactggctcgggcctcccggctggcccctacgggctcctcggcgccgctgagggcgttgcctacctcaccatcgcggccattgccgtcgtcttcggcctgcagttcttccagcaggggtccatcccgggtccgctgccatcggagcagtgttttggctgactgtgtattactcattcggttggatgtctgttgccgagtgtgccctgctatatacacataacttttattattaagtaaatttctagcattttagttagagatttaagtttctgtaattccttctccaagattggcaaaggctctcttttggatacaaagcagcctgactcgaggaatcgaaggatttcctgtttttgttttccaaataaatataaatataagagaaccgttaattatattaaaaata

SEQ ID NO: 108550 - DNA, 851 bp, Zea Mays
aaccaacatctgggcaaggaacagataaggactgcaaaccttgtcactttgtcagggcttcggggacagccaaagaagacggacggacccagtgaggcgagcacgggcgctcaccggcgatggcgacgagggcatgggtggccgcggcggtggccttgaaccctcaactgctgcctctccgctcctgctcgcccacgaagtcggtctccccagcgcagcgctcggcgtcgatggggctccggctgcgcagcggccggccgtgcctggggaagttcgtgtgccgccgcgccaagaacgcgggatacgaggactacaagttcccggaccccatcccggagttcgccgagcaggagacgagcaagttcagggagcacatggcgtggcggctggagcagaagaaagaggactacttcggggaccatgtcgaggagatcgttgacgtctgcaccgagatcatggggacattcctggagaacgattaccgtggaccagggacgctcctggttcacccgttcctggacatgaagggcgagatcaaggagagggggctccccggcgcacctcaggcggcacgggcggcgatagcatgggccgaaaagaacgtggacaaggactggaaggcctggactggggaatactagcactagaagaggtatcaataaagattttgccatttgaattggcatgagaagagagtaaaaactaaagaggatgtttctatgttttaccactgagcttgtatggtttagcactgtgttcctgctctattattctcagttagatcagaggttgcagcttgccagactggcatatacatctcttgctactacttgagcttgcacgtagtgtag

SEQ ID NO: 108551 - DNA, 799 bp, Zea Mays
atatcggatttaaaatgtgcacaaaacctctgaggaagaaaaaaaaaaggtccctcgttcagttgttcctcaacctacctacgccgctccgcgctcgaccgcctttgcctgccttcccattccccccgtctcctcttcccttccgccatggcccagcccgctttcctctcctctctccgctcccgcctcggctccgcgccgccgcccccgccgaaccatcgcctccagcccaggcgcggctaccacgtcgagcttggggctcgcgaaaaagcgcttttggaggaggatgttgctttgaagaggttcaaatcatacaaaaacagtgtgaaacaggtctccaagatcgggaatgctctcactttagctgttgtacttgcttgcagctacgagcttgctgtgttggcgactagcacaaaatgaaggaaaactcagtcatgtggcggcacggttattccgggaagtgatccatcagcatgaactggcactctctctcttcgtgtttttttagccccgtttgttgatcactcgtaccgtgtaaaataaaataaactaggttaaccttgattggcaaataatgtctctgtttttatggcctagttgcaaacaaagtgagagaagcattccgtggtgaatcgtgaagaatgaacgccgcctgctttgtttaccacctgggagtgtatcctgctgcacattgtaacagacgtgcatttattgaactaagtttaatactatcaccattcttgaatattattatcgtccgttagttcatttttaaactaaaacatgacaaaaaaaaata

SEQ ID NO: 108552 - DNA, 2661 bp, Zea Mays
cgcaaacccccgaaatttcaaaacccgacactcgaaagcgggcgtctccatttcccactcgccccctcctcgattcgatccagctggacgccgctccccgacgacgaggacgcccgtggagctctagaatcaagccatgcgacgggacgacgccggcggcgtaaccggcttccacgacttgtttgactcggtgcgccgctccatctccttccggcccgccgccgcagccccggaagcccccgcgggcccattcgtcgcgggggctggggggatcggtgtgcggatcagctcttgcctccggaagtcgcgggggatggggctgctcggtctcatcaccaaaaacccctcgccgccgcgccgcatgctaccgccgatgcccgatgagtcgggcggcggcagcggaggaggtgggggcgacgacgcaggcggagaggagaacccgccgatccggtggcggaagggggagctcatcggggccggtgcgttcgggcaagtctacctcgggatgaacctggactcgggcgagctcctcgctgtcaaacaggttttgatcggcaggagcaacgcgacacgggagaaggcccaagctcatattaaagagctcgaagaagaagtgaaactgctcaagaacctgtctcaccccaacatcgttaggtatcttgggactgttcgtgaggaagacacgctaaacattttgctggaatttgttcctggagggtctattcagtcacttttggggaagctcggttcattcccggagcctgtcattaagaaatacactaagcaaattttgcaaggattggagtatctgcatagcaatgcaataatacatagagatataaagggtgcaaacattcttgttgataataaagggtgcatcaaacttgctgattttggggcatctaagcaagttgcaaagttggctactgtgacagcagccaaaacaatgaaaggcacaccctattggatggcacctgaagtcattgttgggagtgggcatagcttttctgcagatatatggagtgtagggtgcacagtcattgaaatggccactggcaaaccaccatggagccagcagtatcaagaagttgctcttctatttcatgttggaactacaaaatcgcatccacctatacctgaacatctatcgccagaagccaaagattttctgctaaagtgcctgcagaaggaaccagagctgaggtctactgcaccagacttattaaagcatccttttgtcactggagaattggatgacctgcagccactcaatcatgctgcacgcaagaactcttttaatgagattccttcagatgatatgccaaatggcttgggtttgaataagtcttccaactggtccactatgaactccagtaaatcatccaaaatcaagcccttatgggagggtggctgtgatgatgatgacatgtgtgagtttgctgacaaggatgactatgcaggagttggatctagctataatcctatgtcagaaccatttgataactgggaaaacaagtttgacataagcccagagcaaaattctcatcaaccaatggaatttggtgaattggccaaacatgttgaaagcagcataactgggaatgattttacgttccctgttgggggaagttgtgaagatgatgatgtacttacagagtcaaaaataaaggcatttcttgaggagaaggctcttgacctgaaaaagctacaaacacctttgtatgaggagttctacaacactgtgcatggagggagttttcagggagctgatcaaacttccaagggaaaactcccaattagtccaaaatttccccctcgaggaaagtcgcctccatgcaagacacgtgtaggtgcatgtgatacttcgaatgacacagctcctgaaagctgcagcaagcaatttccaagaagcagtgtggtggatagcagccgaattttgagagaaattgcttctcctcaactgaatgagtttgcggataaaatccatcttgatgcccaagatagcccaagcatcagcttcaccgaaaggcagaggaagtggaaagaagagttggaccaggaacttgagagggagagagtgctgagattagctggctgtggtaaagcaccatccccaaacagaggttccaacgtgaaaaaggagtatcatgctgaccattgaacaaacagcagcgttcatcgtctctttatttcatcccacagaacacaactggatagtaactacacaatgccacagactggcagcaacatgagtacagcctgcagcgcctcaccattcgcggtattggccaagctatgactgcagatccatctcgtacaagtggcagatttacgttgaagtggactggtacataggggcactcgtcgcgaatatcaggatcattgtcgctgctaccccggaggacggcgtgctgacagtttcctgattttaaggccgcgtttgtcattctttttgatgcagtgctatacatgcgacttcggttatatttggtttctattgagaaaaaaatagtgttgtaaaaattttgtgtttgtaagcgagcttggcgtggggtttggttttgtatggagcttgtttgtgaaagcgtgtaataagatagctatgcaaattacaggtcattctgctggctgaatgaatctgagcttttcggaagctacaac

SEQ ID NO: 108553 - DNA, 1177 bp, Zea Mays
atgacctgtccggactccggactcggaacccgccttcttcttgccgccaaagaaaggaaggcaaaacggttcttctttcgcgtcggcaacagcgacacccacagccggccagcccaagtctataaatgtacgctcgtcctctcgtcgctcgctcatcacccaatgacccaatcaatcgctaacaacccaataaaccgcggacgcagcagaaaagaggtagaggggcggcgaccgatggcgcggcggggcacggaggcgttccctaacctgggcgcgcactgcgacaagccggactgcaaccagctcgacttcctgcccttcgactgcgacggctgcggcaaggtcttctgcgccgcgcaccggacctacggggaccacggctgcgccaaggcggcggaccagggccgcaccgtcgtcgtctgcccggactgcggcgacgccatcgagaggctggttccggggcagggcgagcgggagatcctggaggcgcacgtgcggtcgcggcgctgcgacccgggcaagaagcgcaagccccggtgccccgcgcggcggtgcagggagcagctcaccttctccaacacccaggactgcaagggctgcggccggaaggtgtgcctcaagcacaggttcccggccgaccacgactgcgccgccagcgcaccaggagctgccgcggcggcgaggagggccagcggggagtgcggccgcggcgcgcggaaggaagggagcggcggctgggcgctgccggcgtccatccggagcctcaagatcttctgaggcttgccaatttgccatactgtcacgttgcagccaggtcaccacagcgaaagaaactgttcctcgagatggatgcagcgaacgtatttcatatgttctttggttgatgtataaatgcattttcaggctaagaatctgaaatacagaaactggacattgaaatgttccatcaatactggtttttaaggcagatgtgaagacagacaaatttgcgttcaatatactacgggagttttttttttccacgccatcatcttggatgattgtcctacgttctgttgcgtatgttgttggatatactctgttttacttttttttcagtggtaattcatattgccacactatgggctagtttgagatgcaaaaaacccgaagtgtcttatttaaaattaaataaaaa

SEQ ID NO: 108554 - DNA, 1916 bp, Zea Mays
cccaagccccaaaagcagcggacacacaaccagaaaaacatgcccgaggctgtagcaaaagcacacatcgtccctccaccgccttccccaagctagctaatctaccagagactaccagcgtataccccccacccccccctcgcggcagttcgccgctccatgggtgcggcgcgtccgcggcgctggaagctcccgttccaccgcaccaccagcgcgccgtgctcgccctcgtccaggtcgtcggcgccgccaccgggccccgcctcgcccgcgcgctccgaggcttgggtggcccagccggtgcccgaggcgttcctgtgcccgatctccggcgcgctcatggccgaccccgtcatactgccgtcggggaacacctacgagcgggcctgcctccaggcctgcgctgagctcgcgttcctgcctccgggcgccgaggccgggggcctccgcaccgtcatccctaacgccgcgctcaaggcggccatcggcacctggtgcgcgcgctctggacgggcggggccgccgccgccgccgctctctgccgaggcggcgaggcaggccgtgctgcgcgctatgcctccggcggccgccaggaccactgccaggcgcgtggcggcggtgatggccgcgagcacatccaactcgtccacgtcgtcgtacgggtcggcctcggagatcaccgcggcggaggacgaggcggaggcggaggcgccggctgacccgctggaggacgacgtggtgggcaaggtgatgcgcgcggacgacggcagcggcggcgtggtggccgcggcgatgggcgcgctccgtgaggcgacgcgggagggcgcggagcggcggctggcgctgtgcacgccgcgcctcctcggcgcgctgcgccgcgtgctgctgctcccgcgccacgccgccgcccgggtggacgcggcggccgccctggtcaacctgtccctggagcccggcaacaaggtgcgcatcgtgcgcgcgggggcggtgccggcgctcgtcgaggtgctgcggtcggccgcgtcggcgcccgaggcgcgggagcacgcggcgggggcgctcttcgggcttgccatccacgaggacaaccgcgccgccattggcgtgctgggcgcggtgccgccgctcctggacctgctggcgtcccgcgcccacccgccccgcgcgcgccgcgacgccgggatggcgctctaccacctcaccctcgccgccgtcaaccagtccaaggtcgcgcgcttccccggcgcgcccaaggcgctgctcgccgtggcctcgggcgccgccgacccgggccccgtccggaggcttgcgctcatggtggcctgcaacgtggcagcctgcgccgagggccgcaacgcgctcatggacgcgggagccgtggcgtccgtctccgccatcctcctctccgacggcggcgcagcggcggcggcggcgggcctggaggagtggtgcgtgtcggcgatgtacgcgatgagccgtggcagcctccggttccgcggcctggcgcgcgcggccggcgcggaccgggcgctccggcgcgtggtggccgacgagggcggcggcgtccggcgcgagatggctcggaagaccctccgcgccatgcggggcgacctcgacaacgacgacggcggcaccgagtataacaacgacctgaccggcagcagcgccgagtgcgaggactgcggcgggagcatcgtgtcggacgggctcatgtcgttcaggcgccggcagcgcgagctcggcaacaccgccgagttctgagcccttctccggcgaccgatccacgtccattgtgatgaatgttttgtactatgtaaattgcttggtttaggtgttagacatttgtgccgtgtccgtgtgtgaggagctgatgaaaaaaacgtccatggtttttggaaggaacggtggcagatgca

SEQ ID NO: 108555 - DNA, 1363 bp, Zea Mays
cgccgcgagcgccgacgtggatgactctgtctccgcctccacgatggatcgggaaccgcggttcgatgagttaaccttcaacgataaatctgtgtcgtatcacctcacgtccacccgtgaggttctcttctccgagggcgtcgaccccttctccaaccaggcgtactccgcgctcgaggttttagatcaaatgcccagcccaggcttcgatggagagcctattttcgacgaggagcccaacgactccatcatcgagtgcgtcgacgtcttgtgccataatcatctcttcctccttggcgtggaggccgaaccccgacgctgaaccctaactttcagcttcgtcggggactactcgcaaccgctcgaccacttcttcaccgaagagctcgacacccaccgcgccgtcactgcctttcccgccgtgcactcagcgctcaagatgcagcagcaggagctattcctcaccgtggaaatcggctcagaccacgtcgacctgccgaccgttgcagccgaggggttcatcgtcgtcgaggtcgtcggcaacaacacggtgtcagtggcagaagcccaactcatgtgtgccctcgtcctcaagcgcaacctcctgtcgggccaccaccaggccaccagtgaggggtgggacatggtcgccgttgcgcaccaggcgtgcgtcctggagggaaagacggtaggcaccgtctgggtcgacgtggaggaggtgaagcacgtgtgcaaggtcggatgcagcgatggcgatatgtgccttttcacggacctcctcggcgacttgctctgtcgcattcaccgctcgccggactccctcatgttggtcgtggagacaacaatcggcaccaacagcacggagatcgtcggaatcgttcgcggttgcgccaagaccgccgtctctgttggcatcacccagcaggccaaagacgaccccatctacaccaaggttggttccatccttggcctccgcgtcttgcccagccactggaggaagggcatggggaagaagctagcggatcgggaggaggacgaggttgtccaagcctcatacacgtacaacatctacaacaactgggatccattagaggatgcactcagactgtttgatagaatgtgcatggagcaggactcacccaagacaagtgctgtgaaccttgggagctttaatgtgatggttgatgcatactgtcatgctgaaagaggtcaatatgcgattaagcttctagtggtttatgtcaccgtagtccgtgaagttctcctaaggccatcagacaccaagcagccaagcactttcctctcccgatatcccaaccgctcttcttctggttctctcgatccccttcctagggactgctaa

SEQ ID NO: 108556 - DNA, 611 bp, Zea Mays
ggttccatccgtcttgtatgggaatgacccattgagcaagccaaaaagatagatcattacatgtgctcggattgtgctgaaaaaaatggtgcaaagagaccctcaaattcatacccagtttcaccaaactctgattctaagatcgaatcaaagaggcgcaagagataaattctggcaaaggagatcgatatggcgtctgctcctcattactgatgcatattgagatgtacactgcgagagaagagccaagccaattgtaggacaaaacttgcttaacttatcattcttctgtgtattctggggacgtttcctgcagcttagacatttagtgtgatgagtaggtcagtcagtcccctcccccgctgcagcgcgcgcatgatcagctgctggtggcgggataagtcgggaaatgctagagcgctgatgattctgtcgatgtaactttatcgggttgtgtgtgtgtgttttaacatatgcactggctggaaacattcccatgtgtgaatgggcgatgctgatgatagcttgactgctgtttcataattcagttagatgttgccaagcaaagacttgagataatattgagttcgatcttgaaacttgaaacgtgc

SEQ ID NO: 108557 - DNA, 106 bp, Zea Mays
gaaatgctagagcgctgatgattctgtcgatgtaactttatcgggttgtgtgtgtgtgtttgatgatagcttgactgctgtttcataattcagttagatgttgcca

SEQ ID NO: 108558 - DNA, 243 bp, Zea Mays
atggcggcgctggacgccggcctccctgccgaggccgtgcgccatttcaccaagatcctggaggcgcggcgcggcgtgctgccgcacccgttcgccgccgcgttccaggccggtagccgtccggccgacgccatcgcggactgcaaccgctcgctggctctggaccctgcctacatccaggcgctccgtgcccgcgccgacctcctccagtccgtggggcgcggtcgccgactgcctccgtga

SEQ ID NO: 108559 - DNA, 2980 bp, Zea Mays
caacgcaaacccacaagaaagtttcaaaaaaacattcgcactccctccctctaccgccactagccaccctcccctaccccaatcccctctccccagatcgagcgccgcgtggctagggtttgcgcgaccgccggcagcgatgcccgcgtcctccgtctcggggggtagcggccccggaggcgtctccccggatgccatcatcgagtggctgcaggacgagatggggtacccctcggcccctcctgcaccggatcagctccgcaagatctgccggggcaacatgatccccgtctggtccttcctgctccgccgcgtccgctccgagcgaaccgtcgccaccgcgcgccgcaatatcctcgtccacggcgtcgcggcccggcgggcgcgggagggcggagcgatgggggcgggcgcgggtgacgctgcggccagggaggccgaggcgagggagcgggacctcgccgctgaggaggccgagcggttgcgtgggatcgtgaggaggcagcgcaaggagcttcgcgcgcgcatcgcggaggtcgccagggaggaggcggagcgcaagcgcgtcctcggtgagcgctccaatgccaggcacaagcaagttatgctccaagcatatgaacagcaatgcgatgaagcgcacaaaatatttgctgaataccagcgccggctacatcagttcgttaaccaagcaagggacgtgcgaagatcaagtataggcgtggctggagctacaggtgctcttgtggatatgcaattgcagagtgatagagatgatctttacccatcgactatcaaaagcaatagattgccagaggatcttttagaaactgcaggtgaaaggagcattcggaaggcatgtgaaactcttgctgcggatatgattgaaacaattcgaagttcattcccggcatttgaagggtgtggcattaattcaagttgccaattagatgcagaaaagctgggtattgacttggttggtgaaataccaacatatgttaaacttgttgcattggattccctaaagaatccattcatgcttctgcagtcaatcattacctacacatcacgcatgaaaacacttatacatagagaaactgacaagattgacatacgcgctgatgcagaactactgaggtataaatatgaaaatgagcaggttattgatgctgcttcaactgatgcaagctcacccttaccatatcaggtgtatggaaatgggaagactggatcacaattgtcaactcgaggaacatatgatcagctactagaaagacagaaagagcatgtacaacagtttttggcaacagaagatgctttgaacaaagctgcagaagctaaagcactaagtcagaagctattgcaacgcttgtatggcactgctgacatggcaggaaataagaagctgcccactgggaacaccacacagaatgtgaccaacagtaggcatttagagttggacgtttgggccaaggaaagagaagttgcaggactaaaggcgagcttgagtacacttacatctgaggtacaacgtttgtataagttatgcgctgagtggaaggaagcagaagattcactgaagaagaagtggaagaaaatcgaagaatttgacgcccgtcgatcagagctggagttcatttacagtgctcttcagcgggccaatatggattcatcagcattttgggagcaacagccattatcagctagaggatatgcatcaactacaattatccctgcgtgccatgctgtggtagacatgtctacgaactcaagggacctcatagagcgagagttagctgcatttagccagagcttggataatagcttgtgcaggttgccagcaacccctcaggcccttttggaggctgtgggttctaacggcgtgacaggatcagaagcacttgcagctgctgagaaacatgcagctttgttgactgcaagagctggtgccagagatccatctgctgtgccgtctatatgccgcatctctgctgctcttcagtataactttgtttcaccaggtacagaaggcacagattctggcttggcttcagtattaaattcactggagttctgcctaaaaccatgtgggtctgaagctagcatattagaggatttatcaaaatctatcaacttggtgcacacacggagaaatcttgttgagaatgaccgtgttttgctgaaccgtgcacatcgtgctcaacaagaatatgaaagagtggccaactattgtcttaaattagctggcgaacaagaaaaggtggtgagtgaaagatggcttccggaactgagaaatgcagttcaagaagctcgaaggtgttttgatgactgccagcgtgttaggggtctggttgatgagtggtacgagcagccagccgccacaattgtggattgggtaacgatagatggacagagcgttggtgcctggatcaacctcgtgaagcaactccacatggagatctccagacggacgttggccatgtcatcggtaggagacgactgaagcaaccagccgtgacctgcggctttggaagttcggaggctcctttatgggttcggtttggcgccaagatatcttctatctactcgatagccttttcccattgtagtttatacgtctctctctctggtttggtctgtaattagttcctaacatgttccttttgtatgttgtcaattgtcatgtgctggttgtcacttggctcaaacgatcagtgttggtgttgtgcctttgctgatttgggttgtttgtatgttgtcaatggtcatgtgcgtgttgtcatttggctcaaacgatcagggttggtgttgtggctttgatgatttgcgcacatgtgtgttcaatcagtccgggaattgtttcagttataacgttcatgtaacttagggtatgtttggcaccaaaatatgtttggcccattttgttatggcttgcttgttaaccttgatggttatcatcttgtcatttttttctttgagg

SEQ ID NO: 108560 - DNA, 3531 bp, Zea Mays
caacgcaaacccacaagaaagtttcaaaaaaacattcgcactccctccctctaccgccactagccaccctcccctaccccaatcccctctccccagatcgagcgccgcgtggctagggtttgcgcgaccgccggcagcgatgcccgcgtcctccgtctcggggggtagcggccccggaggcgtctccccggatgccatcatcgagtggctgcaggacgagatggggtacccctcggcccctcctgcaccggatcagctccgcaagatctgccggggcaacatgatccccgtctggtccttcctgctccgccgcgtccgctccgagcgaaccgtcgccaccgcgcgccgcaatatcctcgtccacggcgtcgcggcccggcgggcgcgggagggcggagcgatgggggcgggcgcgggtgacgctgcggccagggaggccgaggcgagggagcgggacctcgccgctgaggaggccgagcggttgcgtgggatcgtgaggaggcagcgcaaggagcttcgcgcgcgcatcgcggaggtcgccagggaggaggcggagcgcaagcgcgtcctcggtgagcgctccaatgccaggcacaagcaagttatgctccaagcatatgaacagcaatgcgatgaagcgcacaaaatatttgctgaataccagcgccggctacatcagttcgttaaccaagcaagggacgtgcgaagatcaagtataggcgtggctggagctacaggtgctcttgtggatatgcaattgcagagtgatagagatgatctttacccatcgactatcaaaagcaatagattgccagaggatcttttagaaactgcaggtgaaaggagcattcggaaggcatgtgaaactcttgctgcggatatgattgaaacaattcgaagttcattcccggcatttgaagggtgtggcattaattcaagttgccaattagatgcagaaaagctgggtattgacttggttggtgaaataccaacatatgttaaacttgttgcattggattccctaaagaatccattcatgcttctgcagtcaatcattacctacacatcacgcatgaaaacacttatacatagagaaactgacaagattgacatacgcgctgatgcagaactactgaggtataaatatgaaaatgagcaggttattgatgctgcttcaactgatgcaagctcacccttaccatatcaggtgtatggaaatgggaagactggatcacaattgtcaactcgaggaacatatgatcagctactagaaagacagaaagagcatgtacaacagtttttggcaacagaagatgctttgaacaaagctgcagaagctaaagcactaagtcagaagctattgcaacgcttgtatggcactgctgacatggcaggaaataagaagctgcccactgggaacaccacacagaatgtgaccaacagtaggcatttagagttggacgtttgggccaaggaaagagaagttgcaggactaaaggcgagcttgagtacacttacatctgaggtacaacgtttgtataagttatgcgctgagtggaaggaagcagaagattcactgaagaagaagtggaagaaaatcgaagaatttgacgcccgtcgatcagagctggagttcatttacagtgctcttcagcgggccaatatggattcatcagcattttgggagcaacagccattatcagctagaggatatgcatcaactacaattatccctgcgtgccatgctgtggtagacatgtctacgaactcaagggacctcatagagcgagagttagctgcatttagccagagcttggataatagcttgtgcaggttgccagcaacccctcaggttagtagtgttatatgcttaaatcgattacttccaaataatatctgtctgctatgttcccataccagtactcgtctatatctgctttacctgaatgaactggataagcatgagccactaaaaatatgctaggcagttttctccatatattgcctttgtcatgttgacattgatgaaacatgtccaatattatcattttcaagattccagttcttagtctccctttagctgagcttttgaacctgttttttcttttgcaaaagccaaccaaaggggtgaaaagtaatagctgctttggagtttggaccaaaatttgttcttactctagtacaaaactgaaagtagctccgcgcctccgcctgcttttacctgctgtgaagacgggcaactttaaaaaaatatccacctgccactggttatgaagatattggcttgttttttcttctttcccgtctccgacttttttttttcatctgtgagactgtgacacctttctcgttccatgtggtatctctggctggtgctgacgctccgatgactcctctctctttggccttctcgaggcaaggccatccctcgagaatgcacggctgtagcccctgcctcggtgccgggcattgccatggacaccgcgcggagcctttgctgccacataggcccttttggaggctgtgggttctaacggcgtgacaggatcagaagcacttgcagctgctgagaaacatgcagctttgttgactgcaagagctggtgccagagatccatctgctgtgccgtctatatgccgcatctctgctgctcttcagtataactttgtttcaccaggtacagaaggcacagattctggcttggcttcagtattaaattcactggagttctgcctaaaaccatgtgggtctgaagctagcatattagaggatttatcaaaatctatcaacttggtgcacacacggagaaatcttgttgagaatgaccgtgttttgctgaaccgtgcacatcgtgctcaacaagaatatgaaagagtggccaactattgtcttaaattagctggcgaacaagaaaaggtggtgagtgaaagatggcttccggaactgagaaatgcagttcaagaagctcgaaggtgttttgatgactgccagcgtgttaggggtctggttgatgagtggtacgagcagccagccgccacaattgtggattgggtaacgatagatggacagagcgttggtgcctggatcaacctcgtgaagcaactccacatggagatctccagacggacgttggccatgtcatcggtaggagacgactgaagcaaccagccgtgacctgcggctttggaagttcggaggctcctttatgggttcggtttggcgccaagatatcttctatctactcgatagccttttcccattgtagtttatacgtctctctctctggtttggtctgtaattagttcctaacatgttccttttgtatgttgtcaattgtcatgtgctggttgtcacttggctcaaacgatcagtgttggtgttgtgcctttgctgatttgggttgtttgtatgttgtcaatggtcatgtgcgtgttgtcatttggctcaaacgatcagggttggtgttgtggctttgatgatttgcgcacatgtgtgttcaatcagtccgggaattgtttcagttataacgtt

SEQ ID NO: 108561 - DNA, 2309 bp, Zea Mays
cgctcttccatatcggcacgctcccaggtcccagcactgctgacaacctcctcctccctctcagctccacgcccctagacccagcaccaccggcgagcatcccctccacgcctctcacgccggcctctaagctctccactttgactcttcccagtccggcccaacccctcccgatgccgacggactccgcgccgccgaacgcagcgtcgctgtccgaagacgaccgactgctcgtcgcccactgcgccacgctctccttcccctccagctcccccacagccgccgccgccactacccattccgcctcctccttccaggtacaccatgcgtcccacccctacccctgcgccgccttcgtcttcccgccctcctggtccgctgccgactggatgggaggcgatggcggccatccgccgttcggggacgccgaggtggacccggccctgttcccgtcactccgcgctgtcgggagcggcatccccgcgcgcaccaacgccgccttcctcgggaacttccgtcggctgctcgacggatcgacgctccagtccgaggtatcaagagctgttgcggaggagaaacgtgtagtattcacaggccattcatcaggaggttcaatagccacacttgctgctatatggtttcttgagaagtgcaccagacgaggaagtgttaatcaagcacatccattttgtgtgacctttggggctccccttattggagacaatatcttcaatcatgctgttaaaagagagggctggtcacagtgtattttgcatttccttcttccactagacattgtcccacgcataccactgactccacttgcatccttcagagaagaaactcaagctgttctggatcggttatcttctcagacgccaaacaactctcctgctgggaggtcccttgttatacctgaatattatgaaactttattgagaagcacactatctattgccagttatgaggcctgttctttcatgggatgtaccagctccatcctggggacattgacttctttcattgacctctccccttacagaccttgtgggacttatcatttcttgacaagcagtgagcaattgattgttctcgcaaattcagatgctgtactgcagttgttattctactgccttcagttggatccccagcaacaactgcttgatgctgctgctagaagcttaagtgctcactggcagtacgaaccaattaaatactgcatacaggatatagtttgtgtggattacctgggaacaatctcatcagctgttcctggtaggcaggcaggcagagtggcccttggaagcattgaactgagcagggaagctatactgcacctttctgcagctgctcaatgggagaagcaaagacagagaaaccaaacaaaaatagatgaaagctgccaaaagattcaggaagctctcaggtccctaaacgagtacaaaagatcaagggaactcgatggcgtgagctactacgattccttcaagctccaacgtgaggtgcatgacttcaatgcaaacgtgaaaaggctagagctagctggcctctgggacgagatagtggagatgctgcggaggcgtgagctgccggacggcttcgaggctcgtgaggagtgggtgagcctggggaccttgttccgtcgcctggtcgagccgctggacatcgccaactactaccggcactccaagaacgaggacaccggctcctacctctccaaggggcggccgaggcggtacaagtacacgcagaagtggcacgagcagctgcagcgcgttcccgtcgggtccagcctcgagtcctgcttctgggcggtggtcgaggagctccaggccgagatggccgacggtagggcgttcgaggatctgagagaacggttggttaaacttgagaacgatgcgcatggctggtataattctggaagtttgggcaaggacgtgtttctggggagctcgtctttcgtggcgtggtggaggacgctcccagagcagcatagggcggcgtcgagcattgcgaaacttgtatctctataaagggattttggctgaggaactagcgtttctagatctttgtaattatgctgctctatatgtacttcccaagttcaataagaagactagcatagttcttagggttcgtttggatgtagatattgaagatgttagaattaaattatatcaatatcaaatatgtctagtattggaaatgagtttcaatgtaaatctgttatttggatgtatctggaattacaattccatccaatacctagagtcttgactctgaattgtgagagacaccttttagttaaa

SEQ ID NO: 108562 - DNA, 1542 bp, Zea Mays
atgacaagacacaacatatcgaagtcgctcgccgtcgtcctccgcgcccgcatgcagcccaatcccatctcctccccgcctccgccgacccctccgccgccgcccacggaccccgaccccgccgccccgcttgtggcttccgtcagccactggctccacgtatctgcctccgccgcctccccgccccccgcggcgctcgacagcttctccgatgggtaccgctccctcgaccttgtcgggcgccgcgaggtcctccgttccctcgccgtcgactacgatgtgccccgcgcgcgtgtccgggatctcatgaaacagtacatgagcgtcacctccgccgaaccatcaggcgtggatgacgtggaggcggaggaggggaaggagggcgccgcgtcggccctgtaccggatggagagggggctccgggatgcactccggccccggtacgccggattccttgaggccatgaacgcgcagccaggtgggctcaagctcctcgccgtgctccgtgccgatctcctcgccttgctgggagaggagaacgtttcagcgctgcgggctctggactcgtacttgaaggagaaactggtgacttggcttagtcctgctgcattgacgctccaccagataacctgggatgatcctgcctcgttgctagagaagattgtggcatatgaagccgtacatccaatcaggaatctgatagacttgaagagaagattgggcattggtcgccgatgctttgggtacttccatccagcaataccaggggaaccactgattttcattgaagttgctttactcaaagatatggaagcatctatacaggaggtcttgtgggatgaccccccaactcctgaatctgaagctagttgtgcactattttactcaatatcgtcaacccagccgggtttatcaggtattaatctagggaagtttcttctcaagcgtgtgattgacatgttgagaagagatatgccatcagtacagaattttgcaacacttagcccaatccctggtttgatgcaatggcttcttgctaagctggcctcccaaataaaattatcagaggcagaatcacgggaggggaattcactaggagcctgttctactttcaaagaatccatccttcttcctgatgaagagagaatgattcatgatgccatcgaacaagctgatggaaaacaagggattgaactattgcaagatatactgaaatcaagacagtgggtaaagtctgacaaattatctgctgcattaaaatcacctcttatgcgtttatgtgcaaggtatcttgccagagagaagaagcgaggaaaagctctagacgctgttgcaaattttcacttgcaaaatggagcaatgattgagagaattaattggatggctgaccaatcagagaagggcattcaacaaagtggaggtatcatggtcaattatctttacagattagagaacatagaagagtatgcattgtcatattcgagtacagggctcatccattcttcacctagcctgtctgagtatcttgaggttagtaatatt

SEQ ID NO: 108563 - DNA, 923 bp, Zea Mays
agcaaatacacacctcaagttgggatggaatttaagaccaggggagatgcagagcacttcttattcttctatggttttttggctggttttaaaccagcaatcacccacaccttcaggacttccaacaaaaaaagaagcaatgaagtaacaaaggtggagctgaaatgtaacaaacatggcaaaacaaaaaagacaaaaaagcgctgcgagaaaggcccaaaaaggaatacaaatgtccaagttaaaacagattgcagagtattcatggttataaaggaacatggacaaaaatgggtgatcgataagttagacttggaacacaatcctgagctcagaccagcagacaacaacaacatgtttagtgggcataagtacatgacagatatggaaaaaggaattataagaacattgaaccacagcaacatacctacacggaagatgatagctatattgtcttatctgagaggaggtatgatagcattgccgtacaaaaaaaagatgttagcaactacagaactaaaataaacaaggaagtaacagggaatgatatgacacaagcactgcagttttttcaggaaaaacagaaggaagatccaaatttcttctacagaattgtcattgatgaagataaaaaggtgaagcacatgttttgggcagatgggacatctttgaaatactacgagatgtatggagattgcatcagtttcgacaccacatacatgactaacaagtacaacatgccatttgctccatttgtgggtgttacagggcatgcacatacatgcttgttcgcatgtgcattcatttctgatgaaacaatagaaacattcaagtggatattcaagacattccttgaggccatgggaggcaaacatccccgcacaataataacagatcaagatatggcaatgagacctgcgatc

SEQ ID NO: 108564 - DNA, 704 bp, Zea Mays
ccacagcgcgcgcttgactcgatcactgcactcccccccgcgccaaggagatggacgagcgccccgacgcctgcgccgtggcttcctctacctcctccgcctcagtgtcgagcgccgaggaggacgcgtcgatccaggaccagctcggcgggcacggagcgttcgcgccaccagccgtcgacgccgcccagccagtaccaccgcggcggcggttctgggcgtgggccaccctcaccgcgcgcgccgccgcgcccaggctgcacgaggcgtgcggaaccgcggcgcggggactcgtggcgtggacaaggcggggcggcgcgcctcgttgcctcctcgtcgtgtcggttggatccgtggcgctcgtggcgctaagcggcctcctgatcctcgtcttcttcgtggtggcggcggcgacgaacgccatcgccttttccgtcgtcgtgtccttggccggcgccggggggttcctggccgtgctgctggctttcctggccgcgatgtacgtcggcgcagtgtccgtcgccgtgtttgttatcttggccaccacgatcgcgacagtcgttgccatcacgatcgccaccggttgggttgcattcttctggtttgtttggtttaccgccagagaatgcctgagcctgacgactaagcgaagaaccggcaccacaagtccatgatctgagccagtttctgggtcgtagcagcta

SEQ ID NO: 108565 - DNA, 132 bp, Zea Mays
atgtcaaacatagtctcagtgcataataataaaacatcatctcctgaatggcatgacctaaaagcaaacgccatcttgatgtttcagttcttctggcgaccacttgttgatgaaaatcccttgtgtatcacc

SEQ ID NO: 108566 - DNA, 1430 bp, Zea Mays
gtcttagggactccacgttcagactcgcaccacgcaacggcaaagcatagcaacggcggcggcgcagcaagcagttcagctcagcacctcgccggctcacccatcccctgccggccgactctacctggtccccagcacagcaagcagttcaccggagccggcgcagcaagtagtcaggcaagtctccatcccctggtccgcgactccccacgataccaccttggtcctcggcgctcggcggatctcaactacaggttgattaacaaggtcatggatgatgggattgagatcactcaagctcctaagctctcacaaccaccagtgagcgccatggatgtggatgtgcaagctctatgtgtggagggtggcgatgctggtaggaatgaccaaactacaggagaacatgaacctgctattgatgcctctgttgataaagatgatgctagcccgcttgttggaaagaaaaagaaatccatgagtgtagaccatcgtgtagtcaaacaacgaaccattactcctacaagcaagtataggacatcgaaagatattgttttagtgcaaacacttgcaaaagttgtgcaaggtgcaggcgcaagtgcaagtgcaagcacaagcgcggctgcaacaagcataggtgcaagtgcccaatgccaaggaagtgttggagacaatgaatgcaacaaatattagcaagtgtttgaaaaaattctatgatgtcacattgctttttttctagcacttcatatcctactgcaaatcatttctttcggaggttttctgagattaagatggctattgcaagatggtgtgatagtagtgatctggtaatttgcacaatggcattttctatgagacacaagtttgataaatattgggaaatgaacaatttagctttgacagtgggagcatttcttgatcctagatacaaacataggatgattaggctatatatgtctaagatgtatgacagtgataaagccgagttagagaaattggtattcatgaatgttaacaatgaattatttgcatattattcagcagtcatcaatgcaaaaatcaaccagaaaaggttctagttcaagagagagtgagtttgttccacataaacatacttgtttggtggatgaggaggatgaggttgatcttgatgagttgtatgcaacaacaagcaatgacaagaaggtgtcagagttagaattgtacatgagcaaggacctagtgaaggtcaatgacaatgaagcaacgtttgatatcctatcatggtggaaaggacaagtgacaaatttgcctattctttctacccttgttcgtgatgtgttgtctatgcaagtgtctattgttgcttcagagtctgcatttagttccggtggactcattgttgatgcattccgttcaaggctcaaaccagaaattatcgaggcattggtttg

SEQ ID NO: 108567 - DNA, 869 bp, Zea Mays
actgttacgagtcagcgcgggttgcgagttgcagaccgcaggagctcgcgctctgcaaaccttcatggcctccgaggcggtcgtcgttcacaccggcggttgccactgccggcgcttgcggtggcaggtcgaggcccccgcgagcgtagtggcgtggatctgcaactgctccgactgttccatgcgcgcgaacacccacttcatcgtccccgccgccaagttcaagctgcaggccggcgctgacgagttcatcaccacctacaccttcggcacgcacacggccaagcacaccttttgcaagacctgcggcatcacctccttctacaccccgaggtccaacccggacggcgtggccatcaccgtggcctgcgtcgaccccggtaccctgaagcacgtcgagtaccggaagttcgatgggaggaactgggaggattttttcaggaccagcgacatcgctggattctccaaggacgatgcagaggcggcggagtagcgggcagatgttctctgttgatctggtgttgtttcgtcatcagtacatcatctcagttctgaaggttgaatcaaattatgtccttttccttgaactaggtcattcttcatttttgcaatgcatctctttaccccgtgttaatgatgacatgacatcattttattaagctgttaatccctcctatcttcataattgcacttctgggtctctgatgccattgcatttccttgttaaggacataaaaaatggcacaaaaccgtagatagcacaatcaagcaacaacaatggcatctgctcaatatggcgtggctattacagtgaatatcaaactgtgtatatgaacactgctacaactgattgcctgatgcgttaaatc

SEQ ID NO: 108568 - DNA, 721 bp, Zea Mays
aagtttttttttagaagttactgttacgagtcagcgcgggttgcgagttgcagaccgcaggagctcgcgctctgcaaaccttcatggcctccgaggcggtcgtcgttcacaccggcggttgccactgccggcgcttgcggtggcaggtcgaggcccccgcgagcgtagtggcgtggatctgcaactgctccgactgttccatgcgcgcgaacacccacttcatcgtccccgccgccaagttcaagctgcaggccggcgctgacgagttcatcaccacctacaccttcggcacgcacacggccaagcacaccttttgcaagacctgcggcatcacctccttctacaccccgaggtccaacccggacggcgtggccatcaccgtggcctgcgtcgaccccggtaccctgaagcacgtcgagtaccggaagttcgatgggaggaactgggaggattttttcaggaccagcgacatcgctggattctccaaggacgatgcagaggcggcggagtagcgggcaggtcagttcgtgttcttaccctcatgattcatgaggatcagttggaaacttggaattgcaaactgtgattttgtacacgaattgcaaacttgattagtcgaaattcgtgttccattcgtgtttgtgaattgcaaacttgattagtcgaaattgtagaaagaataaacaagcaattgttagttggaattgggtgtgacaactgt

SEQ ID NO: 108569 - DNA, 871 bp, Zea Mays
gcttgatttgccatcattctgttgcttcggtgatgcttgcaatgcaatgagaatgtgttggaacgatagatgttcttgatcgtgttttgctttgttcctagtaggccagcaaggtagcatcagccttgccctaagttgaaggttgtttccatctatttatatgttgcagtcatcgatcaatccaattagctaacttgttgtttctttttcataaacgagtgttttgtgtgccattgaatacaggtaaaaattatcttctgcctctgctaccgtctcctcttcagatccctttgcttccaatgcctcctggtttcatgacacggatcactccacttccagtctgacaccatcctgcagcagggctccttttttcaggctaccaagaaatatacataggtatgatcttctgcgtgttcctgacggagtcgatgcggctgcggagctcgcggagggagcaccacaccatgaggcccgtgcgcgaggcggagcgtcgctgggtggaggaggcgctgttggcgagcgccgatgaggaccaggcggtggagaggtgggaacacgacatgactactggcccccggtaacggggaaaacggaggcaacaaggagcgggcggaacgggatgccaccacaagcagctccttgccgccacctcctacttcgacatgctcaatgacgcctctcgcaaccacgcgtaccgcctcaccatcgatgccacggtcacggaccccacatcccgtgtcctcgacatcgggtgagctgtgtcccatgcaaagtttgctgaaaattaccgtatgtactcctgtagtcactttgttaaaggactggaattcttgatatttatatcgccaatatattattagtgttacggtga

SEQ ID NO: 108570 - DNA, 437 bp, Zea Mays
aggttgtgatattgggtgacaagaccactgcgcactgaagcgttcttcaaaagatatacttagctcttgatgcttactctcctacattgcggtagcatcctggtctgctagacgctttcttaaagacattgttctgatctaaggtgagggatcaaattttttttgaagtaatcatcaagtgctgttgcgagtgcagcccctgcaaggccaatgttgagcagtactgcaacaagatgatatggtcctacaacgacatctactcaggctggcttcgcttccaccatggtcatctaccacaagtgactttttggaactgaaaactaatcaccagtttcaacactatcttggagcgttctagggataatttctattgtttcttaaagggttggtctgaacaaagctacatatacttgaacttcagttatatttgaactttt

SEQ ID NO: 108571 - DNA, 252 bp, Zea Mays
atggatgaaggcacggatgatgaaggcacggacgtggcggtggaggcaagcctattccctcacccttgcctagatggtgaaggcacggatgatgacgacggacgtggcgaagaggtgagcccagggcaaatagaacttctaaacagaggttggagaagtaacgatgggcgcaaaaccggtgagtatctgcatcttcctgctaattctgctgacacagaatcctccaagaaccggcaccgcaggaggcattag

SEQ ID NO: 108572 - DNA, 1404 bp, Zea Mays
atgcgagaaatgatgatgaagatgatggtggagatgacgtgggagatgatgctggagacgatgctggtggatatcgacttggatcaacgactcgttcacaagcacatgacactacaggcaggtgaacatggtccttgtggcgagtctgtccccgccatcacttgggagcattatcgctatggtgtatgtagaacgtttggcaacacacagacactagtttgggatgcattttggaaacgatacaagttgccggaagatgggtcaaatgatctgaacactcattacgtgtttgagtataacgtgaacgatgtcgttgcagatgcaatgtactatgcacgacttcaggctataaaggcatggtacaaagcaagtgatgatgatcggccgatgccgaaagaccaaggcggagtggtgtatgtgccttggatggccacccgatcagagggttaccaagccttgtgtaggtggtgggcttcccttgagtttcgtgccatatccgaaaggaacaggggaaaccgtggtactgaatcgttccacaactacgacagcgatggacatgtgcgcttggctaagcgaatggaagtcaaatccggtcgtacgcccacggatgtggaggtgtatatgcaagggcatgggggttctgatcctcagaatcctgatgttttatgcactcagatagccaccgattgtctaggagctgagacatcgtggacgatagtccacatcctcgacttcgcagtcgtcctgttctcgatcatccgcctaagagatagagattgcagtgttgtgtcagcaggcagattatcatcaatcagttttgaggcaacaaatcgagtattagagcaattggcacaacaagcgagcgtcccgatgccaacatatgggatgccgcctacggactttgcaatgccgccaccaatgttgtcgcctccacctccgccacaattccctatgggctttgagacacatcccgcttcagttgccgcacctggagatgtgtctggtcaagacgacacatcgacttcttgggtgaacaacattttcaacacccagagtccagccggaggaagtggctataactccaaccaaacaggaggtgggcaaccaaggtttgggtcattcgtggtgctgcaatgccctaacaccttgctcacggacaccgacgacagtggtggcggcggtggtccagtggggcggttatcggctccgaggaggcgccgcgccggtgctgctgtggagtccgcatgcactgatgctgccacgagcaggagcgcaagcaacaccgccgctgctccagccagacctcttgcgctccctcctccctgcatcttgatcgatcaggagttgcgtagctccacgggcccagctagagaggtctcgagatgcttgttggatgctaattag

SEQ ID NO: 108573 - DNA, 879 bp, Zea Mays
atggcagtcctccgacagaatcctagtggactcagtgacgcagacaagacatcactggcagcttctaggtttgcagcaattgagaagaagcctttccactttttacactgttgggccattcttaaggaccaaccaaaatggatggacaaccacatgggtcaacaacaacagcaagccaacgctaatcccacacattctaacactgtcgatttggatgcagaagaatctgtaccatcaagcttcacatccaagaggccccttggtcgagattcttcgaaggaaaaggcaaagaggactaaatctgtggacacatcttcatcagattctgagtttatgacacgcatgggtgatctttctttggagcgcctgtcagtgtacaaaacagctgttacaactgaggaaaagaagttggattcaatgaacagaaatgagaggcagaaattgctccttgaaaagaagttgaacctagagaaattaaggcttgaaaggcagaaactaaaggaggacaaggaagaggagataatgatcttaagcatggatttgagcaaatgtaaccctctcctccgccagtactatgaagccaagcaacaagagatactggcaagggttactgggtctacttcatctggccagtgaaggttccttacttaatatgtttgtttgtcatttatgaatgaggcgtactcggacttgttactgtgaggttgctgtcgtcagatcgtaatctggtttgtaccagattttttaggtcgtctttgaactatttgttttcaagttattgttttgaactatttgtcatggtttgtacctgaatgttttactatatgtgttgaactatttggtttcatgaactgtgagcttggtgcagtttttgtttag

SEQ ID NO: 108574 - DNA, 1600 bp, Zea Mays
gcgtgaaaagccacgatggagagtggccgaacctttcggacagccgcgcgtgtcgttagttgatttcgagctgcctctgcctctgcttctgcttgcttgctggtgggaaggacggggatgcttaacggatccatctctggcttacttcggggcagcagccgtcccggcgatggactggtccttcgcgagcaagccctgcgccgccccggcgctgatgtcgttccggtcggcggcgagggaggagccttcgttcccgcagttctccgccttggacggcaccaagaacacagcccctcgtatgctcacgcaccagagatcgttcggccccgacagcacgcagtacgccgcgctgcaccgcgcgcagaacggggctagagtcgttccggtctcgtcgccgttcagccagagcaacccgatgttcagggtccagagctcgcccagccttccgaacagtaccgcgttcaagcagccgcctttcgccatcagcaacgccgtggccagttcgactgtgggttcctatggcggaacaagggatgcggtgaggccaaggacggcacaactgacgatcttctacgccggttccgtcaatgtgttcaacaacgtctcagctgagaaggctcaggagctcatgttcctagccagcagaggaagctcagcccccgtggcctgtaagccagaggctcctcctactctcgctccagcgaaggtcacagcgcctgaggttcttctgcctgcgaagcagatgctgtttcaaaaaccacagcatctctcgccgcctccatccagtgtccctggcatcttgcagtctgcagctctccccaggagcgcctcatctagctctaaccttgactccccagctccaaaatcttcggtcccgttagctgttcctcctgtaagccaggctccgccagcaacactgatcgccactacaactgcagcagcaataatgcctagagctgtccctcaagctaggaaggcgtcccttgctcgattcttggagaaaaggaaggaaagggtgacaactgccgcgccttacccatcagccaagagcccactggagagcagcgacacgttcggcagcgggagcgccagcgccaacgccaacgacaagtcctcgtgcacagacattgccctctccagcaaccatgaagagtccctgtgtttaggggggcagcccaggagcatcatcagcttcagcgaagagtcccccagcaccaagctacagatctgatcgtgccgtgcccagtgttcatagatttgtccaggctgaccgatgcagaaaaccataagaatacttttttccactcaagaggaagagattactatcgatgccgttgttgtttaccgtgatgctgttttgccgtgttaggttactgtactgctggtacagatggtagtgccccccacccacctaactaacaagagagctgtcacttgcagactcttgatttttttttgccatttctcttggaaatgaactcagatgtgttattctagcagtaatcaaattatacaggcatacaaattctgcgccatttgtatggccaaagtgtaatacacttgttcttgaattatgaacctctctcaagctgcagaatgc

SEQ ID NO: 108575 - DNA, 1737 bp, Zea Mays
cgcgcgcatcgtcatcagttcactagtcagtcgaggtcgaggggcggacgaggagctgaggagagagaagcttcaaggagttggggacttgggggttgccgagctgtccgtctttcccctcccctccacccaccagctacctcgggagggcaaggcaaacatctgcggcctcctttcccgaacccgggttggatggagcgggacttcctggccgcgatcggcaaggagcagcagcacccgcgcaaggagaaggcaggcggaggcgcggaggaatcagcttacttcggggcagcagccgtcccggcgatggactggtccttcgcgagcaagccctgcgccgccccggcgctgatgtcgttccggtcggcggcgagggaggagccttcgttcccgcagttctccgccttggacggcaccaagaacacagcccctcgtatgctcacgcaccagagatcgttcggccccgacagcacgcagtacgccgcgctgcaccgcgcgcagaacggggctagagtcgttccggtctcgtcgccgttcagccagagcaacccgatgttcagggtccagagctcgcccagccttccgaacagtaccgcgttcaagcagccgcctttcgccatcagcaacgccgtggccagttcgactgtgggttcctatggcggaacaagggatgcggtgaggccaaggacggcacaactgacgatcttctacgccggttccgtcaatgtgttcaacaacgtctcagctgagaaggctcaggagctcatgttcctagccagcagaggaagctcagcccccgtggcctgtaagccagaggctcctcctactctcgctccagcgaaggtcacagcgcctgaggttcttctgcctgcgaagcagatgctgtttcaaaaaccacagcatctctcgccgcctccatccagtgtccctggcatcttgcagtctgcagctctccccaggagcgcctcatctagctctaaccttgactccccagctccaaaatcttcggtcccgttagctgttcctcctgtaagccaggctccgccagcaacactgatcgccactacaactgcagcagcaataatgcctagagctgtccctcaagctaggaaggcgtcccttgctcgattcttggagaaaaggaaggaaagggtgacaactgccgcgccttacccatcagccaagagcccactggagagcagcgacacgttcggcagcgggagcgccagcgccaacgccaacgacaagtcctcgtgcacagacattgccctctccagcaaccatgaagagtccctgtgtttaggggggcagcccaggagcatcatcagcttcagcgaagagtcccccagcaccaagctacagatctgatcgtgccgtgcccagtgttcatagatttgtccaggctgaccgatgcagaaaaccataagaatacttttttccactcaagaggaagagattactatcgatgccgttgttgtttaccgtgatgctgttttgccgtgttaggttactgtactgctggtacagatggtagtgccccccacccacctaactaacaagagagctgtcacttgcagactcttgatttttttttgccatttctcttggaaatgaactcagatgtgttattctagcagtaatcaaattatacaggcatacaaattctgcgccatttgtatggccaaagtgtaatacacttgttcttgaattatgaacctctctcaagctgcagaatgc

SEQ ID NO: 108576 - DNA, 130 bp, Zea Mays
ttttttctttttttccctttaacttttttgtactatgttactacaatctctggacctacatgttcaattttggcatatttctcatagtgtttactatatctattaaatttagtacatttaattcaatttc

SEQ ID NO: 108577 - DNA, 452 bp, Zea Mays
aatccccacagctcacacaggcacacagctcctcttggcggcgcctctgacttctcctttttcgtcgcccttctcctttttcgtcgccttcgatcggcggccgcctccttcctccacttccgtcccttcaccgagccgccgccgccactatgaagggacccggcctcttctccgacatcggcaagaaggccaaggatctactcagtaaggactacacttacgaccagaagctgaccatctccaccgccagcgcctctggactggtaagatccgaccgcgctcgtgtgattccatttccatgctgcctggttcctgttcgcttgtccgtgctcgtgacgcctgatctggtagttgtggctgtgttcagcgtcgggatgtcgccgtgcgcaattaacgtcattgttggaattggtttcggtagagttgcacttttagttgcttgtgttctttag

SEQ ID NO: 108578 - DNA, 1789 bp, Zea Mays
gagagagcgagagcagccggccggaagccacaccttggccagcttcgttcgccagtccagcaccagcaccagcagcaccaccaccaacctcggagctagccaagaccggccggaagctagggctagccatgtgggacggaggcgtcgagcacgggagccaggaggccgcgcaccagctgctcccgtggctcggcgcggcgcccttctccgagccggcggccgtggcgggcctcggcgccgccatgggggcctacgcctgcgacggcgtcggcgggctcgggcatggcggggtgttcggcttcggtttcgacgccgcggtgcagcagcagcagcagcagcagcgcgcggcggacgggagcggcaaggcggtggtggtgtccgggctgctggggagcctgcaggcggagctggggcggatgacggcacgggagatgatggacgccaaggcgctggcggcctcgcgcagccacagcgaggccgagcgccgccgccggcagcggatcaacggccacctcgccaggctcaggagccttctccccaacaccaccaagacggacaaagcgtcgctgctggccgaggtgctggaccacgtgaaggagctgaagcgccagacctcggcgatgatggcggccaccgacgccgacgccgacgccgacgacgaaggcgccgggcggacgcaggcgcaggcgcaggcgcagctgctgccgacggaggccgacgagctgtgcgtggacgcgggggccgacggcgccggccggctcgtggtgcgcgcgtcgctctgctgcgaggaccgcccggacctcatcccggacatcgtccgcgcgctggccgccctccagatgcgcgcgcgccgggccgagatcaccacgctcggcgggcgcgtccgcagcttgctcctcatcaccgcggacaggagagcggacgtccagcgcggcggcggcggcggcggcggcgacggcgacgacgacgaggaggaggaggatgaggaggagggcggcgagcgcgctgcctcgcaccggaggcacgagtgcatcgcgtcggtccaggaggccctgcgcggcgtcatggaccgcaggacggccagcagctgcgacacgtcgtcgtctggtggcggcggcgggagcattaagcggcagcgcatgaactacggcgcgcaggagcagtgttcggtgtagcattcatgcatgcgcgcgcacacacacacacggcgttttccagcagcgtggtatcgagctgtgcgtctttatgctttgcattgcattgcatggatgcatgaacgcatatatatctgcaagttatttagcgtagctacttgctagtataagtttagccgtcgtttcaaaagcctttgggcgccatggtttcttcttcgggtataatggtgtgtggtgcatatgcatcagtgcgtggcagcggtaactgcttcaggctcagccattcagtggggagcgttttatgtatcccttttgtatgttcatgttgtcacgcacacggtaccggttactgatttcttggaattgggggaaatggtgatatgggtgtacaatatctgggattctgggggttcagctgatgggtgtattggtgccacatgccgcatgccgttccttcgtgatttatgcacgtcaaaatcgaagcgttcttcagttcttcttttgcgatatgatgaagtgttattagttccctagctgttttttaatccgctggagtttgtttctcatataataatacttagattatctggtaaattgcaccctattttcatgaatttgaacttctcaaagaaaat

SEQ ID NO: 108579 - DNA, 962 bp, Zea Mays
ggtccagggaggccaaattcttgagtgccacatgaccccaaaccgccgtctattcagatacgataaggcacgcgccacggctgccgtgcaaaccaaaagcataccacagggaagccggaagccttcgccgcctccgcgtgtccggcgatggacaccgtcgcctcatggcgcctcctctccccgcctccctgcccgcagcagctacccaagcggcaagcgaccttcgcggcctcgccacggcagcattcggccagctccagcagcgccaagttcaggctcctctgccacctccacctccatgacaagatcgacgacgaacgcgcagccagcggcgtcggtgcagcagagctcgcagctgcagaggctggcaacggtgctacggtgcggcgccgtctgggcagctgttgaggcgccggcggcgctggcggtgaccggggaggaggacatcgacctcctagcgatcctgccgccgatcgcggtgttcgccttcttctacttcctcgtcgctcctccgctgatcatgaactggatgaggctgaggtggtacaagcgtgaattcgtggagacgtacctgcaattcatgttcacctacctcttctacccagcgatgatgttctgggcgccattcgtcaacttcaggaagttcccgagggatcccaccatgcggtacccttggtccaagccaaaggagggcacgccgctgttcaaagatagatacccgcctatagactcctactaggcagcaaaagatttctttacctgaatctgtgtaaaacaatatcacagtcaaataatacccgtgctagtacatgggaaaggtgctctgcagactcaactctcgagtcattgtagttgcagcgatatctcacgcatagaaaggagaagaaccatgcgtgtttttttcttagacaagtacgcccagacgtcgaagcatatttcgtgcttgacaaaagattacaccc

SEQ ID NO: 108580 - DNA, 1366 bp, Zea Mays
ttttgtacagtttgcaccaagtggttgatttgcacataatatatatgttctctaaacatgttagtctttacttattttccctgctagctagtttgctcttgttggccgtgtcataaattttgttctcaggagatagatctacacagtgacaacatgtacctcaggagcacaagatatatatgcagatgtaatagcttgttcctgaccaattcctcgctgtattatgctgattgtgggagcacagtgttctgtagtggtcaggcgctaaagaacattgcgccaaccttattcatgaaagcatgccaagcccttacaaataatcgctggatgcacttttgttctccttacacacatgaggaagagataaaagaattcatttccctccggcaagacaacctacaaaagcgaggatggccttgcaatccaatttgttgtctttgcaacttatcacaagaaactatgcctcatttaggcaaagactgcccgtttttgtagagttgtatgattggtggaagagattaaggaatcgttgctgcaaggagtcaaagaagattttcgatggactcctcatctctttctggtggaatatatggttagaaagaaataacagaatctttcatagacttcaaagatctgctatccaggttatgcaattggtgaaagatcaaattgtgagttttagtgtatgcaattggtgaaagatcaaattgtgagttttagtgtatgttagattgagttagtgtatgtttttctctttttttgttttttcttttgctcagtcttcagtatctatttctcttctaatatattgatgaggcaagtcttttgccgcttcctttaaaaaaagagtaattctaatcttcatacactagttttcagtgtagcctttttcctatgtggttaactgtccatagattatgccatacctctcctaaactggacttcaacgatgtgaggtccaatcttattcatctcgagcggctagattttcatatcatagaagtgatgatttatctcaagtttgctcttactcatcttttgtttatttatattttttatttttggattcagagaaacgtcatattcacaactgcaactagtgcgtggtgatctggatgaaaacagtcaggggaaggcagaggtttttgtctaacatggagtttttttcagtgattttagatattcttacaagctgtaacacaatcaagcagataagatcctgctgatatatatgaattaagcttcttatctttttagttccagtagcaaagtacgtttacttgcagtttgttggagggacttgtgatggcttttgatattacttcatgagtcaattgctaattagcaattggctactatatataat

SEQ ID NO: 108581 - DNA, 1928 bp, Zea Mays
cgcgtgcgtgatggtttttttcttgttagcacctctatttgctctcctcccgacgagtgtgattaacggaaagcactgtttgactagtccttgctagccctcctctctctctctctctcttacttatctactcgtttcctcttcctttccgtaaagattgcacacaaaaactattggatcttttcccctttcgatgtgctcatctcatgtgtggttctgtgactgttgagagagaggtgggcgaggcagccatacgaagttggtggtcggagccagatctgcttggatgcatagtgaaagggccggagatcggcacggcacctacctccggcggcgggcgacggctgcttcttctagatctggaaactaatgtttcttctccgatccagcagttttagcaaacaccatatatagcaatatgtggacatgctcattgtacctttccccctactaatcatgcaaagggagcaagaaaatgtaatgcttgggaccataagatgctagagcctgacgtgtcatatagtaaggtatcatctgaagaaagagaaagacaggttcttggaagccaaatcaagagttgatgatgccttcagaagaaaggaataccttgcattagtggattcttacatgaaggtaactaagatggaatgattttcccacaaagaaagagcacaaaataaattgaattctagaagttaattttgtacaatttaatttttctgcatgtaataatgattaacatgcatattttcctttggggggaggcaaaggacctgtttgttgaagttgatgtgttcttttagttgggtttgtttcttcaatgctgtgttcgtgaagatcaacaaggcttactattaacatgcttcgcagggttgagccatatgttgcacactggtaagttttcttagctaatttagttcatgtcttcctgcttattctggtagatcatcccctgcaagtacccagctgaaaacagattatgctgttgtacttgtgtcttgtatgtgaatttacaatagaatttgtctccttttgtttgtttaaatgcatgagtagtattgatccagggtttcagagaacctgaactaataaataaataaataaataatcctagtgaaagtaggccttttggaatttctttcaaaggatagaaatgcctgcaggctgcagctatatatccaagccagtgggtaaggtgagtccatatacttttaattgattttgacgttgttctgatgagcgcactatgctctttcttagcttgcatgcagaatgagctgttatgtgctgaacttgaatatgtgcaaatagggaacatattaggtgcaaaccaattatttggtgcaaatcgtgtaaacaattatgataatttttttaaaacaactctcccaccatcatcagttttcaaaatgacccttccatctttcacctccaccaacgtgtttgtttttgtacagtttgcaccaagtggttgatttgcacataatatatatgttctctaaacatgttagtctttacttattttccctgctagctagtttgctcttgttggccgtgtcataaattttgttctcaggagatagatctacacagtgacaacatgtacctcaggagcacaagatatatatgcagatgtaatagcttgttcctgaccaattcctcgctgtattatgctgattgtgggagcacagtgttctgtagtggtcaggcgctaaagaacattgcgccaaccttattcatgaaagcatgccaagcccttacaaataatcgctggatgcacttttgttctccttacacacatgaggaagagataaaagaattcatttccctccggcaaggtatcaacagcactcaatgatctcgacgatactattttatggaggtggagttacagttcaagtagtgcatacaaaattcagttcacaacg

SEQ ID NO: 108582 - DNA, 1793 bp, Zea Mays
cgcgtgcgtgatggtttttttcttgttagcacctctatttgctctcctcccgacgagtgtgattaacggaaagcactgtttgactagtccttgctagccctcctctctctctctctctcttacttatctactcgtttcctcttcctttccgtaaagattgcacacaaaaactattggatcttttcccctttcgatgtgctcatctcatgtgtggttctgtgactgttgagagagaggtgggcgaggcagccatacgaagttggtggtcggagccagatctgcttggatgcatagtgaaagggccggagatcggcacggcacctacctccggcggcgggcgacggctgcttcttctagatctggaaactaatgtttcttctccgatccagcaggtatcatctgaagaaagagaaagacaggttcttggaagccaaatcaagagttgatgatgccttcagaagaaaggaataccttgcattagtggattcttacatgaaggtaactaagatggaatgattttcccacaaagaaagagcacaaaataaattgaattctagaagttaattttgtacaatttaatttttctgcatgtaataatgattaacatgcatattttcctttggggggaggcaaaggacctgtttgttgaagttgatgtgttcttttagttgggtttgtttcttcaatgctgtgttcgtgaagatcaacaaggcttactattaacatgcttcgcagggttgagccatatgttgcacactggtaagttttcttagctaatttagttcatgtcttcctgcttattctggtagatcatcccctgcaagtacccagctgaaaacagattatgctgttgtacttgtgtcttgtatgtgaatttacaatagaatttgtctccttttgtttgtttaaatgcatgagtagtattgatccagggtttcagagaacctgaactaataaataaataaataaataatcctagtgaaagtaggccttttggaatttctttcaaaggatagaaatgcctgcaggctgcagctatatatccaagccagtgggtaaggtgagtccatatacttttaattgattttgacgttgttctgatgagcgcactatgctctttcttagcttgcatgcagaatgagctgttatgtgctgaacttgaatatgtgcaaatagggaacatattaggtgcaaaccaattatttggtgcaaatcgtgtaaacaattatgataatttttttaaaacaactctcccaccatcatcagttttcaaaatgacccttccatctttcacctccaccaacgtgtttgtttttgtacagtttgcaccaagtggttgatttgcacataatatatatgttctctaaacatgttagtctttacttattttccctgctagctagtttgctcttgttggccgtgtcataaattttgttctcaggagatagatctacacagtgacaacatgtacctcaggagcacaagatatatatgcagatgtaatagcttgttcctgaccaattcctcgctgtattatgctgattgtgggagcacagtgttctgtagtggtcaggcgctaaagaacattgcgccaaccttattcatgaaagcatgccaagcccttacaaataatcgctggatgcacttttgttctccttacacacatgaggaagagataaaagaattcatttccctccggcaaggtatcaacagcactcaatgatctcgacgatactattttatggaggtggagttacagttcaagtagtgcatacaaaattcagttcacaacg

SEQ ID NO: 108583 - DNA, 1326 bp, Zea Mays
cgcgtgcgtgatggtttttttcttgttagcacctctatttgctctcctcccgacgagtgtgattaacggaaagcactgtttgactagtccttgctagccctcctctctctctctctctcttacttatctactcgtttcctcttcctttccgtaaagattgcacacaaaaactattggatcttttcccctttcgatgtgctcatctcatgtgtggttctgtgactgttgagagagaggtgggcgaggcagccatacgaagttggtggtcggagccagatctgcttggatgcatagtgaaagggccggagatcggcacggcacctacctccggcggcgggcgacggctgcttcttctagatctggaaactaatgtttcttctccgatccagcagttttagcaaacaccatatatagcaatatgtggacatgctcattgtacctttccccctactaatcatgcaaaggtatcatctgaagaaagagaaagacaggttcttggaagccaaatcaagagttgatgatgccttcagaagaaaggaataccttgcattagtggattcttacatgaaggtaactaagatggaatgattttcccacaaagaaagagcacaaaataaattgaattctagaagttaattttgtacaatttaatttttctgcatgtaataatgattaacatgcatattttcctttggggggaggcaaaggacctgtttgttgaagttgatgtgttcttttagttgggtttgtttcttcaatgctgtgttcgtgaagatcaacaaggcttactattaacatgcttcgcagggttgagccatatgttgcacactggtaagttttcttagctaatttagttcatgtcttcctgcttattctggtagatcatcccctgcaagtacccagctgaaaacagattatgctgttgtacttgtgtcttgtatgtgaatttacaatagaatttgtctccttttgtttgtttaaatgcatgagtagtattgatccagggtttcagagaacctgaactaataaataaataaataaataatcctagtgaaagtaggccttttggaatttctttcaaaggatagaaatgcctgcaggctgcagctatatatccaagccagtgggtaaggtgagtccatatacttttaattgattttgacgttgttctgatgagcgcactatgctctttcttagcttgcatgcagaatgagctgttatgtgctgaacttgaatatgtgcaaatagggaacatattaggtgcaaaccaattatttggtgcaaatcgtgtaaacaattatgataatttttttaaaacaactctcc

SEQ ID NO: 108584 - DNA, 486 bp, Zea Mays
atgtgggaggagcaccatatgagtgaaggagcagaggaggagcacaatatggaggagtatatgaaggaggagcaccatatgaaggagcatatggaggaggagcaccatactattcataaagaggagcatcatatggatacctatatgagtacaatggagggtacaaatatgagcaaggctgaagaaaagaagcaaagtgttggtggaaggagcttcaattgtagtgtgcgtcatgtgtgtgtgtgcgacgcgcaccatgaggagccggagaagccaacagaggcggtggccatgtccacggactcggctgacgatgagctcagtctcgatgccgtggtcgaggagcggcggcttgaagcacataatgaggcagacgatgctcggtgcctcctccttggtaccatcgatttggacgacgccgggcccaaacgggcacagggacgacttgaacagacacgcacacgggctccacaagcccgacgctga

SEQ ID NO: 108585 - DNA, 273 bp, Zea Mays
aatgagttgaggccgagccggccaccaagcatgggcgggcccagagggtattcatgggtattcattgaatacccatgttttggtgatctatagtgttagaacactaatttgtcaataatgtattacataaaatagtactaaaaccctaaattctttaatcttttgaatttttgtacccaatcttaaatgtctgggcccgcttctgccaccaagcccagcacgacagcgcaccaggcccaggtcctagcccaacaaggcaactagcagactagc

SEQ ID NO: 108586 - DNA, 1977 bp, Zea Mays
atgcagcgcgcgactgtgcactcctcctccacggcttcacgcggaagactccgcccgcgccaccgaccggaaccttcgcggtcgtcttctgtcccgttggaggcgtctgcgatttcggacgaggcgtcggcgattcgtgcgcggaaaggttgcgaccgcgccggtccccgtcggggctgtggaagacgaagtggagttggtcaccaaccacctccagtcgcgagcgaagacgaagcggccgcaaatccggctccgtcgaggttcctcgcgagcgctagcttcgtttgccgctccgagcatcgacgccttcatcggctccgggaatcaacgcttcgattcctcttctctccgcccaaatctccggatcttcaggtgtatgtcatcccaaatatttttgtcacccttgtatacgactggaggatacaaaaatattgtggaccttcatatacacagttccgaatggcatcctcaaaagaagataccatgaagtctttgcttaaagtacttgtcgactgtgccgaggatgccgcaaaatcccttcgtggattagtagatcatgcattagaccacatgcttgatgaagagatattagctagaaccctctttgccatgaaagaaaaacttgatttgcttcaccaagatgccttagaggctaaagtccaagcttttcctgaaattgctaagtacgagggggatgacataactgttgaaccgacatctccgtcgacccctccaacagttactgaaccatctgtcgacgaagaggagttctactgcccggatgtgagtgacgagtggtacttcagcgactcagatagcatggaccctgccaacaatgcgacatcgtcgcaggcgatgtcaaatccctcaaatgcccagcaatttccaccaccaccccctttatggccaacggggtacatgcaccagaatcctgtcgattgcaacatcatgggaaacattaattttcctagtcctggtcaaggtccaactacaatgtgggctccaattcagccagggaatactagttcccaatctaccatgatccctgcttcgcaatctgcagtctattggaatcactacatgaattttgtgaggaaccctctaggttcagttggagtgagtccatacacagattcttatccagcatcacatacaagtacaccgttgcagggttcgaacactatacctcaaatgcctgtacacttggagtcagatgctgaacaaagtgttcaggacatcaatagtcctgggaaaattgcacctccagttcaaaaacacaagaaatcgaaggaacaaaactttacagctccagaagacatactcctttgtactacatggttgcaaataagtagtgaccctattgtccatactggacaaaggagggagggtctttgggccagaattgaaaaaaggtacaatgaacaaaggggggaatttccttgtagacttaacagagcacttagcagcagatgggacaagatcagggctgatgtcagtaaattctctggatactacgccagagtcctaagagagaaacaaagtggtctaagtgacgaggataagacatccaaggcagcaactttgttcgctcatgaggagagcaaaccatttcattatatgcactgctggcatcaattgaagggggaaccgaaatgggagagcatatgtcaaggacactcgtttagaggattacatgcaagatcaataccatcttcggggtgtccatctgtggaagcaccggagactgacagtggatccgctgggctgacaggaaaaaggccccgtggccgtgattacagtaaagctgagagaaagaaagctggttcttcttcgtccgctgagtacttaagccgattacaacaaattactgagaaacaaatacagaggtccatagaaaagggggaaaaaaagaaaagagcactgaagaagacagggagatatagaagaagagattggaattggaagcccaaaagttaa

SEQ ID NO: 108587 - DNA, 1311 bp, Zea Mays
ctcccaatgttctcttccctccctcccacgccctccctctcctatcgcgtccctgcctcctcgatctcgccgtcgagcctgcgtcctcgccgtcgtccgtgccaggccggctccaccagctttcctcgtcgtggcgtctccaagaatcagtcctcctctcccccgcttcccccgcccccggtcgagctccgccagcaacccctctacctgttcacccgacggcgacctccgtggccgacttctcttcactctcgcctcgcttgccacctctgccgaaagtgtagtacatcgtcgggaggaatatgacgccatcgggctcctttagcggggaggcacttctatcttggcctaggcctcgtcgtggccccacatccagttgccacgggatatggattggggcgttgcttcgcggcggcggcggaggcgtttgctagctgtcggcggcattggcgcctgccacgaccatcgtcaactgacagcgacggtgcgttcgacgaccggcagtagcctgcgctccacccagccgcgcttcctcctgtggacataaatctacctctactggggcactgggctggtcccatcttccacgcggccctcccctccactcatgacgacgtcgggttcaacgaccggcatcatcatgcgctccaaccagcctcgctttctcccgtggatacggatctaccgctgctgggtggccccagcttctgagcggccccgcgtgcagttgctggtgaagactgaagaggatttgaggacgtcacgagtgagcttgccaagccttgtgctcgccgagcgtgcgggcgcacgtctccacagcgatcgcatgacgtagctggggccgggacatggacgtcatcgcgaatctcatctctacggacagagcggctgtatgttcctacactttattacctcctccctcctcctctgcatccccatctcgcgcttttggagcccttcgcctacattttccccaaatccatcttcctttgtccttattggtttacctcgctgccaccgactgtcgtcctcgtggcctcatgggttgctctcagggggccgttcgtgacctaggatgtgtgaagtgctattgtgggtacaggtttgtttggctaaccaaagttgtgtatctttgtccactactttgtgtgtattttccttcgattcatggaacaagtcctcgggtatgtgttggaaagtggagagatgagtacaagtagaattgtagaccaacaaaaaggatacaggaacatgcttgcacttcgcattttgtatggaaatggcgtgtcttaatagaaaatgatggcacat

SEQ ID NO: 108588 - DNA, 370 bp, Zea Mays
atataacaagttcacaaggatcacaaatttataatataaaaagtttacaaagatcaaaagttcacaatataacaagttcacagtataacaagttcataaagatcacaaattcacagactcaaagttcaaaatttataatatccacttgatctagctgacatgacatgcttacttatgaaatattttttcctcacataaagagtttttcacaacctcacagaaaaaccctaaaacctagtgaaaagacagactgtcggctctctatcattatatattactaatacataacatgtacatagaaaagcgttgattcgttcgagagaccaaatcgttaatgtcaactgccttacaacaccatctatcccaaaaa

SEQ ID NO: 108589 - DNA, 525 bp, Zea Mays
actaccaccactccaccagccgcctccactcgctctcccacacagaaaaccctagccgccgccaccgaagcggcctcccaggtaagcaggagcgtccatcccgccgccgccatgaagtgcaatccccgcgccacgagctcctgccggaagtgccgcaaggcgcacttcacggccccgtcctccgtccgccgcgttctcatgtccgtcgggctgtcgacggagctccaccacaagtacaacgtgctctccatcccgatccgcaaggacgacgaggtgcaggtcgtgcgcggcacctacaagggccgtgaggggaaggtggtgcaggtataccgccgccgctgggtcatccacatcgagcggatcacccgcgagaaggtgaacggctccaccgtgaacgtgggtatccacccctccaaggtgatcgtcaccaagctgaagctcgacaaggaccgtaaggcgctcctcgaccgcaaggctcagaataactagacctgctgcaagatggcaggccctcatcttcagagc

SEQ ID NO: 108590 - DNA, 1415 bp, Zea Mays
gcgcgttgtgcatttgtgcacgggcggtcgtttgtggacccgatacgagccctcgccaaacacatcggcgcatcaggttcggccaccaccaaccacccgttccgcgcccgtcctcgaccctcccacctattcgctcgctcgctcgccgtccgcgcccgcgcgggccgcgagatctaggccagtcgccgcggccgtggccgcgggctgacgggatctctgtcctcccgacacgacgaacctctaggaaggcgcctaagacgaggaggaagcgggggctatggaggcgtcttcctgggacgccgttcgcaagcaggcaaggaggttggaagctcagttagatgaccaaatgattgcataccgtaaattggtttctatgaaatcagacggttcagaggacaacattgagtctgatatagaaagatcactgaagcagttacagcaagtgaattcgcaaatgcaaacttgggtatcatcaggaggttctgaagttctttctcatactctgactcgtcatatggagattttgcaagaccttactcaggaattctatcggcttcgatcaagtctcagggcaaaacaacagcatacttctctccttgacttgagagattttgacagagcaaagtttgatgttgaggagccgtcagactcagctgatcaagttcttctcagggaacaagctgcgattggcaggagtactggacagatggataacgtgatatcacaagctcaggcaacacttggttctctcatgacccaacggtcaacattcggtggcatcactacaaagataagcaacgtcagcagccagcttccaacaattaaccacgtcctctcatcgatcagaaggaagaaatccatggataccatcattctttcgctcgttgcatctgtctgcacgtttctcatcttcatctactggctgtcgaagtaggtttaccagagcaaagatattacagtgttgtaagcttgggaccacaccaccagtaccggtacagatagtcttcattggtgtttgtacaatattattggttgattgaatgctgttacgattcgggcgtgctgtagccaccgtgtctccagctgtgcaactgctgccaatactgtgaactgaactctgtacctcgtgtacttcggcataactaagggtggagcaactggcgttgctttagctgccccatgttggcatgttgctcagatgtcggcttaaaggtggatcttcacctatgactatagttgacaatataggctctatattttatacaataaaatataaggatgaggctctatttgtttttatttttgaactaaaaataatttagaaccctatcaatttgtaaagaaacatttggatcacgatctattaccacccctacctatgtcgtaagcctctgttatcagacattttcgagtca

SEQ ID NO: 108591 - DNA, 1017 bp, Zea Mays
ggatgactagtttttttcttgcggtgatacgggcatggaagttacatagatcagataggatgacacagcacagatagtagtaacggagattttatacagtatgtaactgcaatagcagctagagggaaaaatataaaaccaatggcatataagggaactcatatttttttcaatggcagggggataagtataagttttgatgacatagaaagaattttctctaaaatgtggctgatatggaaaggctagatagttgattgagtgtactctatttgtttgctggtattgggggcgagatagtcgattaagttgtacctctgtttgtttgctggtattgggaaagaatcatctaaaggcagaagattttatttgtttctcatttggtgaccttactaatctccagtttagttaccaaaaggatttattattgttactgttgcatttattgaccttactaatctccaccataatatttatatacttgttatagatagcaaacccatcgatttgatagtttcagggagagccttctgtcgagctactacttttgtctggaatactacatgtttcacttcagaatgatgaatgctgtcagttgtatgcctgaggagttactgtatgtttaatgataccagatggataacgtgatatcacaagctcaggcaacacttggttctctcatgacccaacggtcaacattcggtggcatcactacaaagataagcaacgtcagcagccagcttccaacaattaaccacgtcctctcatcgatcagaaggaagaaatccatggataccatcattctttcgctcgttgcatctgtctgcacgtttctcatcttcatctactggctgtcgaagtaggtttaccagagcaaagatattacagtgttgtaagcttgggaccacaccaccagtaccggtacagatagtcttcattggtgtttgtacaatattattggttgattgaatgctgttacgattcgggcgtgctgtagccaccgtgtctccagctgtg

SEQ ID NO: 108592 - DNA, 729 bp, Zea Mays
gcagtctcgtccgtttctcttctcctgtgtctatctccacctctcctccacccgggcgatctgctctttggacttcagcggtttagcccaaacccttcttcctcctcggtgcactccaatgcgtcgcattccgtccttctaatcccgacgcattctctcgttgcagaccccatcgttctatctctccgtcgtcatctatctgtgctccccacctcccgctcccttttcgttgcgcctcggggccgctgcgctggtgatttgcgtcgcctccccccctggggttaatgtgacggccctgccgacgatcttgcctgacgactagtttcttctctagctgggctactctccattcagtggttatggagcctcccaggaagaataagtccagtggcatgcaagtcaaggaggaagtgaagttagaagatggaaatgatttgttagtcaagcgcaggaggactgaacttccaggttccattgttcaactacaacagaaaattgaagtatttgacatggagaacaaagtgccagatggtctttcagttgaagattctactggcaaggatcccatggatgtgctcactagatatgcagcacagaactctggtcaagggaatagttgcagtaacgaacctgcaatctcgagactgacaaaaatatgcaaggcaattggctggaaagaaccatcatatgactttgaagaacaaggacctccgcataacagaatgtgag

SEQ ID NO: 108593 - DNA, 109 bp, Zea Mays
atagcctaacaactgctgcaacacctgcctatgcgtgtcgtcgggctactacggccgagtgcccctgctacaacaactggaagaccaagcgcagggcccaaagtgcccg

SEQ ID NO: 108594 - DNA, 1824 bp, Zea Mays
atatatgcatcctgcccccaccccccttttacctccccactcgtctgcaccgaatcggtcgatcggtgcttttaatctctgagcaagcgatcgagctcaccaacaaccaccgcgctcaagagtagcagcccgccggccgcgccggagccgaaaacgacgaggcggtggcatggggaggccgccgtgctgcgacaaggtgggagtgaagaaagggccgtggacccccgaggaggacctcatgctcgtctcctatgtccaggagcacggccccgggaactggcgcgccgtgccgaccaacaccgggctgatgcggtgcagcaagagctgcaggttgcggtggacaaactacctccggccgggaatcaagcgcggcaactttaccgaccaggaggagaagctcatcatccacctccaggctctccttggcaaccggtgggcggcgatagcgtcctacttgccggagaggacggacaacgacatcaagaactactggaacacgcacctcaagaagaagctgaagaagatgcaggccggcgaagggggcgggggagacggcgacggcgcagcaggtgcctcggaaggcggcgccgtcgccaccgcaggcgcgggagggaagcgcccggcggtgcccaaggggcagtgggagcggcggctgcagaccgacatccacacggcgcggcaggctctgcgcgacgcgctctcgctggaaccttcgccttcggcttcggcgccgccgccggctaaggtggagcctctgccggcgaccgccccggggtacacgacgtacgcgtctagcgccgagaacatcgcgcggctgctggaggggtggctgcgccccggcagcggagggggcaaggggcccgaggcgtcgggctcgacgtcgacgacggccacgacgcagcagcggccgcagtgctccggtgagggcgcggcgtccgcgtcggcgagccacagcggcggagcgcccgcgaacgcggcggcgcagacgcccgagtgctcgacggagaccagcaaggtggccggcgcgggcgccgcgccgccggcgttctcgatgctggagagctggctcctcgacgacggcatggggcacggcgaggacgggctcatgaccgacgtggtgccactaggggaccccagtgagttcttttaatcaaggccgctgtacaagtaccactaaaagcaaattaatcaagtagagatgcaagaacaaaagggaaaaaaataatcgccgagttattaggtaataactagtgaagcagaaatccaacgaaccaaatttctttgaattctcggtgatatggatcgagttgagtgtcgatctagtttgttttaattccctcttttatcttttttacgctgttgtttctctgatgttagggattggaactgatcgtgtaagcttatactaatgacaggttcctaaaggaccatgcatgagagtgaccgatagaaagaagtgtacatcttatataaattattaaaagatctatatatttagaagttataatagatgctcaatcctcaattatattactccaatatttttccttcatcaagctctatatatttttcgtgttattcttactctactacacgaatggggaataaaacattatagtactccctagtagttcagatcaaccatgtctaagtgatgcttgcttttgtagaattatcttgtgtaattttcatgaaatccttgcatattgcaaatccaaatgtaaataattgaatggttcttttccaaaagttacttgagttattactctgccatgtgcttgatataaataaaagcagcaggcctttcgatcaagatattgcaag

SEQ ID NO: 108595 - DNA, 1150 bp, Zea Mays
atatatgcatcctgcccccaccccccttttacctccccactcgtctgcaccgaatcggtcgatcggtgcttttaatctctgagcaagcgatcgagctcaccaacaaccaccgcgctcaagagtagcagcccgccggccgcgccggagccgaaaacgacgaggcggtggcatggggaggccgccgtgctgcgacaaggtgggagtgaagaaagggccgtggacccccgaggaggacctcatgctcgtctcctatgtccaggagcacggccccgggaactggcgcgccgtgccgaccaacaccgggctgatgcggtgcagcaagagctgcaggttgcggtggacaaactacctccggccgggaatcaagcgcggcaactttaccgaccaggaggagaagctcatcatccacctccaggctctccttggcaaccggtgggcggcgatagcgtcctacttgccggagaggacggacaacgacatcaagaactactggaacacgcacctcaagaagaagctgaagaagatgcaggccggcgaagggggcgggggagacggcgacggcgcagcaggtgcctcggaaggcggcgccgtcgccaccgcaggcgcgggagggaagcgcccggcggtgcccaaggggcagtgggagcggcggctgcagaccgacatccacacggcgcggcaggctctgcgcgacgcgctctcgctggaaccttcgccttcggcttcggcgccgccgccggctaaggtggagcctctgccggcgaccgccccggggtacacgacgtacgcgtctagcgccgagaacatcgcgcggctgctggaggggtggctgcgccccggcagcggagggggcaaggggcccgaggcgtcgggctcgacgtcgacgacggccacgacgcagcagcggccgcagtgctccggtgagggcgcggcgtccgcgtcggcgagccacagcggcggagcgcccgcgaacgcggcggcgcagacgcccgagtgctcgacggagaccagcaaggtggccggcgcgggcgccgcgccgccggcgttctcgatgctggagagctggctcctcgacgacggcatggggcacggcgaggacgggctcatgaccgacgtggtgccactaggggaccccagtgagttcttttaa

SEQ ID NO: 108596 - DNA, 805 bp, Zea Mays
aagcagcaatgcagcatcctgaatcatgtgttaaatgataacaacaataatgatttaaaaaataagaccttgtcgtccccaccaggccacagacctgggttatcaatgcttaagattccaattgattctactgaaaataccttttctattgataggtatgggcttctacgaggaaccctcagggctccagccctgggctggatgatgtacaatgttctggtgagcaatgaaaagtcgatccagtctcagtacaagtcccacgtctacgccaaccctgacaacgtgacgccagctatcatcgagagccgatacgagttaaccaaaagaaaaggcgcacggttcgtccccgcggccttcctgacaggcctccttgatcctgtccaatcgagggaggagtttctgcagttgttcgccaagttagacggagacgtaccagttctggtagtgtcaacggtcaatgctcccaagagatccaaggccgagatggaggctctaaggggctctaaaggggtgacgaagtttgtggaggtcgcaggcgctcttctaccgcaggaagaataccccttggcagtcgcggaggaactctacagcttcctgcaggaatcattcgcagcaagaaggtgaatgtgcgtgcgtgcgtgcgcacaactgtgccagaagacaggttctcaagtcccacacatcgtgagtaaattcgttagcctgctacagtgtactggaggtttttagcaacaataaagcggcatcactcgttcacttccctagtgccacgattcaatagcctgcgacagagcagacagcagac

SEQ ID NO: 108597 - DNA, 1512 bp, Zea Mays
gcgatagcgagactcatgcaggcacacaagggggagttcccgagtccacggctgcacacgtcgtcgcctcctctccactcgcacactcgcaccctgcgtccgcctgccgcctaccccaggcggccccctcccatcgccatgcctccgtccgccgccgccaccgccgccgccttcctcttcccggccgtcgcgatcccctgccgcgtgttccctcaacggcgggcgaggagcctcgccgtccgtgccgtcgcctcccctccagccttcgcggtcaagcccgccccgctgccctccaaggtagcggaataagcccagattcgttgcgcttggttggaatgcgaactgcttcgatgtgctttgagatcccatattgcagggcacatgggactggaaagtgggagtggaaattcgagaacaagccggtaaacatatactatgaggaacatgagcaggaggttgctgagaatatgaagaacattctcatgatccctacgatctctgatgtgagcactgtggaggagtggagggtggttgccaaagatattgttgggcggaaaggagaacttggctaccgtgttacaattgtcgattggcctggtcttggttattcagataggccatcactgaactacaatgctgatgtgatggagagctttctggttgaactaatgaattcaccaaacagtccagtcgcaaatgcagatgatgaactgatcattgttggaggtggtcatgcagcaaccatagctgttcgtgcagctggtaaagaccttataaaaccatctgctgttgctgctgttgcacctacttgggctggaccccttcccatcgtatttggccgcggttctgatatggaaactaggtatgggcttctacgaggaaccctcagggctccagccctgggctggatgatgtacaatgttctggtgagcaatgaaaagtcgatccagtctcagtacaagtcccacgtctacgccaaccctgacaacgtgacgccagctatcatcgagagccgatacgagttaaccaaaagaaaaggcgcacggttcgtccccgcggccttcctgacaggcctccttgatcctgtccaatcgagggaggagtttctgcagttgttcgccaagttagacggagacgtaccagttctggtagtgtcaacggtcaatgctcccaagagatccaaggccgagatggaggctctaaggggctctaaaggggtgacgaagtttgtggaggtcgcaggcgctcttctaccgcaggaagaataccccttggcagtcgcggaggaactctacagcttcctgcaggaatcattcgcagcaagaaggtgaatgtgcgtgcgtgcgtgcgcacaactgtgccagaagacaggttctcaagtcccacacatcgtgagtaaattcgttagcctgctacagtgtactggaggtttttagcaacaataaagcggcatcactcgttcacttccctagtgccacgattcaatagcctgcgacagagcagacagcagac

SEQ ID NO: 108598 - DNA, 1516 bp, Zea Mays
ctttgtcttgtttctaaaaaactgtttcgaagcgttgtagtttatttgtttataaaacagtttattcgtttggaaggtatctgcttgcgaattgcgatagcgagactcatgcaggcacacaagggggagttcccgagtccacggctgcacacgtcgtcgcctcctctccactcgcacactcgcaccctgcgtccgcctgccgcctaccccaggcggccccctcccatcgccatgcctccgtccgccgccgccaccgccgccgccttcctcttcccggccgtcgcgatcccctgccgcgtgttccctcaacggcgggcgaggagcctcgccgtccgtgccgtcgcctcccctccagccttcgcggtcaagcccgccccgctgccctccaagactggaaagtgggagtggaaattcgagaacaagccggtaaacatatactatgaggaacatgagcaggaggttgctgagaatatgaagaacattctcatgatccctacgatctctgatgtgagcactgtggaggagtggagggtggttgccaaagatattgttgggcggaaaggagaacttggctaccgtgttacaattgtcgattggcctggtcttggttattcagataggccatcactgaactacaatgctgatgtgatggagagctttctggttgaactaatgaattcaccaaacagtccagtcgcaaatgcagatgatgaactgatcattgttggaggtggtcatgcagcaaccatagctgttcgtgcagctggtaaagaccttataaaaccatctgctgttgctgctgttgcacctacttgggctggaccccttcccatcgtatttggccgcggttctgatatggaaactaggtatgggcttctacgaggaaccctcagggctccagccctgggctggatgatgtacaatgttctggtgagcaatgaaaagtcgatccagtctcagtacaagtcccacgtctacgccaaccctgacaacgtgacgccagctatcatcgagagccgatacgagttaaccaaaagaaaaggcgcacggttcgtccccgcggccttcctgacaggcctccttgatcctgtccaatcgagggaggagtttctgcagttgttcgccaagttagacggagacgtaccagttctggtagtgtcaacggtcaatgctcccaagagatccaaggccgagatggaggctctaaggggctctaaaggggtgacgaagtttgtggaggtcgcaggcgctcttctaccgcaggaagaataccccttggcagtcgcggaggaactctacagcttcctgcaggaatcattcgcagcaagaaggtgaatgtgcgtgcgtgcgtgcgcacaactgtgccagaagacaggttctcaagtcccacacatcgtgagtaaattcgttagcctgctacagtgtactggaggtttttagcaacaataaagcggcatcactcgttcacttccctagtgccacgattcaatagcctgcgacagagcagacagcagac

SEQ ID NO: 108599 - DNA, 1547 bp, Zea Mays
tgcgttcgcccctccttttaccttctcccattcacgccccgtctctttcgtggccttccttttccggcggccacaagtgggcgagcggcggcgcccttcaccaggtcttcgtcgggcccttcaccggcgacgagcatccaccaggagggaattgcgaagttgttttgtgatgatatatataatatattgggcagaaacgtggagctcagagcattggtgcctctttcctctttcaccaaggattccggtgccttatttcacaagacaaaaaaagtctcaagggtcttgattcttgtatgaactcaagatttatggtggatcttggagctgtgggatgctaagcctggtctagctactagattatgaactctctgctgatctaatagcatttctacaagaattcttttgctggaaggtttattagttatttgcaacaatgaaggaacatctaatgcttaatattgatgacctaagcattcttgagcctaacgaggtcattgggacagtcaagaataaatcatctggggaaaccattgcacatccaccctccatggctcatgccattttagcagtgggagaaagcatggtttctgaagcggaacctcttctgcaagtggtggagtgtcgcatttgtcaggaggaagatagtatcaaaaatttagagagtccatgtgcttgcactggcagtctaaagtatgctcataggacttgtgtacaacgatggtgcaatgagaaaggagatgtaacatgtgaaatatgtcatgagccttatgaacatgggtacactgcacctcccagaggccatcctgatgaaactaccattgatataaggatacttgcagtggcacaaaaccacatcatggaagctgaatatgatgattattctgccacaaatgcgagcactgctgccttctgccgctctgctgctcttgttttaatggctctcttattgttgagacacgcactgactctaactgatgaagatgacgacgacacttcagcgatgttttcactttttctgttgcgtgctgctggtttcctgcttccgttctacatcatggcttgggcaatcagtatcttgcagcgccgcagacagagacaggaggcagctgctctagctgcagcggaggtggcattcatcctgcagtcaggccaaggaaggggagtgcatttcaccatcgcaccggactccccggccacaccacagcatgaaccaccacaaccataattacatctatctaggagtggctgtggccgccgccgatcgattatttccatgggttacccaaggatttatggctgtctagtgcagaagcagataatttctgcccaagtttcctgtcattaatgtacttgcgtgttcgtgcgagttggctagtgcattttgcatgtcgtcccgggactaacgggatgtgtatataatatattttgtaacagagacatctgggttctatgatctccacaatgtcaaaaattgaactatcgcctgaattgtcagtcatcaacaacaaaaccttttagtccggaatatattagagttgaattct

SEQ ID NO: 108600 - DNA, 1545 bp, Zea Mays
tgcgttcgcccctccttttaccttctcccattcacgccccgtctctttcgtggccttccttttccggcggccacaagtgggcgagcggcggcgcccttcaccaggtcttcgtcgggcccttcaccggcgacgagcatccaccagaaacgtggagctcagagcattggtgcctctttcctctttcaccaaggattccggtgccttatttcacaagacaaaaaaagtctcaagggtcttgattcttgtatgaactcaagatttatggtggatcttggagctgtgggatgctaagcctggtctagctactagattatgaactctctgctgatctaatagcatttctacaagaattcttttgctggaaggtttattagttatttgcaacaatgaaggaacatctaatgcttaatattgatgacctaagcattcttgagcctaacgaggtcattgggacagtcaagaataaatcatctggggaaaccattgcacatccaccctccatggctcatgccattttagcagtgggagaaagcatggtttctgaagcggaacctcttctgcaagtggtggagtgtcgcatttgtcaggaggaagatagtatcaaaaatttagagagtccatgtgcttgcactggcagtctaaagtatgctcataggacttgtgtacaacgatggtgcaatgagaaaggagatgtaacatgtgaaatatgtcatgagccttatgaacatgggtacactgcacctcccagaggccatcctgatgaaactaccattgatataagtggtgggtggacaattaccggtaccgcatttgacttgcgtgatcctaggatacttgcagtggcacaaaaccacatcatggaagctgaatatgatgattattctgccacaaatgcgagcactgctgccttctgccgctctgctgctcttgttttaatggctctcttattgttgagacacgcactgactctaactgatgaagatgacgacgacacttcagcgatgttttcactttttctgttgcgtgctgctggtttcctgcttccgttctacatcatggcttgggcaatcagtatcttgcagcgccgcagacagagacaggaggcagctgctctagctgcagcggaggtggcattcatcctgcagtcaggccaaggaaggggagtgcatttcaccatcgcaccggactccccggccacaccacagcatgaaccaccacaaccataattacatctatctaggagtggctgtggccgccgccgatcgattatttccatgggttacccaaggatttatggctgtctagtgcagaagcagataatttctgcccaagtttcctgtcattaatgtacttgcgtgttcgtgcgagttggctagtgcattttgcatgtcgtcccgggactaacgggatgtgtatataatatattttgtaacagagacatctgggttctatgatctccacaatgtcaaaaattgaactatcgcctgaattgtcagtcatcaacaacaaaaccttttagtccggaatatattagagttgaattct

SEQ ID NO: 108601 - DNA, 1557 bp, Zea Mays
cgagctcgtcgccgcctgttgcgttcgcccctccttttaccttctcccattcacgccccgtctctttcgtggccttccttttccggcggccacaagtgggcgagcggcggcgcccttcaccaggtcttcgtcgggcccttcaccggcgacgagcatccaccagaaacgtggagctcagagcattggtgcctctttcctctttcaccaaggattccggtgccttatttcacaagacaaaaaaagtctcaagggtcttgattcttgtatgaactcaagatttatggtggatcttggagctgtgggatgctaagcctggtctagctactagattatgaactctctgctgatctaatagcatttctacaagaattcttttgctggaaggtttattagttatttgcaacaatgaaggaacatctaatgcttaatattgatgacctaagcattcttgagcctaacgaggtcattgggacagtcaagaataaatcatctggggaaaccattgcacatccaccctccatggctcatgccattttagcagtgggagaaagcatggtttctgaagcggaacctcttctgcaagtggtggagtgtcgcatttgtcaggaggaagatagtatcaaaaatttagagagtccatgtgcttgcactggcagtctaaagtatgctcataggacttgtgtacaacgatggtgcaatgagaaaggagatgtaacatgtgaaatatgtcatgagccttatgaacatgggtacactgcacctcccagaggccatcctgatgaaactaccattgatataagtggtgggtggacaattaccggtaccgcatttgacttgcgtgatcctaggatacttgcagtggcacaaaaccacatcatggaagctgaatatgatgattattctgccacaaatgcgagcactgctgccttctgccgctctgctgctcttgttttaatggctctcttattgttgagacacgcactgactctaactgatgaagatgacgacgacacttcagcgatgttttcactttttctgttgcgtgctgctggtttcctgcttccgttctacatcatggcttgggcaatcagtatcttgcagcgccgcagacagagacagctgctctagctgcagcggaggtggcattcatcctgcagtcaggccaaggaaggggagtgcatttcaccatcgcaccggactccccggccacaccacagcatgaaccaccacaaccataattacatctatctaggagtggctgtggccgccgccgatcgattatttccatgggttacccaaggatttatggctgtctagtgcagaagcagataatttctgcccaagtttcctgtcattaatgtacttgcgtgttcgtgcgagttggctagtgcattttgcatgtcgtcccgggactaacgggatgtgtatataatatattttgtaacagagacatctgggttctatgatctccacaatgtcaaaaattgaactatcgcctgaattgtcagtcatcaacaacaaaaccttttagtccggaatatattagagttgaattct

SEQ ID NO: 108602 - DNA, 1218 bp, Zea Mays
atgtcgtcggcggcggcggctccccgtgtgcccggggccgcacggaggctgtctcagtctccgaagccgcctggagccagggacaaggagccgcctccgccggcgtcggccaggagaaagaatctgctgccgtcgccggcgtcggccaggggcgccgcggcgtccatgctactgcgccgtgccgcagtcgccggtggtgggcgggggagcagctacgtgcacccgtcgtcctcgctcagcgtctcgtgcgcgtcggaggcgtccaccgagtcattctgcagccgggcgtccacgggccggatcggccgccgccccgcgggcccgcccgcgggggctccccggcggagggcggcgggctctgccggacctccctccgcgcggccggcggcggcggcgtcggcgtccaggaaggtcgctagtagcggcgtcgtgccaggcggcggtgcagcggccactactgttcaccatcaggcggtgccgccggtggtagcaggcggcttgttgaacggagaacccaccgcggcggcgtcagcggggccgccgaggtgcccctggattacccctaacagtgatccctgctacgctgccttccatgaccaagagtggggagctccagtacatgacgacatgaaactgttcgaaatgctgactctgtctggtgcactggctgagatggcatggcctgcgattctcagcaagagggacaccttcagggaagtgttcatgaactttgaccctcagttggtggcaaagctgaacgagaagaagttcttggcgccaagcagccccgctagctccctgctgtcgcaacacaggctgcgcataatcattgaaaacgcacgtgagttgctgaaggtcatcgacgagttcggatcgttcgacagctactgctggagcttcctgagcaacaagccaacggtcggcagataccggcacacgcgggaggtgccgctgcggacggccaaggccgacgccatcagccaggacctgatgcggcgggggttcctcggcgtcgggccgacggtggtctacgccttcatgcaggccgtcggcatggccaatgaccacctcgttacctgctaccgcttcgaggagtgctgcgacctcgaatcttgcgcggcgcctgagggctacggcggtgacaattgcaagaagccgccggcggcggcgagcgaccaggagttgagcatgctctgtgggctggtgcagtgcgtcgcc

SEQ ID NO: 108603 - DNA, 2543 bp, Zea Mays
agcaagcaacgagaagggcggctttggcaggccgaggaggccagagaagagcagcagcagagagagagagagagagagagagagacgagttgggtgcagtgcagagaccagggcggctttgggttcaataatatcccatcactcacacgccacggcatcattggccgcgctccctccttcctcctcctgctctgctcgtctcctccgagtgagtcccaagtgagcgcgccccgctccgctctccgttaactgccgcgttcattcagtcccattatattcaccgaccgcctcttcgttggagcagcagcagcagcaccacaccagcgcggagctgcaaagctcctcacggctgctttctcgtggcgcggtgcatgggagcgcggctctgagaggaaaagaagaggagaaaggcgcgcagggaggatgaagttcatgaagctgggctccaagcccgatgctttccagtccgacggcgccgacgtccgatatgtggcctctgaccttgcaacagatgttgtggtgcatgttcgtgaagtaaagttttacttacacaagtttcccctcatttccaagagcagcaggcttcaaaggttagttcttaaggccaccgaggagacgaccgatgaggtccgcatagatgaccttccagggggagcaaaatcgtttgaaatatgtgccaagttctgctacgggatggtggtcaccctcagtccacacaacgttgtagcagcaagatgcgcagcggagtatcttgaaatgaccgaggagatggagaaggggaatctgatatttaaaatcgaggtcttcatgaactctagcatacttcgcagctggaaggattctatcatcgtcctccagagaacgaaggccctgtcgccgtggtctgaggagctgaaggttgtgggcagatgcatcgatgccatcgcttccaagacatctgtggatcctgccaatgtgacctggtcatacagccataataacagcaagaagggaggagcttgtgctgaaatagtcgagtcggcaggaaaaccatcgatagctcccaaagattggtgggttgaggacttgtgtgaattggatgttgacctgtataggagagtcatggttgctatcaaatccaaggggagaatgtcacctgaactgataggagaggcacttaaggcatatgcggttagatggctgccagactcctacgatgcactggttgccgagggtcacatgaggaggaaccaatgtctggtcgagacactaatatggttgttgccttctgataagagctcaggctgttcttgcaggtttctcttgaaactgctgaaggtggctatactagtgggaggcggggagcacgtgaaggaagaactcatcagaaggatcagcttccagttgcacaaagctactgtgaaggatctcttgctacctgctacctcgccgcctaatgatggtacatatgatgttcggttggtgcatgatcttgtgcagagatttgttgcgagaaccgcgctgtctcataatggcggtttcattgagaagtctgatgagaagatgatcgagctcaactttgagcaagaatcaaccttggcggtgggagagcttgttgatggctacctgtctgaagtagcttcagatcaagccccttcactgcctatgtttgttgaactagcgacagccgtgcccgaagcggctaggccagttcatgacaccctttactatgcagttgatgcatatctcaagcaacacccggacataaataaatccgagaagaagaagatctgcagtctggtggatgtgaagaagctcagcacggacgcgtccatgcacgccacgcaaaacgaccgcctgcctctccggttggtggttcaggtcctcttcttccagcagctgagggccggctcgggcaaagaactcgccctggttgacaacggagaacacgcttgcacacggcctacgcaggatcagtgcgaaccctgcgaaaggcggataccgaagcatccagagtcactagataagcaggtgacgagcctgagcgcgagggagagccgccagcaccaccggaccagcgacagcgagcacaggggcggcggcaggaacagcttcaaagaccagctcgggggcctcctgccgcagtcgcggtccaggaggatcttcgacaagctgtggagcagcaaggggcaaggcgagcatggcggcaaaggctcggagacgtctggcagctcccagagcccaccgttgtcagcaaagcctgcagaagtgaagccctcccctcttcccgctgttaggaacaggaggtactctgtttcatagttttttttggctctcctagtttagagctctgggttaggttgctgtacagaaggaagctaatcactgctgcccatcctttttgtaagcagatcaacctgctgttctcaatgtgatcatccatgctgtagcttttactctagtgtaattccaactgggagcagagattcgccagggcctgcgttcttgaaaatgttattttttgaagtgaagttgtttttgtggcaaagataaaagaaataaca

SEQ ID NO: 108604 - DNA, 150 bp, Zea Mays
atgccggataaggttgtgaaggcatgtgccttatataaatctgaagatgaacaacataaggcatttcaattcatgcattgttggaaaaagttgaggacacaaccaaaatggcttgctaaatttgacaaattggttgctgctaaaacttag

SEQ ID NO: 108605 - DNA, 2613 bp, Zea Mays
gggccgagcacgccacaggcatcatgggctctcagcaagatggagacgccaccgccggtgaggtcgtctacctccacggcgtcctggaagcgacagtgttcgacgccgagcacctccgcaacgccgtccacggccggatcatgcaggccatggagaagatgcaggagtccctgggcgtgcactgcctccagcacagccggctctacgtagacgtcgacgtcggcgcggcgcgggtggcgcgcacccgcgaggtggagttccaccccaccagcccggcctggaaccagtcgttccgcctgcactgcgcctaccccgccgcggcggtcaccttcacggtcaagaatcagcaccttatcggcgcgggcgttctcggcgccggatccgttcccgccgcgcgcgtcgcctccggacagccgctggagtgcttgctcgacctccgcggcggcgagcacgcccacgagacgcacacgccgagcctccgcgtccgcctccagttctttggcgtggagcgcgacccgttctggggcgccggcgtccgcctccctgacttcgcgggcgtcaagcccgcgttcttcccggagcggacaaactgcagcgtcacgctgtaccagaacgcgcacctgtccgacgcgttcgacccgggggtccgcctcgacggcgggctggcgtaccggccggcgcggctctgggaggacctctacgccgccatccgcgacgcgcggcggttcgtgtacgtcgcggggtggtcggtgaacacggagatcacgctggtccgcgacgcgggccgtcgggcggttcccggcgccgagggcgacactctgggcgagctgctgaagcgcaaggccgacgaaggggtggccgtgctggtgatgccgtggcaggacaacacgtcagtgtcgttcctcggcaacgccggcctgatgaagacgcacgacgaggagacccggaggttcttcgagggcacaaacgtaaggtgcttcctctgcccgcgcaacgccgacgcgtcgctgaccatggtgcagcacgtcgagaccagcgccgagttcacgcaccaccagaagaccgtcacgctcgacgcagccacgccgggcaccgacgaacgccacgtcgtcagcttcatcggcggcatagacctctgcgacggccggtacgacgacgagaaccacacgctgttcagggacctcgacaccacgtactcccacgacttcatgcagaacaactacaagcacgcctccctgcggcgcggcggcccgcgggagccgtggcacgatgtgcactgcagattgaaaggccccgtggcgtgggacgtgctcgccaactttgagcagcggtggaggaagcaggcaccggatgacatgcgcggctgcctgctcgatctgagcccggcggcgttccccgaccccgtcagcttcgacggcaacgacccgtggaacgtgcaggtgttccggtccatcgacgacgcgtccgtcgtggggttcccctccgacgcggccgaggccgccgcgatggggctgacgagcggcaaggacgtgactgtggaccgcagcatacagatcggctacgtcgaggccgtccggcgcgcgcagcggttcatctacatcgagaaccagtacttcctcggtggctgcgcgtcgtgggcggcggacagggacgccgggtgcctgaacctggtgcccgtcgagatcgcgctcaaggtcgccgccaagatccggtgcggcgagcggttcgcagtgtacgttgtgacgccgatgtggcccgagggcgtgccggctggtgaggccgtgcaggccatcctgctctggaacaggcgcaccgtggaaatgatgtacggcatcgtcgcgaaggccatcgacgacgccgggttgcgcggccaggcgcacccctgcgactacctcaacttcttctgcctggggaaccgggaggcgccgctccctggcgagtactcgccgccggagacgccggatgaggacacggactactggcgcgcgcaggtgaatcgccgcggccccatctacgtgcacgccaagctcatgatcgtggacgacgagtatgtcatggttggctcggcgaacctgaacgagcgctcgctggccggtaaccgggacagcgagatcgcgcaggggagctaccaaccggcgcacctgaacgggccaggcggccgggcgcgtgggcaagtgtacgggttcaggatgtctctgtggcacgagcatttcatgggacgccatgccagtgaggacgccgacgacggagccttgttcctggagccagagagcttggagtgcgtacgcgccgtgcggcgagcggcggagaggctgtgggattcgtacacgcaggacagggtggaggacctgccggggcacctgctcccgttcccgatcaccgtgtcagagttcggcgaggtggctgacctgccggccgacgggtgcttcccggacacgagggcgccggtgagggggacgaaagcggtgaagctcccggacatcctgacaacctgatatgcttgtttaatttgcttgtatggttacgtcagttgtaagcgcactcccaaagaacgtttctagttcattagttatagcatactaaaacatagtggtgtgccaatagaattaagaa

SEQ ID NO: 108606 - DNA, 765 bp, Zea Mays
atgcacgatcaaaatgctcccacctttcttcagtcaataatctgtgtaatcttgagcgcaaaatataatgtcaccttaaagacaatatatgccttcaagcatgctggggggctgtcgtctcccgaagagtcgcgtgcgatcctcccaaggaaagcttgcacttcctccagttcgtgtggctgggccgacaaggttgggagaggtccccaagttaactcatcgaactccattttagctgacctaatcaagagggccaaggcttttggaaaaccacgctcctgcttgttccgacttcatcaaggcaaggtccctaggccggtggcggcggatttaaaaggggccaacctctcgtcgcgttcaccatcctatgctgagatggctgcccgtccgcctgctccagccagcaggtcgagcgatgctgctcatcgcccattcgtcccaaacagtagactcccagggatggcggtttccaggcagagtgatgggtggcgtgggcgcccccctgtcaaggacgtggatttggagtgcagccgcagcgccatggtccggggcatggaggtcccctgggccggggcagccttagtcgtggagcagcgggccggggtggacgatttccaccacaaccgcggttccaacattacggggaggtgcccacggcaaaccaggagacgatgcctcaggtggccactgctgatggtatgtcttagatgccaagggatgctgagcgtaggcagtcggcagcggctcccccaggtaactctgtga

SEQ ID NO: 108607 - DNA, 3451 bp, Zea Mays
atggccaaccccgccgcgacctcccggcgttcagccctgtcgtcgtcgccgtcgccgccgccgccgctctatctgcttctctgcttgtctctgttgctcgcctctacggtgcagcaaccgcccacctcccaggcccagcaagtgcaggcccccgagccggccttcatgttcggctggctcgggaacaagcgggagtacaccgccggcgacaccgcggccatccgggtcatgtccctggaccaccaggcggccgccgccgtccgcgccacgctgtccttcacgctgtcggtcaacggcaagccaggcaacagcagctacgtcaccgacgtcgtggccaacatcggcgacgacccgtcctcctggaccgtctccttcgtgcccctgcgggccgggaagttcgccgcgctcatcggcgagccgcggttcgtccccgccgagtggccgctcacgttcacggtcgccgcggccggcgtgcacccgtccgcgtcgcgtgcgtcgtggacgttcgccgaccgccgcgtcgtcgcgggctacagggcgttcgtgtccgtcttccctcgggacaccttcggcaacggcatcgcgcgcgggcccgacatgcctggctacttcagggtctcgggctcctaccccaacggctctgccgtggagctcttgaatttttactacaacgggtggattgcagatggacgcatcggcctcgagttcagaacgaatgttgcaggcgacttcttggtgcatgtttacgggaatgatagggagctacgtgattcgcctctaatgctcacagtggatccaggtttccttaacatagcaagaagcacatgcagctggaagcatggaatcaacactttgcagctatcttccaagctggagatgttcatatatcagagagattcctttggaaatattgttcctgaaattcatccattcgatgctcaagtagttgacaaagccacaaatttatccattccaatagtagatctcgcgatggaagcagtaggtgatggagtgcagctcctttcttttaatgtcgtggagcgtggacaatttttcctcaaggtttttgatgctaaactgaacgaaagggtttccaacactgtgcactcgtttgatgtttttgttggatattgtgatggaacaaaaagtttcgcaaatgggtctggtttggcaaactctattgctggctcaacatcatccttttctgttttcttgaaggatttctacaacatcccttctccagttgaaactgcaaagctgcaagtgaagattttgggtaaatatgccacatcatacgtagacccgatcatatcacctgtgagagaaccagatgttgcgatcaatacatctttatcaagggttgtccagtttgaccccaaagtaagactgtcaattgaaaacgaagttgttgttcgacttgttgactcattcatgaacccggtggagtcttccaagtcaaaattgaaatttcggctgacatctgcaagtaccacaacccctgtaactacgactacgagttttgtggcaaaagaatttgtcaacaacagcgatggatcatatactggtcattatgcggcagggggccttggttcatatggcatatgcgttctttttgaggacaaacagctgcctccatgtccattcgaggtcactgttcatgcagatgagtacttttcagatgttaagaatgacactgtttcggtgtgggaggatgaatccgtttccttcgacgtattgtcaaatgaccgcattgcaggaagtaaagcggagatagcgaactcatcttctccacttcacgggtcagtcctgcagttcggccaaacctaccgttacacacctttccaaggattctttgggaatgactcgttctcgtatacagtacgcgatgagcataacaatgtcgtcactgcaacggtcttcatatctgttctctgcagaccacctcagttcgtatctttacccgagaagttgcatgttactgaagatacaatcagcccactttttggtggattcccggggatgaaaatggtgtattcagatacgacagaaaatatatctgtcacggtgacagcacagtccgggagcgtgtcttttgatccagtgagaattaaacttggacagttttcagaagatgtactttcaatcagcagcagaggtggcaaggacctggtgttacaaggaactgtagaagcggtgaatggtgcactagactctctgctgtacactgggaacgaagacttccacggagacgatgtcgtagcgctaaatgcctcgagcagaaacggtgtgcgaagaacccagttcccaacattcgtcgagccaatcaatgacccttcggtgatacttgctccaagttcgattttgctgagtgggaacgaatcatgggaagggtatagaatatttgataagaacagggatacatttgaattttccattgttgaccctgatatttacaatttcccagggaagaagtcctcctttttcctagtgctctcgctagaagtcctggaggggacgctaaccgtgaccttgccgtccagcgtcattgccgcggcgtcgatgaagaccgaagccggtagctgctggcagccggttcagacgtacgtgaccatcgcgaatcgcttcatagtgagaggaaccgccatcaggttccgtgggagcgtccgggactgcaacagggcaatgcggcagctgcgttattaccaaggtccgacgcatggaacgaccttgtccatcgctgtgaacgaccaggcaaaccatggatgctaccctgactgctcggagaggatgacgatgccgctatccaccgccaagaccattcgcctagttccacttccagtcgttgcaggcgccctaggacacgtgagctcaaggcgagctatcttgttcagatggctggcggcggccgggatcgtggtaatgctatgccagggctgtgttctcatgtgctgcctattcaaatgcatgagagctctaaagagcgagcgaagacataaaacctacggtcaaattcgcgcaccggagcagacggccccatttcgtcagaatatgtgtgcttcaacatcgcaacgcgaggacgttggatactcccctgctactgcaactgcgtcccagcttggtgcaagcagatcgagtcttcgccagaggtctccgcgttcatgcaatcaagaaatggaactccagccagtctctggggccgtaaacaatagaaatgaaggtagccgtcctgtttcatacaaggacaaataaggaaggcactttatcgtttaatccgttttccgaatccaaactatcctctgctcatccaaaaacttgtcagatgccaccgaacgagtttccagtgtataatagtgagtgcagcacaacgtgaaaaaataatggggggaaacgagatgtgtctgttctattgacagccattacaatataggaacccaagctaattccctccccg

SEQ ID NO: 108608 - DNA, 3248 bp, Zea Mays
atggccaaccccgccgcgacctcccggcgttcagccctgtcgtcgtcgccgtcgccgccgccgccgctctatctgcttctctgcttgtctctgttgctcgcctctacggtgcagcaaccgcccacctcccaggcccagcaagtgcaggcccccgagccggccttcatgttcggctggctcgggaacaagcgggagtacaccgccggcgacaccgcggccatccgggtcatgtccctggaccaccaggcggccgccgccgtccgcgccacgctgtccttcacgctgtcggtcaacggcaagccaggcaacagcagctacgtcaccgacgtcgtggccaacatcggcgacgacccgtcctcctggaccgtctccttcgtgcccctgcgggccgggaagttcgccgcgctcatcggcgagccgcggttcgtccccgccgagtggccgctcacgttcacggtcgccgcggccggcgtgcacccgtccgcgtcgcgtgcgtcgtggacgttcgccgaccgccgcgtcgtcgcgggctacagggcgttcgtgtccgtcttccctcgggacaccttcggcaacggcatcgcgcgcgggcccgacatgcctggctacttcagggtctcgggctcctaccccaacggctctgccgtggagctcttgaatttttactacaacgggtggattgcagatggacgcatcggcctcgagttcagaacgaatgttgcaggcgacttcttggtgcatgtttacgggaatgatagggagctacgtgattcgcctctaatgctcacagtggatccaggtttccttaacatagcaagaagcacatgcagctggaagcatggaatcaacactttgcagctatcttccaagctggagatgttcatatatcagagagattcctttggaaatattgttcctgaaattcatccattcgatgctcaagtagttgacaaagccacaaatttatccattccaatagtagatctcgcgatggaagcagtaggtgatggagtgcagctcctttcttttaatgtcgtggagcgtggacaatttttcctcaaggtttttgatgctaaactgaacgaaagggtttccaacactgtgcactcgtttgatgtttttgttggatattgtgatggaacaaaaagtttcgcaaatgggtctggtttggcaaactctattgctggctcaacatcatccttttctgttttcttgaaggatttctacaacatcccttctccagttgaaactgcaaagctgcaagtgaagattttgggtaaatatgccacatcatacgtagacccgatcatatcacctgtgagagaaccagatgttgcgatcaatacatctttatcaagggttgtccagtttgaccccaaagtaagactgtcaattgaaaacgaagttgttgttcgacttgttgactcattcatgaacccggtggagtcttccaagtcaaaattgaaatttcggctgacatctgcaagtaccacaacccctgtaactacgactacgagttttgtggcaaaagaatttgtcaacaacagcgatggatcatatactggtcattatgcggcagggggccttggttcatatggcatatgcgttctttttgaggacaaacagctgcctccatgtccattcgaggtcactgttcatgcagatgagtacttttcagatgttaagaatgacactgtttcggtgtgggaggatgaatccgtttccttcgacgtattgtcaaatgaccgcattgcaggaagtaaagcggagatagcgaactcatcttctccacttcacgggtcagtcctgcagttcggccaaacctaccgttacacacctttccaaggattctttgggaatgactcgttctcgtatacagtacgcgatgagcataacaatgtcgtcactgcaacggtcttcatatctgttctctgcagaccacctcagttcgtatctttacccgagaagttgcatgttactgaagatacaatcagcccactttttggtggattcccggggatgaaaatggtgtattcagatacgacagaaaatatatctgtcacggtgacagcacagtccgggagcgtgtcttttgatccagtgagaattaaacttggacagttttcagaagatgtactttcaatcagcagcagaggtggcaaggacctggtgttacaaggaactgtagaagcggtgaatggtgcactagactctctgctgtacactgggaacgaagacttccacggagacgatgtcgtagcgctaaatgcctcgagcagaaacggtgtgcgaagaacccagttcccaacattcgtcgagccaatcaatgacccttcggtgatacttgctccaagttcgattttgctgagtgggaacgaatcatgggaagggtatagaatatttgataagaacagggatacatttgaattttccattgttgaccctgatatttacaatttcccagggaagaagtcctcctttttcctagtgctctcgctagaagtcctggaggggacgctaaccgtgaccttgccgtccagcgtcattgccgcggcgtcgatgaagaccgaagccggtagctgctggcagccggttcagacgtacgtgaccatcgcgaatcgcttcatagtgagaggaaccgccatcaggttccgtgggagcgtccgggactgcaacagggcaatgcggcagctgcgttattaccaaggtccgacgcatggaacgaccttgtccatcgctgtgaacgaccaggcaaaccatggatgctaccctgactgctcggagaggatgacgatgccgctatccaccgccaagaccattcgcctagttccacttccagtcgttgcaggcgccctaggacacgtgagctcaaggcgagctatcttgttcagatggctggcggcggccgggatcgtggtaatgctatgccagggctgtgttctcatgtgctgcctattcaaatgcatgagagctctaaagagcgagcgaagacataaaacctacggtcaaattcgcgcaccggagcagacggccccatttcgtcagaatatgtgtgcttcaacatcgcaacgcgaggacgttggatactcccctgctactgcaactgcgtcccagcttggtgcaagcagatcgagtcttcgccagaggtgagcaatgttattcgctaggaattcacatgtttccgttgcgctgtaatttgcaagtggttgtggttcagtatgcacaagcaaaaccagatagattttttt

SEQ ID NO: 108609 - DNA, 363 bp, Zea Mays
atgcgcacaacaaagacacttgtccaattttcttttaggcctgatatagcacgctttatctcatcctctccagctgaaggatggatcttgcacctgtacggaacacgagtatcaacatgtcccagggcatcaacgaggtcagggatgaaccttgcgttggaatcatcgtcctcgatgatagggatgacctccctccaattgtagttctggacaagtgaagcaatagcttcagcttggcaggagtcgttccatgccgtcctgatgaaatatggggtctggctgggtgaacgggatgggctgtttgcagaaaaggaaatgattggaactgatgccttgttcccaagctctgcaagaaatttagct

SEQ ID NO: 108610 - DNA, 1174 bp, Zea Mays
gccgccctaacgccatccaagccacacggtagagacagagagagagagagagctgccgaccgacctcaccgccgcgccgcgtgacacgagcggccaatagagacggagatgggcagggcgctgtgctgcgacaaggcgacggtgaagaaggggccgtgggccccggaggaggacgccgtgctcaagggccacatcgacgagcacggcgccggcggcaactggatacagctcccccacaaaatcgggttgaacaggtgcggcaagagctgccggctgcggtggctcaactacctccggcccaacatcaggcacggcggcttcacggaggatgaggacaggctgatctgcagcctctacatcagcatcgggagcaggtgggcaacgatcgccgcgcagctgccggggaggacggacaacgacgtcaagaaccactggaacaccaagctcaagcgccgcctgctcggtggtggcggccggcggccgagggcagaggcgcgcctccagctcctcaccaacccaacctggcagcacaactccttcgcctcgtcggcgctcgagaggctgcatgtgagcatgcgtctgcaccggcgccaccaggctcgcctcgacgacaacccgccgccggcggccttcaccttgtacaactacgacagcctcgctgcgccgctgtggccgagcctggctccctcgtcttctccttcaccggcggcgagtgagagctcagagatgctgccgcggcagcagccaccggcaggtgctactcccactgctggttactccgccgggctctggtggactcacatgccaggcagttacagtttcggctacgcaggaggtagagtgcaagaaaacgtggacggcacctgcacaccgccgctttcgactagcaccagagacaccatgacggcagtaggcgtcgagagctcgagctcgacgccaacagcaagctctgcctccgcgacgtttgagagtagtatggacgacgagatcgacatgttactccggcagattcagtgcttcggggagagcggccgccacatcggcgacgaggtggcggtagacggcatagaccactgcttcagagcagtggatcgtcatgagacggcgaacggcagcgttggttcttggagtggattcggtgttccatgactacgtgcaagggtacaaccagtgc

SEQ ID NO: 108611 - DNA, 912 bp, Zea Mays
gctgttgcaaattacgttccctctagtctctactctagccccctctctctctcacacacacacacacccctatcacttggactgtgctagtataggtagccgccgtgtaatggagcaggagctcagccttgagctcaccctcttccacccctcggtctcgccggaaccgccgggctatttcgtctgcacgtactgcgaccgcaagttcttcacctcgcaggctctcggtggccaccagaacgcgcacaagtacgagcgcagcctggccaagcgccggcgggagatcgccaccgccctgcgcgcgcacggggcggccgccaccgccacgggcgtccaggacgccgccgctatgggctctcgcgatgtccccgccaggccccaaggcacgggtagcggtgccgacaagagcgcaacaaggatggataagcacaaggcgcctgctgatgatgccgctcccgcgcctgccgcgtcgagcaacaggaagaggtcgtcggaggagctggacctctccctcaggctttgattggttcctcttcctcgtccacctttaattggcccatttgtttacataattcgatccgtataaatgagtgcaagcatctgtttcgagtgtgtgtggtatctctagatccatcacttcttcctcatgtagtacgttgtgcagttatgttcttccatatgatgatgccacttatcggcaagaactgttgtcgttccatgcatcctgctacccaaagggcgcgtgtggtatttggtattctattcggttgtgccttgagtcctctttgtacgtaattagtttttagcactcaattaaaataataatggaaagggcagcaagagttttgctgcaatgtttggggcttttcaagtgattctaaattgcacttacgccatgtcaaactttgttca

SEQ ID NO: 108612 - DNA, 623 bp, Zea Mays
gctgttgcaaattacgttccctctagtctctactctagccccctctctctctcacacacacacacacccctatcacttggactgtgctagtataggtagccgccgtgtaatggagcaggagctcagccttgagctcaccctcttccacccctcggtctcgccggaaccgccgggctatttcgtctgcacgtactgcgaccgcaagttcttcacctcgcaggctctcggtggccaccagaacgcgcacaagtacgagcgcagcctggccaagcgccggcgggagatcgccaccgccctgcgcgcgcacggggcggccgccaccgccacgggcgtccaggacgccgccgctatgggctctcgcgatgtccccgccaggccccaaggcacgggtagcggtgccgacaagagcgcaacaaggatggataagcacaaggcgcctgctgatgatgccgctcccgcgcctgccgcgtcgagcaacaggaagaggtcgtcggaggagctggacctctccctcaggctttgattggttcctcttcctcgtccacctttaattggcccatttgtttacataatttgatccgtataaatgagtgcaagcatctgtttcgagtgtgtggtatctc

SEQ ID NO: 108613 - DNA, 1890 bp, Zea Mays
cacgaacaagtgctccaatgcaagaaacaaaacaccatgctctgtgctctgtgctctccagtagtagtctcgacgtcgtcgtcgcgtggccgatatataccatttcagcgttccctcccggccggtcatgcacgaacgttccagccaacatctcagcacgaccagtcagtcagtcgcacgcgccggccgctcggcctgcgctttataatccggcacccggcgcgcggggccggggcacgtacgttacgtttcgcttgggttttttttttctcacggaacgatccagacgcgctagccgtaggccgcgcgtagctggcggtgtgcgctgccgctgcgccatgaagaccacttcgtcgcacgggctccacgccgcgtcggcgtcgctctgcacgccgtacctactcctcctaccgctcggcctcctcgccgtgctgctggcgctcccgagcctcggctcctcttacgcgcgctcccaaggcctcggcgtgctctgccgcagcgcggcggcaggcaccgacgttggcggcggcggtgactactcctcctccgtcgcgtcgggcgccggcgacgagaagaaggccgcggtcgccgagacaccgcggccggagctcagcctgctggtgggcgtgctgaccgtgccgggccggcgggagcggcgggacatcctgcggacggcctacgcgctgcagccggcggcgcccgcggcgcgcgtggacgtgcgcttcgtcttctgcagcgtgacggacccggtggaggcggcgctggtggcggtggaggcgcggcgccacggcgacgtgctggtgctggactgcgcggagaacatgaacgacgggaagacgcacgcgtacctgtcctccgtgccgcgcctcttcgcgtccgcgccctacgactacgtcatgaagaccgacgacgacacgtacctgcgcgtggcggcgctggtggcggagctgcgccccaggccccgcgacgacgtctacctgggctacggcttccccgtcggcgacgaccccatgccgttcatgcacggcatgggctacgtcgtgtcctgggacgtggcgcgctgggtgtccgccaacggggacatcctgcgccacaacgacacgcacgggcccgaggacctgctcgtcggcaagtggctcaacatcggcggcaggggcaggaaccgctacgacctcaagcccaggatgtacgacctcaactggttcatggacaacttccgcccggacaccatcgccgtgcacatgctcaaggacaaccgccgatgggcggccacgttcacctacttcaacgtcaccgccgggatccacaccaacagcctgccgtgatcaaccagttatttcagttcgatttttttttccctgaggttgacgttggctgattgtgccaaggtggcgtgcgtaagccacattcttttcttgtatttattatattacatatcgttagtcttctgattggtcatcgtcaacgatcaacgtgccatactgacatgaaactttgctcggccccaccttgagtatttaagccacaatctgtgcttaaatacctcatacctgacagtactccaaactgcatagttctctgttaaactgtttttagcaatgttatttatatctatcatctatatctgtcctttacaattttctctaaaatatttcatcatctacatctattctctctctaacaatgttctcaaaatcacgtactctatacgcaaataactatattagagatattttttatttttaaatttttttcatacgtatttatcatactctaaaatgtattgtacatattttagttttgttaaaccggttgtttaaaatattaaaatggatagagaaccattttaaaaagttatatatatagaagatctagcagcgttctctaaat

SEQ ID NO: 108614 - DNA, 575 bp, Zea Mays
cctctctctctcacgcgacgcgctcgtaacccctactgcgagcggcacccctggtgcaggataatacaaggcttgtcccacatcttgtgttctatcccgcgccaactcatttgggcagggacacgcagcgacaattcactcatcggtccagggaccccccggggtcgaaacaccgacaaatatgttaaaagcatgtcacttatttctctaaatttacaacagacccgccgtgagggcacgaagccgtgagcccgtgaccgccgtgagccccttccgtgattccgttccctccaggtaggctgccatccctccagcgttggcacaggctgtcaggctgccaggctggggcgttgagctgccacctgcacctgccaggctagggcgctgggctgccatccctccaggagtcgatgctgccgacctgtcgctggttaggttagtgatctgaaattctgaagtccatccctccaagctccagtccgcctgtcaggtactcagatttaaactataaatgggaacctacagctgaagagtgggttttgtttattgcaattgaaccaattcttgcatcttta

SEQ ID NO: 108615 - DNA, 2390 bp, Zea Mays
ttgctccatcctctctgccttgggtgatggaaggcagagggcgacggccaggaggaagcggtcaatagaagacaaaattttaccctaaaaaagactagaaaaaacatctccgactatgtcatcgtcggcgttcggcgacttcggtccgctcaccgagcgccgccgcgctgagaaggcgcggcagcagcgcaggcgcatcatgatcgccgtcgggactgtctccataatcgccatactcatcgtcattggctggtacgcggtcatgtacagcgggaagaagtcgtccagcgacggtgaccacaaccacaagtcttcgtcgtcgccggccaaaggcaagtccagcggcggatcggactcggaatcggaagcggaaacggaaacggaaacggaatcggggtcggattcgaagacggatctgaaggctgtgtccaagagcatcaaggcgatgtgctcgcagacagactacacggacgcgtgcgagaagagcctcggcaaggccgcgaacgccagctcgtcgtcgcccaaggacatcatccgcagcgccgtggaggtgatcggcgacgcgatcggccaggcgttcgaccgcgcggacctgatcctgagcaacgacccgctcgtgaagggcgccgtcgccgactgcaaggaggtgttcgcggacgccaaggacgacctcaacagcacgctcatgggcgtcgacgacaaggacggcatcgccaagcagggctaccagctgcgcatctggctcagcgccgtgatcgcgaacatggagacgtgcatcgacgggttccccgatgaagagttcaagaccaaggtgaaggagtcgttcaccgaggggaaggagctcaccagcaacgccctggcgctcatcgagaaggggtcgtcgctcctctccgcactcaagggcgtctcaaaacggcgtttgctggaggaggagcaaggcgcggcggcggcggcgtcgcaagccgggccggcactcgacaaggacggcatcccggagtgggtacccgacggtgagcggagggtgctcaagggcggcggcttcaagaacacactcacgccaaacgtggtggtggcgaaggacggcagcggcaagttcaagaccatcaacgaggcgctctccgccatgccgaagacctacgacggaagatacgtgatccaagtgaaggaaggggtgtacgaggagtacgtgaccatcaccaagactatgaagaacgtgaccctcttaggtgacggctccaagaagtccatcgtcaccggcaagaagagcttcgccgacgggatcacgactttcaagacagcaaccttcactgcgcaaggcgacgggttcatggcaatcgggatggggttccagaacacggccggcgcggagaagcaccaggcggttgcgctgctggtgcagtcggacaagtccatcttcctcaactgcaagatggacgggttccaggacacgctgtacgcgcactccaaggcgcagttctaccgcaactgcatcatctccggcacggtggacttcatcttcggcgacgcggcggcggtgttccagaactgcatcctggtgctgcggcggcccatggacaaccagcagaacatcgtgacggcgcagggccgcgcggacgcgcgcgaggccacggggttcgttctccagaagtgcgaattccaggccgaggccgcgctccgggacgccaagcgcccggccatccgcaactacctgggccggccctggcgcgagtgctcgcgcaccgtcgtcatggagtcggagctcccggacttcatcgacaaggccgggtacctgccctggaacggcgacttcgggctcaagacgctgtggtacgccgagttcggcaacaccgggcccggcgccagcacggcggggcgcgtcagctggccgggcttcaagaaggtgatcagcaaggcggacgcgaccaagttcacggtcgagaacttcctgcacgctcagccctggatcgatcccacaggcacgccggtgaagtacgatctgttcacatgagcgcccggggatcggaccggatgatgcatcttagcttgttcacgatgtgggggatcggaggaggctggcgcggtggcactacgattgttgggtgtcggagtcggaggcaaggcgaccgagagcactgcatacaagagtggaaaacgatactgtccagttttaattcgcgttggtatgtatactggctgctatgtgagttttgtacctgtacatttatactacgactaagtctcagtatagcggattaaattggggattctttttacggaggaagaacaagtacgtgcagtgtatactggcaatttggcatgtttctatgtatcacgcgacactgcaaatgttttgtactttgatttgaaacgtgtctttctaagatgaggac

SEQ ID NO: 108616 - DNA, 697 bp, Zea Mays
tttccaatcatcttttttccttatatattattcctttccatttcaatggttcattcaggtcattgctcacactgccacccatggtgatgggtgacactacgttactcatcgccgctaaatgagtaaactagcgagctaggtagctagccagcggctccattacattattactacagtacatagtttcctcagtagtagacaccgccggcagctgcgttgcaagggcagggacctggctgctgcagctgcaggccgcacatcgccgtcagctgctgcgctacctgggccgccatcagcgccgcgagctcgccctgcggctgctgctgcaggaaggactgcaggaccacaccgtatgtcgcctggtaccggtgcagcggctccacctgcctgatctggtggcagcactgctgctgcagcgcctggcactgtggcgagccgtagggcgtcgccgccgggctgcactggtgcctcaggaactcgacgcactggcccaggaacgggctgccgacgctgccgacgccgcaggatccgaactgctggcacgggcttagctgcggtggttgagtggggtattgccatggctgcggctgctgctgcggcggcagatagaacggaggcggcatatagaacggaggcggtagatgaaacggtggtgtctggcagccacagccgccgcttgtactggaggcggcgctcg

SEQ ID NO: 108617 - DNA, 3733 bp, Zea Mays
gctattaggaacacgcataaacggatcaaacgggccatttgctcccacgatcccacgaacacaggcacccccacccaaatggccaaagccgccgcgatcgcgagctgcaatacacgcgcacacccaccctgcatgctcgaccgctcgagcggcgagcgccaagcagcccaagctggatcacaaccctacgcggccacgccacaccacaggccacaccgtatcgatctgcacagcaaaagcagtagcagcatgccagcatccgatattccgatcccagcaaaaacaattctcacagaaagagattattttgccccctcaccaatcctgctcccaaaactcctaatcttttaatccgcgtttgttttcctccggccgtccctggcttgcagcagtaatgaagcggaggaggaaaaaggagaaaacgaaaaggcgcagggaaaacaacgcaccagcaacagcagagagcaggcgcacatcaactcatctaatctcctcatcaagctgggcgatgcgtgtgagcaggcaggcggttagggcgaaaatctgagaagtccgggagaatctccggactgacctccccgtacccgtcaaaaatccaatcttgacgcctccctggtcgagccgagactgttccaaagtttctgtctctgtgatgcgtgattgtttgccgctgctaatgaggcccgctcgcctgatccccgtggtcgtcgtcgcccgttaatccgcttcagctctggttccggttcttggacagattttttcgcccctcttggttgtggattgcgctgtttttgtttgtctggatctgcataagggcgtgggccgattcgccaccaccacaagcagagacggctcctcttttttattgcctccacagtgggatttgctttcgcgttgttgcagtatctatctatttctgcgaatcatcttctagggctccgtttgttctcgcgcactttacccttcgctgcccccatctcccagcaccgaatccgcccccttcccggccgtcgattgagggcgtgccgctgccgattgcgccgcaaaatcgcgtcttgggtttggtccatgaagaagtggggttgatttctgatttcaaggggaggtttttctcctgcgcggccgccgccagggaggctccggcctgccagccatgtctcaaatccaaagcttctcgcggaacaactgtgtgctccttgtggtgctgtgtgggaagtatgctgagaagcgagcaccagcagcgaagtctgggctggaggcgaagcggccacggccgtcttacccattcccggagctcagctcagctgggcgattggaggtccacacactgtttaatcctacaccagagcagttcctcgaggcgcagcgggtggtgcagcccaacttcttgtacatccagggtcagcagcttgaggatgagaaggagattggctcacttgtgtggggggacgccgatgtctctgatccgcaggcgtttagcactcttatcagcccaccattcccaacgatagtatatctggaagttcctattggtgaaaaacttgcccaagcagttcactcaaaggggatcccatatgtaatttactggagaaattcattctcgtcttatgccgcatctcattttcgccatgcattgatgtcagtagttcaaagttcggtgagccatacttgggatgcttttcagcttgctcacgcatcctttcgtctatattgtgtaagaaacaatcatgtgcaaagtgttaaacttggtcctcgtctccttggggattctccaaaaataaatataagtccacctggcactgaaatggttgatgaagaaggttcatctgaagtgaccccagctataaaaatatatgatgaagaaatcaacatgaagttacttctatgtggagtgtcatgcaccttggatccttgtttattgggctctttagaggacggtctgaatgcacttctgaatattgaaattcgtgggagcaaactgcagaatcgaatcagtgcttctccaccacctcttgaagctgcatctctaccacgtgggatggttactatgcgctgtgatatcactacttgcagctcttcccatgtgtcactcctcgtttctggtagcgcacagacttgtttcgatgaccagcttctagagagccacataaaaaatgaaattattgagaaaagccagttagtccgggctctctcaaatagtgaggacaagttaccatcaagtgagcctttaacttccatgtctacggcttgtggggcttctacctttgaagtttggatgtcccttcctaagtgggcagcacaggttctgaagcatctagcgccagatatatcatacaggagtttggttgcacttggtattggttgtataaatggtactcctgttgcttcatttgagaggcgagatgcagaccgtcttcttttcttttgcacaagccagtgcaaagatttggctaatgaaaacggtccatattttcatctgccaagatggtcagcctcccttaccaaggacagaacaaagttgggttcagaatcaaaacaaaatctgttgggtgcaaatggagttttggaagacaagaagcatatgatggaagggccttcctcattttcagccgtcaaggctaaattaaagcctgcaactatgaggccaattcctcactctcaaaagcaacaaatgcatccttttatgtgtttacctgaaacttcctttcatgaaactagtattgtgaagccaagcttgacagttgcgccaactgtgaagcacaattcagtttcttatgccccaaccacgcacagaaaatcaacatcagggccatctcatactccttcagtcattcagttgaatcctctgcctatgaagaaacatggatgtgataggttgtctatacaagtatgctctgaggaggacttcttgaaggatgtcatgcagtttttaatccagaggggccacaatcgacttgtacctcacggaggactagctgaatttcctgatgcagtccttaacgccaagcgccttgacctttataacctgtacaaagaggtggtgtctagaggtggattttatgtgggtaacggcataaactggaagggtcaagtcttctcaaagatgcgtaaccatactgcaacaaacagaatgactggtgtaggtaacacattaaaaaggcattacgagacatacttgttggaatatgagttagcacatgatgatgtggatggcgaatgctgcttgctttgtcacagtagcgcacctggagattgggtgaactgcggtttatgtggcgaatgggctcactttggttgcgacagacgacaagggctaggcactttcaaggattacgctaagacagacggtttggaatacatctgcccccactgtagcttagcaaactacaagaagccaccactaccaccaaaagtagctaatggtttctcaaatacagcatatgtaccacgaagtgtttaatttcttgtttttttcttttcctttggtcccgtgtttgtgggaagaagtcattagagtagggaatagcctgatggaaagatgggcaaggccttcagggtaggtatcgaaggtatcatctcgctaatttagtggctatgagttttttatagatgtacaattgataacacattcaagttcctaagtagttttttagtggttatgaggtttatatagcatgcatttgaatgcgggtgttacttgtttatattaatctccactgtgtttttaatttcg

SEQ ID NO: 108618 - DNA, 1247 bp, Zea Mays
cgcctaccgctgtgtttctttcctctcctccaagccagcgcgcggcgcaagcctccggcgaccggcacccgcctttcttttatacctccgccgcggcgacccacgccaaccttcgacccccctaacccaaccaaagcccgaactctcgagatcacaggacgcggatccaaaccagaggcccctgcctgccctcccccaccacaccacagcctaccgccatgtcggcgaccgctacggacgaggccgcggtggaggcgcgcctccaggagctgcgggggaggctcgggaagaagcagcatgtgatgacccaaggtggcggtgtttaggcacagatgtattcaacggtttgccgcgttgcaacagtgcttcaaaccagatatacagctccaggattctggcatgttggtctgaacctcttcgttggaatagagaagctggtaagtaatcctgctgaaaaggagcacctgaagacctgcatttcgagggcccgtgagcatcttgatgaaaaggaaaatgaggattctgtgccaagcaacagagaagcagacaccagatttctttttgaagggcaccttactgtgggacaggaacctccacctccagcatggcttgttgcccagaatttaacgagggaattgagcatactaactgaatcctctggtgatcaagatgggagcaacaacagaacagtgcctagagccgaggagattacacctgctataatgaacctcctagaaaccatatcaggcgacagggatctagaaactgctttggaagaatcactgcagggaatcattgagtatccacagagggcacccccggcttcaaaggaagttgtcgccaatcttcctgtcattgctgttaccgaggaagtcatgtctagattgggtagtgagacggagtgtgctgtctgccgcgaaaacttggttgtggatgacaagatgcaggagcttccctgcaagcatctcttccatcctctttgtctgaagccatggctggacgagaacaactcctgccctatctgccggcatgagctgaggacggatgaccatgtgtatgagagcaggaaggagcgtgaaagggaagaggaagaagatagaaggggtgcggcaaatgctgttaggggtggagaattcatttatatctgaactcaacagttccagaatgtaatccctttgatgaacttcgtgattaccatgttgacatatatatatacctagttacttatgcttgagttaaatatcttg

SEQ ID NO: 108619 - DNA, 1292 bp, Zea Mays
cgcctaccgctgtgtttctttcctctcctccaagccagcgcgcggcgcaagcctccggcgaccggcacccgcctttcttttatacctccgccgcggcgacccacgccaaccttcgacccccctaacccaaccaaagcccgaactctcgagatcacaggacgcggatccaaaccagaggcccctgcctgccctcccccaccacaccacagcctaccgccatgtcggcgaccgctacggacgaggccgcggtggaggcgcgcctccaggagctgcgggggaggctcgggaagaagcagcacttcgaggaggccgtaaacgagctcgccgccgccgtccgggaccgctacgccggcgcctctccagccctccgcaaagcgatgtattcaacggtttgccgcgttgcaacagtgcttcaaaccagatatacagctccaggattctggcatgttggtctgaacctcttcgttggaatagagaagctggtaagtaatcctgctgaaaaggagcacctgaagacctgcatttcgagggcccgtgagcatcttgatgaaaaggaaaatgaggattctgtgccaagcaacagagaagcagacaccagatttctttttgaagggcaccttactgtgggacaggaacctccacctccagcatggcttgttgcccagaatttaacgagggaattgagcatactaactgaatcctctggtgatcaagatgggagcaacaacagaacagtgcctagagccgaggagattacacctgctataatgaacctcctagaaaccatatcaggcgacagggatctagaaactgctttggaagaatcactgcagggaatcattgagtatccacagagggcacccccggcttcaaaggaagttgtcgccaatcttcctgtcattgctgttaccgaggaagtcatgtctagattgggtagtgagacggagtgtgctgtctgccgcgaaaacttggttgtggatgacaagatgcaggagcttccctgcaagcatctcttccatcctctttgtctgaagccatggctggacgagaacaactcctgccctatctgccggcatgagctgaggacggatgaccatgtgtatgagagcaggaaggagcgtgaaagggaagaggaagaagatagaaggggtgcggcaaatgctgttaggggtggagaattcatttatatctgaactcaacagttccagaatgtaatccctttgatgaacttcgtgattaccatgttgacatatatatatacctagttacttatgcttgagttaaatatcttg

SEQ ID NO: 108620 - DNA, 363 bp, Zea Mays
atggcggctccgctgaatcttctggcaagggcgcgggcggccggtcaggcgcatccccagcgcgggctcggtcctggcgggcatgctgctccagccagcctcgtcgtgggtgcgcaaccccgacgcgcgtgggctcggctccagcatccccagtcggcggcgtggaggccaggcgcgggcaccacgacgagcgtcacgcgggcgctcggcctccagcgcgggaccgcggcccggcagacgagcgggcccccggcgcggcaccggatgggcatgggcgcgcggccgcccccggcttggtgtgtctcaggcgcgggagcaccggtcacggacgaccacgacggatcgggcgtgcggctcctctag

SEQ ID NO: 108621 - DNA, 534 bp, Zea Mays
atggctgtcaatccattagtgctaaggtctggaagtgggagtgtatgtgcaagcacaggagcatctcctgctgctatatcacccattggcactaatcagtctgcacctagaacacaacaacttgtcggtgctatggttataaaaggtggaagtgtcgaaaatgttgttaatactgaagaagctcgagatgagtccaatggcaccaagaaattaggacgtggtaaagataaagataaagatattccgattggtctaaatactgacattgatgagtttctatatgaagatgaagctgcaaccagtaggggtgaagtaagtgaattagatgtttacatgaaacagaaaccaattaggtgggttgatcctagtggtaaagattgcaagattaaggtaccatcaattattgatgatctcattttagacaacaaggaatgcagctctggaaatgaggaggctcaagctgaaggcctgggtaacgaggaactctatggtgatgacgatgaggacaacgacattgacgacatggagatctaa

SEQ ID NO: 108622 - DNA, 328 bp, Zea Mays
ctatgcaggtacttttcaggggtacatactggatgagacaatggatgctgctgctaaaggaagaagaaaaattacaagtaaagcagggatgcaggctgcttgaagttgcaatgatgcaaatctttgctaaaaatggttggaactttagtaatcgattgtgcttgtaatctgtaatgttgtggtggcatctatgtttcgagtatagttttgttcctgtttgaacccagtatttttgatgtattggacagctatatgcccagtatttttgatgtattgaacagctatatgcatattgtcatgcagaggctggaataatcaagttattccc

SEQ ID NO: 108623 - DNA, 838 bp, Zea Mays
gagtcatcacgccgtctagaatagaataaggactgtctgtcagtgcgtgtgcgtgcatctcaacgaaacatttggaatacgaaagctatcgggttgcatacaaaataccaaggcagcgccatcagctcccactctgaacagccttgcccattccatggctaaggtctaaccaaaagaatagaagataaaaaaaaaaccatggctcggtgctcaccaactgcagtgcgcggcgccccaaccgcggcggcgaaggcgagcctcgccggctccggcagaggaagctcctggacctcgtcgccggccccgtccacgtcgtcatcctctccgaggccgcgctcgaactcgcggaagtcggcctcgaagtcctcctcccggggcgctcccttcttgccgggccccggccacagcaggtccgccgtcgcacgccgctgctgtttcttcttggccgccgctgccgccgccggcaccccggacggcgggatgaaacccgagaggatggcgccgccgcacatcgccgcagcggggtgtggtggcggatggattgttggttgggtgaaccgagggtggatggcacgagcggcacagtgacgagctggggaaaggaggccgcgcaagatctttgcggttgcggctcggctttggctgccccactgggtgagcgagggagggagggaaggagtggggggaggcgaggttggggagatggtagctggccacgctacttataattggaagcgacgctgcgctgagccgctgacgcactactggacagcgacgccaaaggagatagtagctgcagtggggcccgcgccactcgcctccccttccgcctcgcgtg

SEQ ID NO: 108624 - DNA, 822 bp, Zea Mays
atggtcaagctccgcgtcacggcgcccggaggcggcgcggagcccgccgccgccgccgccgccaccgccgccgacgacgacgacgagggggagaaggaggcgtacttgcggagcttgccgaggccggagtccgggcgcggcccggccaccgtgtcgtcccacagctggttcaggagccccatatatgcaccggaccaagtggagcacgtcgagttcctcaacactcaatcccgttcacagaggaagacaaagcgcccgcaaatccgactccgccgaggctcttcgtcgccgcatccgttcttttccactcagacccgcgacggcatcctcagatccggagttaatcgcttcgattcgtcgtgttgcgacccagatcttacgttcctcaggtgttctgatcctatgttaccaattaatgcacatttcatcatggcatcctcaacagaagaaaacatgaaggctttgctcaaagtccttgttgactgtgccgaggatgccaccaaatcactgggtggtttagtagatcatgctttagaccacatgcatgatgaagagatcgtagctagaaccttgtttgccatcaaagaaagactagaattgctacagcaagatgccttagaggcaaaagtgcaagcatttccagaaattgctaagtaccagggggatgacataagtcttgaacctacaactccgtcgacccctcaaacagttactgatcgatcttttgatgaagacgagttgtactatcccgaagtcagtgatgagtggtacttcatcgattctgataggtctacgcgcaatagctactggaatatttattag

SEQ ID NO: 108625 - DNA, 720 bp, Zea Mays
gagctcctcgacatggtgcctgcggaggccatagccattgcggtccgcctctactcgctctccgcggctgcggcggccgccggctcgctcctcgcctggctcgtcgccgccgccgccggcctctggcggcgcatccgcgctgccagtgcttcttcccacaacaagcgcggctccagcgttcgcgccgttattggcaacgatgatcgggagccacagccgcctctgccgtctcgggctgccatcactgaggagccgcggcggccggtcgctctcgctccggccgagctgctgtccccgtcgtccgtgagcgagctgacgaacacgccatcgtccaaggtccggttcactgcgcactactacagcggcgcattaggagacgacgacgacgacggaggaggagtggtggacggcgtgaggaaatgcgcggacacggatgactgcgaggtggagattatggttctcagaaggtcggtgtcagagccagcgagaagaagaagagcgaggaccttgttggccgcggcggcggcgccgtgggaggagagggagacgatggcggtgaggcggaggagcgacctgggctgctggtaccgccacgtcgacatggcggcgctcgacggcagcgtcgtgaggctgtgggacggcggcgtcgccggccgcgagagggaggacgaagagagggcgcaggattggaattgcaacgactgtcgttataggagttag

SEQ ID NO: 108626 - DNA, 1274 bp, Zea Mays
tcaaaacggcccgaccccgagccactcctatatttccaattccaccccaccaacgcccacactccaaagcccgcgtgctgcctgcgcggcaaacctggagtaactgagcctgcaccgcggcaggcggtacgacgcctacatgcgccggcgcgacgccaggcgcgtggccgtgtcggccgagcagcggcagcaccaaccggcgaatggtaaggttcaccaacctcgaggcgtgcgcgccacgccgatgagcccgcgcgcgctcaggtgcgcgggtcgggacacgcacacgcaacaagacgcggccgtgtcgaccccgagcaccccgagaagcgacggcgcgacgctgccgaggagcaggacggtgggcggcggcgcggaggggagcccggcgaggccgtcgcactcgcaccaccagaggcggaacagcctcggcgtcgtgcccgccgagttcggcgagtgcgccacgccgaggccgttcctgaagcgcggcacgggcacgggcggcgcgggcgcggcggcgccggccaggctgcggacggcgcgggtgcacgacctgctgccggccatcgacgtggccatgacgaccccgaggccgccgctgccccaggagctcggcgactcccacgcccacgcccacgcgccgcgccacgtgcggtcggtgtcggagctgccgttcgacgcggcggcgctggcctcgccgtcgccacaggcgcggccgaggaagcggtggggcagccctgagaggccgacggcgacgctctcggtctcagcgacggccgattcgcacagggagctgtccaaggggctcaagaagctgctgagcttcgtgaggaagggcggcaggagcggcggcggcggcggcgaccagcctttgccggcgcccagcccgcgcgggagtgggaagcccgtgagcaaggggtggtctggttgctcccaggtcggcgtcccgttcgaccgcgcaagactggacgggcaccggttccccatgccgcggccagttggcatctctgggtgaggccctgcgcggcacggcgccgaacagtgacacgcgccatgagaactgccctgattgctccgcgttcaggtcaggtggttgtggttcgacggcccagagcgtcgctcgctgcctcactgcacttccaaggccccaaactagtgagaagcttttgctgttacctttgcactacaaaggtttagagacgaattctgtagctttaatttccatttcactacaaggtttgagttcccatctgaatgtctggattatgcttgcg

SEQ ID NO: 108627 - DNA, 1770 bp, Zea Mays
gaattcgttcgtcgcttcaatatcttcggcttggctacagttttctcttcgaaaaccatttgatgaaagggatggacgctggacgagctaacttccaaggactaatacagtgatggcggaagcattcctgatggtgccacccagagttctgacgtggaaatccagagatacagggtgcatagatgcgcacgcagacacccgttggcgccgtggaggtgctggttgacaaatcgtcagccaagattctgtactggaatgggtaccggcgatagcgtgtattgccgaaaccatgtgaaccgtgatttgtgactgtcaagccaagcgagtgaacttgcatgtcattatgagcccatttgtacacgaacttgtccagggtttttctagtgatggtgaaaagtcctgccatgagtgtcacctttctttaaaaaaaaacgtcgatcaaactggcaaaatccgtaggagacccacttgtcagctaaccaccccttgcagtcatccgcaccagggcaccaccaccactccagatgttctagaactatcaggcggcttcctccccctaaccgcaacagttaaaacgccgtagcaactagcaacgctaccacagtgcgcgcttgaagatagtgtcatttgcagttcccggtagcagccatggcgtcggtgcagctgtctgggccgcgggtggtggcggctgcgaaaccggctgcgttgggcgggctcctcctgacgccgtcccttgcggtgccaaaggggcggagggccaggggcctcgtggtgagggccgccacggtcgtgtcacctaagtatacgtccataaaaccattgggagacagagtacttgtgaagatcaaaacctctgaggctaaatctgatggaggtattttacttccagtatcagttcagacaagaccacaaggaggggagattgttgcggttggagaagggagaagttttggaagtaaccgcattgagatcagtgttccggttggtgcacaagttgtctactcgaaatatgcaggcacagaattgaaattcaatgacgccgaccatctcattttgaaagaagatgacataattggtattcttgacagtgatgatgtgaaggatatgaaaccactgaatgatcgcattctgattaaggttgctgaagctgaagaacgaactgctggtggtttgctattgacgcaggcaactaaggagaaaccttctgttggatcagtggtagccgttggcccagggccgttgggcgaggacggcagcaggaatcccctgtcgatcactcctggaagcaacgtgatgtattccaagtatgcggggagtgagttcaagggcgaggacggtgagtacatcgtgctcagggcgtctgacgtgatggctgttctttcctgatccccaaaccatacagcgccaggtgcgcgataggaagttttgatgttgaggccgaaccttatcttttatttgctcttgtttggaattggtggaggcttttgaactgtaatctggtgcgaattataaggaaaataagccgagttgtgtagacttgagacaggactgtgctgtgctgtttggctggtaggtgagctaaccagtgttcagctggtgggtgagctgaccagcacgtcgggttcggctgttcttcctgatgtcagcgttgtacgccaaggttggccaacggcatcaatattactaatagcatctaggctaccgtttgagtttttcatggattaatgacaacacaagatgtgactattatatacttcctctgttttttta

SEQ ID NO: 108628 - DNA, 1751 bp, Zea Mays
gaattcgttcgtcgcttcaatatcttcggcttggctacagttttctcttcgaaaaccatttgatgaaagggatggacgctggacgagctaacttccaaggactaatacagtgatggcggaagcattcctgatggtgccacccagagttctgacgtggaaatccagagatacagggtgcatagatgcgcacgcagacacccgttggcgccgtggaggtgctggttgacaaatcgtcagccaagattctgtactggaatgggtaccggcgatagcgtgtattgccgaaaccatgtgaaccgtgatttgtgactgtcaagccaagcgagtgaacttgcatgtcattatgagcccatttgtacacgaacttgtccagggtttttctagtgatggtgaaaagtcctgccatgagtgtcacctttctttaaaaaaaaacgtcgatcaaactggcaaaatccgtaggagacccacttgtcagctaaccaccccttgcagtcatccgcaccagggcaccaccaccactccagatgttctagaactatcaggcggcttcctccccctaaccgcaacagttaaaacgccgtagcaactagcaacgctaccacagtgcgcgcttgaagataggttaacaccgcttcttatcctcagttccaaccccagctcctcagttctcgtcatcgtcctcgcgctcagtgtcatttgcagttcccggtagcagccatggcgtcggtgcagctgtctgggccgcgggtggtggcggctgcgaaaccggctgcgttgggcgggctcctcctgacgccgtcccttgcggtgccaaaggggcggagggccaggggcctcgtggtgagggccgccacggtcgtgtcacctaagtatcagttcagacaagaccacaaggaggggagattgttgcggttggagaagggagaagttttggaagtaaccgcattgagatcagtgttccggttggtgcacaagttgtctactcgaaatatgcaggcacagaattgaaattcaatgacgccgaccatctcattttgaaagaagatgacataattggtattcttgacagtgatgatgtgaaggatatgaaaccactgaatgatcgcattctgattaaggttgctgaagctgaagaacgaactgctggtggtttgctattgacgcaggcaactaaggagaaaccttctgttggatcagtggtagccgttggcccagggccgttgggcgaggacggcagcaggaatcccctgtcgatcactcctggaagcaacgtgatgtattccaagtatgcggggagtgagttcaagggcgaggacggtgagtacatcgtgctcagggcgtctgacgtgatggctgttctttcctgatccccaaaccatacagcgccaggtgcgcgataggaagttttgatgttgaggccgaaccttatcttttatttgctcttgtttggaattggtggaggcttttgaactgtaatctggtgcgaattataaggaaaataagccgagttgtgtagacttgagacaggactgtgctgtgctgtttggctggtaggtgagctaaccagtgttcagctggtgggtgagctgaccagcacgtcgggttcggctgttcttcctgatgtcagcgttgtacgccaaggttggccaacggcatcaatattactaatagcatctaggctaccgtttgagtttttcatggattaatgacaacacaagatgtgactattatatacttcctctgttttttta

SEQ ID NO: 108629 - DNA, 1828 bp, Zea Mays
gaattcgttcgtcgcttcaatatcttcggcttggctacagttttctcttcgaaaaccatttgatgaaagggatggacgctggacgagctaacttccaaggactaatacagtgatggcggaagcattcctgatggtgccacccagagttctgacgtggaaatccagagatacagggtgcatagatgcgcacgcagacacccgttggcgccgtggaggtgctggttgacaaatcgtcagccaagattctgtactggaatgggtaccggcgatagcgtgtattgccgaaaccatgtgaaccgtgatttgtgactgtcaagccaagcgagtgaacttgcatgtcattatgagcccatttgtacacgaacttgtccagggtttttctagtgatggtgaaaagtcctgccatgagtgtcacctttctttaaaaaaaaacgtcgatcaaactggcaaaatccgtaggagacccacttgtcagctaaccaccccttgcagtcatccgcaccagggcaccaccaccactccagatgttctagaactatcaggcggcttcctccccctaaccgcaacagttaaaacgccgtagcaactagcaacgctaccacagtgcgcgcttgaagataggttaacaccgcttcttatcctcagttccaaccccagctcctcagttctcgtcatcgtcctcgcgctcagtgtcatttgcagttcccggtagcagccatggcgtcggtgcagctgtctgggccgcgggtggtggcggctgcgaaaccggctgcgttgggcgggctcctcctgacgccgtcccttgcggtgccaaaggggcggagggccaggggcctcgtggtgagggccgccacggtcgtgtcacctaagtatacgtccataaaaccattgggagacagagtacttgtgaagatcaaaacctctgaggctaaatctgatggaggtattttacttccagtatcagttcagacaagaccacaaggaggggagattgttgcggttggagaagggagaagttttggaagtaaccgcattgagatcagtgttccggttggtgcacaagttgtctactcgaaatatgcaggcacagaattgaaattcaatgacgccgaccatctcattttgaaagaagatgacataattggtattcttgacagtgatgatgtgaaggatatgaaaccactgaatgatcgcattctgattaaggttgctgaagctgaagaacgaactgctggtggtttgctattgacgcaggcaactaaggagaaaccttctgttggatcagtggtagccgttggcccagggccgttgggcgaggacggcagcaggaatcccctgtcgatcactcctggaagcaacgtgatgtattccaagtatgcggggagtgagttcaagggcgaggacggtgagtacatcgtgctcagggcgtctgacgtgatggctgttctttcctgatccccaaaccatacagcgccaggtgcgcgataggaagttttgatgttgaggccgaaccttatcttttatttgctcttgtttggaattggtggaggcttttgaactgtaatctggtgcgaattataaggaaaataagccgagttgtgtagacttgagacaggactgtgctgtgctgtttggctggtaggtgagctaaccagtgttcagctggtgggtgagctgaccagcacgtcgggttcggctgttcttcctgatgtcagcgttgtacgccaaggttggccaacggcatcaatattactaatagcatctaggctaccgtttgagtttttcatggattaatgacaacacaagatgtgactattatatacttcct

SEQ ID NO: 108630 - DNA, 2161 bp, Zea Mays
gaattcgttcgtcgcttcaatatcttcggcttggctacagttttctcttcgaaaaccatttgatgaaagggatggacgctggacgagctaacttccaaggactaatacagtgatggcggaagcattcctgatggtgccacccagagttctgacgtggaaatccagagatacagggtgcatagatgcgcacgcagacacccgttggcgccgtggaggtgctggttgacaaatcgtcagccaagattctgtactggaatgggtaccggcgatagcgtgtattgccgaaaccatgtgaaccgtgatttgtgactgtcaagccaagcgagtgaacttgcatgtcattatgagcccatttgtacacgaacttgtccagggtttttctagtgatggtgaaaagtcctgccatgagtgtcacctttctttaaaaaaaaacgtcgatcaaactggcaaaatccgtaggagacccacttgtcagctaaccaccccttgcagtcatccgcaccagggcaccaccaccactccagatgttctagaactatcaggcggcttcctccccctaaccgcaacagttaaaacgccgtagcaactagcaacgctaccacagtgcgcgcttgaagataggttaacaccgcttcttatcctcagttccaaccccagctcctcagttctcgtcatcgtcctcgcgctcagtgtcatttgcagttcccggtagcagccatggcgtcggtgcagctgtctgggccgcgggtggtggcggctgcgaaaccggctgcgttgggcgggctcctcctgacgccgtcccttgcggtgccaaaggggcggagggccaggggcctcgtggtgagggccgccacggtcgtgtcacctaagtatacgtccataaaaccattgggagacagagtacttgtgaagatcaaaacctctgaggctaaatctgatggaggtattttacttccagtatcagttcagacaagaccacaaggaggggagattgttgcggttggagaagggagaagttttggaagtaaccgcattgagatcagtgttccggtatttacttttacacagctaactgagctaagtttattttgtataagcagacatgtctgtaattctatacttgtgtatttaaagttttaaacatttacgtcaacgaactaaaagtgctattgctgctgcactgccacccatgacaaaaaggtaagaaagtagctgtatgttttctatgctgagattttttctgtatccaaaatcttcttctaggtttgaacttctaattttggaagacaattttcctcatggccttgtcaccagacaccagtaacatgtttttttccgttgtaacacacttgtactgtcctaagccaattgagtaatttgacatcgaattataatcttgtacaggttggtgcacaagttgtctactcgaaatatgcaggcacagaattgaaattcaatgacgccgaccatctcattttgaaagaagatgacataattggtattcttgacagtgatgatgtgaaggatatgaaaccactgaatgatcgcattctgattaaggttgctgaagctgaagaacgaactgctggtggtttgctattgacgcaggcaactaaggagaaaccttctgttggatcagtggtagccgttggcccagggccgttgggcgaggacggcagcaggaatcccctgtcgatcactcctggaagcaacgtgatgtattccaagtatgcggggagtgagttcaagggcgaggacggtgagtacatcgtgctcagggcgtctgacgtgatggctgttctttcctgatccccaaaccatacagcgccaggtgcgcgataggaagttttgatgttgaggccgaaccttatcttttatttgctcttgtttggaattggtggaggcttttgaactgtaatctggtgcgaattataaggaaaataagccgagttgtgtagacttgagacaggactgtgctgtgctgtttggctggtaggtgagctaaccagtgttcagctggtgggtgagctgaccagcacgtcgggttcggctgttcttcctgatgtcagcgttgtacgccaaggttggccaacggcatcaatattactaatagcatctaggctaccgtttgagtttttcatggattaatgacaacacaaga

SEQ ID NO: 108631 - DNA, 2092 bp, Zea Mays
gaattcgttcgtcgcttcaatatcttcggcttggctacagttttctcttcgaaaaccatttgatgaaagggatggacgctggacgagctaacttccaaggactaatacagtgatggcggaagcattcctgatggtgccacccagagttctgacgtggaaatccagagatacagggtgcatagatgcgcacgcagacacccgttggcgccgtggaggtgctggttgacaaatcgtcagccaagattctgtactggaatgggtaccggcgatagcgtgtattgccgaaaccatgtgaaccgtgatttgtgactgtcaagccaagcgagtgaacttgcatgtcattatgagcccatttgtacacgaacttgtccagggtttttctagtgatggtgaaaagtcctgccatgagtgtcacctttctttaaaaaaaaacgtcgatcaaactggcaaaatccgtaggagacccacttgtcagctaaccaccccttgcagtcatccgcaccagggcaccaccaccactccagatgttctagaactatcaggcggcttcctccccctaaccgcaacagttaaaacgccgtagcaactagcaacgctaccacagtgcgcgcttgaagatagtgtcatttgcagttcccggtagcagccatggcgtcggtgcagctgtctgggccgcgggtggtggcggctgcgaaaccggctgcgttgggcgggctcctcctgacgccgtcccttgcggtgccaaaggggcggagggccaggggcctcgtggtgagggccgccacggtcgtgtcacctaagtatacgtccataaaaccattgggagacagagtacttgtgaagatcaaaacctctgaggctaaatctgatggaggtattttacttccagtatcagttcagacaagaccacaaggaggggagattgttgcggttggagaagggagaagttttggaagtaaccgcattgagatcagtgttccggtatttacttttacacagctaactgagctaagtttattttgtataagcagacatgtctgtaattctatacttgtgtatttaaagttttaaacatttacgtcaacgaactaaaagtgctattgctgctgcactgccacccatgacaaaaaggtaagaaagtagctgtatgttttctatgctgagattttttctgtatccaaaatcttcttctaggtttgaacttctaattttggaagacaattttcctcatggccttgtcaccagacaccagtaacatgtttttttccgttgtaacacacttgtactgtcctaagccaattgagtaatttgacatcgaattataatcttgtacaggttggtgcacaagttgtctactcgaaatatgcaggcacagaattgaaattcaatgacgccgaccatctcattttgaaagaagatgacataattggtattcttgacagtgatgatgtgaaggatatgaaaccactgaatgatcgcattctgattaaggttgctgaagctgaagaacgaactgctggtggtttgctattgacgcaggcaactaaggagaaaccttctgttggatcagtggtagccgttggcccagggccgttgggcgaggacggcagcaggaatcccctgtcgatcactcctggaagcaacgtgatgtattccaagtatgcggggagtgagttcaagggcgaggacggtgagtacatcgtgctcagggcgtctgacgtgatggctgttctttcctgatccccaaaccatacagcgccaggtgcgcgataggaagttttgatgttgaggccgaaccttatcttttatttgctcttgtttggaattggtggaggcttttgaactgtaatctggtgcgaattataaggaaaataagccgagttgtgtagacttgagacaggactgtgctgtgctgtttggctggtaggtgagctaaccagtgttcagctggtgggtgagctgaccagcacgtcgggttcggctgttcttcctgatgtcagcgttgtacgccaaggttggccaacggcatcaatattactaatagcatctaggctaccgtttgagtttttcatggattaatgacaacacaaga

SEQ ID NO: 108632 - DNA, 3525 bp, Zea Mays
atgccggcgaatggcaagctctcggcgaagccctccccctcgccgatggttgctcccgcctcgcgccccaaatttacagctgttacctttctcggtgactgcgacgacgacgatgacttccaacctcctcgcccccgccccttgaagccttgcattggcgccgccgcacttcggttccgtaagaagctcaaggctccatcctccgggaaggagaatagttccgccgccggtggtgccgttactgtggtgggggtcgcttcgacggccgtgaaggatgccgaaaccctagccgccggctctagggttagtggcgacgttcccaaaacgaagagacgaaagaccggtgaaagttgcggcctgtcgaggtacggatctgatagcactaaactaagctgtaaaccgaagatagaattggatagatacggatatggcaaagggtgctgcagtttcttgcccagtgcgatagactcgacggttttggcgctcggtgcggtatgtgattttggagttaggcgttgtgatgaggctcaaatagctgtctccaggcattgtacctcagttcttgaggcggggcacgccacagaagagctgacaccgacaggctctgggtgtgatccacccaaaacggagaagaagccgggcagttctgaagctgtggagggacatcacgactccaggttgattgaaccgaggcttgttgaatcagatgcaaacctcgagtttgtaactgggattcttggctcactgactgataaacaggacacgaagaaagcaaacggggtggtatttggatgtggtgttggatttcagaatgggaactatcacttggattctctacagccagagcttctaacgtcgaactcaaagtatgattctagagtttgtgttagcaatgaaatccaagagcctggtttgggagcctgtaacttgatttcacaggagaggaaagtagcagctggacattctgcatgtgcaacccctgaaaatgtgactgcagagaataaatcaagtgcacctgaggcttgtaaggggcaatgccactccgattcatctgcatcaaagcttccagaatcccatatgatccatgactttgaagttgatggttgcgataattttgagattgggacccagctcagtgagctcattaacttgtgtatgaaggattccatagagggacaatcaaactttggtgcagctcccatggaacagaacactttagactctaagagactcagttcagactatgaagcgaaatgccctctatgtggatcggatatttctgatttaagcgaggagctccggcagctgcatactaacaattgccttgacgaaccagctaagggcaagcatggtgtagtggtgagagctgtctcactagttccctcggtcgtgggtttgaagcagtctctccgcatttgtggaaggaaggaatctagtcccaaccataaaaaagagcccagtgttggacaaaatgttgaaactggacgtgttgtcgaatggttaagaaaccttgggttatccaagtatgaggaagtttttatcagagaagaagttgactgggaaaccttgcagtggctcactgaagaggacctgttgggtattgggatcagctctcttggaccaagaaagaaaattatccatgctctaggagagttactgaagaaacatgatgatcccagtgaaatggaagctgtgttaaattcaggaaatactaagaagactaaacttccgatgaatggtaataaattaattaccgaatactttcaatgttcctcatttgatcaaagacaaagaagggtatgcaaagcaaacaagccatctaatctgaacgagaagaaaatttctagtgctaaagtacccactagaagaactgctggtaaaggaaagattaaggatacgcctctttggtgttgcatcccagggaccccttttcgagtggatgcatttcgctacttgagaggtgattgttctcactggtttctcacacactttcatgtggatcggggtgctgcggtcgccgacatggtagcaacagcgaggttcggtgccaggggctggtacaccggtcctggtatggttgcccttgtcgtcgtcagccatgcagctggtgatgaagatgaccctcagggcgcaatgcaactagtaggcatcgtcgcccacgaagatgtaggtgctggagcgggcgacgacggccaggccgctggtgctggcgtgctgctggagagcgccaagctgattgtgttgagcctcgcaaatagatcgtcgaaggttccagtagtagaggtagccggtgatgccgtcgacgaggctgcgccacggcttgggcagcgacgggccttccggcgtgtaccatggggctgcgcgcccggacgagccactaccgcccgacattgggtcgggtctaggcaacccgcagtggtgcccacatcgtggtgcggaggtggtgtcccggcggcgcggggcagaggtgtcccgaaggcgcggagggtgacgcaacctgccggcatggaggtggaggcggcggcggcggacccagagcggaactatcttgcaaaatatgcactgtacaaaggtccttctttgtgggatctggccaccacccacaattccatcctgggtcacgattatcaaggcttgactagaagcttttgtcatgggaagatatactgttcgtcaattacagcgagtcttgtgcatcataagattggtatcccatgggatagattgcatgtattgaccctaaatgaaaagctcaatattgctggagttaatttgatatgttttgatgccaaccattgcccaggatcaatcattattctctttgagcctccaaatggtaaagctgttttgcacactggagatttccgtttttcttccaagatggccaacaatcctgttttgcagtcttcctgtgtccacactctaatacttgacacaacctattgcaatccacggtatgatttcccaagtcaagaaatcgtaatacagttcgtcattgaggccatccaagcagaagctttcaatccaaaaacattgtttttgattggaagctacacaattggaaaagaaagattgtttatggaggttgctcgtttgcttcagaagaaagtatatgttggagctgcaaagctgcaaatactgaaacatttagagcttcctcaggagattatgcactggtttacagccaatgaagcagaaagtcacatacatgttgtccccatgtggactctagcaagcttcaagcggatgaaatatctatcgaatcaatatgctggccggtatgaccttatagtggcgttttgtcctactggttgggcatttggcaaaggtaggaaaaagacaccaggcaaaaggtggcaacaaggatcaatcattagatatgaagtgccctacagtgaacacagcagtttcacggaactgcagcagtttgtcaagttcatatcaccagagcacataatccctagcgtaaacaacgacggccctgagagtgcaaacgctatgcttgcccagctgttaaacgagtag

SEQ ID NO: 108633 - DNA, 1833 bp, Zea Mays
cccgtcgctgccatcgtcgcgtcctctcatcgtccccggcgcgcgcgcccctcctcccagatcacgtgtcgctaccacgccttcccgtcggggcgtccctctcgctcgcctgcccctcctcctcctcctcctcctcctcctccgtccgatcacgtcgccaccgcggcccctcggacccgtcgctctcccacattcccgttccccgaggaccaccatcctccgttccggcggcagccacgtttttcatgcgaggcgaaaggcggcctagtcgcaaaggccattttctccgtggccccccccacactcgccgtttccttggcacacgcgctattattaataaaggcgcaaaggccattcgcgaggcgaggggaggagaagtgtactacgcgagagcttgccggaggctctggatccctgtgataataataaactgatataagcagaggaagcggggaggaagctgcgagttggagggggccgggagaggcgtctctggttattgcttgtccctgcttcccggtgagctgctgggagtggacgggccgggaaggagacgagaagataagggcgccgcgcgcggccatggctggaagtgcgccggcgacggcgatggacaagaccagctttgccaccacgtgcagcctgctgagccagtacgtcaaggagaagaagggcggcctgctgcagggccttggtgccctcgccatggcgccggcagctggagaaggagctttccggccgccgaccaccatgaacttgctgtcagctctcgacgacgcgccggccgaggagcgcagcgagaaggccaccgccggggagccaaaacaccaggacaaatgcaccggcggaaatccaagggaggaggcagccggagaggaggaggaggaggcgcagcagctgaccatcttctacggcggcagagtggtcgtcttcgacatgttcccctccgccaaggtcgaggacctgctgcagatcatgagccctggcggcgacggcgtggacagggcaggcggtgccactgtccctacgcggagcctgcataggccttcacacgacagcctctctgatctgccgattgcgaggaggaattcgctccacaggtttcttgagaagagaaaggacaggataactgcaaaggcgccataccaacaagtcaacagctctgttgttggcgtcgaggcgtccaagcaggcggctggagctggggtggaaaaaccttggctggggctgggccaagaagcgacaacagcgaagctggagatgtgatgaatgttgcccgacaagaaggtgcagtgcacgagattcacggatggtgcaggtcgtagcttcaggttaaggtgaaggataacttaccgtcggatactctactcactttactgctctactactactactgctggtgacgaagttagcaagaaacgttcttctgctaccggtgggtcggtcggtcagccgttcgttggcgagattgtttgctgctggagacggacgtgctcgcagcagtttcgctggtccgtgaccgcgccatatgttgccacgaatggttggttgttcggtacgttgaggaacgatgtgtatgtagtgtgcacgtttccggtgcatcttgttctcctcaagcctgtcctgtatgtttacccccctgcaccccctcctccctctttgtagagagagggtctgtatgttcagtggaagatggttgttctatttgatttttattttatggacatgtatgctcggtgatgtgttgtggtatgctgtatatcgggtatatcataattacgagtatccaagttatatccctaaacatgcttaacgtctagctaccaaacaatc

SEQ ID NO: 108634 - DNA, 1603 bp, Zea Mays
aggggaggagaagtgtactacgcgagagcttgccggaggctctggatccctgtgataataataaactgatataagcagaggaagcggggaggaagctgcgagttggagggggccgggagaggcgtctctggttattgcttgtccctgcttcccggtgagctgctgggagtggacgggccgggaaggagacgagaagataagggcgccgcgcgcggccatggctggaagtgcgccggcgacggcgatggacaagaccagctttgccaccacgtgcagcctgctgagccagtacgtcaaggagaagaagggcggcctgctgcagggccttggtgccctcgccatggcgccggcagctggtaagggcaacagttctttcgtcgtgcgatccgctcctgtccgttaagtgccacactgccatgcacgaataagctagcttccccgtagacactaacactaccgtcaatgaacaataccgttctgcttatcgcacatcgatcgcgctcttcccatcgtcgcaggagaaggagctttccggccgccgaccaccatgaacttgctgtcagctctcgacgacgcgccggccgaggagcgcagcgagaaggccaccgccggggagccaaaacaccaggacaaatgcaccggcggaaatccaagggaggaggcagccggagaggaggaggaggaggcgcagcagctgaccatcttctacggcggcagagtggtcgtcttcgacatgttcccctccgccaaggtcgaggacctgctgcagatcatgagccctggcggcgacggcgtggacagggcaggcggtgccactgtccctacgcggagcctgcataggccttcacacgacagcctctctgatctgccgattgcgaggaggaattcgctccacaggtttcttgagaagagaaaggacaggataactgcaaaggcgccataccaacaagtcaacagctctgttgttggcgtcgaggcgtccaagcaggcggctggagctggggtggaaaaaccttggctggggctgggccaagaagcgacaacagcgaagctggagatgtgatgaatgttgcccgacaagaaggtgcagtgcacgagattcacggatggtgcaggtcgtagcttcaggttaaggtgaaggataacttaccgtcggatactctactcactttactgctctactactactactgctggtgacgaagttagcaagaaacgttcttctgctaccggtgggtcggtcggtcagccgttcgttggcgagattgtttgctgctggagacggacgtgctcgcagcagtttcgctggtccgtgaccgcgccatatgttgccacgaatggttggttgttcggtacgttgaggaacgatgtgtatgtagtgtgcacgtttccggtgcatcttgttctcctcaagcctgtcctgtatgtttacccccctgcaccccctcctccctctttgtagagagagggtctgtatgttcagtggaagatggttgttctatttgatttttattttatggacatgtatgctcggtgatgtgttgtggtatgctgtatatcgggtatatcataattacgagtatccaagttatatccctaaaca

SEQ ID NO: 108635 - DNA, 216 bp, Zea Mays
acaggctgagagagagagagagagagagagagagagagagagggagagggagagggagagggagagggagagggagagggagagggggagggggagagggagagggagagggagagggagagggagagggagagggagagcgagagagaggagagagagagagagagagagagagagagagagagagagagagagagagagagagagagagagaga

SEQ ID NO: 108636 - DNA, 121 bp, Zea Mays
tatatgagatgcacccggctttgttccttaaatccaggtgtgacacgaaccccgactttcgtcgcccgaacaaaccttgaactagttatcccaaccaaggtagccccgacttacagtggcg

SEQ ID NO: 108637 - DNA, 2240 bp, Zea Mays
gtttttagtgctggtttgacaattgtcattgatcctcgaactttgaacaccaaagaagaattgctgccttgctggtctgggaagcactttctttcactccttccctccccatttcctactgacggccgagggggggcacattctttggcttttgtcccggttttgccctccggctcctgccgagctcagcagggggaggcgctgcgcttcgcttcacgccagatccaacctcaccggccaccagcttgcctccatggccggtcgcttcctcctcgtcgttgccgtcgccctcctcctccgccctggggatgcgtccgtgcacgagtaccgcgggctcagcttcgccaacaagggcaacgccttcatcctccacgccggcagcgagggcctctacgcggcctcccacgccaacaccaccgccgaggacgccgccgcagtggccgaagccttaatccggtttgacaagattacttttaggcgatcagaggatactaataattctgtaaaggagactagttcagctaaggttcaggtactcatttttgagatagaagatcgtgaaatgattggtggatcagcatatggaggtcagaaagctatttgttgtacttcagatcttgcgaagttaggagcttgcacagaaggttctgtcatctaccgcccatcccaggtaaatcctggttggccaaagttgtttgtagcatcttttgatggaagtgacctgatcgcgacactaccgtcaaggaccattccaattaccaaaactgggatatacaatatgtactttatacactgtgatccatcacttgctagtttggaaatcgaggggaaaaccatatggaaaaatcctactggataccttccgggtcggatggcacctcttaagaacttttttggactgatgtcttttgcatttgtcgtacttgggatctattggttttatcagtatatgaagtcctggagagaggttcttccacttcagaactgtattactcttgtgattacactgggcatgtttgagatggcattgtggtattttgagtatgctgaatttaatgagactggagtacggccaaaaggcatcacattttgggctgtcacgtttgggactgtcaagaggacggctgctgaagttattgttctcattgtctcaatgggatatggtgttgtcacgcctactttgggtggcttgacatcaaaagtggtcatgcttggaggaacattctttctagcaacagaaattcttgaattggtagaaaatcttggtgctgttaatgatctatctggaaaagctcgtctgttcttggtctatccagtggccattttagatgctgcatttgttatttggatatttatttctctagctaagaccattggtaaacttcaggcaagaaggttgatggccaaacttgacatttataggaaatttgcaactgcattgatcatatctgttctggtgtctgttgggtggattggctatgagatttactccaaatcaacagatgtatttaatgaacgatggcagcatgcctggattattcctgccttctggcatgtcttgtctttcttacttctttgtgtcatttgctacctgtgggcaccttcacaaaactcaatgagattttcttatgatgcaagtgaattctttgatcgaaaggataatatctcattaattaggccagcacccagtgcatccaagaatggatggaatttatcttctacaccagagcccaaagctacaaaggatgtgaataccgtagcagattttgaaggtgatgatgaggaaaacaaaagggagtagaatgtactgtcgatttgattacggagggtatatttgagatcctttgaagtgtgtgctagagcaattttggtatttaggagaggattggccatgctagttattattaatggagcactccgctcgatgttatttcttcgattcgttaccactacagtagttcttcacatggcgagttatgctgttatcttcatagtcttaatgatggtatatgatagaaacaattagtctggtgtataatatttataataatggcaccatattgcttctggttcctgtgaactcgacatatgttatgaatgtcagagaataaattacgatagaaacaattagtctgatgtataatatttgtattactggcaccatattgcttctggttcctgtgaactctacatatgctatgaatgtcagagaataaattgttttgctggatctttgttag

SEQ ID NO: 108638 - DNA, 2235 bp, Zea Mays
gtttttagtgctggtttgacaattgtcattgatcctcgaactttgaacaccaaagaagaattgctgccttgctggtctgggaagcactttctttcactccttccctccccatttcctactgacggccgagggggggcacattctttggcttttgtcccggttttgccctccggctcctgccgagctcagcagggggaggcgctgcgcttcgcttcacgccagatccaacctcaccggccaccagcttgcctccatggccggtcgcttcctcctcgtcgttgccgtcgccctcctcctccgccctggggatgcgtccgtgcacgagtaccgcgggctcagcttcgccaacaagggcaacgccttcatcctccacgccggcagcgagggcctctacgcggcctcccacgccaacaccaccgccgaggacgccgccgcagtggccgaagccttaatccggtttgacaagattacttttaggcgatcagaggatactaataattctgtaaaggagactagttcagctaaggttcaggtactcatttttgagatagaagatcgtgaaatgattggtggatcagcatatggaggtcagaaagctatttgttgtacttcagatcttgcgaagttaggagcttgcacagaaggttctgtcatctaccgcccatcccaggtaaatcctggttggccaaagttgtttgtagcatcttttgatggaagtgacctgatcgcgacactaccgtcaaggaccattccaattaccaaaactgggatatacaatatgtactttatacactgtgatccatcacttgctagtttggaaatcgaggggaaaaccatatggaaaaatcctactggataccttccgggtcggatggcacctcttaagaacttttttggactgatgtcttttgcatttgtcgtacttgggatctattggttttatcagtatatgaagtcctggagagaggttcttccacttcagaactgtattactcttgtgattacactgggcatgtttgagatggcattgtggtattttgagtatgctgaatttaatgagactggagtacggccaaaaggcatcacattttgggctgtcacgtttgggactgtcaagaggacggctgctgaagttattgttctcattgtctcaatgggatatggtgttgtcacgcctactttgggtggcttgacatcaaaagtggtcatgcttggaggaacattctttctagcaacagaaattcttgaattggtagaaaatcttggtgctgttaatgatctatctggaaaagctcgtctgttcttggtctatccagtggccattttagatgctgcatttgttatttggatatttatttctctagctaagaccattggtaaacttcagaaggttgatggccaaacttgacatttataggaaatttgcaactgcattgatcatatctgttctggtgtctgttgggtggattggctatgagatttactccaaatcaacagatgtatttaatgaacgatggcagcatgcctggattattcctgccttctggcatgtcttgtctttcttacttctttgtgtcatttgctacctgtgggcaccttcacaaaactcaatgagattttcttatgatgcaagtgaattctttgatcgaaaggataatatctcattaattaggccagcacccagtgcatccaagaatggatggaatttatcttctacaccagagcccaaagctacaaaggatgtgaataccgtagcagattttgaaggtgatgatgaggaaaacaaaagggagtagaatgtactgtcgatttgattacggagggtatatttgagatcctttgaagtgtgtgctagagcaattttggtatttaggagaggattggccatgctagttattattaatggagcactccgctcgatgttatttcttcgattcgttaccactacagtagttcttcacatggcgagttatgctgttatcttcatagtcttaatgatggtatatgatagaaacaattagtctggtgtataatatttataataatggcaccatattgcttctggttcctgtgaactcgacatatgttatgaatgtcagagaataaattacgatagaaacaattagtctgatgtataatatttgtattactggcaccatattgcttctggttcctgtgaactctacatatgctatgaatgtcagagaataaattgttttgctggatctttgttag

SEQ ID NO: 108639 - DNA, 1915 bp, Zea Mays
acaaatacacctcagtctcagtcccccaccacatccgctccccgccttccgcttccctaccccccgcatcacctaccaacgccgacaccatgggggccttcgcgaaggaggagcaccagttcctagccgagctcggcctcgcgcagcgcaacccaggcgcgttcgcatgcggtgcgtggggcggctcaggtcccaccgtcacctccacgagcccgaccaacaatcaggtcatcgcagaggtcgtggaggcgtccgtgcacgactacgaggagggcatgcgcgcctgcttcgatgccgccaagacatggatggcgattcctgctccaaagcgaggagagatcgttaggcaaatcggtgatgcactgagagcaaagctccatcaccttggcaggcttgtgtcacttgagatggggaaaattcttcctgaagggatcggtgaggttcaggaaatcatcgacatgtgtgattatgctgtggggctaagtcgccaactaaatggatccattataccatctgaacgaccaaaccatatgatgatggaggtgtggaatccccttggagttgtgggtgttataacggcatttaatttcccttgtgctgtgcttggttggaatgcttgcattgctttggtctgtggaaattgtgtcgtctggaaaggtgctccaacaactccactgatcactattgcaatgacaaaaatagtggctagtgtattggagaagaacaacttgccaggcgcaatttttacatctttttgtgggggcactgaaattggtcaagcaattgcccttgacattaggatacctttggtttcattcactggaagtacaagggctggtctaatggttcagcaacaagttagtgcaagatttggtaaatgccttcttgaacttagcggaaacaatgccatcattgttatggatgatgcagatatccagctagctgtgcgatctgtcttgttcgctgctgttggtacagcaggacaacgctgcactacatgtcgtaggctgattcttcatgagaacatatatcaaaccttccttgatcagcttgttgaggtatacaaacaagtccgaattggggatccgttggagaaaggcaccttactgggaccactgcacactcctgcttcaaaagagaactttttgaaaggcattcagactatcaaatctcagggagggaaaatcctttttggaggatctgccattgaatcagaaggaaactttgtgcaaccaacaattgtggaaattacaccttctgcaccagttgtgaaagaagaactctttggtcctgtcctttatgttatgaaatttcagtccttgaaggaagcaattgaaatcaataactctgttcctcaaggattgagcagttctatatttacaaagaggccagatattatttttaagtggctcgggccccatggtagtgattgtggtatagtgaatgtgaacatacctactaatggtgctgaaattggtggagcatttggtggagaaaaagcaactggtggtggacgagaagcagggagtgattcctggaagcagtacatgaggagggcgacttgtacaatcaactatgggagcgagctacctctagcccagggaatcaattttggttaatcctgcagaaatgttgcgcgtggatctcagtgttttctgcagacgtggatgccgtatggaaagaactgatgcaaccgcatttgagatctcagcagacttgagcagcatttattggcgtcagttgtgaaacttaaactgcaggagcatcttgtacataaataaaataagatgtttgttgctcgtgggccgtggcacgttttggtaccggtgtccagtctactaataaaatctaatgcaaaacggtcataactacattctcatgcagtatgattttccggccttttgatctggaattg

SEQ ID NO: 108640 - DNA, 929 bp, Zea Mays
acaaatacacctcagtctcagtcccccaccacatccgctccccgccttccgcttccctaccccccgcatcacctaccaacgccgacaccatgggggccttcgcgaaggaggagcaccagttcctagccgagctcggcctcgcgcagcgcaacccaggcgcgttcgcatgcggtgcgtggggcggctcaggtcccaccgtcacctccacgagcccgaccaacaatcaggtcatcgcagaggtcgtggaggcgtccgtgcacgactacgaggagggcatgcgcgcctgcttcgatgccgccaagacatggatggcgattcctgctccaaagcgaggagagatcgttaggcaaatcggtgatgcactgagagcaaagctccatcaccttggcaggcttgtgtcacttgagatggggaaaattcttcctgaagggatcggtgaggttcaggaaatcatcgacatgtgtgattatgctgtggggctaagtcgccaactaaatggatccattataccatctgaacgaccaaaccatatgatgatggaggtgtggaatccccttggagttgtgggtgttataacggcatttaatttcccttgtgctgtgcttggttggaatgcttgcattgctttggtctgtggaaattgtgtcgtctgggagagatgtttacaggggtaggaggtagcgatggagcatgtccatgacgcaggtaaggagctaaggaggcagaggagtgtgtccgggatgtcctccagccctggcggttggagcagctgaaaggacagtccgggatgttctccagccctggcagttggatcagccgaaggggacggatgtgcttgcggcgcgccaggacagacctggtggaggaaggcgctggcaccacggcaagcagagaatgacggacacgacagcggatcgatgggaggggtc

SEQ ID NO: 108641 - DNA, 360 bp, Zea Mays
atggattagggcaacagccacaaagggcacgccgcatacgcgtgacaactgtggcacggagaccggattcctcacgcctgctggcgtcgatctcctccggaggctgcttctcaccgactgttgatccatatatttcagatgagagagtaggattagctgagcctgcagaagaaatacagactgtgccctcctcatgggaaaaaactagactatttaatatgctttctatgctcacgccattgagcacaacatacaatttgaacttgtttgaacttgttgctttgagttgcttgtactgacttgcctctgaaaaaactttgctttggtccgaagaacactgaaaaaactatgctttggtct

SEQ ID NO: 108642 - DNA, 1851 bp, Zea Mays
ctaaactcagctactcaggtcaggtctgagataaaccagtcactctactactcgatggaaccagcaacatgggctgtgttcctcggcattgccctctgcgcagcggcagcgctcttcctttcgcgcggccggcgcccggtctacaaccccccgccgggccccaagccatggccgatcatcggcaaccttaacctcatgggcgagctgccccaccgctccatgaacgagctgtccaagcggtacggtccgctcatgcagctccggttcgggtcgttgcctgttctcgtcggcgcgtcggttgagatggcaaagctcttcctcaagaccaacgacgcggcgttctccgaccggccgaggttcgcaatcggcaagtacaccgcgtacgacttctccgaccttctatgggctccttccgggccgtacctgcgccaggcacgcaggatctgcgccaccgagctcttcagcgccacgcggctcgagtccttcgagcacatccgcgacgaggaggtgcgcgtgatgctgcgacagctgcgccaagcggctgggcgcaccgtgcggctcagggactacctgcagatgttggcgctcggcgtgatctcgcgcatagttctgggcaataagtacgtcatggaggaggtggcggacggtgagggggactcagcgccggcgataacgcctgccgagttcagggagatggtggacgagttcttcgcgcttcacggtgcgtttaacattggtgattacatcccttggctagattggctggacctgcagggctacgttgctaggatgaagagaatgaaggcgaggtttggtcgattcctggaacgagtcttggacgtgcacaacgagcggcgactacgcgagggagggaactttgtggcaaaggatatgttggacgtgctgctgcagctggccgatgacactagtcttgaagtccagctcagcagggacaatgttaaggctatcacacaggacctaatcatcgcaggcacggatagtaatgcaaacacgctggagtgggctgtctcggagctcctcaagaaccctaagatcttagccaaggccatggaggagctgaaccatgtcatagggccggaccgactggtgacggaaagcgacctccctcgcctcccctacatcgaggctgtgctcaaggagaccatgcgcgtgcaccctgccgcgccgatgctggcaccccacgtggcccgcgaggacacatccgtggacggatacgacgtgctcgctggcacggtcttgttcatcaacgtgtgggcaatcggccgcgaccctggactgtgggacgcgccggaggagttccggccggagcggttcgtcgagagcaagatcgacgtgaggggccatgacttccagctgctgccgttcggctctggccggcgaatgtgccccgggatcaacctcgcgctaaaggtgatggctttgagtcttgccaatctgctacacggcttcgagtggaggcttccggacggcgtgacggcagaggagctgagcatggatgaggccttcaagctcgcggtaccgcgtaaattcccgctcatggtcgtggccgagcccaggttgccagctcgcctgtatactggcgcttgatgcccgtacgtgtcttcggttgttggcatgcgtggagtatagcacatgattttcagctcttggaactttgttttaataaaacacaaatatatgtgttatgttggttagatgaatgtgaatataaagttgacaacctaggtaattcgaacccctattggtatataattttactttatttttgcataactgtgtaaactggtggtcatggacgttgaagttaatatttggactgtggattagatt

SEQ ID NO: 108643 - DNA, 1985 bp, Zea Mays
atgaccctgtacagactacagtgtacaagcctgccactttttaaaactcacaaccccccgacctgctcagatcaggtaaaccagtcactctactactcgatggaacaagctacatgggccgcgttcctcggcattgtcctttgcgcagcgctcttccacaggaccttccttgcgcgcggccggcgccgggccaacaaccccccgcccggccccaagccatggccgatcatcggcaacctaaacctcgtgggcgagctcccccaccgctccatgaacgagctctccaagcggtacggtccgctcatgcagctccggttcgggtcgttgcctgttgtcgtcggcgcgtcggttgagatggcaaagctcttcctcaagaccaatgacgcggcgttctccgaccggccgaggttcgcagtcggcaagtacatcgcgtacgacttctccgaggttcgccaggcacgtaggatctgcgccaccgagctcttcagcgccacgcggctcgagtcattcgagcacatccgcgacgaggaggtgcgcgtgatgctgcaacagctgcgccaagcggctgggcgcaccgtgctgctcagggactacctgcagatgttgacgctcggcgtgatctcgcgcatagttctgggcaagaagtacgtccaggaggaggcggcggacggtgagggggactcagcgccggcgatgacgcctgccgagttcggggagatggtggacgagttcttggtgcttcacggtgtgtttaacattggtgattacatcccatggctagattggctggacctgcagggctacgttgctaggatgaagagaatgaaggcgaggtttggtcgactcctggaacgactcctggacgtgcacaacgagcggcggctacgcgagggagggaacttcgtggcaaaggatatgttggacgtgctgctgcagctggccgatgatactagtcttgaagtccagctcaacagggacaatgttaaggctatcacacaggacctaatcattggaggcacggatactagtgcaaaggccctggagtgggctgtctcggagctgctcaagaaccccaaggtcttagccaaggccacagaagagctggaccacgtcatagggccggaccgactggtgacagaaagcgacctccctcgcctcccctacatcgaggctgtgctcaaggagaccctgcgcctgcaccctgccgcgccgatgctggcaccccacgtggcccgcgaggacacatccgtggacggctacgacgtgctcgctggcacggtcgtgttcatcaacgtgtgggcaatcggccgcgaccctgcgctgtgggacgcgccggaggagttccggccggagcggttcttcgagagcaagatcggcgtgaggggccatgacttccagctgctgccgttcggctctggccggcgaatgtgccccgggatcaacctcgcgctaaaggtgatggctttgacccttgccaatctgcttcacggcttcaagtggaggcttccggacggcgtgacggcggaggagctgagcatggaggaggccttccagctcacggtaccgcgtaagttcccgctcgaggccgtggtcgagcccaggttgccagaccgcctgtatacgggcgcttgatcgatgcccgtacctgtgttggacacttggactgttggcatgtgtggagcacagcacgtgattgttcagctcttggaaaattaatgttgtgtctcgtatacaaattaattatggtagtgcatatataatgcacggtttgtgagagtttgatgtttcagatctatacgttgaattaggcctttatgccttgttcggttattcctaatacacatggattgaatgagattagaaaaattaagaagaagtttgacttgtttgggattcaaactcatccaatctcactcaatttacatggattgagagctaaccgaacaagtccttaattggacttgatccatgttcgttgggtggtc

SEQ ID NO: 108644 - DNA, 1736 bp, Zea Mays
cccctgctctcccgtttctctctctctctcaaccccacgcccccttctctgccattattgcccgcgcagccatcctctctctctctccctcccgctcagtaatcagtatatggggacgtcctgctcctcgcttcctcatccaatcctcccacttcctcttcttcctctcatcctgcttcccctcgcgtgcgcagacacgagcgcgcgtgtccgtcactcccgtgcgtgcgatatcctccacccgcctcagcccgctgtccccctgctcatcgcccgatcgccgcgacttataccaccatcagccagccaccactccctcctcaacattccgcttctctagtcccgaacaccggccggcactcgttagggggaggtgtgccggtgtgggaggtactctgctagccgccagtacatgtgaggtccatgggggaggaggtggcggtggtgctggagcccccacggcccaagtcgccgccgaggtacccggacctgtgcggccgccgccggctgcagctggagctgcaggccctcaaccgcgagatcgacttcctcaaggacgagctacaatcactcgaaggtgttccaccagtctctagaagttgtaaagaggtaaatgagtttgttggtacaaaacaagacccactaataccgataaagaagaagacgcacagatcatgccgtcttttttggtggatcagatcaaaattgtgcatatgcgtgtcatggttctgttgctcctgccattgcttgcccagctgcaaaaggccatgctgcctggattgctcctgctgctcatgcccagatctgtcatgctgcaagcccagctgcaaatcatgcaacaaaccctgctttgggcccaacagctgttcatgttgcgacatatcatgctgcaagccagattgcccatcctgtagttcaaactgcagctcgtgctgcaccggcagtccatcatgctgtaaaccaaactgcaacacctgctgcagaccaaactgtagctcgtgctgcgatccgtcatgctgcaaaccgaactgcagctgcttcaagaccctctcgtgctgcaaattccagtgcagcccaaactgctgcacctgcagcctcccgagttgctccggctgcaacccctgcggcagttgcaagaaatgctggtcatgccccagcgactgcaagccaagctgtggctgtttcagcgcgcaatgttgcagctgcgcgggatgctgctcgtgctcaagctgtttcagttgcttcggttgtttcaagtccttcaagtgctccaacctgtttgggtgctgctcctgcaagcagtgcttcaagtgccagtcctcgtgctgcaagggggcgtcgtcctgctgcaaatgccagtcgtcgtgctgtgagggtgaagacggcagcagctgctgccggaggccatgctgcacttttccgaagccagcttgctctgggtgttcgtgcgggtgcgcttggtcctgcagaaagtgtacagaatggtgtcgatgttccgggtgccgcaatccgtgctgtgccactggatgcttgtgttgactgttgaggttgaactagacgtttccttggttgttatttttttgcgtctgccgtttagatgaccgttagtttcgttcgtgctttgatatatggtgtggcgtccttgtctgtaaagaaatcccatatcactagaagaaattgaagcgtcaatagtcatcaactgctataaaattcagatgccttttaagaacgaggct

SEQ ID NO: 108645 - DNA, 190 bp, Zea Mays
ttttttttgtttctatttcactcttaacaccatgagcctttatctgcaagaaactctttcatttctgcttcgctctaacgctgcaccttttgccttttcaggttgcttggaagatcttgcaatcagctccaccatccctcacttcccttccacctctgtcatgtagtcttcagcaatcatgccctgtgag

SEQ ID NO: 108646 - DNA, 483 bp, Zea Mays
atggcgcaccccgcctgcggagccgctccccacctccgcccgcccgcccgaccgacctccggaaaccccgccgcgcttccaaccgcctcctcaaaccacgccgcaaaccccgccgcacacagcttcgcctccgtcgcacacaacttcacttccaccgcacagatctgcgtgttcggggccttctcgccgccggcgaccatggcgtacggcgaccacgtcaccacctttgaggactccgagaaggagagcgagtacggctatgtccgcaagctgttgattttagcaggctctttgagtttctattgccagtgcacccatgtccaattgtccaagttcaacaggatcttcaggaagcccaaggagcagcccaactccaatgccttgatcactctagacaagttctgtagtgtgcctcatgttgcccagtcgagtatggggatgacagatgcatcccattctcttgtccagctcttctggctctga

SEQ ID NO: 108647 - DNA, 220 bp, Zea Mays
attccgcggcgaaaccagacgggattgacgtcgaaggcagcacagaatctgatgcccagatttgatctcagtaggtggagtcgacgaattaatcggacaaaaaaatgtgtagtaattaggcggtggaaacagctgaaatcaaatctgcagattacacgaattcaatgccgaaagtgagctcggtgcgatcaagcaggaggaatttggtggggagggcgag

SEQ ID NO: 108648 - DNA, 2721 bp, Zea Mays
acccgcctacgtgcaccgggcacaagggagcggtcgctgtggacctgggacgccgcggtgccccgtgcccccagacccttctctccctctcgcacgacctcagaggctcagacaagcgcgaaccccgcgaagctgccaagccgcgactgcccctcgacctgcccgcttcctccgacgcctagggttttctaccgggcgccgccgccgcagccgcggccggggatgcaggtggccctgcgcagttagccgcttttggatccaccgccgccgcgcgccatgtcgctcctgcggcggcggaagcagcagcagctaccgccctcggagggcgacgggtccgaccacgacgacaacgacaaggggaagaagccgtcctcgtcctccgcgccgccgtccaaggagcccacgaggcggaccaaggccaagtggtcgtgcgtggacagctgctgctggctggtcgggtgcgtgtgctccgcctggtggttgctgctctttctctacaacgcgatgccagcttcgttcccgcagtatgtcaccgaggccatcacggggccgctcccggacccgcccggggtcaagctgcagaaggaggggctgcgagctaagcaccccgtcgtctttgtccccggcatcgtcaccgggggcctcgagctatgggagggacaccaatgcgctgagggtctcttccgcaagcggctatggggcggcacatttggtgacgtatacaagagacctctatgctgggttgaacatatgtcgttggacaatgaaactggattagacaaacctggaataagggtcaggtcagtcacaggccttgttgcagcagactatttcgtccctggatattttgtttgggctgtcttaattgccaatttagctcgtattggatatgaagaaaagaccatgtacatggctgcatatgattggaggttatctttccagaacactgaggttcgtgatcaaactttgagcagaataaagagcaatattgaactcatggtagcaacaaatggtggaaatagggtggtggtgatcccacactccatgggggtcctctattttctgcattttatgaaatgggtcgaagcacctcctcccatggggggcggtggtggtccgaactggtgtgagaagcatattaaagctgtaatgaatattggaggacctttcttaggagttcccaaggctgttgctgggcttttctcatctgaagccaaagatgttgccgttgctagagctatcgctcctgatgtcctggactctgattttcttggacttcaaactttgcgccatttgatgcgtatgacccgaacatgggattcaacaatgtcaatgcttcctaaaggtggtgatacaatttggggaaatctggattggtctccagaagatggccttgaatgtaaagctaagaagcataaaaccaatgataccgaggtttctaaggatagcaatggggaaaatatcgaagttcaacctgaacctataaactacggaaggctggtatccttcggtaaagatgtagcagaggcaccttcttcagagattgaacagatagaatttcgtgatgctgttaaaggtaacgatatcgtccattcaaatgcatcatgccgggagatctggacagagtaccatgaattaggatggggtggaataaaggcagtcgcagactacaaagtttacactgccagttctgttatagaccttcttcactttgttgctccaaggatgatgcagcgtggaaatgtccacttttcatatggaattgctgataacttggatgatccgaaatatcaacattacaaatattggtcaaaccccttggaaacaaagctaccgaatgctcctgacatggaaataatttccatgtacggagtaggcattcctactgaaagggcatatgtctacaagttggctccacaggcagagtgctatataccattccggattgacgcctcggctgatggcggggaggaaaacaaatgcttgaaagggggtgtttacttagctgacggcgacgaaactgttccagttcttagcgcgggctacatgtgtgcaaaagggtggcgtggcaaaactcgtttcaaccctgccggcagcaagacttacgtgagagagtacagccattcaccaccctcaactctcctggaaggcaggggcactcagagcggtgcacatgttgatataatggggaacttcgctttgatcgaggacatcatcaggatagctgccggggcaaccggtgaggaaattggtggcgaccaggtttattcagatatattcaaatggtcagagaaaatcaaattgaaattgtaacccatgggaagttaaaagaagtgccccaacccgttcattgcgttcctaaatgcttgcctgagcgcaactctggattttgcttaaatatcgtatttttttcacgcctcattcgtccctctagtaaatttacattgacaggaccccggtgcgacgcggatgttgtaccgtatttttggcattgtatattaaaatgtacaggcgtaagttacatttgctagctgaaattattgcagtagcttgccttttcttttgagcacggaagtgtgctctccattacgtgataacctgtgccaaatctttgacaatcatatcctgaatataagatggaacattatttcgttgtgtgaccatattacaagagcggggaatgtaattgactatccttgacacaaaattacataacagcaa

SEQ ID NO: 108649 - DNA, 981 bp, Zea Mays
atggttctgctgcccctgcccctttcccacgcgtacatcgtggttctactgcccctctcccactcttgtcaccgcgatcctcgccccctgcccgctctcccgatgcaaggaaacatgatggaatccacgcctgccgcgggggagagggaagcaatctccacaatcatcacccccgccttgaatcgcgcttggatccccttccatccttggcaccattggcccttccatccttggcgccctccgtccaacggcagcgatcccattccattgtgtactgagttggagtgtaatgagttcaagggtattggtgggcggtggtacatctgcggcgggcacaccctacactgtagcaagctctgccgcatcctggacggactcttcctacagtaccccattgcgacaaggccatcaactagaacaaagatctttctagagaaccatattgttgattcagaaatttctcttacaaccactgttattttgtgtactgagttggagtgtactgagttcaagggtattggtgggcggtggtacatctgcggcgggcacaccctacactgtagcaagctctgccgcatcctggacggactcttcctacagtaccccattgcgacaaggccatcaactagaacaaagatctttctagagaaccatattgttgattcagaaatttctcttacaaccactgtaattttgcgaaatttcttgtggatggtgaccactaccaagtctggatggtcggccgatgtacatagagaggccagggatggtgtcccggagtttgagagagctttcagggagaggttctctgcctacacattagctgctaagaggcatattgactccactaccatcttcgacgtccaaggtgtggggctcacatggatcatccccgagcgcaagcaaactttgagatcccgccgaaagcatgtcatccctggaatccttcagttgggagtaacatttagtttcactgtgtag

SEQ ID NO: 108650 - DNA, 1867 bp, Zea Mays
atgaaccacagtggtggccccgatgcacgagtggtgaaatcggattatgggagcttgccacatcggacgtcgttccacttccacacccttctcttctatcaatttcacggttccaccgctttgttcgtattttgcctttgcttcgcttggcttcctccctccgaggttccccagacccccaaccaaccaaaaccctatccgccgcccccgcccccgcccttggctgaggacatgtatccaccgctcggggacgcataggttgtgttacgagtgggagaaagcttcttcagtacgtgctgatctctccgccacacctgcacaggagtggccatagatcgccggaacgcgcctccgccgccggacgcggcggcggagaaggatgagagcacccagggtctacaactcccggaggacatccgctgggagcggctcgacaaggcgcgcttctttgtcgtgggcgccgggctcttctccgccgtctcggccgcgctctaccccgccgttgtcctcaagacgcgcctccaagtcgcccctgcggcggccgcggcggctgagtcagcagcgctcccgccctccgccgtcgcggcggcgactgccatcctgcgccaggaggggcccctcgccttctaccgcggcttcgccacctccctcgccggcaccatccctgcgcgcgcgctgtacatgggcgcgctcgaggccacgcgctccgccgtcggcccagccgcgctcagcttcggcgccgcggagcccgctgcgtcggcggcagcgggcgcagtggcgggcctcgccgccgccgtcgccgcgcaggtcgtgtggacgcccgtcgacgtcatcagccagcgcctcatggttcagggcaacccctgtcctgcctcccgctaccatggcggccttgacgccttccgcaagaccgtggcttctgacggactacgcggcctgtaccgtgggttcggcatgtccatcctaacctacgccccctccaatgctgtgtggtgggcaacttattcactgtcgcagaagataatttggagtggaattggctgctacttgtgcgattatggtgttggtgtccaggaaattgatctcggtgatggggattctttgctgcagccaggttgcaagactgtcatggtagttcagggagtgagtgccgcgatggccggtggtgcatctgcgtttgtgaccatgccactggacaccatcaaaaccaggatgcaagtcatggatggggacggtgagccgattacggtggggaggacagtgcgtaggctgatcaaggaaggtgggttggctgcttgttacaggggcctaggcccgaggtgggcgtccatgtcattgtctgccaccaccatgatcaccacctatgagttcctcaagcggctctcagacaagggccaggggagtgatcttgcatgatgtttgataaccagtatagacaacaagtgatcaggtgcatttgctttgtttctttatcgtttcatttccagcatgttatgtgttgaaaaaaaatggtgggctaatgtttgtagataatttttgtttgctcttataatcaagttttccgacgtggtgcaatttacgttggttatatattgtagttctcatatcatgttgttctagttgcatttattggcatcaaattggtggttatggcttggtatgattcagttttgcttactcaaacctttgtttgtgctgaagtattgatgtttgtaatacagttgttgttaagtgcctttggacttctgtgaacgctaacaatgttgtccatgccccatgttagtagaactagaacattgtcatgtttgcttaggatgtctgtaaatttactggcacctggttgtgagcaagaatatagatttatact

SEQ ID NO: 108651 - DNA, 109 bp, Zea Mays
tgggctgggtcccggcccggtgaggtgagcgttggaccggccggtggcggcgacaccggcggcggtgaggcagtggaacacctgcgaatgccatcagcggctttatttg

SEQ ID NO: 108652 - DNA, 1858 bp, Zea Mays
atggagattggtagtcgattatttctgctgcatatcttgctagccattttcttaattatttcctcatatcctatttgtgtgcaggggtttttatattcttctacaaatctttgcatcctcctctactgcctgcagcacgagcttcatatgggagcatttaaagttggtaacataaccaatgagaatttctttgaaatcatcaatggtctacggccagcaaacactgcaggttgcagttcatcaaccgatgcacctaacatcccacatgatggcacatctgtaattgaattgttgtctgatagcatgaaccaactgtccattaaaaatgagaatcagttgattccattagctgtaggattttcttttagacacgggagtgatggtcggttcctgttggcggctatcagatattcagatagtgtatgtgacctcttttcgctagcgcaaccccgggcctacgtcgcactcaacgaccccgccgctgccgacgccgacatcactgccctcgtcgacgccgtcgcgctgggcctcttctgcatagtcgccacgctcggtgttgtgcctgtcatcagttgtgcgcgcggcgggccagcggagatggtggccggcgccctcgacgcccggctccgcgatcacctactcgccaagcccaacctcttcacggaggctgcatctgccgctgtcacgtcattccagcgccctgtgttgtgcctcttcgacaggaattttgagctgtctgtaggggtgcagcacgactggagctaccgcccattggtgcacgacgtgcttggcttgaagaagaacaagctgaagttgccggcagagaagtacgaattggatgactctgacaaattctgggtggcaaacaactggtcttcattccccaaagttgctgaggaaatcgaagcgcagcttgccaagtacaagcaggatgtggatgaggtgaaccagcatactggtggtggcaaggttggggttgagtttgatggtactgatctacttggcaacactaagcatctcatgaatgcggtgaactcactaccagaactgacagagcggaagaatatgattgataagcacaccaatattgcaacatctttgcttgggcatatcaaggagaggtctctggatggatactgcagctgtgaaaatgatatgcttgtgagtggcactgtcgaccggaatacactgctgagtctcatcagagggaagggtaccaaggaagataagcttcggctagctgtgacctacctgctgtcctttgcgacaccaccatcatctgagctggagcagtatgtgaagaggataaaggcattattgaatacccaatttgcagctgcctcaggcacagcaactaagagcaacatcgtcgattgggcagagaagctgtatgggcagtccattggcgctgtgaagaatctcttgtcagatggtaggcagctggccttgacaagaacagttgaagctcttatggaagggaaaccaaacccagaggtgctcttggaattcaaggagtatgccacagaggttaatgttgattttgtgcggaaagttgttcgtgcgattgggagatgtgcaattaaattggagagagctgctgaaaggtgcatcagcgttttgctcgagctgattaagataaaagttaattatgttgttcaggaagctataattgttatcaaagacatcttcagacgctaccctaacacgtatgagtctatcattgctacgctttgtgaaagtcgctttgtgaaagtctggacactttagatgaaccagaggctaaggcatccatgatttggataattggagaatatgctaaaagaattgacaatggctaaggattgtattatggtcacac

SEQ ID NO: 108653 - DNA, 1404 bp, Zea Mays
ataaaggagaaaatgggcactaaaagcactcagcatactgcatgtcatacctgcaacattggtggcctcagtggtaccttctcactcacggtaacctggggagcttaaacagtgataagagccaaatctccatgctcctcaactgcccaactctgagcttctcttgctttgatttcttcttttctccttttcgtttcaatgtcaatatctgccactccagcatcaacaaagacacacctaggaaatattgtttacaagatcaaggaacagaagggcactcttcttgttatggatcagataggatacaatgctggtcgcacaccattcacagacatatcaaacaccatcattacaggtaatcaaaatgaatcgaactcgcttggaccaattgtcgatgctaaggaacgtaagaggcaaagggatagggaaagatatgctgcgatgactgttgaagaaaagaatgagaaaaataggaagcgtcgtgaagcacgtcaacgaaataaaggactatcgatagagccactctcatctagagccttttgtaaatgggtgacatatgaagaagacgttaatacagaccaggcatgtgagctggttagctttccagaagactgtagcaccattgatttcacaaatttgtcaacacaagacattgcaggtggagacaaacaagtaaatctggatgcatatgatgacagcgattggttgcataggaatgagacattccaggcaaacaacattatcacaagtaaagaccttctgacaccaggttgtgtgcatgaaactgttgataacatacctaagcatactatgaaaagggccgcctactttagtgagcggtacaaaaacatgactcccgtcgagagggagtctagacgtgtacgccataggttgtataataagacaccaagacggaaagatgctaacaaagagtgcagcagaaaacgtagagcactgcagggtgacactttgaatcaggagtccatcgccatggaggacccattatatacccctgaggttgttatccctgaattcatcatgacatctttcctgccaacttcaacacagactaaggatgttggttcactcgatatgtctactgagccactaagacgtagacatcatgtgctatctgagacaagacccttaggccgtcgaaaccaacaatttgaagccggcattgcaaggaacgtggctacagtgaccgaggatactatttgtgacgctatggaagaagacgattggacacagccccatccgaatgcagagctccacaacaatggtgatgatgatgagggtgtcatattcgaagaggatgaggatgatgatgagaacgatggatacctattcgttgggcaatgtgcgtacctctttttttttattatgataccacgacttatataa

SEQ ID NO: 108654 - DNA, 1366 bp, Zea Mays
cagcatcggagcgctcgcaaaacctcgacaccttcctgaattagtagccgctagctttagctgctccccttggaccggtcgagcttgagctgatcactaaccagttctaccagctcgatcagcaccgtaacctgatggagttcgacctgctgaattattacagcccggaagaagcgcagcttgagctgatgaacacgatgctccagctggagcagctcaccgcgctcgacggccatcgtcagtcggcgatggcacctgcctcgccgccgatatccccgatgcagacccaccatgcaggtccccacagcttctcgcctctgccacacacgtcgacgaccacgaccacgaccgccaccgccaccgggtacccaaagaagcagcacgcaccgccacgggccgtgtacggcgccgccacttccagcggcctcgagcaccaccacctccagctccaggacgggggcgcgctgcaggccgggccgtcgtcggcggcggcggcgtcggcggacgcgatgcgggaggcgatcttccgcatcgccgcgctgcagccggtggaggatcagacgactacgggcccggagccggaggcggcggtgcggcgggccccgaagcggcgcaacgtgcgcgtgtccaaggacccgcagagcgtggcggcgcggctgcggcgggagcgcatcagcgagcgcatccgcgccctgcagcgcctcgtcccgggcggcaccaagatggacacggcctccatgctggacgaggccatccagtacgtcaagttcctcaagtcccagctgcagtccctgcagcgcgccgccgcctcccgccacgcgccgtggcagtacgcgctccttccccacgccgacatgctgtgacgaacacgaacgcagtctccatcgatcgatcgatcgttaccatagagctagctagcttagcgcgcgcgtcggtggtcgttggcgtctcgagtaccgacgggacacgacgacacgaacacgatggcctctgctgatgctcttgtacgtagcgttgtgtaattgggcatcagctgcctcgtgtgaagatgtaggagccttgatcgatacatttgttgctgtagccgccgcatacggcataccttgctagctccaattttttgttggagccagccacagccggtgcatgcatgcgcgtgagtacgtgctctaccgccctactatacgtaggcggctgtacatttacactgtgcccctttttttcccatactcaggctatccgcaaccgttaccactaaatttttccccctatatcacttttccttcctatttttccatctcccgcagcggttccccctaaatactccccctataccccactaccactataaaatatcattttctat

SEQ ID NO: 108655 - DNA, 2014 bp, Zea Mays
actgagtccagagtgaccacggaattccgacaagcgacaaccaatccagggccactgcccagacccatgattatctgcttgcccgcgtcattgctgcagcgccgccgccaacgaggaaaaccgaagctgaaaggaaaccctcagagctggtcgcctccccccgtttcaaattctccgaatcgctgcaaacggtcgccgaaatttcaaaatcccacctcccaatgagcgggatcctcccccatttcaaatttcaaatccacccactcccacttctcacgattcacggctcacgagcccgccgatctatacagtacatcccatccccatcgcatcccgtggtctctcatccccatcccatcccatccccatcgcatcccatcccttttcgtcgagcgccgccgatggagtgggacggcgactgcagcgaggtcggcatgaactcggtccctgacggcgtcgtccagctcatcctgtcgatgctcagcaacgcccgcgacgtggccgcctgcgcctgcgtctgccgccgctggcgcgactgcgtcccctacctacccgcgctcttcttcccgcggaacgccttcgaaccggccaggggcgccgcggacgatgtcatcggccggatggtggcgtccgtcgcgcgcctcagggagctggtcatctactgccccttctccatggcgcgcctcccggtctggctcgccgagcggagcgccacgctccgggtgctcgagctgcggatggacgccgccgctgacaaggtcccggaaggtgggcacctcgactgcatcggcctgactgcgaatctggaggagctcaggctctggggagtgtctctcacggccccgccggcgtggggccggatggagcggctccgcgtgctggaggttgtcggtgcgccgctgcgggatagcgccgtgagggacgccatcgccgcgtgccccaacctcaccgatctgtctctgcttggatgcgactgctccggcacggtggctatcgatcttcaacagctcgagcgttgccggctcgacatcctcggcgccggcaactgctcgctcttgctcaccgcatctcgtctggagtcactcgagatccagggcttcacctggatcactctgcgtggtggccacaacctccgccgcctctcaattgccaagagcaccgggaggcttcacaaggtggacactggtaatctcccagatctggatcacctgtcgctgcgcggtgttcagtggaactggggagcagtgagctcggtgctgcagtgcgctagcgaggtgaagcatctagtgatgaagatagagttctgtggcgacctggacgcactccagccgttcccggaagtcgatttggttgacttcttcgacaaccaccccaaactccgcaaatttgagatccatggtgccatgttcgctgccctgtgccagaaaaatagcctgaaaaatttgaattcaaggttcctcatcccttgtttggaagaggttctgatcactgtacgctccccactcaatgctgaacagaagctgaacactctcgagtcgcttctgaagtacagtgtgaagctgcggacgatgatcatcagaatctcacagatgaagaattgccacgaggctgctgatgagttctttgaggatatatgtaagttcaagtacatgaactacaaaaaagtgagaattgaataagtggagatgctgttttgatttttaaagttaatctgaccgaggactcgattttttttcatcccagaataattttattgtcattattgtcagaggattcattttgaacctcttgagtagttaagttttttttttatcatctagtctatatattgagtactagagggagttgttggaacaattccatcgagtattgtggctgcaaattgttgttgtaatcgtctctgttccatagcaaacatttttcatctacgagcaattcccaccatgaacatcaatgttgtttactgttcaccgtcttttcttgaaggatgtttcttattattattatgaatatg

SEQ ID NO: 108656 - DNA, 1847 bp, Zea Mays
cgataatctaccagtgggccctggttgacagcccaacgcacggctctcctgtgcgcctccgatgccgtttccccgaagcaaagggagacgaaagctcaaaaggtccccccgcttcctgtggtccacgcacgcacgcaggcggcggtggtgcccatggcttcgtggctgttgctccccttctcctccttcccgtggcctcccccgcccccaccaggctcctcctccggccgcggcggcgatggcggcggagacggcggcgattggaggccgaccgtcgtcgcagccttcgcaggcgtgcaagtcggccgcgctctccgccgccgcttcgccggcctcctccgctcaccggaggtgcgacatcttgatgccttgccgaaaatgggtagcttttggtttgaaggatcagaatcgcttgcgacattccacattcttggcgcgatagggattgtgttctctgcaccttatgtttgcagctctgctctgttcagtgggaacgggtcagggggtagatacatcagcaacgggaagttgttgtccagacggcctcgtggaatcgattccaagaagaggctctggactaatgtccttcttgctcttaatgtcctggcttatgtcgctcaggtagcatcacaaggaaagcttctcatgtggggagccaagatcaacagtctgattgatagagggcaattttggcgtttggcaacatcatctctacttcatgcaaatctcacccaccttgcattcaattgtttctctttgaactctattgggcccatggttgaaatgttaagtggtcctagaagatatctagctgtttatttcagttcggcgctggcaggttcactgatgagctaccgttttagtgcgtcacctgctgttggtgcgtcaggtgccatttttggattggttggagcctatgcagtttatatgtggaggcatagaagattttttgggaattctagagagagtttagaacatattgggcgtgtggttgtcctgaatatggtactgctccacttttttctgcttattttattttgccttcgtttcaaaaactttctttgttccatgtgcaacattttcttttttcatagggtatgggcctcctttcaaggggaattgataactggggccatctgggaggcttgcttgggggagttgccatggcatggttcctaggtccggcatggcaatatcagtacgtggcaaaggatggtagagcggttttcaaagacagggctccagtcctccgactaataaaggggtagacctgtgggtattcgtggaaatagcgtggaagaggatgaaaaggggaaagggggtgaagattcagacatgcgccgagcaaagggagtggcgaaaaaacaattaggccctctttggaatgaaagaatttcagagaaatcatacatgaatcagttcatttttcatagaaaaaacacatgaaccttaacatgtaactagttttggtgtcgaaacatttcactgcagagctaattgctgaggaaacacacacgagaatcatattgctttgttcgaatcgtggcaattgttaaatcttcaaagctaagacgagttgtggactgtcagttgtatttccaggtatcaatagccctttttgtactaaccataggatctgctgtcaagttcctacgttggacattgttacgcaaccggatcctctacagtaacttgaagtagctgctgataggtcaggtcattgacgtgcggggttggccttgtctggcccatgcacttaagttgtcggatattactgcagatgaatggcttccgactgttactacgtttcttcttgtccagtactgcaagagatgataaaatatgta

SEQ ID NO: 108657 - DNA, 1932 bp, Zea Mays
cgataatctaccagtgggccctggttgacagcccaacgcacggctctcctgtgcgcctccgatgccgtttccccgaagcaaagggagacgaaagctcaaaaggtccccccgcttcctgtggtccacgcacgcacgcaggcggcggtggtgcccatggcttcgtggctgttgctccccttctcctccttcccgtggcctcccccgcccccaccaggctcctcctccggccgcggcggcgatggcggcggagacggcggcgattggaggccgaccgtcgtcgcagccttcgcaggcgtgcaagtcggccgcgctctccgccgccgcttcgccggcctcctccgctcaccggaggtgcgacatcttgatgccttgccgaaaatgggtagcttttggtttgaaggatcagaatcgcttgcgacattccacattcttggcgcgatagggattgtgttctctgcaccttatgtttgcagctctgctctgttcagtgggaacgggtcagggggtagatacatcagcaacgggaagttgttgtccagacggcctcgtggaatcgattccaagaagaggctctggactaatgtccttcttgctcttaatgtcctgtaagtcggtggacaatttgagtttatgtgatagtagctccaatcctttggtacatttgttgtttaacacccttccttttgctctcaacgaagggcttatgtcgctcaggtagcatcacaaggaaagcttctcatgtggggagccaagtctgattgatagagggcaattttggcgtttggcaacatcatctctacttcatgcaaatctcacccaccttgcattcaattgtttctctttgaactctattgggcccatggttgaaatgttaagtggtcctagaagatatctagctgtttatttcagttcggcgctggcaggttcactgatgagctaccgttttagtgcgtcacctgctgttggtgcgtcaggtgccatttttggattggttggagcctatgcagtttatatgtggaggcatagaagattttttgggaattctagagagagtttagaacatattgggcgtgtggttgtcctgaatatggtactgctccacttttttctgcttattttattttgccttcgtttcaaaaactttctttgttccatgtgcaacattttcttttttcatagggtatgggcctcctttcaaggggaattgataactggggccatctgggaggcttgcttgggggagttgccatggcatggttcctaggtccggcatggcaatatcagtacgtggcaaaggatggtagagcggttttcaaagacagggctccagtcctccgactaataaaggggtagacctgtgggtattcgtggaaatagcgtggaagaggatgaaaaggggaaagggggtgaagattcagacatgcgccgagcaaagggagtggcgaaaaaacaattaggccctctttggaatgaaagaatttcagagaaatcatacatgaatcagttcatttttcatagaaaaaacacatgaaccttaacatgtaactagttttggtgtcgaaacatttcactgcagagctaattgctgaggaaacacacacgagaatcatattgctttgttcgaatcgtggcaattgttaaatcttcaaagctaagacgagttgtggactgtcagttgtatttccaggtatcaatagccctttttgtactaaccataggatctgctgtcaagttcctacgttggacattgttacgcaaccggatcctctacagtaacttgaagtagctgctgataggtcaggtcattgacgtgcggggttggccttgtctggcccatgcacttaagttgtcggatattactgcagatgaatggcttccgactgttactacgtttcttcttgtccagtactgcaagagatgataaaatatgta

SEQ ID NO: 108658 - DNA, 1766 bp, Zea Mays
gccaaatccgataatctaccagtgggccctggttgacagcccaacgcacggctctcctgtgcgcctccgatgccgtttccccgaagcaaagggagacgaaagctcaaaaggtccccccgcttcctgtggtccacgcacgcacgcaggcggcggtggtgcccatggcttcgtggctgttgctccccttctcctccttcccgtggcctcccccgcccccaccaggctcctcctccggccgcggcggcgatggcggcggagacggcggcgattggaggccgaccgtcgtcgcagccttcgcaggcgtgcaagtcggccgcgctctccgccgccgcttcgccggcctcctccgctcaccggaggtgcgacatcttgatgccttgccgaaaatgggtagcttttggtttgaaggatcagaatcgcttgcgacattccacattcttggcgcgatagggattgtgttctctgcaccttatgtttgcagctctgctctgttcagtgggaacgggtcagggggtagatacatcagcaacgggaagttgttgtccagacggcctcgtggaatcgattccaagaagaggctctggactaatgtccttcttgctcttaatgtcctggcttatgtcgctcaggtagcatcacaaggaaagcttctcatgtggggagccaagatcaacagtctgattgatagagggcaattttggcgtttggcaacatcatctctacttcatgcaaatctcacccaccttgcattcaattgtttctctttgaactctattgggcccatggttgaaatgttaagtggtcctagaagatatctagctgtttatttcagttcggcgctggcaggttcactgatgagctaccgttttagtgcgtcacctgctgttggtgcgtcaggtgccatttttggattggttggagcctatgcagtttatatgtggaggcatagaagattttttgggaattctagagagagtttagaacatattgggcgtgtggttgtcctgaatatgggtatgggcctcctttcaaggggaattgataactggggccatctgggaggcttgcttgggggagttgccatggcatggttcctaggtccggcatggcaatatcagtacgtggcaaaggatggtagagcggttttcaaagacagggctccagtcctccgactaataaaggggtagacctgtgggtattcgtggaaatagcgtggaagaggatgaaaaggggaaagggggtgaagattcagacatgcgccgagcaaagggagtggcgaaaaaacaattaggccctctttggaatgaaagaatttcagagaaatcatacatgaatcagttcatttttcatagaaaaaacacatgaaccttaacatgtaactagttttggtgtcgaaacatttcactgcagagctaattgctgaggaaacacacacgagaatcatattgctttgttcgaatcgtggcaattgttaaatcttcaaagctaagacgagttgtggactgtcagttgtatttccaggtatcaatagccctttttgtactaaccataggatctgctgtcaagttcctacgttggacattgttacgcaaccggatcctctacagtaacttgaagtagctgctgataggtcaggtcattgacgtgcggggttggccttgtctggcccatgcacttaagttgtcggatattactgcagatgaatggcttccgactgttactacgtttcttcttgtccagtactgcaagagatgataaaatatgta

SEQ ID NO: 108659 - DNA, 2348 bp, Zea Mays
gccaaatccgataatctaccagtgggccctggttgacagcccaacgcacggctctcctgtgcgcctccgatgccgtttccccgaagcaaagggagacgaaagctcaaaaggtccccccgcttcctgtggtccacgcacgcacgcaggcggcggtggtgcccatggcttcgtggctgttgctccccttctcctccttcccgtggcctcccccgcccccaccaggctcctcctccggccgcggcggcgatggcggcggagacggcggcgattggaggccgaccgtcgtcgcagccttcgcaggcgtgcaagtcggccgcgctctccgccgccgcttcgccggcctcctccgctcaccggtaccgtgcctcgcctcgccttccatttcgttgtaacttgggatgcacaccatgatagcgtctacttagtctgttcccaaccaaacaggcctcagaccctcagtctgttgttgactgagctctcacgctctttgttcattggatggcgatttttgtgtgtgtgtgtgtgtgcgcgcgcgctcgatcaaatacttaatgtcaagtgaacctttctactctaggaggtgcgacatcttgatgccttgccgaaaatgggtagcttttggtttgaaggatcagaatcgcttgcgacattccacattcttggcgcgatagggattgtgttctctgcaccttatgtttgcagctctgctctgttcagtgggaacgggtcagggggtagatacatcagcaacgggaagttgttgtccagacggcctcgtggaatcgattccaagaagaggctctggactaatgtccttcttgctcttaatgtcctgtaagtcggtggacaatttgagtttatgtgatagtagctccaatcctttggtacatttgttgtttaacacccttccttttgctctcaacgaagggcttatgtcgctcaggtagcatcacaaggaaagcttctcatgtggggagccaaggtttgtgtcttggttggaatttctgtttcagttatgcgctgttgattttgttaacctaatacagttatgaccatcatttgcaatgaaagatcaacagtctgattgatagagggcaattttggcgtttggcaacatcatctctacttcatgcaaatctcacccaccttgcagtatgtttttatgtttgaattgggttttatatttcatagaaaaaatatcagctaacttcctacctgttggatgttgtcataatgatgcagttcaattgtttctctttgaactctattgggcccatggttgaaatgttaagtggtcctagaagatatctagctgtttatttcagttcggcgctggcaggttcactgatgagctaccgttttagtgcgtcacctgctgttggtgcgtcaggtgccatttttggattggttggagcctatgcagtttatatgtggaggcatagaagattttttgggaattctagagagagtttagaacatattgggcgtgtggttgtcctgaatatggtactgctccacttttttctgcttattttattttgccttcgtttcaaaaactttctttgttccatgtgcaacattttcttttttcatagggtatgggcctcctttcaaggggaattgataactggggccatctgggaggcttgcttgggggagttgccatggcatggttcctaggtccggcatggcaatatcagtacgtggcaaaggatggtagagcggttttcaaagacagggctccagtcctccgactaataaaggggtagacctgtgggtattcgtggaaatagcgtggaagaggatgaaaaggggaaagggggtgaagattcagacatgcgccgagcaaagggagtggcgaaaaaacaattaggccctctttggaatgaaagaatttcagagaaatcatacatgaatcagttcatttttcatagaaaaaacacatgaaccttaacatgtaactagttttggtgtcgaaacatttcactgcagagctaattgctgaggaaacacacacgagaatcatattgctttgttcgaatcgtggcaattgttaaatcttcaaagctaagacgagttgtggactgtcagttgtatttccaggtatcaatagccctttttgtactaaccataggatctgctgtcaagttcctacgttggacattgttacgcaaccggatcctctacagtaacttgaagtagctgctgataggtcaggtcattgacgtgcggggttggccttgtctggcccatgcacttaagttgtcggatattactgcagatgaatggcttccgactgttactacgtttcttcttgtccagtactgcaagagatgataaaatatgta

SEQ ID NO: 108660 - DNA, 394 bp, Zea Mays
cgttgaggaagcgcagaccagataagtagtattattgcaatctttatattttatgtatgcaattttcatgcttatttgttgagtatcaaaactttatgtctatatataaaattgtttattaaatttactataaatatatatatatatatattagatagaattttacatgaaaattttgtcgcggcacaccttatataaaaatcctaggtccgccactgtgagaaggtgtacatgtttcttatatagagatatgagacccctcagggacaaagcaggtatttgcccacgtaactctaactagggttacttatcataccccttatcatctccctgcgttagcctagcccataatgatgcgcgtgagcccataataacaaagtcaaacaatttttag

SEQ ID NO: 108661 - DNA, 1339 bp, Zea Mays
agtggcgcttggggctgttcgttgtggtggtgcggcaggaagagacgatggcgcgaggtggcgcgtgggccgcggtggcggcggcggccgtgtggtggatggcggcgggggccggggcggtatggctggagattgcgccgtcagggactaagtgtgtgtcggaggagatccaatccaacgttgttgtcatcggcgactactccgtcctctatgatcaccaccacgcccagcctaccatctccgtcaaggttacgtccccttttggagacattgttcataagaaagagaaggtttcgatggggcaatttgcatttaccacagcagaagcagggaactaccttgcctgcttctcaattgatggtgaggacagagggttagtggtgaagctaaaccttgactggaaaattgggctggctagtagagactgggattctgttgccaaaaaggaaaagatcgagggagttgaactggagttgctcaagctcgaagttgctgtccaatcaatccatgacaacctgctgctactaaaatccaaagaagctaacatgagggacgtcagtgagcagacgaattctagggtcacgtggctgagcatgctgtctcttgttgtttgcattgcagtctctgttttacagctgtggcatctacaacagtacttccgaaagatgaagctcatctgacctgatgtctgaaatatagtgctctgcaataagcttatcttcatcttttttttttttgcatatgagatctggtagttccaccgtcgagcctagcaattgtaaataaaatggtataacaaactgaaatcccacacatgagactgctgttttccttgttcgacttacttttgcagcgtgcaaaacagtgttttttctttccttttcttccatggacaactcagggatgcctctgctacaactacaagcatggacaacctcattgtgccactgacgcactcgccacagccacgaggaaatccctgtagtcactcccaggcaagttttcttggatgtattctgcgaggctcttcccgtaactactctggaacgctgatctgatctcgtctataccgacatcatcgctgcccaagatagccctcgttaccatcctcgtatcagtcgctgcgggtagcatacttctgtgcagtaactggaaatatcaagggcagaagaatgaataaaaacacaggtacagaacagtctgcctttaatttgataccgatccatgggtttctgggattttgttaccttggagtagtacttggaagggttgtagatgcacttgacaacgactctgaggggtccttcgaattcgccagacccgtttatcttcagtgcct

SEQ ID NO: 108662 - DNA, 369 bp, Zea Mays
atgagcgccgccagcgaagcgaagatccctgcaaaatgcccatgcccatgcccaacggaatcgcacccatcaatcgaaccccaaagctctcaagcgaaaaatggaggctactcctcgaatcttagggctcccggtctcacctggaaggtagtggaggaaggagacctggaccgcgctgcaaacgaccgcgtccacccagaaccaccatccggccccgaagatggcgccggacacgcccgggccgatgatgccccaaagcagagcaaggttctccatggtcgcgacctctcctcaccaactcctcccaccaagcaatctcctcgtcgttctgctcttcaccctttttcgggagaaattattcttttctaa

SEQ ID NO: 108663 - DNA, 1562 bp, Zea Mays
tcacactatagggcattattagagagagctacaaacatgaagctaagactggtagcgctagtgctagcggtagcgtcggtgtacgcttgctcgtcggcggcatcagcgttcgcgggggacgacgtcgtccgtgtcgcgctaaagcatgtcgacgctgggaagcagctgtccaggcccgagctgatccggcgcgccatgcggcggagcaaggcgagggcggccgcgctgtccgcggtgaggaaccgcgcccgcttctctggcaagaacgagcagcaaacgcccgccggcgtgctgccggtgcgcccgtcgggggacctcgagtacgtcgtcgacctcgccatcggcacgccgccgcagcccgtctcggcgctgctcgacaccggcagcgacctcatctggacgcagtgcgcgccgtgcgccagctgcctctcgcagccggacccgctgttcgccccggggcagtcggcgtcgtacgagcccatgcggtgcgccgggacgctctgctccgacatcctgcaccacagctgcgagaggcccgacacgtgcacctaccgctacaactacggcgacggcacgatgaccgtgggcgtgtacgccacggagcgcttcaccttcgcgtcgtcgggcggcggcgggctcacgacgactaccgtcccgctcggcttcgggtgcggctccgtgaacgtcggcagcctcaacaacggctccggcatcgtgggcttcggccggaacccgctctcgctcgtgtcccagctctccatccgccgcttctcatactgcctcacgtcctacgccagccgcaggcagagcaccctcctgttcgggtccctgtccgacggagtctacggtgacgccacgggccgcgtgcagaccacgccgctcctccagagcccccagaacccgaccttctactacgtacacttcacgggcctgaccgtcggcgccaggcggctgcggataccggagtcagcgttcgcgctccggcccgacggctcgggcggcgtgatcgtcgactccggcacggcgctcacgctcctcccagccgcggtgctcgcggaggtggtgcgggcgttccgccagcagctgaggctgccgttcgcaaacggcggcaaccccgaggacggcgtgtgcttcctggtgcccgcggcctggcggcgctcgtcgtcgacgtcacagatgccggtcccgaggatggtgctccacttccagggcgcggacctcgacctgccgcgccgaaactacgtcctggacgaccacaggaggggccgcctgtgcctcctcctggcagactccggcgacgatggctccacgattggcaacctggtgcagcaggacatgcgcgtgctctacgatttggaggcagagaccttgtcgatcgctccggcacgatgctgacacgcgcgcaactagtagaaaggccgccgactactcgactactctcactgtatgcaagttagtgttaaccatgcaaatgcatgccaaccataccgggtcgcactttgcacgcagcaaacaaattttttttgtcggtctaaggggagagggtcccgcctgaatattcc

SEQ ID NO: 108664 - DNA, 1683 bp, Zea Mays
gtcgagagtaatggagtgatgcaacacatcacacatgcatggccacggtatttatacaaggatccaagaagccttcgtgctcacagcatacctttcatggtagctagctagtggcgtactgcgctcgctaccactcaacacgtctcgaccccgaccaaaaatgccgagtcttgcggcgttcttggtcctcctgctcccgccgctgctgctttccgctgctggtgccgcagaggcagaggagcttatcggcttcaaggccacgctgaggcacgtggacgcggacgccgggtacacggaggagcagctgctctcgcgagcgctacgccgcagcagtgctcgcgtggccacgctgcagtcgctcgcggcgttggcgccgggcgacgcgatcaccgcggcgcgcatcctggtgctcgccagcgacggcgagtacctgatggagatggggatcggcacgccgacgcggtactactcggccatcctcgacaccggcagcgacctcatctggacgcagtgcgcgccgtgcctgctctgcgtcgaccagcccacgccctacttcgacccggcgcggtccgccacgtacaggtcgctcggctgcgcgtccccggcgtgcaacgcgctctactacccgctctgctaccagaaggtgtgcgtctaccagtacttctacggcgacagcgccagcactgccggcgtcctcgccaacgagacgttcacgttcggcaccaacgagacccgggtcagcctgccgggcatctcgttcgggtgcgggaacctgaacgctggctcgctcgccaacggctccggcatggtcggcttcgggcgggggtccctgtcgctggtcagccagctgggctcccccaggttctcctactgcctcacctccttcctgtctccggtgcccagccggctctacttcggcgtgtacgccacgctgaacagcaccaacgccagcagcgagccggtgcagtccacgccgttcgtcgtcaacccggcgcttcccacgatgtacttcctgaacatgacgggcatcagcgtcggcggctatctgctgcccatcgacccggcggtgttcgccatcaacgacacggacggcacgggcgggaccatcatcgactccggcaccaccatcacgtacctcgcggagccagcgtatgacgctgtccgcgcggccttcgcgtcgcagatcacgctgcccttgctcaacgttacggatgcctcggttctggacacgtgcttccagtggccgccgccgccgcgccaatcggtgacgctgccgcagcttgtgctccacttcgacggggcggactgggagctccctctgcagaactacatgctggtggatcccagcacagggggcggcttgtgcctggccatggcgtcgtcttccgacggctccatcatcggcagctaccagcaccagaacttcaacgtgctctacgacctcgagaacagcctcatgtccttcgtcccagcaccgtgccatctaatgtagctgtaacttgagtttccgtgtacctttatttcgtttccgatccgttgctatttatgcatagatgtgttctatggattggtgattggtgcttggtactttggtagggcttttaactaggtcggtgatctgtatcagtaaagcatactgtatttggtttatgtattgttgtctcttctcaacatctgatgatt

SEQ ID NO: 108665 - DNA, 1715 bp, Zea Mays
gcccgtcctaaaaaatcggtcagtacaggtaggaacaaacccaaccaacccaccacaagtcgcaattcacaccagcgcgacgacaggaagaagagtttctccgccgcagtcgccgaaccacccggtgccgaggccctaggcgcgcttgcttccccgccgccagcatggcaccgaagcgcccggccgccgcctcggggtcggcgtccgaggcatccgacgcggaggcggacgcgggccaccaccagccatcatccccgtctccgtccaagacgccgccgccgcccaaccctaaccctaagtccaccgccgctggccccacctcggcggcggaggactccaccgcggctggatccggctccgaggccgcctacgactctgacgcggaccaccgcaccgcgccccgtaacgcggcgtcgccctcgagcaagcccaggagcaccaggccgcgctcgcgctcccgctcccgctccccggacgccgcctcgtattccgacggcgtggcctcagacgctgacgccgacccagccgccgtagacggcgccgactccgccgacgacggcaacgcctcgccgctcgcgcccccgcgcccgtcccgcgccgaggccgccgccgtcaagcccatcagctcgcgcccaatggatccgccgcgccgctccatggtgccctctttctcggagcagcgctcgaagcgcccccgcagcgtcgccgtcccgtcatccgtggagcacctcaagaggccgacgcggctctggagcctccacgacgagatcgtcatcctgcggggcttggccacgtaccgcgccaagcgtggcgtcctccccggctccacgtacgacatttctaagctacacggccgcatccggagcgagctcagcgttaaggtaaccaccacgcagctcggtgacaaggtacggcgtctcaagcagaagtacaacctgcttgcgtcacgtggcaagagcgggcgggatccagacttgcccagccagcacgaacagagcgtctatgagattggcaagaaggtttggggaggaagtgctaacggtggaggaagtaccggtggtgatgggtacgagattggtggtgacagcgaagaggagcatgagtttcgagagagtgacgaggatgtggagaatggccgagatgaacgtgcccgcaagaacaggagggttatgccaatcgccatggcaaacggcaacggggctgggttgggggctgtgaaagccaatagcagagggaagtttgatactgagaagggaaaggatgcttacccctacctttgggagactgtggaggatctgtcaaaggagcacccgaacggggtagcattcaagaaggccttcgagtcgatcgaaggccccaaagcgcgtgggatggaggaaaaactgcgaaagttcaggttgacagagatcagacaccagctgcgccgtatggaactgatgaaggagacggtgaagatggtgctcgatgcgctggagggttgaccgagactgaatggtcttctggtcttcttttgtttctagatagagtttttgtggctgagttacttaacttttatggacaaaggtgcacttgtctcagtaagaatataggtacagaaagaaagtgagactgatggtgtttcccttgttcctgtggatcatagtgttttgtgtgtcatacatgatacatgtgctaacttttgcgttatatggtatacagtctgtatgtttagtcaa

SEQ ID NO: 108666 - DNA, 1854 bp, Zea Mays
attccaaccaaacggccagtgggccagccgctcgcccgctcccagtccgggcgcactgacaccgaagagggaaagaactcgggtgcgtgcggcgggcctgttgcgttgcggcacacagctcaccgaatccgaaccccacgcggcgtcgctccgcccgtcctaaaaaatcggtcagtacaggtaggaacaaacccaaccaacccaccacaagtcgcaattcacaccagcgcgacgacaggaagaagagtttctccgccgcagtcgccgaaccacccggtgccgaggccctaggcgcgcttgcttccccgccgccagcatggcaccgaagcgcccggccgccgcctcggggtcggcgtccgaggcatccgacgcggaggcggacgcgggccaccaccagccatcatccccgtctccgtccaagacgccgccgccgcccaaccctaaccctaagtccaccgccgctggccccacctcggcggcggaggactccaccgcggctggatccggctccgaggccgcctacgactctgacgcggaccaccgcaccgcgccccgtaacgcggcgtcgccctcgagcaagcccaggagcaccaggccgcgctcgcgctcccgctcccgctccccggacgccgcctcgtattccgacggcgtggcctcagacgctgacgccgacccagccgccgtagacggcgccgactccgccgacgacggcaacgcctcgccgctcgcgcccccgcgcccgtcccgcgccgaggccgccgccgtcaagcccatcagctcgcgcccaatggatccgccgcgccgctccatggtgccctctttctcggagcagcgctcgaagcgcccccgcagcgtcgccgtcccgtcatccgtggagcacctcaagaggccgacgcggctctggagcctccacgacgagatcgtcatcctgcggggcttggccacgtaccgcgccaagcgtggcgtcctccccggctccacgtacgacatttctaagctacacggccgcatccggagcgagctcagcgttaaggtaaccaccacgcagctcggtgacaaggtacggcgtctcaagcagaagtacaacctgcttgcgtcacgtggcaagagcgggcgggatccagacttgcccagccagcacgaacagagcgtctatgagattggcaagaaggtttggggaggaagtgctaacggtggaggaagtaccggtggtgatgggtacgagattggtggtgacagcgaagaggagcatgagtttcgagagagtgacgaggatgtggagaatggccgagatgaacgtgcccgcaagaacaggagggttatgccaatcgccatggcaaacggcaacggggctgggttgggggctgtgaaagccaatagcagagggaagtttgatactgagaagggaaaggatgcttacccctacctttgggagactgtggaggatctgtcaaaggagcacccgaacggggtagcattcaagaaggccttcgagtcgatcgaaggccccaaagcgcgtgggatggaggaaaaactgcgaaagttcaggttgacagagatcagacaccagctgcgccgtatggaactgatgaaggagacggtgaagatggtgctcgatgcgctggagggttgaccgagactgaatggtcttctggtcttcttttgtttctagatagagtttttgtggctgagttacttaacttttatggacaaaggtgcacttgtctcagtaagaatataggtacagaaagaaagtgagactgatggtgtttcccttgttcctgtggatcatatgtgctgtttggtttaagaaatgtaacgcaaagggtaatggtaatggtttacattcgatta

SEQ ID NO: 108667 - DNA, 1524 bp, Zea Mays
ctccacggccgccgcactctactcatccggctcccccgtcctccagctcaactccaacaacttcaaatcgaaggtgctgaactcgaaccgcgtggtgctggttgagttcttcgcgccgtggtgcgggcactgcaagcagttggcccccacctgggagaaggctgccggtgtgctcaagggcgtcgccacggtcgcagcgctcgatgctgatgcgcagcaggcgctcgcgcaggaatacggaatcaagggatttcccactattaaggtgttttcccctggtaaatctccagtcgattatcaaggagcaagagatgtaaagccaatcgtagagtttgctctgtcacaggtcaaggcccttcttagagataggttgagtggtaaggcatcagcagggtcaaatggcaagacatctggaggttcaagtgagaaaaatgaaccaagtgcatcagtagaattaaattcgcgtaacttcgatgaactcgttgtcaaaagcaaggacatttggattgtggaattctttgcgccatggtgtgggcactgcaagaaattggcacctgaatggaaaaaggctgcgaagaacttgaagggccaagtgaagctaggccatgttgattgtgatgctgaaaagtccttgatgagcaagtacaaggtggaaggttttccaactattttggtatttggtgctgataaggagagcccgttcccctaccagggggctagagttgcatctgccattgaatcctttgcattggagcagttggaagccaactctggcccagttgaagtttctgagttgactggcccggatgtcatggaagagaagtgtgcttctgctgccatttgttttgtatcattccttccagacatcctcgattcaaaggcagagggaagaaacaagtaccttgagctcctgctctcggttgctgagaagtataaaaagagtccatacagttttgtctggacagctgctggcaagcaagctaatctcgagaaccaggttggagtgggcggctacggctatcccgccatggttgctctcaacgtgaagaaaggtgcatacgctccactccgtaatgccttccagcgcgacgaaatcatcgagtttgtgaaggaagcagggcgcggtggaaagggaaatcttcctctgaacgttgcgccgacagtagtcacttccgagccgtgggacggcaaagacggagaggtcatcgaagaggatgaattctcccttgacgagctcatgggcgacagctcctcagtaaacgatgagttgtagttctgacgattctgtaactgatctgcgtgccgattagcctgactgtaaatctgaggaactctgatgttttaaaaactcattaaattttcagattttggatgctagaattagaatggttaagattaaagagaactgatgtgataggcacatctttttttgtccctgaaataaagtcagttgtgggcgttgcttgccgcaacaaatggtgtcgctttagatggtctcaagcaacatcatctatatttatcttc

SEQ ID NO: 108668 - DNA, 735 bp, Zea Mays
atgggtaaaacatgggcgctcatcacccacctccacgctctcgcagggccgagtctcactctgatataccctctgtacgcgtcgatctgcgcgatggagagcgcgaccagggtggacgacgagcagtggctggcctactggataatctactccttcatcaccctcttcgaaatggcggccgagcatgtcctctactggataccgctgcggtacgaggcgaagctgctgctggcggcgtggctggtcctgccgcacttcaggggcgcgtccttcatctacgacaggttcgtcagggagcagctgaggaagaacggggtgagtctgcgcggtcaccaccacggccacgccgccgaccacgtgccgcacgtcttccaggctgagcatcgtcatggcgtgcacagctgagagccccgagaatctacacgccgtggttcttccgagaagaaaactgaactgcgccaacgcggttcgttgtctgccgtcacctgaactgcgcaggacggccgcgcgatccgtttctcggtcgtaagctaccatctcgagagagcacttgacttggacatcgtcactccactaggctcgtcctaattcacatgggcctgattcttcagctggaggagttcctttgtaacgaataaatttcagcagagatgattgcgtaactgtgtattgcttattgctgaaacattccgaatattggattgcttgtgcactgacaggtgacaggctcgtatg

SEQ ID NO: 108669 - DNA, 724 bp, Zea Mays
ctagctatttcctgtattctcttcctgccggccgctagagagattggcatcgcactgctctctgtgtttggccgctctatgtttggcggagtccctttcgtttctgtcggcttcgtctgtttctgtacgccgcctccgtacaagaacagcttcctgtttatcgatctgtctctctgcactgaaaacacgggccccgcagacctcgccgccaacgagcacatccctttgggcgggcgagctgctgtctgctgggagctgacggtggtccgagcacgacaggtcgggtgtgtgtaagatcagtcggtctcttgaccgtcttcgacttttaaaactcgtatctagtcctcatttacccgaatccctcgttgtgtaatgaatgtatggatctaatgtaatattcgggatcgagttatgagttgatagaacgtagatttttctgtgataattttctgtacctttactaatctgttctgtcatcaaggccgtggatgcaaaagatcccgagccactgtgatctctgttgacatatatttaaaactcattttgggttaggttattaaaccctaaccctaaaaacatcgatctgttttttactatctcggatttcttgggtttggtcgagacagtctctgacagtggccaaaaacctaactcgagatctaaaattatttcagtctattctaatctttctgttctcgggtgatcgatgataataaaaaaaaaa

SEQ ID NO: 108670 - DNA, 713 bp, Zea Mays
ctagctatttcctgtattctcttcctgccggccgctagagagattggcatcgcactgctctctgtgtttggccgctctatgtttggcggagtccctttcgtttctgtcggcttcgtctgtttctccgtacaagaacagcttcctgtttatcgatctgtctctctgcactgaaaacacgggccccgcagacctcgccgccaacgagcacatccctttgggcgggcgagctgctgtctgctgggagctgacggtggtccgagcacgacaggtcgggtgtgtgtaagatcagtcggtctcttgaccgtcttcgacttttaaaactcgtatctagtcctcatttacccgaatccctcgttgtgtaatgaatgtatggatctaatgtaatattcgggatcgagttatgagttgatagaacgtagatttttctgtgataattttctgtacctttactaatctgttctgtcatcaaggccgtggatgcaaaagatcccgagccactgtgatctctgttgacatatatttaaaactcattttgggttaggttattaaaccctaaccctaaaaacatcgatctgttttttactatctcggatttcttgggtttggtcgagacagtctctgacagtggccaaaaacctaactcgagatctaaaattatttcagtctattctaatctttctgttctcgggtgatcgatgataataaaaaaaaaa

SEQ ID NO: 108671 - DNA, 892 bp, Zea Mays
aaaccctagctatttcctgtattctcttcctgccggccgctagagagattggcatcgcactgctctctgtgtttggccgctctatgtttggcggagtccctttcgtttctgtcggcttcgtctgtttctgtacgccgcctgtgagctttctttggccgccgttctactttccctcttctccctctctgttttttttttttaatttcacctgccgcactactactcggccgccagggagaacctgacaaccggtcattggtttctcaatgtcctctctttgctataattatttttttctttcagccgtacaagaacagcttcctgtttatcgatctgtctctctgcactgaaaacacgggccccgcagacctcgccgccaacgagcacatccctttgggcgggcgagctgctgtctgctgggagctgacggtggtccgagcacgacaggtcgggtgtgtgtaagatcagtcggtctcttgaccgtcttcgacttttaaaactcgtatctagtcctcatttacccgaatccctcgttgtgtaatgaatgtatggatctaatgtaatattcgggatcgagttatgagttgatagaacgtagatttttctgtgataattttctgtacctttactaatctgttctgtcatcaaggccgtggatgcaaaagatcccgagccactgtgatctctgttgacatatatttaaaactcattttgggttaggttattaaaccctaaccctaaaaacatcgatctgttttttactatctcggatttcttgggtttggtcgagacagtctctgacagtggccaaaaacctaactcgagatctaaaattatttcagtctattctaatctttctgttctcgggtgatcgatgataataaaaaaaaaa

SEQ ID NO: 108672 - DNA, 1670 bp, Zea Mays
accgagccggcaagcaggctgtttacctgtttctgctagcaagccgagatgtggcgaaatttagaaagcctgaggtgtcggccgttcacgattacctttatgttcacgttcttctgcgtgcaaacgttccattcattggcgcaattaatggcggccattcttggtacgcctctcttccatctttctttaccatgctgagttgtctgtcaatgacctcaaaagctggcgggagaccgtcctcgaccgcattgaccccgccgtggcacggcctcgaggccggcgacgacgcaggcgcgaggcgccggagggtccggccatgacgtcgtccgtgcggcagtggtggcgccgcgccgccgctgcgctcaaggacaggaggagcctgctcctggcgcgcctgcgcccgcgccgggccgggtcgtcgtcgtggcaccaccgggagctggaggcggccgtgatccgcgcgacgagccacgaggaccggtggatggactaccggagcgccgcgcgggtgttcgcgtgggcgcgctcgtcgcccacgttcatccggcccgtcatgtgggcgctggcgcgccgcgcgcggcggacgcggtgctgggtcgtggcgctcaagtcgctcatgatcgcgcacggcatcctcctccgctcgggccgcgcgccgcgcgccggccgcgtccccttcgagctcgctgacttccgagaccggtcctcgtcggcggcggccaggtccctggccttctccgcctttgtgcgcgcttacttccggtttctggactaccgctccctcttcgccgcgcaggaggacaccgacggcgatgacgacgccgaaaggtgctcggatccccagacggcctgtcttgatcggatagcgaagaaacagttcatgctcgagctgctcctacaaatccgcccgtacggcgacggcatggaggtgccgctggtcctcgaggccatggattgcgtcctcatcgagatcttccaggtgtacggcgagatatgcaccggcatcgcgcggttcctcatcagcggcgttcagggcggaccggcgatgctgacgacccgcaaggaggtcatggcggcaggggtgaaggtgctctggcgggcggcggagcagagcgctcagctctcgtcctacttcgacctgtgccgcgagctcggcgtggccaacgcgcgcaagctcccgacatcattagttcgcttgaaagacgacgacgtccgggacctcgagcggatcctcatgagtgagagtgacatccagaacgaaagcggtgaggaggcggaggcggaggcagaggcagaggcagaggcggcggcggacgtgaaggacgcggggtcaacgtcgacgaacactgcggtggtgatggcaacaacggaatgggtgacattcgacgaggagagaccaagcgctggcgttgtcgcctaccacggcgggggtcacgtctctaatcactggaaccccttcgtcgctgcgccgttagacggtagggaaggcggaaacctgatcgagcttttctagttttctaaccgaacgcaatattgttgggttaaaccataaccttttgctcttttgcgcccgcccgattgtacactatgctctttgtaaatagtaacgtgactcgtttggtccagctttgttagtttctcattctattgagtgcaaccctaccatgact

SEQ ID NO: 108673 - DNA, 1291 bp, Zea Mays
ggcacggcctcgaggccggcgacgacgcaggcgcgaggcgccggagggtccggccatgacgtcgtccgtgcggcagtggtggcgccgcgccgccgctgcgctcaaggacaggaggagcctgctcctggcgcgcctgcgcccgcgccgggccgggtcgtcgtcgtggcaccaccgggagctggaggcggccgtgatccgcgcgacgagccacgaggaccggtggatggactaccggagcgccgcgcgggtgttcgcgtgggcgcgctcgtcgcccacgttcatccggcccgtcatgtgggcgctggcgcgccgcgcgcggcggacgcggtgctgggtcgtggcgctcaagtcgctcatgatcgcgcacggcatcctcctccgctcgggccgcgcgccgcgcgccggccgcgtccccttcgagctcgctgacttccgagaccggtcctcgtcggcggcggccaggaggacaccgacggcgatgacgacgccgaaaggtgctcggatccccagacggcctgtcttgatcggatagcgaagaaacagttcatgctcgagctgctcctacaaatccgcccgtacggcgacggcatggaggtgccgctggtcctcgaggccatggattgcgtcctcatcgagatcttccaggtgtacggcgagatatgcaccggcatcgcgcggttcctcatcagcggcgttcagggcggaccggcgatgctgacgacccgcaaggaggtcatggcggcaggggtgaaggtgctctggcgggcggcggagcagagcgctcagctctcgtcctacttcgacctgtgccgcgagctcggcgtggccaacgcgcgcaagctcccgacatcattagttcgcttgaaagacgacgacgtccgggacctcgagcggatcctcatgagtgagagtgacatccagaacgaaagcggtgaggaggcggaggcggaggcagaggcagaggcagaggcggcggcggacgtgaaggacgcggggtcaacgtcgacgaacactgcggtggtgatggcaacaacggaatgggtgacattcgacgaggagagaccaagcgctggcgttgtcgcctaccacggcgggggtcacgtctctaatcactggaaccccttcgtcgctgcgccgttagacggtagggaaggcggaaacctgatcgagcttttctagttttctaaccgaacgcaatattgttgggttaaaccataaccttttgctcttttgcgcccgcccgattgtacactatgctctttgtaaatagtaacgtgactcgtttggtcca

SEQ ID NO: 108674 - DNA, 1180 bp, Zea Mays
atactacgtcgaaaatttgatgattattagtgctcatctgtgcagacccaggctcatctgatgatgtctctatccaatgtgcagtgtggagagcttcatagagcaccaggatagctgcaacgccgggcaggcacgggcgggcgccggtgtggctgctgctagtgccgggtcgcagcagcaggcgccgccggccatgtcactgtcgaggaccgcgtcgagcaccagcccgtccagcgacattgccatcagcccggtggccgcctggcccgccggtccggcaccggcgattccaagccctgcatcgaccgccgcgttccactggttcgaacaagtcccgtcgccgcggacaccaccgccatcggtccaccaccgcggcgggcacaacctcgagctgcagctcatgccgccgtcctgcagcggcgcgggcggtgacgcgccaccacgtactccggcggctccgtcacagagccacgccgccgccatggccatgcagctgcagctgtccatcggcgtctgcggggacgcgggcgacgaggtgctggccgcagcgagggaggaggaggcgcgggagcagctgcggcaagctgtggcggagaaggcggcggcggacgaagcccgcgcgcaggcgaagcggcaagcggagctggccgagcgggagctggcgagcgccaagcggatgcggcggcaggcgcaggtggagctgagccgcgcccacgcggtccgggaccacgccttgcgccaggtgaacgcgacgcttctccagatcacctgcctcggctgccgccacaagttccacgcgcgcccgcagctggacgccgttccggcgaggtggcctgcagctgctgctacatgtcctccatcgtgagagaggacgtcctctagcttcttattcgctagctaaatcaatacttgctttttttgccaacgggacgccggccgcggggcttgcatgaattggcgcgtgcgttatgaggtgtgatagaatcagatgctgatgcctgatggtccagtgtgtggacagtggaagatcgctagctggatcgatccagtagtgctgcctagtgtttgagctagccctgtgactgtgaggaggagcaggataggagaggcagtagccgttaggcaaatcgaagacgacgggatagctgctagagctttacttactgtgacgtgcatggaa

SEQ ID NO: 108675 - DNA, 1444 bp, Zea Mays
gcacccggcctctctctctgactctcacccagtccactctccacactctgtctgcctcacgattcacgtcctcagctcccccccctgctgccgctgcagcaaggccgacgagccatggagaaaggggtgcagctgatggaggggaggcaggcgtggccgctccacacgatggggatgcccgtcgccagtacgaccaccaccagcacctgcttcgacgactacagctgcagcagtagcgggtgggagcagtcggcaccgttcggctgcttcggcctcctcgccgccgacgtccatgacctcttcccgctcttcgcagccatggagccggccccgccgccgccgccgtcggcgcacggcgtggccgtcgcgatccccggggagctggacgaccttctcctgaacttctgggacgcgggctgccacgacggcgacgtgggcgagccgccgctcaaggcgcagcaggaggaggaggaggccgccttcaattccagctgcgcctgcgccagcgccacgcacgagcagggctaccgcacccccaccgactccttcacaattcactgtgatgatgatgaccaggccttgagctcgattttctcggcgggtcccgcgccggcagcggagagagcggcgttccagcagcaggcccccgccacagaggcggagcccctgcccagctcgtcctcctccagctgccgcggggacccgcgcgccgccggggccgggaccggcctgccgcttccggggcggggcgccgcgcgggggcctgcgcgggccccgccgcttccgaggacctgcggcccctctctgaaacgtgccgcgacacgcgaagagtcggagcaggcgtcggccgagagcggcggcggcaagcggcggaagggcgcgggcgtggtggtggtgcgtccgttcgcgctgctgaagcccgacggcctggacggcggcgcgacgctggcggacatcaacgcgcgcgtcctgatgcggccggcgcggccggtgcggcaccccgtgggcgagttcgcgtgcgcgccgcgcgtgtccgcggaccagccgggcatctcgggcaaggccgtcgccggcttcacgcgcctgcacacccccgggcgcggctccataaccatcataaggacgcgaggctagtgagtcatggcgacgtaggaatgtagtaggattaggtgtagccgccgcgccggggccggcagtggtgactcgacctccgagtcgcgattccgtgtgtaataatgtaaattatgagcgcacaacctgtaaatcgtaccaataaaatctctgctatctaccagtccccccctgcactgcaccgacgaactgcaaccgaacttttgatcaggaactgaatctagctgccattgtttggcacggggccacggagcttgtaaataaacaggttgtggtacggctgctggaggcaactagctttccttttgtctgc

SEQ ID NO: 108676 - DNA, 594 bp, Zea Mays
tgaggttaatgaatgaactctattgcggcacctctgattctttctgcaccctggccgtcccagtccaatccgacacggccagacgacgcgctacaccctcggatccatcggcagtccaaaaaaacccaagaaccgcatgaagtgaaaaaaacaaggaagaagaaaaaaaaaagttgatcgtatttacagccatatcctccttcattcgcgccgccggaggtaaagcagagagggcctcacgccgcgaacgacgacgagggcctctgatccgggtccggggccgacgccgcaatgccagcaccagcagcaggtgagggcgacgctggcgccggcgcggcgggggccgcggagctggtggaggcgacgcgctcgcaggaggggcacatggagagggtggtggccgggaggtgcatgtgcaacaaggggcgcaccgccttgagcgcgcggagctcggctagctccttgtgcagccgccggttctcccccgtcagcgtctcgcagcagcgcttcaggtgctcgcagtccacctccgtctgcttcagcttcgtcctgcacgcgacgcggcacgccaccaggcaccgggtttttattata

SEQ ID NO: 108677 - DNA, 276 bp, Zea Mays
atggagccggggatggaggcggcgctgatcaaggtcgggatgttcgtgctggtgcaggcgctggtgtacctcatcctgtcgcagtcctccaccgtgttctcgcgcaccaagagcctcggcctccgccccgcgcggtcgctcagcgcgcgccgcatgctcgcgctgctctccgacctgccgctcaacgccggggagccctcgcccgtcgccgccttcgcccggacgcggtccgcgttgtcgcccatgctcgccgcggcccaacggaagcaggactga

SEQ ID NO: 108678 - DNA, 276 bp, Zea Mays
atggagccggagatggaggcggcgctgatcaaggtcgggatgttcgtgctggtgcaggcactggtgtacctcatcctgtcgcagtcctccaccgtgttctcgcgcaccaagagccttgccctccgccccgcgcggtcgctcagcgcgcgccgcatgctcgcgctgctctccgacctgccgctcgtcgccggggagccctcgcccgtcgccgccttcgcccggacgcggtccgcgttgtcgcccatgctcgccgccgccggccggaagcaggactga

SEQ ID NO: 108679 - DNA, 1497 bp, Zea Mays
acccctccgcccgtctctcggtcagtctcaggcgtttcgttcctcggcatctcaagcgcagcagcgatggtggacatcgaccaccggatggccgggctggccccgtcggtggcgcacaccgcggcgctgcgccgcctctcgacgcgcgccgccgcggggccgtcatcggcgtccgcgtcgccgcgccacggcctccactccttccacgccgtggctgcaggcgtgctctcccacctccgcgagtccggggtggccgtcctcccgggcctctcggacgcggagctggtccgcgcggaggccgagttcgggttcacgttcccgcccgacctccgcgcggtgctcgccctgggcgtgccgtcggggcccgggttcccggactggcgcggccgggccggcctccgcgccgcgttcgacctccccgcggcggcggcgtcgctccaggtcgcgaggggcgcgctgtggccgcggtgctggggccggcggccggccgacccgggccgcgcgctgcggctcgcgcgctccgccgtacgccgcgcgccgccgctcgtgccgctcttcgaccgctgctacctgccctgccgcccctgcctcgcggggaacccggtgttcttcgtcgccgacgaccgcgtcctctgctgcggcctcgacctgctctacttcttcacgcgcgactcctccttccagccggcggaccgcgccgtcgtctcctcctcgtccccgctctccgccggcgcgagcaggccgtcgtgcacgcgccggagcctcgacgccgtccaggccccgcgctggatcgagttctggagcgacgccgcgtcggaccgccgccgccgcgactcctcgtcctccgaagcatccaccgcctcctcgtcctcctcctcgtcgtcgtcctcaggatgcccatcgccaccccggcggccaaccccgcggtgggtcgacagctacctcgacgagctggggtcaatgctgaagaaagggggctggagggaccgagaagtggacgagatggtcgaggtcaccgcctccgggttcttggacgacggcgaggaggccccaacacccgactccgaggctatcctcgacgcgctggtcctcaagaccgaccggtgctcggactcgctccggcgcgccgggtggaccgccgaggacgtgtcggacgcgctggggctcgacttccggcgcggcgaggagcgctcccggtcggccgtgcggatcccgccggagatcgccgccaaggtccaacgcctcgcgcaagcgctggcgcgcccgtgacgtgacgtcgatcgatctcccccgttcccgccgccggaggcttcccattctttgtttatctccagtccgaatcgaactgcactagtataaaagtgagaaagtaaactaggccatgttcgcgcgagtgaattatgccgtgctcatgtgcgcgaagcaccgtgcgttgtaaggatacaggatcccagaagagaaatgagagctaaattagccgagaagacacatttgcag

SEQ ID NO: 108680 - DNA, 228 bp, Zea Mays
gtaggtgttgagctggcggacaaaggaggagaagttgcagtgcttgaagtggagcgggaggaggtcgcgcgccagctccacgggcttccacaccacgaaggagcggccttgctccgcccacgagatcacctcgtccgtgccccgctcctccaccatctggtgcgtcttgctcaggaacggcgccggcccgctcctcgacgccgccgcggtggcgccttcctccaccat

SEQ ID NO: 108681 - DNA, 80 bp, Zea Mays
tttattttatttatcaatgagtgtaatattttatctttttcgagaccttcgttcctcagttcgattacttcggaacgaag

SEQ ID NO: 108682 - DNA, 825 bp, Zea Mays
gtggttgtcgacgaacgtgacggccttctccggcagccagccgatcatcccgggcgccttgccgttgccgtccttcatgcgccacagctcgccctggacggccgcctgcagcacgcccttggtggtgaagtcgaacgccgcggcggggccgcccaccgcctgcgcccagttgaccagctcctgcctgtcggcgtcctggttgctggacggctcgccgttgccgtcgtagtggagggagctccatatctcggcgacgacgaaggtgggggcggtgctgtcgacgtacaccttggcgacggcggcggagtagcccttggcgaagtcgaggcgccagccgtcgaagccgaggtcggacttgagccagttgagccagtccgagagctcctgctgcacgcgcgggttgaggtggtcgatgtcgggcgcggcggcgaagtcggcccccgtgtcgcggtgcccgcgcccgttggagtactgcgtgtcgtcgctgcagatcatgtcggggccccagtcgaggcggctgtcgggcgtgccgccctcgaagacgcagtagatgccgcggccgtccttgtagtcggcgcagcggtggttgatcacgacgtcggcgacgcactggacgcccttggcgtggaacgccgcggtgagcgacttgagctccgcgtgggtgccgtacttggacgcgtccaggtcgtagagccggccgggcatgtacccctgcggcgccaccgagtgcgacggcggcgggagccagacgtgcgtggcccccgtcgcggcgatgtcgtccacccgccccaggaggtagttgtaccacccaccttgcttcttcca

SEQ ID NO: 108683 - DNA, 2301 bp, Zea Mays
cctgcatcctgcagaatggatgaagtgaatgtggaaattgtgccacaaatgcatgttccttctgaatctatcgatttagtggaaagtttgattgattcagaacctcctagtccctttggtttctctataagtgccccgattgttcataccaaacatctaagtgaagacataagtgcccttacaattaatggtttgcgtttgaacaatgaagagcaaaattgcaatgaccagaccgaacgaaagggtataactagtcacgatagacattttagtgaagatttaagttgccttgcaattaataacttatatgtaaacaaagaagaccagaatggccttaacttgggtgaacaaaaggtagagagtcgccctaattctgctgagcaaaacatttataaggcagcagagattgctgagaggttcattcagtctatagataatagggtgcttgttgacactgctgcaccaatagaatctgttaaagaggctgtaagcaaatttggaggcattcttgattggaaagagagacgtaagaatgtccagaatgagcttgataaggcactggaagatgctcctaggtacaaaagaagagcggaagctgcggaagctgagaaaagcaaagttgtcatggaattgtgtaccactaggagaaccattgaagggttgaagctaaatctagaaaagacacaaattgaggcaatacaagcacaacaagactcggagcttgctgacatacggttcaaagagattcaacaaggaattgcatgtagagagagtgctgcagcaagagcagagattgagcttgcaaggtaccgctatgctagtgccttggcagaactacatttagtgaaggatgagctacaacaacttcagaaggagtacacgtccataaacactaaaagggacaatgctgaaacaaaagcatgtgaatctagtgttgcatctcaggaggttgagaaaactgtggatgaccttacccttgaaattatcagattaaaagagttgctcacctcttcacaagctactcatattatagcagaggaacaaaaactgaaagtggctttagcgtatcaacgagaaaaggaaaattgtcaaaatgaactgagccaagctgatggggatgttcaaagtctgcatgatgcggtttcaatcaacaaagatctcgaatctaagctaaaagatgcctctacactgctcgtgaagttgcaagatgaattttctagttatttgaaaggggaaagtgtagatggagatgcggagagaccaatggttattaccaagttgaaactagcaagtgctaggaaggagcttgaggacatgagggaggacataaaaaaggccaaggatgatgccaggatattttggaatgatgctgctacattacgagttgaaatagagagggaggaggcagatctactagcattgaaacacaaagagcacctcgcttcgctttctgtgtcatctctccaagaagagcaaagcaacatgacatatgagctcaacattgtccatgaaagaaagaaagctgctaagatgccaacagagctacaacaagcaactgaagcaatggaacaagcacaaactaaggctcagatggcacgttatgaggttgcaaaagctagggaagaggtggatcaagtgaagtcccaatttaatgttgtcaaactgaggctagaagcagcgtcaagggagatacttgcagtgaacgcatctaaagaaattgcaaatgcctcagcaaatgcattgcaagaatacaacgatgatggacaaatagagccccaagatgaacgaataagcaataactatatgatgttatcacttgaggagtacaatgccttaagtaagaaagcccaagatgctgaaggcctcgctaagaagcaggtcatcaaggccgttgaaaaaataaaagaagctaaggatgcagaggtgagaagcttgaatcagctggagcagtcgatcaagaagaccaatgagaggaagttggagctgagggctgcacaggagaaagccaattcagcgcaatatggaaagctcaccatggagaatgaactacggaagaggagggccaacgatgagcagcaaagtaaagcgaatgagtcggacgttcatgacatccccaattttaagagtacatcgctttcttttgatgcatcatcatcaacatccaatcctcacatggttggaacattgtctagagctgacactatagcagcaactagggtgaaggagccaaagccacggaagtcaatctttccacggtccttagtggccctgttcgtgtctaggaagaagacacattgaaag

SEQ ID NO: 108684 - DNA, 385 bp, Zea Mays
atgtctcatacgctaaggattaaccactgcaccacatgcatcctaatgtttataaaggaaggtatgaagattttaaaaatttaggcatggctgatgccataatcagccataaaggctactccgcagctgagttcatcacaatgacaccacatcttcacaaagctcaagtcttgattttagttccacctactgtgcgaaagcatgataaatttaccagtaagaagttctgggtacctttgtcctcgttctctctagatgttttactctttaaaacatcgatattgtagcatagcatgtaaggaaaacaagttggagaaatatcatcttaccaatcccggcgcatggcacacacttgcaaatggtctccttgcccttcttcctgaag

SEQ ID NO: 108685 - DNA, 1583 bp, Zea Mays
acgacctcgagagatatctgagcttgctccactcatagccatcacacactagtcacaagtacaccaactagccagtggctacacgagctgagcttgctccgctagcagctcaatctcacaaagcctcagagccaccaccaccagtgtgttctagccagctagctctagctccgctctctgatctcaaagcttgataacgaacgggcaaacaagagctcagaggtgggagctagctagctagagagagagagaggacgacggagagggaaaaaaaaccagctagcgagcgcgcgtgcgtggcgatgatgcatgtcatgtgttaacatgtacaatccagagcagcaccaggccgcgccgcccttcatggcgccgcgcatgtccttctccagcgacttcgccgtggagccgccgcccccggcggccgcgcgcgggggcgcggcggggccgggggacgccgacttcgagttctccgtcggcagccacccgatgatggccgccgaccagctcttctccaagggccggctcctgccgctgagggaggcgccgcagcaggcaggcggcggcgcgcggcccgtgacgctgcgcgaggagctgcgcgccgacgagcgccacggccgcgtgccccgcgcgccgaacatccggtggaaggagctgctcgggctgaagaaggcgcccaagaagcaggccgccgccgacgccgccgccggcacgtccgccgacgcccatatggatctcggagggcagcagggaagcacgagagactgaaaagccgcaggatatatatcagattcagctgtgacttgtgagcgggtgaaatatattgcattgttaggcgtggccatcgaagtgtatctttcagcgcgctctggctgtttggcatcgagctagctgatctgtacctctcgatgtcgatcatcatgtcattggcttagcctacgggagatgaggaaaccacacacatacgaagacgcgcgcgcgtacgtacgtctatggcggtggctcacaccaccaatgcgcatttcctctttacctctttattgccggccgcagcttgtttcctctctttaatttatcctgggtgtataagggaattttgaccatttgtttcacgtacggcagtaattcgttcgtgtcgagtagctagatgtatcatgtatccaaccatgcatggataatgatggatgtttcatgctttgcattattgtaatggtcgtcgcgtgtagtgtagcagtagtagtgaaattaactctccgcttgctgtgtgccgtgcctatctactagtatatctctggtgttttgaaaggggccgggccgggccggttgaatgcagtgctttctccccctttcacatggcgtggtccctgctggtgtacgtgttgtttagctgttcccatgcttgtctgcttttggcacagccgccctggcctcatcaggtcatgcattatattggtggctaatcatgagtagtagtatctagcttttgagtcgtccaatggagattatgtatgcatgtcctgaatttcgcaggaaatatgatgtttttaattttaaaaaaaatctgcaaaactactattacatggctc

SEQ ID NO: 108686 - DNA, 171 bp, Zea Mays
gccggcgcccgcaatgtcgctctggagcctgctgcatcccagcaccgccgccgtcgctgtggcagcggccatacttttctgcttcgtcgcgcctgtgtgcggtgcgggcggtgagggactgtgggtgcgttgcgagttggaaggtgatgactggtaacgatgggattaggt

SEQ ID NO: 108687 - DNA, 382 bp, Zea Mays
atgaaagaaaatgcaattcttcattctacagttcatttattatcataatttatcaagttgcaaaatttgattggctctaaaagaaacttatataatttaaaaccagctacaacgaatttgtaagacatacaaaacaaaaatattctcactctacagaatatatcattggtagtataaaattgctctatgcactgatctacggattcatatcctattggactgctagccgctggagatggtccatgaaaacctggaagctcacatcatctgtgaatatgacgtctccaccaggggagggattgtccgagttatatgtcactgatggatttaacttcgccagtaaaaatcgagcctgcaatttcagaagtaatttttagtttta

SEQ ID NO: 108688 - DNA, 1552 bp, Zea Mays
aaaggggtcgtagaaagcccaccaccacgatcggctgcctccttctcggctccgccatataaccggaccccagccaggcagccagcaccgtgacggcctcagtcccgacgagcagcaggttggtgcggacgggctgctctctcacaatctcacactctgccacagtgccactccctgtctagccatggcctcgcggatcctgctccccctgctcgtcctcctcctcctcttcctgggcccgcattgctccacgggggcggcggcgaggcggcagctgcagcaggcgcggcgagcccgggacccgaactcgcaggtcaagttcgacttctccccgttcctcatccagtacaagagcgggcgcgtgaagcggctcatgggcaccgacgtcgtggccgcgtccacggacgcgcgcacgggcgtcacctcccgcgacgtcaccatcgacccgtccacgggcgtcgccgcgcggctctacctcccgagcctccgcgcccgcgcgcccgtgctcgtctacttccacggcggcgcgttcgtggtggagtccgcgttcacgcccgtctaccacgcctacctcaacacgctggccgccagggcgggcgcggtcgcggtgtcggtgaactaccgcctcgcgcccgagcacccgctgccggcggcgtacgacgactcgtgggcggctctcaggtgggtgctcgcgagcgcggcctcggacccgtggctgtcgcggtacggcgacctgtcccgcctgttcctcgccggcgacagcgcgggcggcaacatcgcgcacaacctggcattgcgcgcgggggaggaaggcctggacaacggcggcggcggcgcgcggatcaagggcgtggccctgctcgacccctacttccagggccggagccccgttggcgccgactccaccgacccggcgtacctccagtccgcggcgcgcacctggagtttcatctgcgcggggaggtacccgatcgaccacccctacgtggacccgctcctactgccggcctcctcgtggcagcgcttcggcgcctcccgggtcctggtcaccgtgtcggggaaggaccgcctgaacccctggcagcgcgcgtactacgccgcgctccggaacagcggctggcccggggaggccgagctgtacgagacccccggcgagggccacgtctacttcctcaccaaactcggctcgccacaggcgctcgccgagatggccaagctcgtcgccttcattaatcgcgactagcaaccggagtacgtgccggccgccgcggcatctagtaccttcagtaccgcaacatcagtatacctatagtaactagcgagagtgagaggtgattgttattagtaattactttttttttgtccttgatggttactgtgcgtcggaagaacggttcctcccagcaacacgtccggatggagagagggggatcgccggaccggtgtcttcgtttgcgcgcgttgcgtgtcactgactgcagtctacaggctgccgtgccgtgtatctacccgctgcgtgtagcagttactggcggttacagtagtcccagag

SEQ ID NO: 108689 - DNA, 1739 bp, Zea Mays
atcgcattgcagctgttgtgaggatgttcctctgtttacatgtgtgcagagtctacttattcacagctaacgcaactcgatttgttttagaaagagtgcaaaatagtagtgacagtgcgaagctgctctgttttcagttcaatgtatatctgtagcaggtggtttgaataaaacctcaaatgaaatggatcaatttcaagtcttatcaagtcgggtagtccaagtaatttcttttcaaacaaaagatgcaattactaacaacgtacagtccgaaagaaacaggggcaattttcaagtatacaatacatcggacagttttcaagtatacaatacatttagccactcgctagcctgcacttcgaaattacagtatgtactgttcaggataaatttcgatgcacaacagaaattcaagatcaggattctgaatcgagactgaacctctgtgcttaacttgcaatatgaataaaagtcactaattgtgcgattttttttctctcgctgaactactcaccaggtccgggcaaacaaagcgaaaggcacctcaacagcgccggacgaattcggccacgagggcgagctccttcacggctttttcgctgccgtgtttaggcaagaagaagacgtgcgcctcacccttggtctcgtagaactcgagctccccctcccagccgcacttcttgattccctctgcgtaagcccttgccctctccacgaaccagcactggtccgccgtggtcaccagcacgcggcgggaaccaagctgcctccactcctccggcgatgccattgggttgacgtaggggtggtcgaggccgaactttccgccgcagatgaattcccaagtgggatcgaacattgcgcggtagccgggatccgtgggctccgcgcccagcggctccttcccccagaaataagggtacaggaggacgacgccgctgaccatgtcgccgtaaccctcgatgccgccttccttgcgcagccttatcgccacgttgtgcgccatgttaccgccggcgctgtcccccgcaaggacgatgcgggaggcgtcgccgtgagcggcgagccagggctcagcttccgcctcggcgccatccgcgcggcacgcggcgatgaccgccttcaaggccgcgaatgcgtcgtcgtaggcggcggggatgcggtgctcgggcgctaggcggtagtcaacggagacgacgacggcgggcaccgcggcagcgagggaggcggcgtagatgtggtacagcggggaggcggcggtgtggaccatgaacgcaccgccgtggaagaacacaacgacggggagcttcttcccggcatccactcccgcgggtaggtagaggcgggcggagatgcctgcggcggggtccaggacgatgtccttggacgcgacgccgttggcgggatcgccatcggggcagggcgggacggtctcggtgccgtcgaagcgctcgacgcggccggtcttgtacacacgcaagacgccgggcatctcgaactcgagctcggagtcggggtccatggcggcgtggggattgaggagcctgtggatcgggaaccggacgagcagagcggctagcgaagcgatgagaagagccgcaaagagcacccgacacgacagtttgggcattcttcctgttcttcgtggttggtatttggtagcgagcaggcgagagatctggattctcgactagtggatcagcgatccggagatctggtggggagtgggaaccgtgggt

SEQ ID NO: 108690 - DNA, 1298 bp, Zea Mays
cctcccgcattcaacacacgccaagcgttgctggcggcgaagacgtgcaacctgcagcgaccgcacttcaaacctcctcggccctagccttcccttgggctttcccaggccacaccccgactcaccaatggccggctccggcgccaacgacgatgaggtcatcttcgagatggcgcagttcatccgcgtctacaagagcggccgcgtggagcgctacttcggctccgaccccgtcccggcctccacagacaccgccacgggcgtcgcctctaaggaccgcgccgtctccccagacgtcgccgtccgcctctacctcccgccgcccgccaaggataccgaagacaacggcggaagcagtaagaagcttccaatcctcgtgtacttccacggcggcggcttctgcctccacaccgccttcaacttcgtcttccacgcctacctgacctccctcgccgcgcgtgcccgcgccatcgtcgtctccgtcgagtaccgcctcgcgcccgagcacccgctccccgccgcgtacgacgactcctggcgggcgctcctctgggtcgcatcccacgccactggatccggtgaggaactctggctcaccgaccacggcgacttctcccgcttgtgcgtcggcggcgatagcgcgggcgccaacatcgcgcaccacatggcgatgcgcgccggcgccgagcccctcccgcacggcgcccgcatcagcggcgccgcaatcgtgcacccctacttcctcggagccgaccgggtggcctccgaggagacggaccccgcgctggccgagaacgtggtgaccatgtggcgtgtggtgtgccccggtaccacaggcttggacgacccctggatcaacccgctcgcggccggcgcgcctgggctggaggggctcgcgtgcgcgcgcgtcctcgtgtgcctcgccgagaaggacgtggcccgcgaccggggacgcgcgtacgccgcggagcttagggccagcggatgggctggggaggtggaggtggtcgaggtgaacgggcagggtcactgcttccacctcgtcgacttcgcgtgctccgatgctgtcgcgcaggacgacgccattgcgagatttgttaacctgtactaggatcctgcgatctcgtgggcgtcgtactttgcatatggtctacgcctgcctgatatgtctgtaaacctaccggcgaattcatactcttttacgtttctgcggtccgaaaattattgtcgttgatatacatccggctgcggtcggtggaggattttggatcgccacttgatcaatccaaacttgattt

SEQ ID NO: 108691 - DNA, 321 bp, Zea Mays
atggcagttttacagcccatgagaggcagtaacaagtgtaggcgcacctcagtctcaggtgaggccaggaatgaggattcacgaacactgcaattcaattatggttcattcaaacataaggcatgggataaatccttaactaaaaagggggagctcgctgcggatggtgttgtgcggcttgacgggccagcgatcgtcgccggggtggaattagctcatggtggacgagaaccatcttcttttgatccatctagcagctatagcagtgctggacaggctgtgcccctaaatgttctaattagattaacgatcacaacttaa

SEQ ID NO: 108692 - DNA, 423 bp, Zea Mays
atgctcgatggacatggcgctgtgcgtgcgcccaccaacgctcacggtggccttgggcatcatcgccacgagcatttgcggggtggtaggtatcccatgctccaggaacgcgttcatcatgcaggaattgtagacgttgatccagaaggccagcttctgctgatgggagagccccgccaggtcaaccgacgacagcctccgcagcaaggccttgagtctccgacgaacgagaggcgtgtcgccgttgccgtcgaaggacgcggcgtcgaccacgtggaaccgcttgtaggcgccgatgtccctggcgcccagctccaggatgccgtaggggtcctgcgggtacgcgtccgcctccgacgacgccgagctctcgctggagccggagaccgacggggacagcgcctgctggtcctcgtctcctag

SEQ ID NO: 108693 - DNA, 2436 bp, Zea Mays
aactaatcactttgcacgaaaacagattaaaacaataaaaccaccgccaccgccacctcgacctcgactcctccgccccatcgccgtcgtccccgtctcctccgccttgctgtctgtccgctgctcacctcccctaaaaggaggcacccccggccattgccgcaccaagctccccttcctcgaatgccccaggcccggacaccacgacgccctgccccgtgctcacatggctagcggcgtcctccaccgctccgcctcccgatgtctccgccctgccgccgcgccaacccccgactccggcaggggccacggcgcggttatgatcggtgattcggggacgcgcggtgttgctctgcggctgggaggatctagccggagagagttattatctgtcacaatggcctccagagaccacactggcttgacccgacaacttttggattttcaacatgatacaatagatgaggtaggtgcagaacacggtccattcatggatttgaaagcgagattcatggacttcaaacagagaaactatgtggagaatttttcaaattaccaaaatcttgctgaacagcaaacaccaaagttcatggtgattgcttgtgctgactccagagtctgccctaccgctgttttggggtttcagcctggcgaagcatttacggttcgtaatgtggcgaatttggtaccaccatatgagcatgagggatcagagactagtgcagcactagagtttgctatcaatacactcgaggtagagaatgtactggtggtaggccacagtaggtgtgggggcatccaggcactaatgagcatgaaagatgattcaacgtccggaagcttcattaaaaactgggtttcaattgggaagagcgcaaggttaagcacaagagctgcagctggaaatttgagttttgacatgcagtgcaaacattgtgaaaaggaatcaataaatagctctctgttgaacttgttaacatacccatggatagagaagagggtgaatgaaggtactttgaatctccacggaggctactacaacttcgttgattgcacatttgagaaatggacattattgtaccgtgaagggttggaaggtggaagcaagtacgctataaagaataggtccacctggtcttgaccaatgaaggcctcatttacttgggtaaatttcactctgcgccctgcagttaagcatggttttgctttgccactacgctgtgcatttccgtcgcacctttgctccattgtggtattgatgtcctgcagaagcgagtccctgtatcaaataactgtgtccattgcgatgcatggcactatggcactagcatgtcagcttgctgtagtattgcatactcacgggcaggtgcatcggcattgtagttgtagcagctattgtttgatacgtacaggaactctccactgtggaagcacaaagccacaatggagtgaggtgcgacgcaatgaacaatatggtggcaaagtgaaagtctgtggaactaccggggggcaaagtggattttgtgcaactatttgtgtgtcgttttccggttgataccattgagaaaatacgaataagttacaggatcagtcatagtgcatgtaattgtcgccacatttggcgttaccttgttattgtaattgtaacatttgtaccatttgttgtatcattataactgtgagatacaatacaaatattatacggtctcggcaaatttgcttgatgacagtgttgttcgttcggaagagtcggcaatgcaaattctgtgatattccacatgttccaactaaaaaagtacgagtagcaccatgggagacatgtcacacagtaccccttcccttccgtctcccatcactccatcagtcagtcacttctacggcgccactgtcgtaaaccctagcgaggtgcgccgagaagcgctgcctcttgtagcactcggcgccgagcatctcctcccggctgagcagcacggcccggagcgccgcctgcagcgctggccgtgacgacgtcgacgttccctcgccatcgtggtgccgcccgccgacgtccagctccaggacgctccgcgtcctcccgccgacggtggctatctccgcgcgcacggccctcgcgctgacggaccgcacggcgcggcccagctcggacatgagccccgggcggtcggcgcagcacacccacgccctgacgcgcctggcggccctctccccgccgtggcagaagcggtgctggtggccctcctcgacgccgacctcgtcgccttcccccgggacggccactgccgcgcccgccgccgcggcgtccgcctcgccccgcagctcccgcacgtgccgcaccacctcccctagcagcgccgccttgtccatctgcatgattaattcgtacacgcacacgtacgtaaccgtgttcgctatcgagttcgatgatgaactgccacg

SEQ ID NO: 108694 - DNA, 1906 bp, Zea Mays
aactaatcactttgcacgaaaacagattaaaacaataaaaccaccgccaccgccacctcgacctcgactcctccgccccatcgccgtcgtccccgtctcctccgccttgctgtctgtccgctgctcacctcccctaaaaggaggcacccccggccattgccgcaccaagctccccttcctcgaatgccccaggcccggacaccacgacgccctgccccgtgctcacatggctagcggcgtcctccaccgctccgcctcccgatgtctccgccctgccgccgcgccaacccccgactccggcaggggccacggcgcggttatgatcggtgattcggggacgcgcggtgttgctctgcggctgggaggatctagccggagagagttattatctgtcacaatggcctccagagaccacactggcttgacccgacaacttttggattttcaacatgatacaatagatgaggtaggtgcagaacacggtccattcatggatttgaaagcgagattcatggacttcaaacagagaaactatgtggagaatttttcaaattaccaaaatcttgctgaacagcaaacaccaaagttcatggtgattgcttgtgctgactccagagtctgccctaccgctgttttggggtttcagcctggcgaagcatttacggttcgtaatgtggcgaatttggtaccaccatatgagcatgagggatcagagactagtgcagcactagagtttgctatcaatacactcgaggtataagtttactgtgtgtttcattaatgatttgtttcttttatcctatttattccttttttgctgaagtaacataaaagcattcttgagactggcacatttgccttcatttgctcaggtagagaatgtactggtggtaggccacagtaggtgtgggggcatccaggcactaatgagcatgaaagatgattcaacgtccggaagcttcattaaaaactgggtttcaattgggaagagcgcaaggttaagcacaagagctgcagctggaaatttgagttttgacatgcagtgcaaacattgtgaaaaggaatcaataaatagctctctgttgaacttgttaacatacccatggatagagaagagggtgaatgaaggtactttgaatctccacggaggctactacaacttcgttgattgcacatttgagaaatggacattattgtaccgtgaagggttggaaggtggaagcaagtacgctataaagaataggtccacctggtcttgaccaatgaaggcctcatttacttgggtaaatttcactctgcgccctgcagttaagcatggttttgctttgccactacgctgtgcatttccgtcgcacctttgctccattgtggtattgatgtcctgcagaagcgagtccctgtatcaaataactgtgtccattgcgatgcatggcactatggcactagcatgtcagcttgctgtagtattgcatactcacgggcaggtgcatcggcattgtagttgtagcagctattgtttgatacgtacaggaactctccactgtggaagcacaaagccacaatggagtgaggtgcgacgcaatgaacaatatggtggcaaagtgaaagtctgtggaactaccggggggcaaagtggattttgtgcaactatttgtgtgtcgttttccggttgataccattgagaaaatacgaataagttacaggatcagtcatagtgcatgtaattgtcgccacatttggcgttaccttgttattgtaattgtaacatttgtaccatttgttgtatcattataactgtgagatacaatacaaatattatacggtctcggcaaatttgcttgatgacagtgttgttcgttcggaagagtcggcaatgcaaattctgtgatattccacatgttccaac

SEQ ID NO: 108695 - DNA, 1982 bp, Zea Mays
cgacggcacgactctcgcgcgggtcggtcgccccggcccacacccacactggagcgtcaatgaaatttcagccccaaacagtccaatcacggtaactaatcactttgcacgaaaacagattaaaacaataaaaccaccgccaccgccacctcgacctcgactcctccgccccatcgccgtcgtccccgtctcctccgccttgctgtctgtccgctgctcacctcccctaaaaggaggcacccccggccattgccgcaccaagctccccttcctcgaatgccccaggcccggacaccacgacgccctgccccgtgctcacatggctagcggcgtcctccaccgctccgcctcccgatgtctccgccctgccgccgcgccaacccccgactccggcaggggccacggcgcggttatgatcggtgattcggggacgcgcggtgttgctctgcggctgggaggatctagccggagagagttattatctgtcacaatggcctccagagaccacactggcttgacccgacaacttttggattttcaacatgatacaatagatgaggtaggtgcagaacacggtccattcatggatttgaaagcgagattcatggacttcaaacagagaaactatgtggagaatttttcaaattaccaaaatcttgctgaacagcaaacaccaaagttcatggtgattgcttgtgctgactccagagtctgccctaccgctgttttggggtttcagcctggcgaagcatttacggttcgtaatgtggcgaatttggtaccaccatatgagcatgagggatcagagactagtgcagcactagagtttgctatcaatacactcgaggtagagaatgtactggtggtaggccacagtaggtgtgggggcatccaggcactaatgagcatgaaagatgattcaacgtccgggtaaaagttctagccatttcttcattacatgttcttttgttgtccgtttagactttagactagtctctgaatttctgatttcatttattttatcgacacagaagcttcattaaaaactgggtttcaattgggaagagcgcaaggttaagcacaagagctgcagctggaaatttgagttttgacatgcagtgcaaacattgtgaaaaggaatcaataaatagctctctgttgaacttgttaacatacccatggatagagaagagggtgaatgaaggtactttgaatctccacggaggctactacaacttcgttgattgcacatttgagaaatggacattattgtaccgtgaagggttggaaggtggaagcaagtacgctataaagaataggtccacctggtcttgaccaatgaaggcctcatttacttgggtaaatttcactctgcgccctgcagttaagcatggttttgctttgccactacgctgtgcatttccgtcgcacctttgctccattgtggtattgatgtcctgcagaagcgagtccctgtatcaaataactgtgtccattgcgatgcatggcactatggcactagcatgtcagcttgctgtagtattgcatactcacgggcaggtgcatcggcattgtagttgtagcagctattgtttgatacgtacaggaactctccactgtggaagcacaaagccacaatggagtgaggtgcgacgcaatgaacaatatggtggcaaagtgaaagtctgtggaactaccggggggcaaagtggattttgtgcaactatttgtgtgtcgttttccggttgataccattgagaaaatacgaataagttacaggatcagtcatagtgcatgtaattgtcgccacatttggcgttaccttgttattgtaattgtaacatttgtaccatttgttgtatcattataactgtgagatacaatacaaatattatacggtctcggcaaatttgcttgatgacagtgttgttcgttcggaagagtcggcaatgcaaattctgtgatattccacatgttccaac

SEQ ID NO: 108696 - DNA, 103 bp, Zea Mays
cctataacagatgtcattttttaaccaaacattatttgaaccttctagtgcaaaacgatcctaataaacactttctcggacaagcagtcagctcctcaaaagg

SEQ ID NO: 108697 - DNA, 113 bp, Zea Mays
gtttattacttccccctttccaaattataattataagacgtttcagtctgtagttcagtcaactaaaaaatatttatgttgttaggcatgctagatgaaggcatattacttgc

SEQ ID NO: 108698 - DNA, 399 bp, Zea Mays
atggggcgcgacgcgtggatgggatcgccgatggttgtcggcgggtgggggcgcgaatcacggacgcaacagctaggattgcgtcctcgatggctgacaatggagcggggacgcgaaccacgggcgcgagagcagcggagagcgcggatcaaggccgcaatcccgtccgcgagcagtgattccgctcgatttgggcgtcgaattgccttccatgtagagcgcgggagcaggggatggtcacagagaaaggggaggcgcgggaggaggtggcggaccttccatcgacgttgcgaggactgtgggtttggatatctggcttccattgacggcgcgacaggaggtgaaggcgcggaccttccgaggactgcgggcgaggagatttggctttccttccattga

SEQ ID NO: 108699 - DNA, 1141 bp, Zea Mays
ctagctagctgtcgcagccacatctttccggcttgtaccactcgatttgctaagtgttgtctctctttctcgcgaccaagctcctcatgtcgcttggcaaaagagacatgagtcaggagcgcctgtaccaagatcgcaaggacgtgccgcccatccacttcaccacgccgccgccgccgccatcccaccaccacccccagcagcacggtagacacggtgagcagcagcagcagctggagtgcttctccgatgaggtggacagccgcgggagcgccgagcggaaggagcccgccagtggtggggcaccggtggtgccgggtggcggcgacgacggggcgagcatcgagttgtccaagaagcggaggggccggcccccggggtccaagaacaagccgaagccgcccgtggtggtcacgcgggaggcggagccggccgccgcgatgcgcccccacgtgatcgagatcccctgcggctgcgacgtggccgacgcgctcgctcgcttcgcggcacggcggaacctcgggatctgcgtgctcgcggggacgggcgccgtcgccaacgtgtcgctccgccacccgtcgcccggcgggcccgccgtcatgttccacgggcagtacgaggtcctgtccatctccgccacgttcctgccccccgccatgtccgccgtggcgccgcaggccgccgccgccgccgcgtgcctctccatctcgctggcggggccgcacgggcagatcgtcggcggcgccgtggccggcccgctgtacgccgcgtccaccgtcgtcctcgtcgcggccgccttcactaaccccaccttccaccgcctcccagcggacgacgacgcgtccgtgtccgtgtccgtctccgtctcgctctccgccggcagcggcgatccagcagacgagcaccgaggcggccaccaagaccgcagggagcagccgccgcaagagcatcgtcctctcgccgtacggcgccagcccgcgccgcaccctgcctcggcagcgcagaccgtggagccgtgcggaccaccggatgtgcccatctacgccgcttgccacccgcagccgcatgacgtgatgtggccgccgccacctcgcgcgccgcaaatgccgccgccgtactgatcgcgtactcggtgatcaat

SEQ ID NO: 108700 - DNA, 1241 bp, Zea Mays
tgcagcaaagcggcgcgtcaaaactggcaggcagcccagacggtgtccacactctctccccatagtccatgtctcttatctcttcatccccctctcttaaccttcctaagccgctcttaaccttcttcgcctgccacagctcgagaacacatcaacacaccacacacaggtcaggcacgcacaagaaacacctgccaccgccggcggccgcccggtcgctcgctgccgatcgacggccatggacttcgacgaccacgacgacagtgacgaggagatggcgccgatgccgatgccgatgccgatgccggtgagctccagctacgacgccccgcctctggcagctgggttcggtggcggcggcgtggagccgctcagcgttcgcgccaaggccccggcgggcggcctcggcggcggcggcggcggcggcgggaggtaccgagagtgcctcaagaaccacgcggtgggcatcgggggccacgccgtggacgggtgcggcgagtttatgcccgccggcgaggagggcacgctcggcgcgctccgctgcgccgcgtgcggctgccaccgcaacttccaccgcaaggagcccgccgcgggctcgctcgtctcccccgccgcgctggccgcctacggcagcgccgcgccgcaccaccaccacttctccccgtactgccgcaccccggccgggtacttccaccagcagccgctgcagatggccccgcccgtgcccgtggggcacacgccgcggccgctggcgctgccgtccacgtcccacggctggcgcgacgacggcgacggcgacgacgacttttccgggatggccgggccgctgtcgtcggcggtggggccgctgggcggcatgtccctcggcggcaccaccgggccttccggctcgggcgggtccggcaagaagcggttccgcaccaagttcagccaggagcagaaggacaggatgctggcgttcgcggagcgcgtggggtggcgcgtccagaagcacgacgaggccgccgtgcagcagttctgcgacgaggtctgcgtcaagcgccacgtgctcaaggtgtggatgcacaacaacaagcacaccctcggcaagaagccgtagcgcgctagcaccatcacctgacctgacctgacccccggacgcgtgtgtactcccatcccatccgtacacggaagagccacgtacacgcttgcattttgttgatcgcagatcgatcgggggtggccggggccagcccctccgg

SEQ ID NO: 108701 - DNA, 1330 bp, Zea Mays
ccggctctttctagaagatcgttacggcttattattccctccgatccaaccgagtcgcgcgggtcagctgtttacaaaaatctcgctgtagcggccgactcgtccgacgtgaccacacgtcagtgcaactgaagcccaactccgccgctaagcctcaagcgaccgcgacgcagagccatggccgccacgaggagcacgacggcggtgccggagctggccctgccctccgggaacgcgaggccagtgccggtgattggcctggggacagcggtaatgttccagccgccggagactaccaaggacgcggtgcttgcggccatcgagctgggctaccgccacttcgacaccgcctccttgtacgggacggagaagccgctcggcgagggcgtcgcggaggcggtgcggcgcggcctcatcgagtctcgggaggaggtgttcgtcacgtccaagctgtggtgcacgcagtgccacccggacctcgtcgtcccctccctccggcagaccttggaaaacctgcagatggattacctggacctgtacctaatccacatgcccgtctgccagaagcccgggccgcctgtgttcccggccaggagagaggacgcccgcccgttcgacttcaagggcgtgtggcaggcgatggaggagtgccagcggctagggctcgctagggccatcggcgtcagcaacttcaggaccaagcacctcgacaagatgatgccttttgccaccatcacccctgcggtgaaccaggtggaggtgaacccggtttgccagcagctgaagctgagggggtactgcgccgagaagggcatccacgtccaggcgttctcgccgttgggaggccagagctgggcggcggaaagaaacgccgtgctcgagtccgaggtcctcgcggagatagccaaggcgagagggaagaccgtggcgcaggtgtcgttgagatgggtatttgagcaaggggtgagttttgtcgttaagacctacaaaaaggagaggcttaaggaaaacctcgagatcttcgactgggagttgactgacgaggacagggtcaagatcagccggatcccgcagaagaagctttctggcttctcattcatgttcaagccggaaggtgagttcacatcggttgatgtctcggagatcaatcctatagaggagtaggcgctaaagaaatgccttgattctcaataagccaatttcgcttgatgtagtacctgtatatatttgaataaggcagcattgactgtccgttgttgaactcaatcgtttttttacatccgaaatcctgtcatgtaaatcagtataaaaggacgaattttttgggaac

SEQ ID NO: 108702 - DNA, 1525 bp, Zea Mays
cgcgactgctcgtgatcttctgacatcgtcgacccagctgatcctggcgcgcgccaacaatcagtaagtctaatcagtacgcatcatctgatttgacttttatttcagttcttctgatttggtcatgatttacattcggaatttaatttggaatttgtctacttattcaacagaaacaccggcgcaggcgcaggcgcagggcaccactcatgtcgccggcactacgactacgaggacactccgcaacccgctcctcgtcgtcaacttcgtcctcatggtcgtgggctcagcgggcggcccgctgttcctccgcgcctacttcctccacggcggcgcccgcaagtggctctcggccttgctccagaccgccggcttcccgctcctgctcgtgccgctctgcgtctccttctcccggcgccgccgccggcgcgacgacggcgcgccggcgaaggcgccgttcttcctcatgacgccccgcctcctggcggcgtccgcggccatcggcctcatgaccggcctcgacgacctcctctacgcctacggcctggcctacctgccggtgtccacgtcctccatcctcatctccacgcagctggccttcacggccgccttcgcgctgctgctcgtgcggcagcggttcacggccttctcggtgaacgccgtggcgctgctcagcgccggcgccgccatgctcgggatgaacgccggcggggaccgccccgcgggcgtgtcgccggcgcagtacggcgccggcttcgccatgacgctcggcgccgccgcgctctacggcctcctgctccccgccatggagctcagccaggcccaggcgcgcgccggtactgccgcggctgtcacctacacgctcgtcatcgagatgcagctcgtcatcggcctcaccgccaccgtcttcagcgccgtcggcatgctcgccaaccatgatttgcacgcaatccccggagaggcgcgggagttcgatctcggccggtcaggctactacctactgctggccgggtcagccgccacgtaccagtgcttcttcctcggcaccatcggcgccgtcttctttggctcggcgctgctcgccggagtggtcatgaccgtgcttatcccggtcactgaggtgctcgccgtcgtgttcttccacgagccgttcaacggcaccaagggcgtcgccctcgcgctctcgctctggggcttcgtctcctacttctacggggaggttcaaacatccaaggcgcaccaccacctgcctgacaagccaacaaatgtcgagcgtttggacccatagatgatggtgatatggcgttcccgggagtaagttttcaccccgtatttgaggaataagcaagccatatcaaatcatattatacaacaatctatataggggagtatgaattttcttgtacagtctaatgtctcccatgcatggacctatagagcatactatgtatatatgttggtgtatatgtacttaaacaaacttgaccatgcaaaggtaagattaatcctagccattgcatcaaaa

SEQ ID NO: 108703 - DNA, 640 bp, Zea Mays
atctatctatccattcgtccaataaaccaaagccttacactcttttttattttttgatggcgcgcgcgtgcaggcgatcccgagggaggcgaggcagtacgagctgggggaggcccggtactacatggtgctggcgtgggcggcggtgctgtggcagtgcttcttcctgggcgcggtgggcgtcatcttctgcgtgcacacgctgctggcgggcatcctcatcgccgtgttcatcccggtgacggaggtggcggccgtcatcttcctgcacgagaagttcagcagcgagaagggcgtggcgctggcgctctcgctctggggcctcgcgtcctactcctacggcgagtggagccaggccaaggccaagaaggagaagaagagcgaggaggacgacggcgaagtggcccaggcagtcccatgatccgtgccccacacacacaaacacaatggtctgccccgttgtactctctgtctgtgtgtatgtaaatgttgtgttgattgcggccgtgttggtcctgtgaatggcgtcctgagtcgtcggttgtcagtgatgtttgatttccagggattaatcttttgtctctttatttttattttatttaataatttacatattaaaataaaatagaatatatgaact

SEQ ID NO: 108704 - DNA, 1457 bp, Zea Mays
gtgtaactaatccgctgccggcgtcatcgttgtatccaaagcgccgtgctagattccactccacacctaggcaaggccgcacacgccaaccaccctcgtgtcgtgtgcgtgtgcgtgtgcgcgggcagacgccagcggccagccgcagcgccatggacgtagaagcgcgcaaggacgcagcgcccgcgcgcggcaaggcggtgcgccgctttctggtagcactaaactgcgggatgctggcgctgggggccatcggcgggccgctcctgagccgcctctacttcagcaagggcgggcaccggcagtggctctccgcgtggctcgagaccggcggctggccgctgctgctggttcccgtggcggcgtcgttcggcgcccggcgcgcgcgcgaccggggcgccccggtgctgctcaccccgccgcggatcctgctggccgccgcgggcctcggcgtcgccacgggcgtggacgacttcgtctacgcctacgggctggcgtacctccccgtgtccacctccgcgatcctgatctcgacgcagctggcgttcacggtgttcttcgcgttcctggtggtgcggcagcgcctgacggccgcgtccgtgaacgccgtggcgctgctgacggtgggcgccgtggtgctgggcctgcacgtctcgtcggaccggcccccgggcgtcaccaggggccggtactggctgggcttctcgctgacgctctgcgccgcagcgctttacggcctcgtcctgccgctggtggagctcgcgtacaggcgcgccgcgggcggtggccgcgccgtgacgtacgcgctggtggtggagatgcagctggtgatggggttcttcgccaccgccttctgcacggtaggcatggtcgtgaacaaagacttccaggcgatcccgagggaggcgaggcagtacgagctgggggaggcccggtactacatggtgctggcgtgggcggcggtgctgtggcagtgcttcttcctgggcgcggtgggcgtcatcttctgcgtgcacacgctgctggcgggcatcctcatcgccgtgttcatcccggtgacggaggtggcggccgtcatcttcctgcacgagaagttcagcagcgagaagggcgtggcgctggcgctctcgctctggggcctcgcgtcctactcctacggcgagtggagccaggccaaggccaagaaggagaagaagagcgaggaggacgacggcgaagtggcccaggcagtcccatgatccgtgccccacacacacaaacacaatggtctgccccgttgtactctctgtctgtgtgtatgtaaatgttgtgttgattgcggccgtgttggtcctgtgaatggcgtcctgagtcgtcggttgtcagtgatgtttgatttccagggattaatcttttgtctctttatttttattttatttaataatttacatattaaaataaaatagaatatatgaact

SEQ ID NO: 108705 - DNA, 1344 bp, Zea Mays
aggagtaggaaccggcgcagcgagactataggcatggacgtggaagcgagccatgagtctccgcccttgcgcagcaagacgatgcgccgcctcctggtggcgaccaactgcgtgatgctcgcgcttggcgtcaccggcgggcagctcctcagccgcctctacttcagcaagggcggccaccggcagtggctctccggatggctgcagaccggtgggtggccgctgctgctcccgccagtggcggcttcctacgtccgccgccgagcgcgctaccggagcgccccggcgctgctcacccagacccagccgcgcatactgctggccgccgcggggctcgggctcatcgcgggcgtggacaacttgctctacgcctggggcctcgagttcctgcccgtctccacctccgcgatcctcatctccacgcagctggccttcacggtgctgttcgcgttcctgatcgtgcggcagcggctgacgatggcgacggtgaacgccgtggcgctgctgacggtgggcgccgtcgtgctgggcctgcacgtctcctccgaccgccccgcgggcgtcaccaggagccagtactggctgggcttcacgctcaccctgggcgccgcggtgctgtacgggctgttcctgccgctggtcgagctcacctacaagtgcgccgcggggggcggacgcgccgtgacgtacgcgctggtggtggagttgcagctggtgatggggttcgtcgccaccgcgttctgcaccgtcggcatgatcgtcaacaaggacttccaggcgatcccgagggaggcgaggcagtacgagctgggggaggcccggtactacatggtgctggcgtgggcggcggtgctgtggcagtgcttcttcctgggcgcggtgggcgtcatcttctgcgtgcacacgctgctggcgggcatcctcatcgccgtgttcatcccggtgacggaggtggcggccgtcatcttcctgcacgagaagttcagcagcgagaagggcgtggcgctggcgctctcgctctggggcctcgcgtcctactcctacggcgagtggagccaggccaaggccaagaaggagaagaagagcgaggaggacgacggcgaagtggcccaggcagtcccatgatccgtgccccacacacacaaacacaatggtctgccccgttgtactctctgtctgtgtgtatgtaaatgttgtgttgattgcggccgtgttggtcctgtgaatggcgtcctgagtcgtcggttgtcagtgatgtttgatttccagggattaatcttttgtctctttatttttattttatttaataatttacatattaaaataaaatagaatatatgaact

SEQ ID NO: 108706 - DNA, 1024 bp, Zea Mays
aggagtaggaaccggcgcagcgagactataggcatggacgtggaagcgagccatgagtctccgcccttgcgcagcaagacgatgcgccgcctcctggtggcgaccaactgcgtgatgctcgcgcttggcgtcaccggcgggcagctcctcagccgcctctacttcagcaagggcggccaccggcagtggctctccggatggctgcagaccggtgggtggccgctgctgctcccgccagtggcggcttcctacgtccgccgccgagcgcgctaccggagcgccccggcgctgctcacccagacccagccgcgcatactgctggccgccgcggggctcgggctcatcgcgggcgtggacaacttgctctacgcctggggcctcgagttcctgcccgtctccacctccgcgatcctcatctccacgcagctggccttcacggtgctgttcgcgttcctgatcgtgcggcagcggctgacgatggcgacggtgaacgccgtggcgctgctgacggtgggcgccgtcgtgctgggcctgcacgtctcctccgaccgccccgcgggcgtcaccaggagccagtactggctgggcttcacgctcaccctgggcgccgcggtgctgtacgggctgttcctgccgctggtcgagctcacctacaagtgcgccgcggggggcggacgcgccgtgacgtacgcgctggtggtggagttgcagctggtgatggggttcgtcgccaccgcgttctgcaccgtcggcatgatcgtcaacaaggacttccaggtgcgtgatgccccacatatacgtgtcgcttatatacgtacgttccacttcaattctccactagctggccttcagcctcttgccatatacgccgagcgctaagaaatgtttgcttgaaggtgccatctcagtttaagatgaggtgatgcatgataacttcatttatcaaatttagggtttaaaggttgttcagtttttagggaccaaatttaactcactctattttattctattcttagttcctaaa

SEQ ID NO: 108707 - DNA, 2045 bp, Zea Mays
cctgcttcgtgatttctatacatctgggtgctgcacgtgcacggggtgatccgtgtcacgccccttgcggcggatgttgccgatgcccgcccgcacaggcacagatgcggcgaggctcaccggataccacgaacgcctatgaacatacgagcatacatgtggggtaggtatgtttggttgattatttatgcatacgtgtatggtctgtgtgaactttggaggaggttggagctgaagcactagtaccgattagactagctcgctgagggcagagaaaaacgcctttacgtaatcaattcgaagtggatctatatcatttgtatctgcgttccgacaagggacaagctaccccttctacaatacagtatacaccggcgccgccgtccggaacgtctccctctcccgctctcacatataaacgcccaagctccctccccctagttgccgtctgcccgtctcctccaaattggttcgtgaaacaccccccgactcccacaaacccaccggccaccgctgtggcttcatccttaccactcgatcaacactaaagctggtgcccaatggatacgacactcctccggagcaatggccgcctcctgcccttgttccttctcctgcttgccgccgccgatttcacggcggtgcagggccagggggggcagcagcagcagcctggaccagctgggggggcatactactcgcaaagcttcagcccgtccatggccatcgtcatcgtcgtgctcatcgccgccttcttcttcctcggcttcttctccatctacgtccgccactgctacggcgacggctccagcggctactccgcgaaccggccgccggcccccggcggcgccgccgcgcgctcgcggcgccagcgcgggctcgacgaggccgtgctggagtccttccccaccatggcgtacgccgacgtgaaggcgcacaaggcgggcaagggcgcgctcgagtgcgccgtctgcctcagcgagttcgacgacgacgagacgctgcgcctgctgcccaagtgctcccacgtcttccacccggattgcatcgacacgtggctcgcctcgcacgtcacctgccctgtctgccgcgccaacctcgtcccggacgccaacgccccgccgccgccgccgccggccgacgacgacgcgcccgagctgctgccgccaccacccgtgtccgcgccgcctgccgccgccgccgctgcggtggtcattgacgtggacgagacagaggaggagaggatcatcagagaggaggccaacgagctggtgcgcatcggcagcgtgaagcgcgcgctgcgctccaagtccggccgcgcgcccgcacggttcccgcgctcgcactcgacgggccactcgctcgcagcgtccgccaccaccggcaccggcgccggcgccggcgccagcaccgagaggttcacgctgcgtctgcccgaacacgtgctccgggacctcgccgcggccgggaagctccagcgcaccacgagcctagtcgcgttccgctccagccgcggcggcagcacgcgccgtggcgtcagcgtccggaccggcggcggcgaaggcagcagccgcgccgggaggagcatccggctgggccagtcagggcggtggccgtcgttcctgtcgcgaacgttctccgccaggcttcccgcgtgggggtcacggtcgacgcgcaggggcgtcgaggctgacgggtccagcaagggcggtagggcggccggcgccggcgccgccggctgaggcgccaagtcagtggaacagccgaacaggacgaccacgcgtgcgctcctggacaacgtgtttgaccggttctctctgacctggtcaatcggtggctgctaggaaactcttggtgctttcgtcgccatcgtggtggaaaaaattttggcacttgaatttaggagagaacgtgcttggtcgcggccctcgcctcctccttcagtccttctggaagcgtgctgtattcatttgttattattatacgaaaaacgtgtacacaaattcataagttttttcatgcgaattatatttgtaagtataccc

SEQ ID NO: 108708 - DNA, 282 bp, Zea Mays
atgactaggagaagctccaaggccactttgtcaagggtctctgcaatgcacctactggtgcatgatttactggaggttgtgcgcatgaatgtgccacacattggtatgggggttggagttcaagcaggagacatgattgtcattcctatcctctcgcagtctcgataccggatcatggttgctaggggagagcagtccaaggcaaatttgccatgttggagcagtcacaggagccaagggctgcagtcacaggtcctgcttgccaggatggagcaatcatag

SEQ ID NO: 108709 - DNA, 1282 bp, Zea Mays
tcgagccgactccgccgccgccgctgcaccagccccagccccagccgaggtagccatgtacacggtgcgcccgcacgcggcggcgacggtcacccttaactgcacggaagcaccgctcgactgcctccccctctgccccggcggcggggacgcctgcttcgaatacgtcctgcccccaccacccccgatcccggtgatcccgcgcgcgccggtcgccgaccgccacgcgcccgtccgcctcatcctcgttatctccctgctctctatcttcctctccctctcgctcgggctctccacgctcctcctctaccgccgccgccgccgcctcatcctgcgacgacgccgaagcctcgccgcggccaccgccgaagggcccgacgacgaggaggagggcgggggcggtggaggggtggtgcaccacgtgtggtacatccggacggtggggctcgacgaggccaccatcgcgtccatagccgctgtggagtaccgccgcggggtgggccggagcggggactgcgcggtgtgcctcggcgagttcagcgacggggagctggtgcgcctcctcccgcgctgcgctcacccgttccacgcgccctgcatcgacacctggctccgcgcccacgtcaactgcccgatctgccgttcccccgtcgtcgtcattccctccgatctacccgtcgatgccgcggaggctgaggcaggcggtgcccaattgggagaacactacgttcacgaggaaatgtcgctgtctcaatctgaatcggagactgagggctcggaggactctgaggcgtcgtcagcctcagccactcaaagtgaaggcacgtctacagcggaggagaatggaagggacacgcccaagccaattaggcgctcggcttccatggattctccgttgtttgccgtagctcttcctgaagcaaatgatgatgtggtgcggtataattgcaagttgccaaatccccgagagatgaaggtcttcagggcgaaggagaaggaggccgcaggcatttcttcgtcctcgtgtcagtcaggccggttcaagattggcaggtccatgtcaagcagtggccaagggtttttcttctcacggaatggccgctccagtggtgctgtgctgccactatcaaggtgggaagattcaccaaattgaggtacgcattattcatgttttagatctgtaaggttgttcttggccattgtgggtggctgtggccaagttgcttttatttatgtgagatatttgattacagtgttgatttgattgcttctaagatagtac

SEQ ID NO: 108710 - DNA, 1660 bp, Zea Mays
ttttaccaaacccaccaacagcgaccaatccactccacgtatccccctccattcccaaccagactagcccaccagtccaccaccagtccaccaccgccccctcgcgcacgcgcacctctcgtcctctccgatgcgcgccttcgagccgactccgccgccgccgctgcaccagccccagccccagccgaggtagccatgtacacggtgcgcccgcacgcggcggcgacggtcacccttaactgcacggaagcaccgctcgactgcctccccctctgccccggcggcggggacgcctgcttcgaatacgtcctgcccccaccacccccgatcccggtgatcccgcgcgcgccggtcgccgaccgccacgcgcccgtccgcctcatcctcgttatctccctgctctctatcttcctctccctctcgctcgggctctccacgctcctcctctaccgccgccgccgccgcctcatcctgcgacgacgccgaagcctcgccgcggccaccgccgaagggcccgacgacgaggaggagggcgggggcggtggaggggtggtgcaccacgtgtggtacatccggacggtggggctcgacgaggccaccatcgcgtccatagccgctgtggagtaccgccgcggggtgggccggagcggggactgcgcggtgtgcctcggcgagttcagcgacggggagctggtgcgcctcctcccgcgctgcgctcacccgttccacgcgccctgcatcgacacctggctccgcgcccacgtcaactgcccgatctgccgttcccccgtcgtcgtcattccctccgatctacccgtcgatgccgcggaggctgaggcaggcggtgcccaattgggagaacactacgttcacgaggaaatgtcgctgtctcaatctgaatcggagactgagggctcggaggactctgaggcgtcgtcagcctcagccactcaaagtgaaggcacgtctacagcggaggagaatggaagggacacgcccaagccaattaggcgctcggcttccatggattctccgttgtttgccgtagctcttcctgaagcaaatgatgatgtggtgcggtataattgcaagttgccaaatccccgagagatgaaggtcttcagggcgaaggagaaggaggccgcaggcatttcttcgtcctcgtgtcagtcaggccggttcaagattggcaggtccatgtcaagcagtggccaagggtttttcttctcacggaatggccgctccagtggtgctgtgctgccactgtgagttggtatgtttttactgtcaattggttgcagcctcagcaaagccgggagctggtagtgtgtcagagtttgttgatagaaaacgcagagagctgaagttgctctccgagaaaatcttcatttaggtgtgagttattcatgagagcaattgttgtcgctaaggattgctggagtgatacggttgtgtaagcttcgaagttccaagtatgataactagcttggcctgagtcaattcgggtgaagctgatgtctggcttctccatatatacttgttatgtactagtaatcatgcaagaaggaatggacttacacttgtatcaactctgtgccttaaagagcaaacatactataaattaagaatatgttgctggggagaccagtacttcctgttg

SEQ ID NO: 108711 - DNA, 99 bp, Zea Mays
gcaagtgcatcggatgaacggggggtggctcggcacaccttgatttctttctttctcaatctaacgctctcgtgtttcttcttgggcacactgatcaga

SEQ ID NO: 108712 - DNA, 518 bp, Zea Mays
accgggcacacaccatcacagtacacacacacacacgcacacgctcatcaagcttctctctcgcctactcggctgcaatggcgcgcttccagctcgcggccctggccatggcaatgctcttcgccgccgcggcggcgcaggccccggccgccaccccgacgccggctcccaaggcgtctcctcccccgccggcgacgccgcctccgacgccgccgccttctactgagagaagggagatctgcactgccccgtgctgtaatttatttgttatccgtgttgagccgttgattccttctttttttttcttttcaccattttttttcttccatccgaatatccatattccattcggcattcgattcagtaggactggcggcatctgttcgttcgtgttgctacagtgtaggaccgtggctcggacagattggttgggctggctcggtggtgttgtgctccgttcatccatttgtataataccctgttgattctctttcgcagctactgcttactacatttta

SEQ ID NO: 108713 - DNA, 815 bp, Zea Mays
acgcggccctctactgtcccggcaccgggcacacaccatcacagtacacacacacacacgcacacgctcatcaagcttctctctcgcctactcggctgcaatggcgcgcttccagctcgcggccctggccatggcaatgctcttcgccgccgcggcggcgcaggccccggccgccaccccgacgccggctcccaaggcgtctcctcccccgccggcgacgccgcctccgacgcccgcgaccccgccgcccgccccggcgccggtgtcgccgcccgcccagcctccggccacgcctcccccggccccggcgcccgctcccaaggcccccgcccccgcgcccgaggcccttgccccggcgcccaaggccgaggccccgacccccgagatgagctccccgccgatgcccacggagggccccgccccgacgccctccgccgaggtgccccctgcccccagcgccgccgccgccgtctcccccgccgccgccaagtggttcgccgccgctgccgccgtggccgccgccgccgccgccttctactgagagaagggagatctgcactgccccgtgctgtaatttatttgttatccgtgttgagccgttgattccttctttttttttcttttcaccattttttttcttccatccgaatatccatattccattcggcattcgattcagtaggactggcggcatctgttcgttcgtgttgctacagtgtaggaccgtggctcggacagattggttgggctggctcggtggtgttgtgctccgttcatccatttgtataataccctgttgattctctttcgcagct

SEQ ID NO: 108714 - DNA, 967 bp, Zea Mays
atgttcgccattggtactgtaggtgggctgaatggaatgggaagtacagagatgatattcgaagatttattaagggagatcctggtatgaagggggtgtttgcaactcgtgtttctggttctgcagatctctaccaggcagcatctgtatagcaagcagtggcgagggatgaaaacggtcggaaacggtatttattcggtgaacaatcggaagccttaccatagtgtgaactttgtaattgctcatgatggatttactttatgcgaccttgtttcgtataactccaagcacaatgatgcaaatggagaaggtggtcgtgatgggtgcaatgacaactacagctggaactgtggcattgaaggaggaacaaatgatttgaatgtgttaagtcttcgttctaggcaaatgaagaacttccatgtggcattaatgatttcccagggcactccaatgatgctgatgggagatgaatatggtcacacgcgttatggaaacaacaatagctatggacatgatactcacataaataattttcagtggggccagttggaagaaagaaaggatggccatttcaggtttttctcagagatgatcaagtttcgtcataaccatcctatactgagacgagacaggtttctcaacaaagtggataccaacctggaatcaccaaaggatattgtcccagaaggggtgccattcacaggttcagggtacaggattgctccttactctttttttgaagattcagtaggggaagcccctactgagattttattgaaaatgaaaaatgaaaaggttacaacttagcctggttacaaaagataatctgaaagatctaattaaacagttacaagcattggagtaagtaaaacaactcttatgtctgtcacaaactcagccaattcgggatggaagtgtcaaaattcccacgcgctctgtggatgatcaaccgaagctccttacaaaa

SEQ ID NO: 108715 - DNA, 1006 bp, Zea Mays
aaccgccctcattccaaaccctagccgtcgccagccttggagctctcggacacggcggctcctcctccactccccctcgactcctcctccatccccgacgcgacggctccatccccgacgctgagctccatgtcttccctcacctcggtcctagactcccaggtgaaaacttcagactctgaccctgtccccataacgtgtgcctcctgccctcctcgcagatctgcttgtccgccggcggcggctaccactcgccagcaagccatctcctggagctggaggggtctgcttcctccttgactgcccatcgacatcttcgccctcgtggccttcgcgtcggtgcccctcgcctgtgatgcaggggtctcatccatgtggtgccacactactggttgccaacgaccgggaaggaaggtggtgtggatgccgtgctcgtgtcttcctctacagggatgctcagattccccttcctcactgggctccttagattcgccaacacgaaggagtaataggagctaataatatccaaccatcaatccagcagaatttaataggatatgagttgatatcaaatgcagagtttacattttcaccgtggacaccttttcctaccaagaggttattaccaagaatcctcaatccaaatccaaggcgttcagcatcatagcaatatttcaatagttaataatttttataaaagaaatcaattgtgtttctacctttgaaggttcaaattttactgcaaaatcaacgagttcttggtggtgttggtatggcatccgatccaatggtggcacgtagaagtaaaatctgaaacatttgttttgatggttagcttgcattttatgctataattacctcaaatcacgtgttgcctttttcaccaatttatgacatctattgacatgttttactttaatttacgacatttattgatgtgttttgcgacaacctcatgtggggccacatttgccattatgaaatagatcgatgatttatgctaaaa

SEQ ID NO: 108716 - DNA, 944 bp, Zea Mays
aaccgccctcattccaaaccctagccgtcgccagccttggagctctcggacacggcggctcctcctccactccccctcgactcctcctccatccccgacgcgacggctccatccccgacgctgagctccatgtcttccctcacctcggtcctagactcccaggtgaaaacttcagactctgaccctgtccccataacgtgtgcctcctgccctcctcgcagatctgcttgtccgccggcggcggctaccactcgccagcaagccatctcctggagctggaggggtctgcttcctccttgactgcccatcgacatcttcgccctcgtggccttcgcgtcggtgcccctcgcctgtgatgcaggggtctcatccatgtggtgccacactactggttgccaacgaccgggaaggaaggtggtgtggatgccgtgctcgtgtcttcctctacagggatgctcagattccccttcctcactgggctccttagattcgccaacacgaagatatcaaatgcagagtttacattttcaccgtggacaccttttcctaccaagaggttattaccaagaatcctcaatccaaatccaaggcgttcagcatcatagcaatatttcaatagttaataatttttataaaagaaatcaattgtgtttctacctttgaaggttcaaattttactgcaaaatcaacgagttcttggtggtgttggtatggcatccgatccaatggtggcacgtagaagtaaaatctgaaacatttgttttgatggttagcttgcattttatgctataattacctcaaatcacgtgttgcctttttcaccaatttatgacatctattgacatgttttactttaatttacgacatttattgatgtgttttgcgacaacctcatgtggggccacatttgccattatgaaatagatcgatgatttatgctaaaa

SEQ ID NO: 108717 - DNA, 755 bp, Zea Mays
aaccgccctcattccaaaccctagccgtcgccagccttggagctctcggacacggcggctcctcctccactccccctcgactcctcctccatccccgacgcgacggctccatccccgacgctgagctccatgtcttccctcacctcggtcctagactcccaggtgaaaacttcagactctgaccctgtccccataacgtgtgcctcctgccctcctcgcagatctgcttgtccgccggcggcggctaccactcgccagcaagccatctcctggagctggaggggtctgcttcctccttgactgcccatcgacatcttcgccctcgtggccttcgcgtcggtgcccctcgcctgtgatgcaggggtctcatccatgtggtgccacactactggttgccaacgaccgggaaggaaggtggtgtggatgccgtgctcgtgtcttcctctacagggatgctcagattccccttcctcactgggctccttagattcgccaacacgaaggagtaataggagctaataatatccaaccatcaatccagcagaatttaataggatatgagttgatatcaaatgcagagtttacattttcaccgtggacaccttttcctaccaagaggttcaaattttactgcaaaatcaacgagttcttggtggtgttggtatggcatccgatccaatggtggcacgtagaagtaaaatctgaaacatttgttttgatggttagcttgcattttatgctataattacctcaaa

SEQ ID NO: 108718 - DNA, 4184 bp, Zea Mays
gcgtttcctcccctcctaagccaaaccccgaatcctccgtcgcccagcagccgccggtgacggcgacgctgggcaatggggactgaggtagcagccgtagtggatctccgggcgctgacacagtcggatctcgtggccctagctgccgcatcgccctacgccgtcgactcccgccggggccggcgccggcgccgcgatagcgagttcctctctcccccgaagatcgaccgcgccgttttcaacgagagcgcaggttcccgcaaacaaaccttctcccgtcgccgcgtcgccaccaacatatcccacaaactaacgcccaccaccaccggggcctcctccttatctacgccagctgcccccaccgaggaggaccccgacaaccgcctcattgtgttctacctccaacgcctcttcgcgcgtgacgacccctcgtaccctgctccgcctacgattccaccccgaccgcaaaccctagccgcgcccgcgataacagcacctgcaccgcccgcgccgtctctgccgccgccgtctgctgcggcggcagaccccgatagggtagtgctgaatccaaagggtttggtggttgacctggtgagactcgccgatcttgtggatccgtatggggaagagctacgtcagcgtacggcaggattggggtcagagtccgagctgctgggattcatgaacgcgctggaagggcaatggggaagccggaggcgtcggaggaagtttgtgaatgctggcatgttcggtgaccacctgccctgtgggtggaaactgctgcttgggctcaagcgaaaggagcgtgtcgcatggattaattgccgccgttatgtgagccccaaaggacatcagtttgctacttgcaaagaagtatcttcctacctcttgtcccttcttggatatcaggaggcaaagccaactgcctctcagattaacaatgcaggagtgcatgacctacatgttaattctgtaggtcttcaccagcaaaccatctcaattgaggaaaagcaaattgcagtgccagttaattcagttgcattgtttaattcctctggtgattctcatcaacaaaaacttcagaaggatgaagctccaatagaagtgaatgcaaaggagtgccggaaatgcaatttgacgtttcatgaccagagcgcctatatgcaacatcagttgtcctttcaccaaaggaaagctaaaaggcgcagggttagtaaatctggagaattgggtaccaacatagatggaaactacgagaagactcagcagaagacctctggagaggtatctggcaattttggccacagcgctgcaaatgtaaggtatgaaggtctgagtccagcagaactgttagatggtcgaccatccttgatggcagtgccatgtggatctcaggagatcactatcttgcctcaacagggaaaagaaccttgtgtgttgcctcaacagggaaaagaaccgtctgtgttgcctcaaccgggaaaagaaccgtctgtgttgcctcaacagggaaaagaaccttctatgttgcctcaacaggggaaagaaccttctgtgttgcctcaacagggaaaagaaccttctgtgttgcctcaacagggaaaagaaccttctgagttgcctcagcagggaaaagaatcttcaggagatatctctgtgaatcagaaggaccctcttaaggagatgaatggctttcctgaacaggaaaaaggacttgttgctggagaacttgtctctgcacatcataaggaccctctaatggatattacagatgcatttgaaatgataaaaaaacatcctgccagagagccttcctctgggcatcatctggatactgtcgacaattctgatgatcataaaacccacgatgaagcatgtgacaatgttgtaacttctctttctattgatgctgaaaggaaattgggtgtttgcaactccatgaatgttcatgagaatatcagcttaaaagatccagaactttccaatgcagattattcccaaaagttcaataggtctgatgaaacttgtgatgtacataaagaggtttcttcaactgtgaatgatcctgatgaaagaaaatgcacagatgattcaacgaggtgtactaatatgtcctgtgatctactgcatggcaaaattgtcagttctcctgaagaacatgattttagtaaccagctagaaagtaacccactttcagtatctaggaatgagcctgatcttaattcaattggtacggaagtggatggtggcaatataacttgcaatgcggaaaaccccagaagcttcaaaagtgagaaatctgctgagctcaagattatggattgcgaaatgacttcttttaaagacagtgaaataaaaaatgatgtcagagtaagggatgtaaatctcaattcatgtttggattcaatatcttctcctatttctggtggaaacaatgaaacatctgatactcctgatgatgctattcgatcatccattatcgcccaatgcttcggtactacctctaatgatgacacggcttgtaaggatggaaactttgccaaccagaacgacacctgtaagggtgaaaattttgtcaaccagaaaaatgtcacaatgtaccaatctaatttgaccatggaacctatacctcgagctcaaataaatgtggattgtttcacttcttcctgttcaatgactcctgaaatcaaggactatggcaacagaggtgaagatcgtgcgaaagaagcactagtgaactcacaaaacatgacaagtaatgaaactggttttgatgctgaagcttataacagtgatatcttcaatggtactatcacagaaagtagtcttgcccagttgagtaatgtcattagtatgaaaaatgcttttgcaaactgttactcattatctgacctaaacacacttactggtggtactgcaactgatgatattgatatgcacaatattaggagttcttttgtcagctctaccagtcgcactgaaccaaatgagcactgcacgttggattttgatatcaagggttccatgcttgaggcattggaaaaatctgacagtgacttagataatcaatacaatgatgcaggcccttcttgtgactcactacctgctactgggacaagtgggactattgatgattttatgtccatgcaaaccaattttggtagctttacttctttggttcgtgctgttgaagatgttccactgagcaggattattcaagatcagcggtgtgatttgcaacttggatttggtggccccaagcagcagatgtatccaagctttgagcaacagctaaggatggcctcggctggagctccgccttatgggaccatcggcaggcatgaccctatacctgtaccagagccaacattgatgctaggttatgcaccgcagctaggtaactgcccccctccgttccagttgggctggggtccgtcttattcgaagatggttggcatgctccaatctgtgtgcgtgtggtgcaatagcccattccagcatttcggcaccgtcgctgagcagcaggcagattcacttggttacatttgcccgtcgtgcaagggaaagttttctggtcatcttggcatcaacggtccatctatttgaaatcagtttcttgtaacctgaactggtgctgctgccccaccatcaatttatagtctagttgatatgaatcgttttgtacttgtagtatgtatcctttaactcgtggctagtggtggaaacaggtttattcgaatcttacatttttggttattaaaactcaaccatcaagcagttgttgcgaacaaggaagctaagttgttggatacatacaagactgtgctctcaagagatactggtgggtactctgctgaagaaaagaccaattggcctgaagactaaattgtccatcttcaattgcaccaagagaaaggatctccattgcactggtggctggtgcatgtttgaggcttggatgatggcagaagtgtcatgtttttttatgttgaaccttgtttctaaatagtaagtctagacaattgttctgtttgaaatctgaatgaattgtggctggttgttggtggactggattacaggcaaaagtgtcatgttttttctatctttaaccttgtgtataatatagtaaaggacggatgattgctctatttgaaatatggagtaatggttgctagttgcctgac

SEQ ID NO: 108719 - DNA, 595 bp, Zea Mays
ctgttaccgggtcgctggccggattttgcgcatcggtcgttgctccccgccgaggcatgcgggggaccaattcttccctgaccactggatacttatgcgcgcacctcacatccctgagccacaccgatagccaaccttaagccacgccagtgaagcaccgtgtgcttgttgcaagtagcagagagagagagagaatggccgccaccttctagcccatggccgaagctaccgcgccgccacgcaatcgcctcacgactactcctccagccgcacctcgctgaatccccctcccacgacccgctcgtgcttactgctccttccctcctccttcccgttcaccaccggtgccgtggacaagttctggtgccatggatcgctagtggagaacctccctgatgttcgccgggtcgaatcgaagctagggagaccaccaattctgcggctgccacttgggaagaccggaattcaccatgggcggccgaccaccacggcggagcttcggtgcgccgtgggccagggtccctacctcacccccaaagacgagcaagccactgtggaatctgaggttaagcaagtagagatagctgagcaggag

SEQ ID NO: 108720 - DNA, 3258 bp, Zea Mays
atgggaggagacagtggaggcaaagaaattgaaaaggttcatgaatatgacactaccaagactgtcagagaaaataacatattctcgcaagatgaaatcaacaattttcaacagtatatattgcgaataattggaagtagtcagatggctggaacctctttgactcagagtggaacaacacaatcaccaagcagtcagatgtgcacacaaatgtcgttcccatatgtgtcaaaccaggggggatacatggacctgatgatggaacagatacgtaactcacaaggagaatcagcaagtgatgaatgcaatgaaatgcatagtggcatggacacacaaaatgaaaccatgaacaacaccacactagaaaagccatgggagacatacacacaaatgattcttgagagcgacaccctgcttgcagatgcaaacatgtccaaggaaaggtgtggagcttgggaaaaagcaataaacatatgcagcataactcagaggagaatacatacaagaattttgaagtggatggatgttcaagagacatttgggggatgcattgaagccggtgcatctaaatatggtgaagcagtataccacagagatctctttgaaggaatgcatgtagaacaactacctgattgtgcaccaaatgtagatggaagggcagttgaaacatcaagtgctcgtgaaaactttgatgctgcagaatttaaaaaaacagatggaagtgaagaagagttaacagaggatcagatcgatgccttcattatgagtgagcagatagctgcattagaaggaaacaatgcaccaatagacagcaaatatacacctcaagttgggatggaatttaagaccaggggagatgcagagcacttcttattcttctatgggtttttggctggttttaaaccagcaatcacccacactttcagaacttccaacaaaaaaagaaacaatgaggttacaaaggtggagctgaaatgtaacaagcatggaaaaacaaaaaaagctgatcagcaggaacaagataattgcatagaacatcaggggagcgagaaagggccaaaaaggaatacaaatgtccaggttaaaacagactgcagagtagtcatggttataaaagaacatcaacagaagtgggtgatcgataggttagacttggaacacaatcatgatcttagaccagcagacagcaacaacatgtttagcggacataaatacatgactgaaatggaaaaaggagttatacgaacattgaaccacaacaacatacctactcgaaagatgattgctatattgtcttatctgagaggaggtatgacagcattgccgtacaaaaaaaaagatgtaagtaactacagaactaaattaaacaaggaagtaacaggaaatgatatgacacaagcactgcagtttttccaggaaaaacagaaggaagatcccaatttcttctatagaattgtcattggagaagataaaaaagtgaagcacatgttttgggccgatgggacatctttgaaatactacgagatgtatggagattgcatcagtttcgacaccacatacatggctaacaagtacaacctaccatttgcgccatttgtgggagttacagggcatgcacatacatgcttgttcgcatgtgcattcatttctgatgaaacaatagaaacattcaagtggatattcagcacattccttgaggccatgggaggaaaacaccctcgaacaataataacagatcaagataaagcaatgagaaccgcaatcaaagaggtcttccctgaaacagtgcataggaattgcttcttccacataaaaagcaaatgctaccagaaaaatggaaattgctttgcaagaaatttaggaatggcagaggactttgaggacatagttaactattcactaactgtgcatgaatttgagagggactggaagaaaatggttgaggactaccacctagaaaacaataagtatttcaacaaaatgtgggaaacaagagctaggttcataccggtatacttcaaaaatgacttcttcccattcttgcaaagtacaggaagaagcgagggcacaaactcaaggtttaaagacaatgtggcttcaacttatagtgtgattagcttcttgcgtgagtaccaaaggattgtggaacaagtgaatgtgtcagaggagtatgaggataatgaaagcaatcggaaacgtccaaaggaactaatgtttggatatacaatagagaggcaagcacaagaagcatacaataggaacatattcaaaaaattccagtcccagttgcaaacaaccccaaaactaagttacaacagaacagctgccccgcatacttttgaagtgtatccaaaaacaaaccaggaacacaaaccacataaaacaaggaggtaccttgttatggctaacctaacatatggaatggaagagttcacttatgtatgcggcaagtttgacaaggatggcattttatgctcccacatacttaaagtaatcattgaagaagggctcacgaaaatcccagaggaatacataatggacaggtggaagaaaaaacaaaaccaaaaagatacaccactgatgcatgcatcaatggcaactcatccagtactaaggcataacctattgagtcggaaagcagcattgctcacatcagcagcagcaaaaacagagaagactatgcagtatatatctgaagaattagacaaactacaagaaaaggtttgccaaatgctatcatcagaagaagttataatagggggaccttggacaggaacagtgggagggaacaatgctgaaaatcagagcagaccaatagttgaaattctgaagaaccctgaagcagtgaaacagaaaggaaggccaaaaaaacctacaaggctaaaaccaatagtagaggaaatccgcagcaagatgaagaaggcagagcagaaaaaaacaagaaaacaaacaatgcagcagcaagtacgtctaactgaaaacacatcccgcttagtgtttttaaacaattacattaactttaaatctttttcttcccatcccccctaaaaatataaattgaacaaaattagattgatccacaaatatgtgttgttttctgtgatcacaggcccacaaggaaaagagaagaagaagatgaaaagatcagcaacttgtagtgttaccgctccgctcccacagaaccaccacccactcatgctatgaagatgcaggaaaatggagaaaaaagaacgtttcaatggggaagaagtgaaggga

SEQ ID NO: 108721 - DNA, 495 bp, Zea Mays
atgatcgccgtgccgcccactccattattccaccctcctcctcctacctttgaacctcctatccacgaagcaccggctgtcgccgccgccggcaacagcccagccggctccggcagcagcaccgatgacgcttacggcggccgcacggcaatggcggaggctgagcggaggcggcggaggatggtctccaaccgggagtcggccaggaggtcacgcatgcgcaagcagcggcagctcaccgagctgtgcgcgcaggtcgtccacctccgcggtgccaaccgccgccgcctcgacgagctgaaccgcgcactgaggggctgcagtgacatgtgctgcgagaacgcccggctccagaaagagaagaccgatctcagtaccaagctcgagcgcctcacccaggcgcagaacgccgccacgccaagctcctcctcggagccgcaacatgacacattgacactgctactgaataaattcaatcttatcttcccgttttag

SEQ ID NO: 108722 - DNA, 2697 bp, Zea Mays
cctcccaggatatatatatcaatcaatgcccctgtgatatcgagcttcagttgatgcagtggtgaaaacatcttctcgaaaaactgctggctgcaagttgcaaaagtttgtctttcccttgttgtgttgttgcttccttctctggtggagtacacgggagaagtttgcagatacaggcagctcctttcaaatctcctatgtccagggatttggactgtcctgttcagacacagatggctgtggcagtcctggaccggagctttagcagcgaatatcctggaggtagcagaattgaggggaggcaactgagctggaagagagtatttgtccaaactgacaatggttctgtccttggcatcgagctggagagaggagaaaacgtacaaactgtgaaaaagaagctccagatagccctcaatgtgcccactgatgagagctcattgacctttggtgacctagttctgaataatgatcttagcagcattcgcaatgactcacccttgtttctcaaaaggaatcagattcaccggagcaattccacaccttgcctctcacctacaggtaagaatgttttgcaaagagaccggagtggacccattgaaatccttggctgttcaagtccttcatctcggatgaagcagcttgctaaggatgtcattaaagccataatgaatgatgttgacccagtcgctgttaacagtgggatgggtggtgcctactacttcaagaacatttggggagagcgtgtggcaattgtcaagccaactgatgaggaaccatttgctccaaataatccaaaaggttttgtggggaaagctctgggacagccgggcctgaaaaggtctgtacgggttggggagacaggcttcagagaggttgctgcttacctcctcgactatggtcactttgcaaatgttcctcccaccatgctggtcaagataacacacacaatcttcaatgtgaacgactgtgttggctgcaaaagtaaagtgttctgcaacaaatcagaggctgtgagcaagattgcatcgctgcaggagttcattcctcatgatttcgatgccagtgaccatgggacctcaagcttccctgtatctgcagtgcataggattggcatccttgacattagaatcttcaacactgacaggcatgctggaaatcttctggtcaagaagcttggtcctggcgccgacaattttggagagcagacagaactcattcctattgaccatggtctctgtcttccagaatgcctagaagacccatacttcgagtggatccactggccgcaggcatctgttcctttctccgaggaggagcttgagtacattgcaagacttgatcctgtaaaagatgcagaaatgctacgcatggagctacccatgatacgagacgcatgtctcagggtgctggtgctatcaacagtatttctcaaggaagctgcagcgtctggcctctgcctctcggagattggagacatgatgagcaggcagttcactgcgaaggaggaggaaccgagtcagcttgagctgctctgcatggaggcaaggaagtgggttgaggaaagagagtcctttcttcccaacgaagccggagttgaagatgacgatgatgacttcacccagttccttatcgacggcgaggatgattatccggatgccttggaaccatcagctttctgcaagtttggtagcatgaaggcaagttctaggaatccactgtccaagctagatgagcgtgacgaggaagacggagacgggaccgaggaggacgacgacgacgacatcttgaccggtgcattgcctcagaggatctcgtctatctccaagctgtcgtcatccatgaaggggcttggcttcattgggaaacccaagccctaccgcacgtgccttcggaagggtaaagcgacaggcagaactaagtacaccggcaaagccagcgagcatcagtccggcagcaggagcgccaacgagctgctcccgcccagcgccagtttcgtgaagctgtcggacatgagccctaaacagtggagcgcattcctcgacaagttccaggagctgctcccaggtgccctgagcgcccggaagcacgctgccggtgtcgtcggccagcgctcgatgccgaggctgggcacgtcttgccagttttgagagtagcagaagagaagccaccgaacccaaggtatgacgaacgcgcttctgttcgagctctggtgtgcagcagccaagcaggtacggagtattatatatgcttgtagtaggtgtctggagccggtggtggtagagagggtccgagaataagatcatccatggcatgtgagatgaggttgcgggagaaggaagggggttgtgtgtgtttgtgcatagtgtttcgcataagaggtccgttgttcttttttcttcttctctgtatatagttaagtactcctactgctactgcatcgcagcaccgggcacgggctgggatctcggccgttgttatctgaacgatggtggtgagtgtgctggcgtcgcctgctctctgctctgtctttgccgctgtaccattttggaggcgcttaccatattatgaactttgaactatgatatgatgttcgctacagattatattgcataaatatcacatgttctctgtataccagtaatatgtgtactgtacctttccattcagtggagcctgcgtgccacaaaaaaaaaa

SEQ ID NO: 108723 - DNA, 263 bp, Zea Mays
aaatgggaatacaaagtgcaacaataataatttcagcatgtaatacatatttttgtatttatttatttgatatttgtctaccttaatttcattattcgaatatgcataaggaaagaaaaaaaatcaataaatctccaagggttccatagattccaaaacacttttatatcaatttatgcatttattttattttttttattataccaattttagggctttacaaatcctaccccccttaacagaaatctcgtcctcgagatttg

SEQ ID NO: 108724 - DNA, 1831 bp, Zea Mays
cgccggtcgccactgtgccgtgtgcctcggtcaagaagagtgacgcgtgcgccaccctcaccgactccacagtcgacactcgacaccacctcacatccccgcgcaccgctcgacgtgcgcgaccacgagccactgacgcgtcggcccgcccggcggtaaacataagcgaagcggtgagagttacccggaccgaccgggcctggtccaccgacccggcgccggtgcccataaactcgagagcgagtcgaccaccgacgctagcgagcagctgaaactgaaacagcccgtcatctaccattcgcccgccgcaacgctccctgctcggaacagcctgcgttgctcgcccacacgacgccacgcatgcaggaggagccagggcgtcgtcccgtgccgccgttcgcgggcgtggacctccgccgccccaagggctaccccgtggcggttgccaaggaggaggagaggccggcgccgggcggcgacccgtgcccgcggtgcgggtcgcgggacaccaagttctgctactacaacaactacaacacgtcgcagccgcgccacttgtgcaagtcgtgccgccgctactggaccaagggcgggtccctccgcaacgtccccgtcgggggcggcacgcgcaagagcagcagcagcagcagctcctcatcatcctcggcgacgacgacgtcaacctcgcccggcgccgcgcccaaggccacgaagcggtcgaagaactccaagcgccgccgcgtcgcgcctgccccggaccccgccgcgcccggcacggacgcctccaccgccgacgtcgcgagcacggcaccgtccgcagcgacggtgactgcctcggagaagccgagcgcgacggagcacgcagcggcggctgtcgccacggagaagccgccggccgcgcttccggtgtccgtcggcgctttcgcggacacgtccccggcgccagatgctgggagcggcggcgttagggagctgctgccgcacccgagccgcttcgagtggccgtcgggctgcgacctggggccgccctactggggctggggcaccagcgtgttcgccgacaccgacccggcgctgttcctcaatctgccgtgagtgacccgtgacaacgccatggcgcccatggttaactaatcaaccatgatcacacggtcgacgagatgagaggaacagagcacgcagtgcgtcgggctcttgaagctaggcgctgtagtagtctcctaagcttactgttgtctagaccgatagtctcgcgtacttgtgtagttgtgttgatggtttttaatcgccgctttgtactgcaattctagtaaaaaggctaacatatgggatagccgggctctgcatgaatctgtgcttgctttgacagtttgacctgattgtggtgctttcttagtttaaggccatgagaatcgcaagaacagggaacggcgaacttcgaagaaatcgtgtcgttgcaagtgttggaggcatatattcttaaagccggccacgcatgtaggtagtgtgacgctggttctcgcaaagtgcaaacgctaaactaggcgagtacgaaaatgtacgttgtctgaatgctacagttatgtttagcacgcacgtactcctacactcgccgcgcagcgtggtgctgatggaactcaagccaggccggattcgttcggttgggcgtcggcgtcgcgggggcttttcgaaattccgggccgcggcgggcgccgacaacgcgttgattccgatcgcgacgcgtcgcgattccgacggcgacgggccgtcctgcgcgccgtgtcagcgacggatccgggtcaggtcaggtcgtcaatcgccgccctgtact

SEQ ID NO: 108725 - DNA, 1663 bp, Zea Mays
aatacttcgatagtaactgtttgtgtgggaaattactaaaaacactgtttgtttgtgtgggaaagaagaaaaaaagaactaacgttaaaggcggcttgtgttgtggcgcagggcaccagcagcagtgggcgctccccttcgccggctccttgcaggtcagtccgccgccgcagcaggcgcaaccggataggaagggccgcggcggaggcggggtcatggattcaggctccagatccagcggcggagccgggttcgacgacgaagacggcctcaccacgcgccgcgaggtctcctcctcgctccaagcagatttggcagtaagggtggattggaagggtgggagctgcagcgatggcggtacaaatcaggggccaaacacaccacggtcaaaacactcggccacagagcagcgcagacgcagcaagatcaatgataggtttcagatacttagggagctgttgccacacaatgatcaaaagagagacaaagcaacatttctcttggaggttattgaatatatacgttttttgcaagagaaagcgcaaaaatacgaggcaacattcccagaatggaaccaagaaaatccaacgatgcttccgtggtcaaatatgtattttcgatcattctggaaaaatgcacagagtaaaggccaaatcccaggagattccccgcctgacccttcacatttcgtgagaaatggatcctcccctggatctaatttcactgggaaactcgatgataatcacacatctgcagctgcatcaggggcactggaccaggcagaaactaatcacgtggctagcggctgctacagatcatcagaaactccggcgaatattacaaataatgctatatctcagtcccaacctcaatggacaggtccgtcccctgtggatgactctgcagtgaaaagtgaaatgcttaacagccaggagttggcaatagatgaaggaatgatcagtgtgtccagtacctattcccaagagttacttatctcgttgtctcacgcccttcagagctcaggtgtggatctgtcccaaaccagcatctctgtgcagatcaacctgggaaagcgtgctggcaagagatctgcatctgctggtggtgtatcctccaactccaaggaaccaccagccgatccagcatctagtaacgaactaggcggccatcacgtgacaacgttgggagctagcgctgacggtctcctcccccacgcgacgaaacggcataaacgggacaacagctgatgatgggcctctctcactccgcctcgttcccagacgacagacggattgatcattcttttttttttctcccagcccgacgggaggctctctcttggattggttgcacatcgcgtgctcggtgatgggctgagaccccggctgtattctttttgatttgatcgctcccgccgccatcccctgtctagcccattgtttttacgtagaggaacgaaccgtggagcttcccattgcggattgtgaagccgctcttcttgtacacaggcttccattcatctgagaagcttcttcccctccttgaacaggtctctccgcgttttagacctgtatactagcaacctgtaagatatgattatgatgtccagcagctctcccaggcacggcaccggccagtcaagttgttccgttatttctatgta

SEQ ID NO: 108726 - DNA, 1660 bp, Zea Mays
aatacttcgatagtaactgtttgtgtgggaaattactaaaaacactgtttgtttgtgtgggaaagaagaaaaaaagaactaacgttaaaggcggcttgtgttgtggcgcagggcaccagcagcagtgggcgctccccttcgccggctccttgcaggtcagtccgccgccgcagcaggcgcaaccggataggaagggccgcggcggaggcggggtcatggattcaggctccagatccagcggcggagccgggttcgacgacgaagacggcctcaccacgcgccgcgaggtctcctcctcgctccaagatttggcagtaagggtggattggaagggtgggagctgcagcgatggcggtacaaatcaggggccaaacacaccacggtcaaaacactcggccacagagcagcgcagacgcagcaagatcaatgataggtttcagatacttagggagctgttgccacacaatgatcaaaagagagacaaagcaacatttctcttggaggttattgaatatatacgttttttgcaagagaaagcgcaaaaatacgaggcaacattcccagaatggaaccaagaaaatccaacgatgcttccgtggtcaaatatgtattttcgatcattctggaaaaatgcacagagtaaaggccaaatcccaggagattccccgcctgacccttcacatttcgtgagaaatggatcctcccctggatctaatttcactgggaaactcgatgataatcacacatctgcagctgcatcaggggcactggaccaggcagaaactaatcacgtggctagcggctgctacagatcatcagaaactccggcgaatattacaaataatgctatatctcagtcccaacctcaatggacaggtccgtcccctgtggatgactctgcagtgaaaagtgaaatgcttaacagccaggagttggcaatagatgaaggaatgatcagtgtgtccagtacctattcccaagagttacttatctcgttgtctcacgcccttcagagctcaggtgtggatctgtcccaaaccagcatctctgtgcagatcaacctgggaaagcgtgctggcaagagatctgcatctgctggtggtgtatcctccaactccaaggaaccaccagccgatccagcatctagtaacgaactaggcggccatcacgtgacaacgttgggagctagcgctgacggtctcctcccccacgcgacgaaacggcataaacgggacaacagctgatgatgggcctctctcactccgcctcgttcccagacgacagacggattgatcattcttttttttttctcccagcccgacgggaggctctctcttggattggttgcacatcgcgtgctcggtgatgggctgagaccccggctgtattctttttgatttgatcgctcccgccgccatcccctgtctagcccattgtttttacgtagaggaacgaaccgtggagcttcccattgcggattgtgaagccgctcttcttgtacacaggcttccattcatctgagaagcttcttcccctccttgaacaggtctctccgcgttttagacctgtatactagcaacctgtaagatatgattatgatgtccagcagctctcccaggcacggcaccggccagtcaagttgttccgttatttctatgta

SEQ ID NO: 108727 - DNA, 1621 bp, Zea Mays
aatacttcgatagtaactgtttgtgtgggaaattactaaaaacactgtttgtttgtgtgggaaagaagaaaaaaagaactaacgttaaaggcggcttgtgttgtggcgcagggcaccagcagcagtgggcgctccccttcgccggctccttgcaggtcagtccgccgccgcagcaggcgcaaccggataggaagggccgcggcggaggcggggtcatggattcaggctccagatccagcggcggagccgggttcgacgacgaagacggcctcaccacgcgccgcgaggtctcctcctcgctccaagatttggcagtaagggtggattggaagggtgggagctgcagcgatggcggtacaaatcaggggccaaacacaccacggtcaaaacactcggccacagagcagcgcagacgcagcaagatcaatgataggtttcagatacttagggagctgttgccacacaatgatcaaaagagagacaaagcaacatttctcttggaggttattgaatatatacgttttttgcaagagaaagcgcaaaaatacgaggcaacattcccagaatggaaccaagaaaatccaacgatgcttccgtggagtaaaggccaaatcccaggagattccccgcctgacccttcacatttcgtgagaaatggatcctcccctggatctaatttcactgggaaactcgatgataatcacacatctgcagctgcatcaggggcactggaccaggcagaaactaatcacgtggctagcggctgctacagatcatcagaaactccggcgaatattacaaataatgctatatctcagtcccaacctcaatggacaggtccgtcccctgtggatgactctgcagtgaaaagtgaaatgcttaacagccaggagttggcaatagatgaaggaatgatcagtgtgtccagtacctattcccaagagttacttatctcgttgtctcacgcccttcagagctcaggtgtggatctgtcccaaaccagcatctctgtgcagatcaacctgggaaagcgtgctggcaagagatctgcatctgctggtggtgtatcctccaactccaaggaaccaccagccgatccagcatctagtaacgaactaggcggccatcacgtgacaacgttgggagctagcgctgacggtctcctcccccacgcgacgaaacggcataaacgggacaacagctgatgatgggcctctctcactccgcctcgttcccagacgacagacggattgatcattcttttttttttctcccagcccgacgggaggctctctcttggattggttgcacatcgcgtgctcggtgatgggctgagaccccggctgtattctttttgatttgatcgctcccgccgccatcccctgtctagcccattgtttttacgtagaggaacgaaccgtggagcttcccattgcggattgtgaagccgctcttcttgtacacaggcttccattcatctgagaagcttcttcccctccttgaacaggtctctccgcgttttagacctgtatactagcaacctgtaagatatgattatgatgtccagcagctctcccaggcacggcaccggccagtcaagttgttccgttatttctatgta

SEQ ID NO: 108728 - DNA, 1585 bp, Zea Mays
aatacttcgatagtaactgtttgtgtgggaaattactaaaaacactgtttgtttgtgtgggaaagaagaaaaaaagaactaacgttaaaggcggcttgtgttgtggcgcagggcaccagcagcagtgggcgctccccttcgccggctccttgcaggtcagtccgccgccgcagcaggcgcaaccggataggaagggccgcggcggaggcggggtcatggattcaggctccagatccagcggcggagccgggttcgacgacgaagacggcctcaccacgcgccgcgaggtctcctcctcgctccaagatttggcagtaagggtggattggaagggtgggagctgcagcgatggcggtacaaatcaggggccaaacacaccacggtcaaaacactcggccacagagcagcgcagacgcagcaagatcaatgataggtttcagatacttagggagctgttgccacacaatgatcaaaagagagacaaagcaacatttctcttggaggttattgaatatatacgttttttgcaagagaaagcgcaaaaatacgaggcaacattcccagaatggaaccaagaaaatccaacgatgcttccgtggagtaaaggccaaatcccaggagattccccgcctgacccttcacatttcgtgagaaatggatcctcccctggatctaatttcactgggaaactcgatgataatcacacatctgcagctgcatcaggggcactggaccaggcagaaactaatcacgtggctagcggctgctacagatcatcagaaactccggcgaatattacaagtccgtcccctgtggatgactctgcagtgaaaagtgaaatgcttaacagccaggagttggcaatagatgaaggaatgatcagtgtgtccagtacctattcccaagagttacttatctcgttgtctcacgcccttcagagctcaggtgtggatctgtcccaaaccagcatctctgtgcagatcaacctgggaaagcgtgctggcaagagatctgcatctgctggtggtgtatcctccaactccaaggaaccaccagccgatccagcatctagtaacgaactaggcggccatcacgtgacaacgttgggagctagcgctgacggtctcctcccccacgcgacgaaacggcataaacgggacaacagctgatgatgggcctctctcactccgcctcgttcccagacgacagacggattgatcattcttttttttttctcccagcccgacgggaggctctctcttggattggttgcacatcgcgtgctcggtgatgggctgagaccccggctgtattctttttgatttgatcgctcccgccgccatcccctgtctagcccattgtttttacgtagaggaacgaaccgtggagcttcccattgcggattgtgaagccgctcttcttgtacacaggcttccattcatctgagaagcttcttcccctccttgaacaggtctctccgcgttttagacctgtatactagcaacctgtaagatatgattatgatgtccagcagctctcccaggcacggcaccggccagtcaagttgttccgttatttctatgta

SEQ ID NO: 108729 - DNA, 2225 bp, Zea Mays
atagctggtaagcgtagtggaggaagagagggaagaaaacgaagcgaagccaaagcaaggtctgagccgccggagagggaggtggccgggtgggaaacctctctcgcgcgtcaggcgtcacgtgagaactcccgatccaccgggacgacggattcccgccgctcccccgcgcgcggcttcttccggtgcggtcggcggccgacggcggaagctactggcccaagcaaagtgagtgaattgcgagtccaggcggcgatggcggggcgctgcgattgacgtgcgacgactatgggcatccaagggaacaaggcggcgacgcacgagcacgacttcctctcgttgtacgccgccgccgccgcggccgccgccgccaaggacgctcctctcctgctccacgactccaagacgccgcctccttctcaaggtaattttctcttgaagacgcacgacttcctgcagccgttcgatcagaagccaggagcgccgccggagccgtcgccgctgcccgctccagccgcggagatcaggcaccggcagcaggtggcggtcgccaagcagcgcgcgctgccccttcccctgcccggcggcgtcggcaccttcagcatcagccccgcgcccgtgtcggtcgcgctgccgtcggccgtcgtcaagtcggagccgccgccgttcgtgctctggggccaacctgcagcgacgctgcagccgggcgcgcgagggcaccagcagcagtgggcgctccccttcgccggctccttgcaggtcagtccgccgccgcagcaggcgcaaccggataggaagggccgcggcggaggcggggtcatggattcaggctccagatccagcggcggagccgggttcgacgacgaagacggcctcaccacgcgccgcgaggtctcctcctcgctccaagatttggcagtaagggtggattggaagggtgggagctgcagcgatggcggtacaaatcaggggccaaacacaccacggtcaaaacactcggccacagagcagcgcagacgcagcaagatcaatgataggtttcagatacttagggagctgttgccacacaatgatcaaaagagagacaaagcaacatttctcttggaggttattgaatatatacgttttttgcaagagaaagcgcaaaaatacgaggcaacattcccagaatggaaccaagaaaatccaacgatgcttccgtggagtaaaggccaaatcccaggagattccccgcctgacccttcacatttcgtgagaaatggatcctcccctggatctaatttcactgggaaactcgatgataatcacacatctgcagctgcatcaggggcactggaccaggcagaaactaatcacgtggctagcggctgctacagatcatcagaaactccggcgaatattacaaataatgctatatctcagtcccaacctcaatggacaggtccgtcccctgtggatgactctgcagtgaaaagtgaaatgcttaacagccaggagttggcaatagatgaaggaatgatcagtgtgtccagtacctattcccaagagttacttatctcgttgtctcacgcccttcagagctcaggtgtggatctgtcccaaaccagcatctctgtgcagatcaacctgggaaagcgtgctggcaagagatctgcatctgctggtggtgtatcctccaactccaaggaaccaccagccgatccagcatctagtaacgaactaggcggccatcacgtgacaacgttgggagctagcgctgacggtctcctcccccacgcgacgaaacggcataaacgggacaacagctgatgatgggcctctctcactccgcctcgttcccagacgacagacggattgatcattcttttttttttctcccagcccgacgggaggctctctcttggattggttgcacatcgcgtgctcggtgatgggctgagaccccggctgtattctttttgatttgatcgctcccgccgccatcccctgtctagcccattgtttttacgtagaggaacgaaccgtggagcttcccattgcggattgtgaagccgctcttcttgtacacaggcttccattcatctgagaagcttcttcccctccttgaacaggtctctccgcgttttagacctgtatactagcaacctgtaagatatgattatgatgtccagcagctctcccaggcacggcaccggccagtcaagttgttccgttatttctatgta

SEQ ID NO: 108730 - DNA, 2189 bp, Zea Mays
atagctggtaagcgtagtggaggaagagagggaagaaaacgaagcgaagccaaagcaaggtctgagccgccggagagggaggtggccgggtgggaaacctctctcgcgcgtcaggcgtcacgtgagaactcccgatccaccgggacgacggattcccgccgctcccccgcgcgcggcttcttccggtgcggtcggcggccgacggcggaagctactggcccaagcaaagtgagtgaattgcgagtccaggcggcgatggcggggcgctgcgattgacgtgcgacgactatgggcatccaagggaacaaggcggcgacgcacgagcacgacttcctctcgttgtacgccgccgccgccgcggccgccgccgccaaggacgctcctctcctgctccacgactccaagacgccgcctccttctcaaggtaattttctcttgaagacgcacgacttcctgcagccgttcgatcagaagccaggagcgccgccggagccgtcgccgctgcccgctccagccgcggagatcaggcaccggcagcaggtggcggtcgccaagcagcgcgcgctgccccttcccctgcccggcggcgtcggcaccttcagcatcagccccgcgcccgtgtcggtcgcgctgccgtcggccgtcgtcaagtcggagccgccgccgttcgtgctctggggccaacctgcagcgacgctgcagccgggcgcgcgagggcaccagcagcagtgggcgctccccttcgccggctccttgcaggtcagtccgccgccgcagcaggcgcaaccggataggaagggccgcggcggaggcggggtcatggattcaggctccagatccagcggcggagccgggttcgacgacgaagacggcctcaccacgcgccgcgaggtctcctcctcgctccaagatttggcagtaagggtggattggaagggtgggagctgcagcgatggcggtacaaatcaggggccaaacacaccacggtcaaaacactcggccacagagcagcgcagacgcagcaagatcaatgataggtttcagatacttagggagctgttgccacacaatgatcaaaagagagacaaagcaacatttctcttggaggttattgaatatatacgttttttgcaagagaaagcgcaaaaatacgaggcaacattcccagaatggaaccaagaaaatccaacgatgcttccgtggagtaaaggccaaatcccaggagattccccgcctgacccttcacatttcgtgagaaatggatcctcccctggatctaatttcactgggaaactcgatgataatcacacatctgcagctgcatcaggggcactggaccaggcagaaactaatcacgtggctagcggctgctacagatcatcagaaactccggcgaatattacaagtccgtcccctgtggatgactctgcagtgaaaagtgaaatgcttaacagccaggagttggcaatagatgaaggaatgatcagtgtgtccagtacctattcccaagagttacttatctcgttgtctcacgcccttcagagctcaggtgtggatctgtcccaaaccagcatctctgtgcagatcaacctgggaaagcgtgctggcaagagatctgcatctgctggtggtgtatcctccaactccaaggaaccaccagccgatccagcatctagtaacgaactaggcggccatcacgtgacaacgttgggagctagcgctgacggtctcctcccccacgcgacgaaacggcataaacgggacaacagctgatgatgggcctctctcactccgcctcgttcccagacgacagacggattgatcattcttttttttttctcccagcccgacgggaggctctctcttggattggttgcacatcgcgtgctcggtgatgggctgagaccccggctgtattctttttgatttgatcgctcccgccgccatcccctgtctagcccattgtttttacgtagaggaacgaaccgtggagcttcccattgcggattgtgaagccgctcttcttgtacacaggcttccattcatctgagaagcttcttcccctccttgaacaggtctctccgcgttttagacctgtatactagcaacctgtaagatatgattatgatgtccagcagctctcccaggcacggcaccggccagtcaagttgttccgttatttctatgta

SEQ ID NO: 108731 - DNA, 981 bp, Zea Mays
aagggccaacatcttagcccatttgattgactccaaaagtaaaaaaaaaacaattcacacagttttgtatccattttctatttttctcctctcgagtagcgtggcgggcgtggacgcggcggcgatgctgcggtcggcgctgcggcggggaggggcgtccgcgaggcaggtcgcgttggcgggagaagcctcgccgagagacctcctccggatgcgcgtggcggagcgggagcgcgcgaggcggcggcgtcgcgacccgggccgcgacgagttcttcgtgcccacgccagagtcgctggcgtggctcgactcggtctccctccccatggtgctcaccgccgccgccgtggccctcttcaccaagctcctcatgatggaacatgaagctacagatcaagaaaggagagagcgcaagataaagaatagccaccctgatcaaggaacagtaaggatgctatctcgtgaagaatgggaggaggtccaagaagtcaggccaaggaccccttttgaatcaaagttagctcgtccacatgcccggataagaacgggggagccagtgcgactggaggatgtcaaggattgggctactgatgtaatcgcagattcttttaccagagcagaagaagctaccaagaaaaaatgatttagaagaatctaaaacacccggtgtatctgctttatcgtttctctgaatctaaaacacccagttgtaaccgagttcttttacagatccatgaccatatgggtattacggccactatggtattctgagagtgaagccctgagtcccttggtctatgtttcggtgcaccatggtaaacaactgcttcacccgggcctcttggagaaagagcgatataataaagaatactaggtgaattgacacggtgaaatttctcttaaaatttgcgccatgtattggtataaggttaatcgtaccactattttgttcttgtttatatacgtgatacttgtatacaa

SEQ ID NO: 108732 - DNA, 748 bp, Zea Mays
aagggccaacatcttagcccatttgattgactccaaaagtaaaaaaaaaacaattcacacagttttgtatccattttctatttttctcctctcgagtagcgtggcgggcgtggacgcggcggcgatgctgcggtcggcgctgcggcggggaggggcgtccgcgaggcaggtcgcgttggcgggagaagcctcgccgagagacctcctccggatgcgcgtggcggagcgggagcgcgcgaggcggcggcgtcgcgacccgggccgcgacgagttcttcgtgcccacgccagagtcgctggcgtggctcgactcggtctccctccccatggtgctcaccgccgccgccgtggccctcttcaccaagctcctcatgatggaacatgaagctacagatcaagaaaggagagagcgcaagataaagaatagccaccctgatcaaggaacagtaaggatgctatctcgtgaagaatgggaggaggtccaagaagtcaggccaaggaccccttttgaatcaaagttagctcgtccacatgcccggataagaacgggggagccagtgcgactggttagtagatgtttcttgtggttagtttctaaaatgaagttttgcatggtactctttgatggtttatggtactgtcacctctgatgtgttctattatttttattcaccactaatcccaatgcttaaattatatggcttgtatgttctgttattcaacagcttgttgctctagtacttcccaca

SEQ ID NO: 108733 - DNA, 607 bp, Zea Mays
gtacgtgtctcgtctggctgcagagcactagagcactgctgcctacccttgcgtattgtgtttacacttcacaatatggcaagagctcttgcctacggtggagcagctgccgcagctgggttcgtctcgccgtggcttgccgtgctcggtgtggccatgctctccgtctggaccatcacgctcgccatcctcctctgtggcgacagctcagacaacccgagaccaccaagatacaatcctgccgttagtgcggctatagcagctggtggcggagggggctgtggtggcgggggcggtggtggtggagggggctgtggtggcggaggcggtggtggagggggctgtggaggaggcggcggcggcggatgctagagttcatcgcatccgttgcaccagcggcatcagttgtgctggtctgcagaagctaaggtgccagaagatgtatcaatggatatttttttacttgtcaattgtcatgcatggcatatatggtaaggaaggactgtccgtattatggatatccttattagtttttgtttgttgtcatgtctctgctgctattagcatggtgtatataataataaattatgtcgtctttgaattcgta

SEQ ID NO: 108734 - DNA, 1128 bp, Zea Mays
ccagccgcagctataaaaatgcacgccagcccccctcgccgtgtgtgtgtgtgtgaccgtgcgtgaggcgtgagtccgtgaccattcccgtcggccgtcccaaaagaagcggaaatttacaacccagtccaccacgggccacacaatccccaaatctaacccctccgacggcgatggggatctcgagcatgccggagccgcgggacagcctgctggggtacctggtgtacaacacggtgatctcgatcgcggcgctggcggggctggtgcgggcggcgctggtgttcctggacctgcaggccgcgctgccgcccggggacgacggcggggaccgactggcggcgtcggcgcccggcctggcggagcggttcctcagggccttccggccggcgctgtacgaggtgctggcgtcgacggcgacgacgtgcgaggcggacggcggcggcggcggcgacgactgcagcgtgtgcctggccgggttccgggcgagggccgtggtgaaccgcctcccctgcggccacctcttccaccgcgcctgcctcgagacctggctccggtacgagcgcgccacgtgcccgctctgccgcgcccacgtgcccctccccgccgacgagacgccgctgctccgctacccggagttcgagtgatccggtaaaaacccaccccggtcgcgtcgcgcctcggctgtgtgctgcacgttccgtgtggccttccgtgtacgcgtagcaaaccaaagaagaagaaaaaaaaggtgtaggagcagtagtagtagtgcagggttgctgtcgcttgctttcccctttcgcttcttgtattccccctccctcccattctctttgctgtttccgttccgtgctgtagcctgtagcgtgtaaatactccggttcgcacttggcagcagaggcagagtgtagagtgctcccgtggccgtggctgatggtgtagcactttttacgagctcagctcgtgtagtacattgcatccttcttcctattcaattctcccccgactggctaaaatatcgaggactgttttggaattggaacggttgtatgtgtgcgtgcagtgcatactgtaataataactccacagcaaaaattacagcaaaatctgcagaattcatgtgcg

SEQ ID NO: 108735 - DNA, 2588 bp, Zea Mays
gtaccaaccctaatcctagggttcctcacacttgcgggccgagtaatttctcgtcttgtttcggctagggagcggggtggcttctccggccaaggctttcacagttttgtgtttgttgaatgtgtttgcaatggagattgaagaacacacagattcactttcaatagaggaacccatcacaaggctcccaccagatattattgaggggatacttctcaggcttccggtaaactctctaatgaggctgcgtcaagtctgcaagcaatggtggaacatggtcagcgtgccccgctttatcaaagaacatgcctatcatgcacccaagcacctcctcctttacttgcctaagttgaatatatctgcatcgctccatccaaagactgccaaaccatgtcttgcaacaatcattaatgaaaagtggtctccattgacatgggcctcatcgcatatggaccctgatgatcacctctttgcatcatgcaacggtttgctttgcttctacaagacatacacactaaagatatctaaccctgcaacaggtcaatgcctgcatctcttgaaacctgacggcatattgttgtacgacttccactatctatacagctttggatttcacccgattactggagaatacaagctcgtgcactttctccgtgagcctcagcgctacaaatcaggacagcctttccatttcgacaccattcaagtgtacacccttggtgaagacaaatggagagctatcagagctcctataccatgctgcatggtgcatcttggagtagtaaatgtggatggagtgatgtattggctaacagaagataaaggaacaagctgtggcatggcagttgtatcgtttgatctcagggaagaaatgtttgccttgattcatcttccagcattggaggtgaaagagacagcctcttgtgccaccatcaaagttgcttactatatgactgagatagatgacaaagtgtgcgtagtgactatgccataccaaagccatgcaccaaggtggcgccgaaacaacgcagagctttcaggcaggactgacatttgggctcttgaaagtgacaagtggttcctgaaatatagcatccagtcaccatctctatctcggtatgttcctcagccatgcttcatccacagggagaagatcatactgcaggacagtgaaagtaatgtgtggtaccatgatttgcgaggcaagaacgtgcagattgagcatgcagatggggcgaagcttttgcaccttggtgacaacagattctatgagacacagtcctatttctacaaggagacacttgctcccttgagcatttatgccagagcagccattgttcgtgcaccgcctgagcctcttgctcgttcagttgctttacattagtttctgagaggctcttgcactctgaaggtttggcagcaagtactgacgaatattttaatatggagagtgggtaatggggacggcacacgtatggaatgatccctggttttggagagagtggactagccatccatgccaaggggtgtaaatcctatgaaccaagtgaatcattgagatgattgacacatgcataggcaattggaacgaggcactaaagatgtgaatgaatcttagtaagcccagttcatatggagatggatgatgtctcagtcttgcactatggagtcttttcatgatcaaatcagcctatatttagtccgggaggagttggccactatggaaagcataggaatagatgtgtattcgacagtgagcaactagaggtccatgaagttccccaggaggttgtagacaagggtagtgtttgggtgagggctgatactgtagctttggggcagctaacacatcagtagacagtagtctcaggactcaggaggttaggctgctcaatcttcacaatgggtgcgaatgtaacaaaaaaactaatctgagccatgtatctggatcgttctatcttttaatatagtgtttttaaatatagtgatgtgcagctctcttgcatattcgagaaaaaaatcaagaggagtttgaaaagaaaaacaagtatggagctgtttcatcttcacgggggctttgatcgataaggattcaggagtgctggaagaagatttggagcaagagctgtcgctgtccggcgtctggcggtctgggggagaccagtgattttcctacgcacgcctgccaaaagtgggatggagttgaacgcaaaatgtgttgtttgtcattgggtagatggaggaggacacctcgtttatacgcgcggaggaggtgtagtgcgactgtgcgagttgaatttgtaagaaactcagccgcatgcttgcttggagatacttgagatggaacggaaaactcaggtctcaacagctgtagagaaggtgaggggagggaagcaaacaacctagcttacattgtgatgaaacaaggcagatgagttctggacctctctctctctctctctctctctctcaaaaatggtttgccagtatagtctgtgacttaggaagattgtcatgcctgaatcccgatatagaatttctggtgtaattttcacagtaatattgttcacacatgtcgatggttcagc

SEQ ID NO: 108736 - DNA, 763 bp, Zea Mays
atggaaagcataggaatagatgtgtattcgacagtgagcaactagaggtccatgaagttccccaggaggttgtagacaagggtagtgtttgggtgagggctgatactgtagctttggggcagctaacacatcagtagacagtagtctcaggactcaggaggttaggctgctcaatcttcacaatggtgatgtgcagctctcttgcatattcgagaaaaaaatcaagaggagtttgaaaagaaaaacaagtatggagctgtttcatcttcacgggggctttgatcgataaggattcaggagtgctggaagaagatttggagcaagagctgtcgctgtccggcgtctggcggtctgggggagaccagtgattttcctacgcacgcctgccaaaagtgggatggagttgaacgcaaaatgtgttgtttgtcattgggtagatggaggaggacacctcgtttatacgcgcggaggaggtgtagtgcgactgtgcgagttgaatttgtaagaaactcagccgcatgcttgcttggagatacttgagatggaacggaaaactcaggtctcaacagctgtagagaaggtgaggggagggaagcaaacaacctagcttacattgtgatgaaacaaggcagatgagttctggacctctctctctctctctctctctctctcaaaaatggtttgccagtatagtctgtgacttaggaagattgtcatgcctgaatcccgatatagaatttctggtgtaattttcacagtaata

SEQ ID NO: 108737 - DNA, 524 bp, Zea Mays
atggaaagcataggaatagatgtgtattcgacagtgagcaactagaggtccatgaagttccccaggaggttgtagacaagggtagtgtttgggtgagggctgatactgtagctttggggcagctaacacatcagtagacagtagtctcaggactcaggagtgatgtgcagctctcttgcatattcgagaaaaaaatcaagaggagtttgaaaagaaaaacaagtatggagctgtttcatcttcacgggggctttgatcgataaggattcaggagtgctggaagaagatttggagcaagagctgtcgctgtccggcgtctggcggtctgggggagaccagtgattttcctacgcacgcctgccaaaagtgggatggagttgaacgcaaaatgtgttgtttgtcattgggtagatggaggaggacacctcgtttatacgcgcggaggaggtgtagtgcgactgtgcgagttgaatttgtaagaaactcagccgcatgcttgcttggagatacttgagatggaacgg

SEQ ID NO: 108738 - DNA, 2207 bp, Zea Mays
gtaccaaccctaatcctagggttcctcacacttgcgggccgagtaatttctcgtcttgtttcggctagggagcggggtggcttctccggccaagtaccgactgaaaaagtaacaggcagaggttcatgtaatcatgttggggactgttgatgcccaaaatgacacgcgaaaggctttcacagttttgtgtttgttgaatgtgtttgcaatggagattgaagaacacacagattcactttcaatagaggaacccatcacaaggctcccaccagatattattgaggggatacttctcaggcttccggtaaactctctaatgaggctgcgtcaagtctgcaagcaatggtggaacatggtcagcgtgccccgctttatcaaagaacatgcctatcatgcacccaagcacctcctcctttacttgcctaagttgaatatatctgcatcgctccatccaaagactgccaaaccatgtcttgcaacaatcattaatgaaaagtggtctccattgacatgggcctcatcgcatatggaccctgatgatcacctctttgcatcatgcaacggtttgctttgcttctacaagacatacacactaaagatatctaaccctgcaacaggtcaatgcctgcatctcttgaaacctgacggcatattgttgtacgacttccactatctatacagctttggatttcacccgattactggagaatacaagctcgtgcactttctccgtgagcctcagcgctacaaatcaggacagcctttccatttcgacaccattcaagtgtacacccttggtgaagacaaatggagagctatcagagctcctataccatgctgcatggtgcatcttggagtagtaaatgtggatggagtgatgtattggctaacagaagataaaggaacaagctgtggcatggcagttgtatcgtttgatctcagggaagaaatgtttgccttgattcatcttccagcattggaggtgaaagagacagcctcttgtgccaccatcaaagttgcttactatatgactgagatagatgacaaagtgtgcgtagtgactatgccataccaaagccatgcaccaaggtggcgccgaaacaacgcagagctttcaggcaggactgacatttgggctcttgaaagtgacaagtggttcctgaaatatagcatccagtcaccatctctatctcggtatgttcctcagccatgcttcatccacagggagaagatcatactgcaggacagtgaaagtaatgtgtggtaccatgatttgcgaggcaagaacgtgcagattgagcatgcagatggggcgaagcttttgcaccttggtgacaacagattctatgagacacagtcctatttctacaaggagacacttgctcccttgagcatttatgccagagcagccattgttcgtgcaccgcctgagcctcttgctcgttcagttgctttacattagtttctgagaggctcttgcactctgaaggtttggcagcaagtactgacgaatattttaatatggagagtgggtaatggggacggcacacgtatggaatgatccctggttttggagagagtggactagccatccatgccaaggggtgtaaatcctatgaaccaagtgaatcattgagatgattgacacatgcataggcaattggaacgaggcactaaagatgtgaatgaatcttagtaagcccagttcatatggagatggatgatgtctcagtcttgcactatggagtcttttcatgatcaaatcagcctatatttagtccgggaggagttggccactatggaaagcataggaatagatgtgtattcgacagtgagcaactagaggtccatgaagttccccaggaggttgtagacaagggtagtgtttgggtgagggctgatactgtagctttggggcagctaacacatcagtagacagtagtctcaggactcaggaggttaggctgctcaatcttcacaatgggtgcgaatgtaacaaaaaaactaatctgagccatgtatctggatcgttctatcttttaatatagtgtttttaaatatagtgatgtgcagctctcttgcatattcgagaaaaaaatcaagaggagtttgaaaagaaaaacaagtatggagctgtttcatcttcacgggggctttgatcgataaggattcaggagtgctggaagaagatttggagcaagagctgt

SEQ ID NO: 108739 - DNA, 677 bp, Zea Mays
acacacccaccgttgctgctgctataccaccatcaccagtcaccaccaccggataaggacacggcagcactagctcgtagagggtcggccagagtcagcaaaacagaaaagggagaggggggatgggggccgatcgcttcccgagcgtggcggagggcggcctcggcggcgaggcgctctactgcgcggtcatcctgtggctgtccgtgacgtcgtggatcatcttcacctgggccggcgacggcggggaaggcgggaggaggcggcggggcggcggtcgcagccgcgggagcccagcgttcgtcggcgcgtcggggctctgcgacggcaccgggcccgaatgcagcggcggctacggcatctgcggcacctgcctcgactagctagccgcgcgcctgctctgctactagtaagtttgtgtgagcgtgagcgtgtttctagcatctacatgtcgtcgtcgtcgtcgatccgtgacctcgatcgaaccggagcagctcccctgtgttatgatcctctgtaaattaagctggaagcctgctaaaagtatcagatacatgccttcaaaagtatatgagatgagattcttcgtcggcgaggttactttatccgctgcgtttagctgctgtgtaggatctctctttttaaggaattgattcataagatgggcacatgtcctt

SEQ ID NO: 108740 - DNA, 90 bp, Zea Mays
tgaatatctggctctcgccatccatcgatatcataggtgtgtgacatcaaaatattctgatcttaaaaagaaacaactgtaacgttcgcc

SEQ ID NO: 108741 - DNA, 1121 bp, Zea Mays
atggccatggcggccgtgggcgtggttgtgggtggtgcagtggccttcctcctcccgcagcgtcatgacgttaccgatttctggagtggcgcggtgcgcgtgtcggacgagggcgaggtgggcgtgatggcgatcaagatggtcgtcctcgtcctcgtcctccgcacccattttgcctcctcgtctcaccactggccagcagcccccgaatccatggaccccagccaatccggcaccccttcgttgtttccagtcatggacatccccgttgcctaccctccggcggcgtaccctccctgcgaggtcgccgtcgccgccgccgcctacccgcggcttctctacgcgccgccggatgctgccgcggcccagcaggcggcggccgcgcagcagcagcagcagctactgggcgcccccgttgtctgccctccggcggcgtaccctcccggcgaggtcgccgtcgccgccgccgcctacccgccgcagctctacgcgccgccggatgctgccgcggcccagcaggcgacggccgcgcagcagcagctactgggcgcccccgtccgcgttgcctatgcgccgccggatgctgccgcggtccagcaggcggcggcagcgcagaagcacaagcatcagctgcagatgttgtggttggagctgcgccgagagatcgaggccaccaccgacttcaagaaacacaacatcccgctcagccgcatcaagaagatcatgagggccgacccggacgtctgcgcaatcaccgccgaggtcttggtcgtgttcccctgggcctgcgagatgttcatcctcgagctcacccgccacggctgggcacacgcggaggcgaacaagcgccgcatgctccagaagtccgacattgtcgctgccatcgcccgcaccgatgtgttcgacttctttcgcgacaccgttctgcacgacgacgccaaagaaggcgctgacgcggcgcccgccgcagctgcggctgccgagaaagcgcatcctgccgcgggagcaccggccaccgaccccctcgccaactaccccatgcctcaacagtaaatcatcatcatcatcaccttcttaccgcgtaaataagacttgtggtttgattctaaaattagggtaag

SEQ ID NO: 108742 - DNA, 465 bp, Zea Mays
gacgaccgctcagaagaagttggggtcgtatccgttgctggaggtggcgaggatgtagtaggcgacgatgtggccgagcgagccccaggcgaggacgtcgacgaggttgaagcccacggggtcgttggacttgagcagggccgcgaactccttggcgcgctcgtcgccggcgtcgaagtgcgtcttgccgttctgcgcgggcacctgcttcgccacgttctcccgctggaagttgaagaagacgaagcggcccaggaagagcgacacgcccgtgctcaggctgatcaccagcgccgagctcagctccgcgcgcgccgccacggaccgccgcgccggcgccggcgccgcgcggaacgacacgcgcgcccggccgggagacggcgccaggcggagcccggccacggacggcggggacagcacggcggcggcggtcgatgtggcggccatggcgatcgtgtcccctga

SEQ ID NO: 108743 - DNA, 235 bp, Zea Mays
aacttatttgccatgccttcatgttcatccatgtctttgtatctttttcgtggtgattagaggcgtcaacgatactcaaagaatatacaatgaaagagaatttttgtggagataaagatgttaacaagacctcaccaaaatataggacggtccggtcagcggcggcgacggtgacggttacttcctttctttacccttccgtgaattatatgggctctttccttttcttaacctt

SEQ ID NO: 108744 - DNA, 2076 bp, Zea Mays
gcattgtttactgacaccttctgtttcctctcaccttccactcctggatctccagctccaggcaaggcccgaactggggatttccgatcccaagagcccccaccaagcgctcccgccgatcccaaggactcctgcctccgatgcggcaactcatcccatccggcttctaaagccgcggcccctgtggtcaattccggtggccggcggcatggattccggcgccaacagcatcggcgagtcggtgggcgagtcgccgtcgctggcgctggcgccggagccgcagacacggccggccgagccggtcaccaagggtcgcgggctccgccggtggcgccgtatcccgcgcgagcagcaccaggaggggtctccgggtagccccggggccgataccggcgttggagctagcgcgggtgaggacttggcggcgcagctccacaagcgtcgttacggtcctgccgccgacgagcccaagggaaagcaggacccggctgcagcagaggaggtcgagagctcggtcgcgtccgtggagtccagcttcgtgccgctggaggcgtccccaccgccggcgccgactaggttggacccgaatctaggccacctgattgccaccgctggtttctcggtgggcgccggcggcgccgattcggacaacagcgacgaccgcaccagcaagttgtccacggccgccagcgcgccgcgccacgacttctcgtccgtcggcttcggccgggagcgcgacagggcgcggtcccgcgcccccggcgctgctcacggcaagggcatccgtgctgcacgtgtgcgcggcgccactatgcgtgttgcctcttcccctgctgaagcggggaattctcgctccagcgtcgagtccaacctccggagctctaacgctgctcatgcgcggcgatctagtgctggcgtcacaagcaacggtgttcacaagattctgttccctgatggtcatcaaagtgacgatgaacctccaagtggggacatgcggtatggtacaggacgtttctacaaggagaatgggagtatagaagggagattggggaactgtgactccgactccaaccatcatacctttgatgaagcgagcgtgggcaagttgagaatggagggactcattcaggtttggatctgtatggcatcattgatcttttggtttgctaggttaggggtgacgccctggatcttctcaatgagattaattagttcagagatccaaaagtttgtggaaatcaggaaagaaactgacgaagattccacagctcaccaaagtgaaatcgaatggagcagctcacctgtagaagaactaaatgagaagataaagatgctcgaattgaaactggaagaggccaccatgctcatcaatgagcgggattcagaaatacttgaactagatgcactcagccatgtacaaccacagaatacagtagcatgtaacaactatccgctgtccctacagtctgatgtagaccggctgttcctggagaagatggaagcagagattcagtgctttatccttacaagagcttctcaggactggaaactcctgacaatggatcaatttgctcttaacgaggcacagaaatcccttctgtcggatcacaaatccctagaaactaaactgaggcacgccgagaacagggcgatgatgctggaggagatggtggataaactagagtcgcaatgcaaggcgctgtctgagacttcagaagttctgaagctgcaggccggagctagcagggcctctttgttctgctcgatccagtttgtgctgctgtgcatagccattgggaccctcctcgttcgcttcctgtcctcttctccggagattgtacctacttgaggttagagaattatgccagtcagcctttatgtaggcgttgttgaacggttgtttactgtaacttattagggcatcaatcgccttacagattttcgttttttgtaccatcaactcgattttgctagtaatttctttatgaatacgagtttactccacttctgggttctctggattctggaaatgccacatgtgtagttttttttctatggtcggtataatgttcgaaa

SEQ ID NO: 108745 - DNA, 1270 bp, Zea Mays
ttctttcctgctttacagttgagagcccaatcccatatggtagaggcccgcacgtttccccttgcgacgtcaacctcgttctacccaccagccaccagccggcacaaattctcccttcccacaagaacatcacacggcgatagcaaaaccttccgtcggaggatggcttccgccggcgctggagaagggaaggagacggctgccgggagcagcctccacagcaagactctcctcaagagccaaccactgtaccagtacatactggaatccaccgtcttcccacgcgagccggactgcctgcgggagctccgcgtcgccaccgccacccaccccatggcgggcatggctgcgtcgccggacgaggtgcagctgctgcagctcctgatcgagattcttggcgccaagaacgccatcgaggttggcgtcttcaccgggtactcgctgctcgccaccgccctcgccctccccgacgacggcaagattgtggccatcgacgttacccgcgagagctacgaccagatagggtcgccggtgatcgagaaggccggcgtggcgcacaagatcgacttccgcgtcgggctcgcgctgcccgtgctggaccagatggtggccgaggaggggaacaagggcaagttcgacttcgcgttcgtggacgcggacaaggtgaacttcctcaactaccacgagcggctgctgcagctgctcagggtcgggggcctcatcgcctacgacaacacgctgtggggcggctccgtggccgcgtcccccgacgagccgctctccgagcgggaccgcgcgctcgctgcggccaccagggagttcaacgcggccgtggccgccgatccccgcgttcacgtctgccaggtcgccatcgccgacgggctcacgctgtgccgccgcgtcgcctgatccgtatccggttatccgcctcgaaatacagcagagctgtgggctgtcgctgacactgctgtgagctctgtgcttgaaatggccatggtctgtaataacgaactgggcttgagcgaaaataaatccaccagcgcgctagcgtgtgtcagcgatcatcatgctcaatctattggccggttggctggggtaacggcagtccagctacgccagtgacgagccggcaccttcttcccggcggtgagggcctttggcggcttggcgcatggcggcatgggcgatgtgtatgcagtatgtgccgttccgtaccacaattaccgttgttcctgggccgtgaatgtacttgggcttcagaccgttccgt

SEQ ID NO: 108746 - DNA, 1392 bp, Zea Mays
ttctttcctgctttacagttgagagcccaatcccatatggtagaggcccgcacgtttccccttgcgacgtcaacctcgttctacccaccagccaccagccggcacaaattctcccttcccacaagaacatcacacggcgatagcaaaaccttccgtcggaggatggcttccgccggcgctggagaagggaaggagacggctgccgggagcagcctccacagcaagactctcctcaagagccaaccactgtaccagtacatactggaatccaccgtcttcccacgcgagccggactgcctgcgggagctccgcgtcgccaccgccacccaccccatggcgggcatggctgcgtcgccggacgaggtgcagctgctgcagctcctgatcgagattcttggcgccaagaacgccatcgaggttggcgtcttcaccgggtactcgctgctcgccaccgccctcgccctccccgacgacggcaaggtcagtgcgtgaccacttcgccgcgaccttgcaaaatctgttcacgtttggtgtcgcgcgcggcgtgcgtgaaccgtgaccttgctgtactgtatccttggtcgccgtgttcggcgcggcagattgtggccatcgacgttacccgcgagagctacgaccagatagggtcgccggtgatcgagaaggccggcgtggcgcacaagatcgacttccgcgtcgggctcgcgctgcccgtgctggaccagatggtggccgaggaggggaacaagggcaagttcgacttcgcgttcgtggacgcggacaaggtgaacttcctcaactaccacgagcggctgctgcagctgctcagggtcgggggcctcatcgcctacgacaacacgctgtggggcggctccgtggccgcgtcccccgacgagccgctctccgagcgggaccgcgcgctcgctgcggccaccagggagttcaacgcggccgtggccgccgatccccgcgttcacgtctgccaggtcgccatcgccgacgggctcacgctgtgccgccgcgtcgcctgatccgtatccggttatccgcctcgaaatacagcagagctgtgggctgtcgctgacactgctgtgagctctgtgcttgaaatggccatggtctgtaataacgaactgggcttgagcgaaaataaatccaccagcgcgctagcgtgtgtcagcgatcatcatgctcaatctattggccggttggctggggtaacggcagtccagctacgccagtgacgagccggcaccttcttcccggcggtgagggcctttggcggcttggcgcatggcggcatgggcgatgtgtatgcagtatgtgccgttccgtaccacaattaccgttgttcctgggccgtgaatgtacttgggcttcagaccgttccgt

SEQ ID NO: 108747 - DNA, 1368 bp, Zea Mays
agaggcccgcacgtttccccttgcgacgtcaacctcgttctacccaccagccaccagccggcacaaattctcccttcccacaagaacatcacacggcgatagcaaaaccttccgtcggaggatggcttccgccggcgctggagaagggaaggagacggctgccgggagcagcctccacagcaagactctcctcaagagccaaccactgtaccaggtaacccatccgaagcaccaagcaaaatgtttcatccccccaagcctccataaccgttcgtctcgtcggtgcgaccgtgccacaccgatgaccttgcttcgcttcgtctagtacatactggaatccaccgtcttcccacgcgagccggactgcctgcgggagctccgcgtcgccaccgccacccaccccatgtgagccccgccccccggatccgctagctgctcgtttcgtgcgttggcttgggctcgaccgctccttgcacggtaggtgtttgacgtatgtcccggtgagctgagccgcgctgcagggcgggcatggctgcgtcgccggacgaggtgcagctgctgcagctcctgatcgagattcttggcgccaagaacgccatcgaggttggcgtcttcaccgggtactcgctgctcgccaccgccctcgccctccccgacgacggcaagattgtggccatcgacgttacccgcgagagctacgaccagatagggtcgccggtgatcgagaaggccggcgtggcgcacaagatcgacttccgcgtcgggctcgcgctgcccgtgctggaccagatggtggccgaggtgatgaatagaaacttgtattcctctgcgtttccgtgcgcgcggaacgcgtccatgtgcagatgttgtcgcggtgcagtgcagggataatgccggccgctgcggttttggctttgcaggaggggaacaagggcaagttcgacttcgcgttcgtggacgcggacaaggtgaacttcctcaactaccacgagcggctgctgcagctgctcagggtcgggggcctcatcgcctacgacaacacgctgtggggcggctccgtggccgcgtcccccgacgagccgctctccgagcgggaccgcgcgctcgctgcggccaccagggagttcaacgcggccgtggccgccgatccccgcgttcacgtctgccaggtcgccatcgccgacgggctcacgctgtgccgccgcgtcgcctgatccgtatccggttatccgcctcgaaatacagcagagctgtgggctgtcgctgacactgctgtgagctctgtgcttgaaatggccatggtctgtaataacgaactgggcttgagcgaaaataaatccaccagcgcgctagcgtgtgtcagcgatc

SEQ ID NO: 108748 - DNA, 705 bp, Zea Mays
ttctttcctgctttacagttgagagcccaatcccatatggtagaggcccgcacgtttccccttgcgacgtcaacctcgttctacccaccagccaccagccggcacaaattctcccttcccacaagaacatcacacggcgatagcaaaaccttccgtcggaggatggcttccgccggcgctggagaagggaaggagacggctgccgggagcagcctccacagcaagactctcctcaagagccaaccactgtaccagtacatactggaatccaccgtcttcccacgcgagccggactgcctgcgggagctccgcgtcgccaccgccacccaccccatggcgggcatggctgcgtcgccggacgaggtgcagctgctgcagctcctgatcgagattcttggcgccaagaacgccatcgaggttggcgtcttcaccgggtactcgctgctcgccaccgccctcgccctccccgacgacggcaagattgtggccatcgacgttacccgcgagagctacgaccagatagggtcgccggtgatcgagaaggccggcgtggcgcacaagatcgacttccgcgtcgggctcgcgctgcccgtgctggaccagatggtggccgaggtgatgaatagaaacttgtattcctctgcgtttccgtgcgcgcggaacgcgtccatgtgcagatgttgtcgcggtgcagtgcagggataa

SEQ ID NO: 108749 - DNA, 2406 bp, Zea Mays
cccatcccttcctctcctcggtcaaaccgcctttctctcccctactcttctccctccctccccgtctctctctctctctaaaaaaagtggcgcccggagaaccgagaggccggagaaagaaaggcggaaagagggagcaaaatctcactttgctgggagttctttcctctgtttccgactcctttgttctcttagtgttcttggttggtggaatggaagctcagcagctccatttgtgttccagagatcttcgtcgttctcgttcccctcgtgtgtagcctttggaggaattcccgttcacatgatccgtgcctggacgtgacggttttgccacgctctgctgcttccctttcggggagaagaggactcgactcaaatcatttggtatcgcagacgtcgcccttcccagttcagttgagagagatttctggcatgtccggcgcaagtaactatggatccctcatcgatgaatggttgctgccccctacaccaagcccaagaactctcatgtctagcttcctgaatgaagaattcagctctgcgccattctctggtccccatgatcaatctgaaaagagcagagaagttttgaattcgagcgatgaggttccttcacatgctgtcaaaggcccatttcaaaatggtttcccaaatttgttcagtgctaaatcaaactccaatggtggtttggcggagcgcagggctgcgagagcaggtttcagtgtcccgaaaattgatacttctcgagttggttcatccacagttattcgatctcctgtgtcaattccacctggtctaagtccaactacacttcttgagtctcctgtttttctttacaataaaatggcacaaccgtctccaaccactggcacattgccatttttgatggctacgaatgataagtcaacaatatcaccagctgccaagataactgaagattctacatttgataatgatgtgttttctttccaaccccacttaggttctgaacaaacagggttctctactgcagaaaaggactatggtgcctatgagagaaagcagtccttgtcgaatattcatcagcaggaatccagtctccagtcaagctttaccgcagtcaaggataacactagtgcaacaattgttaaagcgaagccatcttctagttccatgttcagtgatagtcactattcagctgatcaacagcaagctgacgagacaaacataaaggtgcaaggcaaaggtgtggaggctagatcagctgcttttgctcctgtatcagcgcacagtgatgcatctctcctggagtctcaagaagcacttgatgtctcctcaacactgtctaatgaagaggacgagagggcaacgcatggcactgtttctatagagtgtgatggtgatgaagctgatgctgtatctaaaagaaggaagctggaactagatgctttagaagctactgctactgctactacctccaccaccaataccatcgacatggggcctgcagcctcaagagctgtccgggagcctagggttgttgttcagaccacaagtgaggttgacattcttgacgacggttatcggtggcgcaagtatgggcagaaggttgttaagggcaatccaaatccaaggagctactacaaatgtacaaacccgggctgttcagtgcgcaagcatgtggaaagagcatcacacgatctgaaatcagtcatcacaacgtatgagggaaagcacaaccatgaagttccagcagccagaaatagtgggcaaggcagttccagcgctccatctgcatcacaagctgttggttctcatcgtaggcaagaacctgcacaggccagctttgctcactttggtacggcctctttcagctcgttcggtctcccaccgagtggtcagttgggaccaacaactggcaatttcggcttcgggatggttccgccaggcatgacgatcccagtgccctctctaggatcacttgcccctgtaaagatggttggaaattcatcaactatgcagggctacccagggcttatggtgccgggagaaccaaaggcagagcctgtctcgcaaccacttatccaaatggcaaatgcatctccaccagcttaccaacagatattgagcaggcctcctttcggtcatcagatgtaaataataggaaagagaaaggggataatagatttgcttcagcttgtatacatgatagctacgctgcaacatggctttagtgttcatggatcgtccaattttttatttctattttatttttctgcccacgcatgtctttgaagcaaagaatgctgaggatgataccctgtcgtgcctgttgtaatcacgtaaaggatacctttcgtctttttgagactcgaaattggaaaacgaccaatcaaaatttctggttgcgaatgcaaatctgatgaa

SEQ ID NO: 108750 - DNA, 2264 bp, Zea Mays
cccatcccttcctctcctcggtcaaaccgcctttctctcccctactcttctccctccctccccgtctctctctctctctaaaaaaagtggcgcccggagaaccgagaggccggagaaagaaaggcggaaagagggagcaaaatctcactttgctgggagttctttcctctgtttccgactcctttgttctcttagtgttcttggttggtggaatggaagctcagcagctccatttgtgttccagagatcttcgtcgttctcgttcccctcgtgtgtagcctttggaggaattcccgttcacatgatccgtgcctggacgtgacggttttgccacgctctgctgcttccctttcggggagaagaggactcgactcaaatcatttggtatcgcagacgtcgcccttcccagttcaggctttatgtttgggctgccgtggtatgggttgttcgaggaggcctttcgccggctgcccagcactcttgttaaggttttgggcccggttccttaagtctaggtcaattccatcctttttaattgagagttgagagagatttctggcatgtccggcgcaagtaactatggatccctcatcgatgaatggttgctgccccctacaccaagcccaagaactctcatgtctagcttcctgaatgaagaattcagctctgcgccattctctggtccccatgatcaatctgaaaagagcagagaagttttgaattcgagcgatgaggttccttcacatgctgtcaaaggcccatttcaaaatggtttcccaaatttgttcagtgctaaatcaaactccaatggtggtttggcggagcgcagggctgcgagagcaggtttcagtgtcccgaaaattgatacttctcgagttggttcatccacagttattcgatctcctgtgtcaattccacctggtctaagtccaactacacttcttgagtctcctgtttttctttacaataaaatggcacaaccgtctccaaccactggcacattgccatttttgatggctacgaatgataagtcaacaatatcaccagctgccaagataactgaagattctacatttgataatgatgtgttttctttccaaccccacttaggttctgaacaaacagggttctctactgcagaaaaggactatggtgcctatgagagaaagcagtccttgtcgaatattcatcagcaggaatccagtctccagtcaagctttaccgcagtcaaggataacactagtgcaacaattgttaaagcgaagccatcttctagttccatgttcagtgatagtcactattcagctgatcaacagcaagctgacgagacaaacataaaggtgcaaggcaaaggtgtggaggctagatcagctgcttttgctcctgtatcagcgcacagtgatgcatctctcctggagtctcaagaagcacttgatgtctcctcaacactgtctaatgaagaggacgagagggcaacgcatggcactgtttctatagagtgtgatggtgatgaagctgatgctgtatctaaaagaaggaagctggaactagatgctttagaagctactgctactgctactacctccaccaccaataccatcgacatggggcctgcagcctcaagagctgtccgggagcctagggttgttgttcagaccacaagtgaggttgacattcttgacgacggttatcggtggcgcaagtatgggcagaaggttgttaagggcaatccaaatccaaggagctactacaaatgtacaaacccgggctgttcagtgcgcaagcatgtggaaagagcatcacacgatctgaaatcagtcatcacaacgtatgagggaaagcacaaccatgaagttccagcagccagaaatagtgggcaaggcagttccagcgctccatctgcatcacaagctgttggttctcatcgtaggcaagaacctgcacaggccagctttgctcactttggtacggcctctttcagctcgttcggtctcccaccgagtggtcagttgggaccaacaactggcaatttcggcttcgggatggttccgccaggcatgacgatcccagtgccctctctaggatcacttgcccctgtaaagatggttggaaattcatcaactatgcagggctacccagggcttatggtgccgggagaaccaaaggcagagcctgtctcgcaaccacttatccaaatggcaaatgcatctccaccagcttaccaacagatattgagcaggcctcctttcggtcatcagatgtaa

SEQ ID NO: 108751 - DNA, 1060 bp, Zea Mays
tctgcggggcagccgacctcaccgacggcggaatgacaaaaaggacaatatcaacgacgccgcgcgcttcaacgccacagcccatcctctgagacaaaataggataaggagacccacccggcacgactgctctccgcacccgcaacgcccatggcgttcgccgccgtcctccgcgcccgcctcctcccggtgcccactccgctatccagctcctcgccgccgccattcttcgccccttcggcctacgtccgcgtaccgcgcctcacagcagcagcagcgcgcaccgtacggtaccgacgacggggcgggcggcctcaccgcgcggccgcggcgattacagcgtcactcgacctgaccgaggacaacgtccgggtggccctagacgaagccaaatccgaggcaaggaaactgaaccgattccccttctctcctcacccccccatcggatcgaagtgccgttgcaggcttgcagcctcgagctaatgctgtcgctggtcttgtgcgcgtcagctagggcagctgttcgacacgtcggtgggcatcacagggcaagttgacctcgcggagttggacgggccgttcgtgaagctccggctcaagggcaagttctggcacacccgcgccaccgtggtcgcgcggatcggaaactacctcaagaaccgcattccggaaattttggaggtggagatcgaggacgagaaacagctggatgatagtcccgctgctttctgaggggtaccgcacgatcaccaatttagttcaatgctgtgtgtgattcatcagtatgtgccaattgtgaggttcaggagaagggacacgttttcagttttcagaattagtactggttcagggagaattcttatcggaggctacctttcgtacacagttaagtatggtactccttactctgctaatgtcaaaactacagacttatgaacacatgaattccaatcaacattttctggctgacatgacaagagcattcatcatcctcgatgtgtaaagctgaatctatggatctgagtctgaaggagcgaatatacagacctgaattttctgt

SEQ ID NO: 108752 - DNA, 195 bp, Zea Mays
atggcaggaggcggcggcggtagaggtttcaactgtcccagaggtagcggcaacgggagagctttcaacggttctggaggcggaggcagcgggagagctttctacggtgtcgtacgaggcggcgacggagatgctgtgcagtcgtcggcatctcctgaactggatctacagcctcacgttcaccgcgacggctag

SEQ ID NO: 108753 - DNA, 495 bp, Zea Mays
ttggactaccttcagcatgctcaagctcgccaaggaggccagcaggcggcaacatcctgttcgactacctcatcccaccgatggggatagacaagtgcagcgcgaatggacaagtgtagcgcgaacagcgtggacagcgataacgtacacaaggcgggcatggtgatgaacgggttgcccatcagtgtgtacgcatcagagacgttggggtgtgcggcggccatgtccacagacggttgatgagcaagatgctcgggcgcattggggattcaccactgatcaggttcggcacatacacatgtggcgcgtgtgtcgtgtcatgcacgctcaagtgggacatggccactatcatggcgtacaagggcctacccctgcagcaggccatcaactactatgtcaggggcacgatgcagaatatctgaagacaactattatcaataattagtcaatataaactatttacaaatttttactcatgtttacaaaatagcatat

SEQ ID NO: 108754 - DNA, 1431 bp, Zea Mays
agcgcgcaccttcttcgctgagagcgcgcgggcaccaactgcttgcccccgcccgcaaccgcaacagctgctacccccatatggacatctcaatatttgttttatttttttaatatatttgtatataattataattagagtagcgtggaaacctatatacaccaaagtctcatatgcaccgtttttttttttaattttgttagttcgtgcaattgctcatatacactggatatgttccctttatatagcaccccctctatctctacccagctctccttcgagctgccacccctctcttctcgtcttcttctcccgtcccctcttccctgctctgctgcgctcgaccagaagcgagcagaggatcaggcgcgccgcgcgccaggcagccgctgcttgatggggtccaaagcggtaattcttgccgcggctgtactggcggtcctcctctccaccccggcattggctcagaagggtagcccgccggcgcccgtgtcactgccgccggccccggccccggcgccggcgccgcactacgtggacctcgcggagctcctgagcgtggccggcccgttccacacgttcctcagctacctggagaggaccaacgtgatcgagaccttccagggccaggccaacgacaccaaagtgggcatcaccgtgttcgtccccaaggactcggcgttctcggcgctcaagaagtccaccttctccaacctcacctccgaccagctcaagaagctgctcctgtaccacgcgttgcccaggttctactccctggccgagttcaagaacctgagctcgctcaacccggtggacaccttcgccgggtcgccctacacgctcaacctcaccgacgacatgggcaccatctacgtgcagtccatgtggtccaggcccaagatcgccagcagcgtgtacgccaccaggcccgtcgccgtctacgcgctcaacaaggtgctgctgcccatgcagctcttcagcaaggacccgccgctcgcgccggcgcccgcgcccgcgcccgagtccggggcgtccgatgcccccagccccgcggccgccggcaaagcaggcggcctgacgggcggcaagggcgactcgacgagcgccgcgcacagcaccggcgccgtcggcgttgccagctccttgctgctcgctgcagcagcgcgcttgattctcctgtggtggtgaccggtgacaggcttgtgggttcttgccattcgtgtgagcacagcattcgtgcctccccacggccacgcttgatttcgttttgaatgggttgctggagtaaattcttttggacataaagtaggcataccgttaggatcgagttggagtatttttacgtcacattacatcattactctcataatgtctaacatttttttatcgacggatgattgaacggatgaacacgagaaaaaagttttcact

SEQ ID NO: 108755 - DNA, 585 bp, Zea Mays
atggagagaaaccgtcacgttcgcgttgtactgaacagcaagcccgtgccatgtaggcgcgcgcgcgctgagccatcgatctcccgacccgctgtccgccgccgcagtgcgcgcacggcgcacggcctcactcgctggccttctcggccacctcagcggccggctcggccttctcgggctcctcagcggccggctcggccgccgcgggctcctcctccgcagcagcagcctcgggctcagcggctgctggttctgcttctgtctcggcagcgggcgctgccgcttcctccttcacctctccagccgccgccggctccggctccgcctcctttggcgtctcttcctccgcctccacgggggccgcctcgggctcagcggcggcagctggctcggtctccgccggggcagctggctcctccaccttggcctcggcggcgggggcagcctcctcgggcacgacggcgggcggagccggggtctccaccgccggcgcttcctcggtcgccacgacggtcggggtctggacctcggcagtggccatgggtgacgatcagaaggctgatgactacacgaccgagtggctag

SEQ ID NO: 108756 - DNA, 3122 bp, Zea Mays
gcttcctcccccaaattccggtcctcctaaaccctcgctcgctacctcctcatcggcgcgaccccaattccgccctccccgacctcgatgaacccgatctaagcatgtccgctgcgctcgcctgtctccgccgcacctccaagcgccgccgagacgcgcccgatcatgccctccccccatcatcgaagcagccgctgatggcccacgccggcgccggcgctggcgccgccgagtcgtcctcgtcggcctcggcctccgcttcggggggcgatggagcttccgcagcggcggcggcggcctccgcctcgtctccccctgcgtcgccgcgggaggtgcacttcttcgtgcgcgccaccgattctaggaccatcgcgatgcacgcggggtgtgacgatactgtcggcgccgtgcttgatcatctcggcgcctgcgggtatggccgcgatttgcggctgctctacgcggggcggcagctcgcgccggaggccaccctcgccgagctccatctcccgccggattccacacttcaccttttggcgcgcctcaggtccacccagcatcctcacgcgtggcaactcgcgtcgcacatcgccggcaccgccgccgccgccgccgccgccgcggagtccgagccgtccaggatccccgccgccgcgttctccctcgacgaactcgtcagggagttcatcctccgcgcccaccgcgccaacctggggcttcgccccgatcgcgcctctactgacgaagatcggtttgcggccgaccacgccgctgagtacgtggacatcttcctccaggcgggcgccgccttagcgctggttcgcctctacctctcaaattcccccttccgctctcacgccgagagtgccatcaaatgttttgtcgccacggacccttattccttgccgatggacttgctagtcgtgacggcaccagtgctgcttgaattctgccgcttgctctccttggctgcaggcaagaaggaattactatatagatcatgccgtcgtacacttgcctcagttttatcaactcgtcccaggctgcccccttctatgaactcaccaaccagattgatcgagcaagtcctgccattcgcccgtgaaacagtggatgtggtccttgatggacttgcatcaatgccaatgattatatcgcctagtgatcttgatgagttctcaaatttcctcaaagtgatgtgccagcaagcacgccattggatttccggtgaggggccgatgcccagtaatctgtacagcagggagtctgagcatggcgacacatggatatggaggtttcacaacatgtcgatggacatgctgaaaaggttggatgagtgcttgaagacattggagatggacctgtcattatcatcagagagtgtcggggtcatggaaagtcaaaccacatgggctgctcgatcacacatcctggtcatgttgactgaactcgatttcatctcagcgatttatgaggatgtggggcacaacctacagcttgtgttgctggcacacagggcgccactcaatgctcttgtccgttgttccaagagaaatgagcgtctacattggctcgtgaagcataagaatctcctttgctttgaagcaagaaggaatttagtcttcatgatgctccctgaagggaaggatgactttggggagctgcatgagatgttaattgatcgatcacatttacttgatgaatcctttaattacatcgcacaggcgaaacaaactgaacttcgtggtgggctgtttatggagtttaagaatgaggaagctacaggtcctggcgttctaagggaatggttttgtttagtgtgccaagctcttttcagttcgaagcaagttctcttctcaccctgtccggaggataaacgaaggttctacttgaacgaaacatctgctgtggatccactgcacctgaagtacttcacttttgcggggcggataattggattagccttgatgcataaagtacaagttggagttgtgatagaccgtactctgttcttgcatcttgctgggagaagtattacgttagaagatatttctgttgcagatcctgtcaaatatgcaagctgtaaaaaaattctagagatggatgctgctgaaattgataatctatacctaacattttcccgaggagctcatgaattaggtactgaaaagattattgatctttgtccaggaggacaggatatcagtgtgaatattgggaacagagagcattacattgatcttcttattaagaatatctttgtggactctatttcatctcagctaacccatttcacggatggatttgctgatatactagttaatcccaagcgccgggaagagtttttcgagtgtttagatctagaagactttgatcgactgttaggggggagcagcaatgcaataaatctgcaagattggaaatcacatactcaatataatggctacaaagaaaaggatcgccagattaccctgttctggaaggctgtggagcgcatgtcaatcgagagacagaggcagctcctcttcttctggacttcggtgaagtatttaccatcagacgggttttgtggactgagctccaaactttttatttacaagacatcagattcgcccgaccggctcccatcatcgcagacctgcttctaccggctctgcctccctccttacacatccttgaaaatgatggaaaaccagctgcagaagatcacagaagagcatgtgagctgcagcttcggtacatggtagttgctgctgtcatggattctgaaccggtatattctgtacatacggtaggctagcgacaccctgctgcctcattgaatctgttcctagggcttgaggtaataggctttctttcttcttttgtatgtatcctgggtttagtgttccgagacttctatttaacctaatgcagaaggaattgatagaaagcaggttccttttgttttctaaagaggtgtgagtgtgacgctgtgtagtccagccggtggcagtaatgtaataacatgtgcatgtagctgcattgtgctgagtgctgacactccgattaccggtgaacgggatggtgggctattctagttgatccgttaccaaaccaaagcatggcattgtttgttcttc

SEQ ID NO: 108757 - DNA, 294 bp, Zea Mays
atggcgtgcgcgcggcggattgtgccgcgcccagtaccggcttgtgcggcgacgggtgcggatttctggtgcggtcgtggtcgggctcggggatggggatggcgcggccgcgaggtcgaggcgtcgcagatttctggacgtggccgcgaggtcgaggctcagggctcgtcggcgcccggggacagggcttcgacgcttggggacagggcgtcagcgtttagggacgaggatggcggctgcggggtcgggctgcagggtcggcggggatggaggggtgtttttgtaaaatggtga

SEQ ID NO: 108758 - DNA, 804 bp, Zea Mays
atggcgggaggggtcgtggaccagtcgttgctgccccagatccatgccctcttctccgacccgcttcgcgtggatgagaggataacacctgtgacgtggccatggaaggcgcaggcggtcgggtggttctcctcgtctcgcagacgccgaggagcagcaggtgcggcttcaccgtgtgacgcgcgagcgcggcggcgcacgtacgttgagggcaaggcggcggtggatgctgtacctgtactgctcgatggcgagcgcgaggatgaagctcccgaggacgagggagatgacgtcgaggatatgccgaacgctggaaaaaggaacaggggcgccagggacgcgacgccgagcgtccactgcacggcgtccgtgatccacccactgcacgccagcaccccgagcatgttgcgcgcagcggggtgcccgccgaggccccccgccgtcgcgcagaccagcagcgcgcacgccagcgggcccgacggccgacgcgacggccacgaacctgttggcgagcacgggcctgagcgcggagcaggagcgccccgccgcgggcctgtcgtcgtgcatgggcaggcgggcagcagtggtggcctcgtcacgacctccgtcgagctctcccactcccagcaggcgcgtcgcggatacatggcaggacaaaactcgtcacaggccaaccgtgcttacgctttgcagccgtgccgagttcgattgcttgattctttgaagagcgaggttggctgcgtttataagcgagggccgaggggagcacaactgttacaaaaacgaaaagtcatacggcagtga

SEQ ID NO: 108759 - DNA, 104 bp, Zea Mays
acaaatcagcgctctaaatcaatcaatctttcccttgcagaacctccttcccgtccgtgctcgaagcctccagaagctattaaaaaacagaacaaatggttgat

SEQ ID NO: 108760 - DNA, 355 bp, Zea Mays
tcagaacctaacgaccttggccgcgcgcaccaccgggttctcccgggcgatggcgtcccgggcggcgcccctaagcagctctggcacaggttctgcgtggccgggttacccgggaacccgcagttgttggcgcacagcgtgatctccggcgcccggagctccgtgggctcctccttcttgtcgcgctgcgccatggctcctcgtgcgcctggcagaagggagaccccgaaccaccgtgcgtctctcactctgtctgtctgtctgtctgtctgtgtgtgggagcgcgtgcacgcgcgcgcggtggtggtggtggcggcccggccggagcttgctttttcggaggggtaggaggaga

SEQ ID NO: 108761 - DNA, 165 bp, Zea Mays
atggatgaagaaaatgatggctatacgaaggtaccgtgtaacttcattttctatcctgtcatgtccagtcacacacatggtgtcgagacaatagaggtggacagggaagagaacaaggtcacggtgacgggagcgccgccgatgtcggcgctaaggccgagctaa

SEQ ID NO: 108762 - DNA, 1988 bp, Zea Mays
ccaccacttcacgtcccaggtcatcaccctctcggctttactgttcgcccatttgcttccttctcacaacgtttcagattcccaagaaggcaagaactccctctcttctcaacaccagcggcagctttggagctaaaggggcaggcagcctttgaccctcctcctctgccatggccgtggtcgccgccggcgccgaggcctttgaccccgcggcgccttccccgccccgcgctccggcctcgcgccaggacgtgcaggcggccatcgccaaggccgtcgagctgcgccagctccgcgccaccctccttcagcgcggcgcgcccaatgcccgtgccagagcctgcgccagccgcagcccggccgtcatccgcctcccgccggtcgcgtcccccacgcgctccagagcagcggacgaggagtaccccgtgtttactccggtgacggcctacgacgacgaggagcgcgtagctacagttgcactgaaccacatttgccaggacaaccgaagccggtcggaaaactggaccggggtcgccctggatcacgacgacgcggccttgtccgactatgacggcctccacgccttctcgtcctccaacagcgaggtgttgctcccttactccaacgaccaccgtattcggaacagaggcacggtgtacaagatccaccccgccttcatgcactcggcgccatcggccgaccgcttcctcccgcccaccggtcgggcggcctacactaccgagttcaagctgccgccggcgacgtgcggtaacgcgttccgacccaccacgatcagcagcaccagggtgccactgccaccccaatcggcgcactcgcggacgaagcaaagagggccgccgcagatcctctcgtggctcttccccaagtcgaggaagaaagccaaaccgccggagatggcgtcgccgacggccatcgagcgcggcaacatgccgcagctgctgaccgagtggggggcgctttctctcgagtccctcaagaaagagctcgcagaggccaacgcgcaccgggacgccgctctgcgcgaagctgccgaggtgaggtcgtcgctgggggagctggccaccaagctggtgagcgtggaagcgtactgctcggagctcaagaaggcactgcggcaggccaccaactcgccgtccgtctcgcggagatcgacgagatcagtcgaagcaagacgagagctcccgacgccggtgagccacgaggtaatggtggaaggcttcttgcagatcgcgtcggaggcacggctctcggtgaagcagctctgcaaggcgctgatccagcaggggaacgaagaatcctgtgacggcctgtccgacaggctgaacctgctcctgcgcccgtaccagctcgcgctcagcggcagcactggcaagcactgctcgaaggccacgctgtaccatctcgaggcgatcatgaaccaggccatgttccaggacttcgagaaccccgcgttccagcggaacggctcgccaaggtgcctcgacccagcggaggaccgccagcagagcttcgccgccttcgtggcgctgcgcaaccttagctggaacgaggttctgcggaagggtaccaagtactacagcgaggacttcagccgtttctgcgaccggaagatgagcggcgtcgtggcgacgcttggctggtcccggccgtggcccgagcagctgctgcagagcttcttcgtcgccaccaagtgcgtctggctgctccatctgctggccttctccttcggcccgccgctgacgatcctgcgcatccaagacggccgcgcatttgatgagatgtacatggaagacatcctacatgacaggcagcaagtgcagggtccttgtcaagtgaagatcatggtgatgccggggttttacgtccaagatagagtgcttaaatgcagggtcctcacaaccagatcagcagcataattgtgtctcttttcagagctttctttgaccaacagctagtatggtgtcaac

SEQ ID NO: 108763 - DNA, 1926 bp, Zea Mays
tatgctgtgtcggcgtgcgcctgcggccgcagctagcagcctgtgcttaattggatgcagttgcagcgatccgtcgaccggccggtccatccgtccatggtgagtggcggcagcatcaaggagcagcagcacgagatgaacatctccttcgcgatggtgaaccaccaccaccaccatcagcagcctccatcctcgtcctcttcctcctccatgcacgcggccgctgcgagcttcatgagcggcaaggaggcgtcgtcaggagcgtatgcgtatgaccatctgggcgagctggaccaggcgttgttcatgtacctggatcacggcagaagccatggcggcacgccgcagcaagagcaaaggcagacactcaacatcttccccatgcatgtggagccgtcgccgaagggggagattagtttagttctgcccccggcgccggtgggatacaagcagcctaggtcaccggaccatcaccatcaccagcatgcggccatggaggagttgttggcggagagcaggaggcagcaggagcaccaaccctttgctgccgctgctgagccggcagcagcacccgggatgatcaaaggtgtcaagccactggccaagaaggatcataggagaggcacatcgaccactgaacgcgacccaaaaacgctgagaaggctggcccagaatagggaggctgcaaggaaaagcaggctaagaaagaaggcttacatccagcaactcgagtccagcaggatcaggctagctcagctcgaacaagaacttcacactacaagagctcatcagggagttttcttccccaacggcggcatcctcgctggccaaagtgtcgtcggcaaaggcgtccccatcggcggcatcgacagcctcagctcagaggcggcgatgttcgatgtggagtacgggcggtggcaggaggagcactaccggctgatgtacgagcttcgggcggcgctgcagcagcacctgccggagggggagctgcagatgtacgtggagagctgcctggcgcaccacgacgagatgttgggcatcaaggagggcgccatcaaaggcgacgtcttccacctcatctccggcgtctggaggagccccgccgagcgctgcttcctctggctcggcggctttcgcccctccgaggtcatcaagatgctgctgagccacgtggatcccctgacggagcagcagatcgtggccgtgtacgggctacagcagtcggcgctagagacggaggagacgctgagccagggcatggaggcgctataccagtcgttgtccgacaccatcctgtccgacgcgctcagctgtccctccaacgtcgccatctacatgggccagatggccgccgccatgaacaagctctccacgctcaagggcttcgttagacaagctgagaaccttcggcagcagacgctccaccggctgcaccagatcctgacggcgcggcagatggcgcgctcgctgctggccatgtcggactacttccaccgtctccggacgctcagctcgctctgggtcacacgccccagggcgccgcaggagcagcagggccacagctagcggcggcgacggccagtggtgacgaccgccggccgcacgcaacgctagctggcgcacgcatgtgtccattcattgcatatatgagtcatgcatggtgcgtgtgtgtgtgtccgtcgcgcgtcgttcgtcatcggttcaaggaacagaccggacaagaattgggctttgcaggtaatagctactaagccagttagggccgggctggggaagagagagctagcgaggccgagggatcaacaaaaggataatgttaagcttagcgacgattgtcgtcttcgttggttgcttgtagctatagctagccatctaggtgtacttgatcgttcgatcgcggtctatcggtacggtcggctcctgcac

SEQ ID NO: 108764 - DNA, 1676 bp, Zea Mays
cgttattttaagggcggcgccaccactgttgtcgcctccttcctcactgcctcctcctacccttccctcgctgaagccctctcgcgcctcctcccactcccactggacagagaggaggttagtggaaggcgggctaggaggctacgccgccacagacgcgaagcgatagcgtcggggggaagcaaggaagcgggtggcaatggcgaccggcggcggcggtgggagcgacgacttccacgggctcacgttcggccagaagatctacttcgagcaggacgcgggcgccgccggggggagcgcgacgggcggcaggaaggggaagggcgccgcggcgtccgcgagcgccgcccagccgccgcggtgccgggtggacgggtgcggcgtggatctgagcgccgtcaagcagtactactgccggcacaaggtgtgctacatgcactccaaggagccgcgcgtcttcgtcgccggcatcgagcagcgcttctgccagcagtgcagcaggttccaccagttacctgaatttgaccaagggaaacgaagctgccgccgccgcctcattggtcacaacgagcgccggaggaagccaccacctggaccactcacctcacgatacggcccgcttgctgcatcactagttcaagagcctggtaggttcaggagcttcctgctcgacttctcgtacccgagggttccaagcagcgtgagagatgatgcgtggcaatggcaagggatgcagcatggcggcgacaggatgctgctgggtaccgccagcgccatccagtggcatgggaaccaagaacctcacccaccacatcgcagcgcagctgcgggctatggcaaccatgcgtacaacaactgccatggtggcggcggcttggtagcagcagcagcgggggcgtcaatgctctcctctgccttcgagcccccgcctggcggtggcggatgtgtcgcaggagctaccgcggccgactccagctgtgctctctctcttctgtcaactcagccatgggatacgcccacccaaagtggcagcagccaccacaaccggtccccagcgatgtccgcggctgcaggcgccttcgaagtggcgccgtcgtccgtcgtggcgagcagctacacggcgtcgagctcctggtctggctcacgggaccctgccgacggcgccaggaaaaacgcgcagcgtcacgatgatggcctgcacctggtccatccaccaggccccgtccaccacggccacttctccggcgagctcgagctcgccctgcagggaagcggcccgccgcatgtcgaccatggcggcggcacctgcttcagccattctgacaccaacgcgatgaattggtccctgtagggacaacaacttttgccgccactgccttgatccggtcggcacgccacgagacatggagcacttgggattgggacaccctggttttgtgcccctgaccttgccgttctggtttttcagggtggaactaactgggattccctaggcgtagatcatgaatcccctttccccgtgtaacccattgcgtccatgaagtcggcccaacaccggatcatatataattctacaactcccataacctaaatcattcttcagttgtgaagatatatgcttgtcaagtgacctggttttattttatctgccatcaattcatcatcatcacttcttt

SEQ ID NO: 108765 - DNA, 1472 bp, Zea Mays
gctgctgcgactgggagtgggagggagccgagcggaggaggtgcgtgtggtgggaggtggggacggcagcacaacgcgaagcgatagcgtcggggggaagcaaggaagcgggtggcaatggcgaccggcggcggcggtgggagcgacgacttccacgggctcacgttcggccagaagatctacttcgagcaggacgcgggcgccgccggggggagcgcgacgggcggcaggaaggggaagggcgccgcggcgtccgcgagcgccgcccagccgccgcggtgccgggtggacgggtgcggcgtggatctgagcgccgtcaagcagtactactgccggcacaaggtgtgctacatgcactccaaggagccgcgcgtcttcgtcgccggcatcgagcagcgcttctgccagcagtgcagcaggttccaccagttacctgaatttgaccaagggaaacgaagctgccgccgccgcctcattggtcacaacgagcgccggaggaagccaccacctggaccactcacctcacgatacggcccgcttgctgcatcactagttcaagagcctggtaggttcaggagcttcctgctcgacttctcgtacccgagggttccaagcagcgtgagagatgatgcgtggcaatggcaagggatgcagcatggcggcgacaggatgctgctgggtaccgccagcgccatccagtggcatgggaaccaagaacctcacccaccacatcgcagcgcagctgcgggctatggcaaccatgcgtacaacaactgccatggtggcggcggcttggtagcagcagcagcgggggcgtcaatgctctcctctgccttcgagcccccgcctggcggtggcggatgtgtcgcaggagctaccgcggccgactccagctgtgctctctctcttctgtcaactcagccatgggatacgcccacccaaagtggcagcagccaccacaaccggtccccagcgatgtccgcggctgcaggcgccttcgaagtggcgccgtcgtccgtcgtggcgagcagctacacggcgtcgagctcctggtctggctcacgggaccctgccgacggcgccaggaaaaacgcgcagcgtcacgatgatggcctgcacctggtccatccaccaggccccgtccaccacggccacttctccggcgagctcgagctcgccctgcagggaagcggcccgccgcatgtcgaccatggcggcggcacctgcttcagccattctgacaccaacgcgatgaattggtccctgtagggacaacaacttttgccgccactgccttgatccggtcggcacgccacgagacatggagcacttgggattgggacaccctggttttgtgcccctgaccttgccgttctggtttttcagggtggaactaactgggattccctaggcgtagatcatgaatcccctttccccgtgtaacccattgcgtccatgaagtcggcccaaca

SEQ ID NO: 108766 - DNA, 815 bp, Zea Mays
aagcatctcccccctccctcgtctctctgaagcaggacagcggaaccagttcttgcgcggccttctgatctccgtcctctgctcagataaagctctcggagctcctgcgcgaaacctccgacgctcaccgtcgaccaagacgccgccgcctgtagcagtttgagggtttccgcgctccgggaaggatgggcaggccaaggggagggaaggctaaacggccgacgtcgcaagctaaccacagcgaggatgctgacgccggcagcggcggcgaggaggaggccgtgaccgtgacgccagcctacaagaggagggggcggccgcagaagcaccacacggctgacgacaccgacgacgaggaggacgacgctgccaaggccgagcccatggaggacgcgaagccggccgtggtctcgccggagagcggagggaagaagaagaggcggcggcggcggcaacagcagcccaagcgcggctgcgacccggcgaccgaggaggagaaggacgacgaggccgcgaagcggagcggcttccggcatcacgggagccgccggaagagcaccccgcgccgagctgccgaggcaggcgtggagtgcaggtgaggtctctgcttagatttggccatgcgaccgtgcgagtcgtggcgggttgtgttttcgacttcttttcatttttgccctgcttctttctgcatagatcaagcttccagtagcatgagagtatgtgtgagcaactgagcatgctatatatgagctcgttattagaatgcgaacagtaaacgcttgattggttgctgattctgctgcgacctttgccta

SEQ ID NO: 108767 - DNA, 171 bp, Zea Mays
cgtgtgtggcggcggcggaggaggccgcggtgtgggtcggcggccgcggcgactgtcgcggcgtggggagacggcgtgagggcgtggcgttgggcagttgccgcggcgtggggcgacgacggagaggggcgcgacgtgggatggcggctggcgcctcggcgtgcggcgatg

SEQ ID NO: 108768 - DNA, 183 bp, Zea Mays
agggtcggccgtggggacgaggggcttgacagcgaggagaacggcaagggcagcgggccggaggacgtcgtggcggtgaggacgccgggcttggaggacggcgcgacggtggagggggccgcggcgtgggacggctgctcggagtgggcgcggcgtgcctggtggcggcggaggagggaatga

SEQ ID NO: 108769 - DNA, 1617 bp, Zea Mays
acccaatgcaatcccgcttccacctcctccgtcctcttcactctcccccatcccagtcagtcctctccatgacctccgccgcggccgcctccccggaccccatggtggcgtaatttctgccgccaattcccttgcctccagacttcaaatccccaccaccatcgaacctccccaacccggcaaatcctaaatccaatataggctaaccctagccgcccatccgcccgccatgaaggcgtcgatcaagttccgcgacgacgaccgaccgctgctgcgcgccaaggtgccgattggcgtgctggggctgcccttcctctcgggcctcgcggcggggggagacgccaaggacctccgcttcgacctctccaccgccttctcctctggcccggcgctccgcctctcataccgccccaacgaacccctccagcctttcgccctctccgtccgcacggggctggggccgctggggtcccctgcccgcgccccattcgccctcgccgccgaattcaacctcacctcctccaacccgcccgccttctcgctcctcttcaagccccggatcggggacttcgccgtcgccagctccgtccgctccccgccgacaccgccgcccacatccactccgcccccgctagcgatcaagatggtcgacctcaccaccaacggcgacgaccacgactgcgaagcacacggtaacggcttctcctttaacgggaatgtattgggggcgaacgtggcggccgtcaccgggacggacggcggcggcggcggcgtaggcgcgctgctgtccgggatgcggctcacgaccaggagcatgctgccactgtggagtaaagcgagcctgcggttccagtgggggctgcgtgtgccgccggagatcaaggccacgcttgcagacaacgggtacgggcgcaaggctgggagcctcgccatcagcaagctgccgctgctggtgatgaacaagatcaccatcgagcacacgcccaaggtgccttcacagtctgaaacggacaagaagaggaagaaagatacaccaccggcagccaaggatgaagagttgtcattcatgaagaggcaactggataagctgaatgtggagaacacaatgctgcgtcgtgcagttgaggacttgcgtgcagagattggagccggcaaaggcgatgatcgtaagctgccaacagcagtgccacctcaacaacattctttagtgtcgaaaccagatcgccatttccacatcaatgcgaaggaattggtagacagtgggacgaaaccggcctcaaatgaagcaagtgaggagttgaagaaggtgcttgagggccggcggaagtaagaagcacctagctagggcttgctgttattgcaagccctacattatgacatagctgctgactgctgtgtcaggttttgtggttaataataatacttcctcgctggagaagattgctaaggtcagtttagcccctcgctggagaagattgcaagtgaggttgccattcgccataggtgtggtagtaattttgcctcaattctattttcattgcttgtcttaggatattctgttctgtataaattttcatcttttgatctaaaatgaatgaaggattagttttttcaaca

SEQ ID NO: 108770 - DNA, 1202 bp, Zea Mays
atgcagtcatatgcccggcttccatacttgcagaacttgaatgctaagtctctcacccgttcttttgtagccagattgcgggtagacgacgtatcggcaaagatcatgtcgttctcgcagcacgggacacgcgcggtctgcatcctttcagcaaacggcgccatatcaaatgtgacgcttcggcaatctgccacttcgggtggaacggtgacatacgaggttcgtattttgaatgccacaagttatgagtatcgagtacactttgatacagatagtcagctcgagtactttactgccaggtacactggtacagcgattcagaagagtgaccttactgatgtctattgtctataccgcgagtcatcactgtcgctgggtcgtttcgagatactgtctctgtccgggtcgtttcttctgtcagagaacggtggccagcgcagtcgaactggtgggctcagcgtttcgctagcaggccccgacggccgtgtcctgggtggctgtgttgccggactcctgacggctgcttcaccggtacagatcgtagtggggagcttcgacgccggtggaaagaagcagccgaagcagcagcagcagcagcagcttgctccgtcaccggcgccactaaatctcgcgccgacgggcgtggcggcagggccgagcagcccgccgtccagaggcacattgagcctaagcgagtcgtccagtggcgccccgccgagcccgccgcacgcaggggccagcggtggccatgggcagcagcagcagcagccacagccaggtggcttctccggtctgttctggaaatgacgagacccccggacaccgtctgaccgtggtagaactggcagaaaggactaaaggcgcgtgaggcactcgtcgaggccgaagctcactcggtgagaagcagcggtagcttgtaggtggtgtcaagactgtgtagctcttgctgttgctgtaggtgtaaatcgtgcgttgtgattgtgaggtggttgcttattgtctgtcgtctggaatggatgccgtgtactgaacctgtgcccccaatgcagcatgtcggaagttcttggtttcttctgcttgggtgcatcggcttgccgcacgatatgcatccatgcccataataatacgtgtatagatccaccttgttgtgaaggtcacacacaactcacaatgcaaacttgtctgaaaagattgatacaaaa

SEQ ID NO: 108771 - DNA, 1756 bp, Zea Mays
gagctgagttctttgattggcctccggtgagtggtgactcttgagctccgccgcttaacctgccagtgtgcgagctctgcgtcttgctatccctgactattttcctgccttctgtctccattttcctagtgctatactaatttctgaagacctcctggaggaattctctgcttcatttctcgagcgggagagcggccgccttcagtcaaggaaaatcgctgaagacagccgcagattgccagattcgtagttccgcttctgcttcggcgcacctgttcggtgtggaatgatggaggtgagcccgtctccggagcaaggagtgatggcgggaagggagccgttcgggctgccgaagaccccggcaacgccgccgtcctccgggggcacgcagggcctgcgcatggcgtacacgacggacggcaccgccatcttcaccccggtgagctccgtgccgcccgcgacggcgacataccagcccgtgggcggcagcgccgcgtctgcttcaagcttggctggcgtaggaggcaatggtggcgcgcccgtgcactcgggtggcgcgggtgagccggggaccaagaaaaagcgtggccggccaagaaagtacggccccgacggctccatgtcgctggcattggtgcccgcatccatggctggggagccggcgccggcggctcttggagcttccggtcctttctcgcctaacggcccgaaggcgccgaacactgcgccgtcagcgtcgccggacggcgcgaagaagcggggccggccgaagggctccaccaacaagaagcacgtggctgcgctcgggccagcgggggcaggttttacgcctcatcttatttttgtaaaagccggagaggacgtatcggcaaagatcatgtcgttctcgcagcacgggacacgcgcggtctgcatcctttcagcaaacggcgccatatcaaatgtgacgcttcggcaatctgccacttcgggtggaacggtgacatacgagggtcgtttcgagatactgtctctgtccgggtcgtttcttctgtcagagaacggtggccagcgcagtcgaactggtgggctcagcgtttcgctagcaggccccgacggccgtgtcctgggtggctgtgttgccggactcctgacggctgcttcaccggtacagatcgtagtggggagcttcgacgccggtggaaagaagcagccgaagcagcagcagcagcagcagcttgctccgtcaccggcgccactaaatctcgcgccgacgggcgtggcggcagggccgagcagcccgccgtccagaggcacattgagcctaagcgagtcgtccagtggcgccccgccgagcccgccgcacgcaggggccagcggtggccatgggcagcagcagcagcagccacagccaggtggcttctccggtctgttctggaaatgacgagacccccggacaccgtctgaccgtggtagaactggcagaaaggactaaaggcgcgtgaggcactcgtcgaggccgaagctcactcggtgagaagcagcggtagcttgtaggtggtgtcaagactgtgtagctcttgctgttgctgtaggtgtaaatcgtgcgttgtgattgtgaggtggttgcttattgtctgtcgtctggaatggatgccgtgtactgaacctgtgcccccaatgcagcatgtcggaagttcttggtttcttctgcttgggtgcatcggcttgccgcacgatatgcatccatgcccataataatacgtgtatagatcca

SEQ ID NO: 108772 - DNA, 2474 bp, Zea Mays
ctggccaccatttctttcccctctcccaagccagtgccgcggaccgcgagggttttaagagaaggcggcggcgccgttcactagggtttttcctgatctcgcctcctcctacttcccgagccacacacgctgccgccgtgagccgccgcccacaaggcttagcaccaaccatggccttcggagctctcgtcacgtcgaggctggtcaggtccggccacacccttgcatctgccgttgcccagggtcccgttgcccagcggatagcacctcctctgctctccaggcttggagcagtagctcgtcttctcagcacaaagccagccgcaacagatgtcatcggtatcgatctaggcacaacgaattcctgcgtctccgtcatggaaggaaagacaccacgggtgattgaaaatgcagaaggcgcgaggacgacaccctccattgttgccaagaatcagaatggtgacctgttgattggtatcacagcgagccggcaggcagtaaccaatgcccagaacacaatccgtgggtcaaagcgtctgatcggtaggacttttgatgacccacagacccagaaggagatgaagatggtgccttacaagattgtcaaggcgccgaatggtgatgcctgggtcgagatgggtggccagcagtactcccctagtcagattggtgcatttgttctcactaagatgaaggaaactgcagaggcttaccttggcaagacagtctctaaggctgttattactgtcccagcttattttaatgatgctcaacgccaggctaccaaggatgctggtaggattgctggactggaagttatgaggattatcaatgagcccactgctgcagctttgtcttatggaatgaacaacaaggagggccttattgcagtgtttgacctgggtggtggcacatttgatgtgtcaatccttgagatatcaaatggggttttcgaggtcaaggcaaccaatggtgatactttccttggtggtgaggattttgatggtgcactgcttgagtatctggttagtgagttcaagaagtcagacaacattgatctgagcaaggacaagttagcactgcaaaggctcagggaagctgctgagaaggccaaggttgagctttcgtccactatgcagactgaaatcaacctcccatttatcactgctgatgcatctggtgcaaagcacttcaacattaccttgaccagatctaagtttgagtctcttgtgagcaatctcattgagaggactcgcatcccttgtgtgaactgcctcaaggatgctggcatctctgctaaggagattgatgaggtcctactggttggtggtatgactagagtaccaaaggtccaggaggttgtttctcagatattcaataagccaccaagcaagggtgtcaatcctgatgaggctgttgccatgggagctgcaatccagggtggcattttgaggggtgatgtgaaggagctccttttgctggatgtcacacctctctcccttggtattgagacccttggtggcatcttcacaaggctaattaacaggaacaccacaattccaaccaagaagagccaggtcttctctaccgctgcagataaccagacacaggttggagttaaggtgcttcagggtgagagggagatggctacagataataagctccttggtgagttccagcttgaaggcattccaccagccccaagaggcatgccccagatcgaggttacctttgacattgatgccaatggcattgtaaaggtgtcagctagggacaaagccacaggcaaagaacaagaaatcaccatcaagtcttctggtggtttgtcagaggtcgaaattgagaagatggtgaaggaggccgagctacattctcagaaggaccaggaaaggaagtctcttattgatctcaagaactctgcagataccacgatctacagcattgagaagagtgtcagcgagtacaaggacaaggtccctgctgaagtcaccaaggagatcgagtctgctgtctctgatctgagggcagctatggctgaggacgatctggacaagatcaagcagaagctggaagcagcaaacaaggctgtttcaaagattggagagcacatgcaacaaggtggcggcagcggcagcgctggcggcagcggcagcagcagtggaggagaccagactccagaagctgagtaccaggacgcaaaggaagccaagatgtaggtcgaacctccatcaagtctctagtttttgcatgtgcccatttaggaagtaaacttacctacctccgatttcttagttttctgtgagggttaagaggactgtaatttttgttgccaaattttgggtcacggataagataaattgaggggaacggacccatacgttaattgaaccatttatatactcccgacggcctctcaactattgtttgttgatcttggttgtgtcgataataggaattatttatatggttaacat

SEQ ID NO: 108773 - DNA, 2517 bp, Zea Mays
ctggccaccatttctttcccctctcccaagccagtgccgcggaccgcgagggttttaagagaaggcggcggcgccgttcactagggtttttcctgatctcgcctcctcctacttcccgagccacacacgctgccgccgtgagccgccgcccacaaggcttagcaccaaccatggccttcggagctctcgtcacgtcgaggctggtcaggtccggccacacccttgcatctgccgttgcccagggtcccgttgcccagcggatagcacctcctctgctctccaggcttggagcagtagctcgtcttctcagcacaaagccagccgcaacagatgtcatcggtatcgatctaggcacaacgaattcctgcgtctccgtcatggaaggaaagacaccacgggtgattgaaaatgcagaaggcgcgaggacgacaccctccattgttgccaagaatcagaatggtgacctgttgattggtatcacagcgagccggcaggcagtaaccaatgcccagaacacaatccgtgggtcaaagcgtctgatcggtaggacttttgatgacccacagacccagaaggagatgaagatggtgccttacaagattgtcaaggcgccgaatggtgatgcctgggtcgagatgggtggccagcagtactcccctagtcagattggtgcatttgttctcactaagatgaaggaaactgcagaggcttaccttggcaagacagtctctaaggctgttattactgtcccagcttattttaatgatgctcaacgccaggctaccaaggatgctggtaggattgctggactggaagttatgaggattatcaatgagcccactgctgcagctttgtcttatggaatgaacaacaaggagggccttattgcagtgtttgacctgggtggtggcacatttgatgtgtcaatccttgagatatcaaatggggttttcgaggtaattttcttctcatatcttgcacagattctctatgcagatgttgaaattggtgtagtaattcttaattctgacaccttgttcaggtcaaggcaaccaatggtgatactttccttggtggtgaggattttgatggtgcactgcttgagtatctggttagtgagttcaagaagtcagacaacattgatctgagcaaggacaagttagcactgcaaaggctcagggaagctgctgagaaggccaaggttgagctttcgtccactatgcagactgaaatcaacctcccatttatcactgctgatgcatctggtgcaaagcacttcaacattaccttgaccagatctaagtttgagtctcttgtgagcaatctcattgagaggactcgcatcccttgtgtgaactgcctcaaggatgctggcatctctgctaaggagattgatgaggtcctactggttggtggtatgactagagtaccaaaggtccaggaggttgtttctcagatattcaataagccaccaagcaagggtgtcaatcctgatgaggctgttgccatgggagctgcaatccagggtggcattttgaggggtgatgtgaaggagctccttttgctggatgtcacacctctctcccttggtattgagacccttggtggcatcttcacaaggctaattaacaggaacaccacaattccaaccaagaagagccaggtcttctctaccgctgcagataaccagacacaggttggagttaaggtgcttcagggtgagagggagatggctacagataataagctccttggtgagttccagcttgaaggcattccaccagccccaagaggcatgccccagatcgaggttacctttgacattgatgccaatggcattgtaaaggtgtcagctagggacaaagccacaggcaaagaacaagaaatcaccatcaagtcttctggtggtttgtcagaggtcgaaattgagaagatggtgaaggaggccgagctacattctcagaaggaccaggaaaggaagtctcttattgatctcaagaactctgcagataccacgatctacagcattgagaagagtgtcagcgagtacaaggacaaggtccctgctgaagtcaccaaggagatcgagtctgctgtctctgatctgagggcagctatggctgaggacgatctggacaagatcaagcagaagctggaagcagcaaacaaggctgtttcaaagattggagagcacatgcaacaaggtggcggcagcggcagcgctggcggcagcggcagcagcagtggaggagaccagactccagaagctgagtaccaggacgcaaaggaagccaagatgtaggtcgaacctccatcaagtctctagtttttgcatgtgcccatttaggaagtaaacttacctacctccgatttcttagttttctgtgagggttaagaggactgtaatttttgttgccaaattttgggtcacggataagataaattgaggggaacggacccatacgttaattgaaccatttatatactcccgacggcctctcaactattgtttgttga

SEQ ID NO: 108774 - DNA, 1149 bp, Zea Mays
gcaagcggaagccgtggcggagatattatataaggacgaagaggaggaggaccgaccggaggaggacgtagtgaggccctgtagtggagcgggatggcgtcgccgcgcgtgtgcgtgaccgggggcggcgggtacgtcgcctcatggctcgtcaaactcctcctctcccgcggctacgccgtgcatgccactgtccgcgacccaagtgatcccaagaacgcccacctccggcggatggaaggggcatcggagagcttgctcctgttcaaggccgacatgctcgatcgcgacgccctggccgcggcggtctctgggtgcgagggggtcttccacgtcgcctcccctgtgcccgcagataaggtcctcgatcctgaggcagaggtactgtctcctgctgtcaaaggcactctgaacgttcttcaggcttgctcggcaaataatgttcggaaagttatcgtggtttcatccacagctgctgtccattttaatccgagttggccccaaggtataatccaagacgagagttgctggtcagataaatttttttgcactaagagtgaggaatggtacattgctgccaagacaattgctgaagagacagcactggagtatggagagaagaatgggctactcgttgttacagtttgcccttgtgtcgttttaggtccactcctgcagcctctaatcaacaccacgagtgaagtattcgtctacattataaaaggaggtcctagagcgatgaaaaacatcacctggaacatcgttgatgtccgtgatgtagccgatgctttgcttttggtatatgagaaagtggaatcatctgggagatacatttgtgcaccaaatcggatcagcacttacgacatagcgaacttgtttagaaagttctaccccaactacaattatgtgaagtgcagcgacgaggatcatgaatctgaaatgccgccggttacatcagagaaacttaagagcctaggttggaaaccaagaaaattggaggaaactctgctggacagcattgagcactacgagaaggcagggtttctgcaggatgtagagggctgcccttgtcgtcttccttatcttttccattttgcttctaactaataaagtaaactatgtattacagttacagttactacttaaact

SEQ ID NO: 108775 - DNA, 135 bp, Zea Mays
ttttattttttttattttattttatttactttctgtgatcataattactgtattttaagtaggctaatcactgttcatgctataggaaaataggaagtttaatttaaaattccgttatgttattgattcacgtag

SEQ ID NO: 108776 - DNA, 444 bp, Zea Mays
ctgctctgtactagcttcctgatgcaccaccgcttcaacggcatcaacaacagcactaccatccactgtgccctccttgtcttcaacctcagaatccacatagtgtgcctcagagtcagcactggtgatggtaggttcgcattcacgggacgccagagcagctgccccactgtcctcttcaccaacagcctcctgctgcgccacttcggcaacacaatcggaacttgggtcacctctgctctcatccgcgctaccctcagacccgtcggaagcacgatcacccccgtccgccgacgaagcaccgagtgccgcaccctgagcaccaacttgcccttcggcggtcccgtgatctccggccacggccgcgtccggagctgcattgaaggtgggcacgtcgtcctcctcggatgcagggtcctcgtcgggcgccttgcccagatctga

SEQ ID NO: 108777 - DNA, 1614 bp, Zea Mays
ctgatcccctcgattcgcggcgccctcgcctccaccactctccaaccacccgacgccgaccgccatcaattcacgcccccaccagctgcatcggttccctccagcgccccgcctcctggcgcagatccgtgcaccccttgccctctccggactcgatgattcacagatccgcccagctgcccaggcactgactaccggcatccggatctcctgctccactgctcgccgcctcggggctctccggcgttggctcagcgcgacgggccccccaatagcctagttccggatcccccaaccgcccaagccccacaggtcaagcaccggccaccgatgtctgacgaacgagcgaactccccgcggatgcaggaggaggaggtgcaggagcgaccgccgaccgtccgtgtttcaccatccccttcttcgatcacaaggtaaccttctccggtgttgaaaccatccgcggacacctggcaagctggtgcccacaagaggtggtgctgaggcacgaggcggtgggcgtgttcctgacgcactgcgggtggaactcgaccatggagagcctatgcgccggggtgccgatgctgtgctggcccttcttcgcggagcagcagaccaacagccggtacacgtacgtggagtggggcgtggccatggagatcggccaggacgttcggcgggaggcggtggaggagaagatccgagaggcgatgggcggagagaagggaatggagatgcagcgccgctgggcggagagaagggaatggagatgcagcgccgcgtgggagagtggcagcagactggtctccgcgcgacgcggcccggagggcgctcatatgccaacctcgacaagctggtcgccgacatgctcctctcgggtggcggcaagagttctcaggagggtttcacttcgcacaccgccactgtccaatgattcggactgaacatggatggtagtacaccaaaagagaagtttgtgtgaatgtcgaggcaaacccgtaaatcatggagcatgtgatggaatggaaggaccgaaggagccagtagcggaagaagttacttctcgtagcaggcaaaaattggaatatgaaaacctggaagccaagagggttaatccctaattactatattttattccattagttcgtagaagttttggtccctgtattcaatgtaataacgacttacattattttagcctcacaattttctttaatagtctagctttgtaattgataacataatttttttggttgaactgttagaagataaagaagtaagttactaaagttttggactgtattctttcattttcatctcacttatcctatttctttcaggaatcataaaagcatatggaggaactatgtataggctacaaagaagcataagaagcatttttatagcagaagccaagtgttctgatgattttgttttttcaattgtgttttatgttattagttcagcatgtacatatattgacatgatttatggcatggcatctgtcatctttgttatatttatgacatcgttcttgattgatgtgtgcgacatgaatgatggtttttttaacatcctgaccatcattgtgtcgctcattatcgtattttgtatatc

SEQ ID NO: 108778 - DNA, 1287 bp, Zea Mays
ctgatcccctcgattcgcggcgccctcgcctccaccactctccaaccacccgacgccgaccgccatcaattcacgcccccaccagctgcatcggttccctccagcgccccgcctcctggcgcagatccgtgcaccccttgccctctccggactcgatgattcacagatccgcccagctgcccaggcactgactaccggcatccggatctcctgctccactgctcgccgcctcggggctctccggcgttggctcagcgcgacgggccccccaatagcctagttccggatcccccaaccgcccaagccccacaggtcaagcaccggccaccgatgtctgacgaacgagcgaactccccgcggatgcaggaggaggaggtgcaggagcgaccgccgaccgtccgtgtttcaccatccccttcttcgatcacaaggtaaccttctccggtgttgaaaccatccgcggacacctggcaagctggtgcccacaagaggtggtgctgaggcacgaggcggtgggcgtgttcctgacgcactgcgggtggaactcgaccatggagagcctatgcgccggggtgccgatgctgtgctggcccttcttcgcggagcagcagaccaacagccggtacacgtacgtggagtggggcgtggccatggagatcggccaggacgttcggcgggaggcggtggaggagaagatccgagaggcgatgggcggagagaagggaatggagatgcagcgccgctgggcggagagaagggaatggagatgcagcgccgcgtgggagagtggcagcagactggtctccgcgcgacgcggcccggagggcgctcatatgccaacctcgacaagctggtcgccgacatgctcctctcgggtggcggcaagagttctcaggagggtttcacttcgcacaccgccactgtccaatgattcggactgaacatggatggtagtacaccaaaagagaagtttgtgtgaatgtcgaggcaaacccgtaaatcatggagcatgtgatggaatggaaggaccgaaggagccagtagcggaagaagttacttctcgtagcaggcaaaaattggaatatgaaaacctggaagccaagagggaatcataaaagcatatggaggaactatgtataggctacaaagaagcataagaagcatttttatagcagaagccaagtgttctgatgattttgttttttcaattgtgttttatgttattagttcagcatgtacatatattgacatgatttatggcatggcatctgtcatctttgttatatt

SEQ ID NO: 108779 - DNA, 1266 bp, Zea Mays
agttcatcacttcagtcttcccgccgcgaaagcagtggaaagtggataatcttctctgcattccgtgccgcgccttgccgtggacggaaatgtcgcagccgcttcccgagaccccgtcgctcgccggtcgccgagtagcgttcacgacgccgcagacgggcggcggcggcgcctacgggggccgcttgggcgcgctcctgcggcagcgcggcgcgcatccggtcgccgtgcccaccatcgccgtccaccctcacgaccccgaccgcctccggccctacctcctgcccagcgccctagatcccttcgccgcgctcgcgttcacctcccgctccggcatctccgccttcgcccgcgccctctcgtcctcccaccgccccctctcccacgcctccgcgctccccttcaccgtcgcggcgctgggcagcgacgcggacctcctcgaccacgcgttcctctcgcgcctctgcggcgacgccggcacgagggtatccgtcctcgtacccgacgtgcccaccccggccggtctcgtggaggcactggggcgcgggtccggccgccgcgtgctctgccccgtccctgatgtcgtcggcctccgcgagccccccgtcgtgccggactttctcgcggggctcgaggcggctgggtgggtagccgtgcgcgcgccggcgtacaccacgtgctgggccgggccgcgctgcgcggaggcgctggtggatccggacgctgcgccgctcgacgccgtagtgttcacgagcacggccgaggtggaagggctgctcaaggggctggaagccgtggggtggacctgggcgcggctggcggcgcgttggcccggcatggtcgtggccgcgcacgggccggtcaccgccggtggcgcgaggagcctcggcgtcgaggtggacatcgtgagcaccaggttcagcagcttccatggagttgtcgatgctctcgccgcggcatttccttcccagaagatagtgtaactgctaagacatgaaggattggaaacggccacaattcgctcgattcatgaatcatgaatattccgaggtagaggtagctcaaaagatcgcctgatggctctacttacatgtctcgatcatgccacgctgtgtgcgtatagttacgtgtttcgattcatgaaccatcaaatgtcggatagttttttattgttaagaaacaattttcatcacctctccaatctctctttaggaaattatcttttgtcaaaatgattctataaggggtatttggtttgagaaatca

SEQ ID NO: 108780 - DNA, 374 bp, Zea Mays
gatcaggcgcaggcaggaaaatagagagagagcgaagagggagaagggaaggcccgtccgtgcgtggtggctctggcatgcatgcttcaggcggtgaccggggccgcaggctccggtattggctgcgaatcgtggtccgctcggcgccgtgggcgggaccttcagtgcatcctccctccggtacgaacccacttccagtttcgcaatagccacggtaacattgttgccagtttactccgagtttctggctcgggatcgtagagttgggcggctctgcaatggcgagactcgtcgggaattcgtcaccgaacctgggggcgccaccgcggagccacctgtaccgtgggcgggatatgtgggcgtactatatccag

SEQ ID NO: 108781 - DNA, 342 bp, Zea Mays
atgcagcaactcgtatcaaaataccaatcaccagaagcagcaggcagcaactcgccaactcggcaggaagccggctcggccagccaggaccccaggtctccagcaactggcgtttggcactttgacggacagccctgctgcagcaactggcacctgcggactgcggtctgccgtctggcgtcggtctcggtggcgtggcgtctccaagctccagcagctggcgtctggcgtctgggcggtctggtggacggccgcgcagtgccagcagccaattctccaatctccagccgccagggcgctacgccgctacgaataggcagccgaacaaccatggagttgtga

SEQ ID NO: 108782 - DNA, 1565 bp, Zea Mays
gtctgtgatcgtctgtggagggagccgtgcaccaggcaggcaggcaccgcacgaggcctccatttggaccaccgggaccagaacccgatcgggcacggcggagaacgcgagtacccaggctctaataatttgtacaaaaccgatggaaacttctaaatctcctcaatcgtcaaagaacagtcatattgtggtgccttctgatagtaatggcccccgatttgacaatgatggtttttcttcagaagctgcatcaaatcaaatggtcgttttcaactctgaagcaggagataaagagcaagatgaactgggggaaaaccgtttgcagaagtcaatcataacaaggggaatatcgccatctattggagcattcactgtccaatgtgctaaatgttttaaatggaggcttattccaacgaaagagaagtatgaagaaattcgtgaacgtattatagaggaaccttttgtatgcaaaagagctcgtgaatggagacctgatgtaacatgcaatgacccagaagatatatctcaggatggtagcaggctttgggctattgacaaacccaatattgcacaaccccctcgcggatgggaaaggcagattaggataagaggtgaagggggtaccaaatttgctgatgtatactatacctctcctactggaaggaaacttaggtctctggttgaagtcgataggttcctccaagagaatccggagtatggtgctcagggtgtaactttagctcagttttcgttccagatacctagacctctacggcaggactatgtgaaaaagaaaccgaagttgataaatccaagtgatgaagcaatgaaacccatagcctgggcagttgctacaaaacacgagggcgatgccagtgaagaagcttctctcaccgatgaggcacctacatcagaagtcatgctagcccggaagagaaaagcaggaagctctttgtcgatagagccaaaccatctctctgatgaacttgaaccaaagctggaggatgcttagaacggggagacgtctacctgataagtaaaagttagcagcatcgtgatgccaactgccccctatcatggttttattggccctctgcttgtttctcatttccctttggagccagtttctctgttttgcgaggtcacacaagccttatttgtagtattacaacacagaagctggctgacccaaaatccgacactctgggggcagcaacttaacaaaatgtttgtacgagggtttagagccccacggtgcttctttggataagtatgtttattaccttgtacttagctaggaacctgcttatatgtaagatctttgtgtacgacggagaattgtcacagcggcataattctggtgcatcttggatttaatctcctgttctttgttagaccggccagtaggcagtagcaaaggttttgaaatgtctcaagttatataactactgtggtattgctagtgtaattctctgagcatgttttttatttgatattgtgatccttgtatcttttaaagagctgttttgtagaactcaaggtgcaaagtctggttggtttagcta

SEQ ID NO: 108783 - DNA, 1601 bp, Zea Mays
gtctgtgatcgtctgtggagggagccgtgcaccaggcaggcaggcaccgcacgaggcctccatttggaccaccgggaccagaacccgatcgggcacggcggagaacgcgagtacccaggctctaataatttgtacaaaaccgatggaaacttctaaatctcctcaatcgtcaaagaacagtcatattgtggtgccttctgatagtaatggcccccgatttgacaatgatggtttttcttcagaagctgcatcaaatcaaatggtcgttttcaactctgaagcaggagataaagagcaagatgaactgggggaaaaccgtttgcagaagtcaatcataacaaggggaatatcgccatctattggagcattcactgtccaatgtgctaaatgttttaaatggaggcttattccaacgaaagagaagtatgaagaaattcgtgaacgtattatagaggaaccttttgtatgcaaaagagctcgtgaatggagacctgatgtaacatgcaatgacccagaagatatatctcaggatggtagcaggctttgggctattgacaaacccaatattgcacaaccccctcgcggatgggaaaggcagattaggataagaggtgaagggggtaccaaatttgctgatgtatactatacctctcctactggaaggaaacttaggtctctggttgaagtcgataggttcctccaagagaatccggagtatggtgctcagggtgtaactttagctcagttttcgttccagatacctagacctctacggcaggactatgtgaaaaagaaaccgaagttgataaatccaagtgatgaagcaagtatgattgcctctaagtcttttcaaccagaagaagtgaaacccatagcctgggcagttgctacaaaacacgagggcgatgccagtgaagaagcttctctcaccgatgaggcacctacatcagaagtcatgctagcccggaagagaaaagcaggaagctctttgtcgatagagccaaaccatctctctgatgaacttgaaccaaagctggaggatgcttagaacggggagacgtctacctgataagtaaaagttagcagcatcgtgatgccaactgccccctatcatggttttattggccctctgcttgtttctcatttccctttggagccagtttctctgttttgcgaggtcacacaagccttatttgtagtattacaacacagaagctggctgacccaaaatccgacactctgggggcagcaacttaacaaaatgtttgtacgagggtttagagccccacggtgcttctttggataagtatgtttattaccttgtacttagctaggaacctgcttatatgtaagatctttgtgtacgacggagaattgtcacagcggcataattctggtgcatcttggatttaatctcctgttctttgttagaccggccagtaggcagtagcaaaggttttgaaatgtctcaagttatataactactgtggtattgctagtgtaattctctgagcatgttttttatttgatattgtgatccttgtatcttttaaagagctgttttgtagaactcaaggtgcaaagtctggttggtttagcta

SEQ ID NO: 108784 - DNA, 1701 bp, Zea Mays
gtctgtgatcgtctgtggagggagccgtgcaccaggcaggcaggcaccgcacgaggcctccatttggaccaccgggaccagaacccgatcgggcacggcggagaacgcgacgaagcataaaataagccatcacaactgcatttaaagcaaggcttcccactgagccgaaggtcctgagttcgacacagtctctcttcaaaaaatacaggggtacccaggctctaataatttgtacaaaaccgatggaaacttctaaatctcctcaatcgtcaaagaacagtcatattgtggtgccttctgatagtaatggcccccgatttgacaatgatggtttttcttcagaagctgcatcaaatcaaatggtcgttttcaactctgaagcaggagataaagagcaagatgaactgggggaaaaccgtttgcagaagtcaatcataacaaggggaatatcgccatctattggagcattcactgtccaatgtgctaaatgttttaaatggaggcttattccaacgaaagagaagtatgaagaaattcgtgaacgtattatagaggaaccttttgtatgcaaaagagctcgtgaatggagacctgatgtaacatgcaatgacccagaagatatatctcaggatggtagcaggctttgggctattgacaaacccaatattgcacaaccccctcgcggatgggaaaggcagattaggataagaggtgaagggggtaccaaatttgctgatgtatactatacctctcctactggaaggaaacttaggtctctggttgaagtcgataggttcctccaagagaatccggagtatggtgctcagggtgtaactttagctcagttttcgttccagatacctagacctctacggcaggactatgtgaaaaagaaaccgaagttgataaatccaagtgatgaagcaagtatgattgcctctaagtcttttcaaccagaagaagtgaaacccatagcctgggcagttgctacaaaacacgagggcgatgccagtgaagaagcttctctcaccgatgaggcacctacatcagaagtcatgctagcccggaagagaaaagcaggaagctctttgtcgatagagccaaaccatctctctgatgaacttgaaccaaagctggaggatgcttagaacggggagacgtctacctgataagtaaaagttagcagcatcgtgatgccaactgccccctatcatggttttattggccctctgcttgtttctcatttccctttggagccagtttctctgttttgcgaggtcacacaagccttatttgtagtattacaacacagaagctggctgacccaaaatccgacactctgggggcagcaacttaacaaaatgtttgtacgagggtttagagccccacggtgcttctttggataagtatgtttattaccttgtacttagctaggaacctgcttatatgtaagatctttgtgtacgacggagaattgtcacagcggcataattctggtgcatcttggatttaatctcctgttctttgttagaccggccagtaggcagtagcaaaggttttgaaatgtctcaagttatataactactgtggtattgctagtgtaattctctgagcatgttttttatttgatattgtgatccttgtatcttttaaagagctgttttgtagaactcaaggtgcaaagtctggttggtttagcta

SEQ ID NO: 108785 - DNA, 1823 bp, Zea Mays
gtctgtgatcgtctgtggagggagccgtgcaccaggcaggcaggcaccgcacgaggcctccatttggaccaccgggaccagaacccgatcgggcacggcggagaacgcgagtaagcactcccatcctcaatccctcccctccgcggctccgccgtaaaccccgctgttcttcgccggagcactccctccccgttcccccgccgcccccggccccccgacctcgatatcttcggagcccgccgttgggggcctactgcatgctcaaatcgtagacactgggtcggggcgtggtagagatccgtccgggctcggatcgatttcttcgttcgctggtacccaggctctaataatttgtacaaaaccgatggaaacttctaaatctcctcaatcgtcaaagaacagtcatattgtggtgccttctgatagtaatggcccccgatttgacaatgatggtttttcttcagaagctgcatcaaatcaaatggtcgttttcaactctgaagcaggagataaagagcaagatgaactgggggaaaaccgtttgcagaagtcaatcataacaaggggaatatcgccatctattggagcattcactgtccaatgtgctaaatgttttaaatggaggcttattccaacgaaagagaagtatgaagaaattcgtgaacgtattatagaggaaccttttgtatgcaaaagagctcgtgaatggagacctgatgtaacatgcaatgacccagaagatatatctcaggatggtagcaggctttgggctattgacaaacccaatattgcacaaccccctcgcggatgggaaaggcagattaggataagaggtgaagggggtaccaaatttgctgatgtatactatacctctcctactggaaggaaacttaggtctctggttgaagtcgataggttcctccaagagaatccggagtatggtgctcagggtgtaactttagctcagttttcgttccagatacctagacctctacggcaggactatgtgaaaaagaaaccgaagttgataaatccaagtgatgaagcaagtatgattgcctctaagtcttttcaaccagaagaagtgaaacccatagcctgggcagttgctacaaaacacgagggcgatgccagtgaagaagcttctctcaccgatgaggcacctacatcagaagtcatgctagcccggaagagaaaagcaggaagctctttgtcgatagagccaaaccatctctctgatgaacttgaaccaaagctggaggatgcttagaacggggagacgtctacctgataagtaaaagttagcagcatcgtgatgccaactgccccctatcatggttttattggccctctgcttgtttctcatttccctttggagccagtttctctgttttgcgaggtcacacaagccttatttgtagtattacaacacagaagctggctgacccaaaatccgacactctgggggcagcaacttaacaaaatgtttgtacgagggtttagagccccacggtgcttctttggataagtatgtttattaccttgtacttagctaggaacctgcttatatgtaagatctttgtgtacgacggagaattgtcacagcggcataattctggtgcatcttggatttaatctcctgttctttgttagaccggccagtaggcagtagcaaaggttttgaaatgtctcaagttatataactactgtggtattgctagtgtaattctctgagcatgttttttatttgatattgtgatccttgtatcttttaaagagctgttttgtagaactcaaggtgcaaagtctggttggtttagcta

SEQ ID NO: 108786 - DNA, 1923 bp, Zea Mays
gtctgtgatcgtctgtggagggagccgtgcaccaggcaggcaggcaccgcacgaggcctccatttggaccaccgggaccagaacccgatcgggcacggcggagaacgcgagtaagcactcccatcctcaatccctcccctccgcggctccgccgtaaaccccgctgttcttcgccggagcactccctccccgttcccccgccgcccccggccccccgacctcgatatcttcggagcccgccgttgggggcctactgcatgctcaaatcgtagacactgggtcggggcgtggtagagatccgtccgggctcggatcgatttcttcgttcgctgcgaagcataaaataagccatcacaactgcatttaaagcaaggcttcccactgagccgaaggtcctgagttcgacacagtctctcttcaaaaaatacaggggtacccaggctctaataatttgtacaaaaccgatggaaacttctaaatctcctcaatcgtcaaagaacagtcatattgtggtgccttctgatagtaatggcccccgatttgacaatgatggtttttcttcagaagctgcatcaaatcaaatggtcgttttcaactctgaagcaggagataaagagcaagatgaactgggggaaaaccgtttgcagaagtcaatcataacaaggggaatatcgccatctattggagcattcactgtccaatgtgctaaatgttttaaatggaggcttattccaacgaaagagaagtatgaagaaattcgtgaacgtattatagaggaaccttttgtatgcaaaagagctcgtgaatggagacctgatgtaacatgcaatgacccagaagatatatctcaggatggtagcaggctttgggctattgacaaacccaatattgcacaaccccctcgcggatgggaaaggcagattaggataagaggtgaagggggtaccaaatttgctgatgtatactatacctctcctactggaaggaaacttaggtctctggttgaagtcgataggttcctccaagagaatccggagtatggtgctcagggtgtaactttagctcagttttcgttccagatacctagacctctacggcaggactatgtgaaaaagaaaccgaagttgataaatccaagtgatgaagcaagtatgattgcctctaagtcttttcaaccagaagaagtgaaacccatagcctgggcagttgctacaaaacacgagggcgatgccagtgaagaagcttctctcaccgatgaggcacctacatcagaagtcatgctagcccggaagagaaaagcaggaagctctttgtcgatagagccaaaccatctctctgatgaacttgaaccaaagctggaggatgcttagaacggggagacgtctacctgataagtaaaagttagcagcatcgtgatgccaactgccccctatcatggttttattggccctctgcttgtttctcatttccctttggagccagtttctctgttttgcgaggtcacacaagccttatttgtagtattacaacacagaagctggctgacccaaaatccgacactctgggggcagcaacttaacaaaatgtttgtacgagggtttagagccccacggtgcttctttggataagtatgtttattaccttgtacttagctaggaacctgcttatatgtaagatctttgtgtacgacggagaattgtcacagcggcataattctggtgcatcttggatttaatctcctgttctttgttagaccggccagtaggcagtagcaaaggttttgaaatgtctcaagttatataactactgtggtattgctagtgtaattctctgagcatgttttttatttgatattgtgatccttgtatcttttaaagagctgttttgtagaactcaaggtgcaaagtctggttggtttagcta

SEQ ID NO: 108787 - DNA, 1439 bp, Zea Mays
actacaagtacttccacattccaacaatcatcgcgcctccgtgcatgcaccgttgccgatcgtcgtcctcctccccactccccagaggccaagccaaaggtccagcaatggcgaggtctccccggcttctcgcgctgctgctggctgtcgtctggatatgcggcgcggccctagtagcgcgtgccgacccgatgctcgagaggttcgagcagtggatgggcaggcacggccggctgtacgctgacgccggagagaagcagaggcggctcgaggtgtaccggaggaacgtcgagctggtcgagaccttcaactccatgggcaacgggtacaggctggccgacaacaagttcgccgacctgacgaacgaggagttcagggccaagatgctgggcttcggacggcctcgcagcggaggcggagccgggcactccacagcgccgagcaccgtggcttgtattggaagtggactgatgggtcgtcagggttattctgatctaccgaaaagcgtggactggcgagagaagggagctgtcgcgccggtgaagagccagggggactgtggctcttgctgggcgttctccgccgttgcggccatcgagggcatcaaccagatcaagaacgggaagctggtgtccctgtcggagcaggagctggtggactgcgacaccaaggccatcggctgcgccggcgggtacatgagctgggccttcgagttcgtcatgaagaaccgcggcctcaccaccgaacggaactacccgtatcaagggctgaacggcgcctgccagacgccgaagctgaaggagagcgcggtgagcatctccgggtacatgaacgtgacgcccagcagcgagccggacctcctgcgggccgccgcggcgcagccggtgtccgtggccgtggacgccggcagcttcgtgtggcagctctacggcggcggcgtcttcacgggaccctgcaccgccgagctgaaccacggcgtcacggtggtcgggtacggcgagacccaaggggacacggacggcgacggtagcggcgtgcccgggaagaagtactggatcgtcaagaactcgtgggggcccgagtggggcgacgccggctacatcctcatgcaacgcgaagccagcgtcgcgtctggcctctgcggcatcgctatgctcccgagctacccggtcatgtgatccggcggctgccgccgtcgagacctacagctgcagctctaagaacaatcagtcattatgttggccatcttttgaacaaagggcgttcctctttcccgataagatgatgtcttatcttggcgatcgataaggttacagatagtacaacatttaagatcgtgtcaaaaacctggcagatttcatcagcaggagaaagaaatcaccacacgagtgcttaaacgatgctcataaatatcaggagaataaagtaacagaattacg

SEQ ID NO: 108788 - DNA, 91 bp, Zea Mays
ccgcgccatggttgcgcccgagccctcggacgccgggagggaagggggccatggaagggcagggagcgtcggtctgcgaactgggcgccat

SEQ ID NO: 108789 - DNA, 1088 bp, Zea Mays
atggcagaggagaagacgacaccggaaagcggagccacgaatccgttcctgtctgcacctcctcattttcacctccacccacccgactcggcggcctgcgctcgtccgcccgttcctcgccggcgccgtctcttccgcagaccggtccgtgggtcgagggagccgcttcttcctccagcttatggcagacagaagtgatggaccgattgggaggctcccagaacatcttattatagaaatactcattcgtttaccggtctatgagtgggtgcaattagcatgtgtcaacaagcattgggcaagcatatttcaaggagaatgcgtgtggcaaactgctattgcaaggaactggccatctgctggtctccggaaacgctggcctgggccaattcctagaggttctgctaggaggagatttcaagcactgtatgtcagtgagaacttagtaccatctggtggggagattgatgagcttgttggtcacacttatctctacttaaaagaacagcttgagcgtcctgtcatgcctccttccagcatacttcatggcaccatcattgaccaattcattgcttgcggcaatacaggagaaaaggcccatgatcttgcttcaaaaatatggcttgcagtcattgacagcttggaagaaaaccagcaaactttcttactgttaaaacgtgtggcacaagaaggagaatttttccttccgtttccatactccagatcatatagggtactatggagggtgtttgacaagctgttcaccgacttccgcgactgtttcagcggggctgagtaccatgatgttctatcgactgctaagtctaggtttcagccggtgccttccacatggcttggccattagcgcactgcagttgctcttgttgtgcgcactctacagtgtcgtagataaagcagtgatacttacagcagtcatttcgagtacatgtagcatcttgacagcttcaagagcattaaaatgttgtttgagatggaatactcagtgttcttgcaagtccttgaaagtaattcgatacactctgtcatttgcacagttacttcagtgtatatatactgcagtttcagca

SEQ ID NO: 108790 - DNA, 718 bp, Zea Mays
atggcagaggagaagacgacaccggaaagcggagccacgaatccgttcctgtctgcacctcctcattttcacctccacccacccgactcggcggcctgcgctcgtccgcccgttcctcgccggcgccgtctcttccgcagaccggtccgtgggtcgagggagccgcttcttcctccagcttatggcagacagaagtgatggaccgattgggaggctcccagaacatcttattatagaaatactcattcgtttaccggtctatgagtgggtgcaattagcatgtgtcaacaagcattgggcaagcatatttcaaggagaatgcgtgtggcaaactgctattgcaaggaactggccatctgctggtctccggaaacgctggcctgggccaattcctagaggttctgctaggaggagatttcaagcactgtatgtcagtgagaacttagtaccatctggtggggagattgatgagcttgttggtcacacttatctctacttaaaagaacagcttgagcgtcctgtcatgcctccttccagcatacttcatggcaccatcattggtgaggttttatgttccaacttgcacaagagtgaagttcatcgtttcttttctttcttggtattttcagtgacagtgtgtttccagtttaatgatgatagtggtcaaaggcacgccccaaagatagtatcatgcaatatcatgtcaactagtggaata

SEQ ID NO: 108791 - DNA, 1520 bp, Zea Mays
atggaagcatcagcagcagcaggaggtgggagagagtcgaacaagaaggaggaggagagcttgccgccgggcttcaggttccacccgactgacgaggagctcatcacgtactacctgcggcggaagatcgccgacggcagattcacggcgagggccatcgccgaggtcgacctcaacaagtccgagccgtgggatctcccggagaaagcgaagctcggagaaaaagagtggtatttcttcagcctaagggaccggaagtacccaacaggcgtgcgaacgaaccgcgccactaacgctggttactggaagacaacggggaaagacaaggagatctacaccgccggtcatcagctacctgctgcagccaccacgccggagctagtagggatgaagaagaccctggtgttctacaaaggaagagctcctcggggtgagaagacgaactgggtcatgcatgagtatcgcctgcactccaaatcactccccaaatctaacaaggatgagtgggtggtgtgccgggtgttcgccaagagcgccgccgcaaagaagtacccgtccaacaacgcgcacgcgcacgcgcggtcatcgcaccaccacccgtacgcgctggacatgttcccacccctcctgcccacgctgctccagcatgaccccttcgtcgcgcgccgccaccaccaccaccacccgtacatggccccggcagacctggccgagctcgcgcgcttcgcccgcggcacgccggggctgcacccgcacatccagccgcaccccgggacgtcgtcgtcggcgccgtacatgaaccccgccgtggctgcgccaccgttcacgctctctggcggcggccgcctcaacctcaacctcggcgccacgccggccatgccgtcgtcgccgccagcactccacgcgatgtcgatggcgatgatgagcggccagacggagccgagctgtgccagcaccggtaggcaatatcatcaggtgatggcaggtgaacaccaccagcagaagcagatggcgacggcggctgcggcggggctcggcggctgcgtgatcgtgcccggcgcggacggagggttcggcgcggactcggcggccggggcccggtaccagggcttggacgtggagcagctggtggagaggtactggcctgccggcgggtaccaagtctagctagtagctgtggatcggagtagtggcgtggcttggcaatggcatgcatgcagccgacaaacgtaacaacgacgtaatgttggtgtatggatcatgtaggtcggtaggatttgatgtgtcaatttagtccgttgtttgtatcagtagctggaaattatcctctcttttttttcagttttttgttgggggctcttggcttgtagagatcggagcagcataggttgacagcatgcatgtcatgtgcaacaaaaacaggcttggtactgatcgagctcatacagggatctagataagagtatggggtgtactcgtccgtgtgatagtttctgataaacgtgtatgttttcttcaaa

SEQ ID NO: 108792 - DNA, 693 bp, Zea Mays
atggacgagtacaccgtcgggtggcacgcgtccggcgtcccgtacgcgccgctgcagcagtacctgtcctgcccgaacgcctcgcacgcgctccggcaagcgatggcgccgccgccgcagtccacctgcagctccgtcgggcacgctgccgaaacgaaagccacgtacggtcagtcggccggtaaaggctgtctttggagtagagtagggagtagggacccgacagctagcggcactgcactcacagcggttcaggtcggccatgcatccggtggcgttgcacgcgccctggcgcgcccgcgggatcgcgacgaccgggaggttgtagccgtcgacgaggctcacgtcgtagaagtccagctggccgccgccctgccccagggtgacctcgaacagcgtggccggcggcgtggcgccggacccgcggcactccacccgcccgccgcagtcgcccgtctggcacacgcccgcgccttccgcgtcgaacacgcaccctgtccgcgcccatatccgccccgaccaccccgccggcgccgcgagctgggccgtctgcccaggctccagcttgaaccccgtcgtggaaagctgcgacgtgccggccccggcgagcgtccccggccatatcgggtgggggcagtagttggagatagtgaacgtcatggccaccgagacgtggtgccactgcacgagcac

SEQ ID NO: 108793 - DNA, 1753 bp, Zea Mays
ccagcgggcggccgcgggtacaagatccccaaagtagcgccgaaccggcgcccccgcgtgcggagcgtgcttgcctcgcactgtcacagtcgtgcactccctgtccccgtggactgtggagagtttctgtcggtggtcgccccgcttcatctgtctcatcttccccagcgcagcccctcccccctgtagcctgtatccgccccccacactctgcgtctgtagtcttctttctcgcgtcggcagtcagcttggcagggccgaaccaatggcggtcgacccgcggcaggtggtggcgggcttcctcaccctctccatgttcgtcatgctcggcaacatgatcaagcacgaccacttctctcccgtcaccgaggagctgggcttcgaggcaacaggtgtggtgtcgaacacaaggaagcttgacaacgatgctgaaatgagcagcgtcgatacggctggagtggaggacctgatggacgctgtcgaggaagttaaaccttgctggaccaaaccaagtccaaaaaatcagccgtctaatggttttgttacattctccttgactatgggccctgagtatcacatctctcagatcacagatgctgtggttattgcaaggtatctaggtgcaacacttgtactcccagacatcagaggaaatgaattaggaaataagcgaaaattccaagacatttacaatgtggataagttcgtgaggagcctggatggtgttgtcgaagtaatagaggatatacctgatgaagtgagtgctaagaagccagcagtcatcagagtaccgaaccgtgtgactgaaagcttcatcacaggcaccatccagcccatcttccaaaaaaacaagtacttaagactagcggtcattttctcttccgtaagtttaaggccaaaggagacgaacaacaaggacatggacgcaactgcttgccttgcgatgttcggtggcctcgagctgaagcacgaatattctgaggtggccagaaaaatgctggataggcttcaagaattaagcaagaagtcagatgggaaggtcttggcgatcgatttgcggaccgacttgctggaaaagaagagttgcaagacaacccgcggcgctcgaagaaaaggctgttatagccctgatgaggtcctggctttcctgaggagtgttggcttctctgctaacacaaccatctacttgacagagacgtcgtggtacaaaggcctggatgttctgaaggaagaattcccaaacacttggtataagggtgacattatgccagccgagaacaaagctgaattcctgaaatccagcaatgcagacctagcaagggctctggaccttgagatctgttcgcagagcgacgtgttcgtccctgccgtcgctggcctgttctacgggcatgtcacgggtaagaggatcgcgtccggacgcacccagatcgttgtgccttcccagtccagcacctcgacacatgcgtcagacttcatctccacctacatctccaacaagaaccaccttgcctacgcgtgctactgctaagcatccttttgtacggccgttaataagatcagctgaagggaaagtgctctgggtgcatatacaagtacctctcgtggacatgaatgatgttgtacactagctaatgttttgttatgaggaatattagcatacgactgtgtgttggttacttgtttggatattaaactctggaacagcagcaaggagcatatactgcacaataaaatgaaactaattaataaa

SEQ ID NO: 108794 - DNA, 889 bp, Zea Mays
atggagtgcccgactgcccgaggggatcctgttcctgaggcaagggcactgaaagtaacaaacaacccatgtgatgtgagggagccttttcagctcccagcttcccctgtgtctctctcccaacttccccagggaggagcagtaaaccagaggagagaaaagaaaagatcgagggggaagaccggaagaagaagaagccaagaactcggaagaactctccaagaaatcgaccgagcctggaggaaagccggtggcaaaggcaaatcacggccggatcgatcgcggcatcacgatacccggatccgcttcttgggggacagcgaccggaagacggtggagaggtcgcgcgggacggcgacgaacacccgcacgggcgcgggcggcggcttccgcttggcgggcagccgcggggccggcggcttgcgcggcgccggcgggcacacggcgggcgaccgcagcctgctcccctccgacgtcggcgtcgacggctcgcgatcctcttcctccgcggccttcgcgctgtccaccgccgacgacgccggcgacggagaggacgaggccgaggccgaggccgaggacgtggccgtggcggacgacggcaccgggggcggcagaggtgtagtcttgatgggcggcaacccggggagatcctcgtcgacgggtgacgccattatctctccccgctcgaattaccgacggacttattcaacggcgctgtaaattgggatcgagttctcctcgttggtggagggggtgcaattgcacgaggtgggtagagagagagagagggagagagagtaaggttggggcggtagcgcgaaggctgttaaatagcggcgctcttctaccttcttcgatggagaagggagacagagagagagaggaggag

SEQ ID NO: 108795 - DNA, 723 bp, Zea Mays
caaggatcaagattctcatgcatgtaattttgcattaaccttggttattcataaagctgtcatctttttttagtttgatggccaataatgtgtgtttttctccactaacatatttgaatctatgttcaatcaagttctcaaaaagaaagaagaagaggaaagaaaaactggtatccaaccagtcaagaaaattgggaaagctgaatctccaaatctccaaagtttcgtgaagcagcagttctcgggtactcctccagatcagcagaaaggacctgaggataggcctaaggacacaactcatacagaagatgctacgacagacaatgagaggtatactgaaccaacgggaactggtgccactttcaagccagggacttggcagccaccaacatgaatgccaacatgaactttagaagatgaaggacggtgtaccggagcattttcctttcacctatctgtgtaacattttaacatttgctctgaaagaatcactagcctatgttccttctttcagatggttacccatctgatggagttatagccttaagttccttcttttagatgcttacccatctgatggagttataggtgatcgggggctcccacggtatgctgttttttttgtggctaaattgtcctctgtaatctttactgtgatagcaactgtaataaactggaccagtgttttgcatcagggctctcttagagacactgttcaacata

SEQ ID NO: 108796 - DNA, 1013 bp, Zea Mays
agacacccatactgattcgctggcggcaggccgacggctacggagacggaagtggcgaccggttccggcgaggcgcaggcgacagataggggacagggcgaccatttctagcgaggcaggagcggggaagatccggaagctgcgatgtcgaagcggctgctgtcgcggctgctcggcatgttccaatcgcggacgcaggtgggcgtcgacaaggccggcaaccgctacttcacccgcgttgaggaggtcgacggcacaatgaaggagaggcgctgggtggagttcaagggcgcagaccaggactcgaccaccgttccagtcgagtggatttgctggctgaatggccaaaggaagaaagctccaacaccagaggaattggctgagctggaggcaagacgtgaacgtgtcaagcaaaacattcagcttctcaaaaagaaagaagaagaggaaagaaaaactggtatccaaccagtcaagaaaattgggaaagctgaatctccaaatctccaaagtttcgtgaagcagcagttctcgggtactcctccagatcagcagaaaggacctgaggataggcctaaggacacaactcatacagaagatgctacgacagacaatgagaggtatactgaaccaacgggaactggtgccactttcaagccagggacttggcagccaccaacatgaatgccaacatgaactttagaagatgaaggacggtgtaccggagcattttcctttcacctatctgtgtaacattttaacatttgctctgaaagaatcactagcctatgttccttctttcagatggttacccatctgatggagttatagccttaagttccttcttttagatgcttacccatctgatggagttataggtgatcgggggctcccacggtatgctgttttttttgtggctaaattgtcctctgtaatctttactgtgatagcaactgtaataaactggaccagtgttttgcatcagggctctcttagagacactgttcaacata

SEQ ID NO: 108797 - DNA, 1025 bp, Zea Mays
agacacccatactgattcgctggcggcaggccgacggctacggagacggaagtggcgaccggttccggcgaggcgcaggcgacagataggggacagggcgaccatttctagcgaggcaggagcggggaagatccggaagctgcgatgtcgaagcggctgctgtcgcggctgctcggcatgttccaatcgcggacgcaggtgggcgtcgacaaggccggcaaccgctacttcacccgcgttgaggaggtcgacggcacaatgaaggagaggcgctgggtggagttcaagggcgcagaccaggactcgaccaccgttccagtcgagtggatttgctggctgaatggccaaaggaagaaagctccaacaccagaggaattggctgagctggaggcaagacgtgaacgtgtcaagcaaaacattcagcttctcaaaaagaaagaagaagaggaaagaaaaactggtatccaaccagtcaagaaaattgggaaagctgaatctccaaatctccaaagtttcgtgaagcagcagttctcgggtactcctccagatcagcagaaagttaacactctaggacctgaggataggcctaaggacacaactcatacagaagatgctacgacagacaatgagaggtatactgaaccaacgggaactggtgccactttcaagccagggacttggcagccaccaacatgaatgccaacatgaactttagaagatgaaggacggtgtaccggagcattttcctttcacctatctgtgtaacattttaacatttgctctgaaagaatcactagcctatgttccttctttcagatggttacccatctgatggagttatagccttaagttccttcttttagatgcttacccatctgatggagttataggtgatcgggggctcccacggtatgctgttttttttgtggctaaattgtcctctgtaatctttactgtgatagcaactgtaataaactggaccagtgttttgcatcagggctctcttagagacactgttcaacata

SEQ ID NO: 108798 - DNA, 285 bp, Zea Mays
ccccaatttcagcttctagctcgcctccctctatccccatgccgagctcggtcctgtccatctcgccacgctcggtctctagctgcctgtgcgcacatcggtttatggtcgtggtgatattgtggtgtggcgacgtcgtgcgtgtcgcgacagctgtcgtggccgtgaggcagtccgcgccatagagttcgcccgaccacgatctcgctttactcctcgcgtcgtcgcttgccgagtcctttcccagtccgcgccataaaattcgctcagccacggtcccgtcaa

SEQ ID NO: 108799 - DNA, 85 bp, Zea Mays
atggcgagctcacccatcctctgctcgttcccatggccgtcgtgtgcagccgcgagctccagtcttcttctctgccccgcaatcc

SEQ ID NO: 108800 - DNA, 1676 bp, Zea Mays
gcctcggtcgcttcgctttcccccaaatccattgcagactcgagctcgcagtagacgagagacgacccaagacttcctcaccctccctttgcttcctgcgcaattcctgcggcagcgcctttgtttgtttcaatggacagcgactacattgccagcctgctcatgggctcatccgcccctgcactcagcttcgccgcgctggacgccgggttcctcgacacgctacgcggcggcggcggcgggggcctcttcggggtgcccgcggaggcagggtgtggcggcgggtctccggaggggtcgtcggtgtccgacccagcgtgggcgcgcgctagggactacggcaatgccaggaaacgcaaggcgccgcccacggggtccgccggtggcaaggaggcctgcttgagcaaggttgcggaggccaagggtccggacgggaagaggtgcagagtagtgggtgccagcgacagtccggtgaagccgaaggaagaggaggaggaggcggcggcgagcgacgccttggttgaagtcaaagcgcagaagaagggcaaggggaagagctcgaagccggcagtcgaaccgcccaaagactacgtccatgtccgggcgcggcgggggcaggcgactgacagccacagccttgcagagagggttagaagagagaagattagccagaggatgaaatttctacaggacctagtgccaggatgcaacaaggtggtcggcaaggcactcatgctcgatgagatcataaactacgtccagtcgctgcagcagcaagttgagttcctgtccatgaagctcgccactgtgaacccagagcttgatttcagcaacctatcgacactcctgcacaaagacatgtaccaacagccatgtggtggcccttcggcaagttcggtctttccactggaaagcgccggcgcagcttttccattctgcgagcaggcggatcttttccacagctttggctcgggtggtagcggtagcggtagtggtatggaggatcagtgctctctaagcctgctgctagacacggctctgccccacgcggccagcccacagtttgcttttcaaaagcagcaaagggacttgtgggaggatggcctacagcatgctttgcctacccctactaccggtagcgagcaaaggcaggaggaggatgggcttttagtacccgacctttgatggccagttgcaagctgatcaggcgaaggctgagttctagcccgtccctggtgatctgcaagggctggtatttttgtacataggtggtggtggtaccaagacctgtgtgtgggctgtgtgtttcaagcagagctctcctctgctaagctgaccatcattagcgtttaggcctgcgactgcgactgcgagctgaaattcattccgtgatactgctgcacgtatgtcacatggcgactcgattcttgccccccatagagatcgtgcgacccatctcgtgaaaaattggagtaggtcgtgtgctaggtagatatggcgcaaatattacatgcgccatcatctgaagctgtactgattattactcctatgtaagaccgctggtggctggtactggaacgataccgtgtcatgtttgttgcattttttttctgatcttacgattatgacgaaagtgcaagtatatgaggtttctctcctttagcttgctttgctgc

SEQ ID NO: 108801 - DNA, 2077 bp, Zea Mays
cgtctttctcccaagccataaatcccggagcactgcccctcaatggtgagctgccagagaccgtcatttgctcggcctgccggcggagcgcggtggctacacggttacacctccgcccgctccgtcccgttttgaccgccttttctcccctctcctgcgcgagcgccgccgcagtataacccggtggtaacccaccgccgcaagcatcccaccgcgccgagctacgcgacggatgcggcgcgcggcccacaacccaaccgcagcggcaacaaccgctctataaagcaatcccccacctaccggttccgcggcctcggtcgcttcgctttcccccaaatccattgcagactcgagctcgcagtagacgagagacgacccaagacttcctcaccctccctttgcttcctgcgcaattcctgcggcagcgcctttgtttgtttcaatggacagcgactacattgccagcctgctcatgggctcatccgcccctgcactcagcttcgccgcgctggacgccgggttcctcgacacgctacgcggcggcggcggcgggggcctcttcggggtgcccgcggaggcagggtgtggcggcgggtctccggaggggtcgtcggtgtccgacccagcgtgggcgcgcgctagggactacggcaatgccaggaaacgcaaggcgccgcccacggggtccgccggtggcaaggaggcctgcttgagcaaggttgcggaggccaagggtccggacgggaagaggtgcagagtagtgggtgccagcgacagtccggtgaagccgaaggaagaggaggaggaggcggcggcgagcgacgccttggttgaagtcaaagcgcagaagaagggcaaggggaagagctcgaagccggcagtcgaaccgcccaaagactacgtccatgtccgggcgcggcgggggcaggcgactgacagccacagccttgcagagagggttagaagagagaagattagccagaggatgaaatttctacaggacctagtgccaggatgcaacaaggtggtcggcaaggcactcatgctcgatgagatcataaactacgtccagtcgctgcagcagcaagttgagttcctgtccatgaagctcgccactgtgaacccagagcttgatttcagcaacctatcgacactcctgcacaaagacgtgagcttgacccacacatcaatctccgatgctctgtacctgcacatcaaatccgcccttgacacacgctattttatcctggttaattcagatgtaccaacagccatgtggtggcccttcggcaagttcggtctttccactggaaagcgccggcgcagcttttccattctgcgagcaggcggatcttttccacagctttggctcgggtggtagcggtagcggtagtggtatggaggatcagtgctctctaagcctgctgctagacacggctctgccccacgcggccagcccacagtttgcttttcaaaagcagcaaagggacttgtgggaggatggcctacagcatgctttgcctacccctactaccggtagcgagcaaaggcaggaggaggatgggcttttagtacccgacctttgatggccagttgcaagctgatcaggcgaaggctgagttctagcccgtccctggtgatctgcaagggctggtatttttgtacataggtggtggtggtaccaagacctgtgtgtgggctgtgtgtttcaagcagagctctcctctgctaagctgaccatcattagcgtttaggcctgcgactgcgactgcgagctgaaattcattccgtgatactgctgcacgtatgtcacatggcgactcgattcttgccccccatagagatcgtgcgacccatctcgtgaaaaattggagtaggtcgtgtgctaggtagatatggcgcaaatattacatgcgccatcatctgaagctgtactgattattactcctatgtaagaccgctggtggctggtactggaacgataccgtgtcatgtttgttgcattttttttctgatcttacgattatgacgaaagtgcaagtatatgaggtttctctcctttagcttgctttgctgc

SEQ ID NO: 108802 - DNA, 1654 bp, Zea Mays
cgtctttctcccaagccataaatcccggagcactgcccctcaatggtgagctgccagagaccgtcatttgctcggcctgccggcggagcgcggtggctacacggttacacctccgcccgctccgtcccgttttgaccgccttttctcccctctcctgcgcgagcgccgccgcagtataacccggtggtaacccaccgccgcaagcatcccaccgcgccgagctacgcgacggatgcggcgcgcggcccacaacccaaccgcagcggcaacaaccgctctataaagcaatcccccacctaccggttccgcggcctcggtcgcttcgctttcccccaaatccattgcagactcgagctcgcagtagacgagagacgacccaagacttcctcaccctccctttgcttcctgcgcaattcctgcggcagcgcctttgtttgtttcaatggacagcgactacattgccagcctgctcatgggctcatccgcccctgcactcagcttcgccgcgctggacgccgggttcctcgacacgctacgcggcggcggcggcgggggcctcttcggggtgcccgcggaggcagggtgtggcggcgggtctccggaggggtcgtcggtgtccgacccagcgtgggcgcgcgctagggactacggcaatgccaggaaacgcaaggcgccgcccacggggtccgccggtggcaaggaggcctgcttgagcaaggttgcggaggccaagggtccggacgggaagaggtgcagagtagtgggtgccagcgacagtccggtgaagccgaaggaagaggaggaggaggcggcggcgagcgacgccttggttgaagtcaaagcgcagaagaagggcaaggggaagagctcgaagccggcagtcgaaccgcccaaagactacgtccatgtccgggcgcggcgggggcaggcgactgacagccacagccttgcagagagggttagaagagagaagattagccagaggatgaaatttctacaggacctagtgccaggatgcaacaaggtggtcggcaaggcactcatgctcgatgagatcataaactacgtccagtcgctgcagcagcaagttgagttcctgtccatgaagctcgccactgtgaacccagagcttgatttcagcaacctatcgacactcctgcacaaagacatgtaccaacagccatgtggtggcccttcggcaagttcggtctttccactggaaagcgccggcgcagcttttccattctgcgagcaggcggatcttttccacagctttggctcgggtggtagcggtagcggtagtggtatggaggatcagtgctctctaagcctgctgctagacacggctctgccccacgcggccagcccacagtttgcttttcaaaagcaggtagaaatgtttgcccgaggaatcagcaatctgtatagctagttaatggctgtcaatatggatcttataacagttctggcatatttctcagcaaagggacttgtgggaggatggcctacagcatgctttgcctacccctactaccggtagcgagcaaaggcaggaggaggatgggcttttagtacccgacctttgatggtatgtgagtgatggacgatcaattgaagcgcgcaccattcgggagattaccattatttgactgat

SEQ ID NO: 108803 - DNA, 1511 bp, Zea Mays
atggatgatactcctgttactaatgtcgatgatgtagaattcacctttgcagagaggccacaaacagatactttagaagattttttttccatacagaagactaatgggttcactaaagaggaagtctgcaacaagcatattgtccctgagatccgtacagaagatcagttttctaccagtcagaaacatgatactttactaatgaatcaagcatcttctgtcaaaaatccatttaatctagatgatgacaagaatgatgacttatttgaacttcccactaagagttgccttttggaggtacaaaatgttgttgaatcggttgactctacatccctaatggtggatcaaccaacagtctctaaccaaactaggatggctgaagttcaacaatgccataactcaaggatgaataaggtacgacataaagattatgttgaagaacagccacaagctagcgacacaaaggagttgggtgtagtacagaacatagaaaattttgaagaaaataagctgattgaaggcaccgatacagggatgaatgaggtgcgacagacagattatgtcgaagaaaaggcacaagctagcgaaacaaaggagttgcgcgcagtacagaacatagaaaattttgaagaaaataagctggttgaaagcatcggtgcagggatgaatgatgtgcgacagacagattatgtcgaagaacagacacaagctagtgacacaaaggagttgggcacagtacagaacatagaaaattttgaagaaaacaagctgattgaaggcgctgctgcagggatgaatgatgtacaatagacagattatgttgaagaacagacacaagctagcgacacaaaggagttgggcgaagtacagagcatagaaaatttggaagaaaataagcagactgaagatactgatgcaagggagactaacgcacggtttaatgcaaatgacgttgaacacaaaacgcagactgcaaaggagatggctgcagcagaaagcacatgtagcgttgaagagaagcagccactaaacatcatggttggccaagatggaggcaacaacaagctgaatgaagagattgcatcgacaggtgcccagctgaatccaggaagagttcgtgtcccgctgaaggtcctcctcgccgaggcaagcatggagaaccaagtgaagagacccagcaccaaggcacgagtgatgtcgttccggcgccgggtgaccaaggacagcagcttgtcaatgaaaccggggtcacccaaatctggctctgacgaccaccactggagctccccagccaaactgtctcgtaaggacgttgacaagagttccgaagaaaagaagcagccgtggatgccgtttatctgttgccactccgcgcgctgatgcccccttctctccatacagtatattgcagtacatgttctgctgtaactaatgctatccgtctctgtgtagatagtctgcgaccaaaatgggtttgagatataatctagtattagatatattgactcagt

SEQ ID NO: 108804 - DNA, 519 bp, Zea Mays
atggagaccgacgacaagcgtcacggcggcaaggaggcggcggcgctcagcgggggccacctttgccatgtctgcgggtaccagtacccaaacccgcaccccagcgccaagcttcgccgctcccaccgcaagcactgcggtaaggcgcggccggcggcggccgaggccgaggccttggaggaggttgaggaaggcgctgtgggggtcggggttcgcgtggtgggcgagcgggaggacaggcccggccaccgcaaccgcattgcggccgggcggacgctgctcggtcgggaaggaggacgacagagagaggagactggcacgggcgaggccaatggagaaggcgaggcgtcgcgcggatttgcggggcaagttgacagttccgtggaggacaaggtggttgcagcagattgtggcagcttgtgcctttttgttgtttttgcccgtactgcattttgcgatacattgaaaagggtaaaagccgcaaaaggtttggctgcctcccccctgttccctggttga

SEQ ID NO: 108805 - DNA, 1416 bp, Zea Mays
ccggagggtggaccgtggaccctattcacccaattgaaaggaagaagcgctccctacccaccgcggttgccccctttcggcctttccccttctcgatcgaactcgggtccttcggcgacgtgcggatttttcgtccctcccgatgctcccggggtgcgtggattgactaccggtgttgatttggcgaggcaatcggcggggagggagggggtattaatttcgatcgctgcgccgattccccggtccttaggttcattgtgaagctgaggtgagtatataggcataaagagagcatgaacactgttagtggtacaaagcgtgcaccaaggagacagtcgcaagatgggtctggtgataaactagtggtgatcgtggaagcaagctcccggggggtggggagccgtcgtggaccacatgcccctattcctggcgccctaaactcacccattgatgtggaggccatcgaagatgaagttcaggcagtatctccttcgcgagtgcccctgccatgtattctgcagaggaggaacaggagaaccaggagggaacctataacagtggttgacttggaggttgaagctagccgggaagggagcaaacgccagagggttgaaccagtaggacgtcacctctatccagattggggagcaaggtctagcttgcagtcaaatgccgcacaaaccagcaaagagcctgccaaggaggtccccgaggaaccatcttttacctgcccaatatgttggaataagatggaggagccttccacgacgacttgtggccatgtcttctgcgacacgtgcatcaagcaggccatcaaggttcagaagaaatgccctacttgcaggaaggggctgaaaatgaatagtgttcatcgtatttaccttccgaacggttctagttaagctgagcagctttacatatctgatggcttgtaactttgggggcaattagcttaacctctgttatccgatacatgccgactggctttgtcaaagaaacttctggtaacgtaaggctgtgcaatgtactgtgaggatcagaaattcttagcctgaacaacagatagatgtttcatcccagtctgtattatttatcggcatcaccaggagttcatcatgagaacttcctgactagggaagtcgatatcagcctcagttttactctgcatccatggttcccagaatgttttgttaggatgtgaccataagatgatgcatataaccgtgcaaaacattattttgcaccctattatgtattatttatatcctattatgtattatttatatagtagagttgtaaaatataaatgatgagtaaagctgctgaagatagccttatatatattgggttattgtcttgggggattattgtaactgggatttgcttcgttctaaaacgataatagcgagttgaaat

SEQ ID NO: 108806 - DNA, 1404 bp, Zea Mays
ccggagggtggaccgtggaccctattcacccaattgaaaggaagaagcgctccctacccaccgcggttgccccctttcggcctttccccttctcgatcgaactcgggtccttcggcgacgtgcggatttttcgtccctcccgatgctcccggggtgcgtggattgactaccggtgttgatttggcgaggcaatcggcggggagggagggggtattaatttcgatcgctgcgccgattccccggtccttaggttcattgtgaagctgaggtgagtatataggcataaagagagcatgaacactgttagtggtacaaagcgtgcaccaaggagacagtcgcaagatgggtctggtgataaactagtggtgatcgtggaagcaagctcccggggggtggggagccgtcgtggaccacatgcccctattcctggcgccctaaactcacccattgatgtggaggccatcgaagatgaagttcaggcagtatctccttcgcgagtgcccctgccaaggaggaacaggagaaccaggagggaacctataacagtggttgacttggaggttgaagctagccgggaagggagcaaacgccagagggttgaaccagtaggacgtcacctctatccagattggggagcaaggtctagcttgcagtcaaatgccgcacaaaccagcaaagagcctgccaaggaggtccccgaggaaccatcttttacctgcccaatatgttggaataagatggaggagccttccacgacgacttgtggccatgtcttctgcgacacgtgcatcaagcaggccatcaaggttcagaagaaatgccctacttgcaggaaggggctgaaaatgaatagtgttcatcgtatttaccttccgaacggttctagttaagctgagcagctttacatatctgatggcttgtaactttgggggcaattagcttaacctctgttatccgatacatgccgactggctttgtcaaagaaacttctggtaacgtaaggctgtgcaatgtactgtgaggatcagaaattcttagcctgaacaacagatagatgtttcatcccagtctgtattatttatcggcatcaccaggagttcatcatgagaacttcctgactagggaagtcgatatcagcctcagttttactctgcatccatggttcccagaatgttttgttaggatgtgaccataagatgatgcatataaccgtgcaaaacattattttgcaccctattatgtattatttatatcctattatgtattatttatatagtagagttgtaaaatataaatgatgagtaaagctgctgaagatagccttatatatattgggttattgtcttgggggattattgtaactgggatttgcttcgttctaaaacgataatagcgagttgaaat

SEQ ID NO: 108807 - DNA, 1307 bp, Zea Mays
ccggagggtggaccgtggaccctattcacccaattgaaaggaagaagcgctccctacccaccgcggttgccccctttcggcctttccccttctcgatcgaactcgggtccttcggcgacgtgcggatttttcgtccctcccgatgctcccggggttcattgtgaagctgaggtgagtatataggcataaagagagcatgaacactgttagtggtacaaagcgtgcaccaaggagacagtcgcaagatgggtctggtgataaactagtggtgatcgtggaagcaagctcccggggggtggggagccgtcgtggaccacatgcccctattcctggcgccctaaactcacccattgatgtggaggccatcgaagatgaagttcaggcagtatctccttcgcgagtgcccctgccaaggaggaacaggagaaccaggagggaacctataacagtggttgacttggaggttgaagctagccgggaagggagcaaacgccagagggttgaaccagtaggacgtcacctctatccagattggggagcaaggtctagcttgcagtcaaatgccgcacaaaccagcaaagagcctgccaaggaggtccccgaggaaccatcttttacctgcccaatatgttggaataagatggaggagccttccacgacgacttgtggccatgtcttctgcgacacgtgcatcaagcaggccatcaaggttcagaagaaatgccctacttgcaggaaggggctgaaaatgaatagtgttcatcgtatttaccttccgaacggttctagttaagctgagcagctttacatatctgatggcttgtaactttgggggcaattagcttaacctctgttatccgatacatgccgactggctttgtcaaagaaacttctggtaacgtaaggctgtgcaatgtactgtgaggatcagaaattcttagcctgaacaacagatagatgtttcatcccagtctgtattatttatcggcatcaccaggagttcatcatgagaacttcctgactagggaagtcgatatcagcctcagttttactctgcatccatggttcccagaatgttttgttaggatgtgaccataagatgatgcatataaccgtgcaaaacattattttgcaccctattatgtattatttatatcctattatgtattatttatatagtagagttgtaaaatataaatgatgagtaaagctgctgaagatagccttatatatattgggttattgtcttgggggattattgtaactgggatttgcttcgttctaaaacgataatagcgagttgaaat

SEQ ID NO: 108808 - DNA, 1280 bp, Zea Mays
ccggagggtggaccgtggaccctattcacccaattgaaaggaagaagcgctccctacccaccgcggttgccccctttcggcctttccccttctcgatcgaactcgggtccttcggcgacgtgcggatttttcgtccctcccgatgctcccggggtgcgtggattgactaccggtgttgatttggcgaggcaatcggcggggagggagggggtattaatttcgatcgctgcgccgattccccggtccttaggttcattgtgaagctgaggtgagtatataggcataaagagagcatgaacactgttagtggtacaaagcgtgcaccaaggagacagtcgcaagatgggtctggtgataaactagtggtgatcgttgtattctgcagaggaggaacaggagaaccaggagggaacctataacagtggttgacttggaggttgaagctagccgggaagggagcaaacgccagagggttgaaccagtaggacgtcacctctatccagattggggagcaaggtctagcttgcagtcaaatgccgcacaaaccagcaaagagcctgccaaggaggtccccgaggaaccatcttttacctgcccaatatgttggaataagatggaggagccttccacgacgacttgtggccatgtcttctgcgacacgtgcatcaagcaggccatcaaggttcagaagaaatgccctacttgcaggaaggggctgaaaatgaatagtgttcatcgtatttaccttccgaacggttctagttaagctgagcagctttacatatctgatggcttgtaactttgggggcaattagcttaacctctgttatccgatacatgccgactggctttgtcaaagaaacttctggtaacgtaaggctgtgcaatgtactgtgaggatcagaaattcttagcctgaacaacagatagatgtttcatcccagtctgtattatttatcggcatcaccaggagttcatcatgagaacttcctgactagggaagtcgatatcagcctcagttttactctgcatccatggttcccagaatgttttgttaggatgtgaccataagatgatgcatataaccgtgcaaaacattattttgcaccctattatgtattatttatatcctattatgtattatttatatagtagagttgtaaaatataaatgatgagtaaagctgctgaagatagccttatatatattgggttattgtcttgggggattattgtaactgggatttgcttcgttctaaaacgataatagcgagttgaaat

SEQ ID NO: 108809 - DNA, 151 bp, Zea Mays
cgattggattaaagaaatcccttgtgaaccaagggtagaagtcgtgcttattgatgatgcttttgtggaaaggaagtggatggaatgcctatttcaaccggacgcatatctaggtgatgaggtaattcatgataactcaactagctaggag

SEQ ID NO: 108810 - DNA, 1685 bp, Zea Mays
cgagtcccgcccccccagaagtccgcgcctcgtggtggaaaacgggagcggcagggcgaaagcgtcagacgtcgcgaccctcccgtgcaggcgctgctaacgcgacgcgaccagccgagcccaaccagcgcgcggccgccaagtggcggccgtaaccgcgcacgacgcctctcgcgcctcgcctcgcctacaggctgcaggacaagaggaaaccggttgccaaaacaagagtggcgccggagcgggcagtggcacgcggtataaactggggtagcgggttgctgcgccaacaggcgtcgtcagcgggctcctccagtcccgagttggtggcgcgagggatggaggtccgggtgccgcggccgacgcgagagcgcggcatgacgctggccgagcagctcgccgcgtcgtccaacctccgcgacctactcaagctccgggacgacggcgtcggtggcagtgaaggggaagaccgccccgccacggcgccgaggcgccgcacgctgctcgacgccatccgcgacgcggacgagggccgccgccctcctgccgtggcctcccgccgtgccaccgccgtgcgccccgcgccaggcggcacggccaccgcggcgccggcggccgccgcgcgggggcagagccagagggtgtccctgctggcgctgctggagcgggcggagcagcagtgggcgtggaggcgcgcgggtgcggaggaagcggcgccggaggaggagggggaggaggaggagaagggcggcggcgtgggcggtcggtgctgcgtgtgcgtcgcgcggggcaagggcgccgccttcgtcccctgcggccacaccttctgccgcgcctgcgcgcgccaggtccgcgccggccgcggccgctgcccgctctgcaacgccaccatccgcgaggtcctcaacctcttctgattccgttccgacacctccgctgcctgcctactgcattgcatatttgcattcgacgatcgattccacaagtcatccggtgtacataagacctctgttttttttttgttttgtttcccttcttttgctccatttcttgtttctccttgttggactcgaacgagattcaacacaacaacacatgtactagtacttctgagtatggatcgaattgaatcctgcaatccccaggacgccgtgctattgtagcaaagatctctctcggtccaaatgagaggagaggcgtcactgcccggcatcgagcagtacacgcgcatcgatcatccgagtgtcgtgcgccgcccgccaggccgctggacagactcgaactgcactgaagtctgtgatgtcacgagcagagaaagataagcggcgggcgacgagtcaaagtgctgagttgcaggcgccacctgcctgcccacctgaacacgttaggccgatgttgactcgctcggccgaaccgaacagctttgtgccttcttccaaaagccattcaggcgctggcatggcggcgccgtcttcggctctgaaccttgctcgcctttcaccttgatgccatccatccacccctcgccgcccccaacaacaatcatcccgcgccccgagccgagggacaaggcgcgggacgggccgtcggcgaggtcaggcccgatcggtgcggcgaccccggccggagccggacagagacagacagagacagggttgtctttggggacggcagacacggacggg

SEQ ID NO: 108811 - DNA, 831 bp, Zea Mays
gtattttctgttattacctgcaggtgtaaggtgaacaactccagcacttatcgtctagttggcgttgtcgagcacttgggaaccatgacgtcaggtcattatattgcatacgcgagagcttgcaagattggaggtcggcagcagcagagcagtggctcaaagtcttggttttacgcaagcgatgggcaagtcagagaagcctctctggaggaggtgctaaactgcgaggcctacattctcttttacgagagggtgggcgactaagacaagctctgtgccagcctgctcttcagtcagtcagtcatttatcagagcaagatcactggggggggggggggggggggtggcaaactgggaattgaagacaacattttttttgtgggcacagcccaatgagtttgcatactaatgtagctacccaccaagtccattctgttccttcgaccgagtcattccatggcccgaggtggctccattaccattcatctgctcggtcgaagagattttcgcaattggacttgcacagcagaactgttcatactcgcctacatccattctttcttttcccccctttttggcctttgaagaacatagctggtggtgcggggattggtcaaaattggcagggtttttttgtcgaacggttcatggtcagcttgagacatttcttcggcatgtggatgcccctagattttgagtgatgggggcactgtaaaacggctttaggagctatcctgtagttgcaacaatcgcagtcgttttcacacagcgtcgcccgaagtgattgtatctgagagatgtttatatatatgatcagattcttttttgtta

SEQ ID NO: 108812 - DNA, 519 bp, Zea Mays
tcagcaactcctgcttgcttccctgccagtaggccaggcccagcacccttcacgtagtctcacaattacctattctcccttcgtctgctcttcctccccttcctctgttttcctctcctgttcttctgttcagaagtctggactatattgcttatttgcttatgctttggatcttggacttggatatggatatactcctgtgatgtggtatgctgctagtgcttggatagttgggtatggtactagggtataaactgctctgtctagtgagtggaggctgcatagactctaaaatggacagcataaaggtgcacatcaatgtatgtttgtcttactctaatgtaggtgagggtatgtgtatggtgttgcctcgcggttcaccttattcacttaggcgtctggaaggggatcagttgccacgcctcaacttactgccttaataaccatgctcaaatgttaagaacatataatcacattccagggtgctatgactattgataatcatattctatgatccca

SEQ ID NO: 108813 - DNA, 1419 bp, Zea Mays
gcgccaagccgccaaccccagtccgctccgcccgtgtaaaactccaaccgcgcatcgtcgtcgtcgtcggctgcggcggcggccgggcaacgagcctcctcgaaacgacgcgcccgctctcccacatgctgcgctgtcacgcgccaccgcaatgcggccgcgcgccgctccgccaccacggaaggtgggagtcgtctcccgcacccggggtggtggtgcggtgcacgcggggtgcgccgcaggtatccgggatcgaggcggcgtcgccggaccacgcagctgccacggcggtggcggctaaggcggaagggggtgacgcgcggcccagcctggccgagcggctgcgactggggagcctcctggaggacgggctctcttacaaggagagtttcatcgtgcgctgctacgaggtgggtatcaacaagacggccaccgtcgagacaatcgccaatctcctccaggaggtaggatgtaaccatgcacaaagtgttgggttctctactgatggcttcgccacaactactacaatgagaaaacttggacttatttgggtgacgaaccgaatgcacattgagatctacaagtacccagcttggggtgatgttgttgagatcgaaacatggtgccaagaagatggaaaaattggtactcgtcgtgattggatcctcaaggacctgtctactggtgaagttactggcagagctaccagcaagtgggtcatgatgaaccaaaatacacggagacttcagcgagtcagtgatgacgtgagggatgaggtgtttatacattgtccaaagactccaagattagcatttccagaggaaaataatggcagtttgaagaagattccaaatctttcagatcctgcacaatattcaagactaggactagtgccaagaagagctgatctggacatgaaccaacatgtcaataatgttacttacattggttgggtccttgaaagtatacctcaagatataattgatacacacgagttacaaacaatcactctcgactatagaagagaatgtcaacatgatgacatagttgattctcttacttacgtagaggaaggagaggagagaagcatgaacggctctgcttcctcagtgccgcacacagaacagcggcggcagttcttgcattgcttgagatttgcagccaatggggatgagatcaaccgtggccgtaccgtgtggaggaagctagctagataaaaagtggtttttggtcatcaatattctgctccattttgcttctcgcggttggcggcccttgtaccacaattttgtgatttggggtgcattctgccatgcatcgatggcgatttctgacatttcttgcagttgtaaccgtctgtccgttttgtaccggtggacagtgtctgtgcgatatgtaataacctgcgtttatccggca

SEQ ID NO: 108814 - DNA, 1429 bp, Zea Mays
ctcctctatataaacacaagcgaacggcggcacctgacgccccactaacagactgcagcttacttgtgaggccgagatactccagcaccatacgtccataccggtgcgggcggggagcccggggggtaggtctacgtagtcgtgggacgacgatgatagggtggggcgacgtgtacaaggtggtggcggccatggcgccgctctacttcgcgctggggctcggttacggctcggtgcggtggtggaagctgttctcgccggaccagtgcgatgccgtgaaccgcctcgtggcctacttcgccgtgcccttcttcgccttcgacttcgccgcgcgcatcgaccccttcgcgctcagctaccgggtcctggccgctgacgcgctgtccaagcttgccgtcgcgctcgctctcgctgcctgggccaccgcagcagcgtccgcgtccgcgcgccgtggcggcggcggcaagggcaaggacagagccctgtcgtggtgcatcacggggttctcgctcgccacgctcaacaacacgctcgtcgtgggcgtgccgctcctggacgccatgtacggcaagtgggcgcgcgatctcatcgtgcagatctccgtggtgcagatcatcgtctacttccccgctttgctgctcgcgttggaggccaggcgcgccggcaagctggccgtcgtcgcggaggaagctgcaggtgacgctgacgaaagcggcggcggcggctcgggtggcgggacgacggcggctcagtcgttatggccgctggtcacagcggtctggaagaaggtggcgaggaacccgaacgtctacgcgggcattcttggcgtctcgtgggcttgcgtcaccaacaggtggcacatcgagacgccgagcatcatcgagggctccgtgctcgtcatgtccaagacaggcgttggcctctccatgtttagcatggggctgttcatggcgctgcaggagaaggtcatcgtgtgcggcgcctggccaaccgtgctcggcatggcgctgcggttcgtggccgggccggccgccaccgccgccggggccgtggctctcggcctccgcggcgacgtcctgcgcctcgccgtcatgcaggccgcgctcccccagtccatcaccacgttcgtgttcgccagggagtacggcctgcacccggaggtgctgagcacggcggttatcttcgggacgctggcgtcgttgcccgtgctcatcgtctactacattgttctaggcttgatacggtgttagttaattagccatgaaacgagtagagttaccttcttttgtcagtgatgtaccccttattagtcgtcgtcagcaaacaattagaatattagctgcccatcaatgcaagcttgtgtgtttgctcttctgtaacaaataattaatggccactgtgcctgattccgggagggcagcgccagctt

SEQ ID NO: 108815 - DNA, 1013 bp, Zea Mays
atggctggggtgggggcgtctttggtggtgcggcgcggcagctcccggcggcgctttccggtggcagacagtcggttggagaccagtttcgtggccttcctcgtcttccatggctgtggtggacggtccgacggtgctggtggtgagcggcgggctggtggtgcgggtgttgctgctggcgccagtgagatgcgcgggctagatctggggcagtgggttggtgctcggcttgcccatctgtgctccgacctcccttcccgtgggcacgttccggcgccggcatcttggcggatccggccgaggaggatgacgagggtgtcgctgccgggggcaggcacaacggcgtgtttggcgggccgcaggttagctcggcgcgcggccatggatgcgtcggcttggagcggcggtgggccagcggggtggcccctgcggcgcctgctgtggtgcgctcgccagcaccttagatccgccgcgtcgcagctgctcctgtcagatctgactgacgggggtgcggcgccatttgtcgttggcggcgagttgcgtgacactcacgtctagcgtctgcttgcttcggggccacgtctgccagggccggcaacggttccggtgcgtggcagtgtgttgctcacggctcggtggtgctcggtttctgtgtgccttaacagaggggatggtggccgacggaggtgtgcggctgctgcgcagtcggcgcgtcgatgcccctctgcaagggtttatgtggggtttcaggacaatgacgatgtcggaggtcgcttgctttgatcagggtcttggcctgacattgtgctaggggctttttgggtaaaagacttgacgacggtgacgcccgtgggcgccgttgccctgttgagggcatcgcattcttcagcactgttttctatgggcgaaagcctggtccatctcggacatacgatggtggcgtccccaacgtcactcccttcctgaaggcgtcgcttttgtcggccacgacgtcgccctcggtttgttgcttt

SEQ ID NO: 108816 - DNA, 1903 bp, Zea Mays
gtacacaagctcgcctcgcaccagaaacccgcgaatcaatcccgaatcccgatcgaccggcggcgcgggaggcgatgccggacaaggcggtggacgacgtcatggaggccgcggtgggggcccacttcagcggcctccgcctcgaggcgctgcgcctctccacctctgcgccctcttccccttcctcctcccccgccgccgcggcgcacacgcactccaacggagccgtctacgccaacggcaccaccgagcttccctctcctgccgctgcccggcagccattcgtcatcggggtttctggagggacggcgtcggggaagacgacggtgtgcgacatgatcatccagcagctgcacgaccaccgtgtcgtgctcgttaaccaggattcgttttaccgtggccttactgctgaagagtctgcacatgcacaagactataattttgatcaccctgatgcatttgatacagagcaacttctagaatgcatggggcagctgaaatgtgctcaacctgtaaatgttcctatatatgatttcaagaagcatcgacggtgttctgaaagctttagaaaggtcaatgcatcagatgtcattattttggagggcattttagtgttccatgaccagagagttcgcaatctgatggacatgaaaatttttgtagacacagatgctgacattaggcttgctcgacgaatcagacgtgatacagttgaaagaggaagagatatcagctccgtgcttgaccaatatgggaggtttgtgaagccagcgttcgatgattttgttttgccttcaaagaagtatgctgacgtgatcattcctcgaggtggtgataaccatgtagcagttgatctgattgttcaacatatccgtacaaaacttggtcagcatgacttgtgcaaaatctatccaaatgttcatgttgttcaatcaacttttcagatccgaggaatgcatactcttatccgtgatagggacatcaccacacctgactttgtattttattcagatcgattgatccgtttggtagtggagcatggtcttggacatttgccatttacagaaaagcaggttattaccccaacaggatctgtttatatgggagttgacttttgtaagaagctctgtggagtctctattgtgcgaagtggtgagagtatggagaacgcattgcgtgcttgttgtaaaggaataaaaattgggaaaattctaattcatcgtgttggagacaatggacaacagcttgtttatcacaaactgcccatggatattgctgaacgacatgttctacttttggatccggtgcttggtacaggcaactcagtagcccaagcaattgaccttcttataagaaaaggtgttcctgaggatcggatcatttttctcaatctcatctcggctcctgaagggattcagtgtatctgcaagcgatttccttcgctgaagattgttacatctgaaatcgattatggtctgaacgaggaattcagggtgatcccaggactgggagaatatggcgaccgctacttcggcacagacaattgatggatcataccactctatggctgtgtgaagatctcacttggtccctggatagggatggtatcttgcaagtaatatttaatatggaggcgtaattgtgtttaatagtcggcatgccttagtaacatgtagaaccttctgcataaagcttgaccaaggacagcgggatgctagagaaggacctgtgaacggagaacgtggtgtgtgttttgtcttgtacgggtgcagaaacattgatgttttcaaataagtgtgtttgatccaaatactttacggtgaagtcatgagattaaatctgcaaagcactttaactctgttgttctattgggtttttaattccaacctacatcaacttgctc

SEQ ID NO: 108817 - DNA, 1256 bp, Zea Mays
agaggaacccaaaccacctcggccggtcggcccacgggccacgacccaaaaaaggatcaaggtgggagaaacaaaacacaaggcggcgtccgcagcttccccactccacgttccgtgtttccgactccggtgactccaccaccagcaacccgtgcagcgagcgcactccgaccatcgccatgtcgaggcgcggcgactgggtctacgagaacaacggcgggacctgcgtggccatcgccggcgctgattactgtgtcgtcgctgcggacacccgcctctctgtaggatacagtatcctcacgcgtgatcactccaagatctgcgaccttattgacactactgtgtggaggttgctaagctttctttgattattatgtactttatgagaaagatggttatcagctactccctccatttcaaattggctgacaaatgtgtactggcatcttctggctttcaaggtgatattaaggctctgcagaagaacctagctgccagagaattgctgtaccaacaccagcataataaaaggatgagctgccccgccatggcacagctcctctccaataccctgtactacaagcgattcttcccatattacgccttcaatgtgctcggtgggcttgacagcgaggggaaaggatgcgttttcacctatgatgcagtaggttcctatgagagaaccggttacagtgctcagggaacgggatctactttgatcatgccagtcctggacaatcaactaaaatcaccaagtcctctattactccctgtcagggatgctgtcacaccattgtcggagtcagaggccatcgatctagttaaggacgtgttcgcatctgcaactgagagagacatctacactggagacaagttggaaattgtagtcattaacaaggccggtactatgcgcgagtatatcgacctgagaaaggattaagccaacacttcagttgtgctgcagctgtcatttgctttgaactttttttcctagtctggtgatttatgtctaaagctgttgcttcataggaacacttgtgtttacttgcatatgtaatgtacggtatgtaccaggattcagtgagttttttttctgttgaaacaaattgcttggatactgaaacactgtatttattgcctgaattgtctattttagttttcgtatttggtaatttagggaccaaaatagaataaaatagagggactaaacattagtccctagaaaccaaacacctctattaaaattatttggtttc

SEQ ID NO: 108818 - DNA, 1161 bp, Zea Mays
agaggaacccaaaccacctcggccggtcggcccacgggccacgacccaaaaaaggatcaaggtgggagaaacaaaacacaaggcggcgtccgcagcttccccactccacgttccgtgtttccgactccggtgactccaccaccagcaacccgtgcagcgagcgcactccgaccatcgccatgtcgaggcgcggcgactgggtctacgagaacaacggcgggacctgcgtggccatcgccggcgctgattactgtgtcgtcgctgcggacacccgcctctctgtaggatacagtatcctcacgcgtgatcactccaagatctgcgacctggctgacaaatgtgtactggcatcttctggctttcaaggtgatattaaggctctgcagaagaacctagctgccagagaattgctgtaccaacaccagcataataaaaggatgagctgccccgccatggcacagctcctctccaataccctgtactacaagcgattcttcccatattacgccttcaatgtgctcggtgggcttgacagcgaggggaaaggatgcgttttcacctatgatgcagtaggttcctatgagagaaccggttacagtgctcagggaacgggatctactttgatcatgccagtcctggacaatcaactaaaatcaccaagtcctctattactccctgtcagggatgctgtcacaccattgtcggagtcagaggccatcgatctagttaaggacgtgttcgcatctgcaactgagagagacatctacactggagacaagttggaaattgtagtcattaacaaggccggtactatgcgcgagtatatcgacctgagaaaggattaagccaacacttcagttgtgctgcagctgtcatttgctttgaactttttttcctagtctggtgatttatgtctaaagctgttgcttcataggaacacttgtgtttacttgcatatgtaatgtacggtatgtaccaggattcagtgagttttttttctgttgaaacaaattgcttggatactgaaacactgtatttattgcctgaattgtctattttagttttcgtatttggtaatttagggaccaaaatagaataaaatagagggactaaacattagtccctagaaaccaaacacctctattaaaattatttggtttc

SEQ ID NO: 108819 - DNA, 285 bp, Zea Mays
tgctgcactgctggcagaagcgcatctcgcggccggcgacgacgacgacgggcgtcttggagtgcgcctcgcagaccttgtggcggcggtggtagtcgcggcacttgctcaggtcggccttgcagccgtccaccgcgcacgacgggcactgcgccccgccggcgccgccgggccccaagcgcgggcgcttcatcgggctggcggacggagctgcggttgcagccgccggctccttcgtggccgtgccgtccgccgccccgaactcgcctagcccgccgagcttga

SEQ ID NO: 108820 - DNA, 1008 bp, Zea Mays
atggagaaatggagaagacgcaggcacttgctgcttgctgttgcagccgtggccctggtggcagcaataacgctgccgtccgcggaggcgaagctgtccccggactactaccggtcgacgtgcccggacgtggaggcaatcgtgcaggcagtggtggccaagaaggtgaatgagaccttcgtcacagtcccggccacgctcaggctcttcttccacgactgcttcgtcgagggctgtgatgcgtcggtcatcatcgcgtcccgcgacaacgacgccgagaaggacgcgcccgacaacgtgtccctcgctggcgacggcttcgacaccgtggtgcgcgccaaggccgaggtcgagaagaagtgccccggcgtggtctcctgcgccgatatcctcgccatcgccgccagggacgtcgtcaccatgtcgtccggcccccactggaccgtccagcttggccggcttgacgggctcgtctccaaggccggcaacgtcgcgggcaagttgccgggacccaacatgcgcgtcaaggacctcgccgccctgttcgccaagcacaacctcaccacgctcgacatggtcgcgctctcgggagcgcacaccgtcgggttcgcgcactgcacccgcttcgcggaccgcctctaccaccacggcgtcggcgacagcgatggcgcgtcggtggacccgtcgtacaaccctgcgtacgcgcggcagctaatggacgcctgcccgcctggcgtcggcgcagacatcgccgtcaatatggacccaatcacaccgaccgccttcgataacgcctactacgccaacctcgccggcggcctgggattgttcacctcggaccaggcgctgtacagcgacggcgcgtcgcaaccggcggtgagggacttcgctaagaaccagacccgcttcttcgaggcgttcaaggacgccatggtcaagctgggcagtgttggggtgaagaccggccggcacggggagatcaggagtgactgcactgcattcaactag

SEQ ID NO: 108821 - DNA, 486 bp, Zea Mays
atgtcttctccaaatgaagctccattttttgtggctggtgagtatgacccgaagagcgatcctacccgaaagccacggaagtctactgatccagggtggaagtatggattttggccagatcttcaaaataaagataaggtggaatgcaccctatgtggtcaggttgttagtggaatgcaccctatgtgtgatcttacatgggaccttgtggataatgccattggagcatcacaagcactccgtggccgaaacttaccaagaagagctcataatgtgtattcaagaagaagttctgttgctgcacaacatatgtcagaggctgaagaggaaggtgaagatgaagaagatgttccacatgatgatgcagaaatcacagattgtgaagatgaatctaatggtggcaatgatggtgaagaaggggaggcacccaatatcccaggagagtttgatgatgattttgagcgacgggagagtagctattgctag

SEQ ID NO: 108822 - DNA, 606 bp, Zea Mays
gcaccgcacaggccctctctgccccctcgccaatcgccatggccatgaccgtggcggtcacctggctcccgtcgaccgcctcccgcgggagaaccttagccgctccgctccctccgttcgcgggccctatctccatccacatgccactgcgggcgccgcctcctattcccttccccacaagccgcgcctcgccgtcgcctccgcacagttcgatttctccagagctgttcaaacggtatggcgggtcggtaacgatgccgtggaggccggaagtaatcttgtcccaggttcagttccacgaccaattgctaggataggtgttgccgttgctgctgtgtcggttgcccttttccttcttaaatccattgtgtccactgcattgtttgttctggcaatgatgggcctcatatatctcggcttcctggctatgaacccaaaggaggcctccgactctaggttggatgaagcaacgggcgacccatcggaagaccaaattgaagaggcccgaaggataatggagaaatacaagtaatgaacctgcacaaaggtgttgtactctcagaggtatgatttgtctgtagtttccttacatgacgtgatggaccg

SEQ ID NO: 108823 - DNA, 1167 bp, Zea Mays
ccagagtgcgtccaactcggcgcgagtcatccttatagaatcacctctccgcctccaagcgccagtcgccgcctctccccactccctctcgtcgccgtcctctcccgttcgcaacgccacgctccccaccgccgaaatggccccgaagcgaggtggcagggcaccggtgccggccaagaagaagacggataaagtgacgaaccctctgttcgagaaaaggccgaagcagttcggcatcggcggcgcgttgcctcccaagaaggacctgcaccgattcgtcaagtggcccaaggtcgtgcgcatccagcgccagcgtcgcatcctcaagcagcgcctcaaggtgcctccggcgctcaaccagttcacccgcaccctcgacaagaacctcgctaccaacctgttcaagatgcttcttaagtaccggcccgaagacaaggctgccaagaaggagaggcttctgaagagggcccaggctgagaatgaaggaaaaactgttgaatccaagaaaccaattgttgtgaagtatggccttaaccatgtgacttacctcattgagcagaacaaggctcagctcgttgtcatcgctcatgatgtggatccgattgaactggttgtttggcttccagccctgtgcaggaagatggaggtcccatactgcattgttaaaggaaaggctcgccttggatcgatcgttcacaagaagactgcatcagtcttgtgtctgaccactgtcaagaacgaggacaagcttgagttcagcaagatcttggaggctattaaggcgaacttcaatgacaagtttgatgaagtcaggaagaagtggggaggtggcatcatgggctccaagtcgcaggccaagaccaaggccagggaaaagttgctggccaaggaggccgcccagcggatgacgtagattatccactgttgagtttgcccctgtagtttgacgtggaagaaccgatgagcattgtgcactcgtattgtgtttttttgaatctactttcatatgtttctgtccatcagaccgtgtttagaaactttggaagacagttctacagtgtttgtgcaatgtcttatatcgaagtatatcatttgcgcctcaggcagttttgcttttatttgcctaagcaattggtcccgaattcagcattcgtgctgttagtcatg

SEQ ID NO: 108824 - DNA, 828 bp, Zea Mays
atatctccgtacgattcatgtaatgtgctaagagttcgacttacgaatctgcaggccccgaagcgaggtggcagggcaccggtgccggccaagaagaagacggataaagtgacgaaccctctgttcgagaaaaggccgaagcagttcggcatcggcggcgcgttgcctcccaagaaggacctgcaccgattcgtcaagtggcccaaggtcgtgcgcatccagcgccagcgtcgcatcctcaagcagcgcctcaaggtgcctccggcgctcaaccagttcacccgcaccctcgacaagaacctcgctaccaacctgttcaagatgcttcttaagtaccggcccgaagacaaggctgccaagaaggagaggcttctgaagagggcccaggctgagaatgaaggaaaaactgttgaatccaagaaaccaattgttgtgaagtatggccttaaccatgtgacttacctcattgagcagaacaaggctcagctcgttgtcatcgctcatgatgtggatccgattgaactggttgtttggcttccagccctgtgcaggaagatggaggtcccatactgcattgttaaaggaaaggctcgccttggatcgatcgttcacaagaagactgcatcagtcttgtgtctgaccactgtcaagaacgaggacaagcttgagttcagcaagatcttggaggctattaaggcgaacttcaatgacaagtttgatgaagtcaggaagaagtggggaggtggcatcatgggctccaagtcgcaggccaagaccaaggccagggaaaagttgctggccaaggaggccgcccagcggatgacgtag

SEQ ID NO: 108825 - DNA, 587 bp, Zea Mays
cttctcattcttgagtcttgaccacactaagcttgatttcacattctgctctagctttgcgacgtgcccaagcgctgtttttgacgtgcccatgcttgagaagaagctcacggtcacgggcacgggcacggccatggccatggccacggagaaaggaaggaagccggggctcatcacgaagacgctgggccggtgccgcggcgcgcggcggaggagcaggccgccggcgccggaggggtgcttcgcggtgcgcgtcggcgcggggcggcagcgcttcgtggtccggacggagtgcgtgaaccacccgctgttccgggcgctgctggaggaggccgaggaggcgttcgggtacgcggccgccggcccgctcgtgctgccctgcgacgccgacgccttcgtgcgggtgctggagcagatccaggaggaggaggaggacgctgctggccaggcggcgccggccgtggcgaggtgcggccttgtcaggggccactccgcgtaccgactgctgctcgtccccgcccgcccgctcctcgtcggccggtcctagtctgtagtcctcggctccggccggccagcctgggagtggg

SEQ ID NO: 108826 - DNA, 2085 bp, Zea Mays
ctttttattcacctgtggggaatcaccatctgttgattgtttgaaacttaacttactagatggaatcagctttcttttactggccattgagcgtaatttcagcagaacctcctttcccccatcccttttctttcctgtttctccacccattctgttactctagattggccagttgggtgcaagctgatatcctcaaccaatatatgtaccagtccttcttctcaggttatagactgtggactctgtttacgagctattggggcttcttttgagatggtctacgacttgtgcacactgcacagttcccaggcaggcagtattgtgtttcattgagtttttcttgcaaggccggttcatatttggacctgatgtgagatccttgtttctcaccatattccttattcttgcaccagtggtggtcttctgcatatttgtggccagacatcttatcaatgactttcctgatcattggggagtttcagtcatggtcatagtgattgtcttcacaatatacgatttgacactgctccttcttacctctggtagagatcctggtatagtgcctcgtaacacccatcctcctgaacctgaagctattgatatgaacaatgatgctggaaatggtcagacaccacaacagttgcggttgccacggacaaaggatgttatcgtaaatgggaccattgtgaaagtcaagtactgtgacacctgcatgctgtacagaccacctcgatgctcacactgttctatctgtaataactgtgtggagcgctttgatcaccactgcccttgggttgggcagtgcataggattgcgcaattatcggttcttctatatgtttgtattctctacaacattactgtgtctctatgtatttggcttctgctttgtgtacattgtcaagattaaagacgcagagcagtcgacgttctggaaagcaatgttaaagaccccagcatcaatcgttctgatcatatactgcttcatctgtgtgtggtttgtgggtggtctgtctgtcttccatttctatctcatgagcactaaccagacaacctatgagaacttcagataccgctatgatcggcgggacaatccgtacaacagagggaccgtgaacaacttcatggagatattctgcacctcagtcgctccttccaaaaacaatttccgagctagggtcccagcagagcaaggtttacagcaagcacgtgcgccagcaaggggtttcatgagcccaaacatgggtaaacctattggggaacttgaattgggcaggaagccaatatcatgggatgaacctcggtcagcagctgatatcagagacttggaggttggtctaggcagcctactggacgagaaggaaggcagggtagcccatgcatccccggacctgagcagagaagcccttcctgagcttgtggaagggagggctggtacgcattcgaggcgatcaagctggggtcacagaagtgggacctcggcctccatggatagccttgctgcgcaaatggggaccgcagaatcaatggggctccattagcagtgtccatggtacaaccagtggagctcactagcaagccgctccacgtcttgatgcgtctctttgtgtaaacctgcctgataccaccaactaagaagcaacctttgcgtgctctgtgcgcctgtgcttttcactctacctaggatatacgtctgcagcgttttctttactcagcgccctgggagagcgcatcagttcttctgatgtgcttcccgtttggtgtcctaagcaaaaataacagaagtgccatttaactccttattagttgtttcttgtttggaccaaccactgtatatagatatatatcattgcaaattggaattgtctgcagaaagggtttgtcatgtttggctttcgcgcgtcctggtttcttcacgcccttcaaatttgcaccgtgttggaatggaatcgcatgggctttctattcacttgtgtgagcatgtcaactggtgccaggccgagtttacccacgggatgttgagcgcaatcatcccctgggtgcttgccaccaaaaatcatcaaaccgttttagaacaaaaaaaaaa

SEQ ID NO: 108827 - DNA, 2209 bp, Zea Mays
accgtgtacccccaggccgtgcgcgctcgcggaggcgcatttctgtcgcgagtgctcgaggacttgcctgctccgttttcttttcgcccacatccgccgttttgcctcgccgttctgccgcgccatcgcatcgtccgcgctccttctcatcgttcttcccccggtacggctcgacggcgggcgtgggcgctggagttgcggctccgaggccgaggcgccgggtggtgcgttgggtgcgctcggttcgggagatcccggactttgctgctcgcgcggtcagacagggagcgccggaggaggaggaggctgttcaagtgcaagctgtgctgaactaagggttctggcttcggactctgtgtacgcgccgcggcaggagggagctggagatgtacgggccgccgtcccgaggcggcgggggagccggcgctgccggagagcagccgagggtttaccaagtttggcatggaagcaacgagtttttcttgcaaggccggttcatatttggacctgatgtgagatccttgtttctcaccatattccttattcttgcaccagtggtggtcttctgcatatttgtggccagacatcttatcaatgactttcctgatcattggggagtttcagtcatggtcatagtgattgtcttcacaatatacgatttgacactgctccttcttacctctggtagagatcctggtatagtgcctcgtaacacccatcctcctgaacctgaagctattgatatgaacaatgatgctggaaatggtcagacaccacaacagttgcggttgccacggacaaaggatgttatcgtaaatgggaccattgtgaaagtcaagtactgtgacacctgcatgctgtacagaccacctcgatgctcacactgttctatctgtaataactgtgtggagcgctttgatcaccactgcccttgggttgggcagtgcataggattgcgcaattatcggttcttctatatgtttgtattctctacaacattactgtgtctctatgtatttggcttctgctttgtgtacattgtcaagattaaagacgcagagcagtcgacgttctggaaagcaatgttaaagaccccagcatcaatcgttctgatcatatactgcttcatctgtgtgtggtttgtgggtggtctgtctgtcttccatttctatctcatgagcactaaccagacaacctatgagaacttcagataccgctatgatcggcgggacaatccgtacaacagagggaccgtgaacaacttcatggagatattctgcacctcagtcgctccttccaaaaacaatttccgagctagggtcccagcagagcaaggtttacagcaagcacgtgcgccagcaaggggtttcatgagcccaaacatgggtaaacctattggggaacttgaattgggcaggaagccaatatcatgggatgaacctcggtcagcagctgatatcagagacttggaggttggtctaggcagcctactggacgagaaggaaggcagggtagcccatgcatccccggacctgagcagagaagcccttcctgagcttgtggaagggagggctggtacgcattcgaggcgatcaagctggggtcacagaagtgggacctcggcctccatggatagccttgctgcgcaaatggggaccgcagaatcaatggggctccattagcagtgtccatggtacaaccagtggagctcactagcaagccgctccacgtcttgatgcgtctctttgtgtaaacctgcctgataccaccaactaagaagcaacctttgcgtgctctgtgcgcctgtgcttttcactctacctaggatatacgtctgcagcgttttctttactcagcgccctgggagagcgcatcagttcttctgatgtgcttcccgtttggtgtcctaagcaaaaataacagaagtgccatttaactccttattagttgtttcttgtttggaccaaccactgtatatagatatatatcattgcaaattggaattgtctgcagaaagggtttgtcatgtttggctttcgcgcgtcctggtttcttcacgcccttcaaatttgcaccgtgttggaatggaatcgcatgggctttctattcacttgtgtgagcatgtcaactggtgccaggccgagtttacccacgggatgttgagcgcaatcatcccctgggtgcttgccaccaaaaatcatcaaaccgt

SEQ ID NO: 108828 - DNA, 528 bp, Zea Mays
accgtgtacccccaggccgtgcgcgctcgcggaggcgcatttctgtcgcgagtgctcgaggacttgcctgctccgttttcttttcgcccacatccgccgttttgcctcgccgttctgccgcgccatcgcatcgtccgcgctccttctcatcgttcttcccccggtacggctcgacggcgggcgtgggcgctggagttgcggctccgaggccgaggcgccgggtggtgcgttgggtgcgctcggttcgggagatcccggactttgctgctcgcgcggtcagacagggagcgccggaggaggaggaggctgttcaagtgcaagctgtgctgaactaagggttctggcttcggactctgtgtacgcgccgcggcaggagggagctggagatgtacgggccgccgtcccgaggcggcgggggagccggcgctgccggagagcagccgagggtttaccaagtttggcatggaagcaactccttcttctcaggttatagactgtggactctgtttacgagctattggggcttct

SEQ ID NO: 108829 - DNA, 822 bp, Zea Mays
accgtgtacccccaggccgtgcgcgctcgcggaggcgcatttctgtcgcgagtgctcgaggacttgcctgctccgttttcttttcgcccacatccgccgttttgcctcgccgttctgccgcgccatcgcatcgtccgcgctccttctcatcgttcttcccccggtacggctcgacggcgggcgtgggcgctggagttgcggctccgaggccgaggcgccgggtggtgcgttgggtgcgctcggttcgggagatcccggactttgctgctcgcgcggtcagacagggagcgccggaggaggaggaggctgttcaagtgcaagctgtgctgaactaagggttctggcttcggactctgtgtacgcgccgcggcaggagggagctggagatgtacgggccgccgtcccgaggcggcgggggagccggcgctgccggagagcagccgagggtttaccaagtttggcatggaagcaacgtgagccctcgctctctctgtttctctagctcctgtttttggatttttgtgtgcttgtgaacagtgcgtctggatctgggcgtacggtgattaccaagggttttgtgagaagacggtagggtccctgacgcgattctgcacgagtggtgggaaaacttgatgctgcggctgtgcgttaggttcaggtgcctgtggtatgtgtgatcctgtgcttgaagtgtaggggtttagtcactttagtggatagaattgtggattgttgagtatgttggtgccacttgtgttttagtgtttacctaagcttgaaattgtcattcgatgggtaccaaccatgcagatgtttcaactc

SEQ ID NO: 108830 - DNA, 221 bp, Zea Mays
atatcattcacatcacattatatatcattcgcatcacagaatcaacacatttatcatcaacaccatatatatcacaaatatcaccacataaatcaggtttcacagcacataagtctcattaagtatctcacaagaccaagtataactaacatcaccaacactcacaaatataagtttggatcatcacaaaacagatataagtctggatcatcactaacatc

SEQ ID NO: 108831 - DNA, 103 bp, Zea Mays
cgagaatttatggaggtcaagaagatcacatgataaaatcaagcaaaaccataaaaagttagtgttccatagaattcaagtttcatatcaatacacgatacaa

SEQ ID NO: 108832 - DNA, 1691 bp, Zea Mays
acccgacccgtgaccgtgagacagtgacgcgagcctgtgtgcggcccgctttcgttcgccgagtcaacaacaagaagccacgcgacgataacgcccagttcgtggaagattggaagaacactagagcgagaagcgatcagagcgaggcacggcgagggcgacgacagagccatgagttaccagaaggtcccggagtcctatccgccaccagggtactcgcagccgtacccaccgccccaggctccaccgcaggggccttactacccgccgccgcagcaaccacctccggggtaccagggctactttaacgacggccagcaaccctacggctatccgccgccgcagggtgggtattaccatcacggtcaccaccaccataacgaccaccatcaccatcatcatggtcaccaccaccaccaccacgaagatgatgactgctgccttggcttcttgaaaggatggctggccgctctttgctgctgctgcatgatggacgagtgctgctgctgctgcttctgacatacatgcacctgaagctcgctgtgtctgggcatcgtggcacggcaacatttgagtgattatggttgctggatagtgtttacttgaattttctctttgttattgttcgtaaataatctgaatagtacatcgtgttaataaaagggtatttgcagtgtttctttctgtgtgttctgagctgattggtcgtccatggaaaagacccggaatcctttcgtagatccctgtatcgttgaataacatatttgttttttttttcaataataccagttgtttccatcggatcatgagcgaggaatctaattcattcatagagcagattttctctaaaaaataagaagtaaaaagctgtgcagagatttttttttcttcggttgttatataatcacaaggtgcagcagcaagcagttccctgcattttatgagccttacctttttctccctcctgaatggaaggtaacagtgtcactcactgcatttcataacgtgctatctatcttgacaactctgcctactgcaggctgcagctgaaagaaatgaacagaacaaggggaaatagttgtccttggacaagaaacctcagccccattgcaccggatggtatggtcgaccgatcgaaagcgcgggatacactgctagctgcatctcgtcaggtccatccgtccatcctagggatcggtttcagataaggggcccgcccggactagccaaggagactgcctgtgatcgaggccacgaggcgagcaataaaacgtgcacaaggttttgcccgagccaagccaagccaagaagccacaggcaagtcatccttggctatctggacagactcttatcgccactctctagcacactgcacacacacaaatctgtggccttggattggatgcaacgctctgcgtgcccttcggctatttatactgtccaagtacagaaacgagctggtggatccaaagcttttcttccatgacagaaacggccgcaggttgcagcatcgaacatatcctcagctcctctctctctctctccttttttttctccttgaaatgtgcacatccatccagattacgcatgcccatattttcaagggatccctattttcaatcattcagtggtgtggtgcaccttatcgcctgccgaaattagaaaaaccccgggaccgggaataatatggc

SEQ ID NO: 108833 - DNA, 1412 bp, Zea Mays
atgctgttgttgcttctgatgaactcctccttgccaagaaaactactacactgaaaaggcgtcggcacgcgggcggtgaggatagcgtagcgtagcatagcatagcatagcataccgcaggcgctgctggttgacaaatggcaagcttattcccacagctcgcgcagatggagcacggcgtagccggcgcctcccatggcgcgccgagcttcctgttctgcaatggcgcaggtgcagccacggcagactcagcctcgctagagacctcgtccggtgttctcgacacctccccacgaggcggaggcgctgattctggcggtaggaaggccccgacgaagcccagggaagacagcgccagcgccagcgccagcttcagcttcagctctgcgcactccaaggactcgagctcgaagggaagcaccaagaataggggagggaaaagaggcagaagcagcaaggaggtagacgaggaggaggagcccaaggggtacatacacgtcagggcaaggagagggcaagccacggacagccacagccttgcggagagggtgaggagggagaggatcagcgagaggatgagggtgctgcaggccctggtccctggctgtgataaggtcactggaaaagccctcgttttggacgagatcatcaactacgtgcagtccttgcagaaccaagtcgagttcctttccatgaagatcgcttcactgagccctgtgctgtatggctttggcatggacactactgacgctttcagcactgaccatactactcaaaaaatcgaagggatgctccagctccaccacgaggcgcttgcggtgcctagctctgccctgagcagacctccattcgaggctatcgcggacagtacgcacgccaccgcctctgcctcctccccccggtcctacgagctccacggcgatggcggcggcggcggcgccagcatctctttcccgcaggacggcggcggctacatggcgcaaacagtaggtgggccaaggccagagctgttcaaccaagtggtgttcagtaaccacatgtgctctttccagtagggcgagggtgatgagaagacgacaggtaatgcagcaagcaaacttgcaggacggaggagatgatgctggctgggaggatatatgatctatttgggaagcgtgtgtgtcgccggatgagtctgtgatgttggacgacgcacgtagtccatccccttgtctggtggccgtaacgggacggggcatgcagtagcttgcaatagcattatttagctgttagatttgaggtctctgtcgccatcgcttcatctaggctctggaaaatcatttgttcatacacaatgttaatctgtgcttcctgaacttcagatgtttacggtattggaaaatgggaagcattttgtttgctcgaccgtcaaa

SEQ ID NO: 108834 - DNA, 1341 bp, Zea Mays
cgctcctctccctcatcccacgcacttgtagatggcaccgtccctcgccgagttcgtcgttgacctatgccatgtctccgccgccgcactcagggaccacggcgccgacccgccggagccggactaccttgtccgctccctccacaccgacatcactgcgcttccctgcctcccatggtgcaggtgcccgggggcgtgtggacaaggcgcggggggagggtcacccgagtgggcgacgtcggatgctttgtttgcctcgacggtggacgcaagggactcgtgcacgtctcccagatgctcggtcgacgccgcgctggcgccaccttcacgctcgggcaggtgtccttcaaggtcgtcttggtggacggcgccaagctagggctgtcaatggtagacgtcgatcaggatatagggaagggtcttcagtcgatgcgacgtcggcaccctgtggaggaggacgcgctgagggcaaatccgccaactaatcgctccagactcaccgggaggaggatggcggcagatcgatgagcgcacgcagctcgccagatgaggatgggaccaccgacgccgacggtgcgccccagcccccagcacggtgatgcaggacaccgacacgaagaggttcagccaccggtctggcacctcccacagtcccttggcatacagcttcagctctgccttgtgcacgcggtccaaccgtcatcaccgctcttgatgcatagaagttctctggttattttttattgcaatattttcacaattcatggaagaacggttccagttgagatactatatacaaaagtagacagagagcgacgatgcagtgttcacgatatggcagatccatctaactgaacccgaaggagatatcctattgttactaacttgccaggaagagatcaatcattctggtgagcgtctccatgagaggatgaagccattcggtggggatataccagagctaataatttgtcatgtgtatagtgctcttcctaatgaagttcagtcaaagatattcgaaccggctcctggaactgcagacatgccaaatggaaatactcaggattatcaagctggacattcttctattcatgggccactgcctcatttctgctagaatcctttgcatagtatgcaagcacctcaaatacaagtgccctattaagagttcatcggtaacaatgtggtaaatgtggtgcatggtttaaatccttctgccataggtcttcctttacatccaagaatgttggctctcccattcaatgttgaacacacttttgggcatctaatgcacccagctctgatgaactaagctaacaatggggctttaagaattcttcc

SEQ ID NO: 108835 - DNA, 1250 bp, Zea Mays
cgaacggacaacagagagaggacagagggagaggcaaagcaatggcgccgccggcgaggtggctgcggcgggaggtgttcgtggggctcgcactgggccagttcgtctcgctactcatcacctccactggctttgcctcctctgaactcgctcgccgaggtgtcaatgcacctacatcacaatcattgctgaattacatccttcttgcacttgtttatggtggaacactgttatacaaacggcaaaatatgacgatcaaatggtactactacttgatcctaggcatcgttgatgtggaagctaactacatcgttgtgaaggcttatcagtacacgtccttgaccagtgtgatgctcctggattgctggtcgattccatgtgtcattgtgctcacttggatcttcctgaagacaaagtatgggctgagaaagttcattggtgttggagtttgcgtggctggccttatttttggtcgtattttctgatgtgcatgcttctgatcgagcaaaaggacccaaccccttaaaaggtgatttgcttgtcattggaggctccatgctttatgccatcagcaacgttaccgaggagtactttgtcaagaaaagcaataggattgaggtgatggcaatgctaggtgtttttggagcaattataagtggcatacagataagtatacttgagcaaaaagagctcagatcgactcactggactgctggtgcgattcttcccttcatagggtttgcattggcaatgttcttgttctactcaacggtaccaattattctcaagatatgtggcgcgaccatgcttaatctctcactcctgacctcagacatgtgggctgttctaatccgtattttcgcttacaaagagaaggttgattggatgtacttcgttgcttttgctggaacagcaactggccttgtaatctactcatacaggggctcaaggcagatttctgaagagacagcacaggttacacaggccatagatgaggaggctgcaacggcaaacagcgcagcacaagttcctggtgtcggagatgatgggccagcctccaacaaggacttctcattagctgccactgcctcaaggtagtaggcaaccgtctgccaaacaagactgcatgcaagaacatgtatacagtagtggttgcctggttggtgtaacttttcgcgcctgaaaaccgtcgaatatattttatttccgatgttcagactccatcggaagtaggttgttttcacagaccg

SEQ ID NO: 108836 - DNA, 672 bp, Zea Mays
cacctagttgtggatcaacgaagctctcttctatagccatcaactcaattgtatactgaactatgtcacgaggcagggatcctttggcattgagccaggtaattggtgatgtgttggatcctttcataaagtcagcaacgatgaggattaattatggtgacaaggagatcacaaatggcactggactacgagcatctgctgtgctcaatgcaccacatgttgagattgaaggccacgaccaaacaaatctctacacacttgttatggtggatcctgatgcaccaagtccaagcaaaccagagtacagggaatatctgcattggttggtaacagatataccagaggcaagagacatatgttctggcaatgaaatagttccctatgaaagcccaaggccaccagctggaattcatcgaattgtttttgtgctgttcaaacagcaagcaagacaaacagtttatgcaccaggatggcggcaaaatttcaacatcagagacttctcggcaatttacaatcttggagcaccagttgctgcattatacttcaactgccaaaaggaaagtggtgttggtggcagaaggtttctgggatcaagctgaagaaaagattcagagaaacatctacatggaggcagtaccattcacaattcagaaattagtccacctaaaatag

SEQ ID NO: 108837 - DNA, 2343 bp, Zea Mays
atgagttgcatcttagaggagagggctgcgcttctatcaatcaaggcaagcctcctggatcctaacaactacttctacttgtcatcatggcaaggtcaagactgttgcagctggaagggaatcaggtgcagccaaaaaactggcaacgtcgtcaagctcgatcttaggcgcataaatccaggaaactttgtagcagttgattgggctcatgaaattaacatgctttctacactaaaggaactacttctgcaacagagtggactcagatctacagctccttctcttcgtcagtttaatctcacgatactcgaggtgctcgacatctccgggaacatctttaacacttctattgcccccaactggttttggaatgcaactagcctcacttttcttaacatgaaacagtgttacttctatggttccattcccgacgagatagggagaatgacatcacttgaacaagtttctttcaatacaaataatcacatgtcaaccatgataccgtcaagtttcaaacatctatgcaacctgaagatgttagatttgtctgcgaacaatatcagtggggagctcccaaatctgccagggccactgacaaacctgacctacttcgttttgtcagacaacaagctcacagggacaataccagcatgggtatggacactgagaaaattgtttatcttggaacttcgttggaacaagataaacggtgtagtcaatgaaggccacttaaatggccttacggacctagtgttcttaggtttgggcttgacacagcttcaaataaaaattagaccggactggattcctccattcaaactgcaggcggttctcttagactcgttgcagctgggaccggcattcccatcgtggcttaaatcacaaacaagcatgaagatccttagcatttcaaatgcaagcataaatgcaatcccagattggttttgggttgtattttcaggagcggagttattgaatttatcagataatcagatatttggcgcactaccagctacattggaatttatggcaacaaataccatggtattgtcgaataatagatttaatggtacagttccaaaatttccaaaaaatataacctacatagacatatccagaaactcattatcaggaccactgccttatgattttgtagccccatggttgagcaaacttttgctatataacaattcaatatcaggcaccattccatcttcactgtgctcattagaaaaattggaactattagatctatctagaaacatgctgactggagaatttcctaattgccaagagaattcagaaccattcatgaaattacgtatattaaacctaaataccaacaatctctcaggagagtttccttcagcttttaaaggtcgtcaatttgtagcatttgttgatctttcctacagccaattctccgggaatctaccagtgtggatatgggaggagatgccaaccttggcactgttacgtctgcggtcaaatatgttttatggccacattcccgagattacaacgagtaaacaactgcaatttctagacctcgcgtacaacaacttttctggaagcatacctcactcaatagtcaacttgagtgcaatggctcgcacttctggatacagttactttcttgacataatcttagttggtataggttatcaactgtataattcagaattctattgggttagttttagagaacaagtttcggtttccacaaaagggcagcaactcgaactttctagtgagctcagccatatggtgattctcgatttgtcatgcaacagcttaactggagtgatacctcaagacatcggcgctcttgtcgcactaaaaggttttaacttgtcttggaaccagttaagtggggaaatccctgtcactatcgatcagctgaaacaactggaatctcttgatctctcacacaaccagctgtcaggctcaatcccttccagtatgtcagggcttacctatttaagccgcatgaacctctcatacaacaatctgtctggaaagattccaacagggaaccaattcgacacttatgacgcatccgtttacattgggaacattgatctatgtgggttccctttacctagtatctgcactggaaacacgtcaaaccaaggcacacatggaaattcaaattatcgtgatttggatcttgccatggcaatagggtttgtcattaacctttggtggatcttctgtgtgatgctattcaaaaagagttggaggagtgcatatttcatgtttgttgacgagttgcatgagaagatttatgtgattgtagcagtaagatgtgccatcttgaagaggaaatttggtaaaaaataa

SEQ ID NO: 108838 - DNA, 2114 bp, Zea Mays
gatgttgtctcgcttcttaatccatcctagccgttggttttcatatactagcccacgagacccagcccagccggcttggatctcaacccataggtggcgctctcctcttcggcttcggttgcaagaaagaaaaaggtcacctcttaacaccaggccgccgccattgctgctccctttgttcgtttctcggcaccctcgatcccgagcgcggttaacccacgcatcgaccggcgaacgccaccgtctcccatcgagatctctcccatctagaatacctccgtgctcagcgtcatggacggcttctccaaaacgatcggcggcagtggccctaacgttccggcgggatcccaccccgcgggcgggagccaggcggcggcagggggaggcgcgacgcagcggacgcagtatccgtatgtgactggtacttcagtcattgccttgaaatacaaggatggtgtgatcatggcatgtgacactggagcatcctatggatcaactttgagatacaagagtgtggaacgcattaaggctgttggcaagcatagcatcattggagcaagcggagagttcagcgatttccaggagatcctgcgctatctggatgaactaactctttctgatcatatgtgggatgatggaaattctctgggccccaaagagatccacagttatttgacaagagtgatgtacaacagacgcaacaagtttgatcctctctggaactcacttgtacttggtggagtgaaaaagggtccaaagggtgatgagaagtatcttggcatggttaatatgattggtacccacttcgaggaaaaccatgtcgcaactggatttgcaaatcatctggcgatcccgatactccgtgctgaatggcgcgaggatatgacttttgaagaagctgttaagctggttgagaagtgcttgctggtcttgctgtaccgtgacaggtcatctatcaacaaattccagattgccaagatcacaactgaaggatcaaccatctacccaccatattccttgaagacctactggggcttctctcactttgaaaacccagcccagggcgctgtgggatcatggtagatttatgcgccgcgcacgccgcatatcatgccatgaacttaggcgaaaccaatctgtgctgctgaaatcgaacacttatgaacgtttgttctgaacatcactggaactctgcatttgcttgtatgacatgcttatggttcagcgagtttaattccaacgtttgatcacatgttgtgaatgtggaaaatggattgtgcgattgcgacctcagatgccgttgttgattgtactatgttgaaaacttgaaatgctaaattagtataggtaggtgacctttgccttgttgtcgttgcgtgaactctgatttctacggtttcttgcgtttgctttatgattcatgctagtgttaatgccctctgcgagtgatgggatcttggtagtctgtagtagatgcacaaactgtgttggcaaaactttccatgtacggatctaggagggaggttctccgtcagttaaagattccaatttttgacggaaagcgataccatcaggtgccaaaactactgctacgatgagaaagcgcaatgagaaatcaacaaagggtacaaggcatgaagacagaatcctgaggtacaacaaatgttgaggaatgtacatgacaaatctacgaagggtgcacttgctgtatcattcatggtaaaactgtgtcactgacacgagagcattaggcagatttgttacaaggcatggaacggcccaagattaaccactactattctttcgttacaaagaggctgtacaacaaaaaaaaagaagaagaatccggagttaaaaattgttgctgctctcaacgaatgtcgacaaatacctaactactaactgcctacgatcctcgttgctttctttacttgacaactctattgctcagcctctcgagctgcggcacgccgtagcttgcagtgagttccatgaatcgttgctttaggacttctagctgtcctagcaagtcgccagtagccacggtagtggcaatttgaccgttctcagactccgtgggttcagggcttctttcgttgtaccatttgactgct

SEQ ID NO: 108839 - DNA, 2333 bp, Zea Mays
acactggagaagcatcaggcaaacgatacagcccttccctcttcaatcctctcgtcatttcctctcgcttctgctcagctgcaacccagcgcttagatcttattcttggacgagaactctcctcaagctctccgatttctgttctcgcgccgcttagcaattcaaccccgaaattcttttgcggcgcagtcttcacctgaatcttgggtcgtagccaagaagatgaacaaagacaaagctccgatgccgggagacggcggccccagcgacggcttgccgccgcagtccacgcgccgtgccggggcgccgccctcgtcgtctaccccgccgctggagtgcgacatcagccgcatgccggacttccctacccggagcaccggccaccggcgtgcgcactccgagatcctgggcctacccgacgacctcgacctcagtgctcccggaggcggcgaaggaccgtcgctgtcggacgagaacgatgaggagctcttctccatgttccttgacgtcgacaagctgaactcatcgtgcggggcgtcgtcggaggccgaggctgagtcctcctcggccgcgggtggcggcggtgagggggctgagctggccgacgcgcccaggccaaggcatcagcacagccagtccatggatgggtccatgtcgatcaaggcggaacagctggtgggtgcgccggggatggaggggatgtcatctgcagaggccaagaaagcagtgtctgcggcgaaactggctgagcttgctcttgttgacccaaagagggctaaaaggatttgggctaatagacaatctgctgcaagatcaaaggaaaggaagatgcaatatattggcgaactcgagctcaaggtgcaaaccctgcaaacagaagccacaacattgtcagctcagctagcattgctgcagagagacaccactgggctaacaaccgagaatagtgagctgaagattcgcctgcagaccatggaacaacaagtccacttacaagatgctttgaatgacaccctgaaaacagaggtccagcggctgaaggtggcaacaggacaggtgggcaatggtggtggagggatgatgctgaactttggggccatgccacgcctggtcggaggcaaccagcagatgttccacagcagccaagcgatgcaatccgtgctggcgacgcaccagctgcagcagctccagctccactcccagcctcagcagcagcaactgcactcgctgcagctccagcaggtggcgagagacctcaagatgaaagggcatctgggcggccaaggccagtggggcgatgggaagtctgggagtgggagcaggagcagcggcagctgagcctactggcaccgtggcacgggagttttggtgtatgtggtgagcaggaatggtgatcccttgttttgggggatgttgctgtgcaggtgtaattatcgttaactcagttgtctatctataggcccagttcagcttgagttttatggttaactcggcgatctttataggctcagctcacctgcaacgcacttcagttcagaaactcggatggtggcagatgtttgtctgttggatgttgtttgtatctcttttgctagtttaagggtaaaaatggttggcatttcagtgtttcagatgaagatctcccgtctcagccaggcgctaaaagttagcacggtactagtagggtattcgatttaggccttgttcgtttttgtcggattgcacctggaatcgttagaatcatgtcaccatcaaaaaactcacaatgcactacatcattgataatagtcatttctcaaaccaaacatctcataacatattttttttcatgcgccgctcacttaatttgatccttgtatcaacgagaacatcaccatgtttatgaattactgccatacaaaaaatacattacgcccatggccctaccgaagattaccatgatattttgcctaattctgtttcacctgaaaatatttcttaactactaatgaggtcataatgatggagaaggctggttatcaatcctagtggcaccacttatgcgtcatcagcttattgtaaatgaactgttgcgtcaaagcaaaattctttccctggttcaaatgctgcctcaagctcttcatagctctgctgaactttcatattcttcgatacagtcaggccctcctgtaatatagcagtgagaaacacgtgaccatgtgttaacctaaaaatgccaggactggacatctgattgaaaacatgtctaatcactgcagcttggtgtttccaatgtaagatagcttctactaacaagttgttacaaaaatttgtcattggaaaaaacaataaaa

SEQ ID NO: 108840 - DNA, 715 bp, Zea Mays
cgccagcttcgcgggctcgtccacgacgaccacggccagcggcgaggacacggtggcggggggcggtttgagcttgtagatgccgaaggcggacaggtccgtggcgagagcggcgctcacccaggacgtagctcggcgccggcgctcggccgtgatggcagcggcctcctcgtcggtagcggaacacaccgtcccagcgtcgctggctgccgagcaatctggcgaggctgcagatgtggcagacttggcgagggtgtcggtgatcaccgtggcgcgcgagagcgcggcgtggagggtgaggaactgctctacggctggctgcgggttctgctcttccgccgtggagctcacctccgcgtacgagctgctccgtccaacacaaggcaggtgtacagttaggttagtaactagaatcaacacggatagtaaaaaaaaatcagacagtgaattcacgacaccaacttttcaacaccaagttgaaatccagacagtggattcgacattagcaatcattggattaactggagaatatactgaagctagcaatgtaaataaacagatacttccagtagaagacaatagcatgcagctacaagtacaggtacagcatgagaaacttcctgtttgtccaccacagcatctgtagcatcattgtacagtacaatagcatggttcggcgacagtttcagaaacatgttgatccatgtcctggacc

SEQ ID NO: 108841 - DNA, 943 bp, Zea Mays
cccgacggctcccagtctcccaccttctccgcctcgtcgtccgacgtccctgctgcataaaactaccacctccaggcctcctaccatttcttcctcgcccggtcgtccccctttcccccgcggccccgccccccatgcccctcgcgtacgcgcccataccgtaccgctcccgaaacactagggcgcggcacgcaccctcctcgtgagcgcggggtcgggcgcaggcggcatggcgccgcaggccgcggggtcgacccctgcggtggcggcgctcgggttcctcctccctacctgctgggagatcgaggtcacgtgcgccgccgcgatgatcctcgtcgcgctctacgctgcgtacgagctcctcaacccgcgccccttccaggctgcagcggcgggcgacgccgacgagctcctcgtgcgggggctagacggcaccaacaaggggggtgcgagcggccgttctgcgtatgtactgaagctagaattgttggctgctaggaatttgatggcggcgaacttaaatgggacatctgacccgtatgcattgatcacttgtggtgcagagaagcgtttcagctccatggttcctggctcaagaaacccaatgtggggagaggaattcaatttttttgttgatagtcttcctgtaaagataaatgtcacgatatatgactgggacattgtatggaaaagcacaatccttggttctgttactgttcctattgagtctgagataccgagtgggccagtttggcatacacttgatagcacatcgggccaggtttgtcttcatattaaagtaatcaaggttcatgaaagttcctccagctcaatcgaagccccgactgagaaaggtcacgaaagcaggtcccccgtgcaacatgagggtccgccccttataggtcagatctttactcatgcaatcatgctttgagctctccca

SEQ ID NO: 108842 - DNA, 1121 bp, Zea Mays
gttgttaaaaagctatcatccaacaataattctcagcatgcacaatcatgtacaatgcccgttttcacctttggtaggctaatgggaggacgatgttcatcatgctgaatcataggctttactttactctacaaactaccttctccaggtacaaaatatttagtatattatggtcctactacgtctgaggctgcactgctcttcttctagactgcaggatgcagattcctgctcagacaatcagtgctgcattgcatcccgacggctagggcgccgagctctcctccgacgaggaggaggaggtggtggaccgggaccgcaccgcgccaaacaccggaggagcgtgcgtgttcccaatccccacccgccgcgaccacccaccggccgctgcccgctcgttcaccttcacaacgtccctgcagacgtgatcgagggccgtgaggaagtcgcgcaccaccatgaagatcctcagggggtggccttcctctctggccgagtcaccgtggaagaactcggtcgtctccctgacgcgggcgagggcgcggtcctcctgggcctgcaccccggcgacctcagcctcggccttctgcaggaactcaccgatggaggcgcggaacctcttgcacttgcagccgtcttctgatgctgagctcaagtgcaggacctcgctgatcctcccggctccggaggacagtttggagacgcagctacccagcgtgctggagtccatcgctgccgccttcttcacgctgctgagctcgccgccaaggctcgccacgatcttcagacctaccttcctgcactgcaggtcatctgcgagggcgcctgcctgaccagatgtctggccggtggctaaaatgttggctccttcggacctgatgatttcttcgacgacgaagtgcaggagggtcgtcttgccgtcgacgcccttcacgtcgactagcttgaggagcgcgtccagcttgaaggcgtgggcgttcccacggttcgtgccggtgttcatgcggttgcccgtcttcaggaccgcgtctagtatcttgtggaacaacctgctgccctgtagctcttcgcatgctgcctgaaatgaatgacaatgagtgtcagcaatttttgtctatgct

SEQ ID NO: 108843 - DNA, 327 bp, Zea Mays
gcactgttggctatcctcaaccatgcgccaaacaacagaacactcgggattctacagggctttgctactgggcttatgctcagcatgtctttctttgacttggcttacgatgctgtcaacgccatcggctttctgagagggaacctctggtttttcgctggagcgctgctgttttcaacaatcgcggacgttttccctgagccagactgcagtgcggcagatgaaaacaatcctagatcaattctggtgcagtcttacttttctaacctagcaattgccgttatagttccatcaccaacagcgctatttgtcttggatgctatttag

SEQ ID NO: 108844 - DNA, 1259 bp, Zea Mays
gcactgttcagatgaagacagcacaacaagaccccttttggttgtgactgcttccgttgacaaaatggagctgaaaaagccaattcgtgtggacactgatttgaagatagctggcgctgttacttatgttgggcgttcatcaattgacatacagattgaagtgactcaggttgataaagcagatggcgataatcagtctgatcccattgcattgaccgctaacttcacctttgtcgcacgcgattctaagactggaaaatctgctccggttaaccgcctttcacctgaaaccgaaagagagaagcagctatttggagaaagtgaagcacgcgataagatgagaaaaaggaagagagaagaacagaagggaggactcgaaaatgggatacataggctccgtgccgaggccgagaggctggacgtgttgctcgcggagggccgtgttttctctgacctgcctgctttggccgatagagatagcatcttgctgaaggatacccgcctggagaattctcttgtctgccagccccaacaacggaacttgcatggtcgaattttcggtggtttcctgatgcaccgagcatttgagcttgccttctcgactgcgtatgcttttgttgggcagagaccttgtttccttgaagtcgatcatgttgacttcttgaaaccagtggacgtaggggacttccttcgattcaaatcatgtgtcttgtacacccagcttgacaatccagagcagcctctggtcaacgtcgaagttgttgctcatgtaacaagacctgagctccggaaaagtgaggtctccaacaccttccatttcaccttcacggtctgtagtgacacgctgaagaacgggttgaagattcgcaatgttgtcccctcgaccgaagaagaggcgcggcggatattggagcgcatggaggcagagggtttatgcaactaatctttccgcagatccacttgtttcggagttcggacgtgctttacttgatatatgtctcacttaccgttccacggtaccagctaaaacggggggatttggcgacgatttgagcagcagccagcagctatcataacacgccggcaatagaacggcatagctgtagctccatgcctccatggtactatttgtgattttttttacagagaccgcatgttgcgtataataacatactcctcgagactcaaaatgttcttttgagaaagcatcaaagcactatcgtttttttttatttgctcttgaaatggacggcggccgt

SEQ ID NO: 108845 - DNA, 537 bp, Zea Mays
agacgcgcctcctcgaccgcctcgggagatcggggccaggaaccgccaccggccatggattcgcctatcaaggtggtttctcacctggggggcggacgaggaggaggagggggagagggagagggagagggagagggaggggccgcagcgatcgacgcggggaagtcggcacggaggccgctcagcctgtggcccgggatgtaccactccccggtgaccaacgcgctctgggaggcgcggtccagcatcttcgagcggatgatggacgctgggaacggcgcttcctctgccgagcagcggccgcagactgagctgctcgtcaagacgcccgcgcagagccggaccagcatcgtgtacaagttcgccaccgacgacatcctcagggagcagtaccgggacccctggaacgaggtgcgcatcggcaagctgctcgaggatcttgacgccctcgccggcaccatcgccgtcaaggtaatgcctagtgcgatatccatttcgatcttctttcttggcgttgcgccgttgcctgccctctag

SEQ ID NO: 108846 - DNA, 1731 bp, Zea Mays
gttttacactatcctcactccaaccaaatactaggggcaatatatatatcaaaccaaactaagctaacaaccgctgctagtgctagctgcagctctccgtagctattaaatactataaataacggagaatccaaagcctaatccttggataaaaattctagctaaaccgaggaataaagagcgataagcccggtgtctgtcaacactccagaagagccgcagcgcaaaggagactcctttgtggcgtgcgcgaccagcatgaagccacgtccaccggcgggggcgtcgtccgcttccgccgcgccgcccaggctgcggccgcacctggcgcggctcgcctccttcctgatcgtcttcgccgtgggctactcgctgggcctcctgtcgtcgtccacccggccgccgccaccgagaccgtcccagtcccagtcccagtcccaggcgacgacgatcgcgcggccgcacgccgacgctttattcccggcgtcgtcgaactcgaacgggaccgccgcgtcgagctacccgcggtcgcctccgcacgacctgttccggttcagggagcggtgcggggagccggtgccgagcgacgccgtggtgcggacgctgctcgacaggctcttcggcggcgagagcccctacgcggggttcccgcccgagcgcacggcggcgctgctgcgcccggccgcggcgcgcccgcgcgggtgggggtcgacgggggcggtgttcgcggagctcatggaggcggtgcgcccggcggtggtcgtggagctgggcgcgttcctgggcgcgtcggcgctgcacatggcggccgtggccaggaacctgtccctgtccccggccatcctctgcgtcgacgacttccgcggctggccggcgttccgggaccgcttccgccgcgacgtgccgccgccgcggcacggcgacgcgctgctgctgccgcagttcatggccaacgtcgtggcggcggagggggcgcgcgtcgtcctgccgctgcccttctccacggcgtccgcgctcgccgcgctctgcgagtggggcgtctacgccgacctcatcgaggtggacgccggccacgacttccactcggcgtgggccgacatcaacctggcctgggccgtgctccgccccggcggcgtcatgttcggccacgactacttcacgtccgccgacgaccgcggcgtgcgccgcgccgtcacgctcttcgccaaggtcaaggggctcaccgtccgcccgcacggccagcactgggtgctctccccgaagccgcgagggcgcgccgacgacgcccggcgacggtgagggctcgttgctgtcggctgtcgccgtcgccgcggggccgtgcactcgatcgcccggcaccgaacctgacgtgtcccgtactcccgttgcaccagcggccgtagcacgcacccacccgcctcgatcgaaagctgatcgacgaaaaaggttgcgccgcccccgccactgttctctgaagcgctcgtctcaaccaccatttgcttttgctgtaacactcttctctaactacgccgggatcatacaagaacgatacaatattgtattccaatacgagacgtttacgtgtagatatatatatggacgttcggacacggcaatttccagtgttttctggagcaagtaggttaaaaagctggttagatgggatgctgttgttcaatgttgatggtttctttcttcttgcttgtttatttcggcgatgatggtgaggta

SEQ ID NO: 108847 - DNA, 1516 bp, Zea Mays
taacggagaatccaaagcctaatccttggataaaaattctagctaaaccgaggaataaagagcgataagcccggtgtctgtcaacactccagaagagccgcagcgcaaaggagactcctttgtggcgtgcgcgaccagcatgaagccacgtccaccggcgggggcgtcgtccgcttccgccgcgccgcccaggctgcggccgcacctggcgcggctcgcctccttcctgatcgtcttcgccgtgggctactcgctgggcctcctgtcgtcgtccacccggccgccgccaccgagaccgtcccagtcccagtcccagtcccaggcgacgacgatcgcgcggccgcacgccgacgctttattcccggcgtcgtcgaactcgaacgggaccgccgcgtcgagctacccgcggtcgcctccgcacgacctgttccggttcagggagcggtgcggggagccggtgccgagcgacgccgtggtgcggacgctgctcgacaggctcttcggcggcgagagcccctacgcggggttcccgcccgagcgcacggcggcgctgctgcgcccggccgcggcgcgcccgcgcgggtgggggtcgacgggggcggtgttcgcggagctcatggaggcggtgcgcccggcggtggtcgtggagctgggcgcgttcctgggcgcgtcggcgctgcacatggcggccgtggccaggaacctgtccctgtccccggccatcctctgcgtcgacgacttccgcggctggccggcgttccgggaccgcttccgccgcgacgtgccgccgccgcggcacggcgacgcgctgctgctgccgcagttcatggccaacgtcgtggcggcggagggggcgcgcgtcgtcctgccgctgcccttctccacggcgtccgcgctcgccgcgctctgcgagtggggcgtctacgccgacctcatcgaggtggacgccggccacgacttccactcggcgtgggccgacatcaacctggcctgggccgtgctccgccccggcggcgtcatgttcggccacgactacttcacgtccgccgacgaccgcggcgtgcgccgcgccgtcacgctcttcgccaaggtcaaggggctcaccgtccgcccgcacggccagcactgggtgctctccccgaagccgcgagggcgcgccgacgacgcccggcgacggtgagggctcgttgctgtcggctgtcgccgtcgccgcggggccgtgcactcgatcgcccggcaccgaacctgacgtgtcccgtactcccgttgcaccagcggccgtagcacgcacccacccgcctcgatcgaaagctgatcgacgaaaaaggttgcgccgcccccgccactgttctctgaagcgctcgtctcaaccaccatttgcttttgctgtaacactcttctctaactacgccgggatcatacaagaacgatacaatattgtattccaatacgagacgtttacgtgtagatatatatatggacgttcggacacggcaatttccagtgttttctggag

SEQ ID NO: 108848 - DNA, 125 bp, Zea Mays
ctcgcatggatctccaaatcctaacacatattttgcaggatccatgagccatcatcagaagaacacaaaccatgtgcagacaataaataaagtattaacacacccaaattatgtttagtccttgg

SEQ ID NO: 108849 - DNA, 1249 bp, Zea Mays
gcttcctcctgcacaacccaaacgacgaaatgattccctttatttgtagtcttctctccgttctccccaacctactcactcatgtcaacagggatcgtgctgtctcgtctcgccgtcgatccatactctctcgtcgtcgtcgtcgatttctccagctcctctcatccctcctttttttttgttttggtttccgacggaaatatgctgctaaatgattagcggccggaagatccattggcccatgccatgccgtagtccatgctccatgatggagaggaggagctagctgccctgctgcctccatctctctctctctctcggctcacatgcgtcgcgcgcgtcaatgcgtgcatgcaccaccaaacaaaaaacctaaagcgaccacccaagccctgaggcgaggcgaggcgaggcgagatctatctttatatatagccttgaagcccttggaacacttcatctccaaattaagtcgccgagctctgaagaatctagctaggagcaggccgcctacgccatcggccgtccacagcaacatgtgctccggctcctggttctggagcagcagcggcagcggcaaggagcacccgtctcttgtcgtcgtcaacctcgagcggcagctaaagaagacgctggccgtcaggagaaggaggaggttgaggctgaggaggttgcgagacggaggagcagaggccatggagatggtgaacctgaagctgtatctggagaaccggtgcatcatcgcagagaacgagaggctccgggagagggccagcgcgctccgccgcgagaacctcgcgctgctccagaacctgtcgtccaggacggcggccgtgccagagccaggagcgggagctgcgtgaggttgctgcttcgatcctctgcctgcctgcctgctgaacatgaagtagcgagctcgcgtcaccctcgtcgttggtgcttgtgctacttgtgtggacaggagacaggccagtgaactcgtagccctaggaggccatctgcttggctgctccgccatgtctgtgtggctctgtgctcaactgctcatacataaaccgccaggttcctggagctctcttggggtgctctgcgccatggtgtctgtacattataagtgcgcggattaactagattttgttggcaagaactaactcttttggtcatataagaacacggtcaagttaattattaccttcgttctcgaatatttatctttttttaaaaactaaactacaacaaataaaaaaaa

SEQ ID NO: 108850 - DNA, 826 bp, Zea Mays
gcgtgaggggcacgtgaccgaccgcaagacaggttcgagtgctgacgttgccactgatatttttgaccgttcacggacggtagcgctagcgccaacctccggctccaatggcatccctccggctcgtggcaacgctagcgccctccggtcctccgccgccacctcgacgtaagcagcggagaccgtcctccgcagtccgtctgacaggtgggatgggcctggcggcagctgctgccgtggcggcggccgcggccgcctcaccaccggcgctcgccgcgctgtccgagccggcgaacgcgctctcgctgcccacctgggccgtccacgtctccagcgtcgccgagtgggtgacggcgatgtggctggtttgggactacggcgagaagacggggctcaagggttggaaaggcctctcgtgggggatggttccacttctaggtggagcaatgtgtgcttgcacgtggcatttcttctacaattcagagtctcttgaagttcttgtagcccttcaaggtgctctgacagtggttggtaacataacaatgtgcatagctgcataccgcatattcaaagcatcccaggaaggctcaaaaacttcgtaggctgcaagattggatcttacagccggtttggcaagggatgctcagccgcatttgaagattgacgttgctgagagcctgagacgatgataggagaagatacagatagccggtcggttggttttaccttgtgaaacagtatgattgtgatggagttgaagaagaacaaagttgcgtctctcctgtaaatacctgtgatagtaaaccctgaatccggttacagtttt

SEQ ID NO: 108851 - DNA, 734 bp, Zea Mays
cctccggctccaatggcatccctccggctcgtggcaacgctagcgccctccggtcctccgccgccacctcgacgtaagcagcggagaccgtcctccgcagtccgtctgacaggtgggatgggcctggcggcagctgctgccgtggcggcggccgcggccgcctcaccaccggcgctcgccgcgctgtccgagccggcgaacgcgctctcgctgcccacctgggccgtccacgtctccagcgtcgccgagtgggtgacggcgatgtggctggtttgggactacggcgagaagacggggctcaagggttggaaaggcctctcgtgggggatggttccacttctaggtggagcaatgtgtgcttgcacgtggcatttcttctacaattcagagtctcttgaagttcttgtagcccttcaaggtgctctgacagtggttggtaacataacaatgtgcatagctgcataccgcatattcaaagcatcccaggaaggctcaaaaacttcgtaggctgcaagattggatcttacagccggtttggcaaggtgatgagatatggagcttgcgtttctctgacatggatgagaatggagaactatttgattgttgttttttttttggcccattagataaaagtttattggaaaggacaacctttcacagcaatatgcatcctctgctgtagtattatttctcaggggccaagataaaagacaatgtctggaactcaaatcatg

SEQ ID NO: 108852 - DNA, 1962 bp, Zea Mays
aagccaaagccgaaagaaatcagttacctgtacctgagacgcagccattcgagcaatgtcgtgcaatggtgacagcgtcccattcgagcgaagagataaactgtttcctttccattttttcctaacatcgcggcattaattttattatggcgaagcccacccggccatttcccataatagcaaaaatctcttctcccagtgcttgggccgcccagtggccagtatatatcgttagttcgctacacatggccgtcccgggcaaagaagcaccgacaacagtcgacacgatggccagcccgttgctgtccctggccaccgcggcgctggccgtagccgtcctcatctccacgacagaggcttggcgcgcgacgccaacgccgctgccagtgctgccgatcccgtcggcggcgcagctgaaatggcagcgccgcgaggtgatcatgttcttccacttcggcatgaacaccttcacggactccgagtggggcacggggtgggaggacccgtccctgttctaccccgcgaggctcgacgccacccagtggatggacgctgcgcgggcggcgggggcctcgctcgccatcctcgtcgccaagcaccacgacgggttctgcgtctggccgtccgagtacacggcccactccgtgcgcgccagcccctggcgcgggggccgcggcgacgtggtgagggaattcgtggacgccgcccgcgcgcgcggcgttgacaccgggttgtacctctcgccgtgggaccggcacgacgagcggtacggccaagaggtcgcgtacaacgagtactatgagtcccagctccacgagctcctcaccgggtacgggagcgtgtcggagatttggttcgacggcgccaagggcaaggacgcgaccaatatgacgtaccacttccaggaatggttccagacggtgaagcagctgcagccctccatcaacatcttctccgccgtcgggcccgacgtccggtgggtcggcgacgagacaggcgaagccggaaccacctgttggtccaccgtcaaccgctccatgatcaccataggcgaagccagcgacgagaagtacgtgcaaacatacaatacgatatcatgaacatgcaagagccattgtttgcgcgtgcctgcaggtacctgaacgagggcgatccgcgggggagcgactgggtgccgccggagtgcgacgtgtcgatccggccaggctggttctggcacaagagcgagacggccaagccgctgcgccagctgcttgagatctactacaactccgtcggccggaactgcgtgctcctgctcaacgtgccgcccaactccacgggccttgtcgaggacgccgacatggcgcggctgcgcgagttcggggccgccgtggccaccatcttcggcacggacctcgccgcgggcagcgaggccagggccagcagcgtgcgcggcgccgggttcgcggcgcgcaacgtgctggacggccgcgaggacacgtactgggcgccgacggccgaggacgggcgaagggacgtttactggatcgagctgcggcggccgccgggcgcgcaggcgcggccgttcaacgtggtccggatccaggagcacgtggcgctggggcagcgcgtggagcggcacgcggtgtacgtcgacggcgcgcccgtggcctacggcacaacagtggggcacaagcggctgcaccggctgccctgccccgtcgccggcgggacggtgagggtctggatcacggcgcggcgtggcccgcctctgctctcggcggtgggcctccactacgaccccttcgtcgcggcggccaccatgtgacgtggcgagcgcaagggacttaggctgtctccagcaacgaaccctaaatggtcctgtactctaaatttagaggatgagacgtccgctatcggctccagcagcaacctgtaaatgaaactgtaaaatagcggacgactttgacgagcgctaaa

SEQ ID NO: 108853 - DNA, 1648 bp, Zea Mays
gtatttagcaacttgctaaacaagagtttaaatagctttattttagagaactactaacgtaggagatatttttgttcataaaaataatagaaaaagaagttcactcccctgccgctgccgtgggccgaatcgtcccattccaactacccgcaagttcgggcccgtttggcggtggccccgtaaccctatctgcgggatccatcatccagagaggctaataaaacgccagaacgattcttctcccaaaagacggcgccgccacgaaatcgaaagtcaaaacagagacagaccccactggatgaaggggaccccaaacgaaggccagtccgatctctcaatggagtcccaggcgccgggcaggggcgaggagggcacgaaagccctatacctcgcacccgaggtgatcggcaacggtactgcggcgggggccgtggcggtagacgcgatggtgtcggtcgaggcgggcgggtccggcctgccgaagccggagcccgtcccggtggagttcctgggcagcggcggactccagttatccaaaccgcgtcccgcaccgcgttaccgcgaccggcacaccaaggtggagggccgcgggcggcgcatacgcatggcggcggcgtgcgcggcgagggtggcccgcctcacacgggacctagggcacaagtccgacggcgagaccatccgctggctgctgcagcagacggagccatccatcatcgctgccacgggcacgggcacggtccccgcgatcgccatcacgggcaccgacggcgtcctccgcctacccgccgagccggcatccgaggacgccagcggcgagcagcaggaaccggcccccaagcgccggcgcaagctccagccgacgcgcgccgcggtgggacccgcggtacctgcccccgcggcgtactacccggtcgtcgctgacccccgcctccaagccaacggcggcggcgcgatttcggtgtccagcggccttgcccccgcctctgcccccgcggcgcccgccggcgccattccgttcatcgccatcgcggcgccgaggcccagcgcagcgggcgatggcaaacagatgattccgcctgcggctatgtggatggttccgcagcaggccggcgcgggcaaccagccaactcactattgggctttcacaaccaattctgaattcctcagttaccagcagcaatctgttttccagcagcaagttgtctacgatggggagcagcttgttggcgacggagaatcgcaaggccagcagaccggtggttaccagcacggggacggggagggggtggacgaagagattgccgtgactgattccagttcggaagagtagcggcgcagcattctgaagctcagtcaactgcctaattccaatccaaacttccaaagagtaggtcagaattaccagtctaactttcttctcatttgtcctttcctttgtagtagcagcagcagtgaaaagtagttaatagggtgatgctatttgcgaactggctactcgctagtttgcgtgatcgcattggaaatttggaactgtatttgggagagcggtgtttacccttatcttaccctggccctatgggatgcacaacttttgggggcgtttggcgcctatgtggctatgcctatacgaagatctcattatttagac

SEQ ID NO: 108854 - DNA, 1092 bp, Zea Mays
atggcgtctgcagtggtggtggacgccggcgacgcgccggagcccacggttcgtaacctcctggaccaggagtccctcaagtgggtcttcgtcggcgggaagggcggcgtcggcaagactacctgcagctccatcctctccgtcctcctcgccggggtccgctcgtccgtgctcgtcatctccaccgaccccgcgcacaacctcagcgacgccttccagcagcgcttcaccaagttccccactctcgtccgcggattcaccaacctctacgccatggaaattgacccaaaggtagaaaatgatgatttatccaatgaaggaatggaaggattcctgtcagaactgacaaatgcgattccaggagtagatgaagctatgagttttgctgaaatgctaaaattagtccaaacaatggattactctgttgtagtttttgatactgctcctacagggcatacattacggttgcttcagttcccagcaaccctagagaagggtcttgagaaaatgatggagttgaaaaatagatttggcggtctgttgaatcaggccagtcgattgtttggtcttggtgatgagctgaacgaggatgcaatgcttgggaaacttgagggtatgaaggatgtgatcgaacaagtgaacaggcaatttaaagatccagacttgacaacttttgtatgtgtttgtatcccggaatttctttcattgtatgaaacagaaagattggtgcaagagttagcgaagtttgagattgattcacacaatattattattaatcaagttatatttgatgaggaagctgtcgagtcaaaactgctaaaagcacggatgaaaatgcaacaaaaatacattgatcagttccatatgttatacgatgacttcaacatcaccaagcttcccttgctttcagaagaggtttgtggtgttcaagctctccaaaacttttcccagcacttccttacaccatacaagtctactcttaaaaggggcaccgtcgaggagctcgaacagagaataactatattaaaatctgcactgcaagaagctgagacagagttagatagggttaggaaagggaagcagtcagtgtga

SEQ ID NO: 108855 - DNA, 1085 bp, Zea Mays
acacctcccacaaaaccacacgctccacacagctaccactcagctcaagctcgagacaagaaaccagaaccagctcactcctcactccacttccactcccaacagcaagctcaagcagtcagtcaccggcaggggtcagggtcacagtcacagcagcagccatggacacggccggcctcgtccagcacgcgacctcctcgtcttccacctccacctcggcgtcgtcgtcctcgtcctcgtccgagcagcagagcaaggcggcgtggccgccgtcgcccgcttcctccccgcagcagccgcccaagaagcgccccgcggggcgcacgaagttccgggagacgcggcacccggtgttccgcggcgtgcggcggcggggcgccgcgggccggtgggtgtgcgaggtgcgcgtcccggggaggcgcggcgcgcggctgtggctcggcacctacctcgccgccgaggcggcggcgcgcgcgcacgacgccgcgatgctcgccctgcagggccgcggcgcggggcgcctcaacttcccggactccgcgcggctgctcgccgtgccgcccccgtccgcgctcccgggcctggacgacgcccgccgggcggcgctcgaggccgtcgcggagttccagcgccgctccggggccgccgacgaagcgacctcgggcgcgtctcctccctcctcgtcgccgtcgctgccggacgtttctgctgctggctcgccggcggcggcgcttgagcacgtgcctgtgaaggccgacgaagcagtggcgttggacttggacggcgatgtgtttgagcccgactggttcggggacatggacctggagttggatgcgtactacgccagcctcgcggaagggttgctcgtggagccgccgccgccagcggccgcctgggatcatgaagactgctgtgactccggagccgctgacgtcgcgctctggagctactactagcaaagttaacaataataagcctgacaaccaccccaaagcccccccactgattgtattcacctctgtaacagaattctaattgatttcgcagcaaatggacttcaaaagaagtctttggttccgatttct

SEQ ID NO: 108856 - DNA, 983 bp, Zea Mays
catcgcaaaaaccacccaaggccaagtcgcatcgcagcagccaggcagatcgatcaacaccttaaaatcgagcgagctaagatgtgcccaatcaagagggagacgacgagcgccgagtccggctcgccgtgcagtagctccacctccacctcgtcgtcgtcggaacaccaccagaccgcgtgggcgtcgccgccgaagaagcggccggcggggcgcaccaagttccgggagacgcggcacccggtgttccgcggcgtgcggcgccggggccgcgccgggcggtgggtctgcgaggtgcgcgtgcccgggaggcgcggctgcaggctctggctcggcaccttcgacaccgccgaggccgcggcccgcgcgcacgacgccgcgatgctcgccgtcgccgccggcgccgcgcgcctcaacttcgcggactcggcgtggctgctcgccgtgccgacggcctcgtacgccagcctcgccgacgtccgccgcgccgtggcggaggccgtggagagcttcctgcgccgccgcgaggaggaggagggggacgcgctctcggccgcgtcctcgacgtcgcccaacgacaaggacggcgacgagtcctcctcggccaccaccaccgacgacgactcgccgttcgagctggacatgttcggtggcatgagctgggacctgtactacgcgaacttggcgcaggcgatgctcgtggagccaccgcccattgtccccgcgttatgcgacgacggcgtggcttccgaattgccgctctggagctactaggctaggactagtggtcgctgtactttcggtttttaccttttctcgttctcgtcgtgtcctgtgccacaatttggtaactgcacaaaggttactgctgcttctattaacgaaacagagcagattgggaaaaaaacagagcatggccgttgactttgtaatggtagcaaaaagtcttgagcttattattattatagtgttgactctcaata

SEQ ID NO: 108857 - DNA, 258 bp, Zea Mays
tatttttcttcatataatttataccctttctttatatttgatctcacaaaatgacatgaccatgaatttactttgcaagtcttcaaaagtgaaagtgcagccactgggttcacttgaaactttagtattttatcttagaatttgggcagggcatagagcctctcgccctataacatcctccttcaatagttggcatcgattaaagcatcacggattagcttcctgaacttctccatgtgctcagcctgcgacgagata

SEQ ID NO: 108858 - DNA, 2126 bp, Zea Mays
tattttttttcacacgttactagtagcaacaaatttagagatggcgtgtcctttttgcgtcctagctggatctctccgccgtgtgggccaagcgagcaatcacctcgatttacaatgaaccatttccctgttgggcccatggaaaatccaaacgatagaatgtcatgcgctgcacctgcaagcatctatataaacagtgccagtacgagtgccagctctcgtccctgccaccgcaacagcacacagacgtggcccctctgcggcaaacaaaccagaggccgcggcaggcacggggacacttcacgcaggccgcgcagcagcgccatggcgacgtgccagtgcccggagccggcgcaatgccaccacaggccgctcctctcgtcgacggccgacacctaccctgagctgcacgaccgcccgaggcctgcgcccggcagcgtcctcgccgaggtggccgccatcctctgcctcacggggccaatggtcggcgcgggcatcctgttctacatgcgctcgctggtgtccatggtgttcctcggccgcctcggccagctgcccctcgccgggggctccctcgcgctcggcttcgcaaacatcaccggctactccgtcctctcagggctcgccggcgggatggaccccgtctgcggccaggcgttcggcgcggggcggacggacctcctccgcgccgcgctccggcgcaccgttctgctgctcctggccgcgtccgtgcccatcggcctgctctgggcggccatgcaccgggtcctcgtctccacggggcaggaccccgacatcgcggccaccgcgtacgcctacatcctctgctgcctccccgacctcgtgctgcagtgcttcctccacccgatccgcatctacctccgcgcgcagtccgtcacgctgccgctcacctacggcgccgccgccgcgctgctcctccacgtgcccatcaacttcctcctcgtgagcggcctcggcctcggcgtccgtggcgtcgcgctcggaggggtctggaccaacctcaacttcttgcttttcctcgtggcgtacgtctacttccgcggaatgtacggcgcccatgacgacggcggcgccaagaagggcgcgtccgtggcgccgccgacaccagccgagggggagtggtggagccttgtgaggctgtgcgtgcacagctgcatgtcggtctgcctggagtggtggtggtacgagatcatggtgctcctctgtggcgtgctcatcgaccccaaggcggcggtggcggccatgggcgtgctcatacagaccacctcgctgatatacatcttcccgcattcgctcggctgcgccgtttccacgcgtgtcgggcacgagctgggcgcccggaggccggagcgcgcgcgcctcgtcgcgcgcgtcgggctcggcctgggcgccgcgctgggcctggtggcctgcgcattcgccgtgtccgtgaggggcatctgggcgcggatgttcaccgcggacgaggccatcctgaggctggcggcggcggcgctgccgctgctcggcacggccgagctggggaactgcccgcagacggccggctgcggcgtgctgcgcggcagcgcgcggcccgagaaggcggcgaggatcaacgtgtccgcgttctacggcgtgggcatgcccgtggcgctggcgctggcgttctggcccgcccgtctggacttccgcgggatgtggggcggcatgctggccgcgcagctcgtctgcgccgcgctgatgctgcgcgccgtgctcggcaccgactgggcggagcagacggagcgcgcccgccagctcaccggcgggcgcggcggcggctttgacgtcgtcggcattgtcgacgaggacaaaacaagccatgcagaagcggccaaagcagaggtcgggaacacactgttcgtggtggcggattgcgtctagcgacgacggaagcaggacctgattcatggatgatttgcatcctcgattcattagccataggttttcttttttgctttattagttcttttttgtgattttacccgacctttttggggggatttgtagcaatacaaagcttcaacctccctctgttgttagcttatttttccctcttcgaaacgagaaagagagagtttacagtt

SEQ ID NO: 108859 - DNA, 244 bp, Zea Mays
agtaaaagctcacctcgccgtcgctcgattcgtcggcggcgctggcggattcttcttcgcgttcgcgcttggtagacgtagaggcgatggaggccgagctggaggctcccgtgcggcggcggttggcgcctctcatggctgcggtgatggtggtggcggcggcggcggcgaggatttgcttcgagcgtcacgtgctcgcagtattacgaaacgaagctcaggttcgggccgctttgtgtagaac

SEQ ID NO: 108860 - DNA, 876 bp, Zea Mays
gctctgtttccttgaatgtgtggatctctttcctttccaactttctccattgatggaaggtggaaatcggcagtgtcctcaccggctataaatgtagccacatcctaagtttctatctcctctattttttcgcgcctccagatcgctgtgagttctcttcttcctcacaccaacgccggccagtttctgccaacagcagcggcaccagattcctcacgccaacgccggccagttttcggcaacagcagcggcacctcaggtttttgttccgcgagaatagaatctctatctgtaggcttgtgtcatagcaagccaaaaaaatcggtggcaaccgcaatagttccggaagactatatttgcacgcagggtgatcttgccctcatcgattttattaaggaaatcccttgtgaaccaagggtggaagtcatacttattgatgatgcctttgttgaaagaaagtcgatggaatgtttatttcaaccgaatgcgtatctaggtgacgaggttatagactgttatataaatttgataaaagctcaaacgcatctaaagtgccgatctggaggtcgcgttcacatagaaaatgctttccagtttaatttcttgaagcgagatggcgatgttgacattaaaacagaggagctatatccaattgaagacatgacacaaatatgtagcgctgaacgaagggtgttactttacctagaccatgacatggtgtttattccgataaacatcctagagacgcactggtatcttgctgtgatccatgcaagaaatatggagatacaagtgctcgattcacttggtacttcacaagaccgtaaagacctcactgactctgtgagtatgcacaaactaaacaattatgaattc

SEQ ID NO: 108861 - DNA, 349 bp, Zea Mays
cttgtaactagtgcatatatatgattatatgaagcattgaagctctttaattttaccagcgaaatcgaacataataattgtgtcaagctgttctagatcaaacatagctcatgatcttttacgttttgtgcaataatttttctattgtcggcaggtgtacgtacgttgcctgtggtgcactggccggggtgtttgagacaaaaaaaaaaaaaaaactgcggttcagagttaggaaaagctaaatgcgaggaaaacagttcagttagttacattagatcatcgtccggtgactcagatgtagaccccaagagcacacagctcgaacatatatatcctcatcgtcagcctt

SEQ ID NO: 108862 - DNA, 2248 bp, Zea Mays
aaccagaaaccataggcatcggccttgggcgccacacgatttccggcagcatcaacaaccgttcaggctttactccatagtccatacaaatatttatacggcccttaccgcctcgagcctataaaagcgccgcgcctcgcccctgcacagctcacctcacctcactcaaaccgagcgccagttgccagcacgaagagtaggagtaggaatcgaagagtgagtgaaactgaaagacgaggaggagccatggcgaccccggatgaccgcggcagctggttgctgtacctgtccctagccgccaaatgcgccggcgagcagccttaccgcctcgcgggcttcctggccgtctgcgccgtggccttcgtcgtgacatgcctcctccactggtgcttcccgggaggcccggcgtgggggaggtggtggtggacgcggcggctcggtgccggtgccggtggcggcgcgacggcggtggcggcggccctgccggggccgaggggcctgcccgtggtcgggagcatgtggctcatgacgggcctggcgcaccgcaagctcgcggcggcggcggggagcctcggcgccaggcgcctgatggccttctccctcgggggcacgagggtggtggtggcctcgcacccggacgtggcgcgcgagatcctcagcagcccggcgttcgcggaccggcccatcaaggagtccgcgtacgggctcctgttccaccgcgccatcggcttcgcgccctacggcgcctactggcgcgcgctgcgccgcgtggcgtccacgcacctcttctccccgcggcaggtcgccgcgtcggccgcgcagcgcgccgtcatcgcgcgccagatggtcggcgccgtcaaggagctgtcggcggcctcgccggggcggcgcggcggcgtcgaggtccgccgcgtcctgcgccgcggctccctgcacagcgtcatgtggtcggtgttcggccggcggtacgacctggagctggacccggccagggagagccccgagacgcgggagctgaggcgactcgtggacgaagggtacgacctgctgggccagatcaactggtccgaccacctccccggcctcgcgtgcctcgacctgcagagcaccagggccaggtgcgaccgcctcgtcccgctcgtgacccgcttcgtcggcggcatcgtcgacgagcaccgcgcccggaaccacctccgctctgctccgcctgccgtcgtggacttcaccgacgtcctgctctcgctgccggccgacgacaggctcaccgacgctgacatgatcgccgtcctctgggaaatggtgttccgtggaactgacaccgtcgccgtgctgatggagtgggcgctggccaggctcgtgctgcaccctgacgtgcaggcccgcgtccacgacgagctggaccgcgtggtcgggccccaccgggccgtcaccgagtccgacacggcgtcactggtctacctgcacgccgtgatcaaggaggtgctcaggatgcacccgccgggcccgctgctgtcgtgggctcgcctggccacgtcagacgtgcacgtcgacggacacctcatccccgccgggaccaccgcgatggtgaacatgtgggccattacgcacgacccagacgtgtgggccgagccgacggagttccagccggagaggttcatggggtccaccgagttcccgatcatggggtcggacctcaggctcgcgccgttcggggcgggccggcgcagctgccccgggaagagcctcgccatggccaccgtggccttctggctcgcgacgctgctgcacgagttcgagctgctcccctcgcccgtcgacctgtcggaggtgctcaagctgtcgtgcgagatggccgtcccgctggcgctggccgtgacggcgaggccccggcaagcggttcagaagtcggttggggtatcagtctcactgtgagcaatagcatggcgggctggcgctactgtacatggaaagtgcttctgcttgcaggttgctactactcggtcgacatgggtatatgcttttcatgttactgtctttgatgtgtatcgatcaggtgccgaatgtgatactttggcttgtactgttagctcttttcctgggtgctcttttctttctttttcttagtactcgctgtaagactcgtcaaatgtatatgctggtttggatggttttggattgtagtcgcatactactagtagtattgcgcagttcaatgcctaaatatgctataatcattcatgttcgtacc

SEQ ID NO: 108863 - DNA, 113 bp, Zea Mays
atttgatccatcgggccgttttgtttacttactcacatatcgctagtacatatactaaacgaacaaaccgctcgtatattatactagtagtaagtatattatttatctaccac

SEQ ID NO: 108864 - DNA, 396 bp, Zea Mays
caaaaaggaaatacatataaatacgataaaaaggtgtcattaattcttgatctgtgtcatttcagcgataaacaacgttctctctatacacacgtccatcggtgcggtggtataaagagaattaaatatatttttttttgtctttgaactagaagtgattatgacttatatactcagactgagggagtaattttttagacaactaaggccctgtttgggaacaaagtttttgaaaaccacagtttttgaaatactacagtatactttagtcatgacaataccgcagtttacaataccgcagttttgaaaactgagttccagacctaagtttagaataccttaaaacaactatagtatttacaatacttcagttttgaaaacagagattttagccag

SEQ ID NO: 108865 - DNA, 1448 bp, Zea Mays
cgtgaccgccaccggcatactagtaccccgtgagctggcgctggctctggctctggctctggcagtccggctggcaggagagaattggcgagggattgggatcgggagcgaattcccagccagcccctgtctagagagggacaggccgcgcgcgcacgcacgccaccgcgttccattggccgcgtcgttgccatcacgccgacgactaaactagtcgatcacaccaagctcacaggctctcgatcgcctgtgatcgggctgccctgccgcctcttgctcccttcctcctctcgcccagcagcctagctacttgagcgagacgagctccagctgaggaagtgagaggtcgtggtccgagaggcgtgcgtgcgtggccatggacggcgccgaggacgacgggacggagtggatgatgcatggtgccggagggaagggaaaaggcggcggcgcgctcgacaagaacaagaagcgcttcagcgacgagcagaccaagtcgctggagtccatgttcgcgacgcaggccaagctggagccgcgccagaagctgcagctggcgcgggagctcggcctgcagccgcgccaggtcgccatctggttccagaacaagcgcgcgcgctggaagtccaagcagctggagcgcgagtactcggcgctgcgcgacgactaccacgcgctcctctgcagctacgagtccctcaaggacgagaagcgcgcgctcctcaagcagctggagaagctggccgagatgctgcacgagccgccgcagggcaagtactacggcggcaatgcggacgacgtgcgctcgggcggcgtcggcggcacgaaggaggaggaggagtccacagacgcctgcgccggggccgcgctctactcgtccgagtgcgctggcggtggcaggttcatcgcgcacttcttggcggacgacgacgtgggagcagccctcttccggccgccgtcgtctccgcagccgaccgctggcttactcacgtcgtcggggccgccggagcaccagccgttccagttccactccggctgctgctggccgtcgtcgtcggcggagcagacctgcagcggctcgcaatggtgggagttggagtccctcagcgagtgacgtacgatgatcacaagcggccgggggtcactcggttccaagcacacgtaactggccgggccaatacgagttcgttcgtagcggtctcgtcactcgtcagctagccctgcagagcaacggtgtacatagcttcagtagatcgaagtccaggtccaggtctgcccatcaagcagtttcttcttctcgccatcgatcatcgatcatgcatgcaaaagattttttttctctctcccttgctaccagatcatgtaatccagcaggaacatgtagagaaagatcaaacgaggttatagatcgagaaggtcgcctgcatatgcgagctagtctattcttttcc

SEQ ID NO: 108866 - DNA, 788 bp, Zea Mays
atgcatatatgtccggcggttaattcattttgctagcttctcctaacgatacgccggtggttcttaattcaatgcgtttatacgtgtagctggagaagctggccgagatgctgcacgagccgccgcagggcaagtactacggcggcaatgcggacgacgtgcgctcgggcggcgtcggcggcacgaaggaggaggaggagtccacagacgcctgcgccggggccgcgctctactcgtccgagtgcgctggcggtggcaggttcatcgcgcacttcttggcggacgacgacgtgggagcagccctcttccggccgccgtcgtctccgcagccgaccgctggcttactcacgtcgtcggggccgccggagcaccagccgttccagttccactccggctgctgctggccgtcgtcgtcggcggagcagacctgcagcggctcgcaatggtgggagttggagtccctcagcgagtgacgtacgatgatcacaagcggccgggggtcactcggttccaagcacacgtaactggccgggccaatacgagttcgttcgtagcggtctcgtcactcgtcagctagccctgcagagcaacggtgtacatagcttcagtagatcgaagtccaggtccaggtctgcccatcaagcagtttcttcttctcgccatcgatcatcgatcatgcatgcaaaagattttttttctctctcccttgctaccagatcatgtaatccagcaggaacatgtagagaaagatcaaacgaggttatagatcgagaaggtcgcctgcatat

SEQ ID NO: 108867 - DNA, 878 bp, Zea Mays
acgaatgggcttcactaaaagtttgtcttgggcctcgcaagttgctaccctcttcctcaccttcactcctcttcctcgtttcccccacggtcaatcgggtgatctgacggcggcggcggcggcggcggcggcactccgagcttccgcaacatggcgacgcggttggctgcggccgcggccgccacgttcatgcggcgcctggccccagcgcgcccaccagtacctatcctggcggcagcatctacggcggaggcggtgacgtgcgggcgcggggacaagaaaaccaagcgcgggaagcggttcaagggctcctacggcaacgcccgaccgaagcgtgagaagaagattgagcgcatcaaggaccgcgtcgaggtgccccgttccactccctggcccctccccttcaagcttatctgagcgcctcccctcggtccgccgggggtaccttgggtttgctgcgacagttgctgctacttcgccgtttccaaatagctgcacgcgctgcacgggcgtgtgtttcctttgtttttaattgtttctcaattgtgtggcgtcagatatgtactgccgccgaactgctgtggttcaagcaatatccttttggatggaagtgaagagatgtgtttctgtccatcattcttcttctgttagtgtatgcataattggaaaaattaatggatcctttattcatcagcagttaatgatgttctccacgcctgtcaaatgtcaatagagttgttgaaggatatcagcttagattggatcatctcttttttatgttctactgtcttcagtcacatgccattcataatgaaatggcaaaataaaataaaatgccaagtatatatttctaagatgacaaaaaaccagaattcaaa

SEQ ID NO: 108868 - DNA, 3116 bp, Zea Mays
ggagtagagcaaatggctagcgaggagcggatcttggtgtcggtgcgactgcggccggtgaacgcacgagaggcggagcgcggtgatggctccgactgggagtgcacgagcacgaccaccctcatgttccgcggcaacatccctgagcgcgccatgttccccgcctcctacacctacgacagggtgttcaacccgaagtgcagcacgcgccaggtgtacgaggaaggggctaagcaggtggccctgtcggtgctcagcggcatcaattcaagcatatttgcgtacggtcagacgagcagcgggaagacgtacacgatggtcggcatcacggagcgcagcatgtcagacatctacgactacattgacaagcatcccgagagggaattcgtcctgaaattttcggcgatggagatatacaacgaagccgtgagggatctcttaagacctgatgcaacacaactaaggctactggatgatccagagaaaggaactgtggtagagaaactcaccgaggaaactctcaaggacaaaggccatctcttggagctccttgcagtgtgtgaagctcaaagacagatcggggaaacttctatgaatgaagcgagctccagatctcatcagatactcagattggttggcccttgtatagtactgaatgatgtgcggatgttttagcagaaattagtttttgttctaaaaaacttgtgtaagttgcagacgatcgagagttcagcaaagcagttcatgggacgaggaaactcaagcacccttctggcttgtgtgaattttgttgatttagcaggaagtgagcgtgcctctcagacacaatcagctggtatgaggcttaaggaaggcagccacattaacagaagcctgctaactttgggaaaggtcattcgccaactcagcaagggaagaaatgggcatatcccttacagagattcaaagctcactcgcatattgcagtcatctttaggcggcaacgcgagaactgctattatctgcacaatgagcccagcacactgccatatcgagcagtccaggaacacacttttgtttgcaaattgtgctaaaaatgtagttactgacgcaaaggtcaatgtggtgatgtctgacaaggtgttagtgaaacatcttcagagagaaattgcaaggctagagaatgagttgaagtttcatggatcagcctataccagcaatcatgctgatgctttgagagaaaaagatgagctgatcaaacagctcgaagaacaattgaaggaattgatggggcagaaagaaaccgttcagtctcaacttgacaattttcgtagagttgcaatagatgaaaattttgatgaccatgcaataagacaatgggatcaacgaaataggtcttcagagtcccttccacataatgtgtctgaagatgctctttcttcttttgatacttacgatgttgtttatggagaacaagatggtctaggcccaaaagcatttgatgtacatccaatatctatcttgcatcaaccaagaaaccatatttctgataacattcagatatatcaaccaaataaggaggcttcctcagaggtctctgaggagcattgcaaggaagtccagtgcatcgaaacaaatgagcttaggaggagtccattattctttcctgttgatcgatatcatgttggcacaaacattgatgaaggaaagcatgatgaaaacataacggacacatcagacagtgccatcaaattgtacacatgtgattctgagccatcttctgataccgaaaaaacaaataatgatgaatctttagccctgaagaggtgcgtgataagctctagggatagtgtactaactagaagcagaagttgcagagctagctttatggtcattccaaatagttggtttggtgattcgttggatatgagaatgacaagaccaggtgacattttcaaatattctcaaagaaggccaaagaacgttaggagtttgtatcctgaaaatggtcattgttcaaatgatcttacattcacttgtaatgaagaagatgaagacgccatcaacaatgtcgttggcataacaaaagtggaagagaagttagaagagtgttgtacatcccagctagagggcaatcaggatgacgttactgaagaaattttggacataaaacatgccaatgatgttgataaagatatatcagtgaccagtgtcgactctccttcacggtggcctattaactttgagaaaaaacagaaggaaatcattgagttgtggcatgaatgcaatgtatctatagtacacagaacatatttcttcctcctctttaagggggacaaagaagacaatatttacttggaagtggagcacagaagattatccttcattaaaagttctttcagtgttgcatctgaggctaatgctgctgctacatcaagcttgagaaatcttcggcatgaaagagacatgttgtacaggcaaatgctaaggagactcaatcttttggaaagagagagcctttacaacaaatgggggatcgatcttaattccaaacaacgaagactacagctatcacgtcgcatctggacacagactgacatggaacacgtgagggaaagtgtcgctcttgtcgcaaaactagtagaacacctggagaaggggcaggtcatcaaggagatgtttgggttgaccttcacactgaacccacaagctgaacgaagaccttttcagttgtgttagtgctcattcctaaactaagcattgcgataatgacaattatgatggttgaatgtctggatgagacaacaacaatggcataatggtaaacgatgaatacatagtaatatagatctcttgtcgggtctgaactcatcccaacattggttttcaccaatgtctgcatataattagtatcacttattatacagacgtgcatggtgatgccaaccctttgcacctaactatatgatgtgttggactatggtactatcaaaagcaaaccacatgagatgacaacccttgcacccaattgtatgatgtattgctattctgatattttctacatcaaatatatatctaatctacttgattgttttgtaaggtagagcaaatgctatgaaaatgccaacatttgttgt

SEQ ID NO: 108869 - DNA, 628 bp, Zea Mays
gataatgcatgcatccttctcgctctgctacatcgctcgcgtttcaaaagataaaaaattcatgttgctctccttgtcctccgcgctttttcagacagggtgttcaacccgaagtgcagcacgcgccaggtgtacgaggaaggggctaagcaggtggccctgtcggtgctcagcggcatcaattgtacctacgcttcttcttcagaagcaacaccgattacatatttcacggcactgagatgcaactgttctcttacacaaattttcttctctgtctgaaacctcttcatggcagcaagcatatttgcgtacggtcagacgagcagcgggaagacgtacacgatggtcggcatcacggagcgcagcatgtcagacatctacgactacattgacaaggtcgactgatggctgctgcacaactatcggttcatttgattttgtctgaatcaaatcacgtgtcacttttttctattttgttgtgatttctcgctcgactccaacgttctcttctggtctcctgcagcatcccgagagggaattcgtcctgaaattttcggcgatggagatatacaacgaagccgtgagggatctcttaagacctgatgcaacacaactaaggctactggat

SEQ ID NO: 108870 - DNA, 327 bp, Zea Mays
atggttatgggagctcctttggaggatgctcaccacctcgcccaaaggtacgacagaatgcgtcaagaagctgaagcgcaggtggagaagagaatcagcgagcttcctctttggcctatctgtccacaagcttccatggatccctgcaacttgcgcccccacgagattccctgtgtcctgtgcaccgatggctacagcaaggaaaagaagcaacatctggagggaggagccatgggcgcacaacagctagaactagaagggaggatgagaagaaatgcagctctagcatggcaggacagtaggaatggcttcagaggcgaccagtag

SEQ ID NO: 108871 - DNA, 630 bp, Zea Mays
atctcacctttctcaacccaccgcgtctgtctctctcgcgtctctctggagccgcccacgccactggtcgcccctaccacgcccgccccggccccgtcagccgcggacgcccccgccccggccctgtccaccacggtcgtggcctcaaagttccgggagaaggtggctcggcagcagcaggcggtgatgaagcagtttgggggcgggtacggcgcagatggcgtgttcgcgaatgaggccgaggcgcaacagcactccaagcttgacaagctctacatctccacgcgcgccgtcaagcacttccaaagggatatagtttggggcgtcgagggctacatcgtcacggggtcgaagcaagtcgaaatcgggaacaatttatgtgaggatggcaagaagtacggcaccgagaacacttgtagcagtggaagcacactgtcgaatgcggtgttaagttttgctaaggcacaatccatgatggaaaaggaaaggggtaacatgctgaaagcccttggcacataggtattagtcattgttgccttttgtcggcgtttcgagaccggggggtccctgggccgacgagtgaaatgtcgccgcgtgccccagcccagatgggtcggcgcgagacggagc

SEQ ID NO: 108872 - DNA, 393 bp, Zea Mays
atgcaggatcgtcgaaatggagaaagtgggacaaaattgggtaacctaagctggacacaacaagagaccaacagcgcgaactcgaagatcgtccgcatcccaacgccgcgccgcacccgccgccagtgtcatcgctccgccgccatccgggcgacaaaaccgcgggtcccccgcctcgctccgctcccccgtgatccttcccagcgctgcggtatcggtggacggcggggcggcggcgtagagagatgtggaccagaggcggcagcagaacagaggtcacagaagcttggagtctttggacgaggagagaagatgtggcagcgactagcgaaggacagcgacgcggcggagagcatttttgattggggcaattgtgttcctgtccctggatga

SEQ ID NO: 108873 - DNA, 302 bp, Zea Mays
cgcttcaaacaagcagcaagttaaattgcatgtacatatgcagccctaaattacaagattatgcaagtaaagcgagtgaagttggaatcctggaaggctccatttgcataatcagtgacggagctggggctgctgtgcttcgttctgggactacaatacaagagtaggggtcgattcaggtagtacttgtgtaaggtttccagtagcagcaaggcatttcttcagctctcaaccttgagcatagatgatatacctcagcaagtcggcatggctactactttggtgggcgacgatcgtggtac

SEQ ID NO: 108874 - DNA, 528 bp, Zea Mays
ttttttgaatatcttaattgggccaagcccataaatcctaacacaggtgtcgcttgacaggcttacttatggtaggaaaaggagacgtttcgccagatggtctttatgccattattaacaagagagtggagaaagttttcattcgtatggaagttggttcttaccggcgacgcatactggttgagtatctaaaagagattcaggctagaagcctagagcaggggaaattgtccaagtgtttcaaggaccaaaggtataaagtcttacatgtttttcctgctcgcgcgtagtcttatggaccaatggcttaattttgctgttgtgctgttgtttagcagagactcaataggaggagtttcagaaatgtctaatgctggacctgatcagtgatccgtggccacacaaagagagcactggaaatggagagaagagataaaccagtcaaaaacatttacagcaaatcgcctttccttactttcgtcattgcccattttaagtttccgaagctaagaattcgtcacacacgcc

SEQ ID NO: 108875 - DNA, 1519 bp, Zea Mays
catccgatcctccgactccgactcgccagaaccaagccgccaccaccaaagcaacaccaatggcgcctctcagccacacagccccagcctacatcccgacgaagagaggcgcgccatggatcccgccgccgccagcctccgggcttcctacgtatatcagctggatgcccacgccgccgccacggttcttaccgtggccgcacctggcgccacctccgcctccgccgctgccttgctggagcgtcccgcaggtcccttgcgccaccgccacggggatggtgcagcgcccgctggcctgcgttgcgagcgccgccgccgggaacgcgaacgaggcggcgacgaaccagccgtccccacgctccgtgctcgcggtcaccagcccgcccatctcgccgacgacgtccctcccgacgtcgttcccgtaccggctggcgccccctgcgccgccgcccaccgcaggccacgccgctccaacgccgcctcccaccgccaagcggagcgtggctgcccgtccacggcacgggcgacggtcgagccgtgtccgccgcacccgcagcgctcccaagcctcggcgtctgttcgatcctacttccgagcttaccagtttcatgatccgaaacatccctaacgatttcacgagggcgaggttgattcatatccttgaccaacactgctccatcgaaaacgagaagatcgcgccgggcggggtgaggtcgcaatacgatttcctctacctggtggtagatttcaggagccgtgcaaacaaaggctacgcatttgtgaatatgacctcgccggaggcggcccgtcggctctggacgcacctccatggacacctgtgggcttttaagagcagcgcgaagacctgcgcagtcgactacgctgatttacaggggcaggacaacttggtcagccatttttctgggtcgcgcttcgattgcgacacagacgagtacctgccagtgcgctttgagcctccgcgcgacggcacacggcctgccgagggagccatgaatgtcgttggtcggcggattacccgttcgcgtcccagtgatgagaactaatccgtcgtctcgctgcctgtatcctggccaccccgtttcatatctcgtgttctatctgtttctgtttaagggaggaacagatagaacgggagatacgatacgatggctcatctggagcggatagaatgtgagacacgatacggggagtcgtctgacgtctttgcataatctgtctgtggattgctctcagttcgtatcaatgtgctttctagcgatcttgactcagaactactaagtttagtgttgaatcttaggttgtccggttatgtatgtatactactatatgaatttggtcatgttaggctgttagtctatgtgtgtgtttactttgaggcgtctgaggtttgagtaccggtgttgttagtgttagcaggctaaaaacctgcttgtttcccggcatatggattaattctagcgctttgattcctctgcatgatgataacagcctcatctaa

SEQ ID NO: 108876 - DNA, 209 bp, Zea Mays
ctttttatttcattcagacctttggacgggttgtgccatctctgggatgagcactaacatctgctgtttcccttgttctagaaatgctgtcgagaagggagaaggccacaaacttcaaaccagactatgatattgatatccatatgaaggtcttagctatgagtgggcaagaatccagtattcttacaggctacaaactgaagtgctga

SEQ ID NO: 108877 - DNA, 492 bp, Zea Mays
ataggagagttcaagattaatgttgagtgcaaccatgctactctatctggacacatgtaaggttttttgcttgcctaaattgagttgaataatagcttaaagaactacatgttaaacttgcagctgccatcatgaattggagaccacagattaatgggctgcttggaaatatcgatgcaaacactggtgatcctcaagttggttgggacacaaatcagttcatgatagacattgcagaggctactttggttatgtcaagtgtagttaagaatggtggacttgcacatggtggtttcaactttgatgccgaactgttagtaccttttgtcatattctgggtgacggccacctcaaataagaaaaggaggtagagttccaaactgaccccaagaagttcgaaggctgcctctcggcttatgttggtaatctcttatggaacgtcattgaaaatgacttgcgagatttcttcagctcatcgaagattgcattagt

SEQ ID NO: 108878 - DNA, 1321 bp, Zea Mays
cctgccacggcgcacggcacggaggcctatggatttgggcgcatggcggggttccctctaggcggaggaagccacacccagagccgcgacgcgcccgcctcgtccgtcccgccggtgcatccctccgacgccgcgtccttcctctacgcggcgcgcgcgggagcgggcctgcagctatggcagcagcagcagcaacacccgttctacaactccaacatcatccgcttctccgatgatccacccggcgccgcgccctcgctcacgggcgccgcgtcgccgtcgtcgccgtcgcgcggcccgagggccggcgggggaagcggcggcggcggcggggtcagctgccaggactgtggcaaccaggccaagaaggactgcgtgcaccagcgctgccgcacctgctgcaaaagccgcggcttcgcctgcagcacccacgtcaagtccacctgggtctctgctgccaagagacgcgagcgccagcagcagctcgccgcgctcgcggcctccgccggcgacacagccgcggccgccggcccgtcccgcgacccgaccaagcgcccgcgcgcacgcctctccgtcgccaccccgacgaccacgtcctcgggggatcagcagatggtcacggtcgccgagaggttcccgagggaggtgagctcggaggcgctgttccggtgcgtgcgcctggggccggtcgaccgggccgaggcggaggtcgcgtaccagaccaccgtcagcatcggcggccacgtgttcaagggcatcctccacgacgtcggccctcgtagcttgcctgccgctggaggcggcgccgccgccgccgccatcgagtactacttccgccacgccgcggacggatcgccgccgagcaccacaggcgccgctggcgaagcgtgcggcgccggtggtgtgggcaatgtcgtcgtgtcatcggctgtggtgatggacccgtacccgacgcccggaccctacaccgccttcctgcctggcgcgccgttcttcccaggccacccgagacagtgaccggcggctcgctcgatcgccagccgtctcgctgtgtaacgacatcacgactccatctccagctcgctagatctgtcaatttcgttgggtacctaaattcttaatctcttattgagatgcataaattcatatttgttcgtagagcctagctagcttaggcgcgggttagactttatttgcttcttgggatcatttgatgggggcgtgagtagtcgctgcaaatggcccaaatctgacagttagggaacttgatgataacatttgacctgttttcctgaactgttctccttgatggttttgattt

SEQ ID NO: 108879 - DNA, 2385 bp, Zea Mays
gaagcgtaggcacactgctctccggcgagcagccagccgccggcggatcggatccggatctcgaccagcactggcattgccgcgacggagatgccgaccccgaagcagcggctcccctgctcgaccttcggccgaggcggaggagggaggcgcgccgcctgcggctccgccgtgctgccacccgtggtggtcctcgtgttcctgttcgtggtcgcgccttcgctcttcttcgtcgtgcgcaatggcggtcgcggctacggccacggccacgtagccgtagcctccgatcccaacggtaagaatgatgatcaggaaccaacggcaatgaagaacctcaaatcttttttgcctaaggaggtgtttgatgctataactgctagacaacaagaatcagacactttgagtcttgatttttttaggaatcacgcatcgccctcttggaaaactaatgatctagtcactgagaagagcatggatgtcgatgacaaggctaaagctgaaatcagtttgccagaacatgatctaccaacaaatagatcacccaaagatccagatgaacatcaagctgacaatgcagcaaaagtagctcgaaggaaacttagggagacaaggcgcgagaagagagcaatggatttggttcataaagatgatgaagcacatgttaagcaggagaatgccgctattgagcgatcaaaagctgtcgattctgctgtgcttggaaaatacagcatatggcgaaaagagaacgagaattcagattctacagttaggctgatgagggaccaaattattatggctcgtgtctattctgcgcttgctaaatcaaagaacaagagtgatctatatcaaaaactgcagacccgaatcaaggaaagccagcgggctgttggagatgcttctgctgatgctggcctgcatcacagcgcacctgagaaaatcatagcgatgggtcaagttttatcaaaggctagagaagaagtttataattgtatggcaatcactcagaaactaagggctatgcttcagtcagcagatgaacaggtcaggtgcttgaagaagcagagtacatttcttagccaattggctgcaaagacaattccaaacagcattcactgcttgtctatgcgtttgacgattgattactatctcctcctccttgaggaacgaaaatttccaaggagtgaaaatttagaaaatccaaatctctatcactatgcacttttctcagataatgtcttggcagcttctgttgttgtgaactcaaccatcatgaatgctaagaaaccagagaaacatgttttccatcttgtgactgacaagttaaactttggagccatgaacatgtggtttctgctgaacccacctggcaaggctaccatccatgttgagaatgtggacgaatttaagtggttgaactcatcatactgtcctgtgttgcggcaacttgagtctgctgccatgaaagagtactatttcaaagctgatcggcccaccagtctctcagcaggttcttcaaacctaaagtatcggaaccccaagtacctctctatgctgaaccacttgaggttctatctcccagaggtctatccaaaggtggataagatactcttcctcgacgatgacatagttgtgcagaaagatttgacagggttgtgggatgttaatcttaatggaaaggtcaatggtgctgtggaaacctgtggggagagtttccaccgttttgacaagtatctcaatttttcaaatccacacattgctcggaactttgatccaaatgcatgtggctgggcttatgggatgaacatctttgatctgaaggagtggaagaagaaagatattactgggatctaccacaaatggcaaaatatgaatgaaggcagagttctttggaagcttgggacacttccgcctggcctcttgaccttctacaagttgacgcacccactggacaagtcatggcatgttcttggactaggatacaacccaagcgtagaccgttcagagatagacagtgctgctgttgttcattacaatgggaacatgaagccatggttggagctagcaatgaccaaataccgaccatattggaccaggtatatcaagtatgatcacccttacatccgtggatgcaacttgagggagtagtagatatagtcgtgctgaaacactgacagatgaggacgagcctgctggacagaagtgttccatgtccttgcggtgcgttgttttactgagcaaactggtactacctgaagctcttggttggacataacgacatagttgctcatgtgagagtagaccagacttagacacaatcacacaagaggattcactcacgtggaatacatttgccctacgttgaaattgatgctactttgaaaacca

SEQ ID NO: 108880 - DNA, 1508 bp, Zea Mays
tcaaccttgcctttacaaactccacaaccatgaatccctacttagaaaacaattttcttgtgcggttgatggaagaaatggaagaggaagaagaagagttgcagttggcgaggcacatggtcaataggaggcgacgtgcacgcaatgagcgtcgtcatggtggttcgattccagggcgtgttaggattcatcgtgatcacatgagcggcgatgcaagaatccgagcggactactttggagcgaacccggtgtacacggatgctcaatttcgtaggaggttccgcatgtgtcgccatgtgtttgagcggcttgttgatgttgtgcaacaagtggatccttattttattcagcgtccaaactgtgcgggtgagattggtctttctgctctacagaaagttgttgctgctgttcgaatccttgcttacggtattccggctgatgccgttgacgaatacgtacacattggtgaatctactgctcatgaggcattgaaacacttttgcacggtcgtccaaaccgcgtttgctccgtattatctccgtgcaccaaatgcagaagatatcgcacgccttctccaagttggcgagtcacgtgggtttcctggtatgcttggtagtgttgattgcatgcattgggagtggcgtaactacccaagttcatgaaagggcatgtttacagggcgtggtaaacatcctaccatgatcttggaagttgttgtgtcgtatgacctgtggatatggcatgcatattttggtctgccaggtagttgcaacgacataaacgttcttcaccgttcaaacctttttgaaaggcatctgagcggtgacacacctctagtttcattcactgtgaatggtcacacgtacaatatgggatattacctagccgatgggatttaccctgactggcccgcatttgtgaagacaatctgtaacccctacgacgttagaacccaacactttgcaacaattcaagagtctgctcgaaaagatatagaacgagctttcagtgtactccagaagagatggggtgtggtccgtggccctgcatacggttggagtcctgaacacattggggacatcatgaaaacatgcataatattgcacaacatgatagtagaagacgaaggtccattgtctttgaacacaacctttgaaaacatcggagtgctggcagacacaactcaaggttcaatggaagagcgcaacgacttcgtcaatcaaaggtacaaccaactgaaagaccgcaacaaatatactcagcttcaggttgatctgatacaccatcactgggcgtgacatggatccggagttgcataggaagcaatgaaacaagttgtgtcgtgtctgttcttatctactgtcgaactgttattgtgttgacatgtttagtttacattgttgtactgtctgtcgtagtgtcatgtctgttcttatcaagtgtgtgtactgtctgtcgtagtgtctcatgctgctgtttcaattcaataacaaggagtactactgtca

SEQ ID NO: 108881 - DNA, 1929 bp, Zea Mays
aaactgccttttcttccggcttccaacttccaagtggcgactgctgccgactgccgggtgcgagaagagggagagatcagagtatcagacaagctgttgtccgaatccactccggcgaggacgagtgctgaggtcgaaatggggagaggagcggatgaggtggtgaaggtcgtggattcggaggacggcgagggggaggaggaagaggcagaggccgcggcggcggaggggtcgagcaaggagacgccgatgctgccaaggatgccggtgcgcgtgctactcgccgagggcgacgactccacgcgccacgtcatctccgcgctgctacgcaagtgcggctaccgagttgctgcagcctctgatggtgtgaaggcgtgggacatattaaaggaaaaatctttcaacatagaccttgttttaactgaagttgaactgcctttgatgtctgggttcctcttgttatccacgatcatggagcatgatgcatccaagaacatccctgttataatgatgtcttcacacgactctgtaagcatggttttcaaatgcatgctaaagggtgcatcagatttccttgttaagccgctaagaaagaacgaattaaggaacttgtggcagcacgtttggagaaaacaactggcaaacggtgggcccgatgtgcagcacatacaagaagagaatcttgcagaaagaatggaacagaagactggcgtgacaaaagatgataatttgaacagcgatggtccctgtaaaaatagagaatgcagtgaacaagaaagtgatgctcaaagttcttgcacaaggtcagagttggaggctgaaactaagggtaataacttgattccaacaagagaagacgatttattgccaaagaaaagaacatgtttgaatgacaataattctgagagaacttccagagatatggagctagtccacattatggacaatcagcagaagcatgacacacagagggatgtggatactatgagaacaacatccaggagaaatgatgagaagaactccatcccagcacaccagttggaactttctcttagaagaactgactatggaaaattagagaaccacgagaaaaatgatagaagaacactgaaccattcaacttcatctgcattttacttgtataattgcaggacagcgtccagcttaggaaatgctggtgatggtcaattatgcagcacctcagaaacactagtggatgttgaaaatagaaatggagatttggcagctctgtctgaagacacgactgaaacaaatcgtcctcctatcagagttgtaccatttcctgtccctgttcaatgcttcacatttgatgggcagccgttctggaatggtacaccggtggcatctccattctacccacagtcagctccccccatttggaatagcaaaacaccaacgtggcaagaatcaactccacaagcaacttcactgccacaaaaatcgcaacagaaagaaccagttgaaatggatgctaaaccagttgaaaatgcagaggaacaatttgtcgtaggtcctcccagtgccagtgggaagcagctgcatgttgaaattcctaaagatgatctacggcatatttctcctgtgaccggtgaaagtggaatcagtacggtgctagacagcaccagaaatactctgagcagcagtggctgtgatagcacttccaaccagatcaccgcccctactgaaccatcatccaatgtatacaggggcgttcctgaaaccgcaagagccgaaggtttacgacacctgagccagcgtgaggctgcactgaacaagttccggctaaagaggaaggacagatgctttgagaagaaggttcggtaccagagccggaaattactcgcagagcagcgtccacgggtcaagggccagtttgtccgtcaagatcatagcatccaaggaagctag

SEQ ID NO: 108882 - DNA, 1206 bp, Zea Mays
cggatcgacgggcccaccacatctccccatccacgccatttaaatacacccagtttcgatgttgagcggcatcacaatttcactccaactcatctttttctcgttaagaaacctctaaaatttcccccactcgccagtccgcagcagcaccctgtacagtcatggacgccaccggaacccggtagcaaggggaagaagggggcggccgggcgcaaggcaggcggccccaggaagaagtcggtgacgcggtccgtcaaggccgggctgcagttccccgtcggccggatcgggcgctacctcaagaagggccggtacgcgcagcgcgtgggcactggcgcccccgtctacctcgccgccgtcctggagtacctcgccgccgaggttctggagttggcagggaacgcggcgaaagacaacaagaagacgcgcatcatcccgcgccacgtgctcctggcgatccgcaacgacgaggagctcgggaagctgctggccggcgtcaccatcgcgcacggcggcgtcctccccaacatccactccgtgctcctgcccaagaaggcggcggagaaggcggccagcggcggcagcaaggagcccaagtcccccaagaagggcgccaagtcccccaagaaggcttagaaagtagggtcttcatttgcgctgtgtgctgtagcatgttcgtgtctagatctgtggatgggatgtgtcctgctctagtatcgtccttgtgtcttattgtatgttcgtcttcatcgagaagatcttcagcagtcagagctcgttgtgtactaatgttcccccatgttctgtttctcgttctgattctgcaattcgtcatattgttgaatttaatggttatgtggaatcgctaaaaagacatggtcatccgtatctgcattgaagcataataacgaaactaattgccaagtgtcaataaaaatacatgagggttcggcgtaggcatgtttgctttagcttttttacaacgagcttttacaataatcttgcctatgtacatatttctgcatttttttattctgcaatagattggtcatagacattaaaggtcaggatgaagtggatctgtggttcactaaaacctagaaatgttcggtttgattccattccatgtgctggtggtaggtgtggttcaatctgagccgaggggataaagagacatggaatagcctggttttattcaagattgaa

SEQ ID NO: 108883 - DNA, 261 bp, Zea Mays
ttgacgaacagcttcccgtcaagctccagatgggcagtctccagcaacctttccagcccgggacggtgctccgtttcgggagtcttgagttcatgtccctcgacggcagctacgacatgatactccttcccccaccgtgcgacagcaacaatggcggccgacagcccgcccgtcggcggcggaatcgacgacgccttccccgcgtggtggaagaacgacatttgagctcaccccgccctctccccacattgatatatatat

SEQ ID NO: 108884 - DNA, 1907 bp, Zea Mays
tgccaggggtccagtgctgtgttttgttggaccacctggtgttgggaagacttctttggcctcctccatagcaaaggccctgaacagaaaattcttaagaatctctcttggtggtgtaaaagatgaagctgatattaggggccaccgaaggacatacattggaagcatgccagggagacttattgatggactaaagagggtatctgtgagcaatccagtgatgcttctagatgaaattgacaagactggttctgatgtacgtggtgatccagcatcagcactactggaagttcttgatcctgagcagaacaaagcattcaacgatcactatttgaatgtgccgttcgacctgtcgaaagtcatatttgttgcaactgccaataagatgcaacctataccccctcctctgttagataggatggaagtcattgagctgccaggctacacacctgaagagaagttaaaaatagccatgaaacatctcataccaagggtattggagcagcatggcttgagtacggcaaatcttcagattcctgaggctatggtcaaactgatcatcgagaggtacactagagaagctggtgtgcgcaatcttgagcggaacctagctgcattggcccgtgcagctgctgttaaggttgcagagcaagttaaaactcttagacttggcaaggaaatacaaccaatcactacaactcttcttgattcgaggcttgctgatggtggtgaagttgaaatggaagttattcccatggggcatgatatgtcaaacacttatgaaaatccatctcctatgactgttgatgaggctatgctagaaaaagtacttgggcctcctagatttgatgatacagaagctgcagatcgtgtagcaagcccaggagtatcagttggccttgtctggacttcggttggtggggaagttcagtttgtggaggctacagccatggtgggcaagggtgacttgcatttgactgggcagcttggtgatgttattaaggagtcagcacagttagctttgacatgggtgagagcaagagctgctgacctcaatttgtcacctgcttctgatatcaacttattggagagccgtgatattcacatacattttccagctggtgctgtgccaaaggatggcccttctgcaggcgtgacattggtaacggcactggtgtcactttttagtaacagaaaagtcagagcagatactgctatgactggagagatgactctaaggggcattgtattgccagttggtggtgttaaggacaaggtacttgcggcacatcgttatggaatcaagagagtaattttacgtgaaaggaacatgaaggacttatcagaggttccatcaccgattctctctggcatggagattctgcttgtgaaacacatcgaggacgtactcgaccatgctttcgaaggcggatgtccacttaaatcacgctccaagttatagcatccaactcgcctttgctatggatatttgcttcggaggatcatcgtcaacagtaccacgaatggtcaacagtcagaataagagcctagctctcttgccagcacaggtcttgacacgcccatttttgttaggcttcgcatctgaatgtgtatactggtcagaattcggagagcagtcagaagatctgctcgttcacctgctgggactcattgcatagtttctcgacaccagctgttgatgtttatgcacagatgcaacagaaatcagggaggaattacgctggttggtttctctgtcgtgggtgtatatatgtatgtatgcatgtaatctaatccagggaaatatagctacaacaaggttgtcaaaactaaagacatcgagaaacatcacacgtcctttgggcttgggtgactttattataaatgtatgtacatataacccaaaa

SEQ ID NO: 108885 - DNA, 653 bp, Zea Mays
acccaaccctctatcctcgtcgtcttccacctcacgccctctttttactctccagttttttttttctctgctttgccgtacgttggtgcgcctctcccctcctcagctcctctccacggctccaacccacctcggcatcgacgccgatttgttacatggcggactcgccggtggagctgccgaaccggctcgccatactgcctttccgcaacaaggtgctgctccctggagccatcgttcggatccgatgcaccaaccccagtagtgtgaagttggtggagcaagagctctggcagaaggaagataaaggactgatcggggtacttcctgtgcgggactcggaggcaacagctattggctctttgctgtctcctggtgtgggcagtgattcaggcggaggaggcagtaaggccgtcggttctgcaggagagtcatcaaagcagcacctaaaaaatgggaaggagcccattcagtggcacaccaagggagttgctgccagagctttacacctttccagaggggtggagaagccaagtggaagggttacatacattgttgttcttgaaggtctatgtaggttcagcgttcaggaactaaatgcaagaggaccataccattttgcccgtgtttcgcgccttgacatgacaaagact

SEQ ID NO: 108886 - DNA, 1241 bp, Zea Mays
cccaacccagcccaaagccgtcagatcgcggcactccgtccaaccctcctgggtacgacgacgatgacgatgaggccatcgtcaccccctccgtcccctacgacccgatggcgctaaggaaggcgttcgagaaggtcgtggtgaagcgactaatgacagacatcccgttcaacgtcttgctctccggcgggctggactcgtcgctggtggcggccgtcgtcgttcgccacctcgccgggacagaggccgccaggcgctggggcaccaagctccactccttctacgtgggcctggagggttcccctaacctcaaggcggccagggaggtggcggagtacttgggcaccctgcaccatgagttccacttcaccgtttaggacgacatcgacgccatcgaggacgtgatctaccacacggagacgtacgacgtcaccacaatcagggcgagcacgcccatgttcctcatgtcgcgcaagatcaagtccctcggggtcaagatggtcatctccagcgagggctccgacgagctcttcggaggctacctctacttccacaaggcgcccaacaaggaggagttgcaccgcgagacgtgcaggaaggttaaggctctgcatcagtatgactgcctgagagccaacaaggcgacgtcggcttggggcttggaggctcgcgtcccgttcctggacaaggagttcatcaatgcggccatgagcatcgatcctgagtggaagatggtccgacctgatcttggaaggattgataagtgggtgctgaggaaggcattcgacgacgaggagcatccattcctgcccaagcatatcctctacagacagaaggagcagttcagtgacggcgtcgggtacagctggatcgatggcctgaaggctcatgcagcatcaaatgtaaatgttgccatgtcaatttaaggacagctctgttttttctctctctccatggatcatgatccatatacatacactatttgaatgttggtgactgacaagatgctgtcgaatgcaaagttcatcttcccacacaacactccgaccaccaaggaggcctactactataggatggtcttcgagaggttcttctcacagaaatatgctatcctgacggtacctggcgggccaagtgtggcgtgcagcacagccaaggccatcgagtgggacgcctacaatagggtcttatagagtagtaatagatttgtgagtcgttgcaatgcatatacacctactatc

SEQ ID NO: 108887 - DNA, 1702 bp, Zea Mays
gaagcgggccctccactacaccccctgctggcctgctctctctcgcaacagccccacgtcttacaaccgatcccgagactacacggcacgctcgtctcctggcgcggctgtagcctgtagggaacggcgggtgcgggtgacatgagctgcttgggctggttcaagcggaggtcgaggagcggaggatcggcggcgaagcgaggagcgtcggcgccggtgtcggcgtcgggccccgcgaccacaacgacgaccacgacgacggccacgacagcgtcggcggtgagcacgagccggtcggacgactcgggcgcggcgcggccggcgagcaagtcggcggggtcggccggctcgtcgtcgcagtcgcaccggagcatctcctcgctgtacgaggagcggggccacggccagctgcgggtgttcggctacgaggagctccagggcgccacggccgacttcagccgcgcgcagaagctcggcgagggcggcttcggcagcgtctacaagggcttcatccgcggcgccgacggcaagggggaccgcgtccccgtcgccgtcaagaagctcaaccagcgcggtatgcagggacataagcaatggttggcggaagtacagtttcttggtgttctggagcacccaaatctcgtaaagctacttggatattgcgctgttgatagcgaacgaggggcacaaagattgctagtctacgagtttatgcccaataagagcctggaagaccacttgttcaggcgagctaatcctcctatatcatggaacacaaggcttcaggttatcttgggggccgcagaaggattggcttacctgcatgaaggggtggaagttcaggtaatctaccgggacttcaaaacgtccaacgttctattggacaaggacttcagagcaaagctatcagacttcggcctagccagggaggggccaactggagcaaacactcacgtctcgactgcggtcgtcgggacgcacgggtacgctgcgccggagtacatggacacggggcacctgacggcgaagagcgacgtgtggagcttcggcgtggtgctctacgagatcctgacgggacggcggtcgctggaccggaacagaccggcggcggagcagaagctgctggagtgggtggcccagttcccgccggacagccgcaacttccggatgatcatggaccccaggctccgcggcgagtactcggcgaaggccgcccgggagatcgccaagctggccgacagctgcctgctcaagaacgccaaggagcggcccaccatgagcgaggtggtcgaggtcctcaggcgggccgtgcaggcgcacgccgagcctgacggccggactcccggccccggcgccagggggaagaaagccgccgccgccgccgccgccgccgcgccgtccaggcggtgatggctacatgtcgtcaccggtaaaggcgcgctgttgccttatttctgagaccattgtttggtcagtcctagccgtgactcggtgagttgtgattgtgacagcacaaaaggaatgtttatgcttgggtacattcttggacacattgcttagacgacttgtgtacatatagatgagttggcggattgaactttgttagctttcgaaagtgagcattttgaaagaaaaaaaatatataggtctcaaggagtcaaggatttcgaaagtgggcaactgagaagatgttgcgctggct

SEQ ID NO: 108888 - DNA, 523 bp, Zea Mays
atgacgcagggtcattgtgcagtgcctccgatcagtgaagatggccgtgtcattcgttgccagactcctaacgctggcgttggggtacgcctgcccggcgtacgactgctacaagacgctggaactgaacgcacccccgcaggtggagcggctgcggttctggtgccagtactggattctgctcgcgttcctgaccgcgttggagggcttcgccgagtgggcgctcccgtggtacggcgaggcgaagctggcgctcgtcgtctacctctggcacccaaagacaatgggcgcgaggcacgtctacgacgactacctccgtccgttcctgacggcgcacgaggcggacatcgaccgcgggctcgcggagctgagggccagggctgcggacgcgacggcgtcgcacctccaggcggccgtggcgctcgggcgggcgtgcctgtccgaggtcgtccgccgcgtttcgccgcagctgctgcaggcgaccgggagcgcgggaccggccgcggtcgggcaggtacagtga

SEQ ID NO: 108889 - DNA, 112 bp, Zea Mays
tatgttcattcctcaaatttagtgggatgacctcattcctcgtattattactaactataaggaatgggttagtgatagatcaacacattccattccacaaacaaaaaaaaga

SEQ ID NO: 108890 - DNA, 282 bp, Zea Mays
atggcgaccacgccgcgcacgccactagtgggcgagaagaccggcatgaactcacgggaggcgaggcggcggtggagatggggtcaagtacacgcggggtgctgcggctggctcatcgtcgctggttgcggcgctggtggccacgtcggcggtgttcgccatcatgaagcgcaagcccgggggcgccacatcaagccgctcccggtgccgggaccgccgggggccatcgactccaagtacggcgacgcgctccagttcttccaggtccagaagggtgggtag

SEQ ID NO: 108891 - DNA, 1393 bp, Zea Mays
cccgtgtccggtggttgcggttgccccttgcccgcatcatcccacctcgcgaacgaggacggcttctagtccctcgcctaccccgcccccgaacctggcgtctgccctaccaaccgcagcagcgacactagaatggccgcggcgccgtcatccctcgcgtcctcccacctctccccaatcgcggcggtgtccactcccgccgtcccacatcagcttcgcatcggctgctcccgccgccgcgccgggcgcatcgttgccatggctggatccggcaagttcttcgtcggaggcaactggaagtgcaatggaacaaaggactccattagcaaacttgtctctgaattgaatgctgctacccttgaaactgatgtagatgttgtggtggcacctccatttatctatattgatcaggttaagaattcactaactggtcgcattgaggtttctgctcagaatgtgtggattggaaaaggaggagcctacaccggagagatcagtgccgaacaactggtggacatcggctgtcaatgggttattcttggacactctgagcgtagacatattattggtgaaaatgatgagtttattggaaagaaggctgcatatgcattgagccaaaatgttaaggttattgcctgcataggagagctgctggaagagagggaagcaggcaaaacttttgatgtatgttttaggcagatgaaggcttttgcagatagtatttcaaactgggcagatgttgtaattgcatacgagcctgtttgggctattggaaccggaaaagttgctactcctgaacaagcccaggaagttcatgctgctgtacgcaattggctgaagaccaacatatcacccgatgttgcctctagcactcgaataatctatggaggttctgtgaatgcagccaactgtgcggagctagcaaagaaagaagatattgatggttttcttgttggtggtgcctctttgaagggccctgatttcgccaccattatcaactcggtgaccgctaagaaagttgcagcctgatgagccctgtctgttagaaataagtggtcatctgtgtttcaacctcacctgccacgccgtaaagcctgtaggaggtgatccgtgtgatggtgtgccgtcaccttcctgcctttgctgatttgcagcaccacggaaacagaaaataacgcaagatgtcacaattttttttttgttctcgtagtccgtagaccttgtgtacgttacgggagttcagttgcacgttggcgatgtacgtttagaatattcttttgctctgtccttttgtaaggggaaaataatttgttgacagacgaggagaaatgataagtgctttttttatgcctcggtacttgaactacaagttgtagtagaaatggtaagtgcc

SEQ ID NO: 108892 - DNA, 1203 bp, Zea Mays
tttggtgttgcctcaagtcttcaaactaacttgcaaaaaagtttctcctacccaattcagtgcaattttgagagaactgcgttggctgttcaaaccttggggtgtgcctcaaaaaactttcccacaacctatcttggtctccctctgagcagcaaaaaacttagtgctgaagacctcgctcactggatagagaaaattgctgccaagcttccaggatggaaggctgaacttttaaatcttgcggggagaatcactcttatcaaatctgtactctctgccatcccagtttacttatttattgatcttaatgctcctaaatgggttataaaagccattgataaaattcaacgaaacttcttatggaaaggaagaaagaaggctagaggaggtaactgccttgtatcttgggataaaatctctcggcctcttgatttggggggccttggaattcctaatctccaaaagatgaactgggccctacaattgcgatggctttggctataaaaaactgctccttctaagccttggagtggcctggatcttaaaatagcatcccaggcccgagctttatttcaggttgcagtgtctaccactattggtaatggtatttcaactttcttttggaaagataagtggattcatgggtattctattatggatatagctccccttattgctgctgcagttccgaagaaaattaaagttgtaaggactgtgcagcaggctcttacctctcacttctgggttcatgatatccagaggaatctctctctggctgagattgagcaatatctacaattatgggaggtaattgattcttttcagcttcaaaattcaaatgaccaacatgtgtggatttttagcagcaatggactgtatacctccaaaactgcctatagagcttttttcattggagcggaatcctttgagccctagaaaagaatttggaagagctgggcagcccctaagtgtaaggtctttgtttggctggccataaacaataaatgttggacagctgacagactcaaaaaaagagggcttgatcaccctgaaaattgtgttttatgtgaccaagaggacgaaactgtgcagcatattttatctaattgcgtcttcacaagacagttttggcatagtatcttaactccaattgatctctcttatgtgggtcctaaaagaagagattcagactttgctgaatgg

SEQ ID NO: 108893 - DNA, 1307 bp, Zea Mays
accccggcggtcgcccggcgccgctgcaggccgcagttgtaggtacagggacaaatccccggttctttctccaccctccgaccggccggcggccgctgcaagtttcaccgcagttggcaactggcaaccccgctctgacctaggaggatgtcgggtttcggcgatgggtacgtggggacggcgcaggacgcggtgaagatccggcggctggagaagcagcgcgaggcggagcgccgcaagatcgaggagctcaagaacaagtccgcggacgggcagcccggcctcctccagttcggctccagcacctccgagattcttgagactgcatttaagaaggaaacagttggtctcgtcaccagggagcagtatgtcgagaagagggttaacattcgaaccaagattgaggaggaagagaaagagaaacttcaaaagctgcaacaagaagaagaagaattgcaaatgcagaaaaggaaaaagaggagagtgaagagtgatccacgcttatctttctgtgatgacattgagaatggaagtgacgaagatgattttgagaatcaagaaaccaagaaaaatggccctgccaaacttgggaaggatccaactgtggagacaagttttctacctgatagagaaagggaggcagaggaacaagcagaacgagaacgactgaagaagcagtggtcgcatgagcaggaattgattaaaaatgaacctctttcaattacttacagttactgggatgggactgggcacagaagagcaatccaggtccgtaaaggtgacaccattggagaatttctaagggctgttcaacagcagcttgcccctgaattccgtgaagtacggacaacttcagttgagaatctactttatgtgaaggaagatcttatcatccctcatcaacacagcttttatgaattaattatcaacaaagcaaggggcaagagtggaccacttttccattttgacgttcatgaggatgttcgtaccattgccgacgcaacaaaagaaaaggatgagtcccacgcggggaaagttgtagagaggcattggtatgagaaaaataagcatatattcccagcctcaagatgggagatctatgacccaacgaagaagtgggaacgctacacaatccatggggattagcatggaacatcatacatagagagttaaattattttgtactttggatgtccgaaattaccagcactcaagaatatgagaatggcacaagtgacgatttgaatagcataaattattactgttgtttgcaaacatgtcctgcatagagtactaggtaaagcctc

SEQ ID NO: 108894 - DNA, 1634 bp, Zea Mays
accccggcggtcgcccggcgccgctgcaggccgcagttgtaggtacagggacaaatccccggttctttctccaccctccgaccggccggcggccgctgcaagtttcaccgcagttggcaactggcaaccccgctctgacctaggaggatgtcgggtttcggcgatgggtacgtggggacggcgcaggacgcggtgaagatccggcggctggagaagcagcgcgaggcggagcgccgcaagatcgaggagctcaagaacaagtccgcggacgggcagcccggcctcctccagttcggctccagcacctccgagattcttgagactgcatttaagaaggaaacagttggtctcgtcaccagggagcagtatgtcgagaagagggttaacattcgaaccaagattgaggaggaagagaaagagaaacttcaaaagctgcaacaagaagaagaagaattgcaaatgcagaaaaggaaaaagaggagagtgaagagtgatccacgcttatctttctgtgatgacattgagaatggaagtgacgaagatgattttgagaatcaagaaaccaagaaaaatggccctgccaaacttgggaaggatccaactgtggagacaagttttctacctgatagagaaagggaggcagaggaacaagcagaacgagaacgactgaagaagcagtggtcgcatgagcaggaattgattaaaaatgaacctctttcaattacttacagttactgggatgggactgggcacagaagagcaatccaggtccgtaaaggtgacaccattggagaatttctaagggctgttcaacagcagcttgcccctgaattccgtgaagtacggacaacttcagttgagaatctactttatgtgaaggaagatcttatcatccctcatcaacacagcttttatgaattaattatcaacaaagcaaggggcaagagtggaccagtaattcttctttcttttgtgatgtgtatatattctgctcaaaacatgttgtttgttgtgaagtttttcctagttttttttataaacaactgtgcagttcttttttccattggtgtttccaccatgtaatacttggcttaactgatcactgttatcgtttcatcacagaagactagcagtttcttctttctttaacctcattaattcgcaattttaagaatattggagctgaaaccaaatgatttcgtaattgtagttgcttacagatgctaagagatcctttttgttattccagatggattatttcttcatggcattagagtttaaacatttaatgacactgatttttgttgacagcttttccattttgacgttcatgaggatgttcgtaccattgccgacgcaacaaaagaaaaggatgagtcccacgcggggaaagttgtagagaggcattggtatgagaaaaataagcatatattcccagcctcaagatgggagatctatgacccaacgaagaagtgggaacgctacacaatccatggggattagcatggaacatcatacatagagagttaaattattttgtactttggatgtccgaaattaccagcactcaagaatatgagaatggcacaagtgacgatttgaatagcataaattattactgttgtttgcaaaca

SEQ ID NO: 108895 - DNA, 307 bp, Zea Mays
gttttccattgatatgctgcattctaacaaatgcttggtcactggctcactgcagtcccacgcggggaaagttgtagagaggcattggtatgagaaaaataagcatatattcccagcctcaagatgggagatctatgacccaacgaagaagtgggaacgctacacaatccatggggattagcatggaacatcatacatagagagttaaattattttgtactttggatgtccgaaattaccagcactcaagaatatgagaatggcacaagtgacgatttgaatagcataaattattactgttgtttgc

SEQ ID NO: 108896 - DNA, 1012 bp, Zea Mays
aatagcagcagcgctggcaacaacggcagccaccaacccggtggacgaagccatgggcgccttcttctcgaagcaggtggaccggcggaagctggtggccgccgagaagcgggcgctggcgacgcggctgtcgtcgtcgggcgacacgttcccggggtctgagcaccggccggcggaccggaagcggtggatggcggagctgggcgccggcaggctgcgcgtgcaccaggtggtgtggcccggcacgcacgactcggccaccgaccggatcggcgtgccgttcgtgacccgccccttcgcgcagtgccagtcgctgtccgtgtacgagcagctggcgctgggcgcgcgcgtcctcgacgtgcgcgtccagaaggggcgccgcgtatgccacggcgtcctggccacgtaccccgtcgacgtggtgctggacgacgtgaccaggttcctgggcgagaccgagtccgaggtggtcgtcctggaggtgcgcaccgagttcgggcacgaggacccgcccgagttcggcaggttcctggtggagaggctcggcgagcacctgctgatcccgcaggacgaggcggtgttccacaagaccgtcgcggagctgctcccgcgccgggtcatctgcgtgtggaagccgcgcaggtcgccggcgcccgggcccggggagcccctgtggagcgccgggtacctcagggacaactggatcgacacggacctgccggagaccaagttcgagagcaacctcaagttcctggggcagcagccgccggtggcgggccgcgggttcttgtaccgggtggagaacacggtgacgcccaggcccgacaacccggtggtgtgcgtgtggcccgtgacgaggcggatccacggctacgcgcggatgttcatcgccgaggtcttcgccaagggcctcggcgacaagctccaggtcttctccaccgacttcatcgacggcgacttcgtcgacgcctgcgccggcgtcaccaaggcgcgcgtcgacggcaccgcgtga

SEQ ID NO: 108897 - DNA, 393 bp, Zea Mays
cgaagcagagcagagcccttgactccgtgatgttcttacagatagcggcgtttcccttggcaagctgccacagcgccttggctgcgttagctttcatgtatgccttcgtctcagggtcctcgaactccctgccccttgtactcgttcctgacagtgacgcgttgtgctgcttcgttgccgcgacaccagcgttactagtggatgatatgttgctgtgcttaccactgcctccgttaggcttcgcagccatggtggactgcaccagactgtggatctcgttcttgccctggggaacgtgtccagtcggatacctcatgccggcgtgctcccctgcatccagcaagtccggctgaaccgcagaggcggcgttgttctttctgtccatcagcacgg

SEQ ID NO: 108898 - DNA, 1536 bp, Zea Mays
acccttggccttggcctggcgctcgcacctcacagcagcagcagcaacaacaacctccactgccgcaacccaccgagaggcgagaccggcggcggcaaaaggacgatacaaaagcagccagggttgctggcaacagcgtcggtcgcccgcccgctcgccatggggaggtcgccgtgctgcgagaaggcgcacaccaacaagggcgcgtggaccaaggaggaggacgagcgcctggtcgcgcacatcagggcgcacggcgaggggtgctggcgctcgctgcccaaggccgccggcctcctgcgctgcggcaagagctgccgcctccgctggatcaactacctccgccccgacctcaagcgcggcaacttcacggaggaggaggacgagctcatcgtcaagctgcacagcgtcctcggcaacaagtggtccctgatcgccggaaggctgcccggcaggacggacaacgagatcaagaactactggaacacgcacatccggaggaagctgctgagcagggggatcgacccggtgacgcaccgcccggtcacggagcaccacgcgtccaacatcaccatatcgttcgagacggaggtggccgccgctgcccgtgatgataagaagggcgccgtcttccggctggaggaggaggaggagcgcaacaaggcgacgatggtcgtcggccgcgaccggcagagccagagccagagccacagccaccccgccggcgagtggggccaggggaagaggccgctcaagtgccccgacctcaacctggacctctgcatcagcccgccgtgccaggaggaggaggagatggaggaggctgcgatgagagtgagaccggcggtgaagcgggaggccgggctctgcttcggctgcagcctggggctccccaggaccgcggactgcaagtgcagcagcagcagcttcctcgggctcaggaccgccatgctcgacttcagaagcctcgagatgaaatgagcgcgcttctaccctctctgtgtagcttctcccccccgtcgtcctcgtttttgttttgccacacctcacatggatgatgaattgatgatacgtggttggttagttttttcgtaggtgaaaaatacgcgatggtgagcgagtgaaagagagattttgtgccctgggtcctcctccctgctctctcttgctgctccattttgcctccctctgtcctctctctctctctctctctctctctctctctctctctctctgtatctctgtaattaccatcgccaaatgatcatgggggcaatatcatgctaggtctctggaaattgacgctaatcccgtttccaggagctgaggctaggttcagttgcctggtgtggccgccggccgtgcagtctcagaaaagaaacactggagcatgtgctgaggcctgagccagatcttacgtttaccaaacctctagaccagcagcatgtgagcatcgcctaatcgtgcagtccccataaagcgcctcgtgccttagacgacgcctttttccaatctgacctgcttcttcttcttttt

SEQ ID NO: 108899 - DNA, 587 bp, Zea Mays
gttgttgaatgagttccgtggagtttgttgtcgcattgctttcgtctcggcgcttgcgggcgccgccgcggctggagctgggttcggtcggcgcggacgcgcggtgcccgttttgcgggttacggcgaacttttcttaatgccgatggaggttgcggacgtgtgccaccaggtactgttacatctggcctggtggtgcgcgcgtctgtggtggtggccggcttgatgtttgacgaaatgccgaagcgcttttgaacaaaaggctgcagcgacacgcgatggataatctgtaaaaaaggcaccagcatgatgatgttcagtttgcaccgctaaatccaccggctcacacattcagacagagtcaaaggagcatatgaaaggttttttgtcatcttttggtggatgtggatgcactaagaaaaggggctcatggaacagggtaagcatgatattttgttggttgtaagcactgtttcaaaacttgagtgcttctaatacggcaaaccagaaatgttaggtgaacaagagcaacaggcattttgagtctatgatgctaattaatataacaactgctgaaatacaaaaata

SEQ ID NO: 108900 - DNA, 532 bp, Zea Mays
aatcaaaatcagcattaaatttaaactgaatagaatccctgtttaatttagttgccagacaggagctctcaggagaacaagctctttctccttctctgtgtatcgccacctcgagcctgcctgttgtgagtaggaacgtgaagaaaaccgaaaccgaatcagaaattgttcactgtctttgtgatgtcctggaagatcctcagcctcttgctgatcttctccttcgctgctgggctcgtgtcgcagctcgccggcagcttgccgtggccgttagttccagcagctgttggtttgtcgtcgaacaccgggcccaggatatccgcgacgagggcctcgtcgaacgcgctgtggtcgggcagctctggccatctgtcctcagctgagagcgacttcctcctgccgctgttctcgtcgatgctttgcgccttgtccaccactgctcctgccttgtccatgcaattgctggaccgtgtcctcttcaggttgcccaagggatcatggacaggagctggcttcttcttctgctgctgct

SEQ ID NO: 108901 - DNA, 2100 bp, Zea Mays
gtgttctgtgcgtgtctgcgtgagcagcgacgtgccgacagccgaagcgcccgagccatcccatcctcccctccccccaaaggccaaacccattcgattcctccgccccgccggccgaaaccaagtttctccgcggccgcccggatccccgacccccggccccgagcgttccatgggctcgccttccgcatcgaggcattagcaagcctcgcgccgcactgccgagcccccgacgcctgcctttgcctcactggttttggaaggaatccaagatgggtgtaatcagcacagtgctgggtttctctggttttggctttgggttctcggctggcattgttattggttacttcctcttcatctacgtccagccaactgatgtcaaggatgtcaaggttcgcccgcttgtagaatatgattcaaaatccttggagggcatccttcctgaaattcctttatgggtcaagaatcctgactatgatagaattgattggctgaataggttcttggagttgatgtggccttatcttaacaaggctatctgcagaactgcacaggatatcgcgaagccaattattgctgagaacactgcaaagtataagatagactctgttgagtttgaatcacttactttgggtagcttaccacccacctttcaagggatgaaagtctatgtcacagaggagcaagagctgataatggaaccatctcttaaatgggctgcaaacccaaatattactgttgctgtaaaagcctatggtttgaaagctactatccagattgtggatctacaagtctttgcatcacctcgcattactctgaagccattggtgcctacatttccttgctttgcaaaaatccttgtctcactcatggagaagccacatgttgactttgggctaaaacttcttggagcagatgtaatggctattcctggtctttacagatttgttcaggagaccatcaagaaacaagtagcaagcatgtatttgtggccgaagacactagaagtacctataatggatccctcaaaagcatcaaaaaggcctgttggaattctacttgtgaaggttgtgagagcccaaaatctgcggaagaaggatctgctgggtaaatctgacccatacgtgaaacttaagatgtcagatgataaacttccatccaagaagacaactgtaaagcgcagcaatctcaatccagagtggggtgaagacttcaagtttgttgtgacagatccagaaaaccaggctcttgaagttaatgtcttcgactgggaacaggttgggaaacatgaaaagatgggaatgaacatgatcccacttagagaactcctaccagaggggactaaagttactaccctcaacttgcttaagaccatggacccaaacgatgtacaaaatgagaagtctcgtggtgagcttactctagagctcacatacaagcctttcaaggaagaagatatagagaaagaagatacacagggtgctgatgtgatagagaaagctccagatggcactccagctggtggtggcttgctttatgttgttgttcatgaagcccaagatcttgaggggaagcaccatacaaacccatatgcaaaaataattttcaaaggcgaggagaagaaaactaaggtcatcaagaagaatagggatccaagatgggaggatgagtttgagttcgtgtgtgaggagcctcctgtgaatgataaactgcatgttgaagtcataagtaaagccccgaaggcagggctgatacatggcaaggaaactttgggctatattgatattagccttgcagacgtgatcagcaacaagcggattaatgaaaagtaccatctcatagactcgaaaaatggtcagatccagatcgagttgcagtggagaacttcctagacaggaaggagccagaatgccttgatgttcctctattcagtttgcgtatatctgtgattgagattgaggtcatgtagatatttcttttttttatagacatctgttgttcggatcttctcttaatcgatcaagtttccgacaagaactatgcagacatgttacagaccctgagaatggaactgaacaaatgacacgtcatacaattaca

SEQ ID NO: 108902 - DNA, 2091 bp, Zea Mays
gtgttctgtgcgtgtctgcgtgagcagcgacgtgccgacagccgaagcgcccgagccatcccatcctcccctccccccaaaggccaaacccattcgattcctccgccccgccggccgaaaccaagtttctccgcggccgcccggatccccgacccccggccccgagcgttccatgggctcgccttccgcatcgaggcattagcaagcctcgcgccgcactgccgagcccccgacgcctgcctttgcctcactggttttggaaggaatccaagatgggtgtaatcagcacagtgctgggtttctctggttttggctttgggttctcggctggcattgttattggttacttcctcttcatctacgtccagccaactgatgtcaaggttcgcccgcttgtagaatatgattcaaaatccttggagggcatccttcctgaaattcctttatgggtcaagaatcctgactatgatagaattgattggctgaataggttcttggagttgatgtggccttatcttaacaaggctatctgcagaactgcacaggatatcgcgaagccaattattgctgagaacactgcaaagtataagatagactctgttgagtttgaatcacttactttgggtagcttaccacccacctttcaagggatgaaagtctatgtcacagaggagcaagagctgataatggaaccatctcttaaatgggctgcaaacccaaatattactgttgctgtaaaagcctatggtttgaaagctactatccagattgtggatctacaagtctttgcatcacctcgcattactctgaagccattggtgcctacatttccttgctttgcaaaaatccttgtctcactcatggagaagccacatgttgactttgggctaaaacttcttggagcagatgtaatggctattcctggtctttacagatttgttcaggagaccatcaagaaacaagtagcaagcatgtatttgtggccgaagacactagaagtacctataatggatccctcaaaagcatcaaaaaggcctgttggaattctacttgtgaaggttgtgagagcccaaaatctgcggaagaaggatctgctgggtaaatctgacccatacgtgaaacttaagatgtcagatgataaacttccatccaagaagacaactgtaaagcgcagcaatctcaatccagagtggggtgaagacttcaagtttgttgtgacagatccagaaaaccaggctcttgaagttaatgtcttcgactgggaacaggttgggaaacatgaaaagatgggaatgaacatgatcccacttagagaactcctaccagaggggactaaagttactaccctcaacttgcttaagaccatggacccaaacgatgtacaaaatgagaagtctcgtggtgagcttactctagagctcacatacaagcctttcaaggaagaagatatagagaaagaagatacacagggtgctgatgtgatagagaaagctccagatggcactccagctggtggtggcttgctttatgttgttgttcatgaagcccaagatcttgaggggaagcaccatacaaacccatatgcaaaaataattttcaaaggcgaggagaagaaaactaaggtcatcaagaagaatagggatccaagatgggaggatgagtttgagttcgtgtgtgaggagcctcctgtgaatgataaactgcatgttgaagtcataagtaaagccccgaaggcagggctgatacatggcaaggaaactttgggctatattgatattagccttgcagacgtgatcagcaacaagcggattaatgaaaagtaccatctcatagactcgaaaaatggtcagatccagatcgagttgcagtggagaacttcctagacaggaaggagccagaatgccttgatgttcctctattcagtttgcgtatatctgtgattgagattgaggtcatgtagatatttcttttttttatagacatctgttgttcggatcttctcttaatcgatcaagtttccgacaagaactatgcagacatgttacagaccctgagaatggaactgaacaaatgacacgtcatacaattaca

SEQ ID NO: 108903 - DNA, 1950 bp, Zea Mays
gtgttctgtgcgtgtctgcgtgagcagcgacgtgccgacagccgaagcgcccgagccatcccatcctcccctccccccaaaggccaaacccattcgattcctccgccccgccggccgaaaccaagtttctccgcggccgcccggatccccgacccccggccccgagcgttccatgggctcgccttccgcatcgaggcattagcaagcctcgcgccgcactgccgagcccccgacgcctgcctttgcctcactggttttggaaggaatccaagatgggtgtaatcagcacagtgctgggtttctctggttttggctttgggttctcggctggcattgttattggttacttcctcttcatctacgtccagccaactgatgtcaaggctatctgcagaactgcacaggatatcgcgaagccaattattgctgagaacactgcaaagtataagatagactctgttgagtttgaatcacttactttgggtagcttaccacccacctttcaagggatgaaagtctatgtcacagaggagcaagagctgataatggaaccatctcttaaatgggctgcaaacccaaatattactgttgctgtaaaagcctatggtttgaaagctactatccagattgtggatctacaagtctttgcatcacctcgcattactctgaagccattggtgcctacatttccttgctttgcaaaaatccttgtctcactcatggagaagccacatgttgactttgggctaaaacttcttggagcagatgtaatggctattcctggtctttacagatttgttcaggagaccatcaagaaacaagtagcaagcatgtatttgtggccgaagacactagaagtacctataatggatccctcaaaagcatcaaaaaggcctgttggaattctacttgtgaaggttgtgagagcccaaaatctgcggaagaaggatctgctgggtaaatctgacccatacgtgaaacttaagatgtcagatgataaacttccatccaagaagacaactgtaaagcgcagcaatctcaatccagagtggggtgaagacttcaagtttgttgtgacagatccagaaaaccaggctcttgaagttaatgtcttcgactgggaacaggttgggaaacatgaaaagatgggaatgaacatgatcccacttagagaactcctaccagaggggactaaagttactaccctcaacttgcttaagaccatggacccaaacgatgtacaaaatgagaagtctcgtggtgagcttactctagagctcacatacaagcctttcaaggaagaagatatagagaaagaagatacacagggtgctgatgtgatagagaaagctccagatggcactccagctggtggtggcttgctttatgttgttgttcatgaagcccaagatcttgaggggaagcaccatacaaacccatatgcaaaaataattttcaaaggcgaggagaagaaaactaaggtcatcaagaagaatagggatccaagatgggaggatgagtttgagttcgtgtgtgaggagcctcctgtgaatgataaactgcatgttgaagtcataagtaaagccccgaaggcagggctgatacatggcaaggaaactttgggctatattgatattagccttgcagacgtgatcagcaacaagcggattaatgaaaagtaccatctcatagactcgaaaaatggtcagatccagatcgagttgcagtggagaacttcctagacaggaaggagccagaatgccttgatgttcctctattcagtttgcgtatatctgtgattgagattgaggtcatgtagatatttcttttttttatagacatctgttgttcggatcttctcttaatcgatcaagtttccgacaagaactatgcagacatgttacagaccctgagaatggaactgaacaaatgacacgtcatacaattaca

SEQ ID NO: 108904 - DNA, 1682 bp, Zea Mays
gccacagcccgcctcaaatccccggctcggaaacaaccaccgatcacaccaccacattgccgtcaccgtcaccgccggcccgccgccaccgcttcccaagctatctcatggcggcctccgcgtcctccctgcttgcagacgccgcatcctcatcctgcggggccatctctccgcgtccccggttgcttcgtggagctccggccgccgccttcgtcccctcgccgtcgcgtcactcctgctgttccctccgcgcttcccccgcgaggcgccatcggagccgctttgtagccagcgccgttcccacgatgcagcctccggcggagtccagggtctccacggtagtcgatgtcgacctcggcgatcgtagctacccgatctacatcggcgcaggcctcctcgacgagccggacctgctgcagaggcatgttcatggtaagagggttctggtggtgaccaacacgaccgtcgcgccgctttacctggagaaggtggcatgggcactcacccacaacaatcccaatgtgtcagtggagagtgtgatcctgcctgacggcgaaaagtacaaagatatggacacgctgatgaaggtgtttgacaaggcagtcgagtcccggtttgaccgccggtgcacatttgtagcactgggtggtggtgtcatcggggacatgtgtggatttgcagctgctgcattcctccggggcgtcaatttcatacagataccaactactctgatggcccaggtggattcatctgttggcgggaaaactgggattaaccacccactagggaagaacttgattggagcattctaccagccacaatgtgttctaattgacacagatacactgaacacattgcctgacagggagctagcctcaggcattgccgaggtagtgaagtatgggctcataagggatgcaccattctttgagtggcaagagaaaaacatgcctgaattgttagcaagagaaccaaatgctttggcctatgctatcaagagatcttgtgaaaacaaagctgaggtggtcgcacaagatgagaaggaaagtggcctacgagcaacactaaacctgggtcacacatttggccatgctatcgagactgggactggatatggagcatggctccatggggaggctgtcgcaactggaatagttatggcagctgatatgtctcatcgcctggggtggatagatgactccataaaagaacgtgtgtttgccatactaaagcaagccaaacttcccattgcacctccagagaccatgaccgtggagaagtttaaaaacatcattgctgttgacaagaaggttgctgatggtctgttgagactcatccttctgaaaggaccactagggcgctgtgtctttaccggggattatgaccggaatgcgctcgatgaaacccttcacgcattctgcaacaactgacccatctcagttttggacttcacttctgtatgctaatactaggccatgtatatccatcaaagaaaagattgcgatgtacattatcttcattgtctcattggtatatttttgtcagaaataatggtataatcgtttatgtgttggtttgagtttgtagagaaccatgtctaatcaactgtgattgttctctactgataaagaagctctgtcaggtgacaatactttcgtagcggtttaaacctgttttgtgtc

SEQ ID NO: 108905 - DNA, 2701 bp, Zea Mays
tattgttctaatcccattttcatttaatataatacaaacaaatgcacatagtatcattaggaaaagaaaagaagtacaaatcaaattgctccgatgcatcaagtcacactataatcaagttactgtaactatatgagccgaaaatgcggggacagtgaataaagagcactgagcacattaattgaaacaggagcatccaacgggacattacctcaaacacatgttgtgcatccagaacagagctccactcctagaggagagaccccacaagcaaatcttctgttcataacccctccttcgtcgggctccatgacaagccataaccctccgcctcgtgtcccctgagcacaacagcggcgtcgctctttccgttgtcgtagccatcgccgagatggtacacgtgcacctcgtcgacgcacattttggtcggcaccgtatagggacgctgcggcctgcggcatgcagcgcgcgcggttgacctcgcacggtgtggcgccacgctggagacggacatggacgggaacaggacggcgccgcccgaggcagcggcggctgcagcgaggcgaggtgggagcggaagcaccgcgtccaagaccattggcctcgtcggaggtgtgagtgcccacgacgagccgaggacttcgatgggagcgagtgagccacttcacggtgagcgacggccactcgagcgggtgggagatgacgaggtcgtaaagcacagccgcattcctcttccagttccggtactccatctccgccgccgtaggtggggtgcccgccggtgtggacgatccgccgtccatggttactttgatttgatgatttgcacgagaaccggaggcggcatgctgcttgtctcccgccaacagggatttggacgaagcggcgggtgggtaggtaaggagagagcttttaacgcggactagttgggtctcaagacataaaaggcccaaacacatgctagtaactactagagcaagcccgcccattttcggctcatgagcccacgaagtagaggcttggcttgagcttatcaagcactctctcgaactcgcgtccgtttgcagcaccctccgccgtcgagccgccgcgatgatgcagtcgcacctgccctccccggcgaggctggggctcacaacctcgtcgccgtcgctcccgcccaatccggtccccttgaatcccacatcctcgccttcacatggtagcctgccctcgagtgcagccgccggcaccagcgctgccccaaccctaatcacctcgccgtcgctgctaccgctcctgccgccgcttccgcgcgcgcaatcgctgctccagcttatatcgtcgctcgccaccaacctcttcgagctctcgcccaaccgcgccgcgtggatcttatcgtaccgggggtcgctccccaccttcctcccatcggcgtcctcctccgcgccgccgctcccaacatcgatctcctctaccaaggacgcgctctctcttctcaccaccctgcagacgcagctcttcgaggccgtcgccgagctgcaagagaccctcgacctgcaggatgcgcgcgctcgccttgtccgtgaggcgcgtgccaaggatgcttcgctggtaacctttgcgaagaagctgcacgaggctcaccaggtacttgaccgcctcgtcgacgattacgctgactaccgccgcgatcccaaacgcccacgtggcgccgctgcggctgacgatcccgagccggcgtcggaaggcgacttcggcacgtccctccactccagccttaagctggatgacatcctgacctacgcgcaccgcataagttacacaacctttgctccgccggagcatggggctgggctgcctctccgtgtcagcctgccacctgtaccacaggaaaatcagatgagggcgtcgcagctgtatctttttgctgatttggatgtaggtgtgcccaagaagccattggatgcgaaggagggaatcgcaccagaagtggaggctgcgccgctgtatgagccacctcaggaggggccatcgaggctaccaaacaccttgccacccatgttccctaaggagctaaagccgccaccgggatggaagcctggtgacccgatcacgataccacttgatgagatactacctggtatcaagggtgcagagccacagccccctgtgccgcaggcacctgtttcagtgagaccagtggcgccaatgggcccagagccaatacaggtcaagcctgtgcagcttgattttgagagcagtagtagtgatgagtacagtagtgatgttgggagctcagaagaagatgatgaggattagtgctcggggttatgccagatcttctcaatcactggaagcttatcattcacattgtgaagtaaggatgaactcgagtacaattgaataacttggtgaatcatttttaatagatattccaactaccttgttattgcatatactttgttgatgaatagtctaggctagttggatgatccacgtgcgattcactattcagtaaatgatttgttggctccgtttgcatgtctaaccttggggatgtagctgtttaaatgcaacctggaactttatttaagcttttggtgtgatgtgcaaggtatcatacgcaattgcaacgatactgcacgtccacattccagcatttgcttattttgacccttgagtatattgggacaagggataaattgtcttcaattggtat

SEQ ID NO: 108906 - DNA, 2504 bp, Zea Mays
tattgttctaatcccattttcatttaatataatacaaacaaatgcacatagtatcattaggaaaagaaaagaagtacaaatcaaattgctccgatgcatcaagtcacactataatcaagttactgtaactatatgagccgaaaatgcggggacagtgaataaagagcactgagcacattaattgaaacaggagcatccaacgggacattacctcaaacacatgttgtgcatccagaacagagctccactcctagaggagagaccccacaagcaaatcttctgttcataacccctccttcgtcgggctccatgacaagccataaccctccgcctcgtgtcccctgagcacaacagcggcgtcgctctttccgttgtcgtagccatcgccgagatggtacacgtgcacctcgtcgacgcacattttggtcggcaccgtatagggacgctgcggcctgcggcatgcagcgcgcgcggttgacctcgcacggtgtggcgccacgctggagacggacatggacgggaacaggacggcgccgcccgaggcagcggcggctgcagcgaggcgaggtgggagcggaagcaccgcgtccaagaccattggcctcgtcggaggtgtgagtgcccacgacgagccgaggacttcgatgggagcgagtgagccacttcacggtgagcgacggccactcgagcgggtgggagatgacgaggtcgtaaagcacagccgcattcctcttccagttccggtactccatctccgccgccgtaggtggggtgcccgccggtgtggacgatccgccgtccatggttactttgatttgatgatttgcacgagaaccggaggcggcatgctgcttgtctcccgccaacagggatttggacgaagcggcgggtgggtaggtaaggagagagcttttaacgcggactagttgggtctcaagacataaaaggcccaaacacatgctagtaactactagagcaagcccgcccattttcggctcatgagcccacgaagtagaggcttggcttgagcttatcaagcactctctcgaactcgcgtccgtttgcagcaccctccgccgtcgagccgccgcgatgatgcagtcgcacctgccctccccggcgaggctggggctcacaacctcgtcgccgtcgctcccgcccaatccggtccccttgaatcccacatcctcgccttcacatggtagcctgccctcgagtgcagccgccggcaccagcgctgccccaaccctaatcacctcgccgtcgctgctaccgctcctgccgccgcttccgcgcgcgcaatcgctgctccagcttatatcgtcgctcgccaccaacctcttcgagctctcgcccaaccgcgccgcgtggatcttatcgtaccgggggtcgctccccaccttcctcccatcggcgtcctcctccgcgccgccgctcccaacatcgatctcctctaccaaggacgcgctctctcttctcaccaccctgcagacgcagctcttcgaggccgtcgccgagctgcaagagaccctcgacctgcaggatgcgcgcgctcgccttgtccgtgaggcgcgtgccaaggatgcttcgctggtaacctttgcgaagaagctgcacgaggctcaccaggtacttgaccgcctcgtcgacgattacgctgactaccgccgcgatcccaaacgcccacgtggcgccgctgcggctgacgatcccgagccggcgtcggaaggcgacttcggcacgtccctccactccagccttaagctggatgacatcctgacctacgcgcaccgcataagttacacaacctttgctccgccggagcatggggctgggctgcctctccgtgtcagcctgccacctgtaccacaggaaaatcagatgagggcgtcgcagctgtatctttttgctgatttggatgtaggtgtgcccaagaagccattggatgcgaaggagggaatcgcaccagaagtggaggctgcgccgctgtatgagccacctcaggaggggccatcgaggctaccaaacaccttgccacccatgttccctaaggagctaaagccgccaccgggatggaagcctggtgacccgatcacgataccacttgatgagatactacctggtatcaagggtgcagagccacagccccctgtgccgcaggcacctgtttcagtgagaccagtggcgccaatgggcccagagccaatacaggtcaagcctgtgcagcttgattttgagagcagtagtagtgatgagtacagtagtgatgttgggagctcagaagaagatgatgaggattagtgctcggtaagctgctccttcgccttctatcatatgcttgggcttttccagtagaatcctctatgctagttattttacctgctcatgtcttcctgactacttatgaactttaaggctgatctcagatcattgtaatggtgctgtatccttaacttcttaatccaatgtattataccgatgattttacttattatatgcttagt

SEQ ID NO: 108907 - DNA, 2293 bp, Zea Mays
cgccttccccattcgcccggccgattcaccagcgccccaaacccccagccgaatccgcgtcgcctcgcctcgcctcccgatgtcgccggctgctggtggccccgcgcccacgcccgctcaatcggcgcccgccgtcccgcaggcgatcgcgccgccgccggggcccggccgtgcggcgcccgcggcgccccgccgggatccgccgggcgaccccgagggggccgatcccgccaatgcggcggcgaggaagacgccgtggagcatgctggtgcagccccccgccgcggcgtcggcggcggcggcgggggagaccccagagagtggcggcatcatcggtggggatgcttcgtggccggcgctcgcggggtcgacgcgcgcgggccccaagtcgggctcgtccgactccctcaaggcactctccgatgcgtccggcccgtcgcctcaggaggttccaattgccgctccatcggtacccccatatccagttgtgggggctaatccgattcccaccgcccaaaaccctacctccatacctcctcccatggccgcggcttcctctcagcagaacggtggcacaacccagacgattccagttcggcgcggtggcagcagcggtggaaacggtggaggtggcagtcgtgggtatggtagcattggtggtcgcagggctgccaatagtaatggaggtgatgggagcagcggcagcggtggtgatgataactggaataatggaagccttggtactggcagtggttgcaacagcaccaatggcgatggttctatcaacttggatgataatgcccctggcgctggtcatgctggtgggaatggcaatggcagcagcagagatgctcctgggaatagacactggaaccacaacatacgtggtggtatcagcagtaacggtgctggtagtggtgatgggaacaatagaaatagtagtggtagcagcaaccactggaataataatccccgaattagtagtggcagtagcaatggcgttggaggtcgtggtggttaccgtggtcgccgtgaccatgagagaggggctaacttccctaggaatttccccagagttccagtaatgccatatcaacagcagcagcagcctggcatctaccagcctggacctttttaccgaccgccgccacctgctgcccattttatggtgccacaacatttttatgctccaccatttccctaccctgcggatgtgcaaccctatcctttctatgtcccaccagtagagcagtttcagaacatgcatcttgttcgaccacccatgcagccttcatgggttcctcctcaggatctgccaaatctccaagatgatattaggaatcagatagagttctattttagcacaaataatctatgccatgacacattcttgagaagacatatgaacgatcaaggatgggtacctatcaacctaatcttagggttcaatcggatgagggcatttacgagcttggttgacaccaactacatattagatgctatccgtggttctgagttattggaagtgcagggagataatgttcggaggcgcaatgattggatggaatggctacttcattaacgctgtccactagcaaatcaggttaagatgccaaaatgcagccgcatgctatcttcggggaactgaatagaagtcttgtggaaaattatatggaggagtcctgcaaattgacgcatttacatgacaatctcgatgcatgctacacgtctctgcgtactaatgtgaaactagatcaaatcttggcacgtttaggagccagtgtccctgcccaggccatcgataggtcgactccatgttgtatattggctagctctgtagcttggctcactggctcttaaacgtgggaaggcttgatctagtttgagattggtgcacaagggcatgtggcatggatcaagatcgtactataaacgcgtcggtttgcaggatatagattttattttctaagtcttgggtgatttgatcatgggcaccgggtaccggatccgtggactgatgtacagtgggtctattggaagcgggaagattttgtttgtttagatcggacatgatggctgcacgtaaagccactattgaggggataaataacaggaaataaatttacttaaaagtactttttttgcggtgtgtatagttgttcgaaaagaagtgtgatcctaccttttcatcatggattattggtcctggtgaacgatttggtgctacctagggtttattcttggaatcttagttttgtggtttgagtagtataccctgtatttgactctcctt

SEQ ID NO: 108908 - DNA, 1569 bp, Zea Mays
cgccttccccattcgcccggccgattcaccagcgccccaaacccccagccgaatccgcgtcgcctcgcctcgcctcccgatgtcgccggctgctggtggccccgcgcccacgcccgctcaatcggcgcccgccgtcccgcaggcgatcgcgccgccgccggggcccggccgtgcggcgcccgcggcgccccgccgggatccgccgggcgaccccgagggggccgatcccgccaatgcggcggcgaggaagacgccgtggagcatgctggtgcagccccccgccgcggcgtcggcggcggcggcgggggagaccccagagagtggcggcatcatcggtggggatgcttcgtggccggcgctcgcggggtcgacgcgcgcgggccccaagtcgggctcgtccgactccctcaaggcactctccgatgcgtccggcccgtcgcctcaggaggttccaattgccgctccatcggtacccccatatccagttgtgggggctaatccgattcccaccgcccaaaaccctacctccatacctcctcccatggccgcggcttcctctcagcagaacggtggcacaacccagacgattccagttcggcgcggtggcagcagcggtggaaacggtggaggtggcagtcgtgggtatggtagcattggtggtcgcagggctgccaatagtaatggaggtgatgggagcagcggcagcggtggtgatgataactggaataatggaagccttggtactggcagtggttgcaacagcaccaatggcgatggttctatcaacttggatgataatgcccctggcgctggtcatgctggtgggaatggcaatggcagcagcagagatgctcctgggaatagacactggaaccacaacatacgtggtggtatcagcagtaacggtgctggtagtggtgatgggaacaatagaaatagtagtggtagcagcaaccactggaataataatccccgaattagtagtggcagtagcaatggcgttggaggtcgtggtggttaccgtggtcgccgtgaccatgagagaggggctaacttccctaggaatttccccagagttccagtaatgccatatcaacagcagcagcagcctggcatctaccagcctggacctttttaccgaccgccgccacctgctgcccattttatggtgccacaacatttttatgctccaccatttccctaccctgcggatgtgcaaccctatcctttctatgtcccaccagtagagcagtttcagaacatgcatcttgttcgaccacccatgcagccttcatgggttcctcctcaggatctgccaaatctccaagatgatattaggaatcagatagagttctattttagcacaaataatctatgccatgacacattcttgagaagacatatgaacgatcaaggatgggtacctatcaacctaatcttagggttcaatcgggttagtaaattcttattgttttacttgaggatttcagtccatgggtatgatattctgtttgttgtattttgctttgtactctctctgttcataaatatatgacaccgttgactttt

SEQ ID NO: 108909 - DNA, 597 bp, Zea Mays
acggtcacggattctggtttagtacaacctcgtcatgaggtggcggagagggcgctgtacgtgtggaacaacgagcgcttcctggagctggcgacggcgtcgccggacgtggcggagaggatcctgccggcgttcgtggccagcgtggagagcaacctggagcggcactggagcaagtgcgtgcagcaggtgacggccagcgtgaagtccctgctggagcaggtcgcgcccgacctgtacgcgcggtgcgccgccgacctcgccacgcggcggtccgaggccgaggccgccgccgccgtgcgcgacgcccggtggcgtaggctcgaggcggcggccgccgccgccgccaaatagcccgcggtggcgagacgacgtgtcagtgtacatcatgcgtgagttgtcgtggtgtctggtgtcgagctgtggacgcgccgcgattggtggcgtcgtcgcagcgtgccattttggttgccaacgcgcgcagcggctggctgtacgaccgagaccgtgctgtggaagccaagtttgtgctccgtggaccgtggtacagtagtacagcgccggtgcaacgttcgcgcagaaaagcaaaagccgccg

SEQ ID NO: 108910 - DNA, 1016 bp, Zea Mays
gaaaaagcaggcctttcactgaaatagcggttggtcgataaagtgactttataaagtggcgccactttaaagtttgtcgacttcacgtacgccgttcgttcgtgtaattcaatttcaaaaggacaccttctttttttttacacgccataccccatgtcccatctcctctaatgaaatatatgattccaactgagagtaatcaatccaaattaagcacagcttccgctcagcaaattcagtgattataaagctgctttataaagtttctctcttttcgtcacgggtttcgtgacgtgtaatccagtcattcaccgttgtcgctaataatagcacaacccatgatgaaattttaataacctcacggtcacggattctggtttagtacaacctcgtcatgaggtgaaccaaccaactactgaactctgcagggaatcgagctcatggtgtttcgttttcaggtggcggagagggcgctgtacgtgtggaacaacgagcgcttcctggagctggcgacggcgtcgccggacgtggcggagaggatcctgccggcgttcgtggccagcgtggagagcaacctggagcggcactggagcaagtgcgtgcagcaggtgacggccagcgtgaagtccctgctggagcaggtcgcgcccgacctgtacgcgcggtgcgccgccgacctcgccacgcggcggtccgaggccgaggccgccgccgccgtgcgcgacgcccggtggcgtaggctcgaggcggcggccgccgccgccgccaaatagcccgcggtggcgagacgacgtgtcagtgtacatcatgcgtgagttgtcgtggtgtctggtgtcgagctgtggacgcgccgcgattggtggcgtcgtcgcagcgtgccattttggttgccaacgcgcgcagcggctggctgtacgaccgagaccgtgctgtggaagccaagtttgtgctccgtggaccgtggtacagtagtacagcgccggtgcaacgttcgcgcagaaaagcaaaagccgccg

SEQ ID NO: 108911 - DNA, 1987 bp, Zea Mays
cgcctattaagacccaggacagcagacgccgagccgcgccaggcacatatgcacatgcacatgcgaccctccgttcttgtgccgttgtgcggtgcaagcgcggcgggcgggaccaaaagccatcggccgacgaagcccaagcgtggcgcctgccgtcccctccaacgcgcgggcgttcccaagcgcatgcgcagccgctaccacgaaggcatcgccccgtttggcgtcttccgtgcgcgcgcacctcttaagcctcgcccgcgcgcgcaccccggccacttgacttgagccagccagcgagctgttctcccgtgaaggccccaacaccaccaccagcagccaaggccaagctatgggcgctgccgcggcagaggtcgtggcaccgaggccgccgtcggccaagaggaagtcgaccacgctcaagttcctgttcgagctcgagaagccggacggtggcctgctccccggcacggccaagctgccgccgccgtcgccggagcccgaggcggacagcctgatcgacaagatcgcgtcgtgcaaccgcgcgttcacgttcgtcgacgcggcggagcgcgaggaggagcgggacgcgaagcgggaccggctcgtggaggtgctgggcgccgtgcggtcgagcgggggcaagcggcagccgctggaccaccgcgtgatggtggcgctggtggagatggtcggcgccaacctgttccgcgcaatgccgccgccggcgtacccggcgctgccccccgacggcgccgacgaggaggcgccggcggtggctctggccccgtcgtggccgcacctgcaggtggtctacgacatcctcctctccgtggtggccgcgtcggacgccaggacgctgcgcaaccacgtggaccgcgccttcctctccgccctcctggcgctgttcgcctccgaggacccccgcgagcgcgaccggctcaagaccgtgtaccaccagctctactccaagctcacctgcgagcgcgccttcatgcggcgctccatggccgccgcgttcctgcggctcgcctacgaggcgcccgccgccgagcgccactgcggcgccgccgagcttctggagatctgcggcagcatcgtcaacggcttcgccgttccgctcaaggaggagcaccgtatgttcctggcgcgcgtgctgctgccgctgcaccgcacgcgctgggcgcacacgtaccaccgccagctcgcctactgcgtgctccagttcgtgcgcaaggagccggggctcgccgacgcggtggtcacggacatcctgcgccactggcccgtcaccaactgccagaaggaggtgctcctcattgaggagctcgaggagattgtcgagctgctcgagccggtgcagttccagaggctcgccgtgcccatctgctcccggatcgcccgctgtgtcagtagctacagctctcaggtggcggagagggcgctgtacgtgtggaacaacgagcgcttcctggagctggcgacggcgtcgccggacgtggcggagaggatcctgccggcgttcgtggccagcgtggagagcaacctggagcggcactggagcaagtgcgtgcagcaggtgacggccagcgtgaagtccctgctggagcaggtcgcgcccgacctgtacgcgcggtgcgccgccgacctcgccacgcggcggtccgaggccgaggccgccgccgccgtgcgcgacgcccggtggcgtaggctcgaggcggcggccgccgccgccgccaaatagcccgcggtggcgagacgacgtgtcagtgtacatcatgcgtgagttgtcgtggtgtctggtgtcgagctgtggacgcgccgcgattggtggcgtcgtcgcagcgtgccattttggttgccaacgcgcgcagcggctggctgtacgaccgagaccgtgctgtggaagccaagtttgtgctccgtggaccgtggtacagtagtacagcgccggtgcaacgttcgcgcagaaaagcaaaagccgccg

SEQ ID NO: 108912 - DNA, 2217 bp, Zea Mays
atgtctctcctcctcaagcccaagccccacctctccgccaccggcctcatcatcttcctgcgccatctctgcgaggggtcaccaagccagccgggccaaacgggtacggacacctcgcccccgcccctgacccgcgatgacaccaagctcgtggacgccctgctcgcggcgcttctcgaccaccgccgcgccaacccggccgccgagctcccggttccttctctatccaacacgctcccgtccctctcgtccgccatctccgacctgctcccttccccgcctccgcctcacctcccgctccacctcctcctccgcctcctcgcgctccgccgcggcgtaccgctcccggaggccgtcgccttcttccaccacgtttccccctcccttcccgccgactccctccctgatctctacgcctccatgatagtcctgctcgccaagcaccgtcatttcggcctcgcgcgccacctgctcgatgaaatgagagagcgggccgtccccatctcacggcagctcatcctcgccttgacccgccgctatgtccgagcggagatgccgtcggaggctgccgacctgttccgtcgcatggaggagtacggcgccggggctccggaccctgccacgctggcatccctcctggctgctctctccaagaagcgccttgccagcgaggcgcaggcgctgttcgacagctgcaggactgtcttcacaccggatgttgtgctctacacagccgtggtccacgcgtggtgccgcgccgggcgcctcgatgaggcggagcgcgtcttcacagagatgcagcagtcagggatcatgccgaatgtgtatacctacaccgctgtgatcgacgcgatgtatcgtgcggggcaggttccccgtgcacaggagcttctgtgccaaatgatcgattctgggtgccccccaaacacgacgacgttcaacgctatcatgcggtcgcatgtcaaggccggccgttctgagcaggtgctgcaggtgcataaccagatgcagcagcttcggtgtgagccagacgttatcacatacaatttcttgatcgaaacacattgtgggaaggggcagggcaatcttgatgcagcgctgaaggtgcttgacaaaatgacggcaaaaaagtgtgttcctgactgccacacgttcaatcccatgttcaggctgttacttgtgcttggcaacataggtgctgcacataagttgtatgagaaaatgagggagcttcaatgcaagccaaatgtcgtgacatataactgccttctaaggttgttcaataaggagaagtcaatggatatggttctaaggatgaagaaggacatggatgcggaaggaatcgagccaaacatgcacacctatgcggctctgattgaggcattctgtgggaggggaaactggaagcgagcacacacaacactaaaggaaatgatcgaggagaaatcttttaaaccttcaaagcaggtgcgcgatatggtattggtccttttgagaaaggctgggcagctcaagaagcacgaagagcttgttgaactgatggttgatcggggttttatcagccagcctcctaatgatgcattgtggagtgcactatctgcttgctgatcttcatgtgccagattgttatggaagtgtagtcacacataaaaggtaatgtgagttattgggagactagcttaactgttcggcagactagcgaggttgattaataatggaggtgatcatttctggcctaaacttgtgaagctgagtgttaggattaagcaaaggatgtttacaagcaaaggatcccctttattgcattcgctgttaatgcttgaagtattttttggaaacataagtagggccttagggtgttcaccgttgtggttgcccatcagtggtaatgtggtatagaggcgggcgaggaaaagctggatctgataagataatctattgtagtcaaatctcatcttctttctattcctgaaactatattaggttgccagttctggtaccagaaaactccagaagagatctcggtttggttttcggtcctgcctgttgggccccagtcctttttttttttgtttcttccgctgaaattaaggtttggaaattgcattgtactgcactctttaggtagatgtgtacctgtcaaattgttggacatttacaggacattttaggtttggatgctgcaatcttatataacatttttgaagatttacggta

SEQ ID NO: 108913 - DNA, 1952 bp, Zea Mays
ccagtttctcaaaaaaaaaaaaaatcacaacctcgtcggcgactgcccttccctccgccggtccctgcctccctgcgagcggatcctctgccgttacttgccgggactgccacgccgcggcaccatgtctctcctcctcaagcccaagccccacctctccgccaccggcctcatcatcttcctgcgccatctctgcgaggggtcaccaagccagccgggccaaacgggtacggacacctcgcccccgcccctgacccgcgatgacaccaagctcgtggacgccctgctcgcggcgcttctcgaccaccgccgcgccaacccggccgccgagctcccggttccttctctatccaacacgctcccgtccctctcgtccgccatctccgacctgctcccttccccgcctccgcctcacctcccgctccacctcctcctccgcctcctcgcgctccgccgcggcgtaccgctcccggaggccgtcgccttcttccaccacgtttccccctcccttcccgccgactccctccctgatctctacgcctccatgatagtcctgctcgccaagcaccgtcatttcggcctcgcgcgccacctgctcgatgaaatgagagagcgggccgtccccatctcacggcagctcatcctcgccttgacccgccgctatgtccgagcggagatgccgtcggaggctgccgacctgttccgtcgcatggaggagtacggcgccggggctccggaccctgccacgctggcatccctcctggctgctctctccaagaagcgccttgccagcgaggcgcaggcgctgttcgacagctgcaggactgtcttcacaccggatgttgtgctctacacagccgtggtccacgcgtggtgccgcgccgggcgcctcgatgaggcggagcgcgtcttcacagagatgcagcagtcagggatcatgccgaatgtgtatacctacaccgctgtgatcgacgcgatgtatcgtgcggggcaggttccccgtgcacaggagcttctgtgccaaatgatcgattctgggtgccccccaaacacgacgacgttcaacgctatcatgcggtcgcatgtcaaggccggccgttctgagcaggtgctgcaggtgcataaccagatgcagcagcttcggtgtgagccagacgttatcacatacaatttcttgatcgaaacacattgtgggaaggggcagggcaatcttgatgcagcgctgaaggtgcttgacaaaatgacggcaaaaaagtgtgttcctgactgccacacgttcaatcccatgttcaggctgttacttgtgcttggcaacataggtgctgcacataagttgtatgagaaaatgagggagcttcaatgcaagccaaatgtcgtgacatataactgccttctaaggttgttcaataaggagaagtcaatggatatggttctaaggatgaagaaggacatggatgcggaaggaatcgagccaaacatgcacacctatgcggctctgattgaggcattctgtgggaggggaaactggaagcgagcacacacaacactaaaggaaatgatcgaggagaaatcttttaaaccttcaaagcaggtgcgcgatatggtattggtccttttgagaaaggctgggcagctcaagaagcacgaagagcttgttgaactgatggttgatcggggttttatcagccagcctcctaatgatgcattgtggagtgcactatctgcttgctgatcttcatgtgccagattgttatggaagtgtagtcacacataaaaggtatcctttcttatgtgttgtacccaaacaaggcttcctgagtaaatttctttgggttagatgtatgattgtcaaattttgagtgctacaggtaatgtgagttattgggagactagcttaactgttcggcagactagcgaggttgattaataatggaggtgatcatttctggcct

SEQ ID NO: 108914 - DNA, 300 bp, Zea Mays
atgagcatgaccgactcgccccgtaccctcgtcgacgagcgtcggtcggctcgcggctgcgaccgtggccagcaggttgggaggaagaacagggcgaaggccgagaagacgaacgagacgtccgacgacggcgaaaacgatgccactgcgcgagtcgatgtcggggctggtgtcggacgaatacggggaggaggtgcctgctcctacgccctctgccgagaatggggtgacgcggaggaggtggggttcgaacccatgcctgatgaaagaaggcgggagacactgggtgaagctgtctaa

SEQ ID NO: 108915 - DNA, 119 bp, Zea Mays
gttcgtttagccagtcgttgtgaactcttttctaatcgttcacttcattgtctgtgttgtaccaaaacatattatatggagtaaacaataacatcagttagccaaatcaaaaaaaaata

SEQ ID NO: 108916 - DNA, 1054 bp, Zea Mays
aaggaaagctctgcagctcttaacatcaagcagacccggccaggccagcaccagccgcagcaatgacgtccatgacggcagctacagacgtgaagccggcgccggccgctggcggcccgcagctgaagctgctggtggacaggcgttcgcggcgcgtgctgtacgcggaggcccgcaaggatgcggtggacttcctgatcggcctgctgcgcgtgcccgcgggcctcgcggcgcgcgcactggccaagcgcggcgagcccgcgccgggctccctgggctcgctctacgcgggcgcgctggccctagacgacgccttcttcgtctccagctcgcccaaccgcgacgcgctgctcagcccctcgacgctgccctccgccgcgctcccgctgctgctcggcgagggcgcggtcccgccggcgccggcgcctcccccgccgcagcggttcttccggtgcaacgcgtacgcgcccccgtgccgcgggaacccgacgaacgtgacggacgtggcgggcctgccgtgcccggcgtgccggcagccgatgaccatggagatgcggctgccgcccggggacgcgcacggcaagcagctggcgcttgcgcgggcgcaggaggccgcggggctgggcgccggcgggtacgtgaaggaggtggtgacgtacctggtgatggacgacctcaccgtggcgcccatgtccaccatctccgccatcatgctgctcaagaagttcgacgtcaaggactgctccgcgttggaggagacgaccgttgagctcggcacaaaagaggccgtgatgctcctcaaggcgtcgctgcagtcgtcgacggcgctgacggatgtcttcagcggtggcgtttcgattgacaggattagcggttaatgagggagtcgtcgaacatgaacatcgttatgatcagtcaatgtgtatgtacataaagcatgcgaacgaatcagagcaaccatgatctcctaataatttgaaacttcagtgttaatgtgtaacggtgtatggatgactatgattgcgaaccaaaataatgcagtaaaatgaatcaa

SEQ ID NO: 108917 - DNA, 2400 bp, Zea Mays
atgctggattcacacctgcgcgaaagcgaagagcgagctgagactgagacacctgcacagaaaagctggatgacacaggcacatacgcacatcctacagaaatacaacgcgcccacggtacatgatcagtagtagtaccacaagtggcagtgttgagcacgaacatcaccgccgcgctaatccaccattcaaacgagattagtaaaaaaacaaacggggagctcagagaaaaaggaataaacaaatagaggaagcagcgcagtcggaggcagtgagctcgctctcctgctcctacaggctgcagttgcgctgtgcctgtgcgtccagttccatcgctttccctcctccccagtccccactcccagatgcgatttccctctccaccgccacagcgcctagcttagccagccagccggcggccatcgccgccgcaatggcgaccgcgtcggaggacgaggccgcctcggaccgctgcagcggcagctacagccccagcgccgacgtcagcgagtccgaaacctccagtgactgctccgcgcccaccacgcgccgcttcgcctcctcctcctcggcctccgccaccgtctcccgcctcgcgtcctcctcctcgtcgctccccaccccggcatcggccgccgccttctacctctccaagccaacccccgacctctccgagatcgacatgatgaaggagcgcttcgcgaagctcctgctcggcgaggacatgtcgggcagcgggaagggcgtctgcaccgcgctcgccatctccaatgccatcaccaacctctccgccaccgtgttcggcgagctgtggaggctggagccgctcgcgacggcgaggaaggcgatgtggacgcgggagatggagtggctgctctccgtcgctgactccatcgtcgagctcaccccctccatccaggagctccccgaaggcggcggccagttcgaggtcatggtcccgcgcccgcgcagcgacctctacatgaacctccccgcgctcaagaaactcgacgccatgctcctcgcgatgattgacgggttcaaggatacggagttctggtacgtggacagaggggttatggtcgaggatagcgggggtccgttcccgtcctcatcctcgtcgtcttgtggccggccgtcagtgcggcaggaggacaagtggtggttgccctgcccaagagtgccgcccaaggggctgtctgaggacgcgaggaggaagttgcagcaaagcagggattgtgcaaaccagatactcaaggcggccatggcgattaacagcgatgtgctcgccgagatggaaatccccgaagtgtacctggagacactgcccaagaacggtaaatcttgcttgggtgagataatttatcgatacataacagctgagcagttctcaccagaatgtctcctagattgcttggatctatcatccgagcaccacacacttgaagtggcaaacagaatagaaggtgccatccatgtttggaaactgaaaggccaaaaaaagtcgacacctcaagccaaatcaaagatatcttggggtggaaaagtgaagggtcttgttggagataaggagaagagccacactttgtctgaaagagctgatggtctattgcagagcttaagattgagatatccaggcctgccacaaacttcccttgacatgaacaagatacagtataacaaggatgtcgggcagtccatacttgaatgctactcaagggttctggagagcttggcatttaacataattgcaagaattgatgatgtgatctatgttgatgatgctacaaacagatcagctgctgctgagtctgtttcgatcttcaatcgtggcacaggtgtgccagttcagaagaggatctctccaagcccattctctattcagaattcgccgtatggctctccgttcgcaacacccactttctgctcatccaccccagttacaggcagccctggaagggtacagcccccattaaacaaaaacattctaggaactcaagaaatcaaggtcgaaaagctcttttctggtgatctagagaaggtctggacatatgcaggaaacttgagcgctaggaaagacgctggagatgctcctgagagagactgaagggcgatggaggaaggtagacatgtaccgacagccgacagatcctgtaattgctagtagctagatcttcctgtacagaagcagcatgagtatttttttttgttctttttgtagcgagccgatcattgtgtgctctgcttacaatgaatggatgtcacctgatctgaacagagaaacttgtagtttcagctgtagtttttttttgttgttgtctggattggctgtttagcagtgtactttttcgtgtttatactgcaaggctgggttcagcagcaaatgactgaattcctgct

SEQ ID NO: 108918 - DNA, 2403 bp, Zea Mays
atgctggattcacacctgcgcgaaagcgaagagcgagctgagactgagacacctgcacagaaaagctggatgacacaggcacatacgcacatcctacagaaatacaacgcgcccacggtacatgatcagtagtagtaccacaagtggcagtgttgagcacgaacatcaccgccgcgctaatccaccattcaaacgagattagtaaaaaaacaaacggggagctcagagaaaaaggaataaacaaatagaggaagcagcgcagtcggaggcagtgagctcgctctcctgctcctacaggctgcagttgcgctgtgcctgtgcgtccagttccatcgctttccctcctccccagtccccactcccagatgcgatttccctctccaccgccacagcgcctagcttagccagccagccggcggccatcgccgccgcaatggcgaccgcgtcggaggacgaggccgcctcggaccgctgcagcggcagctacagccccagcgccgacgtcagcgagtccgaaacctccagtgactgctccgcgcccaccacgcgccgcttcgcctcctcctcctcggcctccgccaccgtctcccgcctcgcgtcctcctcctcgtcgctccccaccccggcatcggccgccgccttctacctctccaagccaacccccgacctctccgagatcgacatgatgaaggagcgcttcgcgaagctcctgctcggcgaggacatgtcgggcagcgggaagggcgtctgcaccgcgctcgccatctccaatgccatcaccaacctctccgccaccgtgttcggcgagctgtggaggctggagccgctcgcgacggcgaggaaggcgatgtggacgcgggagatggagtggctgctctccgtcgctgactccatcgtcgagctcaccccctccatccaggagctccccgaaggcggcggccagttcgaggtcatggtcccgcgcccgcgcagcgacctctacatgaacctccccgcgctcaagaaactcgacgccatgctcctcgcgatgattgacgggttcaaggatacggagttctggtacgtggacagaggggttatggtcgaggatagcgggggtccgttcccgtcctcatcctcgtcgtcttgtggccggccgtcagtgcggcaggaggacaagtggtggttgccctgcccaagagtgccgcccaaggggctgtctgaggacgcgaggaggaagttgcagcaaagcagggattgtgcaaaccagatactcaaggcggccatggcgattaacagcgatgtgctcgccgagatggaaatccccgaagtgtacctggagacactgcccaagaacggtaaatcttgcttgggtgagataatttatcgatacataacagctgagcagttctcaccagaatgtctcctagattgcttggatctatcatccgagcaccacacacttgaagtggcaaacagaatagaaggtgccatccatgtttggaaactgaaaggccaaaaaaagtcgacacctcaagccaaatcaaagatatcttggggtggaaaagtgaagggtcttgttggagataaggagaagagccacactttgtctgaaagagctgatggtctattgcagagcttaagattgagatatccaggcctgccacaaacttcccttgacatgaacaagatacagtataacaaggtaaagctcatgcaaaaacaaataaccatggacttcttctctggccaaatcaaaatcgatcaagtctttctttcagttacacaaaccacaatcttcactttgtttcttgcgtgtttttaggatgtcgggcagtccatacttgaatgctactcaagggttctggagagcttggcatttaacataattgcaagaattgatgatgtgatctatgttgatgatgctacaaacagatcagctgctgctgagtctgtttcgatcttcaatcgtggcacaggtgtgccagttcagaagaggatctctccaagcccattctctattcagaattcgccgtatggctctccgttcgcaacacccactttctgctcatccaccccagttacaggcagccctggaagggtacagcccccattaaacaaaaacattctaggaactcaagaaatcaaggtcgaaaagctcttttctggtgatctagagaaggtctggacatatgcaggaaacttgagcgctaggaaagacgctggagatgctcctgagagagactgaagggcgatggaggaaggtagacatgtaccgacagccgacagatcctgtaattgctagtagctagatcttcctgtacagaagcagcatgagtatttttttttgttctttttgtagcgagccgatcattgtgtgctctgcttacaatgaatggatgtcacctgatctgaacagagaaa

SEQ ID NO: 108919 - DNA, 1486 bp, Zea Mays
cggaatcggaagtggcgtgaagcaacgaaacagcgacacgccatcaacagtaccattcagatcggaatcccagttagctctctgtgccctacctgtcagtgacacagaaatccagtcggcggggctgccgcctgccgcatcctcccctcgcccaccgtcgacgacttgatcccctcccaccgttgaggccgcctcctcacggcagcgagccagcgactcctctcttcgtctcctacaagtagccagacaccactccgactttgccggcaacccgtcgacagcgacgaggcgcagcataaggcatacgggcacggcggccatggcgaccagctccaaacccgccgcgcccgtggaccccatggtcgtgctcgcccacgagttccccgaggtgtcattcgactacgacgagagggatgtagcgttgtacgcgctcggggttggtgcctgcggcgatgacgccgtcgacgagaaggagcttcacttcgtgtaccacagggatgggcagccacacattaagacccttcctacttttgtttctttatttcccaacaagaacagcaatgggcttggatttgttgatgtgcctggccttaactttgatgcaagccttctactgcatggtcaacaatacatagagatctataggccaatcccttcgtatgccagtgttgtaaacagggttaaagtagctggtttgcacgacaaggggaaagcaactattcttgagctcgaaactaccacaagcctcaaagagtcaggggaaattttatgcatgaacaggagtactatctacttgcgtggtgctggagggttttcagactcttcacggccatactcatatgctacctatcctgctaatcaagtttctcgcatttctattccaaattcggcaccttctgcagtatgcgacgaccagacaaagcaatcccaggcattgttatacaggctatctggggattacaatcctttgcattcagacccagatattgcacagcttgctgggttcacccgtccaatcctgcacggcctctgcaccctaggattcgctgctcgcgccgtcataaaatctttctgcaacggcgaaccgactgcggtgaagagcatcttcggccgtttccttctgcacgtctaccccggggaaacgttgtccactgagatgtggcttgacggccagaaggtgcactaccaaacgaaggccaaggagcggaaccgagctgtcctctctggatatgtgttgctccagcacatcccctcgtcattgtaagtaaaagttttgtttcttaaaattggtgcccgctgaaagcatttggcttggctgtgataaattgagcacgaggtgggctgccactgtaatgatagccatgtatgggtctgcacataacacattcgtactgtattgataagaagcacgtaccacttaaatacgcagatccgaacgatggatgacaagatcaaagataataaagtagttcagtaatctagaaaa

SEQ ID NO: 108920 - DNA, 1446 bp, Zea Mays
cttcttaacagtcggaactcggaatcggaagtggcgtgaagcaacgaaacagcgacacgccatcaacagtaccattcagatcggaatcccagttagctctctgtgccctacctgtcagtgacacagaaatccagtcggcggggctgccgcctgccgcatcctcccctcgcccaccgtcgacgacttgatcccctcccaccgttgaggccgcctcctcacggcagcgagccagcgactcctctcttcgtctcctacaagtagccagacaccactccgactttgccggcaacccgtcgacagcgacgaggcgcagcataaggcatacgggcacggcggccatggcgaccagctccaaacccgccgcgcccgtggaccccatggtcgtgctcgcccacgagttccccgaggtgtcattcgactacgacgagagggatgtagcgttgtacgcgctcggggttggtgcctgcggcgatgacgccgtcgacgagaaggagcttcacttcgtgtaccacagggatgggcagccacacattaagacccttcctacttttgtttctttatttcccaacaagaacagcaatgggcttggatttgttgatgtgcctggccttaactttgatgcaagccttctactgcatggtcaacaatacatagagatctataggccaatcccttcgtatgccagtgttgtaaacagggttaaagtagctggtttgcacgacaaggggaaagcaactattcttgagctcgaaactaccacaagcctcaaagagtcaggggaaattttatgcatgaacaggagtactatctacttgcgtggtgctggagggttttcagactcttcacggccatactcatatgctacctatcctgctaatcaagtttctcgcatttctattccaaattcggcaccttctgcagtatgcgacgaccagacaaagcaatcccaggcattgttatacaggctatctggggattacaatcctttgcattcagacccagatattgcacagcttgctgggattcgctgctcgcgccgtcataaaatctttctgcaacggcgaaccgactgcggtgaagagcatcttcggccgtttccttctgcacgtctaccccggggaaacgttgtccactgagatgtggcttgacggccagaaggtgcactaccaaacgaaggccaaggagcggaaccgagctgtcctctctggatatgtgttgctccagcacatcccctcgtcattgtaagtaaaagttttgtttcttaaaattggtgcccgctgaaagcatttggcttggctgtgataaattgagcacgaggtgggctgccactgtaatgatagccatgtatgggtctgcacataacacattcgtactgtattgataagaagcacgtaccacttaaatacgcagatccgaacagataaaaatactatagaagtagtagaa

SEQ ID NO: 108921 - DNA, 2116 bp, Zea Mays
cgacgaggcgcagcataaggcatacgggcacggcggccatggcgaccagctccaaacccgccgcgcccgtggaccccatggtcgtgctcgcccacgagttccccgaggtgtcattcgactacgacgagagggatgtagcgttgtacgcgctcggggttggtgcctgcggcgatgacgccgtcgacgagaaggagcttcacttcgtgtaccacagggatgggcagccacacattaagacccttcctacttttgtttctttatttcccaacaagaacagcaatgggcttggatttgttgatgtgcctggccttaactttgatgcaagccttctactgcatggtcaacaatacatagagatctataggccaatcccttcgtatgccagtgttgtaaacagggttaaagtagctggtttgcacgacaagggtacctgctcccactcatcctgaattgataatttttttactgactggatgatacatatacttttttatcaccatgctccttgttattttttcatccttaaaattattgtccatgtttccctatttcaacttcttttttatggtagctctaactcatgttatttcttgatatgaaatatttaaaatttggttgaactaggggggtggttcagcattttgttatagactaacaattgtcaataactccatattgagataataagaaccacatattttattttttgcacatcaatgaatgaaacacatcataaagctacaaaccatttccataaaatcataatgaagaacagtataccgttgtccttcacgtgagtgcctcaaataaaacctgtttattatcatgtgatagttttgtgcttgtagtagaattttgaagttggagctttgttcttggaggaatgaatggttattgtgaaaaagatctttatttttcaactatatcacgtgtaactattaacttggtcctttcaactttatctctgtgcttgaaagtgcccagcacccactcctgcagtacttttggtcaaactgccaaagtactacttggtacttagtgttagatgtaaatagtgtgcatgtatttagtctctagtacagggtgctgtttgcactttgtacttcatatttggctctttggccgttgcaataggctgagctgcacattcctagcacttagcacctttaattttaatcatcataaatgacatcctttaatcgatttcaccactgattgcttcctttctgccatttgccgtaactgcaaaaatataagggattatactacctccgttctcaaatatttgtcgtccgctagttcatttttgaactaagatacgataaataaaaaaacggagggagtattcaattttattgaattgattctaccgatgcactattttaatgtgcagggaaagcaactattcttgagctcgaaactaccacaagcctcaaagagtcaggggaaattttatgcatgaacaggagtactatctacttgcgtggtgctggagggttttcagactcttcacggccatactcatatgctacctatcctgctaatcaagtttctcgcatttctattccaaattcggcaccttctgcagtatgcgacgaccagacaaagcaatcccaggcattgttatacaggctatctggggattacaatcctttgcattcagacccagatattgcacagcttgctgggttcacccgtccaatcctgcacggcctctgcaccctaggattcgctgctcgcgccgtcataaaatctttctgcaacggcgaaccgactgcggtgaagagcatcttcggccgtttccttctgcacgtctaccccggggaaacgttgtccactgagatgtggcttgacggccagaaggtgcactaccaaacgaaggccaaggagcggaaccgagctgtcctctctggatatgtgttgctccagcacatcccctcgtcattgtaagtaaaagttttgtttcttaaaattggtgcccgctgaaagcatttggcttggctgtgataaattgagcacgaggtgggctgccactgtaatgatagccatgtatgggtctgcacataacacattcgtactgtattgataagaagcacgtaccacttaaatacgcaga

SEQ ID NO: 108922 - DNA, 1495 bp, Zea Mays
gaacgtgcctgtcattatcagttagttgcctagttgcaatcttgtaggttcatgtaagaaaaaaaacaacgaaaatgtagttcacatgagatgctgataatccaatagaccgccaattgaagaagtgatatgaagtgtcggccacattgttgtgtcgttcagatactctgggcatgaacaattgtcagaacattttcctgagctggggatccaatttataagtttaaatagggcatactagctacccagaaatttcgatatttcactgcccaagcacagaatgaattggtactgacgcaatggacccactttacacatggtctttatgaagcatgcttctttgacaaggttggtcattggtcagtatggcagcaaattgtggtacccaagcactcgcgttgtgtcggtatggtccgacattgacactgctactagtggctccaacaagtggccagcatatgtccatagaattcaaatccaatcaaaatcaggctgctttttcttgcaacattgcatgttctgatctcatgtccttgtcccttgccagcctgagttgaaagctgcacttgagtaacagcatgcttctcttcatcctcacttataaatccatgaggcagccacggtagcaccaacactcaatcaactagctcaacaacacctgacctgatacaaaaggagccctagagttccagagacgaagaaaggagaagaagccaatcagccaccagccatgatgagtgccaagagacttgttcagatgtcaagtagtaggtggcgaagaatggcggccctcgcgaggaagaggctcgcatcgacacctgtgaaagaaactgacgggtcgtcatgcagcacttcgtcggtggctggcaaaggccactgtgccatgtactcggctgatggtcggcggtttgaggtcccgttggtgttcctcggaacggctctcttcggtgagctcctgagcatgtcgcaggaggagttcggcttcgctggtgatgacggcaggatcaccttgccatgtgagtctttggtgatggagtacatgatgtgtttgcttacaagagatgcctctgaagaggtcaaaaggttgtttttgagctccatggcaaggccttgccactatggatctggactggtgcaaaccatgcatcatacccagcgaactgttgttcctagcttctgaagattagcatatatgcgcagtagcaagcagattgttttcaccttttcgtgtttgatgtaaatgtttacataatgtagattgggatggaatggaactaaccatatggttcaaaaacaaatggagcagaaatatgtgtttacgtcagggttcaaaatttcacgaaattcagcaatttcggtagtggcttgaagaaaaaaagtgaaattttgtatcacactagtacatgtgtttttactgtaaatatataattttaggctattgtttattttattcctctagtcaacagatgagtaatcctaaaccgtgttgatcttt

SEQ ID NO: 108923 - DNA, 438 bp, Zea Mays
atggggacatggcatgttggttcaacagtcaggagacttgattcccaggcagatgcagggttcacttcactgcttcggctggagttgtcagttctacagcttcaacatggtttgtcaggtctgccatggggacgcaatgatcgtcaactgctcggcatcctttgctatgctttgtttgtggagctgctgagtggtggtgtttggagaagtcttgaccctgaatatatagctgaatcaaagagtaaggaatcttgtcgagtgggattattggcaagggacaaggtcatgaggacatggatgcagtatgtgcatacatttgatttgagagccctttctctgcttggattgagcacatcctatgcagccatgctgagcggtttagtggggaaggggcacgaggaccccatggccatgtggaacgggagcaacatgaattga

SEQ ID NO: 108924 - DNA, 1257 bp, Zea Mays
aacacctcatcagcctatcaccagcgacctaaaaagcacagcacctagtagctgaacagcaccatatacaatccgaatctctgaatattcagttgagccaaaaaggcaggaagaaggaggaaccatgatcagttccaagaggcttgttcagatggcgaagaagtggcaggcaacggctgccatggctaggaggcggctcacggcgacgctggcgaaagaggccgacggttcgtgcggcacgtcgatgccggtggccgtcaggggccactgcgtcgtgtactcctccgacgggacgaggttcgaggtcccgctggcgtacctcggcacggcggtgttcggcgagctcctgagcatgtcgcgggaggagttcggatttaccggcgacgatggcggcaggatcacgctgccctgcgatgccgcggtgatggagtacgcgatgtgtttgctcaggcgagacgcctccgaagaggttgtgagggcgttcttgagctccatggtcagaccctgccaccacagcgtcggtggctcggtgccaccgatgggactcgggcgccaaccagccatctgtgtatagctagctatatgattagctccatgatgtacaatattattaggtgtgtatgtatgtagccggatggaatcacaggaaatcgtacagaaggttattcgttttatatcatttctgaagtctgaacacgcctcgttgcatgaacgacatgaatgtactacctccgtcgttcattttcaaattatacagaaggttattcatttttaaattaaaacaggataaataaaaaagaacatatgaagtagtacaataagaggaagccatgaccagaacgttcgcggacgcgcgagatgcggttcaaggacgcaatggcagcggcgacgggctcccgggacggtaggagccgacgtcggcggctgaactcagcaaattcaccggcggcgacggaaggagagggggggcgttgtatttccgtttggcatcttaaaaaattcgatctcccaccgtccaattttttttttttttttgagagagaggagtccaccgtccaatctgaccgtgcgattggattttcttgcggttgcgagttgtgactcagctcgagaaaggcaaagcagttttggggttttggtattgggtcttccccggtaggacccacgtaccagtctgtgggtcacccgtcactgccggcggcggcgccgtggaagcccggcgagcgccgctgagtccgccgtgtcccgctcgtagct

SEQ ID NO: 108925 - DNA, 799 bp, Zea Mays
aacacctcatcagcccatcaccagcgacctaaaaagcacaacacctagtagctgaacagcaccatatacaacccgaatctctgaatattcagttgagccaaaaaggcaggaagaaggaggaaccatgatcagttccaagaggcttgttcagatggcgaagaagtggcaggcaacggctgccatggctaggaggcggctcacggcgacgctggcgaaagaggccgacggttcgtgcggcacgtcgatgccggtggccgtcaggggccactgcgtcgtgtactcctccgacgggacgaggttcgaggtcccgctggcgtacctcggcacagcggtgttcggcgagctcctgagcatgtcgcgggaggagttcggatttaccggcgacgatggcggcaggatcacgctgccctgcgatgccgcggtgatggagtacgcgatgtgtttgctcaggcgagacgcctccgaagaggttgtgagggcgttcttgagctccatggtcagaccctgccaccacagcgtcggtggctcggtgccaccgatgggactcgggcgccaaccagccatctgtgtatagctagctatatgattagctccatgatgtacaatattattaggtgtatgtatgtagccggatggaatcacaggaaatcatacagaaggttattcgttttatatcatttctgaagtctgaacacgcctctttgcatgaacgacatgaatgtactacctccgtcgttcattttcaaattatacagaaggttattcatttttaaattaaaacaggataaataaaaaagaa

SEQ ID NO: 108926 - DNA, 625 bp, Zea Mays
cactcacagctctccagcttccatccagaaagaagaaggaaacgagatagtgaacagctaaccatgatcaacgccaagaagattgctcatctcgccaagaagtggcagaggatggccgcacaagggaggaggcgcctcaccttgggggcgacatcagcaaatggagcggacgagtgctgcagctctgtggcgagcaagggccattgcgcggtgtacacggccgacggggcacggttcgaggtgccgctggcgtgccttagcacccctgtcttcggggagctcctgcagatgtcagaggaggagtttggcttcgcgggcggcgatggcaggatcacgctgccctgcgacgcggcggtcatggagtacgccatgtgtttgctcaggagaggagcctctgccgagctagagcaggcgttccttagcaccatggccatgtcatgccactgtgccagccacatggcgccgtatgttggagccacacatcagatcgctgtttagttgatgttcactgtagtctgtagtatagatatatagtggagcaaagatattagctaggtaaagaactaaagattattcaaaaccttcgaatcctgcaaggctgcaactgagaaagcaatgaagcaag

SEQ ID NO: 108927 - DNA, 168 bp, Zea Mays
atgccaactgtagcagcaactttgttttcaggaaaaggagaagttgtgggttgctcattaacaacattcttgggctgttttggtgattccctcagtgctgccgtattctctgaaactgagtgcgggttgtcaccacgaggcatggtgcctctgccacgaagtaacctg

SEQ ID NO: 108928 - DNA, 643 bp, Zea Mays
ctcacctcaactcacccccggaaatggctcgatgctccactgcatctagtggtcctagtggatcctgctgcgctgcgaaacggaaaggagaacaaaaaaaattgcttggccgggcttcgcttggtgttgcccttattttttggcgtcgtcgttacaacaaaggaatccaatcataggtccatacccgcttggcgcttccatattttccatatataaagtcaacttgcaagggtgattctgcagcttcagaaggattccttgttctttacttggggagttattccaaggctcttgtgatcaaaggtcaataaactagtaacctaattgtggtttgggtggaggtacatgtgatctggataccaaagtccaaatgaaaggttaatcatatgatggagcaataaatttttattcccaaggctgttccaaatttaggaactgctttaaatattttcaagacgtcacttactatattattcctcccatgtgaacatgtttctgcgccctgatcccctgatcagggacagggaggaacacgataaaatagtgctttggttcattattccgtgacatgtacaggaatcttgacgcctctttgtaatgctacaagtcagaacagtacaggtgtagtagtactgtaatacaa

SEQ ID NO: 108929 - DNA, 1193 bp, Zea Mays
tttcagaatttgggtcacccaagcggccgagccgagaacagggcagagcacgaagcggaagcgcatccgcaggcacgacatgtctcgccggcggcgaggaggctccgactccgacggcgaggacaacagcttcctctaccgctacccgctcccctccgccgccgcctcagcaggcgtctcagcgggaggcagcggcaagccccggggcgggggctcgggcggcctcgcgccgtccaaatccacagtctacgtgtccaacctggacttctcgctcaccaactccgacatccacctcctcttctcccgattcggacgcgtcgcgcgcgtcaccgtcctcaaggaccgtgaatcccgccgcagccgcggcgtcgccttcgtcctcttcgtcctccgggaggacgccgcggccgcggccgccgagatgcacggcaaggtgctcaacgggcgcacgctctccgcctccatcgccgacgacaacggccgcgccgcggagttcatccgacgccgcgtgtatcgggacaagtcacggtgctacgagtgcggcgaggagggccacctctcctacgagtgcccccgcaaccagctcgggccccgcgagaggcccgcaccgtctaagaagtcgcgccgcggtggtggtagtggtgggggcactggcgggcgtgggcgcggtcgcgggggagaggctgattggcattcagatgacgatgaagatgccgctgccgccgccgcgttcgaggacgacaggtgggcgtcggtggtggatacgaggggagaggaggagaagtcggctggcaaggaagagggaaaaaaaaagggaaaggcggcgaggaaggagaagaggaaaggctacttcagcgacgagagtgatgaggacgaggactaagcttcagtgtatcctgctaatgttgttgtgttttaacaatagatctaacgttagttacgtgatcaacagctttgtgtatgaatgctagctttttaaatttcagaagttatggctgattacttgttacagacttcgtcttgtcactgtactgttttcttgattattaagcttattatccgtccgaacaatatccctgctttggctattatgacttgttgataaaatggccattcagaaaagaaatagttaatcatttaggtcaaatataaccaaatgcttttcagaactgttggtcatcattcttatatcg

SEQ ID NO: 108930 - DNA, 2001 bp, Zea Mays
cgcaacgacgcgcctcggcctcgcagaaacaggggccaaaaaggaaaagagaaaagaggaaaagaacgcagggaatgggcaagcagcagcaggcgccaccggcgcggcggtccacggcgatgtcggcgcctccgccaccgaagcgccggaagaagaagggccggccttccctcctcgacctccagaagcggagcctccgcctcgagcagcagctccagcagcagcagcccaaggggcgacgctccaaccgccggagcgccggctccgcggacgaggacgacgacggccccgcctccggctccggccgccgcgagaagaagctgcgcctcgtcatgggcctccacgacggatcacccaagcaggtagaaaagacgaggaaagcgacggatgggcatgaagagccgtcagattccgggcccacaacacctttgccaaacaaaaagttattgctcttcatccttgataggctacagaagaaggatacatatggtgtattttcagagcctgttgatcctgaagagctacctgactatcatgacattgtaaagcatccgatggatttttcgacaatacgtaagaagctcgataagggtgcctattccaacttggagcaatttgaggacgatgtgttcctgataagcaccaacgcgatgtgctacaattcaccagatacaatatactatcgacaggcacgaggtattcaagagatcgctaaaaaggattttgagaatcttaggcaagatagtgatgccagtgatccagaaccggaaccagaattggagctggagccagaaccagaagaaccaaagccacagcctcgcaggggcaggcctccaaacaagaacaatgccaaacagaaagttgggaagccaccaacagaacgtgctactgcagatttttctggtgcaacgcttgctactgccgcaaatattggacgccatgcacaggcagatgttgatctgtcacgaagagcaatggataaagcgatgatggatatgctgagagcttcttttgccaatagaaggaatgagcataattggtctggcgagcggaaatttgaaagatttgaagagtgctcaggttataggggtacatggtccgcaaaaatggggaagaggccaattctgatggaagatagtcgccgaagcacatattgtgagactcaaccatccaattcaatatatgagctgccggtatcgtcatcctacaatgggacaaagtttggtcgcgggtgggtaggagatggcgaaacaccaaactcttttcagccacccgtactagctgcattttcagaaacaacgacaccgcaagaccgtacagcagcttcaggtgagcagccatgcccatctatgagcagccctcctgccaccgaggcctgtgctggcaacgacagaagccatttggcgggatctcagccagatgctacgccatatgcttctaccagcacaacgcagaggatgagttccgaagcattagcaagccagcaatgtggatcactaccacaaatttcgataaaccgagctgaacgtacccttgagatgatgaagggcagccccaataatcttcacggacacccaggcatgcagcaaactgcgaatggtttcaatgctgttccaggaccaatgatgttcccacatgtggctcaactggtggtgaatcagatgcagacacatacggctgattgataacgttgtgtgtgtgtgccggggggcggggggtgtcgcctttgatccgtcgtgcctcaacctggggctgcaactgtgagcctgttgtgtaattgcttaagtagtcattaggatgatagcgtgcatagatgtgttgggtggatgctgtaacagcggtgaccggtgagttgcgattctgaatgtgtagcagaaaaaccacaggcgaaatgaaacatctgtatagattatcgaggaatttttttagcatgaaaccgtgcgaatcagtttgtctattgtctgtatggtttatatacatcaacctgacggtgttctcgga

SEQ ID NO: 108931 - DNA, 1998 bp, Zea Mays
cgcaacgacgcgcctcggcctcgcagaaacaggggccaaaaaggaaaagagaaaagaggaaaagaacgcagggaatgggcaagcagcagcaggcgccaccggcgcggcggtccacggcgatgtcggcgcctccgccaccgaagcgccggaagaagaagggccggccttccctcctcgacctccagaagcggagcctccgcctcgagcagcagctccagcagcagcagcccaaggggcgacgctccaaccgccggagcgccggctccgcggacgaggacgacgacggccccgcctccggctccggccgccgcgagaagaagctgcgcctcgtcatgggcctccacgacggatcacccaaggtagaaaagacgaggaaagcgacggatgggcatgaagagccgtcagattccgggcccacaacacctttgccaaacaaaaagttattgctcttcatccttgataggctacagaagaaggatacatatggtgtattttcagagcctgttgatcctgaagagctacctgactatcatgacattgtaaagcatccgatggatttttcgacaatacgtaagaagctcgataagggtgcctattccaacttggagcaatttgaggacgatgtgttcctgataagcaccaacgcgatgtgctacaattcaccagatacaatatactatcgacaggcacgaggtattcaagagatcgctaaaaaggattttgagaatcttaggcaagatagtgatgccagtgatccagaaccggaaccagaattggagctggagccagaaccagaagaaccaaagccacagcctcgcaggggcaggcctccaaacaagaacaatgccaaacagaaagttgggaagccaccaacagaacgtgctactgcagatttttctggtgcaacgcttgctactgccgcaaatattggacgccatgcacaggcagatgttgatctgtcacgaagagcaatggataaagcgatgatggatatgctgagagcttcttttgccaatagaaggaatgagcataattggtctggcgagcggaaatttgaaagatttgaagagtgctcaggttataggggtacatggtccgcaaaaatggggaagaggccaattctgatggaagatagtcgccgaagcacatattgtgagactcaaccatccaattcaatatatgagctgccggtatcgtcatcctacaatgggacaaagtttggtcgcgggtgggtaggagatggcgaaacaccaaactcttttcagccacccgtactagctgcattttcagaaacaacgacaccgcaagaccgtacagcagcttcaggtgagcagccatgcccatctatgagcagccctcctgccaccgaggcctgtgctggcaacgacagaagccatttggcgggatctcagccagatgctacgccatatgcttctaccagcacaacgcagaggatgagttccgaagcattagcaagccagcaatgtggatcactaccacaaatttcgataaaccgagctgaacgtacccttgagatgatgaagggcagccccaataatcttcacggacacccaggcatgcagcaaactgcgaatggtttcaatgctgttccaggaccaatgatgttcccacatgtggctcaactggtggtgaatcagatgcagacacatacggctgattgataacgttgtgtgtgtgtgccggggggcggggggtgtcgcctttgatccgtcgtgcctcaacctggggctgcaactgtgagcctgttgtgtaattgcttaagtagtcattaggatgatagcgtgcatagatgtgttgggtggatgctgtaacagcggtgaccggtgagttgcgattctgaatgtgtagcagaaaaaccacaggcgaaatgaaacatctgtatagattatcgaggaatttttttagcatgaaaccgtgcgaatcagtttgtctattgtctgtatggtttatatacatcaacctgacggtgttctcgga

SEQ ID NO: 108932 - DNA, 2129 bp, Zea Mays
cgcaacgacgcgcctcggcctcgcagaaacaggggccaaaaaggaaaagagaaaagaggaaaagaacgcagggaatgggcaagcagcagcaggcgccaccggcgcggcggtccacggcgatgtcggcgcctccgccaccgaagcgccggaagaagaagggccggccttccctcctcgacctccagaagcggagcctccgcctcgagcagcagctccagcagcagcagcccaaggggcgacgctccaaccgccggagcgccggctccgcggacgaggacgacgacggccccgcctccggctccggccgccgcgagaagaagctgcgcctcgtcatgggcctccacgacggatcacccaaggtagaaaagacgaggaaagcgacggatgggcatgaagagccgtcagattccgggcccacaacacctttgccaaacaaaaagttattgctcttcatccttgataggctacagaagaaggatacatatggtgtattttcagagcctgttgatcctgaagagctacctgactatcatgacattgtaaagcatccgatggatttttcgacaatacgtaagaagctcgataagggtgcctattccaacttggagcaatttgaggacgatgtgttcctgataagcaccaacgcgatgtgctacaattcaccagatacaatatactatcgacaggcacgaggtattcaagagatcgctaaaaaggattttgagaatcttaggcaagatagtgatgccagtgatccagaaccggaaccagaattggagctggagccagaaccagaagaaccaaagccacagcctcgcaggggcaggcctccaaacaagaacaatgccaaacagaaagttgggaagccaccaacagaacgtgctactgcagatttttctggtgcaacgcttgctactgccgcaaatattggacgccatgcacaggcagatgttgatctgtcacgaagagcaatggataaagcgatgatggatatgctgagagcttcttttgccaatagaaggaatgagcataattggtctggcgagcggaaatttgaaagatttgaagagtgctcaggggtacatggtccgcaaaaatggggaagaggccaattctgatggaagatagtcgccgaagcacatattgtgagactcaaccatccaattcaatatatgagctgccggtatcgtcatcctacaatgggacaaagaagctgctagtaccagttggggttcagttacagcagtcctattcccgcagcttggcacgatttgctgcacaacttggtcctgtgtgctgggagattgcatcaaggcgaattgaacgaagccttgctcctggaacaaagtttggtcgcgggtgggtaggagatggcgaaacaccaaactcttttcagccacccgtactagctgcattttcagaaacaacgacaccgcaagaccgtacagcagcttcaggtgagcagccatgcccatctatgagcagccctcctgccaccgaggcctgtgctggcaacgacagaagccatttggcgggatctcagccagatgctacgccatatgcttctaccagcacaacgcagaggatgagttccgaagcattagcaagccagcaatgtggatcactaccacaaatttcgataaaccgagctgaacgtacccttgagatgatgaagggcagccccaataatcttcacggacacccaggcatgcagcaaactgcgaatggtttcaatgctgttccaggaccaatgatgttcccacatgtggctcaactggtggtgaatcagatgcagacacatacggctgattgataacgttgtgtgtgtgtgccggggggcggggggtgtcgcctttgatccgtcgtgcctcaacctggggctgcaactgtgagcctgttgtgtaattgcttaagtagtcattaggatgatagcgtgcatagatgtgttgggtggatgctgtaacagcggtgaccggtgagttgcgattctgaatgtgtagcagaaaaaccacaggcgaaatgaaacatctgtatagattatcgaggaatttttttagcatgaaaccgtgcgaatcagtttgtctattgtctgtatggtttatatacatcaacctgacggtgttctcgga

SEQ ID NO: 108933 - DNA, 483 bp, Zea Mays
atggacacgctacgccgcttcgcgcgccatgtcctgttgctcctcccccattttcctgaggccagtgcggcgcctggaagagtagctgccctagttgccaattacttggtccacgcgcaggagcttttcgatgctacgccgcaggaggaagtataccttttgaccgcacgttttgaggaaatgcagaccataaagcgcttgccaaagagtgtccatagttccttgcgctcaggtgttattctgtctgacctgccaagggttattgaggagttgatatataatagcattgatgcaaatgcgagtaagattgacattgcagtaaacatcagagcttgttatgtaaaagtggaagatgatggttgtggtattacacgagatgaactggttctcttgggagaaaaatatattcttttgacaattgcatagggatctaaatgcttacatctggggatagatgacaagagggaagttgtcggcaccact

SEQ ID NO: 108934 - DNA, 322 bp, Zea Mays
tcgccggctcgccgccacgaagtatgccaccgctggccgacgcgtgcatggacacgctacgccgcttcgcgcgccatgtcctgttgctcctcccccattttcctgaggccagtgcggcgcctggaagagtagctgccctagttgccaattacttggtccacgcgcaggagcttttcgatgctacgccgcaggaggaagtataccttttgaccggtgagagcaggagtgcagaggaagcgagttgatcagcaacacatggcgccatttgatttagtattcggttgaacactgtcagtttaaaatgtttttcaaaaaagaaaaa

SEQ ID NO: 108935 - DNA, 1275 bp, Zea Mays
atggcgtcgctgttcggcaacggcggctacatctactcctcggggtcggagggggaggacgaggacgagggcacggaggggtaccggaaaggcgggtaccacgccgctcgccccggggatcgcttcgccggtgggcggttcgtcgcgcagcggaagatcggctggggcaacttctccaccgtctggctagcctacgacaccctccacagcagatttgtcgccctgaagatccagaagagcgcaagggattacgcgcacgcggctctccacgaaatcgagctactgtcggctgtggccaaaggagacccgacgaattcaaagtgcgtgcttcggttgttggaccatttcaagcacgctggccccaacgggcagcacgtttgcctggtcaccgagttcctcggtgatagcctgctccggctgatacggtacaatcggaacaagggcattgggctgagcagagtgaaggaaatctgccgatcagtcatggtcggccttgattacctgcacagcgagctcggcatcatccacacggatttgaaaccagagaacgttcttctggaatcaacaattaacccggccaaggacccagtgcgctctgggttcacaccgatcctcgaccggcctgtggggaaccagtacggtggcacagtgatcagtttcagtgagaagatgctcaagatgagagcaaggcgtgcagtggctaagatttcgcagagacgggtttcccttggtggggttggggcagaactggagaaagagaggtgcctggatgggatcagtttgaagtgtaagattgtcgattttgggaatgcctgctgggccgatcagcagcacgctggtgaaatacagacaaggcagtacagagctcctgaggttatcattggttctgggtactcatattccgctgacatctggtcgtttgcttgcattgcctttgagcttgccaccggtgacttgttgtttgctcccatgaatcgccagggatgcagcgaagatgaggaccacttggctttgatgatggaaactcttgggaagatgcctcggaagattgctagctcaggaactcgttccaaggattactttgatcggtatggagatttgaaaagggtcaggagactgaagttctggcccctagaccgtgtgctcgtagaaaggtacagtttcagcgaacccgacgccaaagggttcgctgactttcttcggccaatgttagatttcgctccggaggacaggccatctgccgcgcagtgcttgaaacactcttggcttaattga

SEQ ID NO: 108936 - DNA, 1622 bp, Zea Mays
ggcctcaccccttcccacggaggcccccgagtcgccattgcttgccctcgctcggctcgatccccactctaccgtgccagccaccaaccccgcccgcgcctccgctactaaagccgaggcctcacccaccaggccaccgccatgctcctccccttcctcagatcccacccgctcctccaccacgccgctcgcctgtcctccccgcgcactcgcctgatcctccgccgcgacttgctcccgctcgcgcgctcccggcctatccgcatggcggcccattccggctccggctccggcgccagctcccctgccccagcgccgcctgctgccgtggtgcaaaagtcaaagatcaaattttgccctgcttgtggaagtccaacgaaattggccatacctgatggtgatgagaagatgagggctgtttgttcttcttgtggaggagttcactacgaaaacccaaaaatggttgttggttgccttgtggagcacgataataaggttctcctttgcagaagaaagattgaaccggcttatggtctttggacacttcctgctggttatttagaggtgggggagtctgctgctgaaggagcctctagagaaacattagaagaagcatgtgcagatgtagagataatctcaccttttgctcagttggatattccactgattggtcaaagttacattattttccgagcaagactgaagacccccaatttttcacctggagcagagtcgctggaatgtgcactttttgctctcgatgatataccattcgattctctagcattttcttcaatcgttgtcaccttgaggatgtatactgaagatgtgaggtctggaaacatcaaatatcactattgcattataaacaaaagattaggagccagcccgtcagaccttcggagtttcgatattgataaccatatagctgtgtgaggttttaaaggttctaaaacccttggcgattgaggggaatggttttggcatacaacaggcacacggccacacaacaaaaacatcgccatcagatagaccagtgttgaatgctgaatccccatgggagccttttttggcgcctctctgcggattggaacagatttagagggtggaacagatttagagggtgtttgatttttatggactaatttttagtttctctattttattctattttagactctaaattgacaaatacggaaactaaaataggattttagtttctgtatttggtaatttagtattcagtaatttagagactaaaatgaaataaaatgaagaaactaaaaattagtacttagaagccaaacactcccttaaagtaggtgctggaactgtaaatggttcgtatcctaaagcctggtttagcccttttaggagattctgcgtttggatgggagttgggaggactgagaattgtatcatagtgcagcaaatcttggttgtaggattgagctatcctgcatgccatacttgtggcgcttcttcagcgaccgcatgctgtgatctggttacaattgaattatgtgagctcttttttaaccatttatttcagttgtaaagcttgtgttgcattatttttttatcataactgagtgctgaatacaccttcaggcttgctcgtt

SEQ ID NO: 108937 - DNA, 1625 bp, Zea Mays
ggcctcaccccttcccacggaggcccccgagtcgccattgcttgccctcgctcggctcgatccccactctaccgtgccagccaccaaccccgcccgcgcctccgctactaaagccgaggcctcacccaccaggccaccgccatgctcctccccttcctcagatcccacccgctcctccaccacgccgctcgcctgtcctccccgcgcactcgcctgatcctccgccgcgacttgctcccgctcgcgcgctcccggcctatccgcatggcggcccattccggctccggctccggcgccagctcccctgccccagcgccgcctgctgccgtggtgcaaaagtcaaagatcaaattttgccctgcttgtggaagtccaacgaaattggccatacctgatggtgatgagaagatgagggctgtttgttcttcttgtggaggagttcactacgaaaacccaaaaatggttgttggttgccttgtggagcacgataataaggttctcctttgcagaagaaagattgaaccggcttatggtctttggacacttcctgctggttatttagaggtgggggagtctgctgctgaaggagcctctagagaaacattagaagaagcatgtgcagatgtagagataatctcaccttttgctcagttggatattccactgattggtcaatagagttacattattttccgagcaagactgaagacccccaatttttcacctggagcagagtcgctggaatgtgcactttttgctctcgatgatataccattcgattctctagcattttcttcaatcgttgtcaccttgaggatgtatactgaagatgtgaggtctggaaacatcaaatatcactattgcattataaacaaaagattaggagccagcccgtcagaccttcggagtttcgatattgataaccatatagctgtgtgaggttttaaaggttctaaaacccttggcgattgaggggaatggttttggcatacaacaggcacacggccacacaacaaaaacatcgccatcagatagaccagtgttgaatgctgaatccccatgggagccttttttggcgcctctctgcggattggaacagatttagagggtggaacagatttagagggtgtttgatttttatggactaatttttagtttctctattttattctattttagactctaaattgacaaatacggaaactaaaataggattttagtttctgtatttggtaatttagtattcagtaatttagagactaaaatgaaataaaatgaagaaactaaaaattagtacttagaagccaaacactcccttaaagtaggtgctggaactgtaaatggttcgtatcctaaagcctggtttagcccttttaggagattctgcgtttggatgggagttgggaggactgagaattgtatcatagtgcagcaaatcttggttgtaggattgagctatcctgcatgccatacttgtggcgcttcttcagcgaccgcatgctgtgatctggttacaattgaattatgtgagctcttttttaaccatttatttcagttgtaaagcttgtgttgcattatttttttatcataactgagtgctgaatacaccttcaggcttgctcgtt

SEQ ID NO: 108938 - DNA, 1377 bp, Zea Mays
gccctttcttcctacgatacgctgtttcttttctttcttccttctctccacctcttcccccctccccaaattcgcgtcgaacgaattcgttaaataatctcagaaaacacacgattgactggatcgaagggattaaaacgagaacgttcagatcctgtgatcaggtctcggggctaatcgtgtgatacttcggcgtgctttggcttgtgattcagtgatatagggtttcggatctggagaattagttctcccgacttccgagtcagaccatgaatgagcagatgatgcgacctacggcgccgctgccgttccaccagatgtgggcggcggtgccggcgatggagcctccggtggccgcgttcaagccggcgcggcaggcgtggaagcgggcggcgcggacgccctggaagcgcaaggcgcagccgccggcgccgccggcgtcggtcggcggcaggtggggcggcgcggcggccccgcgcaacacgacgtcgttcctcatccgtgcgaagcgggcggggggcgtggcgtcgctggtgtcgccgtgccccgtgacgccggcggtgcttccgacccccgtgctgtcgccggcgcgggaggtgctggtggagatggccaaggaggcgtggggcgtggacgggtacgggtccatgaagggcctcatccgcctgcgcgccgacgccggggacgccggcggcgacgactcgggctccggcgagagcgaggtggaggagcacgtcgaggtggagcgccgcctggaccacgacctcagccgcttcgagatggtccacctcccggccgcggccgcggcctcggccgccctgggcgaggaggacgacgaggcgcgcgccgcgaggctggaggaggagaacctgaccctccgggagcgcctcttcctgatggagcgcgacatggccgacctccgccggcggctcgttgccgtggaggagctctgcctggtggacaccgccgacgagctagtgccctctgagagcgcggccgccgtcgcatgccccggtgcccgcgacgagacctacacgggggacgccatggtcatggagaagtaaagcttacagcactgaaactgtacatacggtttccatttccctgtgtagtcatggagcagcagcagtagcagcttctttagagttactcatctggttagtttgacatcgtctagcttgattccgtttcatgtcccttgtagaaagaaccatcagtcaggaaagcccgtggtcgacgatggaatgtgcggggaggagcacgagatcctggtgtcctcctcctgctcgtccagatcctcaaccacttgtagtcccgaactcttaccagccctttttagtgcagtcagtaacctgttgtttttgttgttaagaaaaa

SEQ ID NO: 108939 - DNA, 345 bp, Zea Mays
atgctgctggaacaaggctcctcagtgccctcgctcaagtccggctcgaagccctgctctggcgtcgacgccacgtgctacatctccggcgacctcggcaaggggctcggccccgtcgcgcagaccagggacggaggctacctggccgtggccgccacgaacccgttcgacatcccggtggaggagaaggagctcgccatggaactttccgagccgttcattctccgcgaccatggaatcctccctgcgcggtggtgccgaggcgctatgcgtgctcatctcatggacgatgtcgttggcaagacaggcgacctacgtttcggggcttgtttgcagttctactag

SEQ ID NO: 108940 - DNA, 1484 bp, Zea Mays
aagtgagacaaggccacaagggggatggggcggcacgcgccccccggccccgccccgcgctacgtggtccatttccagtccagtctccaacaacgccggagcgcaggcgaggcgagcacgccgatcgattccgattcgcatacgcccgcccgccgcgaatggacgatgcggagtccgcctcgagggcggggaggaggcgggcggccgccgccgcggggatgaggttgttctcgccggagtactacgcgctgtgcgccggcggcgggatgctcgcggcgggcgccacccacctcgccatcaccccgctcgatgtgctcaaggtcaatatgcaggtgaatcccatgaagtataacagtatattttcaggactaaatgttcttgtgaaagaagagggaccttcgtcactttggagaggctggggagggaaattttttggctatggtgttcagggtggctgcaggtttggcctctatgagtatttcaagaagaggtactctgacgtgcttgtagacagtaacaagagcaccatatacttccttagcagtgcctctgctcaaatcatagctgatgttggcctgtgtccgtttgaatcggtgaaagtccgtgttcagactcagcccatgttcgctaaaggtttggttgatggctttccaagggtgtatgcaactgaaggcctatctggcttttacagggggcttttacctctttggggacggaaccttccattttctatgcttatgttttcgactttttgagcataccgtggacttcctatatcagaaagttattcaaaagaaaaaggaggactgctcaacgatccagcaacttggtgctacttgtctggctggttatatatctggtgccgtcggtactgttgtttcgaatcctgcagacaatatcgtctcatccctgtataacaaaaaggctgaaaatatcatacatgctgtgaaaagtattggatttcgcaatttgctcacaagaagcctgcccatccgaatcgctcttgtcggacccgtcataaccatgcaatggttcttctacgatacaatcaagatattaactggattgccaacgactggaggacttccgcgcgaactagaagaggctaacatataatctgaccagtttgagataggcttctcgacgcactttttggtatcgtatggacaagtatttgtctatggttctgacttactaggggaagagtatagttggtagttttcagggaagagccaattgacctgaatacatcatgcgtaaggtttctgctgctggatatggaagactgcctcgtgtcgtatgtttttccacgtcttaaacaaccttgagcttcagcacccctccaggtacagcattgtggccaggtggtgctttagtaagtgtgtttcgtaagattttgatgtatgagaaaaatgcacttgtgatgtatacacgcgaccttgaaagtaaataatccctctgaaggaccgagatttgaagtgaaa

SEQ ID NO: 108941 - DNA, 432 bp, Zea Mays
atgatgcaggtgttcgtgaagacgctggtggggaagacgatcacgctggaggtggagtgcagcgacaccgtcgagaacgtgaaggccatgatccagggcaaggaaggcatcccgccggaggagcagcgcctcgtcttcgcgggcaagcagctggacgacgacggccgcaccctggccgactacggcgtccagaaggagtcgacgctgcacctggagctgcgcctccgcggcggcagcaggggcggctaccccatggggatcccgcccagcctccgcgagctcgcgcagaagtacaacgagaacaagatggtctgccgcaagtgctatgcgcggcttccgcccagggcaaccaactgccgcaagaaaaagtgtgggcacagtaacgagctgaggtcgaagaaaaggttcatgtccaagattggcgggaaatga

SEQ ID NO: 108942 - DNA, 975 bp, Zea Mays
atggaagctgcaaagcgacatgcagcagagtcagcaacaaacatttcagagcttgtaaagaaggatgagaacagtcgcaaaaggtctcagcgttggcaatctgacagagccctgttacaagaggatcttgcagcacaaaagagcaggttatctcgggtccaagaacaccttcagcatgctaaagagctaaaggatcaagtgcaggtgtgtgccagggagagagcagtagagaagagaagttgggaaaggagcggaggagatatggtggaacagaggaacaatcaccctgggtggccaggacggccaaaggcaagatggaaacaagaggaagctggaaagattgaggtaattgcccttgtaacctcaaagaagaaagagagggagcaaattgagacctccatgaggtcagaagagaatttactgcatcttaaagcagcgaatgacacagaaagatacaagagtgagatccgtgctcttgagcagcgtattgcacagatgaaggtttctttggactcttcaaaggttgctgcccccaagtggggtgctgacaataaaacatatgcattgcatctttctgaagggagaaagaacagcagtgcccaaattttgtccaacatagcagtaccccaagatcccagttttgatgatatacagcgtgaccgggagtgcgtcatgtgcttgagtgaggagatgtccgtggtgttcctcccttgcgcccaccaggtggtctgtgccaaatgcagcgacctccatgagaagcaagggatgaaggaatgcccttcatgccggacccccatccagcgcagggtgcgcgcccgccccgcagtgtggtgcaggagaacggacgagctcgttgacggccccaacgcgtcccacatctcggcgctggcgctggaccggtgggagtcgcggctggaggacatcttcgccggccgcccgtacgacatgctcgacgccgtgaagggtcatatctag

SEQ ID NO: 108943 - DNA, 925 bp, Zea Mays
cgttactttccgtggaaaacttaccccagtgccacctggctcgtatggtgctataaaagctgattcatcaacggcacaagcaagcccgaatgtatcaaataccgaaccctcggtatcggacaagactcagtgtgtcatcccgaatattgagccaaaaaaacaccatgttcctatatgtgatcattcagaggaccaaccatttgttgctgctgcgacacaatctgtgaaaaatgacaagtcgtccccaagcaagagggggggctctaagagggactcctttcatcggcagaagttgacgaactatgataaaagttcccgagcattgggttccaaaggctctcttaggtctggcaagcaaagctcttcagccagtgcagtattggagaggaagtgcaggtcattttccgattctactactagcaacttgaagggctcatcaagagttgctaaagggtttgctgcaagcatatctggatcagaagtatcagttgacctttcctttactggtaccctttccccttctccatcatttgatgccaaggtagttagtaactcaaactcagcacctgctgctagcacagatctttcattggcattgtcctcaagtgatagtttaacaccatctttgagtcatgattccaatactgaggtagtggactctagtagcaaaattaatttttcatatgatgaagaacagaaggtctggatcccacaagataaaaaggatgaaattgtcttgattcttgtccagaggcagaaagaactgcaagcacatacacgtgactggacagactgggctcaacagaaagtgatgcaggtcgcacaccgacttgcaaaggagaaggatgaacttcagtcactcaggaaagagaaggaagaggcagaccgtctgcaagaagagaggcatcatttggaagagagtact

SEQ ID NO: 108944 - DNA, 615 bp, Zea Mays
catctcgccatacgcttatcgcccatcccctgatcaccagccgccgccgccaccgcctcgatcccgtccgatccaatccggttttttccttgataatgcgcgtggcaaccttgtcagttcaatccgtccgtgaagaacttatccttattttcgtttgcatcgcatcgcttctgcgtttgggggaaaaagggccgcgtccttgatgtctactatcgcgaccccgccgccgccatcggcggcgcaagagaaggccgccagccggaataagcgaaagtaccgtgccgagacaccatccacggagttgggcccattcgggctggagtacccactgacgacggactgcgtgggattcgagtttatgtcgcccgagaaggttgccatggcagccgcggtagccgccgctgagggtgtcagccttgacctcctccagaactcgtgcgaaaactgcaaggatctccaccctactgcggaggacttgttggagtgccagcgatatgtgaattggggtgacccaaatgagatgcagctggaggagatccttctcaagagtctggacaccacctttgacaatagtgtgagtctgatcaccacaatgggctactctgaggcggccgc

SEQ ID NO: 108945 - DNA, 2282 bp, Zea Mays
catacgctaactaatttctctatcaatccatcctttgcaaccttggtgctaaaacaacgtttgtcatgcatacctactatctctttctcacacaagtctcttctccgttttcactctcttgctagctcctctttgtccttcagatcagatctctcagaagagtagagtgcctgccagtgccatgtcgctgccagtcacacagcccattgcatgagcagaagggcaaggaagcttgggagggtgtaagctgaggatcggtgacgtgcaaatgcggccacggggaacctctctgcaacaaagctccgcatctgctctcggcgacggcgatgcggcgctaccgaagaagaagaggaaccggccaggcaatccgaaacctgatgcggaggtgatcgcgctgtcgcctcgaacgctgctggcgacgaaccggttcgtgtgcgaggtgtgcagcaagggcttccagcgggaccagaacctgcagctgcacctgcggggccacaacatgccgtggaagctgaagcagaaggaccccaaggacgcgcgccggcgggtgtacctgtgcccggagccgacgtgcgtgcaccacagcccgtcccgggcgctgggcgacctcacggggatcaagaagcactactgccgcaagcacggcgagaagaagttcaggtgcgacaggtgcagcaagcgctacgccgtcgagtccgactggaaggcgcacggcaagacctgcggcgcccgcgagtatcgctgccactgcaacgccctcttctccaggaaagacaacttcatcacccaccgcgctacctgcgacgcagcagttcgtgggaccgcccagaagccaccgctggtcgccggcctctacgtcggctcaggcagcgatgataggctcgggctctccgacgccgccgcccagatgcatggcttcgcagatcaaggccagtcctcttcagcagcagaagcctcacagtttgaccatgtcatgccatcgtactcgggctcctccatgttccgttctcaggcgtcagacttctcgttgtctttcttcctcggcggcggcactcctcttatcgaacaagacctgtccgacaacggtggtgatctctccgaaggcagccagggccctctgctccatggcaaggcgcccttgcatggcgtgatgacgcatctccccgagcagcagtatcagccaaacagcggcaacgccaacgttaacctcctggacattgggttcttctctggcaacagtggtggcacgtctggcagccagggccctctgctccacggcaaggagcccttccatagccatgacctgacgcaacttcccgagcagcagcaccagccaggcagcagcaacgcccgcgtcaacctccctaaccttggggtcttctctggcaacagcggtggatggcccggaagcagccatcaggacgcgcgccttgtcatccaagaccaactcaacggcggcagcagcagcaacaccgagcatggtaacgggatggcgtccatcggaagccacttcggcggaggcttcgtcccttccctgcacaactcatctccgtcggccgggctctcagcgacggcgctcctgatgaaggcggctcagatgggctcgacgacgtcgagcaccacccacaaccccaacggccccagcgcgctgctccgcgcagccggcttcgcaggcactgccagcgtccgggagactagtagcagggcagcggaagaagagaagtctcacgaggcatatttccatgatctcatcatgaactcactgccattaacgggaggaggcaccggcggcctctcagggttggcgggcgtggacgacggcaatgtgagcacaagggacttccttggcgtcggcagggacgacgcgacggcaccgcagggcctccacggcatgggcgccccgaatccgacccagatgaaatggtacatgtgatggatcaggtcggaaacgcgaaaagaggaagacaacaagaagatgcaagctaagaagggagtcaataaacagaacagaagatcgtgcactagctagtgagtggcgatcagagagatcgagaaaacttaatctagttttgtttcgtggattagttcacttttctcatatgccgcccgccatgattgatatggctaatagtaacagggctgcaagcaatgcagctgctgaacttgttcattgcttttatttcggtacaattttgtggtgtttttcaagtgttcactgttttgggttggagagatggtggtggtctctgcagatgtcgagttcattatgtagaggccggacc

SEQ ID NO: 108946 - DNA, 883 bp, Zea Mays
cccttgttttgtgtttcctggggtcttggtcctggcatgctacctaaacctttagcatgcagatagtagctgcggacggcttttcttgacattaactgcaatgcctttgaaatgtctattcccttggatcaaggtttttataatgaatatggatatctgcaccagtattatgttcattgccctattgaatcatttttgttgccttcttacgttctgttatatttcagattttcacctcttataactatattgtaagtgcatttggattatgtgacaggtttccctttgggatggcattatacctgcaaaggagcatgccaagtttttgatccatacaacaaataagtacagatttattgaccagggaagcaatctaaagggcaaggaattcaacttgacaatgcactggcacattatgccaaagactggcaaaatgtttgcagataagatagtcatgacaggctatcagcttcctgagcagtacagatagtcatatagatcatgaacagtagcagaggcctgcaagaagtgatagttgcatagctgatgctgaactttttgttctaatctagttggaacatgtaatcttataagcttgtacttaagctgaaccaggcaaaactaagttgcaaatttgagatatttattgctcaacttttaagaataggtctcggttaatggtgagaagacttttcactgagccaaaggtcttgggtttcgaactttcgatgcagtctctgagcaaaatgcagggataagacttgtcttggttcttcctcgaaccatactcatgtgggagccctcagtaatgggtctgtttatttattgctcaactttgctttgcctacaaatcttgattctaaacttgaaggtatgcgttgca

SEQ ID NO: 108947 - DNA, 1087 bp, Zea Mays
tctgcactgcacgggctaacttctctctcttccggaagcacttcccgaaaaaaggaagacagagaaggaaacggcagtgaagtcgccggcgccgccgcgacaggaggaaggagggagtagcagcggcaggggaggtccggcgatctcggctgctgtggcgcggtaagggaggaagcggagccgcgacaggatgcactcgtttgggcaccgcgccaacgcggtggcaacgtttgcggtcaccatactggccgcgatgtgcttcgccgcctccttctccgacaattttaacaccctgacacccaccgcatccgtcaagatcttgaatataaactggttccagaaggaggccaacggcaatgacgaggtcagcatgacgctgaacatttcggctgacctttcatctcttttcacgtggaacacaaaacaggtatttgtttttgtggcagcagagtatgagactcgacaaaatgctttaaatcaagtttccctttgggatggcattatacctgcaaaggagcatgccaagtttttgatccatacaacaaataagtacagatttattgaccagggaagcaatctaaagggcaaggaattcaacttgacaatgcactggcacattatgccaaagactggcaaaatgtttgcagataagatagtcatgacaggctatcagcttcctgagcagtacagatagtcatatagatcatgaacagtagcagaggcctgcaagaagtgatagttgcatagctgatgctgaactttttgttctaatctagttggaacatgtaatcttataagcttgtacttaagctgaaccaggcaaaactaagttgcaaatttgagatatttattgctcaacttttaagaataggtctcggttaatggtgagaagacttttcactgagccaaaggtcttgggtttcgaactttcgatgcagtctctgagcaaaatgcagggataagacttgtcttggttcttcctcgaaccatactcatgtgggagccctcagtaatgggtctgtttatttattgctcaactttgctttgcctacaaatcttgattctaaacttgaaggtatgcgttgca

SEQ ID NO: 108948 - DNA, 592 bp, Zea Mays
tctgcactgcacgggctaacttctctctcttccggaagcacttcccgaaaaaaggaagacagagaaggaaacggcagtgaagtcgccggcgccgccgcgacaggaggaaggagggagtagcagcggcaggggaggtccggcgatctcggctgctgtggcgcggtaagggaggaagcggagccgcgacaggatgcactcgtttgggcaccgcgccaacgcggtggcaacgtttgcggtcaccatactggccgcgatgtgcttcgccgcctccttctccgacaattttaacaccctgacacccaccgcatccgtcaagatcttgaatataaactggttccagaaggaggccaacggcaatgacgaggtcagcatgacgctgaacatttcggctgacctttcatctcttttcacgtggaacacaaaacaggtatttgtttttgtggcagcagagtatgagactcgacaaaatgctttaaatcaagtaagtttatcaattattattcttgatgagtcgatatattacttgtgaccctgtggcgtgggcctttattatagtgcctcagatgattatcaattactattagcctgcaac

SEQ ID NO: 108949 - DNA, 2048 bp, Zea Mays
ggctcggcctcgttcctcgcgcgtactgccgcttgccggctaccagaaaaatggccgcggcggcggcggcggctaggcgtgccgctggccttctccctctcctcctatcctcgcggtccggtgctcgcatacccctccaccgggctgtatcccagatccctccgccttgctcctatcgcctactctcgcagcaagccaagcccttctccgcctctgcctctgcctctgcctcagcctccgcgtcgaatggcgcgaccgcggaaagaacccgtgagctgcatctgtacaacacgaagtcgcggaagaaggagcagtttcggccgcgcgatccaggcggggaggtcggcatgtacgtctgcggcatcactccctacgacgacagtcacatcggccatgcccgcgcatacgtagcctttgacgtcgtctacaggtacttgcgctatttggactatgaagttcgctatgttcggaacttcaccgacattgatgacaagataatcgcaagagcaaatcagctgggggaagatccttttaacttaagtaaaaggttctctgatgacttcttgttagacatggccaatcttcaatgtttaccaccatctgtggagccccgtgtttcagatcatattgatgagattataaatatgattaaacagatccttgataatagttgcgcatatgtagtgggtggggatgtttatttctctgtagacagttttcctgactacggagaattatctggtcgaaaattagatgataatagagctggtgaaagggtttctgttgatgagaggaagagaaatccagctgattttgctctatggaaggccgcaaaagatggggagccatggtgggatagcccatggggcccaggaaggccaggatggcacatagaatgcagtgccatgagtgcacattatttgggtcattcttttgacatacatggtggtggggaggatctcatctttccacaccatgagaatgagattgctcagagccgtgcggcatgttgtgacagtaccataaattactggatacacaatggttttgtcaatgtaaatagccaaaaaatgtctaaatcgcttggtaattttgtcaccatacgaaaggttatagagatgtaccatccgctggctttgagaatgttcttacttggcacacactacaggtccccaattaactacacaatagaacaactcaatgtcacatcagacagattgtactacacatatcagaccttgcttgattgtgaagagatttgtcagcagcaacaaagcaacactggaaattcattgcctgctaataccttaaattacatccaaaaacttcatgaggaatttgagacctcaatgtcagatgatcttcacacttcagtggcattggctgctatttctgagccattgaaagttatgaatgatctgttgcacactcgtaagggaaagaagcaggacaaaaggctggaatctctttctgccttagaagagaaaataagagtagttctctctgttctaggattgctaccttcaagttatcatgaggctttgcaacagctgcgggataaggcactgagacgagcttccatcaccgaggagcttgtggtgcagaagattgaagagaggactgcagcaaggaaggcaaagcagtatgaaaaatccgacgagatccggaaagaactggctgccataggaattgccctcatggatggccccgacggaaccacttggagaccatctttgccaattttagaggaagcggtggttgcgaaaacatgatctgtgcaagggattccaatacgacccatggacaccagttctagtcggtaatcatggatttgctatatgtgacgaacttgttcgtttgactttcattcataccggcttgtaatgcttctataatgttttttcataattctctgctcccattagatctatagtagttactagctgaatgcacgtgtgttgtaatgaaaatatataatatgagtatactatgataacttatatacaaaatgtatgttataccgttatgagaaaatgtttcataatcaa

SEQ ID NO: 108950 - DNA, 3957 bp, Zea Mays
atctatcatagtgagtttgaggacattggaccgcaccctgcagaggccaagcgtcgaacacatggcgtgcaccttcctccgccgcgcgttctccctcaccgccgccggcacccacgcgaccccccgagttgccgccgccttcgcttccacttcctcctcatcctccgtcgtcgtgcctctgcgctccccactagaccaccgtcttctccgccacctccgctccgagatcacctacctcgcggagcgccgccctccccacgtgccgccgagtagcttcaagtcgttcgccgtggaggaccgcccgggggagcagtgggtgcgcctccgcgccagcgcgggagggggaggcgaggaggtgaaggtcgaggccaccatgttcgacggcgctgcggagcctgtcccggacgacgcgcccctcttccgccgcgtggagtcgctcgagcgcgggccccgcctccacctcagcctcatcgtcgaggtcgcccggggcgaccgcgtcctcggcttcgtctgctccgcctggcccgacgacctcgccgtccgccacgtgctcacgctcgcagctggcggtggcagcagtggtggtcgtcgtggtgggcgcgatttcgagaaactggggggcgaggagagggaagcggtgacgaagttcttgaaggagagggaggtggacgccgagctcgccggattcttgcacgactacatggcaaacaaggagaagatggagctgctccggtggttgaagactgtcgaatcattccttaacaagtaggataagatcgcacacagaagacaccgctgatgttactgcctagtttgggaacgggtacgctccaacaacaactggtgacgatctcctgcagtctctgtgatcatccgcatctacccctctgctgacaattgtgtgctgaagatgtttgtttttaatcagcttagatagctcagcgcacagcgctcttggaaactggtgatctgaatatcctactggtactttcatttctttgtgataagattgttctcaacggtgtatcttttaagatacaccccattgggtttttttcccttttgcaatataccaaatctcattttggatttccaaccagttgctatgtgcgtgcttagagtaaaaatctgctcttctgaactctgacggttcaatgtcgaaggaggagctgtaacggttggattaagcggggcgacggctcacatttcagaagccttcacatgatggcattgacacacctcaatccaacagtcgtgccactgccaagctccatcgcgccacgcgtgatgtacgtgattatgatctcactgactagcgggcccgcgtacagattcaaccctcccctcccctcaacggctagttccacctccgcatccgttgggacaaaagggggaaaaaccagagggaacttcaccagccaccaaagtaccacacctctcctctctcaagaaccaccgcactctctctagcaggcctctgttttgtactgtaagcaggcctctgtagagtttgcaaaatgaaatttgaaatagaaaataaatactgtatattatattgtttgtaaagtgaagtttgaaacaggagcgaaaaggtagatagtcactcagcttctcgagagatcgccaaagacgcggcgccggcagcaagttctgcggcgatggggcacaagtacacgccgacgtactactcgggcctgcaggacaccatcgcgtcgctctgcaagtccatcctgccctccttccgcgtgggccggcggctcacctccgaccaggccgcggcgcggcgccacgccgagcagctcaagtggcagcaggagtccttccaccgcatcctccaccttgccgcgctccaccgcgagggcatcgtcccggcccacgacgtcgccgccttccgcggcaccatgctcgcggcgctcgtcgcgccgccgccgcagcaccccgagcagcccgcggtgctccgggacaagctcctcttcctccaggagctactctacgccaagtgcgtctccgcggcggagtacaacgcgtccaaggcgcccctcgtgcggcggctcgccgcgttcggcggcggcgtcgtcgagtgccccgatgccgaggcctcggccgaggagtggtcggagatcgacctccgtgacccgcctcctcccgccggcgcggcgtcctccgacaaaccgaagcacaaggccttcatcacgccgtgggagagcagatccaggaaggatcaggacgcgaaccgcagcgcatcaaggccgccgctggccccggtggatcataacaacgccaacaacgcgtcggtcctcatgcccgagtattctccgtcggaagcggtgccctgcaggaaggcggagaaggggaggaggaggcatctggcggggatgttccacagtggcggcaatggcaccgagaacaaggagcctgcgggggaggaagggggggtcgacgagaaagcgacggtgaaatgtaagaagaaaagctcgtggggattcgatggcatcaagaagtggaagaaagctggcgcctgtaataacaatggcgaggcggcagccaccggtgagcagccgcagcgtactcctccgcgctcatcgtacagcgagtgccaattggaggcgagccccatggctgcatctggcccggatgccaagagggccaagacgaggctgcactccagcacggatgatgactgcttctgagctgctgcgtgataaggaattactgaagtgaaggtcctggtggaaaacacaaagaaagaactctgttattggtcatttttttttatatattctgtttcccaaagatggatggctcttggatttgcaggaatcagcagatcgaggccatctcaacaaagcttcaggtggacaagtctgacctcaagcccttcttgccaaagtagatcactggatcatccatcattcagattaggcgcatgatttctcataaacgagatagtgacactttttatgcttttgttactggtataatggtattgttgtacttaggttcaattgttacattggaccaggagttgctgtttatggcgtcatttgtatgattggagcctacttcccattgattccttgaatgcacatcagcttttctctcccccagtgagcatttgcccgacaagaaacttcagtgtcacatgaacagctgataactcatttgacttcacaaaagataaacaggcagttctagatgcaagttcctacatatacagcaggcatgaatcgcaattgtaatttgtaaatatataagatatacatatagatatataagttatatatagacatgttacgcccaccggaaactaattgaggtaccgcctgcagtatcttgatctacaaaagcaaaggatcctctggccttcatcttcccggttgaagtggtaatcgtacgtaatttcctcccctgggtttatgtgccgttctgcaaagaacattacctggatgaacatagaaataacaaagtcaaattttagtccacagctggaacttgtgggaatcatgtagcttaacatatacactccctccggcctccttccaaattgtagctcactttggatttgtcaaacttctctaacttaatctacaaattcatataaaatctctactgaaatatactgtgtgaagaatataatgaaacaaatttgatgttctagatgttagttattaggttcttttacaaaactagtagaaattaaacaagattgacttaggacaaaaccaaggtgaattactccctccgactcaaaccaaaacaacctctagagttatcctaagtattttaagtttgaccatatgtatagaaaagaatttatttattttaggacggagggagtaccattttttagtcagaggtaggagatatttaggctaacgaggctgacacaaggcattacgactaaaatttacgatccagaatattaattttataagaaaacaaacatatatataggca

SEQ ID NO: 108951 - DNA, 2177 bp, Zea Mays
accagccaccaaagtaccacacctctcctctctcaagaaccaccgcactctctctagcaggcctctgttttgtactgagcgaaaaggtagatagtcactcagcttctcgagagatcgccaaagacgcggcgccggcagcaagttctgcggcgatggggcacaagtacacgccgacgtactactcgggcctgcaggacaccatcgcgtcgctctgcaagtccatcctgccctccttccgcgtgggccggcggctcacctccgaccaggccgcggcgcggcgccacgccgagcagctcaagtggcagcaggagtccttccaccgcatcctccaccttgccgcgctccaccgcgagggcatcgtcccggcccacgacgtcgccgccttccgcggcaccatgctcgcggcgctcgtcgcgccgccgccgcagcaccccgagcagcccgcggtgctccgggacaagctcctcttcctccaggagctactctacgccaagtgcgtctccgcggcggagtacaacgcgtccaaggcgcccctcgtgcggcggctcgccgcgttcggcggcggcgtcgtcgagtgccccgatgccgaggcctcggccgaggagtggtcggagatcgacctccgtgacccgcctcctcccgccggcgcggcgtcctccgacaaaccgaagcacaaggccttcatcacgccgtgggagagcagatccaggaaggatcaggacgcgaaccgcagcgcatcaaggccgccgctggccccggtggatcataacaacgccaacaacgcgtcggtcctcatgcccgagtattctccgtcggaagcggtgccctgcaggaaggcggagaaggggaggaggaggcatctggcggggatgttccacagtggcggcaatggcaccgagaacaaggagcctgcgggggaggaagggggggtcgacgagaaagcgacggtgaaatgtaagaagaaaagctcgtggggattcgatggcatcaagaagtggaagaaagctggcgcctgtaataacaatggcgaggcggcagccaccggtgagcagccgcagcgtactcctccgcgctcatcgtacagcgagtgccaattggaggcgagccccatggctgcatctggcccggatgccaagagggccaagacgaggctgcactccagcacggatgatgactgcttctgagctgctgcgtgataaggaatcagcagatcgaggccatctcaacaaagcttcaggtggacaagtctgacctcaagcccttcttgccaaagtagatcactggatcatccatcattcagattaggcgcatgatttctcataaacgagatagtgacactttttatgcttttgttactggtataatggtattgttgtacttaggttcaattgttacattggaccaggagttgctgtttatggcgtcatttgtatgattggagcctacttcccattgattccttgaatgcacatcagcttttctctcccccagtgagcatttgcccgacaagaaacttcagtgtcacatgaacagctgataactcatttgacttcacaaaagataaacaggcagttctagatgcaagttcctacatatacagcaggcatgaatcgcaattgtaatttgtaaatatataagatatacatatagatatataagttatatatagacatgttacgcccaccggaaactaattgaggtaccgcctgcagtatcttgatctacaaaagcaaaggatcctctggccttcatcttcccggttgaagtggtaatcgtacgtaatttcctcccctgggtttatgtgccgttctgcaaagaacattacctggatgaacatagaaataacaaagtcaaattttagtccacagctggaacttgtgggaatcatgtagcttaacatatacactccctccggcctccttccaaattgtagctcactttggatttgtcaaacttctctaacttaatctacaaattcatataaaatctctactgaaatatactgtgtgaagaatataatgaaacaaatttgatgttctagatgttagttattaggttcttttacaaaactagtagaaattaaacaagattgacttaggacaaaaccaaggtgaattactccctccgactcaaaccaaaacaacctctagagttatcctaagtattttaagtttgac

SEQ ID NO: 108952 - DNA, 1488 bp, Zea Mays
ccacacctctcctctctcaagaaccaccgcactctctctagcaggcctctgttttgtacttgaagtttgaaacaggagcgaaaaggtagatagtcactcagcttctcgagagatcgccaaagacgcggcgccggcagcaagttctgcggcgatggggcacaagtacacgccgacgtactactcgggcctgcaggacaccatcgcgtcgctctgcaagtccatcctgccctccttccgcgtgggccggcggctcacctccgaccaggccgcggcgcggcgccacgccgagcagctcaagtggcagcaggagtccttccaccgcatcctccaccttgccgcgctccaccgcgagggcatcgtcccggcccacgacgtcgccgccttccgcggcaccatgctcgcggcgctcgtcgcgccgccgccgcagcaccccgagcagcccgcggtgctccgggacaagctcctcttcctccaggagctactctacgccaagtgcgtctccgcggcggagtacaacgcgtccaaggcgcccctcgtgcggcggctcgccgcgttcggcggcggcgtcgtcgagtgccccgatgccgaggcctcggccgaggagtggtcggagatcgacctccgtgacccgcctcctcccgccggcgcggcgtcctccgacaaaccgaagcacaaggccttcatcacgccgtgggagagcagatccaggaaggatcaggacgcgaaccgcagcgcatcaaggccgccgctggccccggtggatcataacaacgccaacaacgcgtcggtcctcatgcccgagtattctccgtcggaagcggtgccctgcaggaaggcggagaaggggaggaggaggcatctggcggggatgttccacagtggcggcaatggcaccgagaacaaggagcctgcgggggaggaagggggggtcgacgagaaagcgacggtgaaatgtaagaagaaaagctcgtggggattcgatggcatcaagaagtggaagaaagctggcgcctgtaataacaatggcgaggcggcagccaccggtgagcagccgcagcgtactcctccgcgctcatcgtacagcgagtgccaattggaggcgagccccatggctgcatctggcccggatgccaagagggccaagacgaggctgcactccagcacggatgatgactgcttctgagctgctgcgtgataaggaatcagcagatcgaggccatctcaacaaagcttcaggtggacaagtctgacctcaagcccttcttgccaaagtagatcactggatcatccatcattcagattaggcgcatgatttctcataaacgagatagtgacactttttatgcttttgttactggtataatggtattgttgtacttaggttcaattgttacattggaccaggagttgctgtttatggcgtcatttgtatgattggagcctacttcccattgattccttgaatgcacatcagcttttctctccccc

SEQ ID NO: 108953 - DNA, 2883 bp, Zea Mays
atagtgagtttgaggacattggaccgcaccctgcagaggccaagcgtcgaacacatggcgtgcaccttcctccgccgcgcgttctccctcaccgccgccggcacccacgcgaccccccgagttgccgccgccttcgcttccacttcctcctcatcctccgtcgtcgtgcctctgcgctccccactagaccaccgtcttctccgccacctccgctccgagatcacctacctcgcggagcgccgccctccccacgtgccgccgagtagcttcaagtcgttcgccgtggaggaccgcccgggggagcagtgggtgcgcctccgcgccagcgcgggagggggaggcgaggaggtgaaggtcgaggccaccatgttcgacggcgctgcggagcctgtcccggacgacgcgcccctcttccgccgcgtggagtcgctcgagcgcgggccccgcctccacctcagcctcatcgtcgaggtcgcccggggcgaccgcgtcctcggcttcgtctgctccgcctggcccgacgacctcgccgtccgccacgtgctcacgctcgcagctggcggtggcagcagtggtggtcgtcgtggtgggcgcgatttcgagaaactggggggcgaggagagggaagcggtgacgaagttcttgaaggagagggaggtggacgccgagctcgccggattcttgcacgactacatggcaaacaaggagaagatggagctgctccggtggttgaagactgtcgaatcattccttaacaagtaggataagatcgcacacagaagacaccgctgatgttactgcctagtttgggaacgggtacgctccaacaacaactggtgacgatctcctgcagtctctgtgatcatccgcatctacccctctgctgacaattgtgtgctgaagatgtttgtttttaatcagcttagatagctcagcgcacagcgctcttggaaactggtgatctgaatatcctactggtactttcatttctttgtgataagattgttctcaacggtgtatcttttaagatacaccccattgggtttttttcccttttgcaatataccaaatctcattttggatttccaaccagttgctatgtgcgtgcttagagtaaaaatctgctcttctgaactctgacggttcaatgtcgaaggaggagctgtaacggttggattaagcggggcgacggctcacatttcagaagccttcacatgatggcattgacacacctcaatccaacagtcgtgccactgccaagctccatcgcgccacgcgtgatgtacgtgattatgatctcactgactagcgggcccgcgtacagattcaaccctcccctcccctcaacggctagttccacctccgcatccgttgggacaaaagggggaaaaaccagagggaacttcaccagccaccaaagtaccacacctctcctctctcaagaaccaccgcactctctctagcaggcctctgttttgtactgtaagcaggcctctgtagagtttgcaaaatgaaatttgaaatagaaaataaatactgtatattatattgtttgtaaagtgaagtttgaaacaggagcgaaaaggtagatagtcactcagcttctcgagagatcgccaaagacgcggcgccggcagcaagttctgcggcgatggggcacaagtacacgccgacgtactactcgggcctgcaggacaccatcgcgtcgctctgcaagtccatcctgccctccttccgcgtgggccggcggctcacctccgaccaggccgcggcgcggcgccacgccgagcagctcaagtggcagcaggagtccttccaccgcatcctccaccttgccgcgctccaccgcgagggcatcgtcccggcccacgacgtcgccgccttccgcggcaccatgctcgcggcgctcgtcgcgccgccgccgcagcaccccgagcagcccgcggtgctccgggacaagctcctcttcctccaggagctactctacgccaagtgcgtctccgcggcggagtacaacgcgtccaaggcgcccctcgtgcggcggctcgccgcgttcggcggcggcgtcgtcgagtgccccgatgccgaggcctcggccgaggagtggtcggagatcgacctccgtgacccgcctcctcccgccggcgcggcgtcctccgacaaaccgaagcacaaggccttcatcacgccgtgggagagcagatccaggaaggatcaggacgcgaaccgcagcgcatcaaggccgccgctggccccggtggatcataacaacgccaacaacgcgtcggtcctcatgcccgagtattctccgtcggaagcggtgccctgcaggaaggcggagaaggggaggaggaggcatctggcggggatgttccacagtggcggcaatggcaccgagaacaaggagcctgcgggggaggaagggggggtcgacgagaaagcgacggtgaaatgtaagaagaaaagctcgtggggattcgatggcatcaagaagtggaagaaagctggcgcctgtaataacaatggcgaggcggcagccaccggtgagcagccgcagcgtactcctccgcgctcatcgtacagcgagtgccaattggaggcgagccccatggctgcatctggcccggatgccaagagggccaagacgaggctgcactccagcacggatgatgactgcttctgagctgctgcgtgataaggaattactgaagtgaaggtcctggtggaaaacacaaagaaagaactctgttattggtcatttttttttatatattctgtttcccaaagatggatggctcttggatttgcaggaatcagcagatcgaggccatctcaacaaagcttcaggtggacaagtctgacctcaagcccttcttgccaaag

SEQ ID NO: 108954 - DNA, 2857 bp, Zea Mays
atctatcatagtgagtttgaggacattggaccgcaccctgcagaggccaagcgtcgaacacatggcgtgcaccttcctccgccgcgcgttctccctcaccgccgccggcacccacgcgaccccccgagttgccgccgccttcgcttccacttcctcctcatcctccgtcgtcgtgcctctgcgctccccactagaccaccgtcttctccgccacctccgctccgagatcacctacctcgcggagcgccgccctccccacgtgccgccgagtagcttcaagtcgttcgccgtggaggaccgcccgggggagcagtgggtgcgcctccgcgccagcgcgggagggggaggcgaggaggtgaaggtcgaggccaccatgttcgacggcgctgcggagcctgtcccggacgacgcgcccctcttccgccgcgtggagtcgctcgagcgcgggccccgcctccacctcagcctcatcgtcgaggtcgcccggggcgaccgcgtcctcggcttcgtctgctccgcctggcccgacgacctcgccgtccgccacgtgctcacgctcgcagctggcggtggcagcagtggtggtcgtcgtggtgggcgcgatttcgagaaactggggggcgaggagagggaagcggtgacgaagttcttgaaggagagggaggtggacgccgagctcgccggattcttgcacgactacatggcaaacaaggagaagatggagctgctccggtggttgaagactgtcgaatcattccttaacaagtaggataagatcgcacacagaagacaccgctgatgttactgcctagtttgggaacgggtacgctccaacaacaactggtgacgatctcctgcagtctctgtgatcatccgcatctacccctctgctgacaattgtgtgctgaagatgtttgtttttaatcagcttagatagctcagcgcacagcgctcttggaaactggtgatctgaatatcctactggtactttcatttctttgtgataagattgttctcaacggtgtatcttttaagatacaccccattgggtttttttcccttttgcaatataccaaatctcattttggatttccaaccagttgctatgtgcgtgcttagagtaaaaatctgctcttctgaactctgacggttcaatgtcgaaggaggagctgtaacggttggattaagcggggcgacggctcacatttcagaagccttcacatgatggcattgacacacctcaatccaacagtcgtgccactgccaagctccatcgcgccacgcgtgatgtacgtgattatgatctcactgactagcgggcccgcgtacagattcaaccctcccctcccctcaacggctagttccacctccgcatccgttgggacaaaagggggaaaaaccagagggaacttcaccagccaccaaagtaccacacctctcctctctcaagaaccaccgcactctctctagcaggcctctgttttgtactgtaagcaggcctctgtagagtttgcaaaatgaaatttgaaatagaaaataaatactgtatattatattgtttgtaaagtgaagtttgaaacaggagcgaaaaggtagatagtcactcagcttctcgagagatcgccaaagacgcggcgccggcagcaagttctgcggcgatggggcacaagtacacgccgacgtactactcgggcctgcaggacaccatcgcgtcgctctgcaagtccatcctgccctccttccgcgtgggccggcggctcacctccgaccaggccgcggcgcggcgccacgccgagcagctcaagtggcagcaggagtccttccaccgcatcctccaccttgccgcgctccaccgcgagggcatcgtcccggcccacgacgtcgccgccttccgcggcaccatgctcgcggcgctcgtcgcgccgccgccgcagcaccccgagcagcccgcggtgctccgggacaagctcctcttcctccaggagctactctacgccaagtgcgtctccgcggcggagtacaacgcgtccaaggcgcccctcgtgcggcggctcgccgcgttcggcggcggcgtcgtcgagtgccccgatgccgaggcctcggccgaggagtggtcggagatcgacctccgtgacccgcctcctcccgccggcgcggcgtcctccgacaaaccgaagcacaaggccttcatcacgccgtgggagagcagatccaggaaggatcaggacgcgaaccgcagcgcatcaaggccgccgctggccccggtggatcataacaacgccaacaacgcgtcggtcctcatgcccgagtattctccgtcggaagcggtgccctgcaggaaggcggagaaggggaggaggaggcatctggcggggatgttccacagtggcggcaatggcaccgagaacaaggagcctgcgggggaggaagggggggtcgacgagaaagcgacggtgaaatgtaagaagaaaagctcgtggggattcgatggcatcaagaagtggaagaaagctggcgcctgtaataacaatggcgaggcggcagccaccggtgagcagccgcagcgtactcctccgcgctcatcgtacagcgagtgccaattggaggcgagccccatggctgcatctggcccggatgccaagagggccaagacgaggctgcactccagcacggatgatgactgcttctgagctgctgcgtgataaggtagtgtgaattagtgactcctctcatcatgtataagttggttaagttacgattttcatctggaattactgaagtgaaggtcctggtggaaaacacaaagaaagaactctgttattggtcatttttttttatatattctgtttcccaaaga

SEQ ID NO: 108955 - DNA, 589 bp, Zea Mays
atctatcatagtgagtttgaggacattggaccgcaccctgcagaggccaagcgtcgaacacatggcgtgcaccttcctccgccgcgcgttctccctcaccgccgccggcacccacgcgaccccccgagttgccgccgccttcgcttccacttcctcctcatcctccgtcgtcgtgcctctgcgctccccactagaccaccgtcttctccgccacctccgctccgagatcacctacctcgcggagcgccgccctccccacgtggtaaggcggtattccttccctccgccttccccgctgcgcctcacgttctcagcaaaaccctcatggtttcctcctcttcgtgcagccgccgagtagcttcaagtcgttcgccgtggaggaccgcccgggggagcagtgggtgcgcctccgcgccagcgcgggagggggaggcgaggaggtgaaggtcgaggccaccatgttcgacggcgctgcggagcctgtcccggacgacgcgcccctcttccgccgcgtggagtcgctcgagcgcgggccccgcctccacctcagcctcatcgtcgaggtcgcccggggcgaccgcgtcctcgg

SEQ ID NO: 108956 - DNA, 1308 bp, Zea Mays
ctgcctgcgtcgtaggattgtgggactcccagctggtggagtggagcttccgagtgtccactccaattctccaacgccagggtgttgcagacttgcaggcagtggaacatggacaaggaaggcgacggccaccaccaccacgccatccgagtcccatccccagataacatagcaatggtggaggagacatcgcagccaaatggcgcaccgtcgctgagacggaaagcaggcgagatgatcgccacctccctggagacgtaccggagcaagcccttctccttctggctactcctgttcctgagcagcggcgccatgctcaccgcgttcccggcgtcgagcctcctgtcgcggctctactacaacgagggcgggcagagcaagtggatcctgtcgtgggcggccgtcgccggctggcccctgcccgcgctgctcctgctgccgctgtatctcctcggcagggcgtcgccgacgccgctgtcgctgtcgctgtgctcctggtacgtgctccttgggctcctcagcgccgccgacaacctcatgtacgcgtgggcctacgcgtacctcccggcgtccacggcctcgctcgtcgccgcgtcgtcgctcgccttctccgcgctcttcggccgcgccatcgccaagaaccggctcaacatgtcctcgctcaacgccgtcgtcgtgatcacggcgggcgtggtgatcgtcgcgctggactccgggtcggacaggccccccggcgtcacgccccgccagtacgcgctcggcttcgtcctggacgtgctcgggtcggcgctccacggcctcatcttcgcgctctccgagctcgtcttcgccagggccctcggtaggcgctcgttccacgtggtgctggagcagcaggcggcggtgtcgctctgcgccttcgccttcacctccgcgggcctcgccgtcgcggagggcttcccggccatgcggcgcgagtcggcacggtttgcgcacggtggccagccggcgtacgcgaacttgatggtgtggacggcactcacgttccagctgggcgtcctcggaggcaccggcgtgctgttcctggcgtccactgtcctcgccggcgtgctgaacgctgtcagggtgcccctgacgagcatcgccgcggtgatctggttccatgaccccatgagtggcttcaagatcttggctctggtcatcacggtgtgggggttcgcgtcctatattcttggacactcctcttttagaaaaacgtaacaaattagatatcatctcattgcaaaaaatgatgaaagattttaatttatttaagatttaaatttatct

SEQ ID NO: 108957 - DNA, 2079 bp, Zea Mays
ctaaaagatgaaatctattccgtagttgtaaccatatcttcatgagcaattacttaaaaaagattgtgtgcactctcattcttaatctacaacttacaatttctaaaatttgagtgaagaaacgggtattgtacatgggaacaaaatcagtattttcccgttacaacccacctgcacggtccttaataaaatatccctaaccttctctccttggagataaatgcaacaaaaaaaactatgtattagagcttgcgtacgtgccaccgtccttcccaaccaaaaatttctacacccaatttgcctcccaatccaatcaatcaagcgaggactgagttcgaattgttcgtcctctcagtctcaggaggcctcgccggcggctatacactacacctcggcgcaccgccgcggcgcgaagcccagccggttgttctgcaggtcgtacacgacgtggaagttctgctgctggaagttaccgatgatggacatgccggtgcgcggggtgccccggaccgccaggcacatgatgccgtccgggtccagccggacgaagtagttctccgcggggaagtcccacacggcaccgtcggcgaacagcagcgacagctccggcacctccggtcgctccacgccagagacgttgtagcacgggttcagcaccgggaagtccgggatcagagggtacagcctgctcatgagatcgacgaacgcttgccggatcacctggtacgccggctccacgaagtagctcagcgtcgtgccggagtcgatgatcgtgccgccggacccgtccttgcccacgtcccacgtgtccgagctgatgttcagcaggtcgccgcccaccagcacgcccttgagcttcacgtaatagaatgtgtccgccggcgacgacgtgggcgcgaacgccgtgtacttgagctgcggatgcgccagcaccaagtagtcctccccgaacaccaccttgctgccggcgtcgctgccgtgctccaccaggcagtacgagaaggtgtgcccgtacacggcgcggagctgggacgcgaacgacagcgggccccggccgagccccagcagccccgccgcgccgtggaagaggccgcggtttcggtgcccgcacccgaacactacgccgtccacacggcgggacgcgcccggggccgtgaggttgaccgtgaaggactccagggccaggtcgccggtagtgttggactggtccccgtaccagtagtagtacggacaggagtcctccgcggggcggcggcacgccctcggcgcctcgggcggcgccacgaggccgcagcgctggtcgccgcaggtgacgttgcggtaggaggaggacgcggcggggtcgaacaccgggccacgctgctcgaagcagtccaggcacggcgcgcactgcagccagttgaggtcgctgccggtgtccatgatcatccggaaacgccgcggtggcgtgccgacgtagacgtcgatcaggtactcgccggacccgaccgccacgccggactccaccgtcgcaaccatccgctccgacagcgcccgccgcggagacgaagacgccggcatccgggccacgccggagcgcgccgccctccggtgcatcgtctcgatgcggacggcatccttctcggccttatctaagaacgactctttccgtgtcctgcccccctccgcggaccggtgcttcatgcgcagctgcagcgacggggacgagctcgccggctgcttctgctcatcccccgcctcgtcggctgcaaccagcttgctgtcgcagccggtcgcggcgacggcggtgttgaacggcgggaactcgatgccgaagagggtcgacgacgagttgagcttcacaataccaggtgaagccacaactggcgagaccaggagcagggacagcagcagcgaccgcaccgcgagctgcgccatagctgagaagtggaccgacggattagtccttcatggaacagcaggcgacggcgggggcggtggtgggagaggaggttggtggaggtggaatttgggggaaaatataataaagaaacgcgggtcggggaagacgactgcggggggcgagatgcgtgggttttg

SEQ ID NO: 108958 - DNA, 1579 bp, Zea Mays
acagtgcgtgcaagggtgcaagtgcatgcgcatcgagaatccgttcccacttgccaccgggcgcatcgacggcgcgacccatgtcccgcgagaagccgccggcgccggccgtggtctccacgggctgctcaggcttcatgtcctgcctctctcgccaccgccgcggcccgcagcagcgggcggtgccgaggggcgccgctgtgctgccgcgaagaagcgatgctggcggctgcgacgcgggcgccgaggccgcggaggggtgctggaagagggtgcagctcctggaggaggaggaggaggagggcaagaggctgagcggccacgaggagaggccggcgccaggcgcccccgagcgcgtcgccaggggccgcgccaagcaggaccgtgcggagggaggcggcgaggtcaccgatcgcgtcgggaacggcgccaaggccacggcggagggcggcggtagcgtgatgagcatgggcacggccaagaccacggccgccacgacgtgtgccagcgccggccacggcgtgcaggaggtggtgaggctggaggacggcagctacatgcgcgaggtcaggcgggtagtagggcgcccgtgggagcggctggccgtgcaggtgtcgcggcccgtcgtccccgccgacgcggcgagcgcgtccgaggttcttggcaagatggcggcgatgaatgccgaggacctgcgcaagttcctggtccagctaatgccgctggaggacataaccgggcagaagaaccccggcgagcccgtgcgccgagcggcgaggccgagctcgggggacgacctcgtggaagctctcgtcctcgacacgatgggcatgctggaatctctgctcctggaaggcctgaagatccagatggcctcaccggccaccgaccccgccgcgggcgacgggaggcgggacagggccgtcgccgtcggcaaggactgcatggtccacgtggtcctgatgcaggcgagggatcccaaggaaaggtacggcgccatcggcgaccccatgattgggctgatcgaggcgtctctggaaaagaaggatgccacggcggtcaggctgcggatcctggggctgcatgttgccgggatcagcttcgtcgtgagaaggcccagtgatgatggcagcaggtgcatgctgtggagtgcgtatctaaggcgatgcaaggattcacacgacggtgacgggggaggcgatggctgcaggtgcatttgcgttcgaaatccgaatcggttcttcagaagatagataattagaggtgtttttaccgagcagctgcctgctcaacaataataacggtgcaaagtagaaaaataaccctccgtgtgataggtctggcgcaacatgttagggacgccaacctttgttttgttttgttttctaattgataactgtaagtttttttttgataattgtaaaaactgtaatttgcgcttttgcagtaatatgcggtgacgtctttgatgacgtgtaatagggcttgcgagcagaaaataggtgaacgatttaatttccttcgccgttaatgttacatccgctaagcgagtccgatcgggaaagagcaaccctaaata

SEQ ID NO: 108959 - DNA, 638 bp, Zea Mays
tgcaaacaccccgtgcacaaccaattccccatcgagacatcggtccgtccgtacgaatccctgcgctcaacgccgcaccgaacctgactcaggcactcaccgctatgggcggcgaccatggcggtgggcacgccggcggtgacttccgccagaaggtatggagcatgacgggcggaccctactgccgcccggtccactggcgccgtaacaccgccatcgccatgttcggcgtcttcctcatctgcattcccatagccatgaagtccgccgagctcgagcaacgcccgcatcacccagtccggccaatcccatctcaactgtggtgcaaaaactttggcaaggaatactgaaggaccttccaagtagcatgaagcgcggacaccttgcttttgccttcttttgattctctttctcttttggctcaatcatgttatatgagaaataaaataaatattggactcaaataagaaaccggtgattcaaaagcctctgatgaatttacttgtccacgaattttggttatatttctctgctattttctttcttatttgattctctgctattttctctcttatttgaaacaaccaatgacaatgttataagttttggttatatttctagtaaattatgtttcaaaa

SEQ ID NO: 108960 - DNA, 676 bp, Zea Mays
aataacatatcattttttcagaacgatgaaaagtatagctgcagcgaaactggctatcgcctgcccttgaaatgtgtacaggcacaaaatgctacaaaagaaggaaacatgagcaagcagaggaagatattggatgatgcatccacatcaggtggcacaaaatccgcatcaggtggtccaaagcattatattacttacagaagttgtgtgccgttggttggagaggagaatttatctgttcttggttttgagataatgatggccggaatgttgctagtaagtggcccgttcgtatattaccggaaacggcgtacaaatcttatgcagggagctgcaagaatcccgacaagtgatcctaggttctagtatggggggacatggggtaataacggatcgcatacttgtgttgatctggtctatctttcttgtgattttgactcttgtcattgtactattatatttcacacatgtaattctggaagaggcgaagtgcttttttagttctcacaggagtaggaaccacagtggttagtctcatcgacctggtttacttgggtcaaatcacttgtgttacatattcaaatttatggttttgttacccccaaaaagttgctctaacagaggaacaactttgttcatgttgataatttatgcgaccaatgcgatcatttttctg

SEQ ID NO: 108961 - DNA, 347 bp, Zea Mays
tcagaaggaaatatccctagattgttccgccgaagacatcgaccaatgcaacaaatggatccaaaactgacaagtattaagtgcgcttttgcaagtccatttcagtcaacaaatagtagcgcataaactgaagatgagcatccttcgaagctttttactccagatgtagcttcaaaagctgattagccatccatttgtcattccgctttttagggacaccgatggccattttctgaacaattcttgcattgaggataaagttagcaaaattgacatctgatttgttccctttatctcttattatttttcttcagatggcaacagaggcagtaaaattgcaccaaagc

SEQ ID NO: 108962 - DNA, 2178 bp, Zea Mays
cgccgctgtttaaccggggcattggcatggccattggccactataacaactcccgagctacagcccgcacggccgccatgcgtccatccgtcgagagccccatgtacgccgccatggaggggagcaccggatacctgatgacaccgtcgcggttgctcttcgtcttcttcctcgccttggccttcctcgcgcaatgcggtggtgcaagagtgctgaggccagagaagatgctgctgggacactactcttactccagcacaccggccatgcctccatacgccgagttgttcgcaccaccaaaccctccttctcatcctcccggttctcccaactgcgtcctcactccagacacgccaccgccaccgccggcggcgaacactgtccagacgccggccttcgtctactcgtccccaccgccgccggaggtggaatactactacccgccgccttacatcagcccaaacccaccagatatcagcccaagcccgccgcccacggttgcaccgctcccacccatcgtttatccaagcccaccagaagtcactcctagcccaccagaggtcgcgccgtatccaagtcccagtccacccgaaatctcaccgagcccaccagagatatcaccgagcccaccagaggttgcgccgagcccaccgcccactgttacgccgctcccgcccatcatttacccaagtccacctggagccacaccaagcccaccggaagtcgcgccgtatccaagtcccaacccacccgaaatctcaccgagtccaccagagatatcaccaagcccaccagagatatcaccgagcccgccggagatcgcaccaagcccaccggagatctcgccgagcccaccgagctacgaaccaacaccacccagcattgtgccaagcccgccggaaatcacaccgagcccaccggagatctcgccgagcccaccgagctatgaaccaacaccacccagcattgtgccaagcccgccggaaatcacaccgagcccaccgagctatgaaccaacaccacccagcattgtgccaagcccgccggaaatcacaccgaacccaccggagatctcgccgagcccaccgagctatgaaccaacgccgccgaccattgtgccaagcccaccggagtacgcgccagagccaccagcgtacgtgccgagtccgccagagtatgcaccagagccgccgacgtacgtgcctagcccgccagtctacgcgccgtatccacccgggatcatcccgagccctccagagtatgcgccggaaccaccagggatcgccccgagcccaccggaatacgcgccagaaccacctgggttcgtcccgagcccgccggcggtcgtgcctggcccgccagagttcgcgccagagccgccagggcccccggccgtcccctccccgggaggcggcttcctgccgccggtggtgttcccgcccccgttcgcgacaccgttgccaggggggacgacgggctcggagtggtgcgtggccaagccgtcggtgccgggggccatcgtgcagcaggccatggactacgcctgcggctcgggggcggactgcgactcaatcctgccgtcgcacccgtgcttccggccggacaccatgctggcgcatgcctcttacgccttcaacagctactggcagcgcaccaaggccaacggtgccacctgtgacttcggcggcaccgccatgctcatcaccaaggaccccagctatgatggctgccactacattttgatgtgatcacgccagtctcaccgacaaagcagccactgcactgttcatgtgacaatttctttagtatcaatcgtggcctgaagagctttggaagatccttggaactatagacaaacatgctgttctgatgttactgaaggaacttgcagtgggtcactgattttgtatagggtacaaaagactccatcagccatccattccatcctatttagacagtctcttctaactcacctccttttttggcacttcttattgttttgtattattctgatgtacaaggtatgtaatatcatagaagtaaataagcccctgatgaaggtacagctaattcataattactgtccagcggcaagtgttttattgtctcattaacagtttcaacagcccactgttttttgtttatccagtgtgcaagacaaactcacttattttgaac

SEQ ID NO: 108963 - DNA, 1346 bp, Zea Mays
gcagattaatttgaaatagctgaggggttattttaaaaagatgacgcatgatgaccgttgaaattggtgctttaagtatagtatagaattcttggaaggttttgctattctacttatttgtgatacataaacttgcccattttttcttggtatctactatgaacttaactgatgcatttgataatataatgatttcttttgagcctgttcattagatgtaaattaacacagtatccatttacaaccaattcttttgcatttttacaattgaccttttcattttcatataaaatattggcatattcacaatatactgaattgtgaacttgtcaaggattcaagggcatgcaattcttgaacgttttagtggaatatgaaagtctcatctggtcatacaatatgtgagtctgagatgattcatattttatgccactttttacattttcaaatgtctctgttgtgttgattggtcacctatatcctgctgattttgcacacatcaggagttccaagtaggtatttacaccattcttcctactagtaagttttctataatctgacaaatttcgtggtgcctatgctaatggcttgagggttatcgaccaagccctggacagctggcaaatatgtatgtatttaatttcaattgaagcattaattttattcattgccaatttactgcatgcaaatatgggtttgtagcaaaactaggtggctgaggttctgccaatacggtagcatttattgtagcttaagtttggtcgagaatgtgacaagagtcttgctccaggtcagctttcatttggccagtgagcctgagatgctgctcgactcattgttttggaggcagcaaccatatctaacaccaagttttttatttcacaatttgtatgagcagatgaactctgttgacgcagcaattgatcgaagaatatcagaaagtcggctggcaggacgcatggccctatgaagaatctgggctttgctcggtagattatcccccttgcatttcaccgaaggactctgcctgcgcttgtatctcgctgtgcagcagtcggccctcttcatttagttagcgaatggagttgctgcagttaagaggaatgtgttgtttctgacttgtttgagtgtcgagcctttgttcttctatgtttccagcatcgacaagaaaatgaattagcagcacttaggagttattttggtccaactgtcgcctcattgggaatatattgatgaacacctcaatttctgcccgattgtaacctggtcatgtgctattgccaattgaacctaatgctgtgcattggctggaaagcaacttaaaaatgttacggattttaatattt

SEQ ID NO: 108964 - DNA, 1611 bp, Zea Mays
caacaaccaaaaaaagcccgcacgagacgagagacgagacccagacgtctcgccctcggcttcttcctcccctccctgaccgctgccgcgacctctcggcgaaaccctaacctaccttagaccccgccgccgccgccgcccaagggagagagagacttgcacatcaaagggcgtccgatggggaagaagaagaagcgcgtcgataaggtcttctgctactactgcgaccgcgagttcgacgacgagaagatcctcgtccagcaccagaaggccaagcacttcaagtgccacgtatgccacaagaagctctccaccgcctctggcatggccatacacgtcctccaggtccacaaggagtccgtgaccaaggttcctaatgcaaagcctgatagggagtcaacggagatagagatatttggaatgcagggaattcctgcgcatgtattggctgctcattatggagaagaggaagacccttcaacaaaggtacccaaagtagaagtgcctcaggtaaggcctgttattatgcctaattcgctaggcatggcatttcctccgcgaccagcttatggtgtggcacctccaatctataatcctgcactcaatcctttgatggcccggcctccaatttggcctgctgcaccagcgcaagcttggtatccgcaacaagcagcatatccacaacaatcagctgtttcagttcctcccatagtcgctggcctcccaccacaacagccactattcccaattcagaatgtgcctactcctatgacatcagcagctgctaatgtacttcaaacatcgtttcctatggcccctccaggagtaccttcacctgttgcccctcatgtttcccagcctttgtttcctgttaacacttcagctgtcaatggagctgtaaattccccatttttagcatctgttgcacctggaaccattccagcaagctctccagcagcagtcggtgttgcaggaattggatatggaaccaataaccaaggcactagagatccagcagttggatcttcacctgcagtatccaataataaggcgtctggtgcccaaccagctacgaatgaggtatatctggtgtgggatgatgaagcaatgtcaatggaggaaagaaggttgtcgttgccaaagtatcaggtgcatgatgaaactagccagatgaactctgttgacgcagcaattgatcgaagaatatcagaaagtcggctggcaggacgcatggccctatgaagaatctgggctttgctcggtagattatcccccttgcatttcaccgaaggactctgcctgcgcttgtatctcgctgtgcagcagtcggccctcttcatttagttagcgaatggagttgctgcagttaagaggaatgtgttgtttctgacttgtttgagtgtcgagcctttgttcttctatgtttccagcatcgacaagaaaatgaattagcagcacttaggagttattttggtccaactgtcgcctcattgggaatatattgatgaacacctcaatttctgcccgattgtaacctggtcatgtgctattgccaattgaacctaatgctgtgcattggctggaaagcaacttaaaaatgttacggatttt

SEQ ID NO: 108965 - DNA, 1699 bp, Zea Mays
caacaaccaaaaaaagcccgcacgagacgagagacgagacccagacgtctcgccctcggcttcttcctcccctccctgaccgctgccgcgacctctcggcgaaaccctaacctaccttagaccccgccgccgccgccgcccaagggagagagagacttgcacatcaaagggcgtccgatggggaagaagaagaagcgcgtcgataaggtcttctgctactactgcgaccgcgagttcgacgacgagaagatcctcgtccagcaccagaaggccaagcacttcaagtgccacgtatgccacaagaagctctccaccgcctctggcatggccatacacgtcctccaggtccacaaggagtccgtgaccaaggttcctaatgcaaagcctgatagggagtcaacggagatagagatatttggaatgcagggaattcctgcgcatgtattggctgctcattatggagaagaggaagacccttcaacaaaggtacccaaagtagaagtgcctcaggtaaggcctgttattatgcctaattcgctaggcatggcatttcctccgcgaccagcttatggtgtggcacctccaatctataatcctgcactcaatcctttgatggcccggcctccaatttggcctgctgcaccagcgcaagcttggtatccgcaacaagcagcatatccacaacaatcagctgtttcagttcctcccatagtcgctggcctcccaccacaacagccactattcccaattcagaatgtgcctactcctatgacatcagcagctgctaatgtacttcaaacatcgtttcctatggcccctccaggagtaccttcacctgttgcccctcatgtttcccagcctttgtttcctgttaacacttcagctgtcaatggagctgtaaattccccatttttagcatctgttgcacctggaaccattccagcaagctctccagcagcagtcggtgttgcaggaattggatatggaaccaataaccaaggcactagagatccagcagttggatcttcacctgcagtatccaataataaggcgtctggtgcccaaccagctacgaatgaggtatatctggtgtgggatgatgaagcaatgtcaatggaggaaagaaggttgtcgttgccaaagtatcaggtgcatgatgaaactagccagcaaaactaggtggctgaggttctgccaatacggtagcatttattgtagcttaagtttggtcgagaatgtgacaagagtcttgctccagatgaactctgttgacgcagcaattgatcgaagaatatcagaaagtcggctggcaggacgcatggccctatgaagaatctgggctttgctcggtagattatcccccttgcatttcaccgaaggactctgcctgcgcttgtatctcgctgtgcagcagtcggccctcttcatttagttagcgaatggagttgctgcagttaagaggaatgtgttgtttctgacttgtttgagtgtcgagcctttgttcttctatgtttccagcatcgacaagaaaatgaattagcagcacttaggagttattttggtccaactgtcgcctcattgggaatatattgatgaacacctcaatttctgcccgattgtaacctggtcatgtgctattgccaattgaacctaatgctgtgcattggctggaaagcaacttaaaaatgttacggatttt

SEQ ID NO: 108966 - DNA, 1271 bp, Zea Mays
caacaaccaaaaaaagcccgcacgagacgagagacgagacccagacgtctcgccctcggcttcttcctcccctccctgaccgctgccgcgacctctcggcgaaaccctaacctaccttagaccccgccgccgccgccgcccaagggagagagagacttgcacatcaaagggcgtccgatggggaagaagaagaagcgcgtcgataaggtcttctgctactactgcgaccgcgagttcgacgacgagaagatcctcgtccagcaccagaaggccaagcacttcaagtgccacgtatgccacaagaagctctccaccgcctctggcatggccatacacgtcctccaggtccacaaggagtccgtgaccaaggttcctaatgcaaagcctgatagggagtcaacggagatagagatatttggaatgcagggaattcctgcgcatgtattggctgctcattatggagaagaggaagacccttcaacaaaggtacccaaagtagaagtgcctcaggtaaggcctgttattatgcctaattcgctaggcatggcatttcctccgcgaccagcttatggtgtggcacctccaatctataatcctgcactcaatcctttgatggcccggcctccaatttggcctgctgcaccagcgcaagcttggtatccgcaacaagcagcatatccacaacaatcagctgtttcagttcctcccatagtcgctggcctcccaccacaacagccactattcccaattcagaatgtgcctactcctatgacatcagcagctgctaatgtacttcaaacatcgtttcctatggcccctccaggagtaccttcacctgttgcccctcatgtttcccagcctttgtttcctgttaacacttcagctgtcaatggagctgtaaattccccatttttagcatctgttgcacctggaaccattccagcaagctctccagcagcagtcggtgttgcaggaattggatatggaaccaataaccaaggcactagagatccagcagttggatcttcacctgcagtatccaataataaggcgtctggtgcccaaccagctacgaatgaggtatatctggtgtgggatgatgaagcaatgtcaatggaggaaagaaggttgtcgttgccaaagtatcaggtgcatgatgaaactagccaggtaagttgtgtttcttatgatactattattgtagtttctcaaacaaaaggtttatcgctcaatctgcagttcagcaatgagcaatagcgatatgttatttt

SEQ ID NO: 108967 - DNA, 1616 bp, Zea Mays
atcaagaaactgtcactcgccgctgggtccgcctagtcagcgacgcaccaagcccagcaagcaacagtccaacagccaacaaccagccagcgcgcgccgccaccgacacgcaccgtccggtccgccgctgcgttgcctttgccccctcctcgaggctagccccgcctcgcgggaggagatggactgctgccggcacgtgaacccgttccgcgcctgctcggggctgcgcgggctgggctacctcatggtggcgctcgtcgccgccatcgtcgccgtgtcctactacgccgtcgtcgtctacgcatggggccccatgctcctcgccgggggagcagccgcggcaggtgctgccgccgtgatcgccgccttccacatactccttgcaatgattctttggtgctatttgatggctgttttcactgatcctggtgctgtacctgaaaactggagacatgatgctgaagatagcgggaacccttcattttcctcttcagatgagcaagaaagtgctcctagatattgttctcgctgtcaaaatggcaaacctccccgatgtcatcattgttctgtttgtaacagatgtgtgcttaaaatggaccatcactgcatttgggtagttaattgtgttggagcaaggaactacaagtattttctcctttttctggtgtatacatttattgagactgtgctggataccttggtactacttccaaacttcattgaattttttcaagatgaacataggcgttcaagctctcctggggatattgctattctatttcttgcttttgttctcaatttagcatttgcgctgagcctcctctgtttcattggcatgcacgcgtctcttgttacacgtaacacgacttctatagaggtgattctgtgacattagttctttttttttgcgctattcataaatgaacaaatgccttgataacacatcaaccttcatctacctaattgcctgttaatctggaaaccaccatgcacgagattcaaaatgcagtattcatcaaatgtaattgtatagcgcacaaaaagccttcacaaactgtccggtcattgtaattcagattttggttgttttttttcctcttgcctcgcagtcaataatttcagcactacatcccagtagattaataccttgtttccttgatggcattccgaaaacattacaatctttatgattgctttggatgattggatcaatcttgttccaggtctacgaacggaagaagtcggtttcatggaaatacgacctaggatggaaacgaaacttggagcaggtctttggtaccaaaaagttgctctggtttgttcccttatactccacagaggatctgcacaacatccccgcgcttcgaggcatggagttccctactcgctccgacgcaatcgtctaattgcatgtgatgcctagcagagtgttctatgccatagggtttgtctcacgtttacactataggatttctatacggagatctgttaattcttttctgtacagaaatgcacacgcagttctttcgtgtaccagctgtaaggaccagacatgtatttacacaattctgttaattctttggttggtttatattttagacaaattattttcctcc

SEQ ID NO: 108968 - DNA, 1290 bp, Zea Mays
atcaagaaactgtcactcgccgctgggtccgcctagtcagcgacgcaccaagcccagcaagcaacagtccaacagccaacaaccagccagcgcgcgccgccaccgacacgcaccgtccggtccgccgctgcgttgcctttgccccctcctcgaggctagccccgcctcgcgggaggagatggactgctgccggcacgtgaacccgttccgcgcctgctcggggctgcgcgggctgggctacctcatggtggcgctcgtcgccgccatcgtcgccgtgtcctactacgccgtcgtcgtctacgcatggggccccatgctcctcgccgggggagcagccgcggcaggtgctgccgccgtgatcgccgccttccacatactcggatcttgtttcttctgcagcttgcaatgattctttggtgctatttgatggctgttttcactgatcctggtgctgtacctgaaaactggagacatgatgctgaagatagcgggaacccttcattttcctcttcagatgagcaagaaagtgctcctagatattgttctcgctgtcaaaatggcaaacctccccgatgtcatcattgttctgtttgtaacagatgtgtgcttaaaatggaccatcactgcatttgggtagttaattgtgttggagcaaggaactacaagtattttctcctttttctggtgtatacatttattgagactgtgctggataccttggtactacttccaaacttcattgaattttttcaagatgaacataggcgttcaagctctcctggggatattgctattctatttcttgcttttgttctcaatttagcatttgcgctgagcctcctctgtttcattggcatgcacgcgtctcttgttacacgtaacacgacttctatagaggtctacgaacggaagaagtcggtttcatggaaatacgacctaggatggaaacgaaacttggagcaggtctttggtaccaaaaagttgctctggtttgttcccttatactccacagaggatctgcacaacatccccgcgcttcgaggcatggagttccctactcgctccgacgcaatcgtctaattgcatgtgatgcctagcagagtgttctatgccatagggtttgtctcacgtttacactataggatttctatacggagatctgttaattcttttctgtacagaaatgcacacgcagttctttcgtgtaccagctgtaaggaccagacatgtatttacacaattctgttaattctttggttggtttatattttagacaaattattttcctcc

SEQ ID NO: 108969 - DNA, 1270 bp, Zea Mays
atcaagaaactgtcactcgccgctgggtccgcctagtcagcgacgcaccaagcccagcaagcaacagtccaacagccaacaaccagccagcgcgcgccgccaccgacacgcaccgtccggtccgccgctgcgttgcctttgccccctcctcgaggctagccccgcctcgcgggaggagatggactgctgccggcacgtgaacccgttccgcgcctgctcggggctgcgcgggctgggctacctcatggtggcgctcgtcgccgccatcgtcgccgtgtcctactacgccgtcgtcgtctacgcatggggccccatgctcctcgccgggggagcagccgcggcaggtgctgccgccgtgatcgccgccttccacatactccttgcaatgattctttggtgctatttgatggctgttttcactgatcctggtgctgtacctgaaaactggagacatgatgctgaagatagcgggaacccttcattttcctcttcagatgagcaagaaagtgctcctagatattgttctcgctgtcaaaatggcaaacctccccgatgtcatcattgttctgtttgtaacagatgtgtgcttaaaatggaccatcactgcatttgggtagttaattgtgttggagcaaggaactacaagtattttctcctttttctggtgtatacatttattgagactgtgctggataccttggtactacttccaaacttcattgaattttttcaagatgaacataggcgttcaagctctcctggggatattgctattctatttcttgcttttgttctcaatttagcatttgcgctgagcctcctctgtttcattggcatgcacgcgtctcttgttacacgtaacacgacttctatagaggtctacgaacggaagaagtcggtttcatggaaatacgacctaggatggaaacgaaacttggagcaggtctttggtaccaaaaagttgctctggtttgttcccttatactccacagaggatctgcacaacatccccgcgcttcgaggcatggagttccctactcgctccgacgcaatcgtctaattgcatgtgatgcctagcagagtgttctatgccatagggtttgtctcacgtttacactataggatttctatacggagatctgttaattcttttctgtacagaaatgcacacgcagttctttcgtgtaccagctgtaaggaccagacatgtatttacacaattctgttaattctttggttggtttatattttagacaaattattttcctcc

SEQ ID NO: 108970 - DNA, 1931 bp, Zea Mays
atcaagaaactgtcactcgccgctgggtccgcctagtcagcgacgcaccaagcccagcaagcaacagtccaacagccaacaaccagccagcgcgcgccgccaccgacacgcaccgtccggtccgccgctgcgttgcctttgccccctcctcgaggctagccccgcctcgcgggaggagatggactgctgccggcacgtgaacccgttccgcgcctgctcggggctgcgcgggctgggctacctcatggtggcgctcgtcgccgccatcgtcgccgtgtcctactacgccgtcgtcgtctacgcatggggccccatgctcctcgccgggggagcagccgcggcaggtgctgccgccgtgatcgccgccttccacatactcggatcttgtttcttctgcagcttgcaatgattctttggtgctatttgatggctgttttcactgatcctggtgctgtacctgaaaactggagacatgatgctgaagatagcgggaacccttcattttcctcttcagatgagcaagaaagtgctcctagatattgttctcgctgtcaaaatggcaaacctccccgatgtcatcattgttctgtttgtaacagatgtgtgcttaaaatggaccatcactgcatttgggtagttaattgtgttggagcaaggaactacaagtattttctcctttttctggtacaactgaaacatttaatgcggcttctgtgttcttgcttattctacacatttgtatcactgaaacatgtactagtgtaattagaacaaaggaaacatgattgtatttttatttaccttttatttctatgtggtgatgttctctgcttgcctgttcagataccttacttcttgctatttatttctcttgaagctgattttcctatgctatataggtgtatacatttattgagactgtgctggataccttggtactacttccaaacttcattgaattttttcaagatgaacataggcgttcaagctctcctggggatattgctattctatttcttgcttttggtaaaccttttcctttccttggaagcatcaaacttgcctcaaagttgtgcaagctatgtaacagttggtctttgttgcagttctcaatttagcatttgcgctgagcctcctctgtttcattggcatgcacgcgtctcttgttacacgtaacacgacttctatagaggtgattctgtgacattagttctttttttttgcgctattcataaatgaacaaatgccttgataacacatcaaccttcatctacctaattgcctgttaatctggaaaccaccatgcacgagattcaaaatgcagtattcatcaaatgtaattgtatagcgcacaaaaagccttcacaaactgtccggtcattgtaattcagattttggttgttttttttcctcttgcctcgcagtcaataatttcagcactacatcccagtagattaataccttgtttccttgatggcattccgaaaacattacaatctttatgattgctttggatgattggatcaatcttgttccaggtctacgaacggaagaagtcggtttcatggaaatacgacctaggatggaaacgaaacttggagcaggtctttggtaccaaaaagttgctctggtttgttcccttatactccacagaggatctgcacaacatccccgcgcttcgaggcatggagttccctactcgctccgacgcaatcgtctaattgcatgtgatgcctagcagagtgttctatgccatagggtttgtctcacgtttacactataggatttctatacggagatctgttaattcttttctgtacagaaatgcacacgcagttctttcgtgtaccagctgtaaggaccagacatgtatttacacaattctgttaattctttggttggtttatattttagacaaattattttcctcc

SEQ ID NO: 108971 - DNA, 1207 bp, Zea Mays
gacacgatcacgaccacgaccaaccctagtgtgacggctcttttgactccggcgttcctgtggcggcgggcctcctccggcaagtcggcgccacctgcgctccgagctcaaagcctccaacctgcaaccacgatctcctgctccttcggcgagcccacggcaaataccaacgcttgctgccctactcctcctgctccaaagccctcagcagatcctgtataactctcaaggttggcaagctcgcagcaacagcctctcaggccctgcctccctatcctgttagctgtcgtggcactgctctagggccagctggccatggagcatcttgccatcttaaggctgacactgctccaagcctgcaatcgaagactaatcgtccagacaaggagatcgctgatcgggtaagagttacgcttgttcccaaccttgcctgtggttgttgggccgctaatttgcttcgctgcgtatatcgggctgcttcagccccactctgatgatatgtcccgagttgtggaccaactcttaaagttgatcgtcacctttacaggtttgtctcgtttaagcagatctagaatcatctgatgtataaatgtgtttactagcctcctgggactagtaattgtatcacatttgagtcctagaggattggggcgcttcagttcactagttatctcagttataagaatctcacataaagctttcactagtcaataaatagcttaataaagatgtacaagttattaaaaagagcaaacaagtttataacaagttttttcttccccttttctatttcttctttttattttccctctattgtttatgttttctctctaccgtatcatgtcatgtcccactctcgcctccacgtgtgtatgctcgcagcatccacaacatgcatgttgtctcgcaagatccatcatctccatcctgccatcccatcgagagcgtcaactacagttcgtaaattctgtgagggccgctcccatcactgcatgccttcgcatcgattctctaacgaaataactttggttttgtttggtagagcttcaactcgttgaaaaaatagtttatcagagctggtgaaaagctttcaacttattatttgttttcagttcatctaagaagcagttggcttaagagcatgtacaatcctatttactatgttgtcgtttttatgaatagtcgtatagagatgtgttcttcgcgg

SEQ ID NO: 108972 - DNA, 1148 bp, Zea Mays
atgccccacaatctcggccagccctgctgtacccccgcctgcctgtgcaccctcccacgcgcgatggaagcagtccgccatacccctcccaccacaaccgcgcagcaccgtcctgggcacggcgccccgcgcggggcgctcctcggcccgcatctgcttgcggagattggcctcgacgaagaggggctcggcggaggccgcggaggggagcggcgagaaggagatgagcagcgcgcgggaggagaagaagatcgacgcggagatgaggagcaggagaagcagcaggcgaagacgagcaccacgagctcgctcccctccagcagcgagcgctcctccagctccgcttgcaacaacctcacgaaaggaggggcggagagcgacgaggagatacgacgggtgccggagatgggcggcgcgtcggcgtcagcctcgtcgggcgccggcgcggacgagcgtcccaagggggaggacggcaagcaggggcaggtggccgcgcccaacccgttgctggttatagatgttagtggtaaagaattcaaattcacctgggcatctgaacgaggcgaattgtgtgacatttatgaagaacgtcggagtggagaggatggaaatgggttgcttctggagtgtggctctgcttggcgcaaggtgaatgtgcaacgcatgttggatgaatcaacaaagaaccttgtgaaaatgcgctcagaggaggctgaacgtctctcaaaatctcgaaaatcaatcatgctggaccctgccaatccatctgtcaagagtcaggccaggtcaatggctgcagcagctgtagaaggtcttttcatcgcagagttcatgtcatttagtgcttttcatcgcagagttcatgtcgcacaagaccttgacaaagcatatctttcagtgtttgtttggtttcgccttcattactcttctcttacattaccctgccaatcctctggagttgaatatgcagttataaccaatttttaccccttttatcctagaagagttgccaagacacggtataagaccatgataatagactaagagaggatttggctctaattactatatgatttatttatgtagtcccatgagaactttgagtatttgcagattgctttattaatttattaaagttaaagattgta

SEQ ID NO: 108973 - DNA, 1432 bp, Zea Mays
aaaccttttttcccctctgcacgctactctctcctttctcactaccccgcccgtcaaagcgagagcgccgtatcaccggtctatccatcccttcaccgctgcctcgacccgcgccgaaagatacctttcccccccttcctctcgcgccgccgttttggtgcgaccatggcggcggagggggaggccaagaacccgtccggcggtggcgaagggggtaacccccagcaccagcaggcagtgcaggctgcgccggcggagccgccaacggcacagggggaagcggtgcaggaggctggagcgcaggcgacgggacaagagccggagggggagaaggcgaatcgagatggggagggaagcgcgggggagaaggacgacggcgcgtgcagagatctggttctggttgaggatccggaggtgctcgccgtcgaggacccggaggaagctgcagcaaccgcagcactccaggaagaaatgaaagcgctcgtggcatccgtccctgacggtgctggggcagcattcacagccatgcagcttcaggagctagagcagcagtcccgggtttatcagtacatggctgcccgagtacctgtgcctactcacctcgtcttccccgtatggaagagtgtaaccggtgcatcctctgaaggcgcccagaagtaccctactttgttgggcttagcaacactctgcttggacttcgggaagaaccctgaaccagaaccagggaggtgccggcgaacggatggcaaaaaatggcgatgttggagaaacactattccaaacgagaagtactgcgaacgccacatgcatcgcggtcgcaagcgtcctgtacaggtcgttgaggaagccgagcctgactctgcttcaggctcaaaatctgctcccagcaaggccaccgaaggcgccaagaaggttgacgacaagagcccaggtagcaagaagcttgccgtggcggcggcagctgcagctgctgtgcagtctacgtaattgatgcagcattttagtagtcgcaggaagagcatggcggcgctggcaactagcgccttcttttcattgcatgtgatctttagctataacctcatttagcacactcccagtggtgtccgtgggaggaggaagccgcaagaacttcccccgtagggtgtcgactgaaaaaattcacttgtagctgtatagtttgatctctagctttgtcgtgcctccggccttcaggtaggcgatgcggcatgatgttataaatcctctcccagaactgacaatatcgcattgtaacccaagaagccggtgcaagaacctgtgaaactgcattgatgcgcaattatgtgattcatcagttgtataacaaagtggaagatgcataattttatgcctcgtggaggctgtgactatgttattctgatagtaatgagtacgccagagattggatgtcgag

SEQ ID NO: 108974 - DNA, 607 bp, Zea Mays
aaaccttttttcccctctgcacgctactctctcctttctcactaccccgcccgtcaaagcgagagcgccgtatcaccggtctatccatcccttcaccgctgcctcgacccgcgccgaaagatacctttcccccccttcctctcgcgccgccgttttggtgcgaccatggcggcggagggggaggccaagaacccgtccggcggtggcgaagggggtaacccccagcaccagcaggcagtgcaggctgcgccggcggagccgccaacggcacagggggaagcggtgcaggaggctggagcgcaggcgacgggacaagagccggagggggagaaggcgaatcgagatggggagggaagcgcgggggagaaggacgacggcgcgtgcagagatctggttctggttgaggatccggaggtgctcgccgtcgaggacccggaggaaggtacaacgcccgttcttgcagtctctctctctctccggccttggctctagtagtagttgcccctgttggtgcttgtgtctcagctgtcagatgcatggatacactgacgttttttttccttctgaacataacaggtgctcataaacagaaaaaaaataaagaaaa

SEQ ID NO: 108975 - DNA, 422 bp, Zea Mays
atctccgctctgctcaccccgattccccacatggccatggcgacgatggaggccaccacgctgacggcgctgctcaaggaggcggcggccgccttcccgacccgtcgtgtagttgtcgtaccgggcaggctggagctcacgcacgtcgccctcgacgctctcatcgacgcggcggccgcacaactcgccgccgacgccggatttctcccgggccacgtcgtcgcgttctccttccccaacaccgtcgagttggtggtcatgttcgtggcggtgatccgcgcgcgcggcgtggcggcgccgttcaacccggctacatgcaggaggagttcgagttctacctctctgactcggagccgtgcctcctcgtcaccaacgtggagggcaacatggcggcgcaggcggccactgccaagctcaggctc

SEQ ID NO: 108976 - DNA, 761 bp, Zea Mays
atgacattgaaccaccagctaaggaagtggtggtcgttgatgatacccacgttgtggatcctgtatatgattcaagtccttcgggaagcgagaggcctgcacctactggtttagtaattgacggacctgtcctaaaagatggtcatgcttgtactcttgttgttgaagcaaccatcgaagaagggggttcatcatcaagaatggaggtttcttccagtgaggtagctggacctagtttgagttctgtggagcaaagcgaatccccagagaaagaagcctctgagataagagagcagtccatggttggccatgtcgaagcacatggaggttctgtcagccatgctgatccttcagtatctgatataagttctcagccgagtactgaaagttcaacaaatggtgattctggcagtggtgtaacaccatccttcacaaacgcagttctttagtttcttcataaaaaaaatgacagcggcaccgatcgagcatcatcaggttggtcgtcttcagcagtacttcgagctaggcgacttttgtgtggggcgagttcattgctgaggaaaccactgggagggtatatgtttgttgcaggaaatttcttagtgcttcaaagggactaggcaacattagcattattagcactgcactgtaaaaatggctagatatggttgttgcttaatttggccagcactctcgtttgtgaataccttgtggatccgacagtcaattttgtgccgtaaattaattgttaatttgctgct

SEQ ID NO: 108977 - DNA, 432 bp, Zea Mays
tttgctcctaggaaaaatccttttgatcttccttacaatgaagataacttcccagattctgctccatctgcagtgttggaaacgagatacccatttgatctaccaagtgagcaagcaaacgagagcagctcttatggagccaactcaagccatgatgaacctattcccgtagcatgtcatttacagagtgcactgttgaggaggcatgagagcttcactgaaggagcaccattccttagtgactttttgcaagatacacagccttcccgattcagaccatacttcatgacggaaaaaatggctaacgaggaaatgacagatccagttcttgaaggagaaactagtgaaaagagcaactctaaggccagctctgctcaagactcggatagtacttcttcagttgctgaccaagaaagccagaaggatgttcta

SEQ ID NO: 108978 - DNA, 2921 bp, Zea Mays
cctccctcccccgccacctgagcccgcccccccaaaaaaaagttttaaccaaccaaacccaccaccacctgcctgcgcgattcccatcccaccccaattaacccggaagaagagctcgcaacgcccccggtgggatcgccggacacctacgcgggcctcgccttgaaatccctgttggaaaccgaggaggatcatgtcgcgggtggcgtcgttgtcgccgtccttatcgggcgacgaggtggaggtggaggaggaagacgacgagggcgtcgacgggtaccgcaagggcggctaccacgccgtacgccccggggaccagttcgccgccggccgctacgtcgctcagcggaagctcggatggggcaacttctccaccgtctggctcgccttcgacgtccaatcacagagatacgtggccctgaagatccaaaagagtgcgcctgagtttgcgcaagctgctcttcatgaaatcgagttcctatcagagatcaccaagagggacccgttgaactgcaaatgcaccattcagctgatagatcacttcaagcacacggggccgaacgggcagcatatctgcctcgtctttgagttactgggagatagcttgcttaagctggtacagtacaaccggtacaaaggcatcgggttcgatagggtgaggcaaatatgcaagtcgattttggtaggtcttgattacttgcacaatgagcttggcatcatccattcagatttgaagcttgagaacattctccttgtctccacaattgatccctccaaggaccccattcgctctgggcttaaacctaaccttgagaggcctgaggggtaccctaacggtgaggctggtcttaacgcgattgagaataagctaaagatgagagcaaggagggtgcttgcaaagcttgctgagaaaagaaaatcagctgtggaatcttcacgctcagaaaggagcttggatggaattgatctgacatgcaagattgtggactttgggaatgcttgctgggctgacaagcaatttacagattttattcagacaaggcagtatcgggcgccagagatcattctaggtgcaggatactcgttttctgttgacatgtggtccttcgcatgtattgcttttgagctcgcaacaggagaaatactatttacacccaaggaaggccatggatacagtgaagatgaggatcacttggctttaatgatggaactacttggcaagatgccgaagaagattgcaaccatgggaacacgatcaaaggaatattttgaccgccatggagatctgaagcggatacgaaggctgaaattgtcatccattgaacgtgttctcgttgacaaatacaaaatttctgaatctgatgcccgggaattcgccaattttctttgccctttactcgactttgcaccagagaagaggccaacagctttagattgcctaaagcatccatggcttaaacatgacgaggataaaacatgtgggtctcttaacaataatgatgccaagagcattgatctggtccaaagcacagggagtatcaccaccgttgactgtacaaatattgatttgacgagcaaaaaaggcagctccactggaacttgtgataagactgttgatgcaaaatacaacacaagaagcattaccagcaatgctaccatgaacacttatgtacaacccacttctggaagttttgccaacagacttgcgaaaaatgttgatgtaaatccgaacattggatccatcagtaatagagatgccaagagttctgatatgaaggcccacatgggaagcaacaccatcagtgacgccaaaagctctattgtaaagctagatacaggtaacatcactgatagaaatgccaaacctgtcgatataaaacccaactctgacaacatctccagcagagatgacaagagcagtaatgtggatactaccacttcctgtgttgtaaagaaagacgtgaagcacagcattagaagtgttgttaattcttatatcaagaactttgatgcaaaatgcaacactgcaagcactgctaacagtgatgctagtaactcatcagaaataaaacccagcactagaatttttaccagtactgataatgccaagtgtatggacataaaaccgatcagcgaaagtgctaagagcaatgacaccagtgctaagagcaatgacaccatcaatgctaatgtgaaatccaacactggaattgttgcaaacactgatgccaagagcactgatgaacagactaacactggaagtgttgacagcagcggtgattacagcgctgactcaaaacaaaacattggccgggttgctgcaagcatacagaggttggagagcagcatgagtaaagtgcaaatcgggaaatacagggacaaccttcctcaagattgaggatctggcaggtaccagctggcgttattgtatatctctctattcccgctaactgtacaaaactttgtatttgcacacagaatgtacacggaggtaaatattccccatacataccctggaacaaattgtattaattgtcacagattgactgcactcagaattacacagcattcttttggacatttggtgggtaaatatgaaatctctttgggaatatacctgtatatgcagtggtagagaatatcgctgttccttttatggtggatgcactggaaagggaagaattgtactctgaccagccacagcatctcttttgatcatgtccatattctgctgtcagtgaaaaaagagatttcattatgtcatttaacacggatcaccaattatgtgagcaggggtgtctgacattttttgtttggtttatggtttgagatttgcatgtaaaaagtgggacatgtgttgtataaaactattctttgatgttcatttcatggtgaacgatcatatagatggaaacttttca

SEQ ID NO: 108979 - DNA, 4109 bp, Zea Mays
caggaccatggcgtcaagcaaacaacagatgaaggagaagcgagtcgtgcggcccaacagccgtgtctttgggccagattggatccagtaggcttccagccttgtattgtttctgttggcctgttggtcgttttctgtcgtgttaataagggagactgaaccgtatgcaagagggggaggaggagaggacggaagtgttaggagcgaacggcggctgtgtcggccggtactggcttgaactcctgtaaaccccaactctggatctagtgaatacttcgtgagaggtggagagcaccgggagtggtgctcgcgatctcaaattctggtgttggtatgttacaattggtattgggagccgtcgatcctggcagatccgccggaattagtgctgcggccgcagtacaaaacccgcggccaacgtcaagtggaagcgatggagaagaacatttcagatctgactactatcctgcagtccttgcaagcccaaaatgagtccatcaagctggcgttggaggacaacacagcggcagttcgggatcttacggtctggaaaccccaaatggaagccacggtcggatccctacgcagagatgttggccgactgtcagaaacagtggatacattggtggccttccgggaccaagtgcatcctgcattcaaggtgtttgacaaaaagtctcaagatagttcaaccgtgtcgttggctaatttggatgcaaatcttcaacatcaccaagggggattctctggtcttcatacgggcattcccaaccggagtgatggatttggggttgtcactaccctaactccacctccggtcacagttcgtcggacgactgaatcctacaagtcaaattcggacactagcaaagctgctgctctgatggcgtaccgcaaagccaaaggattatgttacaaatgtggtcttcattggggaccaacacacaaatgcagtccaactgtttccctacatgtggttgaagaattatggcaggtgttggaaaattttgtgcctgtggatagttcatctagtcctcctgatgattcaagcgaagatctcatgaccctgtcagttcatgctgtttttggtacagaagctccacaaactatcaaaatattagcaacagtgttgaacaagagggctatcatgttagtcgactcaggcggttcagcttcttttattagtgaacagatggttcggggtgtctcttccttggttccgttagctcaaccagtccctattcgtgtggcaagtggtcagctgatttactgtacccaggagctttctcagtgcaaagtcagtgttcaaggtcacacttttatgatcaacttgaaagtgctaccattacaatgctatgacgccatccttggtgtggattggttggcttccaatagcccaatggaatttcactgggttgataactgcatcacagttgaatcacctcttatccctggatgaagtttggtgtcttttggaattgcaacatatctcggatgatgacaatacacaaactattcaggtggacattcaaaacttgatcactgagtttgcttcactctttgataaaccaacagggctgcctctcgctcgctcccactgtcattccatacctttagtgccaggggctacatcttttcgtctgcgtccttatagatataacccagcacaaaaagatgagattgaacgtcaagttaaagaactccttcagaatggtatgattcagcctagcagtagtcccttcgcctctcctgttattttagctcgcaagaaaactggagattggcgactttgtgtggattaccgtcgtctgaatgctttgacagtgaagaacaaataccctctgcccattattgatgaattattggatgagttacagggtgcaatgtggtttacaagcttagatttgagctctggataccaccaaattcaaatggaacctttggatattcccaaaactgcctttcagacacataatggtcactatgagtatcgggttatgccatatggagtgactggtggccctgcgactttccagcttacgatgaattccatacttgctcctttgcttcggaaatgtgtagtggtttttatcgatgatatattggtttatagcaccaattggcgggatcatttggaacatattcgcgttgtctttaatatcttggacaagcaccagttcaaagtaaatctatcaaaatgttaatttgctcaaaccagcctgcattacctcggtcacataatcagtcaagaaggtgtggccactgacccggagaaaatatcagcagttaaatcttggcctacatctcgttcagtcaaggacattcgaagttttttgggacttgccggatactatcataaatttgtaaaaaactttggcattatgagtcgccctctcacctctctcctaaaaaaaggccaattgtttgtttggaccgaggaccatgatcaggcttttcaagctctgaaaaccgctttagtctcggctcctgtgcttgccctgccggatttcgctaaaacatttgagattgaaactgacgcttgcgattcaggcattggggctgttctccaccaagctggccaccctatcgcttttgttagcaagacattgggtcctagacatcaaaccttatcaacatatgaaaaggaatgtctagcaattctcatggctgttgatcactggcgatcttacttgatttgtggacagtttgtgatacacactgatcagaaagtcttacccatcttgatgaccaaagactaacaacaccatggcagcaaaaagctttgactaaactgcttggtttgcagtacaaaatttgctacaagcaaggtacctcgaatcgagtagcagatgccttgtctagactctcaagtgagcagatgttggccttatcagtgatacaacagtcgtggcttcaggatttagcagataaatatagttcttatcctgataccgcaccaattctccaggccttgtccctaaaatctccttctggcccttaccagattacacaaggcattattcgatatcacagcagaatcttggttccagcaacatctgaattccctctcaaaattttcactgcactccatgctgctccaattggtgggcattctggtttcttggtcacgtaccataagatcaaaaagcagtttgtttggcgaggcatgaaaaagatgatcgctacttggtgcagccactgttcaatctatcaacaggctaaaccagaaagagtaaaatacctaggcttattacaaccaatccaagttcctgcagccgcatggcaagttatctccatggattttatcgaaggcctacccacatctgataagtataattgcattatggttgtcgtcgacaaattttcgaagtacaaccattttgttccacttcgtcatccgttcactgccctgaaggtagctactcaattcatggaccatgtttttaaacttcatggatttcctcaggccattataactgacagagaccggctgttcacaagtgccttttggaaagaactattcaagcttgctggtgtggatcttaggatgactacagcttatcaccctcaatcggatggtcaaacaaaacgtgtgaaccaatgtttggaaacgtacctctgttgcttcatccaagcttgcccaacgaaatggaaaaagtggttatccttagcggaatactagtataacaccagttaccattcctctcttcaaagaacaccttttgaagtgctctatggccatattccgcggcagctgggcattgacctccctgggcaatgtgatgttccttcactgactgattggctgcatgaaagaaagctgatgcttcaactggttcagcagcaactcatcagagctcaacagcggcaaaaacatcaggccgataaactacgttccgaaagagtattccaagttggcgattgggtctatttgaaattgcaaccttacgtccaatcttccttggtgaaacgcgccaaccacaagcttgcatttaagtttttcggtcctttccaaatcgtggcacgcattggacatgttgcttataaattgcaattgccagctacatctgctatacatcatgtgttccatgtctccttgctcaagaaag

SEQ ID NO: 108980 - DNA, 90 bp, Zea Mays
gcaatgacatgcagcttacatgcatgtccgagggggggaaaacaagcaactatatattggactgttgagatgagcaggaatctatacagt

SEQ ID NO: 108981 - DNA, 654 bp, Zea Mays
ggttgctatttcaccaaggacaatttgatcaaacgctccgggcaaactttggtcggtattggattcggattgacaatagttaaccccgtggcgaacagaacgagaaacgctgattgcttcgataacaaaataattaaagattatatgcatggcgtgttctttcatcaccgggcaagtctgcaaatggaaggcatgaaacagcaactgatcgaaatggggaagaagacatcattagtctttgttaaccctgctacacaggaaactactgtgttggcatcagacgacacaacgatggcaaaggagctggaagcagatgttcaagagtgttcgaaggagaagaacgaagtgcggctgcatcggcagaagcacgacaatgtccgagttactggtccagggtgggccatgcttctagagggtgctaacagtcttccacaagatgatcgccagatgaatatgacccagccaaatgtcagcaatatgtcaagggagacgccagaagaggcagccgacgaggaagagacggcgctgtccagcaaggagcagcagcggcagaccaagaaaggtgaaagccaacctgacttgcctgaagaccatgaagtggtgcagcaacatgaagaacaggagggcgacggcgacagaaaaccaaagccgtaa

SEQ ID NO: 108982 - DNA, 1339 bp, Zea Mays
actagtatctataaacagagtgagagactggtagcagccgcatgtgctagagctagacagaagtcagtctccttcccctctctctagtgctcgccggctctttccgtcgccatggacgtcctcctctgctgctgcctgctgcttctcctggcctccgccgcgtccgccggcagcgagcggtgcgtgcggcaggggaaggcggcctactcttcctcgctctctccggcccctcacggtagcagcagcggagcgtgcgggtacggcgccatggccgccgagatcaatgggggtttcctcgccgccggcgggcccaggcagcaccgcgggggcctcggctgcggccgctgtttccagatgagatgccgagacgcaaggctgtgcagcgccgggggagtgcgggtggtgctgaccgacttccacaggagcaaccgtacggacttcctgctcgccgggccggcgttcgcgggcctggccaagcccgggatggcccagcagttgaacaggcgagacgccctctccgtagagtacaaaaggattccctgcgagtacaaggagaagaacctgtcgatccgggtggaagaagcgggcgacaggagccggggcaagctggtggtgaagctgctgtaccagggcgggcagaccgacgtactggcggtggaggtggcccccgtggggtcgtcgtcggagtggcggttcatgacaagggcgtacgggccggtgtggagcacggaccgggcccccgccggcccgctgcagttccgcgcggtcgtcacgggcggctacgacggcaagtgggtgtgggccgagcaggaggtgctgccggccgactggcgccccggccaggtctacgacaccggcgtccgcatcgtcgacgtcgcccgggacgcatcccgcggctgcaccgccgccgccatggacgactggaagtgaagtgaggatatggctgggtagattaaaaatacgtatgaatacatactaacacgtcgccacatcggtgctgcgacactctggtaagaagaggacagcatgcaatggctccaagaacagcatcccccccaagcgcgtccggctgtccagaggagaggaggaagaagattggagtagctagcagctagggtgtaattgtgtatgcaggatcttctatcaaggtcgatccgattagatgcaggcaaaaaaaaagagctgggatccagtcgacagttctaatgggtcatggcgtcatgccatcctggctgtaccacaaactcgactaaaagcaaaaggaaaaaattaacaaaaaatcacgctatcattcaactaccatgcacggatccataaaattaccccaaaaaaaaaccaa

SEQ ID NO: 108983 - DNA, 1220 bp, Zea Mays
actagtatctataaacagagtgagagactggtagcagccgcatgtgctagagctagacagaagtcagtctccttcccctctctctagtgctcgccggctctttccgtcgccatggacgtcctcctctgctgctgcctgctgcttctcctggcctccgccgcgtccgccggcagcgagcggtgcgtgcggcaggggaaggcggcctactcttcctcgctctctccggcccctcacgatgagatgccgagacgcaaggctgtgcagcgccgggggagtgcgggtggtgctgaccgacttccacaggagcaaccgtacggacttcctgctcgccgggccggcgttcgcgggcctggccaagcccgggatggcccagcagttgaacaggcgagacgccctctccgtagagtacaaaaggattccctgcgagtacaaggagaagaacctgtcgatccgggtggaagaagcgggcgacaggagccggggcaagctggtggtgaagctgctgtaccagggcgggcagaccgacgtactggcggtggaggtggcccccgtggggtcgtcgtcggagtggcggttcatgacaagggcgtacgggccggtgtggagcacggaccgggcccccgccggcccgctgcagttccgcgcggtcgtcacgggcggctacgacggcaagtgggtgtgggccgagcaggaggtgctgccggccgactggcgccccggccaggtctacgacaccggcgtccgcatcgtcgacgtcgcccgggacgcatcccgcggctgcaccgccgccgccatggacgactggaagtgaagtgaggatatggctgggtagattaaaaatacgtatgaatacatactaacacgtcgccacatcggtgctgcgacactctggtaagaagaggacagcatgcaatggctccaagaacagcatcccccccaagcgcgtccggctgtccagaggagaggaggaagaagattggagtagctagcagctagggtgtaattgtgtatgcaggatcttctatcaaggtcgatccgattagatgcaggcaaaaaaaaagagctgggatccagtcgacagttctaatgggtcatggcgtcatgccatcctggctgtaccacaaactcgactaaaagcaaaaggaaaaaattaacaaaaaatcacgctatcattcaactaccatgcacggatccataaaattaccccaaaaaaaaaccaa

SEQ ID NO: 108984 - DNA, 1421 bp, Zea Mays
atccctaatcgccagttcgccaccagcctccgcctctcccctcccactcggccactcccagtgccagccgccgtgcgctcgctcgcgcgcgctctctttctgggacgaccagtgggatatctccaccgccgccttacgccaggtgcggaccttcgccgatctcttcgccagcgaagagcgtccatcagtaaaaatggtggcccttgcaaatgaagaggccttggcccatgatgaagatatcatggatgatgttgattctgatgttgaagaatcggactcagaagacgattcaggtgaagaagctcaggataagccttcagacaaagctatatacaacaaggaggccatccttgaaaaacttgaagatattgcctggcccaagtatgtggactggatacacaagctcaccattgagcatgatcagggggaaaaggttgatgtgaatgatgatcttgctcgtgaacttgcgttttacacccaagctttggatggcacaaggcaggcctttgagaagctgcagtcgatgaaggtcaggttcctcaggccaacagattactatgctgagatggtgaagactgatgcgcacatgcacaagatcaaggggaggctgctgtcagagaagaagaggatcgaggaggctgaggaacggaggaaggctagagattccaggaagaaagcaaaggaggttcaggctgagaagaagaaggagagggctaagcagaagaaggagcagattgagtcagtcaagaagtggaggaagcagaggcaacaagggggattcaccaagggaaatgatgatgcaccagaccttaattttgaaggagaagaaggatttaaacaatctaagaaaaggagacctggtgtttctcctggtgacaggtctggtggtcttgctaagcgaggtaaagaaggaaagaacaggagggcaaaggattccatgtttgggcacggtggtcgtaaagggctgaagaagcaaaacaccgctgagaccactaatgatttcagaagctttaaccaggggggtcagtctcaaaacaagaagagaaagaggttttgaacttttgatggatatattaagaatttgggtgagtctcaaaaccagaagaggaagaagttttgaacttttgtgttattactattcccccctgcggcattattttgttatggtgtgtgccagaaggaaaaatagtctagggaagcagtccaaacataagacttaatgttttgctttatctggtaatggtcttcttttatcacggaatgcggattatggccctcttcggtttgagggactaaagattagtccctctattttagtctcatttagtctctaaattaccaaatggtgggactaaaacatggactgaactgatttagtctctagtccctcaatgagtggctaaaagagattaaactatatt

SEQ ID NO: 108985 - DNA, 88 bp, Zea Mays
caatcacgctggtgtcgtgtgactgtggcagaccgtgctcaactgtatgctggcgaaatatggatcaagatacggttgccaagtcacc

SEQ ID NO: 108986 - DNA, 1517 bp, Zea Mays
tttatcaaacgcccaacccaaagagacaaagaaacagcgcacgcgcaccggcgcacgtgtcgctcgacgccgtgcgccgccgcccgccgttccgcgaggagacaggcgtccacctctcccgcctgcatggctgccacttcgctctcctcccttcgcttattgacgacgcatgcctgcctcagaccgaccaccgaagaatcccgcaaccatggcgctccagcttgccgtcctcctcttactgctcccactactcgccggcgcgtccgccgacgacaaattcatccggcaggtgacgacgcaaggtacccgcgccggcgcgggcccgggtctgctcccggaggcgcagttcgcagcgttcgtgaggcggcacgggcggcggtactccgggcccaaggagtatgcgcgtcggctgcgcgtgttcgcggccaacctggcccgcgcggcggcgcaccaggcgctggacccgacggcgcgccacggggtcacgcccttctccgacctcacgcgggaggagttcgaggcgcgcctcacgggcctgcgcgccggcggggacgtccagcggctcatgagtggcgtgccggccgccccgccggcctcgaaggaggaggtggcccgtctgccggccagcttcgactggcgcgacaagggcgccgtcacgggcgtcaagacgcagggcgcgtgcgggtcgtgctgggcgttcagcacgacgggcgcggtggagggcgccaacttcctcgccacgggggagctcgtcgacctcagcgagcagcagctggtcgactgcgaccacacgtgcagcgcggtggcgcagaacgagtgcaacaacggctgcgccggcgggctgatgacgaacgcgtactcgtacctgatggagtccggcggcctgatggagcagagcgcgtacccgtacacgggcgcggcggggccctgccgcttcgacccgacccaggtcgccgtccgcgtggccaacttcaccgccgtgccggccggcgacgaggcccagatccgcgcggcgctcgtccgccgcgggcccctcgcggtggggctcaacgcggcgttcatgcagacgtacgtgggcggggtgtcgtgccctctcatctgcccgcgcgcgtgggtcaaccacggcgtgctcctcgtcggctacggcgcgcgcggcttcgcggcgctgcggctgggctaccgcccctactggatcatcaagaactcgtggggaaagcagtggggtgagcaagggtactaccgcctgtgccgcggaagcaacgtatgcggcgtcgacagcatggtctccgccgtcgccgtggcaccggcgctgtgaacgaatccagtgtactcctgaaacggaagtcctggacggggcatggtattgtctgcacgtggtagtgtaggcttggatacaagtgataaaggaataacaaatcccgatacgtacagccgtacagaccccacccatgtgctctttgctactcgttccgttccattctaatataaattatatataaatgagttctaattttctc

SEQ ID NO: 108987 - DNA, 318 bp, Zea Mays
tgattagtggtatactcagaccagtggtatatttagaacaagtttttcctgattagtgttatactcagatcagcgcttaaaagtataacagacttaaatcacattgcagagaattatattcagatcagcacttaaaagtatcacagacttaaatcacaatgcagagagttaaaccctaatgtctctttatttttatttttgtatgcttgattatttattctcttggtgtaattttcttttttgtttgccttcatctgtagtgagacatgtggcctgcagtgagttatattcactgcatcactagatttttacatgcag

SEQ ID NO: 108988 - DNA, 1242 bp, Zea Mays
gacgtccagcccgtcacaaaaggcccatctcactgaagagatacgctggtcggcttgtgggcgcgtggcttgtgggccgtgggcttcttcgctgttcgtcgtctcgtcaccactcaccattgccgacgcaagctgcgactgaacctccgtggcgacggaggagacggccatggtggcagcgatggagctcgagatcctaggcatgaatttcgggtgcgtcctcgcggctctgtccgacgccaagatccccgacaagggctgcctgctcccgctcatctctaagctgctcggctacgccatcgtcgccgcatccaccaccgtgaagcttccccagatactgaaaattttgaagcatggaagtgttagaggactaagtgtggcatcctttgaacttgaggttgtcggctacacaattgctttggcatattgtattcataaaggacttcccttttcagcttatggggagctagcttttctgttaatccaagcaattattttggttgcaatcatttactattactcaccaccaatgggaaccaaaacatggatgaaagctttattatattgtggaatggctccaacggttttggctggaaaaatagatcctgctctttttgaagtcctttatgcttcacagcatgctatcttcttttttgctagagttccacagatatggaagaattttacgaataaagggaccggcgagctaagcttccttacctgtttcatgaactttgctggttccatcgtaagagtttttaccagcatccaggagaagactcccttaagtgtgatcatgggctccgcaatcggcatcgtcatgaatggtacgctcttgggtcagatagtactgtaccagaagcccgctccaaagaaacagaagaaagaagattaagcaacatggagaagctgcagaaagttcttcctggttgtttaggattctgttccaacactcgctccacatctgaacaaatggcaccagtataggaagttgttggcaacttgttacgagaaaagaacatagtcggactattgctatataacaacatttctgtgctgttgtttttagcacttagcagtgtaccatgacttgaatagttcatataactgcctttagatattgactgcaagctgctgctgatgcgttttcccttctgctgtgccgttccatattttagtttgagttaaatgcatgaggatttatactgcaccataaaataaatttagagaaccaaaagcaca

SEQ ID NO: 108989 - DNA, 1514 bp, Zea Mays
actgtcttgacgcggcgtggtagaagagcgtagaaattgaggaagccgctggaattctttgtttgtttgtgggatgctggtggattcgcgcgatccttgctgctgcttgagtgtagagcacgaactcttgcagttacttcctctctcaagagcttcccctgctaaacaaaactctagcttctcggtcctgacctcaaggctggctggctggacgttgatcagcgaatatgatctcagcactccccgtgctctgctatggggtcacagctagtgcgttgcaatcccaatcgatccaccaaataacatcctctacaagtcctgcaccagctttcttcaaactatcaagggacccctcatccttgacagtttgtagcccacaaatacaggcaataagaatccaatcactgcggggcaaccaaaatttgaaggccattgagatgagtgaagggaatagatggggctcagggatgaagctggatgtcatgggcatgacaattggatgcttcatatcgtgtccactgcatacgaacaacctgctgcctttcatctctaagatcctcgggtattccatcattgctgcttccactgttggcaagctccctcagatactgaaaattttgaagcatggaagtgttagaggactaagtgtggcatcctttgaacttgaggttgtcggctacacaattgctttggcatattgtattcataaaggacttcccttttcagcttatggggagctagcttttctgttaatccaagcaattattttggttgcaatcatttactattactcaccaccaatgggaaccaaaacatggatgaaagctttattatattgtggaatggctccaacggttttggctggaaaaatagatcctgctctttttgaagtcctttatgcttcacagcatgctatcttcttttttgctagagttccacagatatggaagaattttacgaataaagggaccggcgagctaagcttccttacctgtttcatgaactttgctggttccatcgtaagagtttttaccagcatccaggagaagactcccttaagtgtgatcatgggctccgcaatcggcatcgtcatgaatggtacgctcttgggtcagatagtactgtaccagaagcccgctccaaagaaacagaagaaagaagattaagcaacatggagaagctgcagaaagttcttcctggttgtttaggattctgttccaacactcgctccacatctgaacaaatggcaccagtataggaagttgttggcaacttgttacgagaaaagaacatagtcggactattgctatataacaacatttctgtgctgttgtttttagcacttagcagtgtaccatgacttgaatagttcatataactgcctttagatattgactgcaagctgctgctgatgcgttttcccttctgctgtgccgttccatattttagtttgagttaaatgcatgagcagtctttgaagttgttcagaggtgccagtttagtacatgaacttc

SEQ ID NO: 108990 - DNA, 1253 bp, Zea Mays
ttgccagctagacgtccagcccgtcacaaaaggcccatctcactgaagagatacgctggtcggcttgtgggcgcgtggcttgtgggccgtgggcttcttcgctgttcgtcgtctcgtcaccactcaccattgccgacgcaagctgcgactgaacctccgtggcgacggaggagacggccatggtggcagcgatggagctcgagatcctaggcatgaatttcgggtgcgtcctcgcggctctgtccgacgccaagatccccgacaagggctgcctgctcccgctcatctctaagctgctcggctacgccatcgtcgccgcatccaccaccgtgaagcttccccagatactgaaaattttgaagcatggaagtgttagaggactaagtgtggcatcctttgaacttgaggttgtcggctacacaattgctttggcatattgtattcataaaggacttcccttttcagcttatggggagctagcttttctgttaatccaagcaattattttggttgcaatcatttactattactcaccaccaatgggaaccaaaacatggatgaaagctttattatattgtggaatggctccaacggttttggctggaaaaatagatcctgctctttttgaagtcctttatgcttcacagcatgctatcttcttttttgctagagttccacagatatggaagaattttacgaataaagggaccggcgagctaagcttccttacctgtttcatgaactttgctggttccatcgtaagagtttttaccagcatccaggagaagactcccttaagtgtgatcatgggctccgcaatcggcatcgtcatgaatggtacgctcttgggtcagatagtactgtaccagaagcccgctccaaagaaacagaagaaagaagattaagcaacatggagaagctgcagaaagttcttcctggttgtttaggattctgttccaacactcgctccacatctgaacaaatggcaccagtataggaagttgttggcaacttgttacgagaaaagaacatagtcggactattgctatataacaacatttctgtgctgttgtttttagcacttagcagtgtaccatgacttgaatagttcatataactgcctttagatattgactgcaagctgctgctgatgcgttttcccttctgctgtgccgttccatattttagtttgagttaaatgcatgagcagtctttgaagttgttcagaggtgccagtttagtacatgaacttc

SEQ ID NO: 108991 - DNA, 1365 bp, Zea Mays
ccgctcatccccgcctccgccagctttcccgtggccgtgacgccacccccctctcttctctttcccctcgcattaatggccgctccctcgctatcccctttgtcgtctcgtctcatctcgcccccttccggcttaaccctcaagatttctccctcgctgctcctccttcccgcttgggcgggcgcggcaccttccggttccggtttccggggcctcgggcctcggcctcatatatatatacacgcgcgcggccgtcccctctctataccccctagcatgctcggctcgctccccggattgatcgagctcgctcgttgcagagatggacccggtgcctcccccctcctcttctcgccgggccgccgctgctcccggcccctgctgccgctttgacgcgctgcggcgggcgtgcgccgggaacgccgccgccgccgcgcgggccgccgggtgggcgatcggcgcgctgctcacctgcatcttcgccgtcgtgggctcactcgtcggaatcttcattggtgccttcatggggatgtctaccgaaagcggcatgttccgcggggctggtgttggagcagtttctggagcagtcttctccatagaggctgttgagtcctgcatcgagatttggaggtccagccattcaggaaaatacagcattctctttgtgctggacatcatctcgagcctcttcagcggaagaattgtgtgggagaaagtcagtccagcgctacagcgtgcagtgcaaagccagatgagtctaatgagcacaccgttcatcgacaacagtgaccttttcgaaaccggcagtacaggaggcatgtcaagggatttgattgataggatcccaaagacgaggttcagtgctgctagcaactgtgatcaggaaactgatagcagctgctgcccagtctgcctccaggatttcggagcacggcaattcgtgagggccctgcctcagtgccaacacatattccacgtgcggtgcatcgacagttggctcctccggcacgcgtcctgcccgctatgccgggccggtgttcacatagaccatatacatatgtaaatgaactcgcagggtggcacctggtgtattttcgtagcgaatacccgtgctcctgttggatatcacaagtatagctgtatacatagggtttttttgctctctctttttgtcacttcttgagacttgcttgtgtggggctatgctttcagctgcacgtttttgtcgaagcatgatgccttgatatgtacatctggaaaatggaccgactaacaagctccctgaattctggcactgtgcttcaaaatctgtgtctgttaactgctgatgctgacatgctaatgcaatggtttgctactgggcaa

SEQ ID NO: 108992 - DNA, 228 bp, Zea Mays
gtgacttaaacttgtcttttccatcctaaagaagagagagctcccagatagagctgttccccttcagtgtagcaaatggcgaggataaaacccaagcaattgttaatccaaagcaagacgaagaaggccccatctcgaatcagctactctactatcatcacatggaacttgattgtcatattggttcttctatctctttatgctacctacaaccattggcatcaaagg

SEQ ID NO: 108993 - DNA, 798 bp, Zea Mays
ggtttgcctgtatactggcatgctgcagcacctgcagccctgaccggcgacgattgggcggccgtcgctgcctccttactccaggtgtccagctcttcttcgtgccatttgccggccgtgagcaccaccaggggagtttttgacaactgaagaagcgcggagacggcacaaggtgtatgatgaacttgcctctggtggcaagctctgtcccgcgctgattgtcataagagagcacctcccttctggtaaagcatgcttaagagtcaacattgatgcaaccagagtgggaaatgtggctcgctttatcaaccattcatgtgatggaggcaacctgcacccagtgctggtgaggagctctggtttgttgctcccaaggctctgcttctttgctgccagggatatcgtggagggagaagagctcaccttcagttacggtgatgctagggttaggcccaagggtttgccatgcttttgtggaagctcgggttgttctggtgtgcttccttcagaagaaacttaagaactgatgccatcaccttggatgtcttacaaatgagtttgattctatttctgacttcgcaataacatggcttcatgaggaattgcctggcccattcttttagccatactgtaatgtgtgcaacaaacaaaaaacaagctgtcagtttttggtgaagaactggtcatgtttgtaatgtgatctgttttggctggacatgtgtttcctgcttacagttgattggcagattctttgactgtcaatttctagcatatgaggctcaacacgacagccaacct

SEQ ID NO: 108994 - DNA, 1370 bp, Zea Mays
ggtttgcctgtatactggcatgctgcagcacctgcagccctgaccggcgacgattgggcggccgtcgctgcctccttactccaggtgtccagctcttcttcgtgccatttgccggccgtgagcaccaccagacgggatgagcaacccgggggcaccggacaccgtcactgagtcggcggagctggtcctgccgttgttgccgccgcaggacctcgcggccgcggcatcggcctgccgcgccctccgcgcggctgtgactgctgtcaccgcgcgccgcgccggcgacgccgcacgtggcctagagccgctccccatcccgttccgcaactacgtcgattccaagccctatgcctacttcctgtatacccccttctccctcacccggctggctcccggcgcctccgcccccagcgcccagccgtggggtgccgcctggacccggccgccccgccccacctggccccgccccaacctcgacggcttaccatcagccgtgtacgggtgcgcgtgcgcggcggcggaatgcggtggtacccagtgcgcgtgcgccgatgtggaggccgatgcagcgggctcgggcttggaggccgggatggggagcctcacggagtgcggtgatgtctgcgcgtgtgcgccgtcatgtgggaaccggcggactcagcgcggcgttgctgtgcggctgtgcgtcgtgcgccacctgcacaaggggtgggggctgcacgctgcggaggccctcagctgcgggcagtttgtgtgcgagtacgccggggagtttttgacaactgaagaagcgcggagacggcacaaggtgtatgatgaacttgcctctggtggcaagctctgtcccgcgctgattgtcataagagagcacctcccttctggtaaagcatgcttaagagtcaacattgatgcaaccagagtgggaaatgtggctcgctttatcaaccattcatgtgatggaggcaacctgcacccagtgctggtgaggagctctggtttgttgctcccaaggctctgcttctttgctgccagggatatcgtggagggagaagagctcaccttcagttacggtgatgctagggttaggcccaagggtttgccatgcttttgtggaagctcgggttgttctggtgtgcttccttcagaagaaacttaagaactgatgccatcaccttggatgtcttacaaatgagtttgattctatttctgacttcgcaataacatggcttcatgaggaattgcctggcccattcttttagccatactgtaatgtgtgcaacaaacaaaaaacaagctgtcagtttttggtgaagaactggtcatgtttgtaatgtgatctgttttggctggacatgtgtttcctgcttaca

SEQ ID NO: 108995 - DNA, 3653 bp, Zea Mays
cagcaccgtgacggccaccatcattgatgtcatggcgacggggatgtacccgccgtgcgcaaagcagtagagcacggagaagaggtggacaaagtctgcggcggagaagaagagttgtgtgcgtgtgtgtgtgtgcgtgtgcgtgtgcgtgcatgtgtgtgtgcatgcatgtgtgcgcttggcaattcagttcctggcacttgttgtgtgtgttcacttgtgttgtgctttgttctcacaattctcttctacctccaacccaaactgagttgtgtgtgtgtgactgagctgctagtcacctgtgcaggcttgttggctgccaacaagtggcatcggagccactttcatcgtcaccaatgccaggtgagctgagacggggacaagattctgtcgtggcagccccagccaccattacaacaggcggttgtggtgcaacggactgtaaggggagttggcagcgccaactggccagtcctcacccgcaccaactatgacgagtgggtgttggtgatgaaggtgatgttgtgggcaaggaagttatggcgcgcaatcaacatcggcactgaggagtgaggacaaagatgaagattgtgcagccatgaaggcagtcgtgtgtgtcgtgccactagagtatgtggagtcgctggagagcaaggactccacaaagctcgcttgggacaccctcaaggccatgtgtatcggatcgggccgcacgaagaaggtcgaggcgctgacgtctcgcgatggcgaagcggcggaggtctttgtgctacgttgtggtcgctgcctcgctggccaatcagcttgcggcacttggcattgtcatcagccacgaggaggttgtcaccaagtacttgcagacgctaatcgacatatcaacactcaccctcgagaatgtgagtcgtgacacgacgcctgaaggcagtgaaggaccgcgtggaggctgcgacgatggcggcctttggcaagctacttggcagtccgaggaaggctcctctgggtcgtccagtcgtggcagcatagggaagcgacacagcaagccccgcagaaggacagtggcaatgtgtcgcttcctttcgataagaacacttatcgcagatgagggaaaactgggcattgggcctaggattgcaagaatcctaggaaggaaggagcacgcaggcgaaagaccatgagctgacgctcctaatggcgcaggtgtgtgcactgaatgatgtgattaaagagccaaagtcgagggaagagcaaagcattgcaaaacagaggacggtgaaatagagcatctccctcgatgagtcacatgtccaggttcaccttgggagtaagggcaacgacatagagcggaggtggtacttggggctagtaaccacatgaccaatgacaaggacacgttcacgaaattagatgatggagcggtcggctctatgaagtttgacgatggctcaatgatggaaatatgtgattgaggcaccatcatcttcaagtgccaaaatgacaagcatcagcattgacggatgtgtactacatcctaaggctctactcaagcatcgaccagattgacgagtgcatgtgtcaattcagtcaacgacgaccctgcacatccatgagtgttgtctcctcatcaaggtaaagcactccaagaatcgattgtacatggtcaactgaagattgtgcaattggtgtgcttggcggcgcgacagtgcgaggagtcgtggctatgagcctgtgacatgccagttttgggcatatgtgcttcgatgcgattggaaggatcgcaatggaacaaatggcgcatgggctccggcacatcaagcatatctgcaaattgtgtgacaggtgcctgatggggaacaagggaggctacccttacccaaggctgcgaactgtgtgacaggtgcctaatggggaacaagggaggctacccttacccaaggcgaccaagtattgctccagcgacatgttgaagctcgtccacagcgacctctgcgagccaatgactctagcaacacacggagggcggatgtactacttgttgctagtcgacaactacagttgcttcatgtggctacagctcatgacgagcaaggatgaggcggtggcggcaatcaaaggattccaacctctggcaaaaagcaaagtcagagaagacgctacgggtgttgaggaaggaccgtggaagcgagttcacttctatggaattcacatagtgcaacgccgatcgcggtgtggtgtgccacctcactgcgccctactcactgcaacaggacggggtcgtgcaacggcggaatcagaccactgttagcatggcaccgagcatgatgaagtcgaagtggatgtcgatgcagttctagggtgatgcagtgtccacgacgatgttcattcacagtcgcatgtcgatgaagagcctgaaaggcatgacgccctccgtggcatggcatgggaggaagcccgacatctcatttgaggattttctagtgcgtcggccatgtcaaggtgacgaagtcgcgcctgttcaagttggagaataggagcacactggtggtgctcctggagtaagcggccgacaacaagacgtattggttgttcgacctgcatggaggcaaggtgatcacacgcgaagtcatgtttcacaaaaaggtagcttgggaatggggaacaaaggaagtcgacgaagtgcacgtcatcttcattgtcgagcatcttgtcatccatgtcgctaatgatgcgggtctagaggatccgatagtgggcgtggcaagatcagaagcaatgttggcctcttatgggcctgcaatgcccatagtgaagtgggatgagtgtagcaccattgtgaagcacaaggcaaggcttgtcaccagacacttcgtccagcagggggagatcgacggcaaggaagtcttcgtgccgatggtgcagatggaagttgtccacctcctgatggcgctggagcaacgaaggactggcgtgcccagcccagcacatggacgtgaagtccgccttcctcaatggtgagctcttggaggtgttcttcgtcaagcaagctccaaagtttgtcgtccaagggtaggagcacagggagtttgtcgtccaaggtgttctacgggctacagtaggctccacgggcttggaacacgaagcttgacgacacgctcggcgagctcgcaacaccgagcacacgctctacacgtgacgacggcgaaggagcatctcatcgtcggtgtgtacgtggatgacttgatcatcaccgaggtgcgggaagaggacatcaacggcttcaagcttgagatggtggcttgtttccatatgaacaatctcgggttcctctcctactacctcggcatcgaggtgaagcaagggagggactccaacataggaacacagggaggttttggagcgaagtggcatggcggattgcaagttgtgcacgacatcgatggagaggctcaagctgataaagaccagaactgcagaggtggacaagacgtgccaccgaagcatcgtctgtgggctgctctacttgactcacacatggccgaacatctcattcattgtcaggtatgtgagcactgagcaggttcaaggatgatcctcgaaaggatatttgggctgcagtgaagcacctgctgcgctatgtcaagaggacgactaatcaa

SEQ ID NO: 108996 - DNA, 3783 bp, Zea Mays
ttttttgattttttttatttattattattaatttgccgaatgtagcactcgacaaaagttttgccgagtataaaatggctttgacactaggcaaagaacacgattacggtagtgcttgacgaaatgaccgatagggaaaaaaatagaataggagatagagcacactatgtatgaaaaaatgtaataggaaatagagaacacgagcactaatctattagttcaccatcagtaacaattctcatgtcggtagagcacactatttattattcacttcaaagccggctgcggcgctgcgctgccgctcattctcctctctttctggctaattataaacgtccaacacggcaccaccgagcagcgaccgcacccaacaagaaccaccaccacaccagatatccatgtgctcgccctccctcttccttctggggcgatataggttattgcgcgttttgcagcaccccctccctggttttgctctgcatcagtttccttggattggatcgatcggacctctcatcagctgttaggtggccacttgtcctatcagcagaaccacagccaaagccagatagatagtcctcatcttcgtcttcggcctcctcaccccttgaggaaaccatcatcggggagaaaccaccaagagcaagagcaagagcagaagctcaacttcttcctccctcagcgtttctcaagaacaataaggtgttgaagtaactacaagatccggtggcgggccacggcacgatgagcaatcttaagcttggtgttgaagttaccagcgctcatgatctcctcccgaaagagcaggacacggccaatccttttgttgaggtcgacttcgacggccagaagttccggacagccgtcaaagacagggacctcaaccctgtctggaacgagcagttctacttcaacatatctgatccatcccgcctcccagagctacaccttgaggcctacgtataccatgcagaccgtgccagtaattccaagtcctgcctgggcaaggttcgcatatcgggcacatccttcgtcagccagcctgatgctatgcccctgcactacccgctggagaagcgcacgatcttatcacgtgcgcgcggtgagcttgggcttagagtcttcctcacagatgatccatcagtacgagtgtctgctgctccagctcagcaggagttcgatatgctaagcacgcctaccactgcgcaggagcagcaggcagcagccaactccatctcaaatcctttccaagagaccagagcaaacccagtgaggcagttccagcacttaccaagagaacagcagcgtcctgcacagccacagccatactacgctgaaggttcatacggagaccagcagcagcaacagagaagcttttctgcggttgcgaacaaagctgcagcccctcagcctcaggttcaggtgtcaaggatgtatgctccaggtccacagcagcctgtagacttccagctcaaggaaacaagcccaacgcttggcggcggccgtgtcattggcggccgggtgtaccctggccagaaggctggggcgtacgaccttgtcgagaagatgcagtacctcttcgtgcgcgtggtcaaggcacgcgacctgcccaacatggacatcactggaagccttgacccttacgtggaggtgcaccttggaaactacaagatgaagacaaagcactttgagaagaaccagaggcctgagtgggacgaggttttcgcgttccccaaggaagtcatgcagtcgacgatgcttcaagtcgttgtgaaggacaaggatgtccttcgggacgactatgtcggccgagtgagcattgatctgaatgaggtccctctcagggtccctccggacagcccactggcaccggagtggtaccgtctgatgggcaaggacggcgtgagggacagaggggagctgatgcttgcagtctggtacggtactcaggcagatgaatgcttcccaagcgccatccatgcaggatcgacaccggttgattcccatcttcacagctacatccgcgggaaggtgtaccccgcgccaagaatgtggtatgtgagagtcaatgtgattgagggacaggacatatacccaatggagaaccgcatacctgatgtgctggtaaaagtgaggctgggccatcaactgctgaggacaaggcaggttcgctcgccgaccagaaacttcatgtggaacgaggagctgatgttcgtggcagcagagccgtttgaggacgacttgctcatatcagtagtagaccgtgtggcacaagacaaagacgaggtgattggtgaggctatcataccgctcgcgaggcttccaaggcgggctgatcacaaaccggtactcccagcatggttcgatctaagaaggccagggatcatcgacgtgaaccagctgaaggaagacaaattctatgcgaaggtaagccttcgtgtctgccttgaaggtggttaccatgtgcttgatgagtccacacagtactgcagcgatctccgtccgacgatgaagcagctgtggaagccaccaatcggcatgcttgaagtcggcatcttaagtgcgaacggtctcaatccaacgaagaccagaaacagccgtgggtcgtgtgatgcgtactgtgttgccaagtatggttccaaatgggtccggacgcgcacgatagttgacagcttgagccctcggttcaacgagcagtacacatgggaggtctttgatcatggaactgtgctcacaattggtctatttgacaactgtcacataagtggagatgataacaaggacggttcctcaggccacatggataaacccatcgggaaagtgaggattcggctttcgacacttgacacggcgcgtgtgtacacgcactcatatccattgctcttcctcagcccatcaggagttaaaaagatgggtgagctccaccttgccatccggttcacagtcacatcccttatcaatgtgctcttcacatactctaggcctctcttgcccaagatgcactacgcacagcctctgtcaatagttcagcaggaaatgctccgccaccaagctgtgctgcttgttgcgcagcgcctgggacgcatggagccaccagtccgcagggaagttgttgagtttatgtcagatgctcgctctcacctgtggagcatgcgacggagcaaagctaacttcttccgccttatgcaagtcttctcagggttcattgctgcagggaaatggtttgctgatgtttgtcagtggaaaaacccggtcaccacagtgctggtccatgtgctctttatcatgcttgtgctctatccagaccttatcctgccaacaattttcctctacatgttcttgatagggctgtggaattaccggttccggccacgcttcccaccacacatgaacacaagaatatcttacgctgatgttgcacttccagatgagcttgatgaggaatttgacacattcccaacctcaaagagcccagatctcatccggatgaggtacgataggttacgacacgttgctgggaggatacagactgttgttggggacattgccactcagggagaaagattacagtcactgctcagctggagggacccaagggcaacagctatgttcctgatattttgcctgattactgcgattatactgtatgtgacaccattccaagtggttgcactctgccttgggttcttcgggatgaggcatcctcggtttcgccacaaggtgccatcagcaccagcaaacttcttcaggaggctacctgcaaagacagattctttgctgtaa

SEQ ID NO: 108997 - DNA, 2125 bp, Zea Mays
aatttggtccccgcttcccttccccctgttcctcgcgttcctgtcaaggctcagcctcgccatcgctcgcggcatcgccgcttgccctccccttccccaagcgaataaagtgccggaagcgcgcgcgtcaagcgaagccctcgcccccgcgctccgctcaggatcgggagccaccccctagggttagggctcggttttgcatcgttccggcgtcgaccgatgcgcggcgcatggcggcggtgaactgcctctacgtcgcggctgcctctacggcggccagcgccgccgcgctgcagtggtgggcatcctcgctcttcgacggcgacgctggcgcgggcgaggatggagcctggctcggagccgtgctgcggtcaaaggtcaccgtcgcgctcctggcgaatctggcggtccacgtgttcctcgtcatcatcctcgcgctcaagactctattttttgttcagctaacttctatagagaccagaaaagtgttggagcacatcattaactatgtaatttacaagggaacttttctcccactggttgtgcctcctacttctcagcaaattatcctttggtcaacttggttggtcattctttgttcgctgaagatgtttcaatcattggccagagaacgtctagagaagctcaatgcttctccctcagtgactccttcaaaatattttcgtgtgtactctgcattgcttctggttttatcagctgatctactttggatgtggctctgtgcagggttttgcagcttctgtaattccaagttgttttggctcctgttctttgagccacttagtattgcctttgatacactgcagtctattatggtgcatgggtttcagttatttgacatctggcagcagcatctaatggaaagtggtgcagacttccttgatttacagaaatcttataagcaagcagcaggatctttttctgaatggaggggcaagcttactaggaactttggttttgccattgatttgataagcttgttgatgtcacttggtcattactcgatgatattttggcttcgtggtatggcgtttcatctggttgatgcagttctcttattgaactcgcgtgctcttatagtttcctttttgaagaggattaaagctcacatcaagttacggaaggcacttagttcactcgatggagcacttccagatgctacgtatgatgaaatttgtgcatatgatgatgagtgtgccatctgcaggggaccaatgggtcgagctaaaaagttgtcatgcaaccatctatttcatctagcttgtttgcggtcatggttggatcaaggactaatggaaggttactcctgtccaacttgtcggagaccgctcttattgtcatctgaagggcaaagaaggtctacaactgcggaggtagcaaatgttcagcgaattgcggaacaacttactatggggatgaatcagcagagagttcctggtaatgaacatcctgttgaacagcagaacccttcagatgctgtttggagaggtgctggtctggatgctagctggattccaccgtggtcaagccctgtgatggaccatccgagttcctccagtgcagtgaggtcagtaggtcttactggagttcagatgatgatgacgcagttggcttctgtcaccgacaattatgggcatgctgatggtacctggaacctatggcctgaaccgatggcagggtcctctcttgttccttccacttcctcgatttccggcactgcatctgcttctggattgcggctccgtggtagtgcaggcataagcaacgggagtctttcggaggtactcactatggtagatagagtgcgggaagttctacctcatatccctgatgagctaatcttagaggatttgatgaggacaaacaacataaacgcgactgtgaataatcttctgctgatgcaatagtagatacgtcaatacaacatataagtgtgacgtttactggctataaaagcttataagaaaagtatgtgtatagctaagggcgagcctgggtgtaacacgtctttggttctgtaataaaagcccttttttctttatttttgtctgcagaggtctgtatagcaaccaatattatcggaataaaatttgttttgctacta

SEQ ID NO: 108998 - DNA, 2015 bp, Zea Mays
aatttggtccccgcttcccttccccctgttcctcgcgttcctgtcaaggctcagcctcgccatcgctcgcggcatcgccgcttgccctccccttccccaagcgaataaagtgccggaagcgcgcgcgtcaagcgaagccctcgcccccgcgctccgctcaggatcgggagccaccccctagggttagggctcggttttgcatcgttccggcgtcgaccgatgcgcggcgcatggcggcggtgaactgcctctacgtcgcggctgcctctacggcggccagcgccgccgcgctgcagtggtgggcatcctcgctcttcgacggcgacgctggcgcgggcgaggatggagcctggctcggagccgtgctgcggtcaaaggtcaccgtcgcgctcctggcgaatctggcggtccacgtgttcctcgtcatcatcctcgcgctcaagactctattttttgttcagctaacttctatagagaccagaaaagtgttggagcacatcattaactatgtaatttacaagggaacttttctcccactggttgtgcctcctacttctcagcaaattatcctttggtcaacttggttggtcattctttgttcgctgaagatgtttcaatcattggccagagaacgtctagagaagctcaatgcttctccctcagtgactccttcaaaatattttcgtgtgtactctgcattgcttctggttttatcagctgatctactttggatgtggctctgtgcagggttttgcagcttctgtaattccaagttgttttggctcctgttctttgagccacttagtattgcctttgatacactgcagtctattatggtgcatgggtttcagttatttgacatctggcagcagcatctaatggaaagtggtgcagacttccttgatttacagaaatcttataagcaagcagcaggatctttttctgaatggaggggcaagcttactaggaactttggttttgccattgatttgataagcttgttgatgtcacttggtcattactcgatgatattttggcttcgtggtatggcgtttcatctggttgatgcagttctcttattgaactcgcgtgctcttatagtttcctttttgaagaggattaaagctcacatcaagttacggaaggcacttagttcactcgatggagcacttccagatgctacgtatgatgaaatttgtgcatatgatgatgagtgtgccatctgcaggggaccaatgggtcgagctaaaaagttgtcatgcaaccatctatttcatctagcttgtttgcggtcatggttggatcaaggactaatggaaggttactcctgtccaacttgtcggagaccgctcttattgtcatctgaagggcaaagaaggtctacaactgcggaggtagcaaatgttcagcgaattgcggaacaacttactatggggatgaatcagcagagagttcctggtaatgaacatcctgttgaacagcagaacccttcagatgctgtttggagaggtgctggtctggatgctagctggattccaccgtggtcaagccctgtgatggaccatccgagttcctccagtgcagtgagggtcctctcttgttccttccacttcctcgatttccggcactgcatctgcttctggattgcggctccgtggtagtgcaggcataagcaacgggagtctttcggaggtactcactatggtagatagagtgcgggaagttctacctcatatccctgatgagctaatcttagaggatttgatgaggacaaacaacataaacgcgactgtgaataatcttctgctgatgcaatagtagatacgtcaatacaacatataagtgtgacgtttactggctataaaagcttataagaaaagtatgtgtatagctaagggcgagcctgggtgtaacacgtctttggttctgtaataaaagcccttttttctttatttttgtctgcagaggtctgtatagcaaccaatattatcggaataaaatttgttttgctacta

SEQ ID NO: 108999 - DNA, 304 bp, Zea Mays
cggtccaacccgagcgagtgaagaagctcccggcgcgcgcgcgcgcaaacgagaggatgtggcgaccagcaaacggcaaggcggcgcagcgggaggaggggaatacgccaccgccagcggggtcgatcggcgggtacgtacgagtccctgcacaggctactggaggccaacctctctccccccgagctttttcaggaagcaagccggttgttgttgggactgaattgtgcacgacctcttgaggctatctcactgcctgacgccacaaccactcctgcagaaacacacaattttgatttgcagg

SEQ ID NO: 109000 - DNA, 1304 bp, Zea Mays
gaattccttaggaccgtagcccatctccgtcctcggacaaacacttttggtgcagttgcaagagtgagaaatactctggcatacgcaactcataaattctttcaagacaatggatttgtttgggtttcgagcccaattattacggcctcagattgtgaaggagctggggagcagttttacgtgactactttgctttcaaacagcgctgatggtggttctctactcaaagatattcctgctaccaaggatggaagggttgattggtcacaggatttcttctgcaaaccagcatttctgacagtgtctggacagcttaatggtgaaacatatgcttcagctctatctgatatttacacatttggtccaacgtttagggctgaaaattcaaacacttcaagacatctggctgaattttggatgattgaacctgagcttgcctttgcggatctgaacgatgacatggcttgtgcaactgcatatctccagtatgtagtaaagtatattctggagaactgcaaagaggatatggatttcttcaatacttggattgaaaaaggcatcatagatcggttaaatgatgtagtagagaagaacttcgttcacctgtcttacactgatgctgttgagctacttcttgggtccaagaaggaattcgagttcccggtaaagtggggtttggatcttcaaagcgagcatgagcgatatatcacagaagttgcctttggtgggcgccctgtaataattagagattacccaaaggagatcaaagctttctatatgagagaaaatgatgatgggaagacagttgctgcaatggatctgttggttcctcgggttggtgaacttattggaggaagccagagggaagagcgtcttgattaccttgaagcccggttggacgagcaaaatctgaataaggagagctactggtggtatttggacctacgacgatatggatcagttccacacgctggtttcggtctcggatttgagcggcttgtacagtttgctactggaatggacaacatcagagacaccatcccatttcctcgagttcctggctctgccgagttttagcgccctgaaagtgttgtcgtatacgtatactttagaaacattctttcctaggatgtaatgtgagaaaggcatacgttgtactgtactactgtttcatcattgtacagagttaagctgagacttgtgattaatcggaggcaagcagtgctgtggcaagctttgtcgtttgttgtaattgtcgtcaaagaatgtcactggtggatgatgcaattttttcacgggtaaga

SEQ ID NO: 109001 - DNA, 1297 bp, Zea Mays
gaattccttaggaccgtagcccatctccgtcctcggacaaacacttttggtgcagttgcaagagtgagaaatactctggcatacgcaactcataaattctttcaagacaatggatttgtttgggtttcgagcccaattattacggcctcagattgtgaaggagctggggagcagttttacgtgactactttgctttcaaacagcgctgatggtggttctctactcaaagatattcctgctaccaaggatggaagggttgattggtcacaggatttcttctgcaaaccagcatttctgacagtgtctggacagcttaatggtgaaacatatgcttcagctctatctgatatttacacatttggtccaacgtttagggctgaaaattcaaacacttcaagacatctggctgaattttggatgattgaacctgagcttgcctttgcggatctgaacgatgacatggcttgtgcaactgcatatctccagtaaagtatattctggagaactgcaaagaggatatggatttcttcaatacttggattgaaaaaggcatcatagatcggttaaatgatgtagtagagaagaacttcgttcacctgtcttacactgatgctgttgagctacttcttgggtccaagaaggaattcgagttcccggtaaagtggggtttggatcttcaaagcgagcatgagcgatatatcacagaagttgcctttggtgggcgccctgtaataattagagattacccaaaggagatcaaagctttctatatgagagaaaatgatgatgggaagacagttgctgcaatggatctgttggttcctcgggttggtgaacttattggaggaagccagagggaagagcgtcttgattaccttgaagcccggttggacgagcaaaatctgaataaggagagctactggtggtatttggacctacgacgatatggatcagttccacacgctggtttcggtctcggatttgagcggcttgtacagtttgctactggaatggacaacatcagagacaccatcccatttcctcgagttcctggctctgccgagttttagcgccctgaaagtgttgtcgtatacgtatactttagaaacattctttcctaggatgtaatgtgagaaaggcatacgttgtactgtactactgtttcatcattgtacagagttaagctgagacttgtgattaatcggaggcaagcagtgctgtggcaagctttgtcgtttgttgtaattgtcgtcaaagaatgtcactggtggatgatgcaattttttcacgggtaaga

SEQ ID NO: 109002 - DNA, 1188 bp, Zea Mays
gaattccttaggaccgtagcccatctccgtcctcggacaaacacttttggtgcagttgcaagagtgagaaatactctggcatacgcaactcataaattctttcaagacaatggatttgtttgggtttcgagcccaattattacggcctcagattgtgaaggagctggggagcagttttacgtgactactttggatttcttctgcaaaccagcatttctgacagtgtctggacagcttaatggtgaaacatatgcttcagctctatctgatatttacacatttggtccaacgtttagggctgaaaattcaaacacttcaagacatctggctgaattttggatgattgaacctgagcttgcctttgcggatctgaacgatgacatggcttgtgcaactgcatatctccagtatgtagtaaagtatattctggagaactgcaaagaggatatggatttcttcaatacttggattgaaaaaggcatcatagatcggttaaatgatgtagtagagaagaacttcgttcacctgtcttacactgatgctgttgagctacttcttgggtccaagaaggaattcgagttcccggtaaagtggggtttggatcttcaaagcgagcatgagcgatatatcacagaagttgcctttggtgggcgccctgtaataattagagattacccaaaggagatcaaagctttctatatgagagaaaatgatgatgggaagacagttgctgcaatggatctgttggttcctcgggttggtgaacttattggaggaagccagagggaagagcgtcttgattaccttgaagcccggttggacgagcaaaatctgaataaggagagctactggtggtatttggacctacgacgatatggatcagttccacacgctggtttcggtctcggatttgagcggcttgtacagtttgctactggaatggacaacatcagagacaccatcccatttcctcgagttcctggctctgccgagttttagcgccctgaaagtgttgtcgtatacgtatactttagaaacattctttcctaggatgtaatgtgagaaaggcatacgttgtactgtactactgtttcatcattgtacagagttaagctgagacttgtgattaatcggaggcaagcagtgctgtggcaagctttgtcgtttgttgtaattgtcgtcaaagaa

SEQ ID NO: 109003 - DNA, 429 bp, Zea Mays
taagcttacagccccacaccgccggccaccgccaccgcctcgctgccgatggcggccgccgccgccgcccggatcctccgcctggccccgcgccggattcaggttcccaagacctccccgctcgccgcactctcgttcccactccctcgaacggcgccgatcgccgctgcctcgggaaggcggcagcgcttctgcgccgtggcgcaggcccccgcccccgcagccgcggcgacaggggcggcgggagaggccgtgggggagttcaggaagcggctgcgggtggcggacgtgaagggcggggaggacgagggcgccgcgtgggtgggcaaggagctcgccgtgcgcgggtgggtgcgcacctgccgcgcccagaggaccataaccttcgtcgaggtgtcacatctgcaactccatttgctatggttttga

SEQ ID NO: 109004 - DNA, 604 bp, Zea Mays
ccctcctcggtccataccatgctcgtcgatccacactgacaccatgctatggaggagtatgcagctctagtggccaaccacaactgggaattggtgtcgtgtccctctagaaccatggtcaccgacaagtagatcttccatcataaactcaaggctgttggtactttggatcgctacaaagcctgttgggtccttcagggcttcactcagcaccccggagtggactacgacgataccttcagtcctgtcgtcaagaccgccaccatttggaccgtcctctccctcgccctctctagggatcgggcgggtccactagctggacatcaagaatggcttccatcacggcactctgaccgagacagtgtactgcagccagcccaccggcttcgtcgactccactcgcccgagtatggcatgtaagcttgaccgctctttgtatggcctcaagcaggcaccgcaggccagatatagtcgcttcgccacctacatggtctccctcggcttcatcagggccaagttaggcatgtccctgttcatccttcggcacgacgacgacaccatctacctcctatacatcgacgacatcgttctcatgacctccagc

SEQ ID NO: 109005 - DNA, 504 bp, Zea Mays
atgggggctgcacggcatcgtcctcgccaacgccggaaccccgactccgctgccagcgcgcccccatcggtgaccgcacccctgcagcggtcgcgttccctgtggccaacgagcgtcgtcgccgcaggtcaccaccccatctctggcgtcctctccggcgaccccaaccgcgtcgacttcatcaccggtgctcttggcatccctcctggcacgctcacctccaatagcgacgcgtacgcggctcctcccgcgttcctcgctgccctctacgtggctgcactgcgggccaccacacccacgacctacgacgccgcagcgcgtcgcgccgaactcctagctccgcacttcccatacctgagtgcgggtcatgacactcccgccctgcctagggtcgcgcgggggttcgacattccgcctcccgtctacaaccacccgtcggttctcaccactactcagcatcctcgtgctcccgacatcactgtcgccctcgccgctacccattag

SEQ ID NO: 109006 - DNA, 318 bp, Zea Mays
atgcctacgcataggtctgtaggacagatggagatgatcgagaagacaaagccttcttgtgttttggaattcaccaccaagatggcgcgtgaagagctaactctccatcgtgccctgttcataacagttgatgggactaggccggaggtgcttggcgttgaggtgttagaagttgctcataattttgatgtcaatattgaagccatgtggattcatcaagtcctgccagaggatttcctcttgattctacctaatgaagcaactgcttcaagggtgctcaatgatggcaaggcatacaggggcctcattttagtctga

SEQ ID NO: 109007 - DNA, 1044 bp, Zea Mays
tacatttttgacactgttgtgcttgcattccagcttcaatctattcacgtcttatctcgtttaagaatcagtcaatcggattccaagcattcttcttaaaacatttagttgctatcaacttccttgttcttgacttctcgttcattaaaaaacttcacaatcagtgaatatagtcattctctaactgcaggtttggtgatcatttcatttggtccaagttattcatatacccttctaaaattactctatggggaaagacacagtgatggagaggctccagttattcttcgttactattgtttatatatcatcagtttagcaatgaatggcacatctgaagcctttcttcatgctgttgcaaatgaaaaccagcttaagcagtcaaatgatatgttgcttctgttctcggtgatttacatcattctaaatgttgttcttattaaatcttctggagctgttgggttaattgctgctaatgccattaatatgttgcttcgaatatcatattctgcagtatttataaaagactatttcaagggctcattctctttccggcgctgtgtgcctgcgggctggggcattttactcatttctggtctgaccactgttttctctgagagggttttcttgaacaaaacgaggttcaagcagactgttcccattcacatagcgattggcatcatgtgcttgagcatcgcgttacttgagatataccgtggcgaaaagcagttcttgatgcaaataatcagaactttgaagcataatgacaaaagccagtgatttgaagacacagcgcatttcatagcgtattctctctggaacgcctgatgaaagagagctggtagtatagtgggtgggtaatttggtgtgtatgcaggagatcgggagttaacagaagaggggggattaatcggtcagatagataaatcggttgcgtatgggaattgctggatttcttgttgacccaatatttatattacaggtttattgagctagtgattcaataatttataattaaatgaagaagtttaggttccttttgtt

SEQ ID NO: 109008 - DNA, 2287 bp, Zea Mays
ccagagcatccaatctagatccaacggtttcatatggaaggggttaaaagtaaaataggtactatgttttaggtggaaggggttaaatataaaataacagtcatcattagatttagatcggatgtaccagatcgcttgattgcatgcttgcaccaggataagtgattgcataggatatttcccccttagtgacaatgcctatgtacgaagagtcaaaggttctcaggaatgaacggtccggatcgcgttttaaggggcgagggccgagtccaagctgacacgcgccgctgcccgatctcccggtgtttgtttttgctgcatccgccggactctcgccgccgcgctcgacttcctgccgccgcctgggccgactcctccgtccgcgcgaaacaccggccggccgaggcgcaactcagtaagccggcgcgatggatgatgcggcacttctctccggagcaggggtggctgccgccgcgccgccccatgcggcggctgccggagccgccgtgatgggcgtcttcaagtacaacttcgcggcgcagttcctctcgaggattatccctttcgtatttaacatctggttcgtgcgccagctcggggcggacgatggcgctgtgtcggcatttgcactgcagcttcctctatttatgaactgcatcttatttttaagccgggaggggtttcgacgtgcatgtttgcgtaatgattcccagagtgatgtgttgacttctgaagcgatactaatggtcgcttggatggtaattccagtgtccatcttaattacttctgttggcagcatacttgtgttgagtttaaagagagtgaagctatctgacccctatgcgaaagctgtattgatcatcggatttgcttgtattctggaattactggcggaaccattatacattatttcccagaaaaagaaatactataatataagagtgtacgttgaaccgacagctacactcttccgttgtttaacaactttcatcctcataaaaggacatattaaagtgaacaagctggttctagtttctctgtcccaggttgtctatggggcctgcattctctttggatattggtcatattttcttatgtatactgatactaaaccttcagatctttttccgttaaggttatcaaacctgatggactacgataaacagttattgcacatgtgcatgttgtttacaggccaggctttcaggaagttgatactccaagaaggcgagaaatttgtccttgtgttatttgatactccatacaaccaggccgcatatggtattgtggataaactagggagtctggttgttaggatagttttcttgccatttgaagagagttcatatgccacttttgcccgattggcaggagagagtccccgaaatatatccaatattgaagactctttgcttggtgcgcttaagcttattatgctaataggtttggtgatcatttcatttggtccaagttattcatatacccttctaaaattactctatggggaaagacacagtgatggagaggctccagttattcttcgttactattgtttatatatcatcagtttagcaatgaatggcacatctgaagcctttcttcatgctgttgcaaatgaaaaccagcttaagcagtcaaatgatatgttgcttctgttctcggtgatttacatcattctaaatgttgttcttattaaatcttctggagctgttgggttaattgctgctaatgccattaatatgttgcttcgaatatcatattctgcagtatttataaaagactatttcaagggctcattctctttccggcgctgtgtgcctgcgggctggggcattttactcatttctggtctgaccactgttttctctgagagggttttcttgaacaaaacgaggttcaagcagactgttcccattcacatagcgattggcatcatgtgcttgagcatcgcgttacttgagatataccgtggcgaaaagcagttcttgatgcaaataatcagaactttgaagcataatgacaaaagccagtgatttgaagacacagcgcatttcatagcgtattctctctggaacgcctgatgaaagagagctggtagtatagtgggtgggtaatttggtgtgtatgcaggagatcgggagttaacagaagaggggggattaatcggtcagatagataaatcggttgcgtatgggaattgctggatttcttgttgacccaatatttatattacaggtttattgagctagtgattcaataatttataattaaatgaagaagtttaggt

SEQ ID NO: 109009 - DNA, 347 bp, Zea Mays
ctttttgtaaatttattaattcacatgcatcatatatgtaccaaagactcatgtaaactggatatatgtaaactggatatgttctcattttacaccatccacgatcaactgaggacaaacttattactttactagtcggttgcccgtgcgttgcgacggcttacaacaatacccacgtaaactatccataaaaaacttcaagattttttattaattgtctccgctctctgtataatatttttttgatttggctaaccgatgttattgtttactccatgcaatatgtcttggtacaacacgaccaatgaagtgagcgattagaaaagagttcacaacgactgactgaa

SEQ ID NO: 109010 - DNA, 484 bp, Zea Mays
caaacaggtcccacgtggcagtatttgatgttgtatccacaatttttggaggcggtttcagggttaacttgaggtggttacgcaaatctgtgccagcatcaccttgccgccacatgatcaaaggcgcaaattccacagcaaggctgcgggagtccatctacattgcatacaaaaaaaaacttgtcaaacaccaccacaaaggtgattcagtagtattagttaggaccacgagaccaactccagaaatacagaaactaaagcagcattctttacatatgtaaattactaaactgtgaaatactttactgcgaaaagatatacaatgtggtttatcaatctacactctacagacaaaacagaacaagatcatttagtcagtatattcatgtccatacctgtcacaactcacaaccctatttaagacagctaagcacgtgtgaatgtgtatcagaatcccatctgtttgctacattgctcatgtttt

SEQ ID NO: 109011 - DNA, 309 bp, Zea Mays
atggcgcaggcgccatttcccatggccgagctcccccaactagccgtcgttctccctgctcctctgtccctagtgcacggcagcggccagggcaccatctccgagttgccctccatggctactccctctccgtggcaagcgcggcttccccaagcctcggtgctcggcgctctggccatggacgcccaggtcctcgcccctgctgctgctctacgtgaggtggaagaagaaccgtgtgtgccaatgacgtgtgggcccaaggccatgggtaagattgctgaaagtttcagacctttgtcctttctttaa

SEQ ID NO: 109012 - DNA, 1686 bp, Zea Mays
cacacggccacaccccgacaccggcatggccacatccctttcccttaaatagacgccatcgccgccgagccgcgcattgggatcgtgcggcaatggcggcggcggcggcggcgcacgtgctggtgttcccggcccctgcgcagggccacctcaacagtttcctccacttctccacggggctcctccgcgcgggcctccacgtcaccttcctgcacaccgaccacaacctccgccgcctcggtactgctgccgccgaggctacggtcgcctcgccgcgtctccgcttcctatccgtgcccgacggcctccccgacgacgacccgcgcaccgtcgacggcctcccggagctcatggagtccctgcgcaccaaggccagcgcctcgtaccgcgcactgctcgcctcgctgcgcgcgggaggcggaggcttcccgccggtgacgtgcgtcgttgccgacggcataatgccgttcgtggtcgacgtcgcagaggagcttggagtcccggcgatctccttccgtacggtgagcgcgtgcgcggtcctggcgtacctgtccgtgcccaagctcatcgccctcggcgagctccccttccccgaaggtggcgacctcgacgcgcccatccgcggcgtcccggggatggagagtttcctgcgtcgacgagacctcccgatccagttccgccagctcaccagcacgtacgaggagcccttggtagcggcggtggtcgcggccaccgtgcacagctgctgcaaggccagagctctcatcgtcaacacgaccacgtccctggagaggtcatccctcgggcacctcacgcaggagatgcgcgacgtattcgccgtcgggcctctgcacgccatgtcccccgcgccggcggtggcctcgagcctgtggcgccccgacgacgggtgcatggcgtggctcgacaaccagcaggcggagcgggccgtggtgtacatcagcctgggtagcctcgccgtcatctcccacgagcagttcaccgagttcctgcacgggctcgtcgccaccggctacccgttcctctgggtgctccgcccggatatgctcgtggccagccaggacgccgcgctccgggaagccatcggcgcggtcgggaaagacagggcgtgcgtcgtgccgtgggtgccgcagcgagacgtgctgcggcaccgcgccgtggggtgctttctgacgcacagcgggtggaactcgacgatagagggcatcgtcgagggcgtgcccatggtgtgctggcccttcttcgccgaccagcagatcaacagccgcttcgtaggcgccgtgtggaggaacgggctggacatgaaggacgtgtgcgacagagttgtggtggagagcacggtgagggaagcaatggagtccgaagagatcaggaggtcggctcatgctctggcggagcaggtgaagcgtgacgtcgccgacgacggggcatcggcgttggaattcaagcgcctcatcagcttcatcacggagctcagcacgtcagcagcacagggaaccccatcttcaaaatcgtgaagtgaatgaatgaatcgaaagtaaacttgatagatacgcaccggattcaacaaccggctgaggggtgttttggaatgttatttttgaaggaatttctattttctcaatagaaaatgaactaatctctctgcgtaaaatgaaaatcccttag

SEQ ID NO: 109013 - DNA, 241 bp, Zea Mays
atgtttgcatcgtttgactcaatgatggcctttctgatctcattcatattccgagttccattttccttttgcctcaatgatggcttttctgatctcattcgttttccgatgcataaaaagtcatatttcttggtctaggtatctctctttgcaaatagagatgccgaggcccctacttaccttctgggttttaggggggaagaagagtgggttagcgggcttctttcactgtgtcttttga

SEQ ID NO: 109014 - DNA, 871 bp, Zea Mays
caattgatgtaggagctccctagccatctcaagctgcagctctgtgcactatattttgacttgggccaaagctaaagtacactgatttgaaacggatggagaacgtgatagatgtattgctgtctttctttcacgatagaagtttctggcattgtgtgtgatgggtacatgtattgaatgctagaaatatttatgctgaggaaggttcagaggctatggatgtggctgctgcccctgctgtccaggcattggcaagatacacacgaagggaggcaacttgcctatcattgactggcaaagattctatgttctcggggaacttcaaattcacagctctgctgccggcaactcccagtcccagcccaaagaagcctgtgcgatgaactgccgtggtacgtccacatttcacgcgaaggtttagaaaacagcaggatcggtggatacctgctgttctctcagcagtacaaataacaggcttcttccagcagttgtttactctggggtccccacgattcaaacccttttgatggatatacttcgttccagataggaagtttgttttgttaatctctagtctcgagtatttgctctaggagaccacccaccagaacggagccttcttgtcgccggaccaggcatcgattcgcacactgtatgaggcgatgctgaaagaaaaaaaaaaggaaggcagcaccgatgttcggtcattaatatgcagtttctttcggctgcatgtgtctcttatgtagagtaaaactaatttattctcgcatatagaatcatactataccggacatcaattgatgatgtgaaccgtatgcaagatcatcgccatctactgtagtatgtgacagtgtaagttgtttttttt

SEQ ID NO: 109015 - DNA, 1214 bp, Zea Mays
gcagtcgcaccacttgcacacgggcggccaccgcacatcagcacttttacgagccctcctatctctcgatttctcgcgcagcggccctccccttctctcgccgccgccgccgcgtgttccgtcgtctcctctcaccgatggcttttgctaaggtcggtgctgcgacgcaattggagaacagaggcgcgctgtcgaaaaggttacgcaacgacgtgtctgtaagggagggggactggaattgtcctcagtgtggtaatgtcaacttcagttttagaaatgtttgcaaccgtggagcctgtggtgcaccccgtccatcaccgagtccaagtccaagaatgatgccagcacctcctgctcctggatatgaccgactacctctgttttacggaggaggtggtggcgctccatctccaatttcacttggatctggtagctatggtggtccatatccacaccttgggatgcgatatggttatggtccaccagtaggagctcctggttcatatggccttttctcgtcatatggtcaacctgggccaatgagtggtatgggatatggcccaggacctgagctaggccgatatagctatgggtttagaggttctccaatgccggtttctagcccatggtctggtggagcaatagctgaaaacaatgacaacattgcttcacgaaagcgccgtggaggccctgatggactttctgagggtgactggacctgtcccaaatgcgacaacattaacttttccttcagaaacacttgcaacatgaagaaatgtggagctccgaggccaactcctggagctaacacgagctcatctaggaaggacaataaggaagcccctgaaggaagctggacctgtccagagtgcaataacctgaactacccgtttcgttcggtgtgcaacaggaaaggatgctcgtacaacaagtcagccccgacgaataactgaacctaacctccgcacagcgcaccatattgttgagacgtgtcgtcgaactattcttgtatccttagattgtatcctagctagtcgtgtgtaatctttgaactgcacaaaaatgtgtgcctggagacgagcgaatatattcattacgtttaatttgttcgttatgtttaatttacttgctatactttctatgttcgaaattataagtcccgtcattgttcccaacacagtttaaaaatagaagattcatttttttcttgcgct

SEQ ID NO: 109016 - DNA, 1263 bp, Zea Mays
actcgcagtcgcaccacttgcacacgggcggccaccgcacatcagcacttttacgagccctcctatctctcgatttctcgcgcagcggccctccccttctctcgccgccgccgccgcgtgttccgtcgtctcctctcaccgatggcttttgctaaggtcggtgctgcgacgcaattggagaacagaggcgcgctgtcgaaaaggttacgcaacgacgtgtctgtaagggagggggactggaattgtcctcagtgtggtaatgtcaacttcagttttagaaatgtttgcaaccgtggagcctgtggtgcaccccgtccatcaccgagtccaagtccaagaatgatgccagcacctcctgctcctggatatgaccgactacctctgttttacggaggaggtggtggcgctccatctccaatttcacttggatctggtagctatggtggtccatatccacaccttgggatgcgatatggttatggtccaccagtaggagctcctggttcatatggccttttctcgtcatatggtcaacctgggccaatgagtggtctgtgtttcttacacacttgatagttgcagttattcaacattttcttgattgccttttttttggtaattgttgcaggtatgggatatggcccaggacctgagctaggccgatatagctatgggtttagaggttctccaatgccggtttctagcccatggtctggtggagcaatagctgaaaacaatgacaacattgcttcacgaaagcgccgtggaggccctgatggactttctgagggtgactggacctgtcccaaatgcgacaacattaacttttccttcagaaacacttgcaacatgaagaaatgtggagctccgaggccaactcctggagctaacacgagctcatctaggaaggacaataaggaagcccctgaaggaagctggacctgtccagagtgcaataacctgaactacccgtttcgttcggtgtgcaacaggaaaggatgctcgtacaacaagtcagccccgacgaataactgaacctaacctccgcacagcgcaccatattgttgagacgtgtcgtcgaactattcttgtatccttagattgtatcctagctagtcgtgtgtaatctttgaactgcacaaaaatgtgtgcctggagacgagcgaatatattcattacgtttaatttgttcgttatgtttaatttacttgctatactttctatgttcgaaattataagtcccgtcattgttcccaacacagt

SEQ ID NO: 109017 - DNA, 1536 bp, Zea Mays
cgaagtctacatgataggtgccgactgctgagacagagtacggtcgcgagagtgaaggcaaggaaaaacacccaaacggcccaaccccaggaagccccgtcggaccctacagaccctaaccctagcgctcccgacgcgccgcggagcgatggcgatggacgcggagcggcggcaggcggagctgatcgcgcagttctccgctcaggcggcggcgctttcgtccgcgccccagctcgccgcgctggtgcttgaggccacctcccacccggccctcttcgccttctccgagctcctcaccctcccggccctctccaagctcactggcacgcagtacgcgtcgtcactggacttgctccggctcttcgcctacggtaccctgaatgactacaagagtaattctggattccttccagcactgttgcctgaccaggtccgaaagctaaagcagctcagcgtgctaactctggcagagtcaactaagatactaccatatgatcagctcatgcaagagttagacgtttcaaatgtaagagaactcgaagatttcctaatcaatgagtgcatgtattcgggtatcgttagaggcaaactggatcagctgagaaggtgctttgaggtacaatttgcagctggaagagatcttacacctgatcagctaaagaacatgatagagactttgtctgattggttggggacatcagatagactgttgcatcaaattcaggagaaaatcaagtgggctgacacaatgagtgaggtgaacaagaagcaccagaaagaatttgaagacagagtggaagaggccaaaaaatcaatcaagaagttaaacaatttaagcaggcagacattgacttacgggggcatgacgagtttctctctgaatctggaggaataatggattttgaagaggaccgcgtccgaccaaaaaggaggaggcaaccaccggcgtagtttcaattagcccttaccaatctctcccagaatgggacctgctgataccttgattgagacattttgacgccggagttgagtaaactttgtacatctgtcgtgtgatgcctccactgtagcgagtctgtttattttgccttctggtcttggtggggacgtacaaggccaaacctaggcgttatgttgcatttatttggtagtaaatggcccatggaagaaataacgttgttatgattatggcactgggttattctcaagtgtactgaacgataacagaagcacctctgttaaatgatgattgactcgaggcttgctgacttgctgctctagaggagttagcatagctgctcaggtatacaaactgccatcatttactctgcatgcaaaagagaaccaacttttgctgaatgacaattgtgcaagacatagatcacgaaaaagaaaacgatgaacgcataagcatgttgaaatggatttcagattatttgcgttttctttcccacagttttatcttcgtcacgagaagagaaggcaaatctgaattctgcgcgaaacgttggtaatgtacttgttggaaaaaagaaa

SEQ ID NO: 109018 - DNA, 1516 bp, Zea Mays
cgaagtctacatgataggtgccgactgctgagacagagtacggtcgcgagagtgaaggcaaggaaaaacacccaaacggcccaaccccaggaagccccgtcggaccctacagaccctaaccctagcgctcccgacgcgccgcggagcgatggcgatggacgcggagcggcggcaggcggagctgatcgcgcagttctccgctcaggcggcggcgctttcgtccgcgccccagctcgccgcgctggtgcttgaggccacctcccacccggccctcttcgccttctccgagctcctcaccctcccggccctctccaagctcactggcacgcagtacgcgtcgtcactggacttgctccggctcttcgcctacggtaccctgaatgactacaagagtaattctggattccttccagcactgttgcctgaccaggtccgaaagctaaagcagctcagcgtgctaactctggcagagtcaactaagatactaccatatgatcagctcatgcaagagttagacgtttcaaatgtaagagaactcgaagatttcctaatcaatgagtgcatgtattcgggtatcgttagaggcaaactggatcagctgagaaggtgctttgaggtacaatttgcagctggaagagatcttacacctgatcagctaaagaacatgatagagactttgtctgattggttggggacatcagatagactgttgcatcaaattcaggagaaaatcaagtgggctgacacaatgagtgaggtgaacaagaagcaccagaaagaatttgaagacagagtggaagaggccaaaaaatcaatcaaggcagacattgacttacgggggcatgacgagtttctctctgaatctggaggaataatggattttgaagaggaccgcgtccgaccaaaaaggaggaggcaaccaccggcgtagtttcaattagcccttaccaatctctcccagaatgggacctgctgataccttgattgagacattttgacgccggagttgagtaaactttgtacatctgtcgtgtgatgcctccactgtagcgagtctgtttattttgccttctggtcttggtggggacgtacaaggccaaacctaggcgttatgttgcatttatttggtagtaaatggcccatggaagaaataacgttgttatgattatggcactgggttattctcaagtgtactgaacgataacagaagcacctctgttaaatgatgattgactcgaggcttgctgacttgctgctctagaggagttagcatagctgctcaggtatacaaactgccatcatttactctgcatgcaaaagagaaccaacttttgctgaatgacaattgtgcaagacatagatcacgaaaaagaaaacgatgaacgcataagcatgttgaaatggatttcagattatttgcgttttctttcccacagttttatcttcgtcacgagaagagaaggcaaatctgaattctgcgcgaaacgttggtaatgtacttgttggaaaaaagaaa

SEQ ID NO: 109019 - DNA, 1471 bp, Zea Mays
cgaagtctacatgataggtgccgactgctgagacagagtacggtcgcgagagtgaaggcaaggaaaaacacccaaacggcccaaccccaggaagccccgtcggaccctacagaccctaaccctagcgctcccgacgcgccgcggagcgatggcgatggacgcggagcggcggcaggcggagctgatcgcgcagttctccgctcaggcggcggcgctttcgtccgcgccccagctcgccgcgctggtgcttgaggccacctcccacccggccctcttcgccttctccgagctcctcaccctcccggccctctccaagctcactggcacgcagtacgcgtcgtcactggacttgctccggctcttcgcctacggtaccctgaatgactacaagagtaattctggattccttccagcactgttgcctgaccaggtccgaaagctaaagcagctcagcgtgctaactctggcagagtcaactaagatactaccatatgatcagctcatgcaagagttagacgtttcaaatggtatcgttagaggcaaactggatcagctgagaaggtgctttgaggtacaatttgcagctggaagagatcttacacctgatcagctaaagaacatgatagagactttgtctgattggttggggacatcagatagactgttgcatcaaattcaggagaaaatcaagtgggctgacacaatgagtgaggtgaacaagaagcaccagaaagaatttgaagacagagtggaagaggccaaaaaatcaatcaaggcagacattgacttacgggggcatgacgagtttctctctgaatctggaggaataatggattttgaagaggaccgcgtccgaccaaaaaggaggaggcaaccaccggcgtagtttcaattagcccttaccaatctctcccagaatgggacctgctgataccttgattgagacattttgacgccggagttgagtaaactttgtacatctgtcgtgtgatgcctccactgtagcgagtctgtttattttgccttctggtcttggtggggacgtacaaggccaaacctaggcgttatgttgcatttatttggtagtaaatggcccatggaagaaataacgttgttatgattatggcactgggttattctcaagtgtactgaacgataacagaagcacctctgttaaatgatgattgactcgaggcttgctgacttgctgctctagaggagttagcatagctgctcaggtatacaaactgccatcatttactctgcatgcaaaagagaaccaacttttgctgaatgacaattgtgcaagacatagatcacgaaaaagaaaacgatgaacgcataagcatgttgaaatggatttcagattatttgcgttttctttcccacagttttatcttcgtcacgagaagagaaggcaaatctgaattctgcgcgaaacgttggtaatgtacttgttggaaaaaagaaa

SEQ ID NO: 109020 - DNA, 1686 bp, Zea Mays
cgaagtctacatgataggtgccgactgctgagacagagtacggtcgcgagagtgaaggcaaggaaaaacacccaaacggcccaaccccaggaagccccgtcggaccctacagaccctaaccctagcgctcccgacgcgccgcggagcgatggcgatggacgcggagcggcggcaggcggagctgatcgcgcagttctccgctcaggcggcggcgctttcgtccgcgccccagctcgccgcgctggtgcttgaggccacctcccacccggccctcttcgccttctccgagctcctcaccctcccggccctctccaaggttcgcgcactgcccttggcgtgcgccctgctacgttactccgggacccgctgccggactaggttttgggtttcattatctgtttgtcttcgcgtcgattaggtggtgtgtggcgcgatctgacgcgggtttgtttgtttatcggcgcagctcactggcacgcagtacgcgtcgtcactggacttgctccggctcttcgcctacggtaccctgaatgactacaagagtaattctggattccttccagcactgttgcctgaccaggtccgaaagctaaagcagctcagcgtgctaactctggcagagtcaactaagatactaccatatgatcagctcatgcaagagttagacgtttcaaatgtaagagaactcgaagatttcctaatcaatgagtgcatgtattcgggtatcgttagaggcaaactggatcagctgagaaggtgctttgaggtacaatttgcagctggaagagatcttacacctgatcagctaaagaacatgatagagactttgtctgattggttggggacatcagatagactgttgcatcaaattcaggagaaaatcaagtgggctgacacaatgagtgaggtgaacaagaagcaccagaaagaatttgaagacagagtggaagaggccaaaaaatcaatcaagaagttaaacaatttaagcaggcagacattgacttacgggggcatgacgagtttctctctgaatctggaggaataatggattttgaagaggaccgcgtccgaccaaaaaggaggaggcaaccaccggcgtagtttcaattagcccttaccaatctctcccagaatgggacctgctgataccttgattgagacattttgacgccggagttgagtaaactttgtacatctgtcgtgtgatgcctccactgtagcgagtctgtttattttgccttctggtcttggtggggacgtacaaggccaaacctaggcgttatgttgcatttatttggtagtaaatggcccatggaagaaataacgttgttatgattatggcactgggttattctcaagtgtactgaacgataacagaagcacctctgttaaatgatgattgactcgaggcttgctgacttgctgctctagaggagttagcatagctgctcaggtatacaaactgccatcatttactctgcatgcaaaagagaaccaacttttgctgaatgacaattgtgcaagacatagatcacgaaaaagaaaacgatgaacgcataagcatgttgaaatggatttcagattatttgcgttttctttcccacagttttatcttcgtcacgagaagagaaggcaaatctgaattctgcgcgaaacgttggtaatgtacttgttggaaaaaagaaa

SEQ ID NO: 109021 - DNA, 950 bp, Zea Mays
attcacctacccccctagctgccaccttcttctttttttccctgtcttcttccacacggcgtgcagcagggagctcagctccacctccctgcgtgctctctgcctcccatggccgacggcctccgcagcgcagcagccatggacgagcttcttttctcccctgctgttcccctgcgtgcagggagcaccaaggccagcgcccccttctccaatggcgtccttgctgcaggatgcgcagaaacttctccatggcgccccctgcttcttcctcccgcagcacggcagcaagcagccattcccatggccgagcttacctccctgccgcgagctctctctggctccttccccaagtccgactggagcttgcctcctccatggccggcgcccagcaacagtagcagccgggtcttcgtcctccctctgctgtccgcggcatgcagcaaacagggagctcgagtttcttccatggctgccaacctcctctgcccccttgctgtcccaccccttctccctcaagccagcaccttccccgaccacatctccatgaccgagcagcagctctgctcgcccccctccttctttttcccttgcgcagcagcaagaagcccctgctcgcagccttggcgtccaacttcgctgcgcagtggtgccgatccaaaacagcggccccggatcacctccgcactgcgtgcttcaccggatctgcgcagccccaacatcgacgccgttcacctcggtgagacgacgacgacctttgtttgattccgtattggcaatgttcttcggtgattaattatgtatgtgtgctgctttgttttatttttgtggaggagagaaccccgtgttttgcgtggagaaggcaagccgctcgacgctcgtcggatgtttggagcaatgcacaaatcagaatcaccgtcattcttgcaaacaccgtttgggtttgtttatgg

SEQ ID NO: 109022 - DNA, 899 bp, Zea Mays
gctatctcttcctttctcttgcagcaaaaaggtctcaaagtctcttgagagtgactttagcaataaaatgaaccagctgttgctaatagttctgcaaaaacaaaggcaacaacagatgatggatggttttggaggatactatgatgaatgcatgtactggagacaaaatgatgaaattcatgatgctcataaggaggcatctgctccatgttcatcagctcctgtctcacatcttggtgctcatcagcaagagtgttggcagcactcttcatatggaagtcaacatcacgataaccaaaatttacttgaaatggaagtcagggtaaggggtgaaatgtcccagattcaacatgaaatatatgaactgcagaagttggtggaaagttgtattgcatcccaagtaaagatgcagcactccattaaagaagaggtgtgcagtgcacttcgtgaggcaggcttgatgccaaaccaacccgacacaacagcagcaaaagggggtaattgctgcatctgccatcgaatgcaagttgactctctactttacaggtgtgggcatgtgtgcacctgttttgactgcgccggtcagctgaaatcgagcggcaggagttgcccaatatgtcagactcctattgatgatgttttccgggcgcagctgaatttttgagcttaggatttaggaaaggccaagagaaaagagccggcactcccagatttagatgtggagtttgcgaactgcgaagccctggtattgaggaggcttcctaccttttgttaaccaccactaaaaaatacgagctagttcttgcagaaatgtaaatatgttttttgcgcaagagcggtatgcttgtatttccctgaaggaaaacagagttctaatcataatactgatcctgtttctg

SEQ ID NO: 109023 - DNA, 111 bp, Zea Mays
cttgaaacacgcaggagagctgcgtataatttatattaagaaagagataggtctgagaacagaccgggtacaaacgactccttacggaggacgaaaacacaaatacaaaaa

SEQ ID NO: 109024 - DNA, 1008 bp, Zea Mays
atggcctcttcggtggccgccatgccacacgagtccgcatcatcatggagggacccctcccgcctcaccccgcccaggggcttcgtcaccatcctcatctcctcccccgacgccgccggagccggcggctcggcctcctcccccgccgccgccagcgagcccacgcccaggacccgccgccaaatcctggaccgctggacggccgcggccgcggccaccaccgtcacggacagcgccgcgccggcccccgccgaccagcgccgcgtcgccagggatgccgagctgtccgagctcgcgtccgccgcgcgccccgtcgccgcgcgcgccgccgtattccgggagccgtccccggcgccgtccgacgcctcctccacggccgcagccgcagccgccaccgcgcccgccgagctcccgccagcggggccccgggcctcgtcgctcatccagcgctggcgcgagatcgaggccgtcggccccgccacgccgcgccccgccgaccctggcgtctcggccgcggcctcggcctcagcctcggcgtccgactccgacaccggctcgccgcgcggccgcgtaggctgcatcgtcaagaagctcagcggggcgtcgtcgctgccagaggacgagctcgacgacgtcgccaggtccgagctctcgctctcgcagtccgcacccccgtcgcccgcgcccatgcgcgacgcctcgcactacccgtaccagtgcccgtcggtcgctagcgcgatcaacggcccccgcccgccgcacctcgtcttccggacggtgcgaggccgccgcgcgatggaggagctcgtcgccgcgatggcgcaccgccggaggcgcgaggtcgccgcgctcgccgagagccacgccgtgtcccgcttcccgcacaagggcaggatccaggttaacctctacttctcttgtcgcattgtgcgtttggaccatcctctcatgtacttgctacatctgtttgtttattcatcatcactcggatattgttccgtttcttga

SEQ ID NO: 109025 - DNA, 1893 bp, Zea Mays
gcttcgctcggctaacctcgcccgcctcccatgccgctgctggcgaggagcacgaccgcggggcctcggcggcgcgccttcgtcctcgctctcctcctgctgcccccgctgtttcttattctgctccaccgcacctcatcgccctcgcttcggcccctccccgcgccccgcaagccctcttcccggtcccagtcctgcgactactccgccggcgagtgggtgcgcgaccccctcgcgggctcctcgctccgctacgacaacacctgcaaggagatcttcaagggatggaactgcatcgccaatggcaagcccaacgcccgcgacctgctcagctggcggtggaggcccgtcgggcccgggtgcgagctcccccgcctcgacccgcgccggttcctggagcacctcagggacaccagtatcggatttgtgggtgattcgttgaaccgcaacatgtttgcctcattagtatgcatgcttaggggagtaagtggtgaggttcgcaaatggcgtcctgcagaggcagaccgtggcttcaccttcctgcgctataacctcactgtggcataccacaggacaaatctcttggtacattatggtggtcagcaaatccaaatggaggtactctagaatctcttgggtataagcatggttacagagttgatgtggatattcctgaccaaacatgggtagaggcatgtagcttccatgatgttcttattttcaacactgggcattggtggtgggcaccctcgaaatttgatccaatacggtcaccaatgctgttctttgagaaggggaggccaattgtgcctcctttactgccacctgctggactggatttggctcttcaaaacatggtatgcctatagccttgtttcttcatgttactaaaaactccactttagagtgcccttgctgatatctaacaactattttatccatgcctgaagctcatatgtaattgaatcctgatgttctcttactatgcaatggactggcatttctataattctctttgtgaaaaaaattcaccgtcatgggatattgatattctacttctgcacttgaactaattgatgaattttggcagttcttgaaatagtctttaccatgtaatttgatgtgaatggatttatggcgcttgtatctatttaaaagaaaaaaaagccctgtgtatgtctatcagaatgtcattcagcttatctttctcatgctttgaataaataattttcatcagttaatgtttgcgaacaaagcaatgagaccaaacacagtgaaattcttccgtactcaatctcctagacatttcgaaggtggtgactggaatgaaggtggatcttgccaacgtaaccagcccttgtcgtcagaagaggtggaagaaattttctctttggacaataacagcaccaacgtggaggcacgcttggtaaaccaacacctggtgaaggctcttgaacagcagtctagttttagagttctggacatcactcgcatgagtgaattcagagcggatgctcacccttcaacaactggcggcaaaaagcacgatgattgcatgcattggtgtttgccaggaccaactgacacatggaacgatttgctagcgtccagtcttgaagtggttgagagctagtctgagaataaaactcaagggctcacctgagaaagttacccctagcttcactccccccccccccccccccccccacacccccccatgaatccacttgtagaatcgagttttgctgagagttcgttgtagggctcttcgctgcagcttgttttatatgtggagtggagcatttccccggcttgtattcttgaccctgtatatatttgaccattgtagggtttcactgtataataataggtcgaattcattttgtttgtttg

SEQ ID NO: 109026 - DNA, 711 bp, Zea Mays
aacagataggaaggtccctctccggccacaactcacaagtccccacagcactctccccgaccttgccgtccagtcgtccaccccaccgccgcagcctcgccccgaggagacaggagaacagcaggatgccggcgacgccgacgatcatcggcgccctcctgggactgggcactcagatgtactccaacgccctccgcaagcttccctacatgcgccatccttgggagcatgtgttggggatgggtctcggtgcagtatttgtgaaccagctggtaaaatttgacgagaagctcaaggaggacctcgacaagatgcttgagcgcgccaggctagccaacgagcaacgctacattgatgatgatgaatagctgttcagatttgtttgtcagtgacctgtatttttttgcaacatgttgtcagtacacatggtcaggactgtggatcccccatgacttagttgttgcctcagcttccacatttcaactgtggccttgtaataaaatgtcgttgcccaatggatctgatggatcacaattgtaagctacaaattatgggctttgaatatgatcgcttactttctctgatgcaaaattactcagttatagtgactgtgcttttgcaatgccaacttttttcttccattcttcttcctgtctagtgacatttcattcattactcttttttttcattggacataatgattcgccaaga

SEQ ID NO: 109027 - DNA, 505 bp, Zea Mays
aacagataggaaggtccctctccggccacaactcacaagtccccacagcactctccccgaccttgccgtccagtcgtccaccccaccgccgcagcctcgccccgaggagacaggagaacagcaggatgccggcgacgccgacgatcatcggcgccctcctgggactgggcactcagatgtactccaacgccctccgcaagcttccctacatgcgccatgatgatgaatagctgttcagatttgtttgtcagtgacctgtatttttttgcaacatgttgtcagtacacatggtcaggactgtggatcccccatgacttagttgttgcctcagcttccacatttcaactgtggccttgtaataaaatgtcgttgcccaatggatctgatggatcacaattgtaagctacaaattatgggctttgaatatgatcgcttactttctctgatgcaaaattactcagttatagtgactgtgcttttgcaatgccaacttttttcttccatt

SEQ ID NO: 109028 - DNA, 702 bp, Zea Mays
aacagataggaaggtccctctccggccacaactcacaagtccccacagcactctccccgaccttgccgtccagtcgtccaccccaccgccgcagcctcgccccgaggagacaggagaacagcaggatgccggcgacgccgacgatcatcggcgccctcctgggactgggcactcagatgtactccaacgccctccgcaagcttccctacatgcgccatccttgggagcatgtgttggggatgggtctcggtgcagtatttgtgaaccagctggtaaaatttgacgagaagctcaaggaggacctcgacaagatgcttgagcgcgccaggctagccaacgagcaacgctacattgccttcagcaatcctactataagagttagcacatgttgtatcattttcttctgattttaacatatgatgatgaatagctgttcagatttgtttgtcagtgacctgtatttttttgcaacatgttgtcagtacacatggtcaggactgtggatcccccatgacttagttgttgcctcagcttccacatttcaactgtggccttgtaataaaatgtcgttgcccaatggatctgatggatcacaattgtaagctacaaattatgggctttgaatatgatcgcttactttctctgatgcaaaattactcagttatagtgactgtgcttttgcaatgccaacttttttcttcc

SEQ ID NO: 109029 - DNA, 708 bp, Zea Mays
ggtccctctccggccacaactcacaagtccccacagcactctccccgaccttgccgtccagtcgtccaccccaccgccgcagcctcgccccgaggagacaggagaacagcaggatgccggcgacgccgacgatcatcggcgccctcctgggactgggcactcagatgtactccaacgccctccgcaagcttccctacatgcgccatccttgggagcatgtgttggggatgggtctcggtgcagtatttgtgaaccagctggtaaaatttgacgagaagctcaaggaggacctcgacaagatgcttgagcgcgccaggctagccaacgagcaacgctacattggtacagtgctaacttgcttatggcatcttaacaacagcaaagactttgcccaagttagaagtctacatcggatatatccaaacaatctcaattggtgttggacaaactttttttcaattggtgctacctgtactcatgtatatcatcgtttgaagccacaaattaagggtttatacacgtcgatagctgttctctattcatttctgttcagagttagatctttagtatattccatcttttctagtctcctctttccatattaacttcggtcttctcctatctctcttcctattactatcatgtattagtatcccactatatattggtgtctctggaggtctacatcggatatattcaaacaatctc

SEQ ID NO: 109030 - DNA, 1725 bp, Zea Mays
atggtgtcttccacgcgcgtgtggcacaacggtctcggtaacacacaaagctctgagcgtgcatttaatgcgtgcgacgctaccatgatacaatgtgccttggtaacgtgcggggcggtcatagaggcctgtcacaagcctgccaatgctctgtgcttggtcagaattctggatttcactgatcacgtgtggacagaatgtttttcaaacttgtatggaagatggatgcacctagatccatgcgaaggagtctatgataatcccttactgtacgagaaagggtggaacaagaagttaaattatgttattgcgatttctaaagatggagtacgggacgtaacaaaacgctacaccagaaagtggcatgaggttctctctaggcgaataattacctccgaagaaactgttgtgtctgttctatcatctataacagggaagtatcgcacaggtttgtcacctgatgctctatcagtcatagaaaaccgtgaaaaggaggagtctgaggaacttagaaaatctgcttatcttcaagttgaaacggctttatccttacctggaaggcttagtggttctgtggaatggaggaaagcaaggtcagagttgggccaagcagattcactaagttgctcatcctgccctattcggaagtgtgtggatggtcatgtttcaaatatatatgatgctctttctgcttttctttcacatttttttgacaaaaaaatccctaaagaaagaattattgaagcttttgaggcattgaagactttgatgctaactcttaaaagttccaactttaagagcagaagtgctacattagaccagaaagcacaccatctatttgaggagatatttccttccattgaaagattgttatctgctatttcactgaaagcagagttgggaactgctggataccaatctgtgaccgtgtctggaaatccagtacactcatccttagcgttaccagtagcactggatgcagttaatgagatattgagtaattataagaataatacctttttcacagaaggcaatcatttcccaagagggaacagagtatgctcaggttcagtccttgcaagcagggaacaacttccaataggaattgcaacagcagcttttgacggcattcactcctccaaatgggaagagcctgatggagccaaaggatgttggctgatttatacaatgcaagatggcaaaagttgcgagttggagtcatatgatttgatgtcagctaatgatgctccagagagggatccaatggactgggttcttgaagggagcgcagacggaggctccacctggaatatacttgatgctcggaattcagaaatgttcgagagccgtttcctgaggaaaacatttacagtggataagagatataaggcaaatgctttcaggtttaggtttctacgcgtaagagattcccattctaatccaaggtttcagataggatcaattgatctatatgggaaaaccatatgaactccccccggagctgtgtttcacttttcggctttctgaactgctcggtctcacgagcctgtgtagtatcataaattcataatattgtaatgcgagcatttactgtggacgcaacgctctcttcagtatgaatagatactgaataattaagagcatgatatatattgtttgcgcgcgcgattgagttctgaaatataagtgaagtccctcgacatgatcaacgatcctgttttcttg

SEQ ID NO: 109031 - DNA, 976 bp, Zea Mays
agtcgcgcgcatcttttccagtcgcgcccatctaactacgggtagactcggcaggacggcagcacaggtccacgcgggcgcggaggcaacgctatggtggctcgccgcttcgtggtccggcatggccccgcagccggaggatcagccgaggcggcggaggagcaacagcacgaggtggagtacgacacggagcacggcctcgacgtcctccgcctccagatcttttccctcaccgccgtcccgcccgacctccagaagatcgtggtggaggcggatgggtcggtggtggacgacggcaccgacctggaagccgtctctgagcgcctgcgcctccttgctatcggcgaggagggggaggacgacggggcagcggccagggcgcaggagaagtccgacgaggaattcgcacggatgcttcaggcggaagaagaggcacttctcctacaacagtacaatatacaaaatgatggtggagatgtgtttagacaaagagttgagccttacatgcaccaggttctgatgtatgaagattcagtgggacaagaggcagcacaaaagacagttccgatatgcgaactggaggagaaggcattagtttcactggccaagtaggaagggaatttcaatccttcgaaagatgaagagaagcatgcctttctgctgcaattgcttttttggtttaagcaatcattcagatgggttaatgcagcaccttgtgacagctgtgggccgtgagacatccaatgttggaatgggcaccccacttacctcagaaatcaaatttggcgcttcacgtgttgagatgtataggtagctataagttgaaatgttattttcttacatctcatatgcttaatttagatgtgtcatatcctttcaaaacttgcaactcaatatcaggtgaatcatattgctactgtttgaagttctctaacacgtagaagagctgcatatcattatattaaaaagaaaaaaa

SEQ ID NO: 109032 - DNA, 1062 bp, Zea Mays
tcgcgcccatctaactacgggtagactcggcaggacggcagcacaggtccacgcgggcgcggaggcaacgctatggtggctcgccgcttcgtggtccggcatggccccgcagccggaggatcagccgaggcggcggaggagcaacagcacgaggtggagtacgacacggagcacggcctcgacgtcctccgcctccagatcttttccctcaccgccgtcccgcccgacctccagaagatcgtggtggaggcggatgggtcggtggtggacgacggcaccgacctggaagccgtctctgagcgcctgcgcctccttgctatcggcgaggagggggaggacgacggggcagcggccagggcgcaggagaagtccgacgaggaattcgcacggatgcttcagggagcaacctggtggtatcattctatgttgaggctgtttcaatgtcaccacacttcaccaatttggccaccagtcaccacagtttaggaaaagcaaaatgtgccaatactgggcggaagaagaggcacttctcctacaacagtacaatatacaaaatgatggtggagatgtgtttagacaaagagttgagccttacatgcaccaggttctgatgtatgaagattcagtgggacaagaggcagcacaaaagacagttccgatatgcgaactggaggagaaggcattagtttcactggccaaggaagggaatttcaatccttcgaaagatgaagagaagcatgcctttctgctgcaattgcttttttggtttaagcaatcattcagatgggttaatgcagcaccttgtgacagctgtgggccgtgagacatccaatgttggaatgggcaccccacttacctcagaaatcaaatttggcgcttcacgtgttgagatgtataggtagctataagttgaaatgttattttcttacatctcatatgcttaatttagatgtgtcatatcctttcaaaacttgcaactcaatatcaggtgaatcatattgctactgtttgaagttctctaacacgtagaagagctgcatatcattatattaaaaagaaaaa

SEQ ID NO: 109033 - DNA, 971 bp, Zea Mays
agtcgcgcgcatcttttccagtcgcgcccatctaactacgggtagactcggcaggacggcagcacaggtccacgcgggcgcggaggcaacgctatggtggctcgccgcttcgtggtccggcatggccccgcagccggaggatcagccgaggcggcggaggagcaacagcacgaggtggagtacgacacggagcacggcctcgacgtcctccgcctccagatcttttccctcaccgccgtcccgcccgacctccagaagatcgtggtggaggcggatgggtcggtggtggacgacggcaccgacctggaagccgtctctgagcgcctgcgcctccttgctatcggcgaggagggggaggacgacggggcagcggccagggcgcaggagaagtccgacgaggaattcgcacggatgcttcaggcggaagaagaggcacttctcctacaacagtacaatatacaaaatgatggtggagatgtgtttagacaaagagttgagccttacatgcaccaggttctgatgtatgaagattcagtgggacaagaggcagcacaaaagacagttccgatatgcgaactggaggagaaggcattagtttcactggccaaggaagggaatttcaatccttcgaaagatgaagagaagcatgcctttctgctgcaattgcttttttggtttaagcaatcattcagatgggttaatgcagcaccttgtgacagctgtgggccgtgagacatccaatgttggaatgggcaccccacttacctcagaaatcaaatttggcgcttcacgtgttgagatgtataggtagctataagttgaaatgttattttcttacatctcatatgcttaatttagatgtgtcatatcctttcaaaacttgcaactcaatatcaggtgaatcatattgctactgtttgaagttctctaacacgtagaagagctgcatatcattatattaaaaagaaaaa

SEQ ID NO: 109034 - DNA, 459 bp, Zea Mays
atggcggccacacagctcctgcattcggcaaccgtgctcctggctcttgcggcggcgttgctctgggactacgtagtggtgcccctcctttggcggttttcgttccaacgtcacgcaggggagccattcctgtactggatgggtccgcggccccgggtctgcctcttcgactacgagttggtaaggcaggttcttttcaacaagtccagccatttcttcaaggacgccgcccacccgactatcctggcaatgctcggcaaagggctggtcctggtggaaggcaccgactgggtgcgccatcggagggtggtcaacccagccttcgccatggacaagctcaaggaaaaggagctcgctaatgcagctgggaagctcgcagagtgccagaagacaattgcttctctggagcgccaaatcaaatcactgacagacctcatcaagcacatgatttacatatag

SEQ ID NO: 109035 - DNA, 96 bp, Zea Mays
cgggtcaagccccatgttgttgtgtccccatgttgttgtgtccctgattcagtttgccgtacggcgccgtcatcgcttctgtggcgagctcgtcag

SEQ ID NO: 109036 - DNA, 2350 bp, Zea Mays
cttcgccttcctcagcgcgtcctcgtccggcttcctccgctcgatgcagcagcagcgactgcaggcggcgctcgacagaaaacaacacggctgcgaccggatctcaccggaaaagttgaggagtggagggtcttagctgccggagttgggtaatacctccctatatcccctattggtaggtccgccgctgctccaacctccaggtccaggcaccaggtcgctcctcccttctcttcccgtcgggttcttgtccatcgtagatagcctctccttcgccgaggtcaccagttcctcctcgtgtccttctcgctagtcgctacagtcctcctactctgcttggctcgagtggaatggggatccatcctgacctgagtggtttcttctttgcttggtagtcgcgcatatttggtagccgcgtccgcgtgacgtcgtcggtgcttgggtccattcagacattgttcttatttgatcagtacccctatttagcgcctgcaagatcgagatcgatcttacttgactccataagatgtattggggatttggagtgccttgtactccaacttaagactgggagtgaacccgcataccccaagcccgcccttccaccgaactgaactagacatcctcaagcgtcatcaattctaatggatgatgcagcagaaaatattcttgcatcacttggccgtgtgcatctcgttgatctaatggcctctgagggccttccttctgacagctataagatgtgtgtgtcgactctgatgcagtcactcgctcaatattcggcagccatcattcagctgtcaccagctgatggtgccttgttgaggtcaggtttggactcggctcgctttttcttccaccagcgagggtataattcaaatgaggctgtacactcggatgattcccgtgaatggtgcaagacctctggttactatgttgattctcagatgtgtctggaaatgtatgattacaggcctggtattactgcaactgatcccagcggtgaaatggaattacctccatcaggtttgcctgacatattttcggtgctgggtaaagtttctcgagatatattggacgcaatcagtttctcattgaatttacgtagctgtgcatttactgagatactcgacaacatacccttgagaagccaggaagtatcatcttctgttctttcagcatgttgtcattcaaggccatcgcttgaaggaggacatcagcatagcattgcttctcaagataatggtcacttgctcatgttttctgagcaggagcaacagattgataagactttgcttaccctagttaagtcagatatgtcaggtctatatattaaagacttacatggacactggattcttgttgatggagatattggtccacatgatgttattgtctattctggccttgcactttatcaggaaactgctggctatgtaaatccagctgtacataaaacagaggttggaatacatggatgtatgtttgggcgatgctctttgatgttcaagttcatgcctagatcagttgcaaggctgagtggttcagagatgagagctgctggccatggtgttgatgcccagtttcaggttcccatacaagttaatgatttcatgcagacagatcgtttttctgatcaactgtttcctaagactgaaccatcattacacacagaacaagattcagttgtttggtgtagcatcattcaactccgtgatgaataaaaagaagggaaatacaagaacaaagccgctccctccttctaaaagacttcgccaagaagcacagagggtcctgaaggagcgtgttcaggacattgcagataagaaaggcgtcaagctgagattttgcaatctcaaggaatgtgaaagccacatcctgtcattggatagtccatgtgagaacacgagaactgaaattggatggccacaaggggttccgtttgtccatccacatgacctcccaaacaaggcaaagcttgggtttttggaagcttacgaacctggatggacggcctcccaacaagaaatggaggagccagcctcagtaaattttgatgtattaccaaccttggatatgttttgaatttcggggctggtcatcaattcattccttcaacatgttgcagaagcagtaatgtatactgacgccaaataatttgtatacatagatgtagtatttgagaacgtgtaaatgcgactacccgctgcttagattgaaagttagattatataatctgggtagattataatcctaaacaaacaggcctttaatccataatgcattatacggaaatgtttgtaatatacttcgcaagttcgcatcaacaatgacaatgctgatgtggaga

SEQ ID NO: 109037 - DNA, 2395 bp, Zea Mays
cttcgccttcctcagcgcgtcctcgtccggcttcctccgctcgatgcagcagcagcgactgcaggcggcgctcgacagaaaacaacacggctgcgaccggatctcaccggaaaagttgaggagtggagggtcttagctgccggagttgggtaatacctccctatatcccctattggtaggtccgccgctgctccaacctccaggtccaggcaccaggtcgctcctcccttctcttcccgtcgggttcttgtccatcgtagatagcctctccttcgccgaggtcaccagttcctcctcgtgtccttctcgctagtcgctacagtcctcctactctgcttggctcgagtggaatggggatccatcctgacctgagtggtttcttctttgcttggtagtcgcgcatatttggtagccgcgtccgcgtgacgtcgtcggtgcttgggtccattcagacattgttcttatttgatcagtacccctatttagcgcctgcaagatcgagatcgatcttacttgactccataagatgtattggggatttggagtgccttgtactccaacttaagactgggagtgaacccgcataccccaagcccgcccttccaccgaactgaactagacatcctcaagcgtcatcaattctaatggatgatgcagcagaaaatattcttgcatcacttggccgtgtgcatctcgttgatctaatggcctctgagggccttccttctgacagctataagatgtgtgtgtcgactctgatgcagtcactcgctcaatattcggcagccatcattcagctgtcaccagctgatggtgccttgttgaggtcaggtttggactcggctcgctttttcttccaccagcgagggtataattcaaatgaggctgtacactcggatgattcccgtgaatggtgcaagacctctggttactatgttgattctcagatgtgtctggaaatgtatgattacaggcctggtattactgcaactgatcccagcggtgaaatggaattacctccatcaggtttgcctgacatattttcggtgctgggtaaagtttctcgagatatattggacgcaatcagtttctcattgaatttacgtagctgtgcatttactgagatactcgacaacatacccttgagaagccaggaagtatcatcttctgttctttcagcatgttgtcattcaaggccatcgcttgaaggaggacatcagcatagcattgcttctcaagataatggtcacttgctcatgttttctgagcaggagcaacagattgataagactttgcttaccctagttaagtcagatatgtcaggtctatatattaaagacttacatggacactggattcttgttgatggagatattggtccacatgatgttattgtctattctggccttgcactttatcaggaaactgctggctatgtaaatccagctgtacataaaacagaggttggaatacatggatgtatgtttgggcgatgctctttgatgttcaagttcatgcctagatcagttgcaaggctgagtggttcagagatgagagctgctggccatggtgttgatgcccagtttcaggttcccatacaagttaatgatttcatgcagacagatcgtttttctgatcaactgtttcctaagactgaaccatcattacacacagaacaagattcagcatcattcaactccgtgatgaataaaaagaagggaaatacaagaacaaagccgctccctccttctaaaagacttcgccaagaagcacagagggtcctgaaggagcgtgttcaggacattgcagataagaaaggcgtcaagctgagattttgcaatctcaaggaatgtgaaagccacatcctgtcattggatagtccatgtgagaacacgagaactgaaattggatggccacaaggggttccgtttgtccatccacatgacctcccaaacaaggcaaagcttgggtttttggaagcttacgaacctggatggacggcctcccaacaagaaatggagttaagttctattgaaacatgatgagtgcattctcattttatctttctaattggcaaaggagccagcctcagtaaattttgatgtattaccaaccttggatatgttttgaatttcggggctggtcatcaattcattccttcaacatgttgcagaagcagtaatgtatactgacgccaaataatttgtatacatagatgtagtatttgagaacgtgtaaatgcgactacccgctgcttagattgaaagttagattatataatctgggtagattataatcctaaacaaacaggcctttaatccataatgcattatacggaaatgtttgtaatatacttcgcaagttcgcatcaacaatgacaatgctgatgtggaga

SEQ ID NO: 109038 - DNA, 3139 bp, Zea Mays
cttcgccttcctcagcgcgtcctcgtccggcttcctccgctcgatgcagcagcagcgactgcaggcggcgctcgacagaaaacaacacggctgcgaccggatctcaccggaaaagttgaggagtggagggtcttagctgccggagttgggtaatacctccctatatcccctattggtaggtccgccgctgctccaacctccaggtccaggcaccaggtcgctcctcccttctcttcccgtcgggttcttgtccatcgtagatagcctctccttcgccgaggtcaccagttcctcctcgtgtccttctcgctagtcgctacagtcctcctactctgcttggctcgagtggaatggggatccatcctgacctgagtggtttcttctttgcttggtaaggaacccttgctttcttggatggatctttgttctgcggattgtctaaatctcaattttcttcttcctccacgcaggtagtcgcgcatatttggtagccgcgtccgcgtgacgtcgtcggtgcttgggtccattcagacattgttcttatttgatcagtacccctatttagcgcctgcaagatcgagatcgatcttacttgactccataagatgtattggggatttggagtgccttgtactccaacttaagactgggagtgaacccgcataccccaagcccgcccttccaccgaactgaactagacatcctcaagcgtcatcaattctaatggatgatgcagcagaaaatattcttgcatcacttggccgtgtgcatctcgttgatctaatggcctctgagggccttccttctgacagctataagatgtgtgtgtcgactctgatgcagtcactcgctcaatattcggcagccatcattcagctgtcaccagctgatggtgccttgttgaggtcaggtttggactcggctcgctttttcttccaccagcgagggtataattcaaatgaggctgtacactcggatgattcccgtgaatggtgcaagacctctggttactatgttgattctcagatgtgtctggaaatgtatgattacaggcctggtattactgcaactgatcccagcggtgaaatggaattacctccatcaggtttgcctgacatattttcggtgctgggtaaagtttctcgagatatattggacgcaatcagtttctcattgaatttacgtagctgtgcatttactgagatactcgacaacatacccttgagaagccaggaagtatcatcttctgttctttcagcatgttgtcattcaaggccatcgcttgaaggaggacatcagcatagcattgcttctcaagataatggtcacttgctcatgttttctgagcaggagcaacagattgataagactttgcttaccctagttaagtcagatatgtcaggtctatatattaaagacttacatggacactggattcttgttgatggagatattggtccacatgatgttattgtctattctggccttgcactttatcaggaaactgctggctatgtaaatccagctgtacataaaacagaggttggaatacatggatgtatgtttgggcgatgctctttgatgttcaagttcatgcctagatcagttgcaaggctgagtggttcagagatgagagctgctggccatggtgttgatgcccagtttcaggttcccatacaagttaatgatttcatgcagacagatcgtttttctgatcaactgtttcctaagactgaaccatcattacacacagaacaagattcagcatcattcaactccgtgatgaataaaaagaagggaaatacaagaacaaagccgctccctccttctaaaagacttcgccaagaagcacagagggtcctgaaggagcgtgttcaggacattgcagataagaaaggcgtcaagctgagattttgcaatctcaaggaatgtgaaagccacatcctgtcattggatagtccatgtgagaacacgagaactgaaattggatggccacaaggggttccgtttgtccatccacatgacctcccaaacaaggcaaagcttgggtttttggaagcttacgaacctggatggacggcctcccaacaagaaatggagttaagttctattgaaacatgatgagtgcattctcattttatctttctaattggcaaaggtataatagtgctccttaggtttcagaattgttttttatggtacaacaaacaacatacaatcaagagatttatttttcaagttccatctctaacctacccaatctttcttgggttttccctaaaaaatgatttattatttgctgtttaacatacaggttggacaactgcttgcgacattgtgaacctcatcctgatcattccagcctgttctcaaaccaaattgttctaccagtccattgcaccctagcaaagtctgaaatttgtgttgattcagccttgtgctctgccctggagtatcagtcactccaaaaaaaaactgacttggatggcacctagccttctaaatgacattcgtaaaagtgtgctgacccaagattgtctaattcaaggttagttttggaaccccattttcccaagggatttctattttcccaagaaaatttagttcaaaatgaaaatccattaagaaaatagagttcccaaactagtcctcagagtgattttgttctgcgctaatatatcgcagtgcgcagtggccctgagctttcccttgagttcaatattgtagcagcagctgttttaaagtcactctcgtggttgtgtttcatgtggagtcgcagtttgccacgatttcttaaacaatcaagccatcgagactctagaggagccagcctcagtaaattttgatgtattaccaaccttggatatgttttgaatttcggggctggtcatcaattcattccttcaacatgttgcagaagcagtaatgtatactgacgccaaataatttgtatacatagatgtagtatttgagaacgtgtaaatgcgactacccgctgcttagattgaaagttagattatataatctgggtagattataatcctaaacaaacaggcctttaatccataatgcattatacggaaatgtttgtaatatacttcgcaagttcgcatcaacaatgacaatgctgatgtggaga

SEQ ID NO: 109039 - DNA, 2385 bp, Zea Mays
ccccttcatcgattccgggcaaaagggaactccgcccccgccgcccctaccacgattctgccgctacaccttccttcggcgccggagatgagatgagaggatccgttatactcgcgctccttgccgccgccgcctcctccttcttcggcgcggtgaccgcggcttcagaggggcggccgacggtggcagtggaggtggacccgtcgtggcggttcccgagccggcgcctatgggacgcgaaagcagcaggccatcttccccgaccccaacctcactgccgactgggtaggcccgggggtgtgcaactacacggatgtctactgcgtgccgctccccttcggccccgaccgccgcagcgcgctcgtggtcgccgaggtcgacctcaaccatggcgacatcgcgggcttcctcccgccggagctcgccctcctccccgacctcgccctgctccacctcaactccaaccgcttctgcgacgtcctcccccgcgcgcttcgccgcctccgcctcctccacgagctcgacctcagcaacaactgcttcgtcggcccattctcggacgtcgtcctagacctcccgacgctgcgcttcctgggcgtccgcttcaacgacttcgaggggacgagggcaccgtcctgcctcgcctcttcgaccgcccgctcgacgccatcttcctcaaccacaaccgcctccgcttccagctcccggacaacttcggcaactcaccgacgtctgtcgttgtcctcacgcacaacgccttcggcggctgcctcccggcgagcgtcgcaaccatgtccggcacgctcaaggagatccttctcatcaacaatggcctctcctcctgcttcccgccggagatcggtctgctgcgggagctcaccgtgctcgatgtcagcttcaaccagctcgccggcctgctgccgccggagctcgccctgatgaggaagctggagcagctggacgtcgcgcacaacctgctcaccggtgcggtaccgccggggatatgcgacctgccgcgcctcaagaacttcatgttggcctacaacttcttcacgtgtgagccgccgtcttgtgcgcgcatcgtggcgcgggacggcgaccggagcaattgcctgcccaaccgctcgtcgcagcggacgccacagcagtgcgccgccttctacgcccgcccacttgtcaactgcgccgcattccagtgcaaaccgttcgtcccgcccatgccgccgccgcgacggcttccttcaccgcccccgccttcgccacctccaccatcgctgccgccgccatctccacctccgccgctgccttcaccaccgccacctcaacttctgccgtcaccaccactatcgcattccccacctccaccatccccgcctcctcccgcgccagtctatcacccgccatgccccatcatgccgccaccgctgccctgcaccccaacgcatctatggccatcgccaccaccatattaccccggcccattgccacccacaaaccctgtccgatatgcatcgcctcctcctccacagcagcaccatccatggccattagtacacccagttcaatatggatcgccactgcccctctgttgcatccgtagaaaccaatctcagacgcaaggaaggaaagctggttctgctcttgcccagcccccccccccccccccccccctgtgacaatggctagcagctgccagattcaccggtgtacgtggtcattgactcattgtcacgtttagcgaatagcattggctgatggctatagtcctcgagagagcgtggtaagctccacagaattttctgacttatggtttgtcggtgtcggtcattgctgctgaaagggaatggattaagggtggtggggctttggagcgtgtaggcttgggatttgtggataattggctgtgaataaaggagagattgagagggacagaggaggattgtaggtccagcgatctatcatatatctgagcgtatagagaagttccagcccagttaagtttagtcaggcataaaagtttagaaacaacaaaaattccattgtcatttgttccttttgtatcacagctaccatcgattatttgctcttatattattcactccttttctttaacatccgcacttttacttatcttttttctaggttattcttattctccactgcatgttagtcttgttagtattatctttaaatgatctttattcgttttctttgtttcctctcctttgctgtgttgttactttcggcaagcgattcattgcatactgcaccagtttaattggttcattggatatgttccattggtgctactgatgaacgaaaattcatcccctctctaagaacttgttcggttagcctcatattcaaatacatgaacgagaatct

SEQ ID NO: 109040 - DNA, 192 bp, Zea Mays
atgggcggaggcatcaggttgggaaggaagaacaaggcgaaggccgggaagacgaatgggacgtccgacgatggtgaaaacgatgccactatgcgggtcggtgttggggctggtgtcggacgaatacggggaggagacgcctgctcccacgccctctgccaagaatggggtggcgcggaggcagaggcatga

SEQ ID NO: 109041 - DNA, 812 bp, Zea Mays
ccatgccacggaaaacatttctgaccagtaaagggctggctggcaatgctggagaagtataggaactatgacttcgggcggtgcccgcgtgtttactgctgtggtcaaccatgcctgccggttggacaatcagatattcatcgatctagtaccgtgaaaatatactgccccaagtgtgaagacatctactacccacggtccaagtaccaaggcaacatcgatggcgcatattttgggacaacgttccctcacctgttcctgatgacatacgagcacctcaagctacagaagcccttgcagcgctatgttcctcgtgtctttggcttcaagctccacaagccatgagcctcatgtatttggcttttaagctctacaggatgtggctcactgggggaaaacccagagttttgcgagatcaaggtccttgaagactacatataagagcgccattggctacatataaaagcgctattgacagatcagtggattgataaaactccaccatgcagcggagcgcttttaccttacctggctggcacctaccaacatttgaatgtagctctaaggataacgatgttgttgtaacctaactgtaattgtttttttgattagtaaaccaggaccccgtacgatgtagagtatgggcattatttatggcttatgcaaaaaaaatcgttatgctgtcccaggctcccagcaaccctttacctgtttttttagatcctttacctgcttggttctcgtaagatggcctttgaatttgataacaaaattctatattgaattgtgatatgtgaagggcgcaccatctt

SEQ ID NO: 109042 - DNA, 613 bp, Zea Mays
accgctgtttcctatcctttttcattcccacccgcccatcccttcaaaattcgctgcgtgtccctctctctccctgcgctcgtgctccgcccaggcccctttcctccaccgcgggcgcaaaccctaaccctacagccgctcgccccgcggcgcctgccaatggcgcgccccgtgtgagtgtgtgtgagaggcagagacctagaggccgctacccggggaggagagggagggagagggagaggctgatagatgtataagcaggggggagcgggggtaggggctggtctggaccggaaacggatcagcgacgcgctagacaagcaccttgagaaggcggtcgcatcgccgtccacatcgagggggtcagcgggcggcggcggtgtgcgcgaccaccaccgcctcgtcgtgccgtcctccgtgtcgtccatccccaagggccgctgctccgaaggtgacgtcatgcgttattctccccctttcagtttcaggtgaccgcgccatggtcgcgtggcgtgccgcgaatccgtgcctattttggtgtgatcatgagtcatgaggctgtggcagttgtgttacttttcggtgcagtaggatgcacgtgcggaaggagatt

SEQ ID NO: 109043 - DNA, 1287 bp, Zea Mays
atggcggctgatgttggagttgtgatgatctctgcgtggtccgtgtcgttccagatagcttcaaagggggctacggcagagggcgcagtcatcacgaaggcgcttgggtcagctgggcgcatgctcgatgggccgcaggccgagctggtgcctggtgctgcagccacccgcctcgccgtcgagaccaagcacgtcaagctcgtcgagtccgcgctcaactgcctccacgatgttacgagatctaccagcgcaagaccactccctggccaaaatttcagatcccgcaacaattgtgtcgatcctcccaataccgctgccgctgtcaacgcgtacgccgacctcaaccactcgtgggtggatactatcgagaaggttgtgcgaaggaaagaagaggtggttggagaggagggcgacatggagaggccgacactgatgagagagtcccacacatcaatggtggaccttctgatctggacggagggggcgccacatgagtcgcaacagccgactgcatcagctgtcggaggcgctcaggatgccccagcccgctgcttttgtctccgtgcagtcgtccgatggtcaacccacaccaagcaacgtctcgaagaagaagatggacggtggcgatgtgttgttcttggatggcgtcggggaggtcgctgtcaccatcggtcgcaacagcatctctccatagcccctccacccggtggtgctttggctgagattgtagagttccagaaaattgcagaggtggtaggtgactgttacagatttattcgagaatacgaggattttaatgttggagatcacatagacgtcaagcttattgaagttggtgcagatggtggctcatgtgtatcagttgatgaagatggggatcacatttttatatctgacagtaaccatcataggatcatcattagcaacaacaatgggatgattttagattatattggatcttccctaggctatgaggatggaaagtttgagtcagccaaatttttgcgcccagcttcatcattttatcacgctgctgaagactgtcaatttattgtagattcagagaatcatgctgtcagaaaagcagatttgggaagaagaactttacaaacagtttatccagtcttcaataaaagcaatgacatctggagctggattaccgataagcttggtatgagaaaagaagctactccaactattcaagattttcatgcagactccatgccacttccatggcatttgatacaaattttagaggacaccttattagtcgtagaccgcaggtag

SEQ ID NO: 109044 - DNA, 1518 bp, Zea Mays
gtagtggccgcagcagtctcgatggccgccgccgactcctccccgctccacatcgtcattttcccttggctcgcgttcggccacttgatccccggcctcgagttcgccgagcgcctcgcagagcacggccagcgcgtgtctttcgtctccacccagggcatcctccgcaggctccgcccggtcgcgcccgcgttggcctcgctcatcgacttggtggccctcccgttcccgcgcattgacggcctccccgatggcgccgaggccactagcgacctcccgcccggcacggccgagctccacgtgcaggccatggaccgcctcgccccggccttctccgccttcctcggtgccgcctgcgccgacgggagcgaccgcaaggtggactgggtgctcctcgacaacttccacgcgtccatggcggacgtcgccagcgagcacaaggttccctgcatactgaacatgccctactccgcggcgacgacagaggatttcggcattccagacccgtcggttctaccaatgttccggccatttgtggagaccttcaagagatgcaaagtcatcgctgctcgtagcagcttcgagttggaaccggagtccctgcctctcatgacaaagatcctcgggaagccggtcatccccgtgggcctacttcctccggcgcccgccggaggcaacacgcagcgcgacgacagcgcagccctgtcgtggctcgacgagcagccgtccaagtccgttgtctacgtcgccttcgggagcgagtacccgatgaccgtcaagcagctgcacgagatcgcgcgcgggctggagctcgccgggacgcgcttcctctgggccctcaagaggcctagcgtcgcccaccccgacgaggacctcctgccgccaggtttcgaggagcgcacgcgcggccgtggctccgtcgtcacgggctgggttcctcagaccagcatactggggcatggcgccgtcgccgcgttcatgatgcactgcggctggggctccaccatcgaggcgcttcagtacggccatcctctggtcatgatgccagttctcgtcgaccacctgtccaccgcgcgggtgatggagcagcggaaggtcggagtcaaggtgcggaaggagaagagtgacgaagcgttccttggtgacaacatcgccacagcgatacgggctgtcatgtgcgaagaagagagcaagaggatctttgtggccaatgctaagaggatgcaggagattgtggcagacgacgagtgccacaagaggtacatagacgaattcgttcagagcctgagaacctacaagaactgaaacatgcatgctgagtgcactcaggcagcatacttggcaatggcattggcgttacacaagtgatccgctggactccagctaatagtacgatgtatcttattttgctgcaatatgtaactttatcattgtttggttgtaaaaatatttgaatttgtttctcgtgaattgcatgaaagttattcatatctatcattacaaaagctgactcgaaat

SEQ ID NO: 109045 - DNA, 1570 bp, Zea Mays
gtagtggccgcagcagtctcgatggccgccgccgactcctccccgctccacatcgtcattttcccttggctcgcgttcggccacttgatccccggcctcgagttcgccgagcgcctcgcagagcacggccagcgcgtgtctttcgtctccacccagggcatcctccgcaggctccgcccggtcgcgcccgcgttggcctcgctcatcgacttggtggccctcccgttcccgcgcattgacggcctccccgatggcgccgaggccactagcgacctcccgcccggcacggccgagctccacgtgcaggccatggaccgcctcgccccggccttctccgccttcctcggtgccgcctgcgccgacgggagcgaccgcaaggtggactgggtgctcctcgacaacttccacgcgtccatggcggacgtcgccagcgagcacaaggttctggagatggatatagtacagcgcaatgaaattaaaatgatacccctgcactgcagtaacccccttcccatgtcctgcaggttccctgcatactgaacatgccctactccgcggcgacgacagaggatttcggcattccagacccgtcggttctaccaatgttccggccatttgtggagaccttcaagagatgcaaagtcatcgctgctcgtagcagcttcgagttggaaccggagtccctgcctctcatgacaaagatcctcgggaagccggtcatccccgtgggcctacttcctccggcgcccgccggaggcaacacgcagcgcgacgacagcgcagccctgtcgtggctcgacgagcagccgtccaagtccgttgtctacgtcgccttcgggagcgagtacccgatgaccgtcaagcagctgcacgagatcgcgcgcgggctggagctcgccgggacgcgcttcctctgggccctcaagaggcctagcgtcgcccaccccgacgaggacctcctgccgccaggtttcgaggagcgcacgcgcggccgtggctccgtcgtcacgggctgggttcctcagaccagcatactggggcatggcgccgtcgccgcgttcatgatgcactgcggctggggctccaccatcgaggcgcttcagtacggccatcctctggtcatgatgccagttctcgtcgaccacctgtccaccgcgcgggtgatggagcagcggaaggtcggagtcaaggtgcggaaggagaagagtgacgaagcgttccttggtgacaacatcgccacagcgatacgggctgtcatgtgcgaagaagagagcaagaggatctttgtggccaatgctaagaggatgcaggagattgtggcagacgacgagtgccacaagaggtacatagacgaattcgttcagagcctgagaacctacaagaactgaaacatgcatgctgagtgcactcaggcagcatacttggcaatggcattggcgttacacaagtgatccgctggactccagctaatagtacgatgtatcttattttgctgcaatatgtaactttatcattgtttggttgtaaaaatatttgaatttgtttctcgtgaattgcatgaaagttattc

SEQ ID NO: 109046 - DNA, 116 bp, Zea Mays
ctgtcttggcctattttttggcaacttgttctgggtctactttagacctctatctcctttacttaatatataagatgcgtagttctcttgcgcgttcgataaaaaaagtgtgttaa

SEQ ID NO: 109047 - DNA, 2145 bp, Zea Mays
gcttggttaacattttttttataaatctgaaaatatgatgagcacgaagccaaatacaatatttattttaaaatagaagaaatatactgtctatattctaaaataattatcgctataatatttatgttagataaattatttgagcattatatagagaactcataaaaaatattatttaacttgctctaaaaacagagaactcataacagaatacatgtacaccattggatggctggtggacagagcctcctgattgaactctgtgggcatcactttcccgggtgcaccgcgccttcgacgagcgcatcacagagcctctgcaacgacatgttcgatgatccgccctcctccattgccttccggcacgcggcttttatctccatgaccttgtccctaaccttcctcgctgtctcgccgtcgcacatcagagctttaaccgctcgctccagctcggtcgcctccacgaaattcttcctcttcctttccacgttcagcgccacggcgacgcccatgtcggccaccagcgtgaacgcgttgtagtgctgctcggcgccaagcggccatggcaccatcggcacgccatgccagaggctctcgaggaccgagttccagccacagtgcgtgacgaagcctcccacggcggcgtgggcgagtatctccttctgcggcgccttggtaggccacacgagccctctatccttcgtcctcgccaagaaatccgccggaagcagctccgcgaggttcccgtccgagggcaacttcgtgccgggctccggcgtcccgcgcagcacccacaggaatcgatgcccgctgcggtccaggccgtgcgctatctcgtgcgcttggggcgccgtgaagcagccaccgctgccgaagcataggaacaccacggagctcggaggctgcgagtcgagccagcgcacgcactcctgcgcctgctgctcggcgggcggggtggaggggatcaccggcccgatcgagtacaccggaggtgccgggacaccacgcgtgcaccgcccgtcggcgatggccgcgaggacgcgcggctcggcctcggcaatggtgttgacgatgatgcctgctgcttccatatagcgcctgccgttgtacaggaaccagcgataggtcgggatctttctgttctccagccccgtcggcaggcaggacgccggcaccggcggcagccctggcacgtccactccgccttccatttgctcgaactcgacctcgacggctacctcctcgtcgagcgtcggggagcgcagcaagagcgcgcacatcgcggcgctggtgatcaggtacacgtaggccggcacgccgagctggtgcgccgcgtcgaacagcgccgtgcagaagatgtcgacaacgacgccggccaccgggcacgtcaacccggcgacggccgccttgacgtggggcgagtacagctgcacgtagcgggatatgtactcctcgatgcccgagtggtcggttgggggttccaccgctggcagatggtggaagcggatggcgaggccggaggcttcctgctggcgtatgtgctcggtgatctcggacgcccgcttcgcctctgcaggcaacggcattacgagcacggtgacggtgaggggcagtgcgctgcgtgcgagcagccgcttgccgacctcgagcattggtacgaagtggccaatgccccagacgggcaccagaacgatggtcggggtagcagccattgctggatcgacgtttctagtgcggcaagaaacaggatgtgtgagggaagtggctaacgaagtaatgatacaagcgagttcatcattggagcggctttggtaggtaagagcagggctgcagctgtaacgtcaacaaaaaaacaaaaacaaaaacagagaggctaataaagaaatcaagtctggccctatggtaggtaagagcagctgtaacgtctacgtcggatcggacggactgtaccgcctactttatcgtcccctaactaaatgtcagagtattgtatacaggggcgtttggtaagtatctacaaagtccgtagaatcaagagaacagatagcctagataggagggtcacttgagaaagcgctgttgtagctacaaccacactgcacacacatggattatttttagataatggaaatgtcctgttttcac

SEQ ID NO: 109048 - DNA, 1413 bp, Zea Mays
atggcggcaccaacggtggtgctcatcccgttctgcgtcaccggccacctgacgtccatgctccaagccggcaagcggatgctgatgagcggcggcggcgacctggccatgtcgctcaccgtgctcctcgcgccactgccgatggccaggttcgcgcacatcgtagagcgggaggccacctcgggctcggggttcgacatccgcttccaccgcctccctgacgtggagctccccgccttctccggcccggaggacatgatctccagtttcatccagctgcaggcgtccaacaccaaggcggccattgccggcctggcaagccccgtcgccgccgtcgtcatggactacttttgcaccacgctgttcgacgtcgcccgcgagttggcactgccggtgtacgtgtacttcacgtccccggcctccatgctcgcgctcatgctgcggttgccgacgctggaccgggaagttgccggggattttggggaggcggaaacggcgttcaacgtgcctggtatgccgccggtgccagcggctttcctgccgaatgccgtgatgaagagggattcgggctacacgtggagcatgtaccacgctaaccggttcatggaggccgccggcatcatcatcaacacggtggcggagctcgagccggaagccctcgcggccgtcgctgacggccggtgcatgcccgggcgccgcgccccgaccatctacccgatcggtcccgtgatcgcctttgatccgcctgccgagcagccacacgagtgcctgcgctggctggacgcgcagccgcgttcgtccgtggtcctgctctgcttcggcagcatgggcaacctgtccgtgccgcaggtgcacgagatcgctgagggcctgcaacgcagcgagtaccggttcctgtgggtgctccgtggcccgccgccagccgggtcgccgtacccgaccgacgccaacgtggacgagctggtgccgggtggtttcctggagaggaccaaggaaaggggcctcgtgtggccgagatgggcgccgcagaaggagatcttgtcgcacccctccatcgggggcttcgtgtcgcacggcgggtggaactcgacgctggagagcctgtggcacggcgtgccgctggtggcgtggccgctgtacgcggagcagcacatgaacgcgttcatgcttgtggcgtccctgggcgtcgccgtggcgatggaggtggacaggaagcggggcaactttgtggaggccgcggagctggagcgcgcggtgcggacgctgatgggcgcgtcggaggaggggaggaaggcgagggcgaaggccgctgaggccaaggccgcgtgccggaacgccggagaggaaggcgggtcgtcgtgtgccacgttgcagagactgatgtgcgagatttcgcgacaccgaggggggtga

SEQ ID NO: 109049 - DNA, 644 bp, Zea Mays
aggggcgatctagagatgaccgaggagaagccgtacaaccggaggcacaaggtgtgcgaggcgcactccaaggcccccgtcgtgctcgtcgccggcctccgccagcgcttctgccagcaatgcagccggttccacgagctgtcggagttcgacgacgtcaagcgcagctgccgcctgcgtctggccggccacaacgagcggcgccggaagagctcggccgacgcgcacgccggcggcggcaataatggattccgccaacacgccgaccagaacggccgcggcgacccggccgggaaccacttccagatcagataaagcatgctctctctcttctgtcatgcagcaggatatgctagcatcatcactaccgatagatatttatgcgtctatcgtctacccgccccgaaaaccctagttatatatatatatatatatatatatatatatatatatatatatatatagacatatgctgattgtaacctaattagcctgcagcccagttaagcagggactgccttactctgctaggaggacgtgtgtaatcatgtggcctgcgcaaacagtaatttgtgctggctgctgtgtattcatgctgctctgataatcgtgtcgtggtaataatatatcctatttattctact

SEQ ID NO: 109050 - DNA, 599 bp, Zea Mays
tccttgactttgccaagtgaccacgtggactggcggagggaaccgagcgagtggcccagacgtcgcgactcgcgaggccgaggcgcggcggcagcgacgactccaacaaccacgcgcggaggctgcagtgctccagccaagtgatagggtcgtgacaggcagccccgcaacgtcttggagcacaagacattgaagcttctaaagtattggacctggcaatttgttattgtcaggacagtatgttccattctgattattgcacttcaggttcttgggctgtaccccagctaggtgagctggacgtttagtattatactgaacttctcagtctacatggccttatatgccttggttcttttctaccacttgtttgctaaagagttggcacctcacaagcctcttgcaaagtttttgtgcatcaaagggatcgtattcttctgtttctggcaggtatatcatctaaagtgtttctgaaagctttatataaagtttgcacgggtgattgtcttgattgcttatagacaactctctggatggattaatgtgtacttattagatagtatctgcttgccatgacttaagatgaagcttcatttctc

SEQ ID NO: 109051 - DNA, 828 bp, Zea Mays
tccttgactttgccaagtgaccacgtggactggcggagggaaccgagcgagtggcccagacgtcgcgactcgcgaggccgaggcgcggcggcagcgacgactccaacaaccacgcgcggaggctgcagtgctccagccaagtagcttttggtgtgctgaatccaacaccagctcctcctccctttgttatgtatcctgagatctccatggagggaacgcaagctcaggacacagttattacagtcacacaatatactgtacctattctatagtgaagctctgaatttcatttctttttaaatatttatacttcggctgtttgtattattgtagctaccatgaaaacagttgcttaatgcatctctagatcatttctattagttcaaaaatcaattatacaggcttttggttctgtggttggtcttcattagaaaaatctagttacagaagaatggtcactggattaatctaaattttgaacccaaaacctggctctaactaaataaaaatcgtgcttgcaaaacatttgattgacaacctgttcagtggagtgcagttaagctgagctcaaggtcacatatgtatgccctcttaaaagtgcacttctgacatttgtgagaaaaaaagaaatagatacaaaaatctgtagattttttttggcaatatgtgctacactgcttgttccaaaaaagacaaataacttgtttcatatttgtgggggcaaatcaaattatttctcctgtctttcgtgtaactcgcgtatggtctagtttttccacaaaaattatctgtgttgacatacttgttcatggtctacatgtgtttatt

SEQ ID NO: 109052 - DNA, 344 bp, Zea Mays
tccttgactttgccaagtgaccacgtggactggcggagggaaccgagcgagtggcccagacgtcgcgactcgcgaggccgaggcgcggcggcagcgacgactccaacaaccacgcgcggaggctgcagtgctccagccaagatctccatggagggaacgcaagctcaggacacagttattacagtcacacaatatactgtacctattctatagtgaagctctgaatttcatttctttttaaatatttatacttcggctgtttgtattattgtagctaccatgaaaacagttgcttaatgcatctctagatcatttctattagttcaaaaatcaattatacaggc

SEQ ID NO: 109053 - DNA, 2196 bp, Zea Mays
cgcccggcatggggcactccatgaatgaataaccggagtgtcgcttccggtggaactgccatggacgcccgcggagctgacgactctgttcgatctgttcaagggatgatgcttgtggaagagcttatgtactaaaattcaatccaccgtaagctatcaaaccaaaaaatgaaaatgctcgtttgcacgcttgcaaataagagccccttgcaccacagtcgacgatcaggaccgaacacggagaaaagccacactctgcgactgctcacgccaccacctttgtttgtttgaggaaattctaagcaccacctggccaggctgaaactctagcgcgactggctttttccacggcccggcccgtcaaatccatgtactgtactcgttgtcgcggagaacgcgcccctgccacctccgcgcgggcacggcacgtcgtagtaaaaccctagaaaaacagtagcccaccgcgccggcgagccgaagcgagcgcggagctaaggatgccgcggaccaccgtggtagagagctccggctgcccgccgctccgcgccctcaccaccgacatcctcggcctcgtcaaagtcgtcgaggcccacgcgaggccggcgggcgccgccaaggtcgtcgagacgtggggcgcgcctgacgcttcccgtgccatcgttgctgcctccctcgccgatcgtgccgccgaccccgtcttggctgtggcgaggaggaacggcgtggttgagctgctgaatcccttgaatggaagtgctctggctgctgtcaagaccgcggggtcagcgccaaatgacagtggcgctgaaggtgatcccctcgccgcactgcatcttttcgcaagacagacttcggactcgatcttaggcacatttcttgcctgcacggagaaggggaaagcttctatcaggtccatcacgaaagaaaatgcagattcgggttcggatgttgggccatcagccacatgggatgtgtgcaatggggccaatgtgcaattttgctcagtagatcatggcgaaagctatgtgatatttggagggaaaggcatagaagtgaacttgtgggatatcacatctagtagtaagacatggtctgctaaatctccccgagcaaatagtcttggcatattcactcgaccttggttcactgctggaaccttcttgtgcaagaatgatcatcgtaaaattgttgcctgcacaaataatcatcaggtccgcttatatgatactgcattgcaaagaagacctgccgtctctgttgattttagggagtcaccaatcaaggcagttgctgctgatccaaatgggcatgatgtctatattggcacaggaacaggggaccttgcttctttcgacatgagaacagggaaattgctgggatgctatattggcaaatgcagtggaagtattagatctattgttaggcatccagagctacctttgatagcatcttgcggactggatagctacttacgtatctgggacacaaacacaagacagttgctatctgctgtctttctgaagcagcaccttacaacggtggtccttgattcacatttttctgttgaagagcctggagagatgaaattcaagcaattggagtctttagtggaggcggaggctgaagtccgaaaagaaaagaagaaaaagaagagcagaccaactgaagaggacgaagaacaagttggagtggtcgaccatagtgataataatggtgaaatgtatgctagaaaagaaaaaaagaaaaaaaagaaaaagaagagtagaactattgaacgggacgaggagccagacaacgatggtgaaatgtgcagtcccaagagaagaaaatctgtagaaagaagcaaatgcctgaagaagagcaagaaacagcaggtcgcatagaacatagaacaagtaccatttatctcagtatttgcattcgcttgattttgcagaattacacaattttgtgctgtagttgttttgaacagtatattccttttgaaactatgcaagggaatttcgccgtccattctacgagatacttttttttatggctgcaactgcatatgcgtcactaggggcgtgttttatttgtggatatttctggtgaaagtatctggtccactagttgggttttgttgcgttttgctgattaataggagcactatattattgtgactaaattaaaatgtattttgcagaggtaaattaa

SEQ ID NO: 109054 - DNA, 1190 bp, Zea Mays
gactgtaggggtgaaaatcctttccttccgccctattctcgtaggatctcgtcgccctcttgaacagaatctcgtcacgactagcccctacccgatgccatgtaagggcttgttcggttaggggtggattgaggaggattggaggggattaaattcccttctatacaaatttaaatagaagatgatttaatccccttcaatccctctcaaaccccttcaaaccgaacaagccctaaggtgaacctatcctacctggtgccatacaatgtggacgtgacgagcccttgcctgatgctagcaatcaaattggtgatcgaacaacgatgtcagaacaggagccatcagaacaatcagtccctgccgccaaagtctcagatcagcccaacgtcaatgatatgttccctccgccttttttttgtcacacgacatcatctccatagaggaagtagatattcgcgggcttctgaatcctggttctaagcctgatcaacaaagagacgacgtcgagcaaggtaactcttgtgacctgtaaggtatgcgtgcaatgttatgacctgatgtgtatgccatgattcacttggtaattaagcccatgttgggacactgaagaagaaaaaagaaattattcttaagagagggatgctacgtgatgatgtggatgcatcacaaaaagatggacacataattgcaaaagaaaatttattattggagaagtccactggtgcccatgaatgatgtcatgagaaggaagatgtcaagcgcctataacaactttgaagataattttaaaatggccaagacctcggaagacggcatgaacctattaataaaaaattggaatctctgtcattgttgtttcagcctacatctcgcgccaaataggaggagcaagagagttctattgggatgtccattctggagaatgtacatgtccatccacctagtgatattcgttcaaaggggaagtgcaagaaaataatatggcatctgacaaaaacaaaaagaagcatagtccatgtacaagcaaatgcacaatatgcaaacatcttggacaggatcgacaaaattgttcgaagaaaggatcagcaacaccataagtttttagtagcatcggtttaaactttttgtcttatatacaaatctgtcatatattttctatggatttttagataaagcggttgtttttgtat

SEQ ID NO: 109055 - DNA, 2530 bp, Zea Mays
atggcgctggacacggggacggcggcgggtatcgacgaggcgtacgagttctccgcgcccaggttcttcgacttcgtcgtcgaggaaacggaggaggccgtacgtgccgccgagagctggttcgaggctgcccgcagccacgccccctcgccgttcaacccaaggatcaaggaatcgagggcggaggtcaagctcgcggtcctctgtgatttcgcgcaagccgaggagccggctccagaggtaaataaacagaaggagccagctgacgaaatgtcggggccgcctgcggctcaagaagagagagatgaatcgcccccgtctctggagttcctctcggcgacggacctttctgtaaaatgtgagctgctaattgctaactctgtcttctttgattacttcgggtccgaaacagcagatggtggttctaccagcacgcttaagatgcagacgcgttatcctgcccctcctaccaatgttgcccctgcgagttcgacatgtgacagctcttcagtgaatactgatgcgcgcacgccgaagatgcaggtaaacatgtgcagagcaggtcctacggctgcttcgacgaatgtcaagaggagcgtgatgatcaagggtggccgtgatttggtggggactggaaaggcagccactgctggcgctgaaattgctcaagagaaccaagcggtgaagaggcagaagctcgatgatgggagagccagacagatactcaatgtcaagactaaggtgctgcctcataaggcgagagctgatttagctggaagcgaaatgaggaggtcccatgaggatatgcgctctgcgaaggaagcagatccatatgtatcagctgcagaattggttaagaagtttgaatcagggaccagagagcttagcatcactcacagtagatgtcgttctcatgaggatgctgcatcacagcgaagcctgcgaaggcctaagcttatgttaactagacctaaggaacctgacttccagacttcccagagagttcgaacagtaaaagtgaagagctctgcagagatagaggaggaaatgttggcaaagatacccaagttcagggcacggccattcaacaaaacgattgctgaagccccttcgttccctccacttccaaggagaaccccacagatacctgaattcaatgaattccatcttaaaacaatggagagagcaagtcgatatgcggacacctgttcagaagtttcttgtgcagatactatccagagtcaaaataagacactgaaatcgagacaagcaaagccaccacaacttcatacagcaatgagagctcggccaccaagtgtgaaaagttttcaggaacttgaactggaggagctggagaaggcccccaagttcaaggccaagccattaaacaaaaggattcttgagagcaagggagacattggtgtatttttccatccaaagtctcaggtcacagctcccaaaaaattccatttttctaccgatgttcgcttgggccctccatcagttgctgacttatttgacaagcaacagacaagatgtgcccagacgcaccataccaaaccctttcaatctacaaacagaggaaagaggtcatttaaaagagaggcagctagaagcacatctcttacaaaagaagatggaggaggaaaaggccagggttcacaaagctaatccttacccatacaccacggactacccgacgatgccaccgaaacctgagccgaagccctgtacaaggccagaaggctttcaactagagagttcggtgagacatgaactagagcagcgaaggctgatggaagaaaaacagagaatggagagtgaagaggctcagaggagaatcttcaaagctcaacctgtaatgaaagaggatcctttcccacttccggagaaagagcggaaacctctcaccgaagttgaacagtttgtgttgcatgttgatgagagggcagtgcagagatcagaatttgatacattgataaaagagaaagaaaagacttacaaaaggttgagagaggagaacgaattcgcgcacaagatcgaggaagagaaggcattgaagcagctgaggagaaccatggtgccacatgctcggccgctccccaagtttgacaggccattccgaccacagaaatcgacgaagcaggtgacaaggccgaagtcgccacagcttcaggtggatgagcgaggggcgaggaggcacgctttgatcagatgatcaccgccgttgtttatctatcttgtactacactgattgtcatgcgcggtcaagatcatatctcaatcttgccgtcgatctgttgttggttactagattctttcttctgctgaccagtgaccatatgtagagcaggccaggccctaataacagcaatctttgtcagcacaacgcagctgacacggtgtatgcccttgccctgtgtgtgtttgtgtgccagtgtgtgtgtgtatgtttgtgtaagtgtaatatgattacctcgatggtgagacttcttaatccgatgatggcttgatatagagcttgtgttga

SEQ ID NO: 109056 - DNA, 2551 bp, Zea Mays
atggcgctggacacggggacggcggcgggtatcgacgaggcgtacgagttctccgcgcccaggttcttcgacttcgtcgtcgaggaaacggaggaggccgtacgtgccgccgagagctggttcgaggctgcccgcagccacgccccctcgccgttcaacccaaggatcaaggaatcgagggcggaggtcaagctcgcggtcctctgtgatttcgcgcaagccgaggagccggctccagaggtaaataaacagaaggagccagctgacgaaatgtcggggccgcctgcggctcaagaagagagagatgaatcgcccccgtctctggagttcctctcggcgacggacctttctgtaaaatgtgagctgctaattgctaactctgtcttctttgattacttcgggtccgaaacagcagatggtggttctaccagcacgcttaagatgcagacgcgttatcctgcccctcctaccaatgttgcccctgcgagttcgacatgtgacagctcttcagtgaatactgatgcgcgcacgccgaagatgcaggtaaacatgtgcagagcaggtcctacggctgcttcgacgaatgtcaagaggagcgtgatgatcaagggtggccgtgatttggtggggactggaaaggcagccactgctggcgctgaaattgctcaagagaaccaagcggtgaagaggcagaagctcgatgatgggagagccagacagatactcaatgtcaagactaaggtgctgcctcataaggcgagagctgatttagctggaagcgaaatgaggaggtcccatgaggatatgcgctctgcgaaggaagcagatccatatgtatcagctgcagaattggttaagaagtttgaatcagggaccagagagcttagcatcactcacagtagatgtcgttctcatgaggatgctgcatcacagcgaagcctgcgaaggcctaagcttatgttaactagacctaaggaacctgacttccagacttcccagagagttcgaacagtaaaagtgaagagctctgcagagatagaggaggaaatgttggcaaagatacccaagttcagggcacggccattcaacaaaacgattgctgaagccccttcgttccctccacttccaaggagaaccccacagatacctgaattcaatgaattccatcttaaaacaatggagagagcaagtcgatatgcggacacctgttcagaagtttcttgtgcagatactatccagagtcaaaataagacactgaaatcgagacaagcaaagccaccacaacttcatacagcaatgagagctcggccaccaagtgtgaaaagttttcaggaacttgaactggaggagctggagaaggcccccaagttcaaggccaagccattaaacaaaaggattcttgagagcaagggagacattggtgtatttttccatccaaagtctcaggtcacagctcccaaaaaattccatttttctaccgatgttcgcttgggccctccatcagttgctgacttatttgacaagctctctcttcactctgaatgttcttcaaacagcaacagacaagatgtgcccagacgcaccataccaaaccctttcaatctacaaacagaggaaagaggtcatttaaaagagaggcagctagaagcacatctcttacaaaagaagatggaggaggaaaaggccagggttcacaaagctaatccttacccatacaccacggactacccgacgatgccaccgaaacctgagccgaagccctgtacaaggccagaaggctttcaactagagagttcggtgagacatgaactagagcagcgaaggctgatggaagaaaaacagagaatggagagtgaagaggctcagaggagaatcttcaaagctcaacctgtaatgaaagaggatcctttcccacttccggagaaagagcggaaacctctcaccgaagttgaacagtttgtgttgcatgttgatgagagggcagtgcagagatcagaatttgatacattgataaaagagaaagaaaagacttacaaaaggttgagagaggagaacgaattcgcgcacaagatcgaggaagagaaggcattgaagcagctgaggagaaccatggtgccacatgctcggccgctccccaagtttgacaggccattccgaccacagaaatcgacgaagcaggtgacaaggccgaagtcgccacagcttcaggtggatgagcgaggggcgaggaggcacgctttgatcagatgatcaccgccgttgtttatctatcttgtactacactgattgtcatgcgcggtcaagatcatatctcaatcttgccgtcgatctgttgttggttactagattctttcttctgctgaccagtgaccatatgtagagcaggccaggccctaataacagcaatctttgtcagcacaacgcagctgacacggtgtatgcccttgccctgtgtgtgtttgtgtgccagtgtgtgtgtgtatgtttgtgtaagtgtaatatgattacctcgatggtgagacttcttaatccgatgatggcttgatataga

SEQ ID NO: 109057 - DNA, 795 bp, Zea Mays
atgcagtaatgctcacccgcaacgttcttctcccaatcggttccacctgatgcatcccccgccgacttccttcttcttcatcatcgtctcttcatcgcttcaggaggccgccgcataattagagataggacttagagatataataacccccagctcctgatccccaagccctaggcgtaggattccacgtccatcgatggcgctggacacggggacggcggcgggtatcgacgaggcgtacgagttctccgcgcccaggttcttcgacttcgtcgtcgaggaaacggaggaggccgtacgtgccgccgagagctggttcgaggctgcccgcagccacgccccctcgccgttcaacccaaggatcaaggaatcgagggcggaggtcaagctcgcggtcctctgtgatttcgcgcaagccgaggagccggctccagaggtaaataaacagaaggagccagctgacgaaatgtcggggccgcctgcggctcaagaagagagagatgaatcgcccccgtctctggagttcctctcggcgacggacctttctgtaaaatcagcagatggtggttctaccagcacgcttaagatgcagacgcgttatcctgcccctcctaccaatgttgcccctgcgagttcgacatgtgacagctcttcagtgaatactgatgcgcgcacgccgaagatgcaggtaaacatgtgcagagcaggtcctacggctgcttcgacgaatgtcaagaggagcgtgatgatcaagggtggccgtgatttggtggggactggaaaggcagccactgc

SEQ ID NO: 109058 - DNA, 1577 bp, Zea Mays
ctctctcccacggttgcttccaggtcccaccacgtagggaggggattggagacgccgagctccaccggaggcgaaggcggaggcgcgtggcgcgccctcggactcctcgctggcctggatttatgagtatcttcctattactcaaccacaacagaagaaccagagcacattgctgccccgggcttgccggtggaactttggaggagcaacacgtggacagagaaaaaaagtcatggactggagaaaagtttttgagcaacttcaattttccgaggtcaactggaacccttacaaggacatgaatccagcaattgttccggaatattgcattgcagcagataacatctgctactctcgtacttggctaatcagctttaacataaaggaggcgtatgtgcctgacaggtttgctaggcagttcgggagggaacaaggacgcctccatggtgtgccaatgtggacaagaagaacttggagtaagtggaaagactggaggactgagtatgctcgtgagattgaggagttccatcaattggttggctgccatttcacccctcctgcggaaaccaatatcaactcctttccactacatgagtctagtgctggacagaatgatgcaggatgcagtctgaatatctctcataatttttctgcaatggttgaagatttgaaaaatgatctcccagtaattggtcgatatcttgagggaaacttgcttccttcagatgttgcaagcttcctagagagggtgagcacgatgatcaagagttataccccaccacagggcagccgaaggaaagatcgagtaagtcatggccccgctgacccagtcaggtcaaagaacccaagaaaaaggggaagacattcactctttcaagattcttttcctcatcggtatctaggcaccccggtaaacatagtgtttgatggcaccattcctctactaaatgggggtgaggcattgaaggaacaagtggccatggatccctggcgggtctcccagtcccatttgacgatgaccacatcttcttcatctctagactcaagctcaccagaatcaatgaagcggaggcgggaaggtggggatgaaattccaatcacaagggacactgattgcctccaaagtggaaggctctgtgtgcagctgaaaatgttcaagcacagagatggagtgaatgccgaggcagctaatccgattttccgctgacgaagacaaaacttcgcttggtcttcatattgtacaaagtagcaaagaaacatgacttgtttgctgcactgctgacagttagctggccaccaacaccgctctgcggtattgctgtctgcaatttgcgaggattttcctgtgtttatatcgttgtgaaacagttgcctctgtgaaatagatgccttttcagaagcgatagagttgtaactgtttatgacaattaacatggctattaaaggggcaagtcttttggcacagatagtgggaatggttgttctatcttttagggttagtttgggaactacgtttttccaagggatttctattttttcaagggaaaatgaactaattttccttggaaaaatgaaaa

SEQ ID NO: 109059 - DNA, 1691 bp, Zea Mays
cagcatctcttctctctcccacggttgcttccaggtcccaccacgtagggaggggattggagacgccgagctccaccggaggcgaaggcggaggcgcgtggcgcgccctcggactcctcgctgtcttgtttttcaggacaaaatggaccttgcacctcagggtttgataacacagcaacaaaaggcaaatgagcgaaggccagttggtagctcacaaatttggacagcctggatttatgagtatcttcctattactcaaccacaacagaagaaccagagcacattgctgccccgggcttgccggtggaactttggaggagcaacacgtggacagagaaaaaaagtcatggactggagaaaagtttttgagcaacttcaattttccgaggtcaactggaacccttacaaggacatgaatccagcaattgttccggaatattgcattgcagcagataacatctgctactctcgtacttggctaatcagctttaacataaaggaggcgtatgtgcctgacaggtttgctaggcagttcgggagggaacaaggacgcctccatggtgtgccaatgtggacaagaagaacttggagtaagtggaaagactggaggactgagtatgctcgtgagattgaggagttccatcaattggttggctgccatttcacccctcctgcggaaaccaatatcaactcctttccactacatgagtctagtgctggacagaatgatgcaggatgcagtctgaatatctctcataatttttctgcaatggttgaagatttgaaaaatgatctcccagtaattggtcgatatcttgagggaaacttgcttccttcagatgttgcaagcttcctagagagggtgagcacgatgatcaagagttataccccaccacagggcagccgaaggaaagatcgagtaagtcatggccccgctgacccagtcaggtcaaagaacccaagaaaaaggggaagacattcactctttcaagattcttttcctcatcggtatctaggcaccccggtaaacatagtgtttgatggcaccattcctctactaaatgggggtgaggcattgaaggaacaagtggccatggatccctggcgggtctcccagtcccatttgacgatgaccacatcttcttcatctctagactcaagctcaccagaatcaatgaagcggaggcgggaaggtggggatgaaattccaatcacaagggacactgattgcctccaaagtggaaggctctgtgtgcagctgaaaatgttcaagcacagagatggagtgaatgccgaggcagctaatccgattttccgctgacgaagacaaaacttcgcttggtcttcatattgtacaaagtagcaaagaaacatgacttgtttgctgcactgctgacagttagctggccaccaacaccgctctgcggtattgctgtctgcaatttgcgaggattttcctgtgtttatatcgttgtgaaacagttgcctctgtgaaatagatgccttttcagaagcgatagagttgtaactgtttatgacaattaacatggctattaaaggggcaagtcttttggcacagatagtgggaatggttgttctatcttttagggttagtttgggaactacgtttttccaagggatttctattttttcaagggaaaatgaactaattttccttggaaaaatgaaaa

SEQ ID NO: 109060 - DNA, 2153 bp, Zea Mays
cagcatctcttctctctcccacggttgcttccaggtcccaccacgtagggaggggattggagacgccgagctccaccggaggcgaaggcggaggcgcgtggcgcgccctcggactcctcgctggacaaaatggaccttgcacctcagggtttgataacacagcaacaaaaggcaaatgagcgaaggccagttggtagctcacaaatttggacacggtatggtgttctgcttccaagccagcagactcgaaagctaaaagaatggattctgactgatgagcagcaacagcttgttaatgctagtggtcttggacatctggcacttaccactgggtttaccattgaccgttctttgctgacatctttttgtgaaagatggaataatgaaacaaatactgcacatttcatgggatttgagattgcgccttcacttcgtgatgtttcatatattcttggcattccagtgactggtcatgtggtgaccgcagagccaattggtgatgaagctgtgaagcggatgtgcttgcattatttaggagagagccctggaaatggagagcaactgtgtggcttaattaggctgacttggttgtataggaattttcatcaactacctgaacatccaaccatcaataagattgcatatagcacccgagcttaccttctataccttgttggttccaccttgtttcctgacaccatgaggggatttgtatccccaagatatctaccactgttggcagattttgggaagatccgtgagtatgcttggggggctgcagcccttgctcatttgtataggggattgtctgttgcagtaacacctaatgccacaacacagtttctcggcagtgcaactttgctcatggcctggatttatgagtatcttcctattactcaaccacaacagaagaaccagagcacattgctgccccgggcttgccggtggaactttggaggagcaacacgtggacagagaaaaaaagtcatggactggagaaaagtttttgagcaacttcaattttccgaggtcaactggaacccttacaaggacatgaatccagcaattgttccggaatattgcattgcagcagataacatctgctactctcgtacttggctaatcagctttaacataaaggaggcgtatgtgcctgacaggtttgctaggcagttcgggagggaacaaggacgcctccatggtgtgccaatgtggacaagaagaacttggagtaagtggaaagactggaggactgagtatgctcgtgagattgaggagttccatcaattggttggctgccatttcacccctcctgcggaaaccaatatcaactcctttccactacatgagtctagtgctggacagaatgatgcaggatgcagtctgaatatctctcataatttttctgcaatggttgaagatttgaaaaatgatctcccagtaattggtcgatatcttgagggaaacttgcttccttcagatgttgcaagcttcctagagagggtgagcacgatgatcaagagttataccccaccacagggcagccgaaggaaagatcgagtaagtcatggccccgctgacccagtcaggtcaaagaacccaagaaaaaggggaagacattcactctttcaagattcttttcctcatcggtatctaggcaccccggtaaacatagtgtttgatggcaccattcctctactaaatgggggtgaggcattgaaggaacaagtggccatggatccctggcgggtctcccagtcccatttgacgatgaccacatcttcttcatctctagactcaagctcaccagaatcaatgaagcggaggcgggaaggtggggatgaaattccaatcacaagggacactgattgcctccaaagtggaaggctctgtgtgcagctgaaaatgttcaagcacagagatggagtgaatgccgaggcagctaatccgattttccgctgacgaagacaaaacttcgcttggtcttcatattgtacaaagtagcaaagaaacatgacttgtttgctgcactgctgacagttagctggccaccaacaccgctctgcggtattgctgtctgcaatttgcgaggattttcctgtgtttatatcgttgtgaaacagttgcctctgtgaaatagatgccttttcaga

SEQ ID NO: 109061 - DNA, 3090 bp, Zea Mays
ggcacatcccaccttatacaaggaccaagctccaattatgcctaactgaatatcgcccaattaattaacaaatcgaatagacgcaaccatactgagggccagcagcagctagaagcaaagcaactagcagcttcgatgccagggtcaatcgactcaacgacagcgcctatggtccagttacgaacaggggcaagaagagaagaaccaacctggtgccagctctgcctcccgtcccagagagcacaggctgccggacgaggcccgcctatcctcatccaccgtgggggtcacgtactcacgagtctccacagatcctacaaaggcgcgaggtaagtcggagatacgcggcgccaacagagccgctgccgtaacagcagcagcatttgctcttcaccggcgagcgagcggcggcggagtagagaagggaaaggggacgacgacgacacggtgcctcccagtcccacctccgggttggactggtcactggacccgatccttcacctaatcaccttcactcgatcagtcgggctcgagcggcttcatttcactgacatgtgggtccctatccgcagctaggattctgggcccctgtggcagccagtggaagagttcctctcacttaacagcatctcttctctctcccacggttgcttccaggtcccaccacgtagggaggggattggagacgccgagctccaccggaggcgaaggcggaggcgcgtggcgcgccctcggactcctcgctgggggtaaactgcaaaaaaaatataggagtggactctggcgcattgctggaagagacacctccggctctggttgtacgagttggtggtcgtctctccagatccgatgctcttcctggtcgatggcgcgaaaccgtggtggctaaatcctttcttcccgcttgagtagacaacatcgcctttccctcgcaatgccaccgaaaagaggtgctgctggcacccgctgcaccacctctgctgcccatggcgccaccgagtttgccaccggcagccgatccgtcgcgggccaatccgccgcccagttcgtcgttgaagctgccacccagttggccgcccaagccaccaccccaaccatcgccctcgttcttagatatgcttcaaaggacaaaatggaccttgcacctcagggtttgataacacagcaacaaaaggcaaatgagcgaaggccagttggtagctcacaaatttggacacggtatggtgttctgcttccaagccagcagactcgaaagctaaaagaatggattctgactgatgagcagcaacagcttgttaatgctagtggtcttggacatctggcacttaccactgggtttaccattgaccgttctttgctgacatctttttgtgaaagatggaataatgaaacaaatactgcacatttcatgggatttgagattgcgccttcacttcgtgatgtttcatatattcttggcattccagtgactggtcatgtggtgaccgcagagccaattggtgatgaagctgtgaagcggatgtgcttgcattatttaggagagagccctggaaatggagagcaactgtgtggcttaattaggctgacttggttgtataggaattttcatcaactacctgaacatccaaccatcaataagattgcatatagcacccgagcttaccttctataccttgttggttccaccttgtttcctgacaccatgaggggatttgtatccccaagatatctaccactgttggcagattttgggaagatccgtgagtatgcttggggggctgcagcccttgctcatttgtataggggattgtctgttgcagtaacacctaatgccacaacacagtttctcggcagtgcaactttgctcatggcctggatttatgagtatcttcctattactcaaccacaacagaagaaccagagcacattgctgccccgggcttgccggtggaactttggaggagcaacacgtggacagagaaaaaaagtcatggactggagaaaagtttttgagcaacttcaattttccgaggtcaactggaacccttacaaggacatgaatccagcaattgttccggaatattgcattgcagcagataacatctgctactctcgtacttggctaatcagctttaacataaaggaggcgtatgtgcctgacaggtttgctaggcagttcgggagggaacaaggacgcctccatggtgtgccaatgtggacaagaagaacttggagtaagtggaaagactggaggactgagtatgctcgtgagattgaggagttccatcaattggttggctgccatttcacccctcctgcggaaaccaatatcaactcctttccactacatgagtctagtgctggacagaatgatgcaggatgcagtctgaatatctctcataatttttctgcaatggttgaagatttgaaaaatgatctcccagtaattggtcgatatcttgagggaaacttgcttccttcagatgttgcaagcttcctagagagggtgagcacgatgatcaagagttataccccaccacagggcagccgaaggaaagatcgagtaagtcatggccccgctgacccagtcaggtcaaagaacccaagaaaaaggggaagacattcactctttcaagattcttttcctcatcggtatctaggcaccccggtaaacatagtgtttgatggcaccattcctctactaaatgggggtgaggcattgaaggaacaagtggccatggatccctggcgggtctcccagtcccatttgacgatgaccacatcttcttcatctctagactcaagctcaccagaatcaatgaagcggaggcgggaaggtggggatgaaattccaatcacaagggacactgattgcctccaaagtggaaggctctgtgtgcagctgaaaatgttcaagcacagagatggagtgaatgccgaggcagctaatccgattttccgctgacgaagacaaaacttcgcttggtcttcatattgtacaaagtagcaaagaaacatgacttgtttgctgcactgctgacagttagctggccaccaacaccgctctgcggtattgctgtctgcaatttg

SEQ ID NO: 109062 - DNA, 4529 bp, Zea Mays
atggcgcatgctggtaggagcggaaccggcgctcaagcacaaggtgccccgaggccgagcagtcatcaagttccctcaaagacaagtgctgtggctgcaggaggttcctcaagtgcacctacaccgacgagtgctgctgcaaatgcaatgccatcttcaagtgctcaagctccaccatcagaaggaaaagatgagcatggggcggtagttgtcgagaagtatgtgtttgatcaggaagttgctaggaaagaacttgcactaatgatatgtgttatgttatttctactgagcagaaggcaagaactagagactgcagaatgcacatgtgatgtgatgaaaagggggagagggggagaaggaagggaccagcggcaaccttcagatgacgagttcatgtcgtcagtcatcactttgtcttcgtcactgctcactagtgctggtctggagacaactgctcactggtgctggtctggagacaacgctggtgacctggagtcctggagacgccggaccactgaccaggctgttcctgttcggtcaggcactcaggccctgagggactcaggatgtgtggcagtgtggccgttagggaccaggagtgcagactatgaatttgtgaaacctgagcacacggctggtcctgacacccttgctgacaagaaacgggcagcgggcggtggctctgtgtttaagccaccccctcccatggtagctgttgctgtgggttccatcgatgaagatgagaagccaggacctacagagaatgacgcgacaagcctctctacgacaattcgcagtaactcattgcgacgctaccgaggaagtggttccgatgataaaacatctttgaatgaatcaacagtcactgatgaggacgaaagggccccatcacccaaccatcaggatgagccccaccggcaagaggcccacatctctagaagctctcaaggttctcgtcctcatggcactcctcgtggttatggttactatgatgatagaggatcccatgataaacatggtgatcgtgagagatctgcatccattggctatagtaatagtggaaggcgaagataccatgatgatagagaatctcatactaggcgcgctgagcgtgagaggtctacatcaaatgaatatactaacaagagaagtcgacatgagcatagctcaagaagctcaagaacatctgcacgatctgattgggatgatggacgctgggaatgggaagatacacctcgtcgagattatcgtgataatcgtcctggctcccggagacaacatccaacacgatctcctatgctcgctgctgcatccccggatgcacgcctggtatctccttggttagacgggaatacaccacgtctagcagcgtccccgtgggataatgtatccccttcacctgctccaatacgtgcttctggttcctcaaaagggtcttcttattcacattccagtggaagatcacaccagcttaccttttcatcaactactagttctaatattattgatgctgatagaagcccctcaaatcctgataggaacagtgagataaccgaggaaatgatgcaggagatggactacaatgctgaccgtgcatggtatgactgcgaagaacacactaccatgtttgatggtgatcattctatgtatcttggagatgataattcctacaaaaagagggaagcagagatgccgaagaagctgactcgtagagatggtagcctgatgacccttgctcaaagcaaaaagatgtcacagatgactgctgataatgctcagtgggaggatagacaattgttgagatctggagctgttaaaggaacagaagtgcaaactgaatttgatgatgaggaggaacggaaagtaatacttcttgttcatgacacaaagccccccttcctggatgggagagttgttttcacaaaacaagcagaacctgtaatgcctctgaaggacccaacatctgatatggctattattgcacgcaaaggttctagtctggttagggaaatccgtgaaaagcaaagcatgaacaaatcaaggcaacgattttgggagcttgctggatctaagcttggcaatatcttgggtgttgagaaaacagctgaacaggttgatgcagatactgctgttgttggtgaccaaggtgagattaattttaaagaagaagcaaagttttcacaacatttgaaggataaagcagaagctgtcagtgattttgcaaaatcaaaatccctttctcaacaaaggcaatatcttcccatatttaccgtccgggatgatctgctacaggttgtgcgtgaaaatcaagtggttgtggttgttggtgaaactggttctgggaagactactcaactgactcagtatctgcatgaggatggatatactaccacaggagttgttggttgtacccaaccaaggcgtgtggctgccatgagtgttgctaagcgagtcagcgaggaaatggagactgatctgggagataaagtcggatatgccatacggtttgaggatgtcactggtccaaacactataataaagtatatgacagatggagtgcttctccgtgaaaccttgaaagatgctgacctcgacaaatatcgtgttgttgtcatggatgaagcacatgaaagatcactcaacactgatgttttgtttggtatactgaagaaggttgttgcacgtagacgggattttaaactaatcgttacatctgcaaccctaaatgctgacaagttctccaagttcttcggaggtgtgcctgtattccatattccgggtcggactttcccagttaacattatgttcagcaaaacaccatgtgaggactatgtggaagctgcagtgaagcaggccatgactatccacataaccagcggccttggtgatatcctaatcttcatgactgggcaggaagaaattgaggctacctgctatgcgcttgctgaacgcatggaacagttaatatcgtcatccaccaagactatccccaagctagagattctgcccatctactcacagttgcctgctgacttgcaagccaagatttttcagaaggctgaagagggcgctcgcaagtgtattgttgctaccaatattgctgagacctcattaacagttgatggtatcttctatgtcattgataccgggtatgggaagatgaaggtgtacaacccgcggatgggtatggacgccctccaggttttcccagtcagccgggcagctgccgaccagcgtgcaggtcgggcaggaagaactggccctggcacatgctacagattgttcacagaatcagcctaccagaatgagatgctccctaaccctgtgccagagatccaaaggactaacctggggaatgtggtgcttttactgaaatccctcagagttgaaaacttgctcgactttgactttatggacccaccgccccaggagaatatcctcaactcaatgtaccaactctgggtgttaggtgcattgaacaatgttggtggccttacagaaattggctggaagatggtggagttcccgttggatccaactctggcaaaaatgcttcttatgggggagcagctagagtgccttgatgaggtgctgaccattgtatccatgctatcagtgccgtcagtcttcttccggccaaaagaccgagcagaggagagtgacgcagcaagggagaaattctttgtcccagagtctgaccacctgacactcctgaacgtgtatcttcagtggaagtcgaatcagtatcgaggcgattggtgcaacgaccacttcctccatgtcaagggtctccgcaaggctcgtgaggtgagatctcagctgctggacatactgaaaaccctgaagatccccctgacatcatgccatatggaatgggacgtggtgaggaaggctatctgctctgcgtacttccacaattccgcccggttgaagggtattggggagtacgtcaactgccggaatgggatgccgtgccacctgcaccccagcagtgcgctatatggccttggctacactcctgactatgtcgtctaccatgagcttgtcctgaccaccaaggagtacatgcagtgcgtcaccgcagttgatccacagtggctagcggagatggggcccatgttcttctctgtgaaggagacagacacctctcttcttgaccacaagaagaggcagaaggaagagaagacggcgatggaggaggagatggagaagctgaggcggcagcaagcagaggccgcgcgcatggagaaggagaaggaacgggagaagagagctaagcagcagcaacaggttgctatgcccggcctgaagaagggtgcgacttatctgaggcccaagagaatgggtctgtagataagacctgatataacttaactgtctccggtgattttgttactaggctgagggaacttgtaatgtgtagcctgctcaagcagcatgtaaaacaacacgtcaatgtgaatgtatacaacatcgacatgtgaaaaaatgaaaagaaaaatagagtgttgtcgacatagagtttgatt

SEQ ID NO: 109063 - DNA, 285 bp, Zea Mays
atgccaccacatgcggctggggtggcaatgtggcatggggacatcggtgccgttgtggccgtggcccacaaaatggcggagatgcggtggcggcgactcctggaagatgtcgggggtggccgggtggcaggcgggaagggtagcggtagtcgtcgtagtcgccgaggaggtggtgtggcgggaggaggtggtgaagtggaggaggcggatggtcgcggcgcgggagcaggaaaggggcaggtggcgcctggccatgggatcgccgaaaccctaccgatggcgtga

SEQ ID NO: 109064 - DNA, 1715 bp, Zea Mays
acgggctgggctttcgtgggccgggagtgggcgacgaacgatggctggctggccgtccgtgattgttttggaacgggcagcgtgtttggttggtgcctgtgctgtgccgccgttcgtctctgggtagcgtagcgacggcgccacggcggcttccggctcgtgcgcgcgcgcgcgtgtccgggcgagaagagctgccaagggatggaggcgctgaggaagcaggcgagcaagttcaaggagcaggtcgccaagcagcagcaggctgttataaagcaattcagtactactggctatgagcggtcagattccattgtaattgatgaggttgaactacagagacatcaacagcttgagaaattgtatacttctactcgttctgtaagggatttccagaaggacatagttagagcagctgaaggtttggtgtctattggaaacaaacatattgaagtgggaacaaaattttctgaggactgctatagatatggaagcgaaaataatgcaagcgacgaagcccttagaaaagcagcatcactatacggaggtgctttgagaaatattgagaaagagtatgaagatttcaacagaattttatcttctcagactatagacccattgagagcaatggctatgggtggacccctggaagatgctcgtggtcttgcacagcgctatagcaggatgagacatgaagctgagatcctctctactgaaattgctagaagaaaggcacgggtaagagaagctccaattgctgagcacactacaaagcttcagcaatcagaagctagaatgatagagcacaaagcaagcatggccgtgttagggaaggaagcagcagctgcacttgcagctgtcgagtctcaacagcaacgagtgacccttcagaggctggttggcacggcggaagcagaaaagttattccatctgagattagctgctatacttgatgacgttgaggcagagatgtcctctgagaagcaaaggagagaatctgcaccacctatcatatcttcacataagcgtgctgagaaagctcagtacttccttgctgaggtaatgcataatttcaatggaaccacggagaaggaactgagcttaattgttggcgattatgttgttgttcgtcagattgctcccaacggctgggcggaaggagaatgccgagggaaggctggctggtttccggctgcctatgttgagaggcgcgagaatatccccccgaataaagttttccctcaagtataagatcataagaggggtcatctgtttccactgataagcagtttggtttggcattgaggagctgcaaggctgtatctaacttctgattggtttgatgctccgtatggcgtatcttgtgcatcctatgttcttgtggtggtctagacttggaataagatatgtcggcacgtgctctgcgcctgtgcctgcgcgcacattgatgaagatgtcgctttgcatgtgtccgcagtgtgctactgcttgcggcagcgtaggtcatgttgaatgagctttcctttactgacagatttcgagtgtaaattggttcttgcacttttttttcgttagggtgtatcagtagttctgtacaatatgtttttaatgagaccattcggccatcagagctttgatctgtctcctaaccgcaggattttttttttcagaacgcttatttcacattttagctgtcagaagttgatttttttttcttt

SEQ ID NO: 109065 - DNA, 2267 bp, Zea Mays
acgggctgggctttcgtgggccgggagtgggcgacgaacgatggctggctggccgtccgtgattgttttggaacgggcagcgtgtttggttggtgcctgtgctgtgccgccgttcgtctctgggtagcgtagcgacggcgccacggcggcttccggctcgtgcgcgcgcgcgcgtgtccgggcgagaagagctgccaagggatggaggcgctgaggaagcaggcgagcaagttcaaggagcaggtcgccaagcagcagcaggctgttataaagcaattcagtactactggctatgagcggtcagattccattgtaattgatgaggttgaactacagagacatcaacagcttgagaaattgtatacttctactcgttctgtaagggatttccagaaggacatagttagagcagctgaaggtttggtgtctattggaaacaaacatattgaagtgggaacaaaattttctgaggactgctatagatatggaagcgaaaataatgcaagcgacgaagcccttagaaaagcagcatcactatacggaggtgctttgagaaatattgagaaagagtatgaagatttcaacagaattttatcttctcagactatagacccattgagagcaatggctatgggtggacccctggaagatgctcgtggtcttgcacagcgctatagcaggatgagacatgaagctgagatcctctctactgaaattgctagaagaaaggcacgggtaagagaagctccaattgctgagcacactacaaagcttcagcaatcagaagctagaatgatagagcacaaagcaagcatggccgtgttagggaaggaagcagcagctgcacttgcagctgtcgagtctcaacagcaacgagtgacccttcagaggctggttggcacggcggaagcagaaaagttattccatctgagattagctgctatacttgatgacgttgaggcagagatgtcctctgagaagcaaaggagagaatctgcaccacctatcatatcttcacataagcgtgctgagaaagctcagtacttccttgctgaggtaatgcataatttcaatggaaccacggagaaggaactgagcttaattgttggcgattatgttgttgttcgtcaggtcagtgtgctcttaacactatcagctgtggaagtaatgtagtacacactaaagcctagttttggtactctagggccttgttcgtttgtatcggattggtgggtcggaacgattccgagtcggattgcttctctaatttatataaactttgattagctggaacgattccgggtgcaatccgacgtaaacgaacaaggcctagtagtgaaagggattggagtggatttagatgtattgtgggagtttttgatctattgtggatttatacactctccaatccctccaaaccacttcaatactagagtaactaaactaggtctaacttggcttttaatacctgtgaacgtgatcacaagaaaccatctggtcaaagatgagtagatgaccaatcaattagtatagtatggacactcgtcctcctgcagtgagtgcaaagtgcacagtaactacctacaggcttgtaggatgtgttggttcatcagttgctgaaaagaaccgtactatggtggaaggaatataagaacgaattagcctgtccaacaacaaaaaaagttaacccactatctgtgagtagtgttttactgtatgattgcatccttgttctctctgtgcctgcaccagattgctcccaacggctgggcggaaggagaatgccgagggaaggctggctggtttccggctgcctatgttgagaggcgcgagaatatccccccgaataaagttttccctcaagtataagatcataagaggggtcatctgtttccactgataagcagtttggtttggcattgaggagctgcaaggctgtatctaacttctgattggtttgatgctccgtatggcgtatcttgtgcatcctatgttcttgtggtggtctagacttggaataagatatgtcggcacgtgctctgcgcctgtgcctgcgcgcacattgatgaagatgtcgctttgcatgtgtccgcagtgtgctactgcttgcggcagcgtaggtcatgttgaatgagctttcctttactgacagatttcgagtgtaaattggttcttgcacttttttttcgttagggtgtatcagtagttctgtacaatatgtttttaatgagaccattcggccatcagagctttgatctgtctcctaa

SEQ ID NO: 109066 - DNA, 2184 bp, Zea Mays
atggaggacggtggtggtgacattagtcgctccatcaaccacgatttgaggctgctcagagaacctggagtccctgagactactaccactaccgaccatgctagtggcagtagtagtagtgttgcagttcctatcgacctcgccgtcggggaatctggcgctggccaaggcgcagaagctcctgctgaggttggtcagggctccagcgaccgcaagaggtgtaacacctcaaaggtatgggatgattttgagcctgtgtacacgattaagaacggcaagagggtaaggactggtgggaagtgtcactggtgcaaacaaactttgtctgctgtgtcttctagtggtactggccatttgcttaggcatcaacgtgattgcaaagtaaaacatgctaggatgggcaagcagtccatgattaagttaaaccctgatggttctgttcgtaattttgattattgtccccatcgtgctagaacagagatgtgtaggttgattgccaggcttgatcttcctctaaattttgctgagtcctctgcttttgagcagtacataaaattatcccacaatcctggcttcaaatctgtgaccagacaaactacatctagggatatgattaagtactatactgatcgtcgtaaggttatagctgattgcttgttgtctgcttcgtctattgcgattacttctgatatttggtcaggaaatgctaaagaggactaccttagtgtagttgctcattacattaataaggattggatgttagaaaagagaatcgttggcctcaggctcatagagtctgctcacactggtgtcaacattgctggccatatctatactgttattgatgattttgcatgcactaacaaagtgatctctatcactttggataatgcatcttctaactctagagctatggagaagcttaaacctctactgtctggttacgttggtagtcttttgttgcatcaacgttgtgcatgccacattatcaatcttattgtcaagtctggcttgaaacgacttaagccttacattgaagcatttagaactgctatttcattcctaaactcctctaatcagcgcattgctgcttataagagttactgtgttgctatggatgtacgccctcgtaagtttgggctagacatggatgtgaggtggaattctacatatctcatgcttaagcatttagttccatacaagtcaacattttctattttcatgcatactcattaccctagaaagcctggtgaacctgatctattaacagaggctcattggtatgtggctgaaaaggttctagaatttttggaattgttctatgatgcaactgtatccctttctggtgtttattatcccacatctcctctgatattgcataacatacttgatattgctaaacatttaaatgagtatgacaatgatcacttgtttagaaatgctatttttcctatgaagtctaaattccttaagtactggagggatattccaatgttatatgcttttgcttttatactggaccctagagcaaagattagaggttttcataattttctgaggatattgtctgggctaactggtactgactactcaaatttctattctaatgtgagatctgaactgactgtaatgtttactaaatatgatgctaagtttggtgtagttaaactacagaggaccactcctacaacatctattactggtaagaggaaacaacaatggagctggatctatggatctgaaaatgagtatactcctcctattactcctcctaacttgtctaggggaacatcagcatctgaattgttacaggcagcaagctctggtgcatgcataagttctttagactctgaactgtcctcctaccttgatagtgacactctttagaagtttgaggatgatttcaacctcttaaactggtggcatgagcataaactaacatttcctgttctctcaatattagctagagatgttatttcagttcctgtttcgacagtatcttctgagtctgctttcagtctttgtggcaggatcatcgaggaacgacgacgacgattagccccagagatggttgagatgctcctttgcatcaaggactgggagctaggtgatgcaagagctcaacactctgcccaggacaaagaattagaagatgcattcgaaggaatgtatcttgatgaggtg

SEQ ID NO: 109067 - DNA, 79 bp, Zea Mays
aactttcagtctttcagatatcatcaaacctcactgttttaactcagcaaaatgcgtgccctcgagttcaacattaact

SEQ ID NO: 109068 - DNA, 818 bp, Zea Mays
ctttagatctttattgttcaacttctggatggcttttgaagctagctctttagttctaaaattgacaaaagcatacatgcatttgcacctatagaaaagaaaagaaaaatctctgaatttagaagaaagaaaaaacaaaagctagcacaaagaaatctaggagtagtcacttccactacttgtccaaaagactggcagagtttttgagatcaccataagagacatcagaggagatgccccaacataaacttcggatccatgaggaggaagagcaagaagttaaccatgactatcttttccatcctcatccctgtcatgtttagcatcaacttggcatacacttcagttttttcatacttgccatctagctctttatactcaacttcctctttctcatactcaacttgttcctcttcgtctacctcatcaggatcatcaaactccaaacagccttgttgtttcaccaattcagttgatttggtggaagcaacattctctgtccacctcagcatctttctcaaagtaccaaggaaactttggaaagagcacaggaaccagcaatactgtgggagcaaattgatgatgtatggacaggaagaaaaacaacagaaacagctagaaaaaatgatacgtaatgttctgaaattgggttcaaccattgacatccaagtaagaaatgggacgtcaaagtatgcgactgttaaagatttagccgtagtttctaaatagatttagcataagtcttaactcttaagatactttgtctcttgcttgaagcaagagggctgtttgaaaaagtacgccaggatatcccaacc

SEQ ID NO: 109069 - DNA, 1832 bp, Zea Mays
acgccacaggaaggggaaaaaaaacgcaggtgcccaaaacacgttcgccccagagaattgaaaacttaccactgcgaattcaattcgaaagcctcagacccagagagcttcccatggcatccgctaccacctccatctcgtcgcaccctgccgccctccgcgacgtcaaagctgcgaggattggtggcgcgctgaggcaggtgggcgtggcggcgcgtggccagcgcgctcgggcggtgcccccgctgcgcgcggcggagcctgcgaggcggccggtggcggcctccgcggccgcggcgccgccggccgcgcccgtggccgacgaggcggcggtggactacgaggccctggcgcgcgagcttgagggcgcgtcgccgctggagatcatggatcgggcgctggccatgttcggctccgaaatcgccatcgccttcagcggcgcggaggacgtggcgctgatcgagtacgcgaagctgacggggcgtcccttccgggtgttcagcctggacacggggcggctcaacccggagacgtaccagctcttcgacagggtggagaagcactacggcatccgcatcgagtacatgttcccggacgccagcgaggtgcaggagctggtgcggaccaagggcctcttctccttctacgaggacggccaccaggagtgctgccgcgtgcgcaaggtgcggcccctgcgcagggcgctcagggggctcagggcgtggatcaccggccagaggaaggaccagtcccccggcaccagggccagcatccctctggtccaggttgacccttccttcgaaggcctggacggcggggctggtagcttggtcaagtggaaccccgtggccaacgtcgacggcaaggacatctggactttcctgcggaccatggacgtccctgtcaacgccctgcatgctcagggctacgtgtccatcgggtgcgagccgtgcaccaggcctgtcctgccggggcagcacgagcgggaaggccggtggtggtgggaggacgccaaggccaaggagtgcggcctccacaagggcaacatcgacaaggacggccaggcggcggcggcggcggcggcccccaggactgccaacggcaacggctcggcgggcgccccggacatcttcgagagccccgccgtcgtgtccctcacccgcgccggggtcgagaacctgctgcgcctggagagccgcgccgagccgtggctcgtggtgctgtacgcgccctggtgcccgttctgccaggccatggaggcctcctacgtggagctggccgagaggctggcggggtccggcggcgtgaaggtggcccggttccgcgccgacggcgagcagaagccgttcgcgcaggccgagctgcagctgcagagcttccccaccgtgctcctgttccccagccgcaccgcccggcccatcaagtacccgtcggagaagagggacgtcgactcgctcctcgccttcgtcaacagcctccggtgaggcccgccagtgagcgagaaccatcgttctctgtcagtatgtactgtattacatgttggtatccatctaggtgcgctgtacgtagagagggaggcggagggaactgggatgctagaaaaaacagatgcaggtgttgcttgtaactgcagaatgatggtaggtatgcatgaagtctgaggtcctgtgttatttggcagctgagggagagatttgtgcgtgcttgtagttgtagctagtggcgatggagtattctaaggaaaatcaaataagaatcgaagttttgagagttcttgtttgttcatgttggctgtcgactatatagacagtagaaagcgaagatttttattt

SEQ ID NO: 109070 - DNA, 2471 bp, Zea Mays
atgggggcagcgaagcgcgtcgtctgctggcggccatccgcggcaccgctggccacctgcttcttctccctcgccgtggctaccctcgcggcggccagcgacaccatcctccccggcggcgacggcatctccgggaaccagacgctggtctcccagaacggcgtgttcgagctggggttcttctccccggggacggacatataccacttcctgggcgtgcggatcaggaacatgccgggggacgcaggcaccaccccgacgttctggttcggggaccgggtctacatctccgacctctccagcgcggcgctgcagctgatcggcgaccgcctgtacatcacggagaacggcactaacctctggtggtcaagcgtggcgggcgccgccgccgccgcatcggcggcatattccgccgtcgcggcggtcctcctcgacagcggcaacctcgtggtcgtggcgagggaccaagccaactcgtcgtcgtcgcgggtcctgtggcagagcttcgactaccccggcgacgcgctgctccccggcgcgaggctcgggctcgacggggacaccggaaccaacgtctcgctgacgtacaggaacgccaactcgtggcacagcagcagcctcagcgtggacgtggacccgcgcaggaggaacgggttcgtgctcaccaccgacggctgggacgtccaccgggggaccttcccggcgtggatggtgtcttcgcaaggaaacggcagctcgctggtgctgctcaacaacacccgtccgggtccgggtctgggtccggctgcggacggcgcaggcatggtggcggagcacctgcagctgcacctggggcaggtgagcctacggagctggtcgagttccgctggctgctgggtggcccgctggaccttcccgtccgactgcagatccagcgccttcttctgcggccgtttcggcgtttgcacgagcgccggcacgtgtgcctgcgtcgacggattcgagccttcgaaaccctgcgagtggcagcgcgggtactttgtggacgggtgcaccaggtctcacccgctgagctgcaccgcagacgatagtggccgccaggacgactcgtttctgctcctggacaacctgcgagggctcccttacagttccatcccccagaacgatacggcggcacaaggcgacgaaggctgcagagaagcctgtgcaggcaagtgctactgcgtcgcgtacgcctacgacgactctggatgcaagctgtggtacaactacctgtacaacgtgagcttcgctgctacgcctccgtacagcaaggtttaccttcgtttggcttcttctgagcccgtggtccagaaaggtccgagaactgtaagcagcatcgtgctcatggctgtcggattggcagcagcggcagcctgtgtgatatcgatactgctggcgctcctacggagatacagggacaggagaaagttccaacaacgggcggaaggttctctgtctgtctacccatacgcggaggtgaggagagccacgaggaatttctccgacaagctcggcgagggggggttcggctgcgtcttcagggggacgatgcccggacccggacccggaccgaccgccgtcgccgtgaagcgtctcaaagggctcgggcgcgcggacaagcagttcggagccgaggtgcagacgctgggagtgatccggcacacgaacgtcgtccctctcctggggttctgcgtgaaagggagcacgaggatgctggtgtaccagtacatggacaacggctccctggacgcgcacctcttctcgggaagcccttgctgccggctgctggactggggcctccggtaccggatcgcgcatggcgtcgccaggggcctagcctatctccacgaggagtgccaggactgcatcatacactgcgacatcaagcctgagaacatcctcctcgacgcggagttccgcgcgaagatcgcggacttcggcatggcgaagcttctcgggcgggagttcagctccgcgctgaccacgatccgggggaccatggggtatctcgcgccggagtgggtgtctgggcagcctatcaccaagaaggcagacgtctacagcttcggcatcgtgcttctggaaataatctcggggagaaggatgacaaggagactgaaatctggaagccatcggtatttccccctctatgctgctgtccagctgaacgaggggaacgtgctgtgcttgctggaccctaggctggaagggcatgccgatgtcagggagcttgacgtcgcctgcagagttgcctgctggtgtatccaggacgaggagaacgacaggccgtccatggcccaagttgttcgtatgctggaaggtgttgtagacgctgagattcctccagttccgtcttcgttcaaggaccttattgagggtgacaacagcagcacatgttccgaagaaggctaatgttttttctttactatatgcggacaattgattaggat

SEQ ID NO: 109071 - DNA, 550 bp, Zea Mays
tttatcagcaaagtcatgcctggcgttgctcatcattaatgacatcccagcttcaaggctagaatcaaatgcaaggacaaacgaatcagtgcatcgcaacgagagaattggcaaccttttttagcttcagcatgccatttgaactgaatagggcacagacctcagttcctggcttcctgctactacatacatcatggacaaaagaagcaatttcattcagaagacgggggtaaaggccactccccactgccctactctaacaatctattcaacgcaaaaccatttacaaccaacatacatttcgatacgggcattacacaggggtctacactaccaaatgaaagcctaaattctggtgccaaaatttccaccgaagaaagctgtattgtggtcagagaggttcctccaaagtattctgatcatgggcattgctagtatgctacctacatgtatgccacccaaactcccaaagcatttctccgaatgctgggatttgaactcctatcacaatgcccccagtagacatgatctcatttcaagcagtgtccat

SEQ ID NO: 109072 - DNA, 564 bp, Zea Mays
ccagtgaataagagtttatcagcaaagtcatgcctggcgttgctcatcattaatgacatcccagcttcaaggctagaatcaaatgcaaggacaaacgaatcagtgcatcgcaacgagagaattggcaaccttttttagcttcagcatgccatttgaactgaatagggcacagacctcagttcctggcttcctgctactacatacatcatggacaaaagaagcaatttcattcagaagacgggggtaaaggccactccccactgccctactctaacaatctattcaacgcaaaaccatttacaaccaacatacatttcgatacgggcattacacaggggtctacactaccaaatgaaagcctaaattctggtgccaaaatttccaccgaagaaagctgtattgtggtcagagaggttcctccaaagtattctgatcatgggcattgctagtatgctacctacatgtatgccacccaaactcccaaagcatttctccgaatgctgggatttgaactcctatcacaatgcccccagtagacatgatctcatttcaagcagtgtccat

SEQ ID NO: 109073 - DNA, 2054 bp, Zea Mays
gagagctatctcactaagtcaccatgtcacggatgaatatggttaactatttggttcactataattctaaacatggaccttaacacaactgaattccaatagtcattttattttgagagacaaattttcttttgtttgttttcatttaaaagttccatttgtggtattctgatgccaatttcgcatttacaattttttgctggagtagaatttactaggagctgcagaagcaaagatatcctcaaaacctcctagagctttgccaagagttgctatgatgaggtcatcaactaccacagctgtcacctctggggtttcagacaaaagaagcagcactgggggtgctgccaacaggcaggcagctggtaaaactgccagtacttcagctggcctgagatctggcgggggtacaaagtctagttcaatctcaaaatcaggtcccttcacatcagcagcaacttctcatggtgtgtcaatggacactaagccggaagcaaaaaccaaatcagcaaccttaagcaacaaaaataggactgcccagagggtccctgttcatccgccatcaaaatctggtatcagcaaaactattccctcaagatcatcagggaacacgattccagctaagggccatgctgaccgtgcatcaccaagcatttcacctagcagctccatggacagcatgagctctgtcatatctggggcttcaactgcttccaccgtagggaggatgagccatacatctgagagtttaaatggactgtccccctccctcaggaagagcaatgactgccctccaactccaaagcttaggcctcctgttgtcacagagggtcattcatctggaacagcagcacctggagttaatttaaaagctacttctgaaatgaccaaccagagaaaaggttttaagccatctgggcttcggaggcccacacccaagattggttattttgatgctgtatgtgcatttttttaaaattccttagcttgcagtaatagtgatttcctttattattgtgcttctaacaatctcactgtatgtctcaggagaaatacattgaccaaaacatcggtgcacagctacaaccacaaccttcaaaggtccagtgtctacctgacacaacacaatttcagagcatgaatgtggatgccgcaccagctacctacgtccaacaggattcaaaactgacagcaacacctcatgaggaaagttgtgcttccgaaagtaaggtcgtgaagctgctgcctcttaaggtggaagtagagccttttaaggtggcggaaccatgcacgcaccagactgatccagttgtggtcagacccgaagcagtgcaacagcaatccatggagatccagtgcttgctatatgccacaccaaactctcagcaaacctttggtcaacaagtattagaacctatagtagcacctcatgaggttagtgcttgcaaaagtaacacagtaaagacgcctttggaaactgtgcaaatggaagtagaagcgcctctagaagcagtgcaattggaagcagaagcttttaaggtggacaaacctgaagcgtgcagacacctggtcagtccaattgtggtgaaactcgaagacaaattctgtgatcaaaatgctagagctcttgtcgctgaacgtgaagattgcacgctcatgactgaggcagtggtggcactggctacagactattcaaaagagaacattccggttttgcatgagaatatacaagctaatgtggatgcgagttcattagttgaggtgctgacccagaagttatcctccatttctcttggggaggataactctaacgtggctctcaggtcctgcagtgaatgaggtttggatggtatgctggttgttattttattaccctcttgttatctgtaggcaaccgtaccgcagctgacgagtccaattcccttaacctgcttgtggtgtaaaatccttgtgcacagagctttatagaactaagattttctattgtatgcatgaaaacctcatctttgtctattgccggtttgcaagtaaagtgtgtttgtttggtaattata

SEQ ID NO: 109074 - DNA, 1875 bp, Zea Mays
cagctcgtctcgcattcccttcgcctcctctccgatcctgacaactgttggcgatctagggttttcccaccggtctccggtgactccgaccggccgcaggcctccgcgctgcacccatggaggggctcaccctcatcgacgtctccgtcgaggacgatcttcttttcgacatcgcctcaccgccccacgcagggtctctggtgggcgccgtggcgacttcctctggcgcttttccgtcggcggcgggacgggctccggatccggacagtgtgatggaggagcaggcgctccccgagcggacggactccccggaacagcggaaggccaagaagggggtgaacctgcgcaagagcttggcttgggacagcgctttttttacaagtgaaggtgttctcgacactgaggaattggccattgtaaacagcaccttccgtaagacgcagggttccaggttgcctggaatcgtggaggaaatgagtagatcgggggaatcagcaacctcaactctggaaagtgaatcctgggtgatggagagcgttgagactgaactatttgacaatgtccgtgcttcgatccagaggtctcttggcaaacctgataaagttccaggtcggcctgttgctggctcaaaccacccaaaggccacagcaaatgtacctcgtgttgcagttgcagctagaaaaggtgttgatcggatgccccagccaaagataagggcccctgtttcaacaagccaaggagccggtgtcagacaaagggcccaagtcaccaccaaagagcctgtggctgcacgagttaatttactaggagctgcagaagcaaagatatcctcaaaacctcctagagctttgccaagagttgctatgatgaggtcatcaactaccacagctgtcacctctggggtttcagacaaaagaagcagcactgggggtgctgccaacaggcaggcagctggtaaaactgccagtacttcagctggcctgagatctggcgggggtacaaagtctagttcaatctcaaaatcaggtcccttcacatcagcagcaacttctcatggtgtgtcaatggacactaagccggaagcaaaaaccaaatcagcaaccttaagcaacaaaaataggactgcccagagggtccctgttcatccgccatcaaaatctggtatcagcaaaactattccctcaagatcatcagggaacacgattccagctaagggccatgctgaccgtgcatcaccaagcatttcacctagcagctccatggacagcatgagctctgtcatatctggggcttcaactgcttccaccgtagggaggatgagccatacatctgagagtttaaatggactgtccccctccctcaggaagagcaatgactgccctccaactccaaagcttaggcctcctgttgtcacagagggtcattcatctggaacagcagcacctggagttaatttaaaagctacttctgaaatgaccaaccagagaaaaggttttaagccatctgggcttcggaggcccacacccaagattggttattttgatgctgtatgtgcatttttttaaaattccttagcttgcagtaatagtgatttcctttattattgtgcttctaacaatctcactgtatgtctcaggagaaatacattgaccaaaacatcggtgcacagctacaaccacaaccttcaaaggtccagtgtctacctgacacaacacaatttcagagcatgaatgtggatgccgcaccagctacctacgtccaacaggattcaaaactgacagcaacacctcatgaggaaagttgtgcttccgaaagtaaggtcgtgaagctgctgcctcttaaggtggaagtagagccttttaaggtggcggaacc

SEQ ID NO: 109075 - DNA, 1347 bp, Zea Mays
atgaagagatccaaggtccgagagaacttcactgaggtcaccaccatggagaaagatggtgaggcgtctaggactctaggtacagtgctgcaactgctccgcatgccatggagaggggggcgatgttgtggtgaggcggaagcgttgcaaaagaggagctgcttacgcaatacaaccgtagctccggggcttttgagtaaaagcctcgcaatagaggccataataaataagggcgacacgccatccccaccgaaccctacccctacccgcgacttcgctcagcttccgccgatcggcttgccccgtcgatttcgccaacccctcgacccgatcggctccattgatcgtacctcgtcgtccggttgtcgatggccaggacctctttcaaaatggagcacgacctcgagaaaaggcagtccgaatctgccaggatcagggataagtatcccgacagaattcctgtgattgttgagaaagctggcaaaactgatgtccccgagattgataagaagaagtaccttgtccctgctgatctcactgtcggccagtttgtctatgtggtgaggaagagaatcaagctgagcccagagaaggccatctttgtctttgtgaagaacaccttgccaccaactgcctctttgatgtctgcaatctacgaagagaacaaggacgaggatggcttcctttacatgacctacagtggtgaaaacaccttcggctctgcctagagcaatcgcccctgccactgtaaataaacgagcatgatggggctgctgctattgtaaacctgtgtatatacctcagtctctagtatgctgctgccggattgcttcaatggcttcaatgacacccttagctttcaactgtttggatttctcctgtgacattgaattccttcggtatcgaaacatttgatcatttcactattacttcacttaccttatctcatcagatgcgtgattgctgtttatctgtgctcatcgtgtttgttttaagctgcaactgcaatctgctgacggccaagctgatgctatatttttcttgatggaatcgatagattcccgcagtagataaaggggtgtttggtttaagaaattaatccatccaaaatgaggtgatgcatcgtgagttagttccttaaatttggtaggatgactcatactcagtccttatatcagtactatctaactatgaaatcaaataaaaaagtgaggaataagaacagtactaactacgaaaccaaataaaaaaatgaggaagtccttatatcagtactatctaactatgaaatcaaataaaaaagtgaggaataagaacagtactaactacgaaaccaaataaaaaaaa

SEQ ID NO: 109076 - DNA, 672 bp, Zea Mays
cgtgctcaactctccagtccccacccaaacccaatccatccaaccccatttccccgcctccatcccgtcccgcccgccccttgtcgcttccgcttcccccgtcgccacggcccgcaggccagtagttatatcgtgttcccacctctccatcgcctagccctcctcggcgctcgccagcagcgcctcatccaccctgcgcgctctgccccgcgcacgggcctcatggtgcggtgctccctccaagagctccgcagccgcatcgactccatcaggaacacgcgcaagatcaaggaggccatgaagctggtggccgccgccaaggtgcggcccgcgcaggaggcggtcgtctcctcccgccccttctcggaggcgctggtggaggtgctctacaacatgaaccaggagatccagacggaggacatcgacctgccccttacccgcactcgctctgtcaggaagccaccttctctcggtccgagcccaaggtcgggcgaggcagtgactcctccgaggtcgaggctgagtccgagccctggggtcgggcgaggcaaagatcgtcttccgaggtcgaggttgagtccgagccctggggtcgggcgaggcggagaccgtcttccggggtcgaggttgagtccgagccctcgggtcgggcgaggcggagcttcctatggc

SEQ ID NO: 109077 - DNA, 173 bp, Zea Mays
attcattttagtgtggctcttgtatctcatattgctgctctatggcccagattttgttgtcctttgcactctacttgatgctggtgtgttgaaaacatgctgccagttttcatttcgttatatcctttttggtactgtccttagcactctacttgatgttggtgtgatgaaac

SEQ ID NO: 109078 - DNA, 2351 bp, Zea Mays
cttaccttccggtaaagcaatgcaactacaacgagctgacagcaaagcaaagcttgagaggcttttctcaaaaacgcgccgtcgccgtttcttccccctttttctttgagaaaattcgcccgcgagatctttagtttcagaccccgtgtggattagtcgctgtcacgatcgaggcggggcgccaattgcggtggccaccacctccaatccactccccgcggtggcctcgccgagctgttcttgctccgtcctccctccaactccaagatttgtttcgcacccgattcctgagcttccgcggcgcttcttgctgaaaagaaagctccgagttcttcagttctggatcgatagagaggcggttcctttgcgggctctgaggttcagctctcgctcttgatttgtctcatcgacgcatcagttgggctgcaggcttagagctggaaggaataatttgactagagaaatggggcagtgttgtagcagagctcccgccccggactctggacggggaggcaccaatggttatggctattctaaccaggcaaagccagcgcaaacaccttcgagttacaaccctcctcagcagccggccgaggtgaggtacacgccgccggcgacgaaccctccggtagtcccacctgtgcctgtgccaccgaagcccacggcggacacgattcttggcaaacagtacgaggacgtgcgctctgtctactccctcggaaaggagcttggccggggccagttcggggtgacatacctctgcacagaggttgcctctggtaagcagtacgcctgcaagtccatctccaagcgcaagcttaccagcaaggcagacagggaggacattcgaagagagatccagatcatgcagcatctgtctggacagccaaacattgttgagttccggggagcatacgaggacaagagcaatgtccatgtggtgatggagctctgcgcaggtggggagctcttcgatcgcatcattgccaaggggcactacacagagcgtgcagctgctacaatctgcagagcagttgtgaatgttgtcaacatttgccacttcatgggtgtgatgcaccgtgacctgaaaccggagaacttcttgcttgcgagcaaggaggagaatgcaatgctcaaggccactgattttgggctttccgtcttcatcgaagaaggaaagatgtacagggacatcgttggaagtgcttattatgttgcgcctgaagtccttaagcggagctatggaaaagagatagatgtttggagcgcaggtgttattttgtacattcttctcagtggtgtgcctccattttgggctgaaactgaaaaggggatatttgatgctattctgcatgaggagattgactttgaaagtcaaccttggccatcaatttctgagagtgctaaagacttggttagaaagatgttgacacgagatccaaagaaaagactgacttcagctcaagttcttcaacattcatggctcagagaaggtggaggtgcatctgataagcctatcgacagtgctgttctttctagaatgaagcagttcagagcaatgaataagctgaaaaagatggccctaaaggttattgcctcaaaccttaacgaggaagagatcaaggggctaaagcaaatgttcatgaacatggacacagacaatagtggcacaatcacgtatgaagaactcaaagcaggactagccaaacttggatcaaagctgtcggaagctgaagtaaagcagttgatggaggctgctgatgttgatgggaatggatccatcgactatgttgagttcatcactgccacaatgcatagacacaagctcgaaagagacgagtatttgtttaaggcattccagtacttcgataaagataacagcggtttcatcacaagagatgagctggagtctgctttgatcgagcatgagatgggtgacacgagtacaataaaggagatcatatcagaagtggacacagacaatgatgggaggattaactatgaggagttctgcgcaatgatgagaggagggatgcagcagccaatgaggctcaagtagcctgttcccttagtagaaatggtgtaccgttagttactgttcttcactctttttcccccttcgtatttggtactcttggtagccggattaagcttacaatgggcgtcgctcttttgcattgtcaagagatgattgtgtatatctttttcttttgctcgtgtttgttgcattgtagtatcctgaacgtcccttccttttgtaagtttgtttatacacaagcacatccaatagaaagtgcaatttgtgtctcactctgtactagttgtgtaattggtgataggaaaaaggtcta

SEQ ID NO: 109079 - DNA, 2230 bp, Zea Mays
aacgagctgacagcaaagcaaagcttgagaggcttttctcaaaaacgcgccgtcgccgtttcttccccctttttctttgagaaaattcgcccgcgagatctttagtttcagaccccgtgtggattagtcgctgtcacgatcgaggcggggcgccaattgcggtggccaccacctccaatccactccccgcggtggcctcgccgagctgttcttgctccgtcctccctccaactccaagatttgtttcgcacccgattcctgagcttccgcggcgcttcttgctgaaaagaaagctccgagttcttcagttctggatcgatagagaggcggttcctttgcgggctctgaggcttagagctggaaggaataatttgactagagaaatggggcagtgttgtagcagagctcccgccccggactctggacggggaggcaccaatggttatggctattctaaccaggcaaagccagcgcaaacaccttcgagttacaaccctcctcagcagccggccgaggtgaggtacacgccgccggcgacgaaccctccggtagtcccacctgtgcctgtgccaccgaagcccacggcggacacgattcttggcaaacagtacgaggacgtgcgctctgtctactccctcggaaaggagcttggccggggccagttcggggtgacatacctctgcacagaggttgcctctggtaagcagtacgcctgcaagtccatctccaagcgcaagcttaccagcaaggcagacagggaggacattcgaagagagatccagatcatgcagcatctgtctggacagccaaacattgttgagttccggggagcatacgaggacaagagcaatgtccatgtggtgatggagctctgcgcaggtggggagctcttcgatcgcatcattgccaaggggcactacacagagcgtgcagctgctacaatctgcagagcagttgtgaatgttgtcaacatttgccacttcatgggtgtgatgcaccgtgacctgaaaccggagaacttcttgcttgcgagcaaggaggagaatgcaatgctcaaggccactgattttgggctttccgtcttcatcgaagaaggaaagatgtacagggacatcgttggaagtgcttattatgttgcgcctgaagtccttaagcggagctatggaaaagagatagatgtttggagcgcaggtgttattttgtacattcttctcagtggtgtgcctccattttgggctgaaactgaaaaggggatatttgatgctattctgcatgaggagattgactttgaaagtcaaccttggccatcaatttctgagagtgctaaagacttggttagaaagatgttgacacgagatccaaagaaaagactgacttcagctcaagttcttcaacattcatggctcagagaaggtggaggtgcatctgataagcctatcgacagtgctgttctttctagaatgaagcagttcagagcaatgaataagctgaaaaagatggccctaaaggttattgcctcaaaccttaacgaggaagagatcaaggggctaaagcaaatgttcatgaacatggacacagacaatagtggcacaatcacgtatgaagaactcaaagcaggactagccaaacttggatcaaagctgtcggaagctgaagtaaagcagttgatggaggctgctgatgttgatgggaatggatccatcgactatgttgagttcatcactgccacaatgcatagacacaagctcgaaagagacgagtatttgtttaaggcattccagtacttcgataaagataacagcggtttcatcacaagagatgagctggagtctgctttgatcgagcatgagatgggtgacacgagtacaataaaggagatcatatcagaagtggacacagacaatgatgggaggattaactatgaggagttctgcgcaatgatgagaggagggatgcagcagccaatgaggctcaagtagcctgttcccttagtagaaatggtgtaccgttagttactgttcttcactctttttcccccttcgtatttggtactcttggtagccggattaagcttacaatgggcgtcgctcttttgcattgtcaagagatgattgtgtatatctttttcttttgctcgtgtttgttgcattgtagtatcctgaacgtcccttccttttgtaagtttgtttatacacaagcacatccaatagaaagtgcaatttgtgtctca

SEQ ID NO: 109080 - DNA, 2304 bp, Zea Mays
cttaccttccggtaaagcaatgcaactacaacgagctgacagcaaagcaaagcttgagaggcttttctcaaaaacgcgccgtcgccgtttcttccccctttttctttgagaaaattcgcccgcgagatctttagtttcagaccccgtgtggattagtcgctgtcacgatcgaggcggggcgccaattgcggtggccaccacctccaatccactccccgcggtggcctcgccgagctgttcttgctccgtcctccctccaactccaagatttgtttcgcacccgattcctgagcttccgcggcgcttcttgctgaaaagaaagctccgagttcttcagttctggatcgatagagaggcggttcctttgcgggctctgagctctcgctcttgatttgtctcatcgacgcatcagttgggctgcaggcttagagctggaaggaataatttgactagagaaatggggcagtgttgtagcagagctcccgccccggactctggacggggaggcaccaatggttatggctattctaaccaggcaaagccagcgcaaacaccttcgagttacaaccctcctcagcagccggccgaggtgaggtacacgccgccggcgacgaaccctccggtagtcccacctgtgcctgtgccaccgaagcccacggcggacacgattcttggcaaacagtacgaggacgtgcgctctgtctactccctcggaaaggagcttggccggggccagttcggggtgacatacctctgcacagaggttgcctctggtaagcagtacgcctgcaagtccatctccaagcgcaagcttaccagcaaggcagacagggaggacattcgaagagagatccagatcatgcagcatctgtctggacagccaaacattgttgagttccggggagcatacgaggacaagagcaatgtccatgtggtgatggagctctgcgcaggtggggagctcttcgatcgcatcattgccaaggggcactacacagagcgtgcagctgctacaatctgcagagcagttgtgaatgttgtcaacatttgccacttcatgggtgtgatgcaccgtgacctgaaaccggagaacttcttgcttgcgagcaaggaggagaatgcaatgctcaaggccactgattttgggctttccgtcttcatcgaagaaggaaagatgtacagggacatcgttggaagtgcttattatgttgcgcctgaagtccttaagcggagctatggaaaagagatagatgtttggagcgcaggtgttattttgtacattcttctcagtggtgtgcctccattttgggctgaaactgaaaaggggatatttgatgctattctgcatgaggagattgactttgaaagtcaaccttggccatcaatttctgagagtgctaaagacttggttagaaagatgttgacacgagatccaaagaaaagactgacttcagctcaagttcttcaacattcatggctcagagaaggtggaggtgcatctgataagcctatcgacagtgctgttctttctagaatgaagcagttcagagcaatgaataagctgaaaaagatggccctaaaggttattgcctcaaaccttaacgaggaagagatcaaggggctaaagcaaatgttcatgaacatggacacagacaatagtggcacaatcacgtatgaagaactcaaagcaggactagccaaacttggatcaaagctgtcggaagctgaagtaaagcagttgatggaggctgctgatgttgatgggaatggatccatcgactatgttgagttcatcactgccacaatgcatagacacaagctcgaaagagacgagtatttgtttaaggcattccagtacttcgataaagataacagcggtttcatcacaagagatgagctggagtctgctttgatcgagcatgagatgggtgacacgagtacaataaaggagatcatatcagaagtggacacagacaatgatgggaggattaactatgaggagttctgcgcaatgatgagaggagggatgcagcagccaatgaggctcaagtagcctgttcccttagtagaaatggtgtaccgttagttactgttcttcactctttttcccccttcgtatttggtactcttggtagccggattaagcttacaatgggcgtcgctcttttgcattgtcaagagatgattgtgtatatctttttcttttgctcgtgtttgttgcattgtagtatcctgaacgtcccttccttttgtaagtttgtttatacacaagcacatccaatagaaagtgcaatttgtgtctca

SEQ ID NO: 109081 - DNA, 2201 bp, Zea Mays
tttctcaaaaacgcgccgtcgccgtttcttccccctttttctttgagaaaattcgcccgcgagatctttagtttcagaccccgtgtggattagtcgctgtcacgatcgaggcggggcgccaattgcggtggccaccacctccaatccactccccgcggtggcctcgccgagctgttcttgctccgtcctccctccaactccaagatttgtttcgcacccgattcctgagcttccgcggcgcttcttgctgaaaagaaagctccgagttcttcagttctggatcgatagagaggcggttcctttgcgggctctgaggttcagctctcgctcttgatttgtctcatcgacgcatcagttgggctgcaggcttagagctggaaggaataatttgactagagaaatggggcagtgttgtagcagagctcccgccccggactctggacggggaggcaccaatggttatggctattctaaccaggcaaagccagcgcaaacaccttcgagttacaaccctcctcagcagccggccgaggtgaggtacacgccgccggcgacgaaccctccggtagtcccacctgtgcctgtgccaccgaagcccacggcggacacgattcttggcaaacagtacgaggacgtgcgctctgtctactccctcggaaaggagcttggccggggccagttcggggtgacatacctctgcacagaggttgcctctggtaagcagtacgcctgcaagtccatctccaagcgcaagcttaccagcaaggcagacagggaggacattcgaagagagatccagatcatgcagcatctgtctggacagccaaacattgttgagttccggggagcatacgaggacaagagcaatgtccatgtggtgatggagctctgcgcaggtggggagctcttcgatcgcatcattgccaaggggcactacacagagcgtgcagctgctacaatctgcagagcagttgtgaatgttgtcaacatttgccacttcatgggtgtgatgcaccgtgacctgaaaccggagaacttcttgcttgcgagcaaggaggagaatgcaatgctcaaggccactgattttgggctttccgtcttcatcgaagaaggaaagatgtacagggacatcgttggaagtgcttattatgttgcgcctgaagtccttaagcggagctatggaaaagagatagatgtttggagcgcaggtgttattttgtacattcttctcagtggtgtgcctccattttgggctgaaactgaaaaggggatatttgatgctattctgcatgaggagattgactttgaaagtcaaccttggccatcaatttctgagagtgctaaagacttggttagaaagatgttgacacgagatccaaagaaaagactgacttcagctcaagttcttcaacattcatggctcagagaaggtggaggtgcatctgataagcctatcgacagtgctgttctttctagaatgaagcagttcagagcaatgaataagctgaaaaagatggccctaaaggttattgcctcaaaccttaacgaggaagagatcaaggggctaaagcaaatgttcatgaacatggacacagacaatagtggcacaatcacgtatgaagaactcaaagcaggactagccaaacttggatcaaagctgtcggaagctgaagtaaagcagttgatggaggctgctgatgttgatgggaatggatccatcgactatgttgagttcatcactgccacaatgcatagacacaagctcgaaagagacgagtatttgtttaaggcattccagtacttcgataaagataacagcggtttcatcacaagagatgagctggagtctgctttgatcgagcatgagatgggtgacacgagtacaataaaggagatcatatcagaagtggacacagacaatgatgggaggattaactatgaggagttctgcgcaatgatgagaggagggatgcagcagccaatgaggctcaagtagcctgttcccttagtagaaatggtgtaccgttagttactgttcttcactctttttcccccttccttacaatgggcgtcgctcttttgcattgtcaagagatgattgtgtatatctttttcttttgctcgtgtttgttgcattgtagtatcctgaacgtcccttccttttgtaagtttgtttatacacaagcacatccaatagaaag

SEQ ID NO: 109082 - DNA, 455 bp, Zea Mays
cttaccttccggtaaagcaatgcaactacaacgagctgacagcaaagcaaagcttgagaggcttttctcaaaaacgcgccgtcgccgtttcttccccctttttctttgagaaaattcgcccgcgagatctttagtttcagaccccgtgtggattagtcgctgtcacgatcgaggcggggcgccaattgcggtggccaccacctccaatccactccccgcggtggcctcgccgagctgttcttgctccgtcctccctccaactccaagatttgtttcgcacccgattcctgagcttccgcggcgcttcttgctgaaaagaaagctccgagttcttcagttctggatcgatagagaggcggttcctttgcgggctctgagatccagtgtcgaataccgtgtcttgaatcatggccttgtgaattccaatataaacgttcctgcttggcttgctttgt

SEQ ID NO: 109083 - DNA, 130 bp, Zea Mays
ccactcgatcttgaaggtcgcaatctttttgggatgtgtggtcacgtgcaaacattcctcctctatcaggctagtttgtgaacctgtaaaccctatttttccaaaagatttttattttttttaaaaataa

SEQ ID NO: 109084 - DNA, 2848 bp, Zea Mays
accgggccaccacaccacgtgacatccgtttcgtacggcctcccccaaaaatctcagcccgtctctctctcctaacgaagaggagagggggcagaagaaaacctcgcgcgggggaggcgcgagaggaatcgcgggggccggaggagcagcggccggtggaggtggcgcgcgcggtggccgtccgagatggagtacatatcccctgagagaaatctggaggggacttgtggagatcctgggccgttatttgccgaccaaggtggcagcttgttggaccacttgggttatcaagggggaggaattccacaacatgagtctccaacactggatcatggacttttggttgatccagctggtgcaattccgtatttatctacagattctccgcccttcatgaatgatcaaatcacttgcaatgttataaaatctgcttcagctagtccagaatcttgtacaaaacaacctcaagaacctcttaatgtagaatctgatgtacagaatgacgcagctgaacaaaatgttcacaatagtaactctgaagaacagatcacttctctgggctgtgatgtacagcagaacacagaagtaattgatgaactgttgcctccaaagcttcctgaaagcagtggtaatgatatatcaaactttcaaccggaaactacatattctgatgcctaccatggtgactctttgttaactgaaaatagttgtaatagttatcagcttaacaatagtggtgctcctgctgctgatattccaaactctcctgcacttcagatggaaaatgaggagatgggaaagttacatgagacttctcacaatgaaaacagtgggtcagaggatgatcaaatgaatggtaggaagccttgccccattagtggtcgagacaatgagaagtttaacacttcagctgtacctccctcttgggaacagacaaaacaaaaaaatcctggtaccagaaatggaagttcaactccagacgatcaatttgattctcctccagacaggtttgcaagattggaaagggacacaccatctccagatgggagagtatcccctgaaaggtttgcaagactggaaagggataccccacctccagacggggatatatctcgtccaggtgaaagttcacatgtccattctgagacgatggagatggagccagaatatcgcgccaatgatgataccccacctccagacgggaggatgtctcctccagttgaaagttcacatgtccattctaagaagatggagtcacaacaccatgccaaagatgttggtgagttagctcgttttgaaagcccacaggtaagacatcggtcccgatcttctgaaaaacatgaccccagccgcaaaagaacctcttcaggggagttgtctccacatgcgcgtcagaattctcctgtagaaaggaaaagacggagagagtctcgccatggtgatgggtcacctcgacagagatctgcatctccccgaagaagatctacaccccctcgaagaagatctatatcccctcgaagatcctcacacaagaggagggaatcaccaagaaggggagactcacctaggaggaggcactcacctaggaggagggagtcaccaaggaagagagactcaccaaggaggagagactcaccaaggaggagggattcaccaaagaggaggagggactccccaaggaggagggataggtcaaaatcaaggtcaccttcaagaaaacatgacacttctagacataaaaaagaacatgacagatctcggtccaggtctccccactcaagggatcatcacagacgatctccaagaaggcattcaccaagacgcagatcacccccagccagtcatcgccatcattcaccaagaagacattggtcaccacctgccaacaggaagactggattgggtaagcctggaaagaatctctttattgcaggatttagctatgccaccactgagcgagatttggagaagaaattttgcaagtttggacgtgtaacaagtgcacgtgttgttcgtgataaacgaactggagattcccgtggctttggattcttatccttggataaggatgaggatgctgatgcagcaatccgtgcttgtgacgagactgagtggaatggaaggatcattcttgtggagaagtcaaaagcacctgcatggtgaatcttccgctttgggggcgcacacgccattgttcgagagggatttcattgcttcacctttcacagattttaccattcagaaaaaaagaaactaccggtatgacatactcggtacatgtcaaagttcacccgaacctggcttttgatgctgtactaggagtaagagtattaaataatgcacttccttgctgatagttgttgaaagaataagatgtaacgttgcaccttagcttgtttcagggccctgctgctgataagagggacttacgacttagtggtacttttagtgtctgcaacctctacacgtgaaatgtgatacgtgcctgttcgtgagctgtcagttctcttcttcaccttcatctcgcgcccactgaatactgatggcatgaacggattccgggagactcaagctttatggtgttgttgcgactcaagggttatgttagcagttcaataatctgcatattagcttttcaatgttgtgcatcctctgaatgagggtttggaaaatgtcctatatagtttgtgttttggattccagatgttgtttaattatggtcacgacacgatacctatgccccatctgttgactgttggtgatgttttttttcctgatgacatgtcttttcatcctgtgttcttgaatctagagttgtctgtctattggcgcaatattagtgagatgg

SEQ ID NO: 109085 - DNA, 2845 bp, Zea Mays
accgggccaccacaccacgtgacatccgtttcgtacggcctcccccaaaaatctcagcccgtctctctctcctaacgaagaggagagggggcagaagaaaacctcgcgcgggggaggcgcgagaggaatcgcgggggccggaggagcagcggccggtggaggtggcgcgcgcggtggccgtccgagatggagtacatatcccctgagagaaatctggaggggacttgtggagatcctgggccgttatttgccgaccaaggtggcagcttgttggaccacttgggttatcaagggggaggaattccacaacatgagtctccaacactggatcatggacttttggttgatccagctggtgcaattccgtatttatctacagattctccgcccttcatgaatgatcaaatcacttgcaatgttataaaatctgcttcagctagtccagaatcttgtacaaaacaacctcaagaacctcttaatgtagaatctgatgtacagaatgacgcagctgaacaaaatgttcacaatagtaactctgaagaacagatcacttctctgggctgtgatgtacagcagaacacagaagtaattgatgaactgttgcctccaaagcttcctgaaagcagtggtaatgatatatcaaactttcaaccggaaactacatattctgatgcctaccatggtgactctttgttaactgaaaatagttgtaatagttatcagcttaacaatagtggtgctcctgctgctgatattccaaactctcctgcacttcagatggaaaatgaggagatgggaaagttacatgagacttctcacaatgaaaacagtgggtcagaggatgatcaaatgaatggtaggaagccttgccccattagtggtcgagacaatgagaagtttaacacttcagctgtacctccctcttgggaacagacaaaacaaaaaaatcctggtaccagaaatggaagttcaactccagacgatcaatttgattctcctccagacaggtttgcaagattggaaagggacacaccatctccagatgggagagtatcccctgaaaggtttgcaagactggaaagggataccccacctccagacggggatatatctcgtccaggtgaaagttcacatgtccattctgagacgatggagatggagccagaatatcgcgccaatgatgataccccacctccagacgggaggatgtctcctccagttgaaagttcacatgtccattctaagaagatggagtcacaacaccatgccaaagatgttggtgagttagctcgttttgaaagcccacaggtaagacatcggtcccgatcttctgaaaaacatgaccccagccgcaaaagaacctcttcaggggagttgtctccacatgcgcgtcagaattctcctgtagaaaggaaaagacggagagagtctcgccatggtgatgggtcacctcgacagagatctgcatctccccgaagaagatctacaccccctcgaagaagatctatatcccctcgaagatcctcacacaagaggagggaatcaccaagaaggggagactcacctaggaggaggcactcacctaggaggagggagtcaccaaggaagagagactcaccaaggaggagagactcaccaaggaggagggattcaccaaagaggaggagggactccccaaggaggagggataggtcaaaatcaaggtcaccttcaagaaaacatgacacttctagacataaaaaagaacatgacagatctcggtccaggtctccccactcaagggatcatcacagacgatctccaaggcattcaccaagacgcagatcacccccagccagtcatcgccatcattcaccaagaagacattggtcaccacctgccaacaggaagactggattgggtaagcctggaaagaatctctttattgcaggatttagctatgccaccactgagcgagatttggagaagaaattttgcaagtttggacgtgtaacaagtgcacgtgttgttcgtgataaacgaactggagattcccgtggctttggattcttatccttggataaggatgaggatgctgatgcagcaatccgtgcttgtgacgagactgagtggaatggaaggatcattcttgtggagaagtcaaaagcacctgcatggtgaatcttccgctttgggggcgcacacgccattgttcgagagggatttcattgcttcacctttcacagattttaccattcagaaaaaaagaaactaccggtatgacatactcggtacatgtcaaagttcacccgaacctggcttttgatgctgtactaggagtaagagtattaaataatgcacttccttgctgatagttgttgaaagaataagatgtaacgttgcaccttagcttgtttcagggccctgctgctgataagagggacttacgacttagtggtacttttagtgtctgcaacctctacacgtgaaatgtgatacgtgcctgttcgtgagctgtcagttctcttcttcaccttcatctcgcgcccactgaatactgatggcatgaacggattccgggagactcaagctttatggtgttgttgcgactcaagggttatgttagcagttcaataatctgcatattagcttttcaatgttgtgcatcctctgaatgagggtttggaaaatgtcctatatagtttgtgttttggattccagatgttgtttaattatggtcacgacacgatacctatgccccatctgttgactgttggtgatgttttttttcctgatgacatgtcttttcatcctgtgttcttgaatctagagttgtctgtctattggcgcaatattagtgagatgg

SEQ ID NO: 109086 - DNA, 1229 bp, Zea Mays
accgggccaccacaccacgtgacatccgtttcgtacggcctcccccaaaaatctcagcccgtctctctctcctaacgaagaggagagggggcagaagaaaacctcgcgcgggggaggcgcgagaggaatcgcgggggccggaggagcagcggccggtggaggtggcgcgcgcggtggccgtccgagaaggcattcaccaagacgcagatcacccccagccagtcatcgccatcattcaccaagaagacattggtcaccacctgccaacaggaagactggattgggtaagcctggaaagaatctctttattgcaggatttagctatgccaccactgagcgagatttggagaagaaattttgcaagtttggacgtgtaacaagtgcacgtgttgttcgtgataaacgaactggagattcccgtggctttggattcttatccttggataaggatgaggatgctgatgcagcaatccgtgcttgtgacgagactgagtggaatggaaggatcattcttgtggagaagtcaaaagcacctgcatggtgaatcttccgctttgggggcgcacacgccattgttcgagagggatttcattgcttcacctttcacagattttaccattcagaaaaaaagaaactaccggtatgacatactcggtacatgtcaaagttcacccgaacctggcttttgatgctgtactaggagtaagagtattaaataatgcacttccttgctgatagttgttgaaagaataagatgtaacgttgcaccttagcttgtttcagggccctgctgctgataagagggacttacgacttagtggtacttttagtgtctgcaacctctacacgtgaaatgtgatacgtgcctgttcgtgagctgtcagttctcttcttcaccttcatctcgcgcccactgaatactgatggcatgaacggattccgggagactcaagctttatggtgttgttgcgactcaagggttatgttagcagttcaataatctgcatattagcttttcaatgttgtgcatcctctgaatgagggtttggaaaatgtcctatatagtttgtgttttggattccagatgttgtttaattatggtcacgacacgatacctatgccccatctgttgactgttggtgatgttttttttcctgatgacatgtcttttcatcctgtgttcttgaatctagagttgtctgtctattggcgcaatattagtgagatgg

SEQ ID NO: 109087 - DNA, 1033 bp, Zea Mays
accgggccaccacaccacgtgacatccgtttcgtacggcctcccccaaaaatctcagcccgtctctctctcctaacgaagaggagagggggcagaagaaaacctcgcgcgggggaggcgcgagaggaatcgcgggggccggaggagcagcggccggtggaggtggcgcgcgcggtggccgtccgagaaggcattcaccaagacgcagatcacccccagccagtcatcgccatcattcaccaagaagacattggtcaccacctgccaacaggaagactggattgggtaagcctggaaagaatctctttattgcaggatttagctatgccaccactgagcgagatttggagaagaaattttgcaagtttggacgtgtaacaagtgcacgtgttgttcgtgataaacgaactggagattcccgtggctttggattcttatccttggataaggatgaggatgctgatgcagcaatccgtgcttgtgacgagactgagtggaatggaaggatcattcttgtggagaagtcaaaagcacctgcatggtgaatcttccgctttgggggcgcacacgccattgttcgagagggatttcattgcttcacctttcacagattttaccattcagaaaaaaagaaactaccggtatgacatactcggtacatgtcaaagttcacccgaacctggcttttgatgctgtactaggaggccctgctgctgataagagggacttacgacttagtggtacttttagtgtctgcaacctctacacgtgaaatgtgatacgtgcctgttcgtgagctgtcagttctcttcttcaccttcatctcgcgcccactgaatactgatggcatgaacggattccgggagactcaagctttatggtgttgttgcgactcaagggttatgttagcagttcaataatctgcatattagcttttcaatgttgtgcatcctctgaatgagggtttggaaaatgtcctatatagtttgtgttttggattccagatgttgtttaattatggtcacgacacgata

SEQ ID NO: 109088 - DNA, 990 bp, Zea Mays
atggcctctctgcagcaacgcaagtctcgtgttcttcgtgtccggctttcgccgagtgatccggccggtacgtctctgcagcaacgcaaggatgagagcggcggcgcccacgcggttgctgatgaggcggtgcgcgggacgggaaaaggcaagagcgaggcggcgccggggcgccggaaggtgacgtacgggttccacctggtggagggccggatgccgcacggcatggaggaccgccacgtggccgagttccggaagctggacgacggcaacgaggtcggcctcttcgcggtcttcgacggacactccggcgccgacgtcgccacctacctccgcgagcacctcttcgacaacatactcatggaccaatcgggctccgatttctggacggacccgacggaggcgatccggcgcgcgtaccaccgcacggaccggaagctgctgaagaaaacggcgggcgacgacagcggcgaggggatgaagaagggcaggcggcgcggcgggtcgacggcggtcacggcgatcctgatcaacggagaggatctcgtggtcgccaacgtgggcgactcccgcgccgtgctgtgcgacgcgggcggcagggccaggcagctgtccgtggaccacgagccgctccgggagcgccgcgccatcgaggcccgcggcggcttcgtcaccgagatccacggggacgtgcctcgcgtagacgcgcagctggccatggcgcgcgcgttcggggaccggtcgctcaaggagcacatcagctcggaccccgacgtggccatcgaggacgtcggagacggcgccgagctgctcgtgctggcgagcgacgggctgtggaaggtcatgtcgaaccaggaggcggtcgacgaggctcggggcatcgaggacgcccggaaggcggcggtcaggctcgtcgacgaggcggtgcggcggggcagcaaggacgacatctcttgcatcgtcgtgcgactgcactagctagtgaacatc

SEQ ID NO: 109089 - DNA, 200 bp, Zea Mays
ttgcagagtaattatggtactttcaattgaagtcacaggcctcacatgacctgatgaacacgatacagtactcaaccgcttttatagatcatagcagtagtgatgattcacagtttctctccctccctcccaagaacagaggacagggaacccaaatctgcccagattcctcccgttcccccggccgcggacaactgaaa

SEQ ID NO: 109090 - DNA, 802 bp, Zea Mays
cctcctgccttcgcttcccttccacaccttccgccctctctctctctctctctctctctctctctctctctcatcaggtcagcaggtctcgtgcgcgcccggctttcctctcctcgcgccgcacgacgcgagcgcggtcggcgatggccaaggcgcgcaggtcgccgttcgccgccgctgagcggttcctcggcttcccccgcggcgggccgtcgccgggggccgtggcgccggcgcccgccgccttcgacgacctgccggacctcgccgaggccgacgtctggtactcggccgccgccgccgccgccaccaacgacccggggagcccacgcgccacggcgtccaggcaggtggaggcggcggagggcaggcgcggcccgcggcagggcggcctgagccgggcgttcggcgacgggcccgggcggcaggcggcggcgtcggctcccgtcgaggtgcccgcgtggcccgcccgcttcgcgttcccggacgcggacccgtcgctgctgttcgagatggagatggggggcgacgaccacgacgaagggcgggagggggacgacggcaggcaggggcagggcgccgggtgggtgccgccgcacgtgtacctggcgcggcggcaggcgcgggcgtccgtggtggagggcgccggccggacgctcaagggccgggacatgtcgcgggtgcgcgacgccgtctggagccggacgggcttcgacgggtagtgtggacgagcgagcgaagcgagcccttggacagatttttgatctccctttgcttcctcctctttcttcattctctctct

SEQ ID NO: 109091 - DNA, 2683 bp, Zea Mays
aaaacacctggctccgactccggccctagtgccctacttcccggtatcctaaaccctagccgacatgcgccgcccgcagcgccgcgtcgcggcgaagcagactcgcctgcgggaggtcgacgagatacgcctcctcaacgaatggatcgacgccggcaagcccctcccgcgcaccaaacttctgcccccgtcgaaatcagctggaccggttccgaccgccggggagcacccggagtacggcgcgtgcacactgttcgacgagctgccgctgtcgcagaagaccaaggacgggctgcggaaggcggggttcactgagatgagtgagatccagcgcgccgctctgccccacgcgctgtgtggccgcgacatcctcggcgcggccaagaccggctccggcaagacccttgcctttgtcatcccgcttattgagaagctgtatagagagagatggggtccagaggatggtgtgggctgcattattctctccccgacaaatgatttggctgggcagatttttgaggtgatcaagaaagtggggcagttccataactttagtggtggcgtcattgttggtaagcgcaagggtatcgagatagagaaggaacgtgtgaacagcttgaatatcttagtgtgcacgccagggcggttagtccagcacttcaacgaaactgccaattttgattgttcacagctccaactgttggtgcttgacgaggcagatcaaattcttgatcacggattcagaaaccaggttgatgctatcatttctcagattcccaaagttagacaaactttactgttttctgctacacaaacgaagtcagttaaggaccttgcaagggttagcttaagggatcctgaatatataagtgtgcacgaggaggccagaacagccacaccggatacccttgagcagtatgccatgattgtacctcttgagcagaagttaaatatgctctggagcttcattaaaaggcatctaaattcaaagacgatagtcttcttatctagtgtcaagcaggtcaaatttgtttatgaaatttttaagaaacttcgtcctggtattcctttgaaatgtatgcatggacggatgaaacatgtggtacagcaggccatagttgcagatttcaatgaagctacctcagttcttttctcaactgatataacatctcgaggactagatataaagaatgtggattgggtggtgcaggttgattgcccagaaaacattgataattacatccacagagttggccgtacagctcgttacaataagaaaggaaaatcacttatattcctttgtcctgaagaagaagcaatgcttgaaaaattgaaggcaaccgaaagtaaaatacctatacatattcgaaagccaaaggcagaacaactggagcagatatcgcagagtatagcctcagtgctggttaaatttcccaatcttcaggaattgggtaaaagggcttttgttacctatcttaaggcagtatacctccagaaagacaaaaaagtgttcaacctgagcaggttctctgcagagcagtttgctgcatatgctgcttcgcttggtctgcctgttacccccaagatccgcttcataagccacaagaagaatgtgtcgaagaaggatatggaggacattgatatgaaacagatgaaatccagtttggaacatgaagttaccatcactccaaagatcaacattgatttaactttgtgtgatggagatgatgatatcctttatcccaagaagcccactgcagatgctaatatggatgacagacttgatgatgtccttcatcccaaggagtctgccacagatacaaatgtgactggacttgaaagacccttcaaaaagaagaaactgaagataaacgtgaacaggccatcaggaacaagggtcaagtatgatgatgagggcaacgccatcccacctcttgcatctgtcgctgaagaagtatctttagaacctgtggttcacaaggataaaatttcccagcggtatgcagagatgttgagagaaatgcagaaacacgacaaggaggacaagcttgaacacaagaagaccttgcgggagaagaagctgcagaagaagatgaagcttaagcgcaagaggcaggaagacactggagcagggtcagaggaggatagtggatctgaatcagacagaggccaagacacagccaacaaaggtaaaaagaggtacttcaatagcgacgatgaagacaatgacgcagcaaaggacggtgatgttctcgcccagcaggaggcgttggcactgaagctcctgagtaatatgcacagttagctttgggatctgatggtataggttacccttgaatgggggtttgcctattagcgctccagccaggaaggggctgaaattttgaacgtgtcgcggttttttttttctgataaccgggagttaattcccactttcaggcatacgttcatggatgtatgagaaatcagtgtggccgtattaccccaagaaatcggacttagatgaggttttaagtaaaatgcctttgattttaaaattctaaaattgcgtaaaatgattgttacagcatcttgaggactccgatgaaatttactgacaggtgaaaattgcgtggtcatggttccctcggatgtgctcctgaggacagaaatgtgaatggattgttggggacactctgcaatc

SEQ ID NO: 109092 - DNA, 2878 bp, Zea Mays
aaaacacctggctccgactccggccctagtgccctacttcccggtatcctaaaccctagccgacatgcgccgcccgcagcgccgcgtcgcggcgaagcagactcgcctgcgggaggtcgacgagatacgcctcctcaacgaatggatcgacgccggcaagcccctcccgcgcaccaaacttctgcccccgtcgaaatcagctggaccggttccgaccgccggggagcacccggagtacggcgcgtgcacactgttcgacgagctgccgctgtcgcagaagaccaaggacgggctgcggaaggcggggttcactgagatgagtgagatccagcgcgccgctctgccccacgcgctgtgtggccgcgacatcctcggcgcggccaagaccggctccggcaagacccttgcctttgtcatcccgcttattgagaagctgtatagagagagatggggtccagaggatggtgtgggctgcattattctctccccgacaaatgatttggctgggcagatttttgaggtgatcaagaaagtggggcagttccataactttagtggtggcgtcattgttggtaagcgcaagggtatcgagatagagaaggaacgtgtgaacagcttgaatatcttagtgtgcacgccagggcggttagtccagcacttcaacgaaactgccaattttgattgttcacagctccaactgttggtgcttgacgaggcagatcaaattcttgatcacggattcagaaaccaggttgatgctatcatttctcagattcccaaagttagacaaactttactgttttctgctacacaaacgaagtcagttaaggaccttgcaagggttagcttaagggatcctgaatatataagtgtgcacgaggaggccagaacagccacaccggatacccttgagcagtatgccatgattgtacctcttgagcagaagttaaatatgctctggagcttcattaaaaggcatctaaattcaaagacgatagtcttcttatctagtgtcaagcaggtcaaatttgtttatgaaatttttaagaaacttcgtcctggtattcctttgaaatgtatgcatggacggatgaaacatgtggtacagcaggccatagttgcagatttcaatgaagctacctcagttcttttctcaactgatataacatctcgaggactagatataaagaatgtggattgggtggtgcaggttgattgcccagaaaacattgataattacatccacagagttggccgtacagctcgttacaataagaaaggaaaatcacttatattcctttgtcctgaagaagaagcaatgcttgaaaaattgaaggcaaccgaaagtaaaatacctatacatattcgaaaggttagcagcaggattttctgtttttagtgcttatttgattatggttgatctatgttgctgagacaagcgtttagaatggttattcggtctcaagtgacagaaaatttgacagttgtttatatcatagaactgccactggttcttgcatttcttcttttttattgttgcctactgttcttaatttctttaatgtagccaaaggcagaacaactggagcagatatcgcagagtatagcctcagtgctggttaaatttcccaatcttcaggaattgggtaaaagggcttttgttacctatcttaaggcagtatacctccagaaagacaaaaaagtgttcaacctgagcaggttctctgcagagcagtttgctgcatatgctgcttcgcttggtctgcctgttacccccaagatccgcttcataagccacaagaagaatgtgtcgaagaaggatatggaggacattgatatgaaacagatgaaatccagtttggaacatgaagttaccatcactccaaagatcaacattgatttaactttgtgtgatggagatgatgatatcctttatcccaagaagcccactgcagatgctaatatggatgacagacttgatgatgtccttcatcccaaggagtctgccacagatacaaatgtgactggacttgaaagacccttcaaaaagaagaaactgaagataaacgtgaacaggccatcaggaacaagggtcaagtatgatgatgagggcaacgccatcccacctcttgcatctgtcgctgaagaagtatctttagaacctgtggttcacaaggataaaatttcccagcggtatgcagagatgttgagagaaatgcagaaacacgacaaggaggacaagcttgaacacaagaagaccttgcgggagaagaagctgcagaagaagatgaagcttaagcgcaagaggcaggaagacactggagcagggtcagaggaggatagtggatctgaatcagacagaggccaagacacagccaacaaaggtaaaaagaggtacttcaatagcgacgatgaagacaatgacgcagcaaaggacggtgatgttctcgcccagcaggaggcgttggcactgaagctcctgagtaatatgcacagttagctttgggatctgatggtataggttacccttgaatgggggtttgcctattagcgctccagccaggaaggggctgaaattttgaacgtgtcgcggttttttttttctgataaccgggagttaattcccactttcaggcatacgttcatggatgtatgagaaatcagtgtggccgtattaccccaagaaatcggacttagatgaggttttaagtaaaatgcctttgattttaaaattctaaaattgcgtaaaatgattgttacagcatcttgaggactccgatgaaatttactgacaggtgaaaattgcgtggtcatggttccctcggatgtgctcctgaggacagaaatgtgaatggattgttggggacactctgcaatc

SEQ ID NO: 109093 - DNA, 2558 bp, Zea Mays
aaaacacctggctccgactccggccctagtgccctacttcccggtatcctaaaccctagccgacatgcgccgcccgcagcgccgcgtcgcggcgaagcagactcgcctgcgggaggtcgacgagatacgcctcctcaacgaatggatcgacgccggcaagcccctcccgcgcaccaaacttctgcccccgtcgaaatcagctggaccggttccgaccgccggggagcacccggagtacggcgcgtgcacactgttcgacgagctgccgctgtcgcagaagaccaaggacgggctgcggaaggcggggttcactgagatgagtgagatccagcgcgccgctctgccccacgcgctgtgtggccgcgacatcctcggcgcggccaagaccggctccggcaagacccttgcctttgtcatcccgcttattgagaagctgtatagagagagatggggtccagaggatggtgtgggctgcattattctctccccgacaaatgatttggctgggcagatttttgaggtgatcaagaaagtggggcagttccataactttagtggtggcgtcattgttgctgttggtgcttgacgaggcagatcaaattcttgatcacggattcagaaaccaggttgatgctatcatttctcagattcccaaagttagacaaactttactgttttctgctacacaaacgaagtcagttaaggaccttgcaagggttagcttaagggatcctgaatatataagtgtgcacgaggaggccagaacagccacaccggatacccttgagcagtatgccatgattgtacctcttgagcagaagttaaatatgctctggagcttcattaaaaggcatctaaattcaaagacgatagtcttcttatctagtgtcaagcaggtcaaatttgtttatgaaatttttaagaaacttcgtcctggtattcctttgaaatgtatgcatggacggatgaaacatgtggtacagcaggccatagttgcagatttcaatgaagctacctcagttcttttctcaactgatataacatctcgaggactagatataaagaatgtggattgggtggtgcaggttgattgcccagaaaacattgataattacatccacagagttggccgtacagctcgttacaataagaaaggaaaatcacttatattcctttgtcctgaagaagaagcaatgcttgaaaaattgaaggcaaccgaaagtaaaatacctatacatattcgaaagccaaaggcagaacaactggagcagatatcgcagagtatagcctcagtgctggttaaatttcccaatcttcaggaattgggtaaaagggcttttgttacctatcttaaggcagtatacctccagaaagacaaaaaagtgttcaacctgagcaggttctctgcagagcagtttgctgcatatgctgcttcgcttggtctgcctgttacccccaagatccgcttcataagccacaagaagaatgtgtcgaagaaggatatggaggacattgatatgaaacagatgaaatccagtttggaacatgaagttaccatcactccaaagatcaacattgatttaactttgtgtgatggagatgatgatatcctttatcccaagaagcccactgcagatgctaatatggatgacagacttgatgatgtccttcatcccaaggagtctgccacagatacaaatgtgactggacttgaaagacccttcaaaaagaagaaactgaagataaacgtgaacaggccatcaggaacaagggtcaagtatgatgatgagggcaacgccatcccacctcttgcatctgtcgctgaagaagtatctttagaacctgtggttcacaaggataaaatttcccagcggtatgcagagatgttgagagaaatgcagaaacacgacaaggaggacaagcttgaacacaagaagaccttgcgggagaagaagctgcagaagaagatgaagcttaagcgcaagaggcaggaagacactggagcagggtcagaggaggatagtggatctgaatcagacagaggccaagacacagccaacaaaggtaaaaagaggtacttcaatagcgacgatgaagacaatgacgcagcaaaggacggtgatgttctcgcccagcaggaggcgttggcactgaagctcctgagtaatatgcacagttagctttgggatctgatggtataggttacccttgaatgggggtttgcctattagcgctccagccaggaaggggctgaaattttgaacgtgtcgcggttttttttttctgataaccgggagttaattcccactttcaggcatacgttcatggatgtatgagaaatcagtgtggccgtattaccccaagaaatcggacttagatgaggttttaagtaaaatgcctttgattttaaaattctaaaattgcgtaaaatgattgttacagcatcttgaggactccgatgaaatttactgacaggtgaaaattgcgtggtcatggttccctcggatgtgctcctgaggacagaaatgtgaatggattgttggggacactctgcaatc

SEQ ID NO: 109094 - DNA, 2063 bp, Zea Mays
ttctctgcgctcgagctggacgggcagtccgttcagcggcgacggcatggggtccctgacgaatgtgttgtccttgtccccgcagcagagcctccacctgaagcgtctcaccaggtggtgcatggtcaccagcgtctccaccctggcgaactcgatccccgcgcacagcctctgcccgccgccgaacgccacgaacgagtagggcggcgcctggctctcgaaccgggacggctcgaacttgtccgggtccgtgaagatgctggggtccatgtgcgtcacgctggacgcccagaacacctgccaccccttggggatgcagtagccgtcgaactcgatgtcctccagcgctcgccggaagctgccgaagatgggagggatcatccgcagcgtctccagggccacgcgccatgtgaacctcatgcggtgcaggtcctcccaggtcagcgcctcgccgtcggccttgttcttggcaatctcgtcgtgctctgcggccaatattatgcatgcatgcatgccatacatacaaacatgagacgtccatccatgccatggtcacgagcatttgatttatctacgaaaggcatgccgcatgcatagccgcgcgcggtctatttctcgattaccttgaaccatggcggcgagggtcgcgggatcgccggcgaggtggcggaccatgaaggtcatgagcacggacgacgtgtcgtggccggcgacgaggacgaccatggcgttgtccacgatctcctcgtctgtcagcagccgctggcccccggcgccgtcctcggcgcgaaggctgacgagacagctcaggaggtcgtctgcgggcgacgcctcgccgcgctccagcctggccttcttctccccgagcgtcgcctcgagcacccgccgcgccctcgcgctggccctcacgctcctgcggaacgccgtgaagggcaggtccagcggcacggaccacatgccctccagcatgtccgcgaacgcggcggcgaggcgctccctgacggcgccgcgatcgaggccgaagagcagcgtggcgatgatgtcgaacgtgagcagcttcatgagcggcagcacggcgacggcccggcgccccgcccaccggccgtccaggtggcgcgcgacctcggcgtcgatcgcgcccacgtaccgccgcagcatgtcgggcttgaggaactgcatcatggcgccgcgcacgcgccggtagtcgtcgccgacgagctcgaggatgttgcggcggcccaggatgagcggcaggcagcggggctgcttcggcgccagcgcgtcgctcgcgaacacgagcctgttcgcggcggggcccgccacgaacaccgtgggggcgccgaacagcgacagcttggacacggggccgtaccggtcgatccggtcccgcagccaccgctcgccggtgttgctccgcatcgcgcgcagcaggcccaggctctgcccgatgatcggcagacccagtgagcccgggggcagcggcaacttgcccggcaacggcttcttgttgggccttgtgaacaggtaaagaaaaagggccggcgtgaggaaggcgactaggagcgcaacggccacggaggccgccattgttgcgtgctagctagctagagctagcctagagctcgttgactagctactcgttatgtagttggcaccagtgatggtggtagggtgcggcagagatcggcgaggtgtcgagaaggtgaagcggacaaagcggcatcttcacgtaacgtgcagcatcgggccgggatttcacctgcctcgttcggttggaagcagcgtgacaaacatctgggacaatccagaccgtgttcaccaacggaatctagcatcgcagattccccctagcaaacaaacaaactgtgggtgtgtttggtttgacttttggcttttggcttttgccccctaaaagccaaaagccaaccaaagggttagatccaggaagcagctttttctaaaagctggctttctcacagtgcaaatctgaaagcaccactgaacctgcttttagtggcttttcaaatggaactgtgaaaacatatatcgaagaacttttaacg

SEQ ID NO: 109095 - DNA, 3517 bp, Zea Mays
tactgtagtccagtctccagtctatctactactcgtacttccagtggggcctcgcttgctactgcaagtcctacttccgtctttcctccgccccgttatccattctattctcaccagccatcgcccatctttaaaaaaaaatcttgaacccctcctttgccgactcctctctccagaaggccccaacccatctcatcactcaccgctcccaaggcgagagatctcacctccccattcccaaaccaacccaaacaccaaaattcaaactgacgatcgatccaaaaacgccacaaatcccaccaaatccacctcaaatttgccacaaaatgccccagattggcacccaaaccccgcacccaccgtttcaaatctgacctcgccattcccactcctcccactctacccaccgcatactccagatccccaccgcaatggcgaccgcggtctccaaatccgccgtcaaatcccaccccaggttgcccaccacagcgcagccgccgccgccgaaccccggctccaacgccgcgtcggctggcggaggggcggcgcctccgccgccgccgtctcccgccgccggcgcgacgccgtcgaagaacgcggcgatggcggagctcaagtcgcgcgtgctcgccgcgctcgccaagctctcggaccgcgacacgcaccacatcgccgttgaggagctggaccgcatcatccgcgcgccgccgtcgaccgacgccgtgcccatgctgctcaatgcgctggcacccgactccccggggctcgcctccccggccaggcgcgagtgtctgcgcctcctcgccacgctctgcacgtcgcacccggatgccgccgcgtcgcacctccacaaggtgctcgcccacctcgcgcgtcggctaaaggacccggcgtccgacacttccgtgcgcgacacgtgccgagacgtcgcggggcagctcgcggcagtgtacctccgccctctgtcggcttcaggcgtttgcgaggcgggcaatgcgaccgtgacgctgttcgtgaagccgctgttcgaggtgatgggggagcagagcaaatcggtgcagggcggggcggccgcatgcttggccaaggcggtggaaggggcgggacctgggcccggtgccatcgggatgtttgggaagctcggtcctaggatttgcaagttgctcggtgggcagggcgtgcaagccaaggcgggattactaggcatcatgggaagtttggcgcaggtgggagcaatcagttcccagaatatgcagcagactctgcaaagtatccgcgactgccttgagaacagcgattgggctactagaaaagcagctgctgatacattatctgtctttgctacccattctgttcacttgataggtgacggaacagctccaaccattgctgctctcgaagcttgccgttttgataaggtaaggcctgtcagagatagcatgattgatgcagtacagttgtggaaaaagttgactggagaagatgcaaatgcagatggtagaaataaggatcttgctgatggtgaagggaaactggactcaagaaggtcaatacaaagaggtggaaaatcagaatcctttgatgattcctctccagattcacctagtaacaacgtgaagggcagtagcatagctgaaaaggcagcttttcttttgaagaaaagaccaacattaactgacagggaattgaaccctgagtttttccaaaagctcgagacaagaaaaacagatgacttggcagttgaggttgtagtcccccacaagactctacaatctcacttgcgaggtgaagatgaaacagaagaagatgatgatcctgttggtccagctgacagcaatggatcagctgaagatgaagcaaatctaactcaaatgcgtgctagctttaattttcagaatatccgggataaatgggctggccaaaggggaaatagaaacaaaattacaaaagctaggacaactgatgttgaagataggggcgaacccagtacaaaagattccactgctgcagccatgaacatttctggagaaggccctttcataaataataaaacaaattggttagcaatacagaggcaattgtcacacttggagaggcagcaaactagtctcatgaacatgttgcaggatttcatgggagggtctcatgacagcatggttacattggagaacagagtacgtggtcttgagagagttgttgaggaaatggctagagaaatatcactctcctcaggcaggagaggtggtggtccagcgttgggctttgattcatctcctggcagatcatctaaacacaatggtttccatgaatattctaattcgaaatatggaaggagtggtgatggacggatgggatttgcagaaaggtatttctctgcagatgctatggcttctggtacgaaaaaccaatcttggagaccagattctgaaccatgggactcatatgcttattctggatcaagaagtggtatgaatgtgaggagaggattagattctgtttcatcagacaatagaatggcaagaaatgaacggagtaatgatcaagtgggtccccggagaggttgggacaaaggtcagggaccctttaggttcggtgagggtccttctgcccgaagtgcatggcgggcctcaaaagatgaagcaacactggaagctattagagtagctggtgaagataatggaaattcaagggccgctgcaagagttgctattcctgaactggatggagaagctttgaatgatgacaaccaaggggatgaaagaggcccactttgggaggcctggactcgtgcgatggatgctgttcatcttgaggatatggactctgcttatgctgaacttctttcgactggtgatgctgaattacttgtaaagttgatggagcaaactggaccggtcgttgatcaactttcaaatgaggttgcaaatgaagtcctacatgcagtggggcagtttctcatggaagaaagcttatatgacgtagcattaaactggcttcagcagttgactgatctggtaatggaaaatggctctgattatctcggaatacctctagacgcaaagcaggacgtcttactgggacttcatgaggcgacagcgattgacctgcctgatgactgggagggagcgacaccgttgcagataatgaagcagctagcttcatcctggcacatcgacctacagcaacttatcaattagggtaacattgattaccgacatatgggttaatttcatttgttcgttgcctcttggtcttgtctggcctgttgctattaggattaggaatattatattggttggagtggaagtggcactgtgttgaaatggattggttgtattggggaaatatgatgtggatattgtctcaccttcatctaaaggctttcataattcatagtttgattctccagttatactgtaaaaccttctcacttcatggtggtggtctcttgtatgattatggtgcattggttattacatggaactcaaaatgagtagcaatgcattgtttatttgcc

SEQ ID NO: 109096 - DNA, 2798 bp, Zea Mays
tactgtagtccagtctccagtctatctactactcgtacttccagtggggcctcgcttgctactgcaagtcctacttccgtctttcctccgccccgttatccattctattctcaccagccatcgcccatctttaaaaaaaaatcttgaacccctcctttgccgactcctctctccagaaggccccaacccatctcatcactcaccgctcccaaggcgagagatctcacctccccattcccaaaccaacccaaacaccaaaattcaaactgacgatcgatccaaaaacgccacaaatcccaccaaatccacctcaaatttgccacaaaatgccccagattggcacccaaaccccgcacccaccgtttcaaatctgacctcgccattcccactcctcccactctacccaccgcatactccagatccccaccgcaatggcgaccgcggtctccaaatccgccgtcaaatcccaccccaggttgcccaccacagcgcagccgccgccgccgaaccccggctccaacgccgcgtcggctggcggaggggcggcgcctccgccgccgccgtctcccgccgccggcgcgacgccgtcgaagaacgcggcgatggcggagctcaagtcgcgcgtgctcgccgcgctcgccaagctctcggaccgcgacacgcaccacatcgccgttgaggagctggaccgcatcatccgcgcgccgccgtcgaccgacgccgtgcccatgctgctcaatgcgctggcacccgactccccggggctcgcctccccggccaggcgcgagtgtctgcgcctcctcgccacgctctgcacgtcgcacccggatgccgccgcgtcgcacctccacaaggtgctcgcccacctcgcgcgtcggctaaaggacccggcgtccgacacttccgtgcgcgacacgtgccgagacgtcgcggggcagctcgcggcagtgtacctccgccctctgtcggcttcaggcgtttgcgaggcgggcaatgcgaccgtgacgctgttcgtgaagccgctgttcgaggtgatgggggagcagagcaaatcggtgcagggcggggcggccgcatgcttggccaaggcggtggaaggggcgggacctgggcccggtgccatcgggatgtttgggaagctcggtcctaggatttgcaagttgctcggtgggcagggcgtgcaagccaaggcgggattactaggcatcatgggaagtttggcgcaggtgggagcaatcagttcccagaatatgcagcagactctgcaaagtatccgcgactgccttgagaacagcgattgggctactagaaaagcagctgctgatacattatctgtctttgctacccattctgttcacttgataggtgacggaacagctccaaccattgctgctctcgaagcttgccgttttgataaggtaaggcctgtcagagatagcatgattgatgcagtacagttgtggaaaaagttgactggagaagatgcaaatggatttcatgggagggtctcatgacagcatggttacattggagaacagagtacgtggtcttgagagagttgttgaggaaatggctagagaaatatcactctcctcaggcaggagaggtggtggtccagcgttgggctttgattcatctcctggcagatcatctaaacacaatggtttccatgaatattctaattcgaaatatggaaggagtggtgatggacggatgggatttgcagaaaggtatttctctgcagatgctatggcttctggtacgaaaaaccaatcttggagaccagattctgaaccatgggactcatatgcttattctggatcaagaagtggtatgaatgtgaggagaggattagattctgtttcatcagacaatagaatggcaagaaatgaacggagtaatgatcaagtgggtccccggagaggttgggacaaaggtcagggaccctttaggttcggtgagggtccttctgcccgaagtgcatggcgggcctcaaaagatgaagcaacactggaagctattagagtagctggtgaagataatggaaattcaagggccgctgcaagagttgctattcctgaactggatggagaagctttgaatgatgacaaccaaggggatgaaagaggcccactttgggaggcctggactcgtgcgatggatgctgttcatcttgaggatatggactctgcttatgctgaacttctttcgactggtgatgctgaattacttgtaaagttgatggagcaaactggaccggtcgttgatcaactttcaaatgaggttgcaaatgaagtcctacatgcagtggggcagtttctcatggaagaaagcttatatgacgtagcattaaactggcttcagcagttgactgatctggtaatggaaaatggctctgattatctcggaatacctctagacgcaaagcaggacgtcttactgggacttcatgaggcgacagcgattgacctgcctgatgactgggagggagcgacaccgttgcagataatgaagcagctagcttcatcctggcacatcgacctacagcaacttatcaattagggtaacattgattaccgacatatgggttaatttcatttgttcgttgcctcttggtcttgtctggcctgttgctattaggattaggaatattatattggttggagtggaagtggcactgtgttgaaatggattggttgtattggggaaatatgatgtggatattgtctcaccttcatctaaaggctttcataattcatagtttgattctccagttatactgtaaaaccttctcactt

SEQ ID NO: 109097 - DNA, 1847 bp, Zea Mays
ggccgcggctgcctgcggcgccgccaccttggtggagtccagctcccttgtcatgagcgagccgatggtgcccgttgtgcctaccttgaccgtgcctccctcgccatggacgagctcggtggcggcgcaaggcatggtctgtttcagccagatgagaaggctggcgactggttagtttccgtacatacagatacaggtagtgtgactgcagacgcaggaagagaagggtattgcaggcgattgccgcgcatgattgctgttcgataaaacaaagagagtcaatgactcaaccgccatgacagcacagtgtcaacccacctgtgttcctaattcaagagtcatggcaaagcaaatgcagatggctatagcctaaaaccgcacaagcaaatgcagcagacatttcatatatgttcttatttcaacgaatatgataccccaaacaacatttatcacacctttttgatactcattttattttttttgcagaaaacagcatctggttggaatgacatgaccctgttgggtatttagacagtgaaaaacatactgcgtttgttggaaatgcaccattgatcagctaacttaacacttacagttaatgtagcggtgacgagtgtttcacatagattgggagatctcaacgatgccggaagaagctgtcataacaggtgttttaatgggaggcgaccatggaaagcgatgtgccgtctgcgtgtggcttctttctgagtggagggagtggtggacgatgctaccaacaaacagaggtgtaaagatagatgccctcggctgctcccctccttttcgtcccctcctttctgccccaatttcctccctgatgccaacttttgaggggacgcgtgtttattgtgtggatggccttgccttgccctttctttccaccaattcacctcctaggaaagagaagctgtgctgatcaaaatggttcgcctccaagagcagaaacagctggtggcaagcatccagaatcacttctcttgctcatgggatgtgctaacggccaacctaacaaagcaaagaacctagcatcccctgacccctttctgccccttggattcttgctcgcttttttaattccagccactggggttccttcctgagggggagtaatctaatgggtaaaccaaaaactgcggcttcactcctctatcctatagatatgtatgtaaactgggatggaacaagcaagcgctggaacatggatttggaacaggcttccggcctgcagtgtttccgtttccttggccaccaccataaataagatcgcaagccaaaactcagaaggaagattggaggagaatacaagggcagggctctgatctgagacagattagttgaggtcctccatcaggcacagcaagatgcatagaactacgagaatgcacttacaaccattcagtactttgttagttcagtccctcaggcacggaaggctcagtaatcggcaacaccgagagacaggggagagaggagcaaaaaaagttgggagaaatggcatagaacaatccagattcggacagcaaatctgcagcattcacccgctggacgagcttcgactggtggtacatttcccacagaaatatactaaccttgactcgccaagagcatatgcgctcgttacgtggagcagatcacgcagggaagctagaaactgatcacacgagccatacctgggactgggactgggactggagctggaggaacggaggggccgcagacttctgctcttctgcgcagaattgaagtcaagtgagggcctgctgccgtgacttgaggagcgcaactctcctcgtgtcccccctctgccttgtaaatgctgctgcccc

SEQ ID NO: 109098 - DNA, 529 bp, Zea Mays
cgagcctccggattccaagacaatagtctaccatgggatggatgtcaatagaagcctagagaatggcaagtttgtcatccgtgatgaagaagcggacgaatcagagcctgaacctgtcagccctataagcgactgggaggacagtgatgtggagaaaggcggcaaccatgacgtggatgatgaggagtacctggctcagttcatgtgcctgatgtatgacaaattgttccgtgagggtgtgactgtggatacggctctgcagcaagcactccgctcacatcccaagttgaagtacagctgccacttacccaacgttttgtagttagggacattattgacaaaccatacataagtatagcaaaatggacatggataacagggaatgaataaggattgggtggattttttagttgggttatagaggtctatactttgttcgttgtgcaggcatggtgacagaataaaagcatgaaggcattgcactgcatgtgcatttttgctgtagttgtgagaacgggcattttgtttc

SEQ ID NO: 109099 - DNA, 3759 bp, Zea Mays
atgtcgtggggcctggcctggaagcgcagctccgagatcttccacctcacgctcaactacggtgactacgacgacaacgacgaccgccaaccctcgtcaccgccccctccggcgtcctcttcccctcccgcctctgcatcgtcgacccctgtatactcctcctcgcccattgccacccgcaacggcgaccttggcttccgcatcgagcttgactggtcggcgggggacgacgaggatcaggtcgcgctccgcctccagtcccagctcatggtcgcgctgcccccgccccacgacgccgtctccgtcgatctgaccccgagggaccacggggaggaggaaggggtgcggatcgaaatgcgtgtggtcaggaggcgggaggcgctccggtccgtgcgcgtgtcgcgggcccctgggtctgcgctgggcagcggcgatggcgcgggggtgctcgcacgcctcatcagatccaacctcgcgcccgcgcctgccgtggatggccccacagccgcctcgggcgtgcccgtgcttgcggatcactggcgccccatcaccatggtcagcctatgcaactgcggaatgtcgatgcttccagttgagttaactcgccttcaatttcttgagaagttatatcttgacaacaataaattgtcagttttgccccctgaagttggtgctttgaagaatatgaaagtgctgtcatttaacaacaacatgctagtttctgtccctgcagtagaactgcggcaatgtgttatgctggaggaattatcattagaacataacaagcttgtccggcctctattggatttcaggtcaatgcccaagctccgaattttgcgcttgtttggaaatcctctagagttccttccagaaattttgccattgcataacctcaggcatgtcacacttgcaaatattagaattgaagcagtggaaagtcttaaatctgtcactgtacagatagaggttgagcaagcatgtcttgctatctcatcactggcatctgatatttcttcagcaatgcagctgattaagtgtgacattatgaagcctattgaagctgtactaaaatcatctgatgaagaagaactagtatcagtattgcaagttgtagtcaccttaactttcgtttctgatcatgttgctcaaaaggtgcaacgtctatctctgtttgcaattggcaatttggctttctgtttggagactcgtcgcatcctcatgcattctgaaagcatgtgtgacctgttaatccgattaactatttcacaagagtgtcgtgtcagcaaggcagctgcgcgcgctttggcaatcctaggggagaatgagaacttacgtcgagcaataagaggaaggccagttgcaaagaagggtctacgcatcctatcaatggatggtggtggcatgaaaggccttgcaactgttcaaatgcttaaacagatagagcaaggaactgggaaacgcatacatgaaatgtttgacctcatatgtggtacatccactggtggcatgcttgcaatggctcttgggatcaagcagatgactttggatcagtgtgaagaaatatacacaaaacttggtgattcccttttgccttttgaagtttccttgccaatgccaatgttgccaactgaacttttaattttcctaggaaaacttgtatttactgaacctatcccaaaggatgaagctgctacgtggaaggagaagattgatcaacttttcaaaagttcctcacaaagttttagagtggttgtacatgggtccaagcacagtgcagatcaatttgagaggttactaaaggaaatgtgcgagaatgaagatggtgaccttctaattgaatctgctgtaaaaggcattccgaaggtctttgctgtatccactttagtcagtgtcattcctgctcaaccgtatatattccgaaactatcagtatcctcctggcactctggaggtatcaccaggaatggcagaaagtccatcaattggtgcaattggcacggctgtttctggtgcaccagttggtattaaacgtggtgccttcatggggagctgcaagcatcgcgtgtgggaagccataagagcatcgtctgcagcaccatattatctggatgatttctctgtagatgcaaatcgttggcaagatggagctattgtagccaacaatcctacaatctttgccattagagaagcacaacttttgtggccagatgcacgaatagattgtctagtctcgataggatgtggctcagttccaactaagagtcgccgaggtggatggcgctacttggacacagggcaagtgttaatagaaagtgcatgctcagtggagagagttgaagaaactttggatacactgataccgatgcttcctgaaatgcaatatttccgctttaatccagtggatgaacggtgtggtatggagttagatgaaactgatcctactatctggctgaagttggaagctgcaactgatgagtacattcagaagaactttctgtctgtcaagaatctttgtgagcttctggtcccaaggtaccaagaggaagaaaagccatcagatatttacaaatctctttcattttcaagactgacatcgttaaatcaagaggcttcatttagtcctgattttggaaagaaaataaatcatgcacgttcccttgaatccttctgctcccagaatggtattaggttagctctaatgaatagcacttctgggtttgggaagccagccactgcacttcctaccccaataacttctcccttgtttactggaagtttcccatctagtccacttctatatagtccagagggcactcaacggatcagtcgaattgacctagttcctccacttagtttggatggccacccaactacaaagtcctcacctccaacatcaccattgaagtcaagacagccatctgcacatgttcggtcattgtatgataaactgcagaatatgcctcaagttggtgtgatacacttggctcttcaaaatgattcaactggttcagtattgagttggcagaatgatgtatttgtggtcgctgaacccggggaacttgcagacaggtttctgcaatctgtcaaaactatcttgtcaaccttgttgcgtgggtgtaatagaaagggtgcatattccctgtccaagatttcatgtttatctgagttggttgctgaatggccatcttttgaaatcggtgggatacaccaccgctatataggtcgacaaacacaagtaatggaagataaccaagaaattggcgcatatatgtttaggaggacagtgcctgctgttcacatggcacctgaagatgttcgatggatggttggagcatggagggagaggattatcatatgcagtggtaagtatggccttgctcatggcctggtcaaggcattcatggattgtggtgccaaagcagtcatctcgtcgtccatcgagcctccggattccaagacaatagtctaccatgggatggatgtcaatagaagcctagagaatggcaagtttgtcatccgtgatgaagaagcggacgaatcagagcctgaacctgtcagccctataagcgactgggaggacagtgatgtggagaaaggcggcaaccatgacgtggatgatgaggagtacctggctcagttcatgtgcctgatgtatgacaaattgttccgtgagggtgtgactgtggatacggctctgcagcaagcactccgctcacatcccaagttgaagtacagctgccacttacccaacgttttgtag

SEQ ID NO: 109100 - DNA, 3055 bp, Zea Mays
tagcgactttggacctcaggcagacaaggaaataactaacttgtgagttgtgacggggtagcataaattgactcgtcgtgcaaataactcacagatgtacaaataaccaactacaggaacggaggaacctgaactgcttgcacgcctcaagacgcatgcaagcacgccctgcccgggtgaggagaaagaagaggttctgcaccggcagcaagccgccacgcgccagcgcatgcctttgtcagttggaatggagggtatattaacatggatttcctatatactctggcgaatgttacagacggggtgttacatcacagtcacacctcgcggttttcttcccatttgacgacgctcccgcacggccgcacgcacgcgggaccgtcacctatggctatatttacaaagggcatcttgcctgctgcagccggccaccaggaggaagaggacgacgggcatgctcggtcacttcatggctccggcggctcgcacagggcaagaggatcgaaagacacgaccctgtcaacccatgatatataccaagggtcgtcgtgcgtgtgctgccgagttactagttagaggaaggggtcgtcagaagtctatgatgggctcgccgatggtgaggttgcgctccaccgtccacgggaggttgaagagcttggccgtgatgaacttgaagatcttgttcacgttgatgttgtgcgtcgcgctcgagaagaagagggtcgccttcatcgctcttgcgtatgctctggcctgttgggaacacacaaaccacatttgttagcgatcgacacgcacattagtattgtttcgataggaatggaacttcgcaacactccactctggagctgtagtgctgtagcacaagtaacaactctagcctagatgcaaagactgaacttctcatctttcagtgccactgacagaaatgcagctaaagcttcctaacagcagttcagcacagccaaataaatcccaggaacctcccttctttttctcagccagatgcaacgtagccgtcgattccttttagcatgtccggtgaggagtgaccatcagtttacatcctgtagaccaagggcccacaaacaagattgacgtacactcctaattccgacgtgcggcgactggcaaacggacacgaaaatggagaccggagtaccagaccttgcatgtccaattgccaagttttttctaacactcttgaccacttcagttttcgtctatcgatataagacgttgtctgggcctacaactacaactacctaatagtagttcactatggctccaatcgacaccaaggcccacttgagcttcaatgtgcataagtaggcgagtactatctgctcagagcagtctttacttgtctactgtaaccgattcaagttctgttttgggttctacaacgctgtcgcctgtcggtccttgtcacaggaatgcccaaccgacactgagtctgtggatgtaatcacactagaaataaatctagggttcatggcggtggagcacataaagaagcccaaaaatgtttcatctagaaagattcaagaacagttgcctagctatgggttatggtagtttttatatatctcacgtgacttcaactttcaggcctttgttgaactgcactgtttcagatgaaacaggcatgtgcaaccacttctcccctcgtcacaaccaaggcaattctcatctttctatgccagcaccagataaattacatcggggatgctgaagacccccatatgcaagaaacaaagctaccaagaatcaaatttcgatcagaacaaaccagtactgtaaaatgcacagctcacctggttaacgatggcccattgcatctcaagaggaagctgagcaaagtcatcaaactttgtcccgattaggattggaatagccgtctgccaagaggagagggggttaaaaaattaaagcactgctcagtaacaatgccaagctccaagcacaatgcgcactagtactatccatcttcaatactgctaaacgtgtgagaacaaatcacagagttatcaaattgttccaaacagttatctgaaggagagtgagcggcagcccatctgctactgactgtttgtgtcaattcgtaatagttttttttcgccatatgttccgtgagcacgaaatgttcagctatatcatcaagaggctacagaaagaaaacgcgggatgtacacgaagtgttcagcacagagaaatgcacaccaaccttattccatttcctcgccctcccgtaccaatctacaatgctgcacaaccaaacaaagaatgagcaacaaacaagaatttgctgtgaaactctggattctagttgtttgtaatcgatgtaaacactaacttattaagcgtgcagcggctcgtgagatcgaacatgtacaggatcgccacggcgtccttgcacgcgattgggacgtggtcgacggactggtggtctcctgcatccgtttcacaggcgaatggaaatgaaacgatcgagaaaggttggaaatctggcctctgagccaaagcaaccagggaacagaatcgctgatccaatggggtgcctgaggtttacctgccacatcccagatgctgtaggcaatccttgctcccctgacgggcatcgtcttgtccatgagattcaggcccgtcatctgcaagccgttctgctcctccccgtcatctcccacatacttaacctgcggatgaacgaacatccacgagaaggttaaacttacagcgacgacgcgttggtggtttctcgctcagatttgcacagcggttaaggaactgcacgagcacgatgtgaggaaggaataatagtagctgtatgtaggcaccaaaccaaaccaaaccaaaccagatccgccgtcaagattacacagcaagacaataagacaggtcaacagcatcaaacgacaagacgacgaggagggaagacgcgtcgagggtgcagacgtgcagtacagagcatatccggattaagttatttatttactaacacattaacagtaggtagtagaatcatggcgattataaggaaggtattaatcgattg

SEQ ID NO: 109101 - DNA, 672 bp, Zea Mays
taacttgtgagttgtgacggggtagcataaattgactcgtcgtgcaaataactcacagatgtacaaataaccaactacaggaacggaggaacctgaactgcttgcacgcctcaagacgcatgcaagcacgccctgcccgggtgaggagaaagaagaggttctgcaccggcagcaagccgccacgcgccagcgcatgcctttgtcagttggaatggagggtatattaacatggatttcctatatactctggcgaatgttacagacggggtgttacatcacagtcacacctcgcggttttcttcccatttgacgacgctcccgcacggccgcacgcacgcgggaccgtcacctatggctatatttacaaagggcatcttgcctgctgcagccggccaccaggaggaagaggacgacgggcatgctcggtcacttcatggctccggcggctcgcacagggcaagaggatcgaaagacacgaccctgtcaacccatgatatataccaagggtcgtcgtgcgtgtgctgccgagttactagttagaggaaggggtcgtcagaagtctatgatgggctcgccgatggtgaggttgcgctccaccgtccacgggaggttgaagagcttggccgtgatgaacttgaagatcttgttcacgttgatgttgtgcgtcgcgct

SEQ ID NO: 109102 - DNA, 548 bp, Zea Mays
gacttcatctgtggtgtggatgtggatgcacgtacgtacgcaggtgggtggctgcgcagagcgtgttctaccacctgtacaaccaggtgtcgtacatgtcgctggacgagatctcgccgctcacgttctccatcggcaacaccatgaagaggatctccgtcatcgtcgcctccatcatcatcttccagacgcccgtccagcccatcaacgcgctcggagccgccatcgccatcctcggaaccttcatctactcccaggcaaagcagtaacgccttgcattaattggcgtctagatggcctgccctcatcagttcaccgcggatcagctcggtgctcgaagatgacagcttatgacctttgagaatgtctactaagaatcgccctttgtataatactactagatcctctcttttttgtattttctttcctaggactagcttccagtgttactgggctcatttcgtggtgtttctattatgactaagattagagagagaatgagagatggatccatctaaataaaggttccagattttttttcccctctc

SEQ ID NO: 109103 - DNA, 1535 bp, Zea Mays
cacacacacaccacacgcagtcacgcacagcctcggcctccgcagctgcaggcgcctgctgctcttcgacaagaccccaagaactcgccaacctaacctaggtcagccacccttccttctaccttctgcgacaatgcaggccgccgccgcctccgtcaagtcctcccctccccgccgccggctccaggccgctgtccctctccgtctccgcgcgtccgctgtaccgccaagaccatgtcctcgcgacaaccgtggcgatggcggcggcgggccgcagcgaccgcgccgcgtcccccgcgcctccgtccgccacagcggacggcgcccggccggtggtggaggtcgccgcgccggcggagaccgcgcgccgcgccaagatcggggtgtacttcgccacgtggtgggcgctgaacgtgatcttcaacatctacaacaagaaggtgctgaacgcgttcccgtacccgtggctcacgtcgacgctgtccctcgccgccggctccgccatcatgctcgcgtcctgggccaccaggatcgccgaggcgccccagacggacctcgacttctggaaggcgctcactcccgttgcgatcgcgcacacgatcgggcacgtcgcggcgacggtgagcatggccaaggtggccgtgtcgttcacgcacatcatcaagagcggggagccggcattcagcgtgctcgtctccaggttcttcctcggcgagcacttcccggcgccggtctacttctccctcctcccgatcatcggtgggtgcgcgctcgccgccgtcaccgagctcaacttcaacatggttgggttcatgggggcaatgatctcgaacctggcgttcgtcgtccggaccatcttctccaagaaggggatgaagggcaagtccgtgagcgggatgaactactacgcctgcctctccatcatgtcgctggtgatcctcctccccttcgccgtcgccatggagggacccaagctctgggcggcgggctggcagcaagcagtcgccgagatcggccccaacttcgtctggtgggtggctgcgcagagcgtgttctaccacctgtacaaccaggtgtcgtacatgtcgctggacgagatctcgccgctcacgttctccatcggcaacaccatgaagaggatctccgtcatcgtcgcctccatcatcatcttccagacgcccgtccagcccatcaacgcgctcggagccgccatcgccatcctcggaaccttcatctactcccaggcaaagcagtaacgccttgcattaattggcgtctagatggcctgccctcatcagttcaccgcggatcagctcggtgctcgaagatgacagcttatgacctttgagaatgtctactaagaatcgccctttgtataatactactagatcctctcttttttgtattttctttcctaggactagcttccagtgttactgggctcatttcgtggtgtttctattatgactaagattagagagagaatgagagatggatccatctaaataaaggttccagattttttttcccctctc

SEQ ID NO: 109104 - DNA, 2155 bp, Zea Mays
acaaaaatgcaaaggggattagtacaggtaggactactcaattaaataacatttgaaattaaattttttcactaaaataaatattcattgttccacggtcttattgtggacactaaagtgccgtttgattcacaaaatgtaacgtaaatgataacggtaatgctttacactcgatatcagcggtaacaagtttgaataagacaatatcagttttgtaaacggttggatttaacaaacatggttgtgtgcatgcatgcgagagggggagacgaggggcgaaacgaggatccaaaattagggggttaaattagattaaggggctgttagaagtgttagaagcatttttacattatttacatgagaattagcttaaaaactaacatgtcctatagaattaagcattaaaaccgcatgagtaataaatatataatacaaatacaaaaaaaaaactgagaagaaatggcacagatccgaagtggcaaattgtcttccttcgccttcgcgcgctcttctataaatacctcccctctcaccattcccttgccatcagacaagagacacacacacaccacacgcagtcacgcacagcctcggcctccgcagctgcaggcgcctgctgctcttcgacaagaccccaagaactcgccaacctaacctaggtcagccacccttccttctaccttctgcgacaatgcaggccgccgccgcctccgtcaagtcctccaccaccgcggccgcggccgcggccacctgcaaggcgggcttcaagcccctgcacctccctcccctccccgccgccggctccaggccgctgtccctctccgtctccgcgcgtccgctgtaccgccaagaccatgtcctcgcgacaaccgtggcgatggcggcggcgggccgcagcgaccgcgccgcgtcccccgcgcctccgtccgccacagcggacggcgcccggccggtggtggaggtcgccgcgccggcggagaccgcgcgccgcgccaagatcggggtgtacttcgccacgtggtgggcgctgaacgtgatcttcaacatctacaacaagaaggtgctgaacgcgttcccgtacccgtggctcacgtcgacgctgtccctcgccgccggctccgccatcatgctcgcgtcctgggccaccaggatcgccgaggcgccccagacggacctcgacttctggaaggcgctcactcccgttgcgatcgcgcacacgatcgggcacgtcgcggcgacggtgagcatggccaaggtggccgtgtcgttcacgcacatcatcaagagcggggagccggcattcagcgtgctcgtctccaggttcttcctcggcgagcacttcccggcgccggtctacttctccctcctcccgatcatcggtgggtgcgcgctcgccgccgtcaccgagctcaacttcaacatggttgggttcatgggggcaatgatctcgaacctggcgttcgtcgtccggaccatcttctccaagaaggggatgaagggcaagtccgtgagcgggatgaactactacgcctgcctctccatcatgtcgctggtgatcctcctccccttcgccgtcgccatggagggacccaagctctgggcggcgggctggcagcaagcagtcgccgagatcggccccaacttcgtctggtgggtggctgcgcagagcgtgttctaccacctgtacaaccaggtgtcgtacatgtcgctggacgagatctcgccgctcacgttctccatcggcaacaccatgaagaggatctccgtcatcgtcgcctccatcatcatcttccagacgcccgtccagcccatcaacgcgctcggagccgccatcgccatcctcggaaccttcatctactcccaggcaaagcagtaacgccttgcattaattggcgtctagatggcctgccctcatcagttcaccgcggatcagctcggtgctcgaagatgacagcttatgacctttgagaatgtctactaagaatcgccctttgtataatactactagatcctctcttttttgtattttctttcctaggactagcttccagtgttactgggctcatttcgtggtgtttctattatgactaagattagagagagaatgagagatggatccatctaaataaaggttccagattttttttcccctctc

SEQ ID NO: 109105 - DNA, 341 bp, Zea Mays
tcagtctgggccgatgcggacacttggttcgagaggcagcagcaggaagaggagatgcagcggctgcaggcagagcaccgtgcagcgatgcaggcagcagagaagctgcacagggagaaactggccgctgaaagggaaggcgagaaagaagaagatcccatggctgtcgcagaggctcatgctgtaaaacaaagttcttaagaaccggatatcaactcataactcatgtgctacgttgctgcctgtttgtcagatatgactaaacgaatcttgcgaatgctgtttgttttgctgaaagaaccctatttctcacctgacgtgggattcttattggtttccct

SEQ ID NO: 109106 - DNA, 128 bp, Zea Mays
tgttattctttactttatcaagatcattatcctttggttcaaacttcttcagaggtaacctaagccaaaacctgagaaagaagccgaagaaaaaacaatccgacataccctagaactggaaaaaataa

SEQ ID NO: 109107 - DNA, 633 bp, Zea Mays
tcctccgatccaaacccaataagctagaagcccctctccggcgaggcgatgggcaccgccaaggcgaagcggaggcccgtcctgatctgctgcggggtgctggtggccgcgatcgccgtcctggccgtcgtgttcgtggcgctctacttcaccgtgttccggccgcggtcgcccaaggtggtggcgacggcggtggtagcggacctgctccccaagggcgacggcggcggcgggcaggacctgaacctcaccgtgcacgtggacgtgaccgtgaacaaccccaactacgcggcgttccggtacggcgacgtggtgacgctggtgcggtaccacgggagcgacgtgggcatgtcggtggtgccggcgggggagatcggcgcgcgcgagacgctgaccgtcgccgccgcggtcgaggtggacacgctcaaggtggccgccaccccgtacttctacgtggagttccccacgggcaagctgccgttcgagacggccacggcggtggccggcgaggccgtggtgctgggcgcgttcaagatcagcgccagctcgcaggtggcgtgccaggtcaccgtgcacctgctgcctcccaacgccacgtcggagtgcacctccacggtccatataggccggtag

SEQ ID NO: 109108 - DNA, 716 bp, Zea Mays
gtgttcaattctacgtactgagcaactcagcatcaagaagggattcggcgaagatgagtgatgataacaataacaagggcagcagcaaggcgaggcggagggcgcaccgcctggcgtgctgcgtggcgctgggcgtgctggtgatcctgggcgcgctggcgctggccttctacctgcggtaccgtccgcggccgccgcgcgtggtggcgacgccggtggacgtgggcatcgaggagttccggctgctgccgcacccggcgctgaagctgtcggtgggcgtgcacgtggtggtgagcaacccgagcaacgcgccgttccggtacggcgcggcgctgagcgcggtgacgtaccacggcgcgccggtcggggagacgctggtgccggcgggcgaggtcgggggcggggccacggcgcgggtcgagccggccacggtggtggacggggtgaaggtggccgagagcccccacttcgcgtcggacgccgtcgcgggcgtgctgccgttcgtggccgtggcgagggtggtgggcaaggcgctcgtgctgcgcgccttcgaggtgcccgtctccgtcgaggtggtgtgcctcgtccggatatacgtgttccacggggagagcagctcgcggtgcgtggccaccgtccgcacggggtccggcgctggctctggctctggcgcggggttcccagagggtgcagggcgtgcgcaggagcatgactag

SEQ ID NO: 109109 - DNA, 531 bp, Zea Mays
ttgcaggttgtcgcggcgggaggagatgctgggcaatcgagcttcagcgccaactcaccccccaccaccggcgccgggttcgtcgccctcgacgtcggtgagctctcgtctctggccggcgacgccggccctccgggcacgcccatcgcgccgccccggacacccagggtggtgaggtcgctgtcgaggaagggcgacaggaagccggccgacgccgacgccaacgccaccgccggtacgtcagtccaaacgattagtggcggtagagagcggccgcagctgttcgtacacgtggctgccggcgacctcggggacgcgcccggcagcgcccggctggtcgtccacacgccgctggccggcacgcccggaagcaagtcccggcggttcggaaggcgggcggcgccgtggctcgatccccgcagggtggtcttcctcttcgccacgctgtccagcgtgggaacactgatcctcctctacttcacgctatccatgagcagggcggactccagtagcggcggcggcggcggcagc

SEQ ID NO: 109110 - DNA, 101 bp, Zea Mays
ggatcacagaagtcccataaacgagaaacgcgagcgcatatggtcacagaagtgttcccacgttggagctccgggatcaacacgtctcccatctacaagct

SEQ ID NO: 109111 - DNA, 492 bp, Zea Mays
atgatcagcctaagacttttcttcctttaatgtgttcatttgtctcctgcacatccttgcacttgatttggttaatactttgaagttttgaatttattttctgaaaaattaaatttatgttgcagcgccaccagcacatcgtttgcacagccttctgggatttcattagcttttggtattcattgctgactctttttttgccattctgtttctgatctcatggcactgagcataggaatttttataacagaaatgcatgagttacttgttgctgatagtgaaagtagttccattcgagttgttaatctgaagacaggaggctcaagattgctggcaggaggagatccagtatttccagaatatttgtttaggtttggagattatgacgggactggctcagatgtgctacttcaacatcccttgggtgttgtttatgccaatgacaatcaagtatatatagctgattcctacaaccgtaaggtagtaacctta

SEQ ID NO: 109112 - DNA, 83 bp, Zea Mays
acatgtatcatacatccttccgaaagcaattgtacatagcagcttggatacaaaagcagtagacaacgatcatccaaaagagc

SEQ ID NO: 109113 - DNA, 174 bp, Zea Mays
gtaggaacacaaacatattgtagaatacaatatgacaatataatacatatggcgcgggcgcaggttccacaactgtctctaaaagacagcgtacatgcagttgcgaaacggtgttcagtacaacagtacataactctaacagtttacagctccatagactatacatgtacggtg

SEQ ID NO: 109114 - DNA, 2455 bp, Zea Mays
caattttcttctctaaacaccttgtgaccgacaaaagtaaaatcctacataatacctttgcctttatccgttccataaccaatgtcgaagttttcaagactttcaatcacgctcctgtttatgtggtccaacctgcattcttatttctccaagaattcgttagtctacatattgtagtcattaattaccaaaaacaacaattagaggcctagatgcttcacagatggcgatgagactgtcattggatttgtacgcacactcctcgtattcatcatgtgaggcggaggctctgggcgaggtcacaagagttgtgatggaagttgcgtccgaaagtggaagctgtggtggattggagaagaccttcgctcacgaatatttgagggagagtggagctcggatgcggtgggttggggaagacccccccccccccccccccccctccccccctccacacccttttttatttctccatctccatgctccgatgccgctgatgatcttgccaacagaggtggaaaattgcagtcaatggatacctgcacggcggttctattctgtagaacgttcttctgattatgctgctgctgcttgctcaaaaaagtgcctaacaattatccaacaacgaccccagccaggcccacgttgaatttagtagaagcatgtttgaacccttattgcccgcacgccgaacaaagaggtcacctaaccacttaaaaattcagcgcccatacaaccgtaggcgccatcttcttggcgtgagcgcgacaacaatgctagcgagcgctgcagactgtttcatctcttccaggcaactcaccagctgagactgagaccggcacaagatggcggctctgaccaggtattagaggcaagccataggtcatccatgatgaatgatcaccgtatatgaagctcacatttctcaatggcattccattcttgcacaatcattccagccagccaccatagctccatgtcgtcgtcgacctcacaaatggcgtcgctcgccgtgctcgtcttcctggtggtctgcgcaacgcttgcgtccggtgccgccagcgtccgcgttgggctcacgcgcatccactccgacccggacaccaccgcgccccagttcgtgcgcgacgcgctgcgccgcgacatgcaccggcagcggtcccgatcgttcggccgcgaccgcgaccgcgagctcgcggagtccgacgggcgcaccacggtgtccgcgcgcacccgcaaggacctgcccaacggcggggagtacctcatgacgctggccatcggcacgccgccgctgccgtacgcggccgtcgccgacacgggcagcgacctcatctggacgcagtgcgcgccctgcggcacccagtgcttcgagcagccggcgccgctgtacaacccagcgagctcgaccacgttcagcgtgctcccgtgcaacagctccctgagcatgtgcgcgggggcgctggcgggggccgcgccgccgcccgggtgcgcctgcatgtacaaccagacgtacggcaccgggtggacggcgggcgtgcagggctccgagaccttcaccttcggctcgtccgccgccgaccaggcccgcgtccccggcgtcgccttcggctgcagcaacgccagcagcagcgactggaacggctcggcggggctggtggggctgggcaggggcagcctgtcgctcgtctcgcagctcggcgccggcaggttctcctactgcctgacgccgttccaggacaccaacagcaccagcaccctcctcctcggcccgtcggcggcgctcaacggcaccggcgtccgctccacgccgttcgtcgctagcccggccagggcgcccatgagcacctactactacctcaacctgacgggcatatccctgggcgcgaaggcgctgcccatctctcccggcgcattctccctcaagcccgacggcacgggcggcctcatcatcgactccggcacgaccatcacctcgctggccaacgcggcgtaccagcaggtccgcgccgcggtaaagtccctggtcacgacgctgccaacggtcgacgggtcggactccacggggctcgacctgtgcttcgcgctgccggccccgacgtcggcgccgccggccgtgctgccgagcatgacgctccacttcgacggcgccgacatggtgctccccgcggacagctacatgatctcggggtccggcgtgtggtgcctggccatgcggaaccagacggacggcgcgatgagcacgttcgggaactaccagcagcagaacatgcacatcctctacgacgtccgggaggagacgctgtcgttcgctccggccaagtgcagcactctttgacgatgcgatagttgtacatatgtatatgtgtgcatatataggattcatgattttttttgtatacagtggattgttaaccgaacacactaattaattccattattgttgactgctagaatt

SEQ ID NO: 109115 - DNA, 1597 bp, Zea Mays
tcctgcggcttccagcttgctttccatcgttcgatgtcaccgccgacgcagatggcttccctcgccgttctcgtttgcctcgtctgcgcagcgctcgcctccgatgcggcggccgtccgcgtggagctcacgcgcgtacacgccgaccccagcgtgaccgcgtcccagttcgtccgcgccgccctgcaccgcgacatgcaccggcacaacgccaggaagctagccgcgtcgtcgtctgacggcacggtgtccgcgccggtctcgcccaccaccgtccccggtgagttcctgatgacgctggccatcggcacgccgccgctgccgttcctggccatcgccgacacgggcagcgacctcatctggacgcagtgcgcgccctgcagccgccagtgcttccagcagccgacgccgctgtacaacccgtccagctccaccacgttcagcgcgctcccgtgcaacagctcgctgggcctatgcgcgccggcgtgcgcgtgcatgtacaacatgacgtacggcagcgggtggacgtacgtcttccaggggaccgagacgttcacgttcgggtcgtccacgccggcggatcaggtccgcgtccccggcatcgcgttcggatgcagcaacgcgagcagcggcttcaacgcctcgtccgcgtccggcctcgtcgggctgggcagggggagcctgtcgctcgtctcccagctcggcgcccccaagttctcctactgcctcacgccgtaccaggacaccaacagcacgagcacgctcctcctcgggccgtcggcgtcgctcaacgataccggcgtcgtcagctccacgcctttcgtcgccagcccttccagcatctactactacctcaacctgaccggcatatccctcggcacgactgcactgcccatccctcccaacgccttctcgctcaaggcggacggcaccggcgggctcatcatcgactctggcaccaccatcacaatgctgggaaacacggcgtaccagcaggtccgcgcagcggtcctctccctggtgacgctgcccacgacagacggatcggcagccacggggctcgacctgtgcttcgagctgccgtcctcaacatcggcgccgccgtccatgccgagcatgacgctccacttcgacggcgcagacatggtgctcccggcggacaactatatgatgtcactctcggacccggactcggactccagcttgtggtgcctggccatgcagaaccagaccgacactgacggcgtggtagtaagcattctcggcaactaccagcagcaaaacatgcacatcctctacgacgttgggaaggagacattgtcgtttgctccggccaagtgcagcacgctgtgatcagaaatctattccaattcaaatgctgaaaaaatcgaactagactacgacaatgaacaggtaagcgccagacttgtcgatcgggcagtcgcagtgctacttcccttgtgacagtctagctgtactttagtttgatgttttttttttgttttagaaaaatgattttttgggacgttttacctttgttgtgttgctagggttgtgatgtaaagcaggaaatatttaaacttatcagttactgtgt

SEQ ID NO: 109116 - DNA, 359 bp, Zea Mays
tttttttttttttttgcattcgttcgcagaatatttggggcagggtgtcctgtgtgtcccttcattaacatatttgacctcagttgatactatgggaacagcacttaagttgctgtcaaatttgtcacgtgcgactactcgagcggctgaaatttcaagtagccataagcttcacctacaccccctgcattatataaaatggagaatactcaaatccataaaaatggagaatgtttatgtgtatatatatcaatctagtgactttatgtaagatttgtatattaaactactccaacacacattaattgagatagatacatgctcattcgaataatcgctatgctggaccatttggaagg

SEQ ID NO: 109117 - DNA, 2158 bp, Zea Mays
cctccaagatttctccttcgatacacaagcacgatggctcacaacctgctgcccgtggccgtcgtcctcgccgtcgcactgctcatggccccagccgcgggttacccgtggctatcgtgtggcaccagcagcagcttcgcggccaacggcacataccaagaccacttcaacttcgccgccgccaccctgcccaagaacgcctcgacatcccctgacctttttgccagcatagtcgtcggcaccgtgccggagcagctctcagccatggccctttgccgcggcgacgtcaacagcacgacatgcttcagctgcctgaccgaggccttcggagacctgcccagcgcctgctccgacgacaaggctgccaccatctactacgatccctgcatggtccactactccgacgtgcacaccctccccggcgacgacgacaccggcccgtcgatcgacacgtaccccatcggcgacaaccagtacgtgaccgctgaccccggccagttcatacgcctgctggccgcgctcgtgaacgccaccgccgactacgccgcgtacaactccacgcggcggttcgcgactggccaggctgacaccggcttcgacccggagtttcccgagctctacgctctggctcagtgcacgccggaccagacgccggcgcagtgccacaagtgcctcgccgggctcatatcacagtcgctaggcgggttccagaaccgtgacggggccaggatgctcgcggtcagctgcacctacaggtacgagaccaagcccttctataacgggccggcgatggtgcggctggcctcaccaagctctggagcgccggcgccggcgcccgctgtgaactctcgggttcgtgcggcggatggagggaggcgaaagtaccatgtgccctgggtggcgattgcagttgtgctgccagctctagcagccatgaaccttgtggcctgcctctgcttccggaggcggcggcggcggctactgatcgcacaggccaaacaccagaatcccatgtactccactgaagcagaggacaccgaaatggtggactccatgatgatggacgtctccgccctacgggccgccacgggggatttcgacgagagcaacaagctcggcgaaggcggctttggcgccgtgtacaagggtgtcctcccggatggcgaggagatagcggtgaagcgtctgtccagtagctcgtcgcagggggtgcaggagctgaagaacgagctggcgctggtggccaagctgaagcacaggaacctcgtcaggctcatcggcgtctgcctggggcagcaggagaggctgctcgtctacgagttcctgcccaaccggagcctcgacctcatcctattcgacacggagaatgaagagcgtggacgacgacggctggactgggcgcagaggtacaagatcatcaacggagtcgctcgggggctgcagtacctccacgaggactcccagctcaaggtggtgcaccgcgacctcaaggccagcaacgtcctgctagacgagaacatgaaccccaagatctcggacttcggcctggccaggatctttggccggggccagacccaggccgtcacccgccgcgtcgtcggcacctacgggtacatggcgccggagtacatgatgcgggggaactactccgtcaggtcggacgcgttcagcttcggcgtcatggtgctggaggtcgtcacggggaggaagaacagcgacgatggctgcaacctcttggccacagtatggacgcactgggaggccgggacggtggcgcagctggtggaaccgagcactatgggcggcagcttcccggagggcgacgtgctgcggtgcgtccacatcggcctgctgtgcgtccaggcagaccccgcggcgcggccggtgatgtcgtcggtcgtcatgatgctcggcagcgacaccgtcaccctccaggctccatccaagccggggttcttcgtcaggaacaacagcgccaacgcagccgcgtcgacggtgtcactggatggttagctagccagcaggccatgggatcgagcccagaaattgggaacatatatttgtaccgttaccaccctgttaccaaaatgtatgacagcagctaataagcagcgtaagctacaaagattagattttgcatacagctgctacagaatgt

SEQ ID NO: 109118 - DNA, 2283 bp, Zea Mays
aaagttaaaaaaacaaaaaaaaaatcggtaacagggactgggcctcagctagtcagctacaataaagtaaacaaccaccaccaaagcttcttccagcttgcacaatggcgaaccatctggtgccctgcgccgccattgtcgcagcggttgtgctgctcatgccctgcgccaccggttatccatggcccttttgccacgacagcgacaatttcaaggccaacagctcctaccaggcccatctcgacttcgtcgccgccaccctgcccatgaacgcatccgcgtccccggacctcttcgctaccgccgtcgtcggaaccgtcccggagcagctctgggctgtggggctctgccgtggcgacgtcaatgccacggcctgcttcaactgcctcacccaggccttccgagacctacagaacgactgctcgtacgacaagggcgcgaccatctactacgacccctgcatgctccactactcagacaaccaacagctcctcgccgacgacgagtccgatctcccctacttcatcagctacaacggaaacgtcacctcggaccaagcccggttcaacggactcgtggcagagctcgtgaacgccaccgccgagcacgccgcgtacaactccacgcggcggttcgccaccggcgagagcagagccggcttcgagccaaaggtgtacagtctagcgcagtgcacgccggacctgacggctgcgcggtgccggacgtgccttgaggcgatcatatcgcagtcgctggacgggttccagaacctcgtcggaggtcgggcgctctggatcaactgcacctaccggtacgagacggcgcccttcttcgacggaccggcgatggtgcagatagcaccaccgccgagctctggagcgccagcgccagcgcccacagtggcgccgtctatgcaaccgacttctgggacgccagcggcggtggccggcggaggtgagttcctatctgtacgtcagacagtttcgactgaaacctatgtttgtcgcactcatcttatcgcgtgcatacgtcaatcgacaggcgggaggaagtacagtcgtctgccgagcgtggttgtcgcagccgtgctggctgcagtaacggccttgaaccttgcagcttgcctctgcttctggaggcggcgccggcgaacagcagaggagaagcagacatatcccatgtactccaccgtagcagaggacacggacatggtggactccatgatgatggacgcctctatcctgcgggccgccaccggggatttcgacgagagcaacaagctcggcgaaggcggtttcggcgctgtgtacaagggcgtcctcccggacggcggcgaggtagccgtgaagcggctatcgcagggctcgagtcggggagtcgaggagctgaagaacgagctcgcgctggtggccaagctgaggcacaagaacgtcgtcactctcgtcggcatctgcttggagcagcaggagcgcctgcttgtctacgagttcgtcgccaaccggagcctaaacctcatcattttcgacgcggagaaacgcgagcggctggactggaggcacaggcaccagatcatcaacggcatagctcgtggcttgcagtacctccacgaagactcccagctcaaggtagtgcaccgtgacctcaaccccagcaacatcctgctggacgcaaacatggaccccaagatctcgggcttcggcctggcgaggatcgtcgggcgggaccagcagacgcaggccgtcgtctcgcaaggcgtcgtcggcacctatggatacatggcgccggagtacgcgctgcgggggaactactccgtcaaatccgacgcttttagcttcggcgtcacggtgctggagatcatctcggggaggaagaacagcgcgatctacaacggtggaaagcctgacgatctcctcgacactgtatggcagcactgggaggctgggacggtggtggagacggtggacccgtgcatggacggcggcttccctgaaggcgacgtgctgagatgcatccacgtagcgctcctgtgcgtgcagggagacccggcggcccggccggccatgtcgtcggttgtgatgatgctcggtggcgatactatcactctccaagcaccgtccaagccgatgatctttgaatattaccaggagtctccagagaatgagtaaattcatatcaccagtgtacactgatgaaaacttgcagattggccggttctcagcaactagaacgtagacacctaggtggtgggctgaatctcaagataaatcttatatttctgtgtgc

SEQ ID NO: 109119 - DNA, 767 bp, Zea Mays
agatcaaggcgatcatggaaaccaaatgttcaggagaagcgtcttttcagctatgttcatgatcagcacattagagtcaaggttaccacacacgcacttcgatgtattgacaaagctggtgggatagatgaatacctcctgaagacaccttacaataaaatggataccgagatggggatagtgtggaaagcaaatatcgaaaagatgtattcagatttggctgaaatagaagtaggcttcttccctcccgaggttgaggctaagattaaaaagggcttagacgaggttcgagctgcgaagagggactttcgcagggaaggaagacgagctttggcaaagcaaagccagctagaagcaagtagtgttggtgatgaccaaacgagtgaagtcatagatacaaagcaagtatttgccgctaaagtctgagcctaaacctatgtgcctgtattgaatgatcaaaggaggcggcaaatcattggatgcacctgggcaaataatggaaggcttgctacttgcgcactaactgtacccccttttcgggagcagcagtgtatgttaagccagcatatcttgtatattaatgtcttgccgttgtaaagcagcttttatgtgttggaaacttcgtacaattattgagatctcaaaagcctgaattgtgggggtagtttgtcttttagaatctatcattttctgcagcttaactgagttgtcgaaataataatgctaaattagctagaggtctgacattctagctcatttttgttcca

SEQ ID NO: 109120 - DNA, 1005 bp, Zea Mays
atgaagaaggagaagcattacgtccgaagcctgagttgtcttggcaagaagattgacagcgatcagcaagcaatgactcctctaaccaaggctaagaagagagagcctgatagttggaagaatgggtgtcagcagagtgagggttgtgggatacaggattccatttgcgatgatggtcacactgaaactgctaaaaccaataagaagatggaggaatccttagagccaagtggggagaataataactgtgagcaagttgagatttcgagtaaggatggcaaaaaggtgcccatgaagttggaggtctcatctggagttcaaactacatcatccattgtggaacaagaagtgcactcagggtttgttggggtagagcgtgtgcgggcagcgtacgaccagggccatcaatcctcacgcctacccaatgagactgtgtttgttcagggtgttcagaagcacgaagaggtcagtaaagtcaaggacaacaatgttctcagggttttgtcatggatctttaaccatctgaagaagaggacatacagactgacctttgaaagtactgaagaactgatagatacaagatctatggcatttgacattaacatcctagagaggcagacctgcaaaagtctaaccacatctggaccaagacgctttcctcttcttggacctactgaagcagctttgcgacttgttttggatttgagtagcacaatcataacattgctgccacaccagaaccctttaattcttcatgcttttacggatctgttttgttcatatgtccgagtgaaccttcttttctctagcaagatgaaggcaaatggttgccctttttatttattttaccttatgtatgccatgtgtccacacaagtggtttaaagctattgccatggaactaatttctgttctagaacagattcaccgcaggatggttgagattatggtcaatcaggcttctacatgcgacctgaaagaacttgtttcaaagttcattccataa

SEQ ID NO: 109121 - DNA, 828 bp, Zea Mays
atcttcaaaccctaaccttaacgcactctcctatatccgccgccatcgtctcgggctctcatctctaatcttcgggttcgcgtcgcagtgtcttccgcccgggctaccaccatgccgaagcagatccacgagatcaaggacttcctgctgactgcgcggcggaaggacgcacggtcggtgcggatcaagcgggccaaggacgccgtcaagttcaaggtgcgctgctccaggtacctctacaccctctgcgtccacgacgccgacaaggccaacaagctcaagcagtcgctcccgccaggtctgactgtccaggagatttaaggtatcaagccacaaactgtgctttttttgcggtgtcagggacgtttgctccagtgttactttagtttgtaggtgggctccattgctgtgtttgaatgaattatgaagtttgagtttgggatgcgaatgatgtgtcgaacctatgagcctgtgttgtaatggttaccccagaccgcaaaggatggcaatctatcataagttaaactgatttccgtgattttcgcttcccccccttttgtctgattcctttgttgtttttcgcctgagcctttttctgccacagcaattgcgaactttgacgtggcaatggtggaatgagttatgttgtatcatctttcttgcctgctcgtatttgtaatattgaacagatagcagctgaaaattttgtagataagaaaattgcatatcgtgcccaattgaaaccatatcgctaggaatggggctacttgtgtttttttaacagatggggctactggtgttgtttaagtattttcgtttccgtggaag

SEQ ID NO: 109122 - DNA, 472 bp, Zea Mays
atcttcaaaccctaaccttaacgcactctcctatatccgccgccatcgtctcgggctctcatctctaatcttcgggttcgcgtcgcagtgtcttccgcccgggctaccaccatgccgaagcagatccacgagatcaaggacttcctgctgactgcgcggcggaaggacgcacggtcggtgcggatcaagcgggccaaggacgccgtcaagttcaaggtgcgctgctccaggtacctctacaccctctgcgtccacgacgccgacaaggccaacaagctcaagcagtcgctcccgccaggtctgactgtccaggagatttaagtttgtaggtgggctccattgctgtgtttgaatgaattatgaagtttgagtttgggatgcgaatgatgtgtcgaacctatgagcctgtgttgtaatggttaccccagaccgcaaaggatggcaatctatcataagttaaactgatttccgt

SEQ ID NO: 109123 - DNA, 315 bp, Zea Mays
atggaggaggctatgctcaacctcaatgaagagtcgtcgagccggcccaagcgtcgtcaacgctacatcaatcgtgatcgtgagtctgcccatgatcggctttatcaagactacttcgccgatgactatgcatatgcagatgcagtgctgctccttgcctcctccttcgatcttcccaggtcccagctccataaacattcagtgagaggcgtccatccagccagatgtcagtcgctgatgcactcggagcatctacatggccagcacaggcacgacacgaagaagcaccgctcagacacgatccggctcgcctag

SEQ ID NO: 109124 - DNA, 1278 bp, Zea Mays
attaggggcgggcgcaggccggctcgccgtcctctcgtctcgggctctcggctcggctcggccacccaacgggcaagacgacgagggtttttgccgccgccatggcgatccctcgagcacgtctaactcgcctgctcctccacttcggcagccggggctccagattcctagcgcaacccttctctacctcttcctccgcacacggcctcttcccctctctgtggccaacgccgtccaccgccggcgcgtggcggcgcgcgttccacgatgggcggccgcgagggccgctgtggcggagcaagaagctgatcgggaaggaggccttatttgcgatccagggcctcaagcggttcaagggggacgaggagaagctagcggatttcgtgcggcggtatgtggccagactgctcaaggcggacaagcttgccgtgctcggcgagctggaacgccaggaggaggtcgatctggctgtcaagatgtttaggatcatacaaaaggaggactggtataaaccagatatttacatgtacaaagacttgattattgcattagccaaatgcaagaatatggaggaagcaatggtaatctgggggaacatgagagatgagaacttgtttcctgactcacagacttatgccgaagtaataagaggattcttgagatatggctccccatcagatgcaatgaatatttacgaggacatgaaaaagtcacctgatccaccagaagagttaccttttagggtattgttgaagggtcttttacctcacccactgctaagaaatagagtaaaacaagattttgaagagatgttcccagaaaggcatatctatgatcctccagaagaaatttttggcatgcactgaggtatattcagaggcatgaatgtgtttatcaattggatggtcgcgttgcaataaatgggcgaaaactgagaagctgattattctgatttctgatagacagattagttgtccatatcattgtgctgtcctttgttgttcagccaagctcattaatactgggccatctattcaactcaaccagtacaactttgcatggttgcaatgcctgatcttatgagtagtaacagaaaaaaaatgtgttcttctttgggcccacttgtatgattacgttgttagaacaatgtactggcgtctggctacattcatgtcgttccttccctaactgcatgagagacctacttcgcatgaacattgtgatggtacctcatttcgtgaccctgttgagtttatgggtgatgattattgttatttg

SEQ ID NO: 109125 - DNA, 519 bp, Zea Mays
ccgcccgcacatggcggcggcgctcgttcggcaacccggacgcgatgctcctgctgcccaggcacccgggcgactgcgccgatcagggctccgccgcctccaccgacggcgagtggtcctccacctgcaccgtcaacgacgtcaccgtccccatcgtggaaggacggtgattccacgtggcgcgcggcagagtcggatactgccacgcggcagagtcgttgatttcacagtaagcctaacccttagagcatgataatttatccacgtgtgaacgggaatgtggtattgcatggagcaacttgtttgccatataatcgtctcatacgaggaccgaagagtaaatataacaaacatgactttgactgtctaacagtagaaagaatcaaagaatgaacaatttttaactgtaatcttcggcgttgacatacctttcaagagtctccggggtgagaaagagcaacaaacgcggcgattatgtattggattgaatcggccaaaaaaatcagttagtttttcacc

SEQ ID NO: 109126 - DNA, 677 bp, Zea Mays
agcggttccctctaaaattctccccctatatcacttttttacgtcatatcatcaacattttatcccctacttcttcttctcctgcagcggttccccctaaattattcccctatacctcactacaaccataaaatatcattttttatacatacttttcatctattattaattttttctactaataattggaagtgggcccacgtcaacaatgcttggagggcagccgcacgcacgccagaacgagggggaaagagaagcggacctccacgtaggagccctgctaggggcagcgctgcagcgaattttggctcctgtagccggcatacaggggaggggccgggcggcggtaagggttgcgtacaccctaaggcatcaaactgtctccagagaatgtaaaggttgtagcattcgacagttggctgggtgctaggtgggatttctacccgagtgcatgtgaagtttgctgaacttccattacccgtgcccatgtatctgtgatttcgctttgtttgtagcttctgttacctttgttcatgtagcttgtctgacttccactgcctggtgaatatctttgtctgaacatttgtacttactttgcgttgcactgtgtttctgatgaaagttataggttaaccacttctatagaaccaactaatcaagggtgcaaattcctccta

SEQ ID NO: 109127 - DNA, 1255 bp, Zea Mays
agcacctaccttgcacgacttcttctttccggtaccttctccccttcctctccctccctagtccctagtcggcagtcccccgaccccgacctcgctaagcaaactcccagagcgatcgccgcagaagatcccgcatgcatgccccggcgccgccctcctccgtcgatctgccgttgtcggcgccgccgccgccggtgaaggcgccgtccccgcggcctccgccgccggcctcgctgcagcccgagtccccgggcgtctttttctccgccaccgcacccctgggcacctcccaccgccgcatcgccatcgccgtcgacctatccgacgagtccgccttcgccgtgcgctgggccgtcgccaactacctacgctccggggacgccgtcatcctgctccacgtgcgccccacctccgtgctctacggcgccgactggggcgccgtcgacgtctctctccccatccctagcgcctactccgaggatggctttggcggcggcgacgccgattccgaggccgccgctgcgcgcaggatggaggacgactacgacgccttcacggcctccaaggccgacgacatcgccaggccgctcaaggaggcgggcatcccctacaagatccacatcgtcagggaccacgacatgaaagagcgcctctgcctcgaggtcgagcgcctctcgctcagcgccgtcatcatggggagcaagggcttcggctccacgcggaggaccagcaaggggaggctcggcagcgtcagcgactactgcgtgcatcactgtatctgccccgttgtggtagtgcgcttccctgatgagtgatgacggctctgccgagtgtggggaggcaggtggtttgcccgccgcggttggtgctgaggatgtgctgcaccccgtgccggaggaggaggaggccgagtatcatgattcatgacgccgctgaggagcacaaggatacctgacctcgttgatgtattgtgaagtcctcttggattcagaatgtaaaggttgtagcattcgacagttggctgggtgctaggtgggatttctacccgagtgcatgtgaagtttgctgaacttccattacccgtgcccatgtatctgtgatttcgctttgtttgtagcttctgttacctttgttcatgtagcttgtctgacttccactgcctggtgaatatctttgtctgaacatttgtacttactttgcgttgcactgtgtttctgatgaaagttataggttaaccacttctatagaaccaact

SEQ ID NO: 109128 - DNA, 1108 bp, Zea Mays
atatcatctccttgctgtgtatcatcactagttactccctccttttatatactgctagctggttccgagtgattacccacagcaacagaagcagttctccaggcaatagactagctagatgcgcatcaccaaagagtagctttcgtctagaacgaagaaacaccccccactacatggccgcgctcagttcttgtgttgcttctggaggcctggcacttcaggccacccttgtggtttctcctcctcgccgccgcgggactccagtcgtcatctccgtatcatctcatggtcgccgcccaagtcttatcggctccaccatgaatccttcaggcatggctccgatcaaaagaactacacgaattcgtgcggttcatccatgccctgcaaattcgttaggaggaagcctcaccatcatcccaatacctgacctgctttcatcatggctctggatgttcggagcggccatagctgcagcagtgcctctttacagaaggttcagagcattagaagataacgtagagaagacggcggaggcggcgatcgaggtgatcgactcggtggcggaggcgaccgagaaggtcgccgacgaggttgcgcaagcgttccccggcagtgaaactctcaagcaggcagcctccaagattaagacgatcgcggatgagatcgaggaagatgccgacaaagctgaggccctgattgagaaggttgacgagataaagaaagaggtggattcaatcgtcgatcctatactcgacaaggtcgccaaagacaagtcctagagaaagagcccaactggaggagacaaataaaacatccagtaaattagtttaagaagcattagttgagcagtaaccggaagacactacgtacgggggcaacatgacacgtcgggtgtcatcacctatttctctcatcgattcattgctttcagtttcagtcacgtgtttgttcagttttagtgacttcctccctacgaaattctatgagagaacaaatttccttggatgttttattgtcaagtgcttgtgcagttgtgcttgtacatacagtcgctgacatcttaacaagaaccacggtagggcaaatttgctcgatcgccacttacgaa

SEQ ID NO: 109129 - DNA, 1239 bp, Zea Mays
atatcatctccttgctgtgtatcatcactagttactccctccttttatatactgctagctggttccgagtgattacccacagcaacagaagcagttctccaggcaatagactagctagatgcgcatcaccaaagagtagctttcgtctagaacgaagaaacaccccccactacatggccgcgctcagttcttgtgttgcttctggaggcctggcacttcaggccacccttgtggtttctcctcctcgccgccgcgggactccagtcgtcatctccgtatcatctcatggtcgccgcccaagtcttatcggctccaccatgaatccttcaggcatggctccgatcaaaagaactacacgaattcgtgcggttcatccatgccctgcaaattcgttaggaggaagcctcaccatcatcccaatacctgacctgctttcatcatggctctggatgttcggagcggccatagctgcagcagtgcctctttacagaaggttcagagcattagaaggtaaaacacggcggagacgaccggccgccgcgtgcgtccaccgcttcgagaaattaattaatcaccttctagcgtagcattagcatcagcgcgcatatatatgttttggttttgcaacttttgtgtggcagataacgtagagaagacggcggaggcggcgatcgaggtgatcgactcggtggcggaggcgaccgagaaggtcgccgacgaggttgcgcaagcgttccccggcagtgaaactctcaagcaggcagcctccaagattaagacgatcgcggatgagatcgaggaagatgccgacaaagctgaggccctgattgagaaggttgacgagataaagaaagaggtggattcaatcgtcgatcctatactcgacaaggtcgccaaagacaagtcctagagaaagagcccaactggaggagacaaataaaacatccagtaaattagtttaagaagcattagttgagcagtaaccggaagacactacgtacgggggcaacatgacacgtcgggtgtcatcacctatttctctcatcgattcattgctttcagtttcagtcacgtgtttgttcagttttagtgacttcctccctacgaaattctatgagagaacaaatttccttggatgttttattgtcaagtgcttgtgcagttgtgcttgtacatacagtcgctgacatcttaacaagaaccacggtagggcaaatttgctcgatcgccacttacgaa

SEQ ID NO: 109130 - DNA, 1384 bp, Zea Mays
atatcatctccttgctgtgtatcatcactagttactccctccttttatatactgctagctggttccgagtgattacccacagcaacagaagcagttctccaggcaatagactagctagatgcgcatcaccaaagagtagctttcgtctagaacgaagaaacaccccccactacatggccgcgctcagttcttgtgttgcttctggaggcctggcacttcaggccacccttgtggtttctcctcctcgccgccgcgggactccagtcgtcatctccgtatcatctcatggtcgccgcccaagtcttatcggctccaccatgaatccttcaggcatggctccgatcaaaagaactacacgaattcgtgcggttcatccatgccctgcaaattcgttaggaggaagcctcaccatcatcccaatacctgacctgctttcatcatggtgagtgaaaattaaaagctcaaacagatacacatccatgctttgcttgttcattgctgttcagatgcgatttccaaaaaaaaaaatcgttcgattcccttcgtcgcgttccaaaacggcctacgtaccgtgtccgctttgtcaggctctggatgttcggagcggccatagctgcagcagtgcctctttacagaaggttcagagcattagaaggtaaaacacggcggagacgaccggccgccgcgtgcgtccaccgcttcgagaaattaattaatcaccttctagcgtagcattagcatcagcgcgcatatatatgttttggttttgcaacttttgtgtggcagataacgtagagaagacggcggaggcggcgatcgaggtgatcgactcggtggcggaggcgaccgagaaggtcgccgacgaggttgcgcaagcgttccccggcagtgaaactctcaagcaggcagcctccaagattaagacgatcgcggatgagatcgaggaagatgccgacaaagctgaggccctgattgagaaggttgacgagataaagaaagaggtggattcaatcgtcgatcctatactcgacaaggtcgccaaagacaagtcctagagaaagagcccaactggaggagacaaataaaacatccagtaaattagtttaagaagcattagttgagcagtaaccggaagacactacgtacgggggcaacatgacacgtcgggtgtcatcacctatttctctcatcgattcattgctttcagtttcagtcacgtgtttgttcagttttagtgacttcctccctacgaaattctatgagagaacaaatttccttggatgttttattgtcaagtgcttgtgcagttgtgcttgtacatacagtcgctgacatcttaacaagaaccacggtagggcaaatttgctcgatcgccacttacgaa

SEQ ID NO: 109131 - DNA, 2673 bp, Zea Mays
atgaccatgacttcgccgcaggcgctgtccgccggggctgtcaccgtggaggacgatggcggcctcgccgttccacttctagcggacggcagcggcgccacgaagacggaggaggagtgcggcgccgaggccgagggcaagtactgggtggccgccgacgaggcggagaggcaggcggtgacggactgcggcgctgaggacggccgtgcgctgctgttccggacgtacaagctcaggggcgccatcctgcacccctacagggcgctaatcttggtgcgcctcgtcgcggtccttctattcttcgtctggcgcatcaggaacagcgcatccaacgtcatgtggttctgggctacgtcggtcgccggggacgcctggttcggcttctcgtggctgctgaaccagcttcccaagttcagccccgtcaagagcgtgcctgacctcgccgccctcaggcgacactacgacctgcttccagctgatgatggcgccgcctctaagctccctggcgtcgacgtcttcgtcaccaccgccgactccgtcgacgagccggtactctacaccatgaactccatcctctctatcctcgccaccgactatccagccgacagactcgcctgctacgtctccgacgatagcggcgcgctggtcctctacgaagcactggttgaggccgcgaaatttgcaaggctgtgggttccgttctgccgcaagcactgcgttgagccaagagcgccggaaaggtacttcgagacggaaccacagggcgggagagcatcgcaagagtttgtgaatgattataagcgggtgcagatggagtatgacgagtttaaggtgcgcttgggtaatctccctgacaccatccgcaagcgatcgggcacgggcagcatgagagcttcagaaggagatgcgcaggggacttggatggcagatgggatgcagtggccaggcacatggatggatccgacagagaagcacaggaaagggcaccatgctggaattgttaaggttgtgttggaccatcatccaagccgtggacaccatggtccccgagcgggcgctggcgccggcgccgagaacaagcagtctgctgacgacttcggtgctgctgctgggctgcgcctaccgatgctcgtatacgtctctcgcgagaaggatccgaactacgaccacaacaagaaggcaggcgcgttgaacgcgcagctgcgagtctccgctctgctctccaacgcgcagttcgtcatcaacttcgactgcgaccactacgtcaacaactcgcaagcgctccgcgcggcggtctgcctcatgcttgaccagcgagaaggtggcgacaccgccttcgtccagttccctcagcgcttcgacaacgtcgacccgacggaccggtacggcaaccacaaccgagtgttcttcgacgggaccatgcttgcgctgaacggcttgcagggcccgtcctacctcggcaccgggtgcatgttccgccgcatagcgctctatggcgtcgacccacctcactgtaggcaacaacaactagagagcgtcgcgcctgaacctgctagcaagtacggcaagtcaacggccttgatacactcggtctcggaagccatgggagaacgagaaaggctgaccacgccgccaccagtaccaccacttgacgtggagatggttgtggcagcttcctacgacggagggactgactggggcaagggcgtcggctacatctacggcatagcaacagaggatatagtgacagggttccgcatccatgggaaagggtggcggtccatgtactgcacgatgcggcgcgacgcgttccgtggcacggcgccgatcaacctgacagagcgcctccaccagattgtccgctggtctggggggtccctggagatgttcttctcccgcaacaacccgctcgtcggtggccagcggctgaagcttctccagcgtgtctcctacctcaacatgacagtctacccagtcacatcgctcttcatcctgctctacgctctatgcccggtcatgtggctcgtccctgaagaagtgcacatccagaggcccttcactaggtacgtcgtgtacctgctcataaccatcctgatgatccacatgattggatggctcgagatgaagtggtcaggggtggcatggctggaccactggcgcaatgagcagttcttcatgatcggatccacgagcgcgtacccgatagcgctatggcacatggcaaagaaactcctcaccaggaagggcatacacttcagggtcacctccaagcaaaccaccgcgggcaccgacgacaagttcgccgatttgtacgagatgaggtggacgccgatgctggttcccacagcgtttgttttggttgccaatgtcggcgccgttggagtggccatgggcaaggccttggtctacatgggagtatggacggtggcgcagaagacgcatgctgcgcttggccttctcttcaatgtgtggatcatgctgctcctttacccctttgcactggcgatcatgggacggtgggcgaagagacccatcatcttgttggtactgctgcctgcagtctttgcagttgttggcaccatatatgtggctcttcatttcttacttgctaatgttatcccaatataatatagacagaaatgcaatgtggctaaatttaatcactgcaccaaa

SEQ ID NO: 109132 - DNA, 2045 bp, Zea Mays
aacccgcctccgtctctctctctatctcttgccacttcttcccccgtccccttccctcgcaactcgcgattcccaaatcccgatgcgccctcgcgcctagccccctccgccgccgccgccaacatcacctcccctgtcacgggacgcccccccccctccccctccaccgcgtcctatgacgtcgccgacctcgcaccacccggactcctccaccccgcacgccgggatcggcaacggcaacggcggcaaccaccacctccacccgccgactctgaccccggcgcccgcgagcaccccggccgctccccccgcgcatgcgcacgggggcccgcaggtgcgtctcatgtgcagcttcggcggccgcatcctgccgcgcccgggggaccgccagctgcgctacgtcggcggggagacccgcatcgtgtccttcccgcgcgccgcggcctccttcgccgccctcgtcgccgcgctcgccaaggccgcgcccgcgctcttcgcccccggggcgcccaggccgtccctcaagtaccagctgccccaggacgacctcgactccctcatctccgtcacctccgacgacgacgtcgaccacctcgtcgacgagctcgaccgcatccacgacctctccgccaacgtcgcccggccgccccgcctccgcgtcttcctcttcgcgcccgcgcccgcgcccgacgccgccttcggctccgtcctctccggcaccgccggcgacgccgcccccagcgaccagtggttcgtcgacgcgctcaacgcccccgcgccgcaccccatcgagcgcgtccgatccgagtcctcctcgatcgtctccgacgtccccgactacctcttcagcctcgacagcccgtccgacgaccccagccccggcccctcggcggctcgcgccaagtccgacgccacggagactccgcaccaccacggcgacgacgtgccgccttccgctcgacagataccgcacgtcgcaggaggagcgtcatcgtggcccgccccgccgccgccgtacatggcgcagcctatgtactacttccccgtgccgccaccggtccactatctcgaccagtctgcgcagagtggctacatgcctcgcccgatctaccacattgtcggtggcggaggaagcgaggcgcctggcggagatcttcacgcggccggcggagtctacggcgtctcgcaccacatgcaggggttcccgccgatgatgtacgcgccgccgcgcgcggtcatctacaactacaagtcggaggggatgccatcgctgcctccggaaggtggggcacactcttcctaggcgcatcgactacttcacatctctgaatcctgattattgttgcagatgcctaagctaaggagttttgcgtggtattttttttatcgattcgtctaagtcttgttcgttgttttgtatagatggaggggttgatggtgatggatagatattaatgcagctttcgtctagtggaaatatattcgtgaaatgtatatcatactaaatagtatagtatttggtgtgattaattagtattctagttaatgtaatgtgggattcatataatctaggtggttctggtcttatagaaaccatttttgggcattttatatttacataaactggatgttgggtgaatgttctaagcagtatgtgctgtgttgaacctcaatcacttatgagtggtttactaaatttgaatttgctgttctttgcttgagtgctgtattgactgaacgaattctctctagatttgataaaagagatcatgtttagcctgtttacttcttagttagtttgatgagttcatttgttttatgtctgtattgagtttgtatgatgtggtccttctcagattctgctgctgttcagtcctcctgaggatcctgtacttggaacaacatgtaaagcatctacttcggttctgatgaacatatgcatgctagtactagtagatagatcataaaacatatacacatactcagatgtaagaaatcatcatgtgtacatcaaaataaattcatttatataataagtgatcttt

SEQ ID NO: 109133 - DNA, 81 bp, Zea Mays
cgccgccatctttgcctccggcgtcaccgttgtcgtcatggagcccgcgggctcggtcacctcgaggtcgtaagccgcaag

SEQ ID NO: 109134 - DNA, 1212 bp, Zea Mays
atgtacggctcgccggtgtccaaggacctcaacgtcccggtgcagccgcccatgatctcgtccgggctgctgaggtacagatcggcgcccagcacggtgcttggcgacctctgcgaggacttcctcccttccgcgtccggcgccgccagccccgacaacgtcttctccaggttcctcgccgagcaccacacccgggacgacaagccgtcgccgccaccgcctgccgcggtccacttcccgagcgaagcggacatggcttcccagcagcagcagcaaatgatgttccactcccaccaccaccagcagcagcagcagatggtgggtgccaagtccggcctttaccgcaccgtgagctcagacatagaaaccgcggccgctgttggcaccggtggcgccagcaacctgattcggcagagcagctcccccgccggattcctcgatcatctgaacatggacaacggatacggggccatgctgagggcgggcatggccacggcggactccctcgcaggtagcggtagcaggctaaagggccagctgagcttctcgtcacggcaggggtcattgatgtcccagatctcagagatggacagcgaggaggtcggagggagcagcccagaggctgccggcggaggcagggggtacatccctgggtacccaatgggttctggttctgggtgggaggactcatcggcgctcatgtcagacaatttgtctggcctgaaacgcccccgggactcgtcggagcctggccagtcagtgcagagccgcatcacgcaccagttcagcctgcccaagacgtcgtctgagatggcaagtattgataaattcctccagttccaggacgcggtgccttgtaagatccgtgccaagcggggatgcgccacccatccgcgcagcatcgccgagagggtgaggagaacaaagatcagtgagcgaatccgaaagctgcaagaactcgttccgaacatggacaagcaaaccaacacatctgacatgctagatttggctgtcgactacatcaaggaactccagaagcaggttaagaactcgaaagcatcttcacttgggatagaaaaagatttcgtgttagctaaaggccaggtaacagatgagtctatagaagctattgatcagttgagggttgctattagaaaggagctcctctgtagataaatttaataatttaaccgaactactctactcgcacaa

SEQ ID NO: 109135 - DNA, 2103 bp, Zea Mays
ccccccgtggtcccgtcgcccggccgtgagacccaacggcgtttggacgagtgcaacagccgcacgccacgagcgtgggcgtgagtcgtgaccacgtgcggcctgggccagtaccggatccgggcgcgggcggacaccggacggacacaccgcaccgccatcgcccatcggcatcgcctcccaaccgtggttgacgagctcctggagcagatcacccaaacgcgaaagccaaaagccaaagcgagcggagcacaatttatcgtgcgcagcatcggcgcagcccctttccccgcccgcccacaccgcgcaccgcccgaccagctacgggagcacgccgcccctcccccctccccctccccgccccgtgccgtcgctcaccagccccagcgtcgccgttccctgctaactctatcccctccgcctctcgtcgtgctgaggagggcggagacaactgcggtgcggtggtgcctcctcaaatccccgccgacactttctgccgcccccaggtggatcctgtccgcggatccaggaggtgctatctagctccctgatccaagctgaaattaggatctgaaccttccggggcgagctgatgtacggctcgccggtgtccaaggacctcaacgtcccggtgcagccgcccatgatctcgtccgggctgctgaggtacagatcggcgcccagcacggtgcttggcgacctctgcgaggacttcctcccttccgcgtccggcgccgccagccccgacaacgtcttctccaggttcctcgccgagcaccacacccgggacgacaagccgtcgccgccaccgcctgccgcggtccacttcccgagcgaagcggacatggcttcccagcagcagcagcaaatgatgttccactcccaccaccaccagcagcagcagcagatggtgggtgccaagtccggcctttaccgcaccgtgagctcagacatagaaaccgcggccgctgttggcaccggtggcgccagcaacctgattcggcagagcagctcccccgccggattcctcgatcatctgaacatggacaacggatacggggccatgctgagggcgggcatggccacggcggactccctcgcaggtagcggtagcaggctaaagggccagctgagcttctcgtcacggcaggggtcattgatgtcccagatctcagagatggacagcgaggaggtcggagggagcagcccagaggctgccggcggaggcagggggtacatccctgggtacccaatgggttctggttctgggtgggaggactcatcggcgctcatgtcagacaatttgtctggcctgaaacgcccccgggactcgtcggagcctggccagagccgcatcacgcaccagttcagcctgcccaagacgtcgtctgagatggcaagtattgataaattcctccagttccaggacgcggtgccttgtaagatccgtgccaagcggggatgcgccacccatccgcgcagcatcgccgagagggtgaggagaacaaagatcagtgagcgaatccgaaagctgcaagaactcgttccgaacatggacaagcaaaccaacacatctgacatgctagatttggctgtcgactacatcaaggaactccagaagcaggttaaggtgttaaaggagacccaagctaattgcacctgcccagcaagcaagagccagcagcactcttgctgaagccctgatgcacactatacatgacctgcagaactcgaaagcatcttcacttgggatagaaaaagatgtaagacagctctcattttttttttgtgggtttgaactgtagcatttgaggcttatctaccagacagtgtgtagctttatatgagcacaggggaatggaacaatggcatcatcctcaagcattcaagtgatagggagaagggtaaaattggggagatatataggagaaacaactgtatagtttcgttgtagctttgctatatgtatactacactttcggtataaagtggttaatttacccctattgctagtcgtagcagctgtaaatgtgccgcagataagttgtagaaaaacttggatgcgttcaatgcgagcgatagtgtttcgactctgaacatata

SEQ ID NO: 109136 - DNA, 1772 bp, Zea Mays
ccccccgtggtcccgtcgcccggccgtgagacccaacggcgtttggacgagtgcaacagccgcacgccacgagcgtgggcgtgagtcgtgaccacgtgcggcctgggccagtaccggatccgggcgcgggcggacaccggacggacacaccgcaccgccatcgcccatcggcatcgcctcccaaccgtggttgacgagctcctggagcagatcacccaaacgcgaaagccaaaagccaaagcgagcggagcacaatttatcgtgcgcagcatcggcgcagcccctttccccgcccgcccacaccgcgcaccgcccgaccagctacgggagcacgccgcccctcccccctccccctccccgccccgtgccgtcgctcaccagccccagcgtcgccgttccctgctaactctatcccctccgcctctcgtcgtgctgaggagggcggagacaactgcggtgcggtggtgcctcctcaaatccccgccgacactttctgccgcccccaggtggatcctgtccgcggatccaggaggtgctatctagctccctgatccaagctgaaattaggatctgaaccttccggggcgagctgatgtacggctcgccggtgtccaaggacctcaacgtcccggtgcagccgcccatgatctcgtccgggctgctgaggtacagatcggcgcccagcacggtgcttggcgacctctgcgaggacttcctcccttccgcgtccggcgccgccagccccgacaacgtcttctccaggttcctcgccgagcaccacacccgggacgacaagccgtcgccgccaccgcctgccgcggtccacttcccgagcgaagcggacatggcttcccagcagcagcagcaaatgatgttccactcccaccaccaccagcagcagcagcagatggtgggtgccaagtccggcctttaccgcaccgtgagctcagacatagaaaccgcggccgctgttggcaccggtggcgccagcaacctgattcggcagagcagctcccccgccggattcctcgatcatctgaacatggacaacggatacggggccatgctgagggcgggcatggccacggcggactccctcgcaggtagcggtagcaggctaaagggccagctgagcttctcgtcacggcaggggtcattgatgtcccagatctcagagatggacagcgaggaggtcggagggagcagcccagaggctgccggcggaggcagggggtacatccctgggtacccaatgggttctggttctgggtgggaggactcatcggcgctcatgtcagacaatttgtctggcctgaaacgcccccgggactcgtcggagcctggccaggtgcgcgcgggggttactctattaccacttcccatttcttgtaatacatctacgtggcgaactgacggtgcagtcagtgcagagccgcatcacgcaccagttcagcctgcccaagacgtcgtctgagatggcaagtattgataaattcctccagttccaggacgcggtgccttgtaagatccgtgccaagcggggatgcgccacccatccgcgcagcatcgccgagagggtgaggagaacaaagatcagtgagcgaatccgaaagctgcaagaactcgttccgaacatggacaaggtactcgcctttctgcagccacggcaacaccgataggcagtagctaggacattgtgtgtgtgtggttagcaaattttctgtgtgaggaccactccatcattgacttgtctgcaacctgcgcttccattt

SEQ ID NO: 109137 - DNA, 1130 bp, Zea Mays
atggaagctagcactggtgcagtgcccagtgatgttcaaatataccttagggggcacagaggaccagatcctgcaaatccagatgtgttgtgcagccaaaaggcaacagatcgtgtggctgcatatggcgaggcgatgtctagtcagcacggaccagactatgattggaggacctcacctattgattctcaggctgtgtatgcaagtggtggaaaagctcatggaaggtacacaatatttgctaacgtcatcgactcgagccaggtgagggttcagcgtggaggttcatcgaggtctgctgctcgtagctcccgtcgctccactcaagatccagcagaagtggagcaactgcgagaagaacttaggtgacatcaggattacttgaagcaacaagctgcgcaacatgaatattatgctacacagattcagcaacagcaaacactcatacaagtaagttcaaaagataataggtttcactttaagatatgtattgatttaaaacgctgatgtgaatgagttcgacaaatttgtagcaactagcacaggcccaagggatacacgtcccggtgccccccccacctcccgttcattatccttggtcttcacctcctcctatacctacatctccatctaccgaacatcaggtatgcatattcatcatcatttacttattgttagttatattatgatgtaactcagcaaatgtcatttgtatatgtatattagacccctccagctaccttgctgacgcatgaacaagacgatgggttagactttgtcgaaaccctcttcaacagtggaggtatcgaccatcactcttcactgtaacccgatggtgatcggcgaccgtgagcttccatgttattgtgttctgatacttgagacttttattatgactatgtatgagatattgtctcttattagtacttgatgatgagatgtgtcttattatgactatggatgagacttttgtgatgtaattgatgagactatggatgagacttttgtgatgtaattgatgagactatggatttaaatattgttatgtgattgtgtatgagatgttttatgtgaaaatatgttgtgctatatagcttttgatatatttgttatgttgtggaatatggtgt

SEQ ID NO: 109138 - DNA, 673 bp, Zea Mays
gaaactagcctcgaatgacaacaagtcaacaatacgatccatgtgggctactgaatactgatagtaccgcacataaaaattatcaaggtaatcccttagacgaacgacaatacaaccaatccatcagctcccgcctctcggtaatgacaaaaataaagccataaccatatgtacaacgatgtttaacataacgactcccggatcaaagacgaaacatatccccaggtcacaggcctaaaatcaatagccatataggccgataacctagctaaattaagcaacctaccctctatcgaatccggaccgtatcatacacatcttcaggcttcatgctagtgaacatgtcagcttgcgctcccacctgaacgatgagccaaccatagctgcatcttcattcctcagacactgtttctgcctgggcagcagccaataatcttccattactctcaggtacaggtgacccatgagcctgagcatccttcactccagaatgattgcctgcagcatctagctcacattctgaactgagctcttcggactggctagatggagatgaatatattaggttcagcatggcgtcaccacatccacccagctcaatcgaagggcaagtaatactgccatcctcatggacagactcttgttgaatcaaccgattcttgaatttatcttc

SEQ ID NO: 109139 - DNA, 1766 bp, Zea Mays
cagcttaaccacatacatatctatattcaaactacattgtataaatattacaatctacaatgtaaagcgatataaaatggtgttttagtgatcatatatgtatattgtacagttcactcatattgatcgtcaaaaacactttttgcgttgttttgtactataaattatattgtttgtatagtgtattttaaatattagtatcattacgagtaatctggttcttaccgtctctaatccggagtccctacccccgacctcgcgatcgcagttcgggttgccatatatacatacaacaacacccggtcccaaagaaaggccacacacagccgcactcgcacagccgccaccaccacctggtccacgtcgccggcggcaatgtgggcccacctggccgtggcgctgttcgtggcgttagccgtggctcccccggcccgcggctccgacgtgccttcgttcccgctgtcgcaggcgcagtccccgtccaactcctcgtccccgtccaacgccgcctcgcggccgtgccacctggacctctcggccgagctcttcggcggggtagccgcggcgtgcggcgccggcgggggcccgggctcgctggaccgcggccgctgctgcccggtcctggcggcctggctcttcgcggcgcacgcgcgcaccgcgctgtccgtgcccccggcgcctccaccctcggcgctagcgggggacgagggaatggggcccgacggcggcgacgacgggcccatggtaccgtacgacaaccagaggtgtgtcgacgcgctgggcgccgcgctggagcggcgcggggtggcgctgccccggcccaacgcgacgtgcgacacggtgctctgcttctgcggcatccggctccaccagatcggctcgctccgctgccccgctgcgttcgccgtcaaagctggcgccgcggccaggaacgccacgcccaccgccgcggtgaaggccctggagaagagctgccgcaacgcctcctacgccggctgctcgcgatgcgtgcagtccctgcaaaagctgaaggggaacgtgagccgcgaggtctccggcgccggcggcgaccgcgcgcggcggatgctggggcgggactgccagctgatgggcctcacgtggctgctggccaagaacaagacggcctacatccccaccgtctccgccgtgctgcgcgccatgctctacaccgcgcgcccgacggagtccggcagcggcggcgcggcgccgcggtgcagccctgaccaggagaacatgccgcttgccgtggactcgctgcagttcgagcgcaccgccagcgcgggcggttccgcggccgccgcctccgcgacgccgcgcggcgccaccgccgccgccctccttggcctcgcgctcagcctggcggtcggccgctggtgggatgcgttcttgtgaactcccgatgcaggatggctgtggttggagggcgtggcgtggtggagctttgttgataacatgtattttgtacgtagtagttgttgttagcagggaagggagtagcttattttgcatagccggggatttggcaaatactatggcggattgacggcgtggctgtgaatgcgatcgtggtgttgcttgcagatggctggctgctggctccaaggggtgtgcggatgacggcagtaaattgaaaacgtagagcctctttgccaagacttccacgggctttgacttcactactagtagcagaaacacagatgaagcttttaaatttttattttgttaaaataatttgaattgttgcc

SEQ ID NO: 109140 - DNA, 385 bp, Zea Mays
caactcgaagcaacctggcattaattgagcagatatattatgcagtacgtccgtggctccacgctatggggttcacatgatgtgttcccctcccctcttcgatccctggcggggttctgttctgtccaaggcaggaggatggggtggccggtttcgagtcacgagcaaccaaagaggactctggcgattcagacgtacgtggggggcgtacaaggctgtccaggcacacgaactagtctgcgtatggctctgcagcagtatacacatcgcgtatgcgaacccgtatgccattcgccatggcatctccccattgacggtctgtgccacacctgctgagactggaagcaaaacagataagcctatcatcggctacggttgcttgctt

SEQ ID NO: 109141 - DNA, 2771 bp, Zea Mays
aaaaaagcacacgcgttgcgcaaaaggggaaacaggggatctccacctctgccgccgacccgtgggaagagaggagcgtgcgacggcacgcagacgcatctagtctcccgccgcctctactgtcctcgccatcgccagcaccccaaggctcggtacgattcggctgcgtgcccgcgcgtcggcactgcaccgcggcgcgcaggcggaccgtgctggggttttggtggggtgtagggaggggcgtcctgcgctctgcggcggcttgatcctgtgaaggcggcggcagcagcagcaggcttctccgatgcagcggctagtgggggtgggcgagaggctattggcaatcggaacaaataggcgggcggccacttattcccattcgagccacagaagtgggtactacacagcagtgagggacaatggcttgtcaacaaggcgtaagattccagccatcttatctagaatgttctcacattacaaagtcattagcagaaagaacagagctgaggatcacaagtgtagaaccaggatgtcaagaggctaccacacactctctgtgtcagtgacgaattcatctgcaacccagcaagcacatttggcatggaagcagcttggtcatatgtacacatatagaggtccacggttcccactgctgggccgagcagcttgtgctgtaagcctgtccttcacgaggttccatataatccctggggtcatggctctagctgttggcaagatggcgcttgcacctcctgtccttgcagactcgcgacccttcattccaagaatggatggcatcatcacaaaggcacaagatactcgccaatttctgtcatctcttgtttgctcaatctgggagggcatcactttgcttgttagagctgtgcatttggcattcctattcttccctgcaactgcattagctccatttgctgacaagtttagtattgcattcaggagaaggtggcttagtcttatgcgccggacccttgaaaaggctgggccagcattcattaagtggggccagtgggctgcaacacgccctgatctttttccaagtgatctctgtgtagagcttgcaaagctccatagtgctgctccagcgcatggctttgcttacagcaaggctgccattgagaaggcattcggtcgtcagctttctgaaatatttgagtcctttgaggagaaccctgtagcttctggaagcattgcacaaatacatcgagccacactaaaacatcaacatcctggaaagcatgttgcagttaaggtgaggcatcctaatgttggagaatcaatcaagagagactttctactcattaatcttgtggcaaaggcttctgatatggtccctggattaagctggctgaggctggatgagagtgttcgccagttcgcagtattcatgatgtctcaagttgatctttctagggaagctgctcatttgagtcgttttatctacaacttccgcagatggagacatgtgtctttccctaagcccttatatccatttgtgcatccatctgtcctagttgagacttttgagaatggagaaagtgtttctcgttttatggaagaaatcgaagggaatgctcggatgaagaaagaccttgcacacattgggacatatgctttcctgaagatgcttctggaggacaattttattcatgcggatatgcaccctggcaacattcttgttcgtttaaatgagaacaagcttgcaaggagacgttttttcagagctaagccccatattgtgttccttgacgtgggcatgactgctgagctcacacgatctgaccgggataacttacaacagttcttcaaggcggtggctactagagatggccgtactgctgccaagtgtacccttcagttatcaaagaatcagagctgtccaaatccagtggccttcaccgaggagctagacaagacgtttacattttggggaacacctgaaggggatgtttttcatcctgttgaatgcatgcatgagttgcttgatacagttcggcgccacaaagtcaacattgatggcaacatatgtactgtaatggttaccattttggtccttgaggggtggcaacgcaagctggacccaggctttgatatcatgcaaacgttgaagactttactgctagagaaggacataaagcaaccaattgattttttctcataaacaaacctgtcagatcgttcttatgtatagaagcagtggaagatgatgccctaccaatcagaaggcgaaacatctaatccaactcgaagcaacctggcattaattgagcagatatattatgcagtatgttctatctgtcctttctgatagtagaagtagcagaaactgtctgcactgagtttcattttttactacgtcagtatgaaaattttgccgaccacgaccacccaggcgggtccagccatggtgttctttaaaattcttgggaagttcctgtccaccaaacttcgtagaagagcaaacagatgtagaatagtagtcattgaattgaggccgagttgaactacattatggcacacataggtttggttccagacttgtgattcataccggcaactaaggaattcctcaatcaaggaacaggaagagacagggatggggtaaaaatggctaagctataagtttggttgtccgttttatgcgtggctacgttaaagttttggaccgtcttcagtgttcagtgcgggtgagccgttatttaggtaatgttatgttccagattatgcttaaatagtgaatcgtctcgctccat

SEQ ID NO: 109142 - DNA, 483 bp, Zea Mays
acacacaatcacataacaatatttaaatccatagtctcatctattacatcacaaaagtctcatccacagtcataagacacatctcatccaatcataataagagacaatatctcatatatagtcataataaaagtctcaagtatcacaacacataacatggaagctcacgatcgctgatcaccatcgggatacagtgacgagtgatggtcgatacctccactagcgaagacgcttcgacaaagtctaacctgtcttctcgttcctgcgtcggtaaggtagctggaggggtctaatatacatgtacaaatgacatttgctgagttacaccacaatataactaacaacaagtaaatgatgatgaatttgcatacctgatgttcggtaggtggagatgtaggtgtaggcggaggtgaagcctaaggataatgtaacagaggtgtggtggtggtggtgggggcaccgagacgtgtaacccttgggcct

SEQ ID NO: 109143 - DNA, 1488 bp, Zea Mays
cgagacaaacaaggcctttttttcgctcagctcgcaccccccgcgcccttcattccacgcgggtcgtcgttgccaccgatggggcgcgcgccgtgctgcgagaggagcgggctgaagaaggggccgtggacgccagaggaggacgagaagctcgtcgcctacatcaagaagcacggccagggaaactggcgcaccctccccaagaatgccgggctcgcacggtgcgggaagagctgccggctgcggtggactaactacctgaggccggacatcaagcgcggccgcttctccttcgaggaggaggaggctatcatccagctccacagcatcctcggcaacaagtggtcagcgatcgcggcgcggctgcccgggcggacggacaacgagatcaagaactactggaacacgcacatccgcaagcgcctgctccgcatgggcatcgaccccgtcacccacgcgccgcgcctcgacctctccgcgctcctcaagcccgccgccgcgtactaccccacgcaggccgacctcgacacgctccgcgccttggagccgccgctcgccagctacccggacctcctccgcctcgcctccgccctgctctccggccgcccggccgcgcccgcgatcggcgagcaccggcagcagcagcttctgccgtggattctgcagcaggcggtcgccagcatcagcatggcgcagcatgctgttgccgccggagcagcgtgccaaatgccgccgccggacctggtccacaacacgaacccgccgacggtgcagcagcatcagctcgcggccgcgcagcaccagccccaagacgtggtctgccacagcatgcagccgcctacggcgggctacgtcgacagccctctggacgtcccggcgctgatgcaggcagcgcagcccgacgcgacgaacctgcagcagtggaacagcacggtgacgagcagcggtaacaaccacaacagcgtcggctccggcgtgtccacaccaacgtcttccagcccggtgccgcggttggatcactccaccacctgcgtcgccacgacgttcggcggcggtggcgccagcaccgacgacgtcgccgcgctgttcgacatgcagctgtctgagctgcttgatgtgagcgactacatgctgtaataacaacagagagagagagagagagagagagagagagagagtcacgcgagtgcacggactgttcatcacgtaccgcaaggccgggcaaacggaaatctatgtcacgacggacgacgcattttttgtacaggattattgttgcacctcctttatccagttgttcgttcatggtcagaccagtgattaattactgctgtaattttcgtcttttcgattagccaggtgcgtgtcagtgtggggaatggtgtcgtggcatgattggttgagacgtctgttatcactctcgctcgcatcacggttcgtctccagcgaagaaaatcagggttgtttttcctatggcatgtgcaatgt

SEQ ID NO: 109144 - DNA, 1090 bp, Zea Mays
ggttactggccggacatgtcacatgtggttccgtgtaggttcacccgcctctccttcgcaatacggcaaagaggagtcgacaccgcccgccccatgtactcggtgtcggtgtggtcctgtgggcgcggcgctgcgtgtgggcgctcctctgttcggcaggaatcctcgttgcctcctcactactccaatctccatcgccattgtcggcgcaagcaaaggggcggagcagcatggcggggcgctatgacggcaaccccttcgaggaggaagacgtgaaccctttctcgtggggtattcgctacttcactcctctttggatctggacggggcgcagatctgaccacgtctcggcgatggcttgcagtatcgccgtcaccgacaccgctagtgcattttttctccttttttctagcctaatgatgcaatgctgcccttgaacctattgtgcgtggctgtggttgaagtttttattgatgggtttccttggtagcaacaaacgcgcggcaaggctggcgggcaatccaactttggcggtggcgcgttttatatgcctaacccccaaaacgtgcctccgacatccaattcacgcctttcgccgctccctcctgaaccggcagacttcagtgctacagtggatataccccttgactcgtcaaaggacctgaagaaaagagagaaggagctgcaagcaagggaagcggaattaaacaagagggagaaggaactaaaacggagagaggaggctgcagcaagagctggcattgtcattgaggagaaaaattggcctccttttatgccactcatccatcatgatatcatcaatgagataccgagtcaccttcaaagaatgcaatatgttgcatttgcctcgtttcttgggttggtttgctgcctcttctggaatgtcatagcagttactacagcttggatcaagggggaaggtgttaagatctggttattggcaataatttacttcatatctggtgttcctggtgcatatgttttgtggtatcgtcctctgtataatgcaatgaggactgatagtgcattgaagtttggattgttcttcttgctttacttggtaaatata

SEQ ID NO: 109145 - DNA, 887 bp, Zea Mays
ggttactggccggacatgtcacatgtggttccgtgtaggttcacccgcctctccttcgcaatacggcaaagaggagtcgacaccgcccgccccatgtactcggtgtcggtgtggtcctgtgggcgcggcgctgcgtgtgggcgctcctctgttcggcaggaatcctcgttgcctcctcactactccaatctccatcgccattgtcggcgcaagcaaaggggcggagcagcatggcggggcgctatgacggcaaccccttcgaggaggaagacgtgaaccctttctcgcaacaaacgcgcggcaaggctggcgggcaatccaactttggcggtggcgcgttttatatgcctaacccccaaaacgtgcctccgacatccaattcacgcctttcgccgctccctcctgaaccggcagacttcagtgctacagtggatataccccttgactcgtcaaaggacctgaagaaaagagagaaggagctgcaagcaagggaagcggaattaaacaagagggagaaggaactaaaacggagagaggaggctgcagcaagagctggcattgtcattgaggagaaaaattggcctccttttatgccactcatccatcatgatatcatcaatgagataccgagtcaccttcaaagaatgcaatatgttgcatttgcctcgtttcttgggttggtttgctgcctcttctggaatgtcatagcagttactacagcttggatcaagggggaaggtgttaagatctggttattggcaataatttacttcatatctggtgttcctggtgcatatgttttgtggtatcgtcctctgtataatgcaatgaggactgatagtgcattgaagtttggattgttcttcttgctttacttggtaaatata

SEQ ID NO: 109146 - DNA, 1476 bp, Zea Mays
ctcagcctcttgaactgctcaattcattaggattccataaatcaaacaaccagcagttactttcaagagaagaaagcaatgcacatggcaatagttaccatggcagccggggggaaccctccatcgttaataatggtgagcatagtcatgcagaggcaggtccacaaactagcctggagaattcggaaggtttaccgtcaccatcagggagaacacaacctgctgtttccccacgtggccaaagctttggacaaagaattatgggcaatatgatggataatcttttggttagaagtcttacatccaaatcaaaaggtcgagtcgatgatattgctccaccctcacctgtgaaggcccctgatgatgatgagacagacaaggctgaaggggaagagagccctatgatggaaactgtccggagcaaatgtatcacacagttgctgctgctcggggcaattgacagcatacagaagaggtattggagcaggttaaaagctacacaacagatagcaataatggatatcttgctctcactgctagaatttgcttcttcgtataactcaccttcaaattttcggacgagaatgcaccatatacctctagaaagacctccactgaatcttctccgtcaagaactagttggaacaacaatttatttagatatccttcataagtcaacagtggagcaggacaaaattgactccattgaggaaacaaatggtttaaatgtggaatctggtgaccaggaaaagatcaagtacctagcagaagggaagctggtttctttttgtgggcagattttgaaagaggcgtctgttctccagcctagcactggggaggctgccagtgcagacatacatcgtgtattagacttacgggcacctgttattgtaaaggttttgaaaggaatgtgcatcatggatgctcagatcttcagaaggcacctgaaagagttctatccattaattaccaaacttatctgttgtgatcagatggatgttcgtggagcccttggtgatctctttagcaaacagcttactccactcatgccctgaagtctggcagtatttcctcccttgcatagatcttgttggaacatattcttcgtcagcatttttgtgcaaacatggagcaccggttgggtgcttgacatccttaacgcgctttctggtgcaacagctactccctaggaacttaagagcttgatcagcgggaacggcaggtccctaggccacatcttttttttttggatgacgcaagggaagtagcttgactgatgcgcacaccgtgtttttcctagcaggcttgtactttggagctatttatctgtgcccggacagggatgatgcttccattatacagtagagtagtgttggtaatatgtacacattgttgagaacgttgtacttgaggcctgttgttattatacggcaatagtagattgtttgcggcaagcctcgttttttgtgcgtctaa

SEQ ID NO: 109147 - DNA, 807 bp, Zea Mays
atccgcccccgccgagccgaggacagcagcgggggctctcggtctcctcctaggctcctacagatctcgtaccccgtcacagatctcgcgccctctccatcccatgcccaccccccctcgtcggatctgaccactccgcccctcctcccgtctccgccgccggagctgatatccgcggtcatggcgggcgccgcgggcgggttcgtcacgcgggccttcgaggccatgctcaaggagtgcgctgccaaccgcggcaagttcgccgcgctgcagcaatccatccagtcatacctcgatagtatcaagggggctacagcagagggcgcggtcatcaccgaggcgctcgggtcagctgggcgcgtgctcgacgggccgcaggccgagctggtgctgcagccgctccgcctcgccgtcgagaccaagcacgtcaagctcgtcgagcccgcgctcgactgcctccacaaacttattgcttatgaccatttagaaggcgatcctggtttagaaggtggtaaaaattccccaatatttacagacatcctgaacatggtatgtggttgcgtcgataacacctcctctgacagtactgttctccaagtcttgaaagtgcttcttaatgctgttgcttcaaataagtttagagttcatggagagccattgcttggggtcattagagtatgctataacattgctcttaataggtacctgttatatcgctaccttcttgtttgcagtatgttgccttgttgccctttggaccatgtatgataatttattcatttgtattttcttagcaagagccctgtg

SEQ ID NO: 109148 - DNA, 1158 bp, Zea Mays
cccttccctcttcgcacgcagtcgcagactcgcagccccccttctgatcctcttcctctaccacgcggccacgcccccgccccccgctgactcacgcaacgcgcgcgacgacgcggaggagaaaaccaggaatcccataaaggtttcagttccgcaagccaagccactcccacacccccacgctcgagcgaagggaaccagcaatggcgcgtcgcgggccgtgagagacgggaacaagaatggctgccatggtgcgcgggcccgcgatggcctctgcggctgggccgggtgcgacgtcgtcggctgctgcggccgcggccgcggcggcggaggagatgcggtggcggcagctagacagcggcgtgagcgcggtgtcgttcgggttcgtggccaccgccatactcgtgtccatgttcctcgccatggccatcctcgagcacttcctccgccccccgacgacggcccacgcgccgccccggggccggggtgtcctccgccgcctccgcctcttcctcctcggccgcagtggcggcgcccccggcgggacggatctcgaggcggcgaggaagctccacggtcacgcgcccctcgagatgcctgtttaccccagaggcgtgtcagttctgatgccagggcaagacgtgccaacgttcatcgcgcatcctgcccctgcaccgtgccccccagagaggatccggtggccgtcacaccagccgcctcctttcactggctcctcgccaaaccctagctagtgctgatgtagcacacacccagcacactgagaacgctggctgttgtcagccagtcaaccatcaatgtcttgtctgtagaggaggcgaggagcagccgtgcgctttgcgggcgtgttggtgttgccgatgaatcgatgatccactccgtctccggggcatgacagccaggacaggcgggctctctctcctctttgtgactctgtatctgtacaggtttaggtcttgttctgaagcattgcaaccttgtactgctgccccctgctgcgttgtggctggcgagcggcggctggtggatccgtcgtggagttgttgctgctgatccctgttgatgtgtgtcagtagatgcctgatggagcatgtaaactacttgtaaactcgcttggcaaatgtggtttgatttcaggaa

SEQ ID NO: 109149 - DNA, 1022 bp, Zea Mays
cccttccctcttcgcacgcagtcgcagactcgcagccccccttctgatcctcttcctctaccacgcggccacgcccccgccccccgctgactcacgcaacgcgcgcgacgacgcggaggagaaaaccaggaatcccataaaggtttcagttccgcaagccaagccactcccacacccccacgctcgagcgaagggaaccagcaatggcgcgtcgcgggccgtgagagacgggaacaagaatggctgccatggtgcgcgggcccgcgatggcctctgcggctgggccgggtgcgacgtcgtcggctgctgcggccgcggccgcggcggcggaggagatgcggtggcggcagctagacagcggcgtgagcgcggtgtcgttcgggttcgtggccaccgccatactcgtgtccatgttcctcgccatggccatcctcgagcacttcctccgccccccgacgacggcccacgcgccgccccggggccggggtgtcctccgccgcctccgcctcttcctcctcggccgcagtggcggcgcccccggcgggacggatctcgaggcggcgaggaagctccacggtcacgcgcccctcgaggtacggctacgctttaatgattccgtcgcctagccttttttttttcctcagctttctgttctcgcgtgggtttgcttttcgctactcttctcttctgtgtgtctgcgcatctgatggacctgattgcgaatcttgtcggacccccgcgttcttgtcgttctctagtcagtctctgctatgctcgaaaactataatgcagcggcggtgggggggagtggagcgaaggcatctactcctagcgcgaggaagatgaaactgcagccatatctttcctctatctgctgatcgtgcgaccgcagccccgtaggtctagaaatcactagcactaggactgatgtaacattgtccgagagaccaggacatatcgtttacttatatattttagtgggcatgggcatgccattgttggttgctccaactttatcttca

SEQ ID NO: 109150 - DNA, 1497 bp, Zea Mays
ccaccaaggcaccaacccgaaacgaatccagtgatttcccctcccgcatcgaaacgtcccccaagcagccctgcccggctgcccctgccgcgacgcaactggcaagcatccagcatagcagcgactcccccgctcgccggccagcggccaccagttccctttacatccacacacaacgcgcaccacaccacaccacccgacgccaacgtccgggaccaaactccgatccccaccactatgccggcggacggggaggcgctggcgccggccgttcacttctggggcgagcacccggccacggaggcggagttctactcggcgcacggcacggagggcgagtcctcctacttcaccacgcccgacgcgggcgcccggcggctcttcacgcgcgcgtggaggccccgcgcgcccgagcggcccagggcgctcgtgttcatggtccacggctacggcaacgacatcagctggacgttccagtccacggcggtcttcctcgcgcggtccgggttcgcctgcttcgcggccgacctcccgggccacggccgctcccacggcctccgcgccttcgtgcccgacctcgacgccgccgtcgctgacctcctcgccttcttccgcgccgtcagggcgagggaggagcacgcgggcctgccctgcttcctgttcggggagtccatgggcggggccatctgcctgctcatccacctccgcacacggccggaggagtgggcgggggcggtcctcgtcgctcccatgtgcaggatctccgaccggatccgcccgccgtggccgctgccggagattctcaccttcgtcgcgcgcttcgcgcccacggcggccatcgtgcccaccgccgacctcatcgagaagtccgtcaaggtgcccgccaagcgcatcgttgcagcgcgcaaccctgtgcgctacaacggccgtcccaggctcggcaccgtcgtcgagctgttgcgtgccaccgacgagctggccaagcgcctcggcgaagtcagcatcccgttccttgtcgtgcacggcagcaccgacgaggttaccgacccggaagtcagccgcgccctgtacgccgccgccgccagcaaggataagactatcaagatatacgacgggatgctccactccttgctatttggggaaccggacgagaacatcgagcgtgtccgtggggacatcctggcctggctcaatgagagatgcacagcccaggcaactcaccgtaacatacctgtcgaataagcattcggatgcatggatacacaagaaaaatgtttcatgtacaacgattgttatatatgctatactcagtatttgactgtaaactgttcggtcaggtttagtggcttggatatacaaaatgttggttgcctcatcagtgtaaaagaatgctgcaaatgcttgggatcgataatatcagctctcttcgggggctatggatggcaatacaaggcgttctctgccctgtacaagcttggcagaccgaattttatctcc

SEQ ID NO: 109151 - DNA, 842 bp, Zea Mays
acggcagtcgtcacaccacgaaagcagcagcaaagtcatcagcaacccacgatcggtcgatcgatcgggtacctgctagcgaattcgatcggtcgggtacctgctgctagcgatatatagcagcagcagcagccagcagatcgtcgccggcacgatggccagctcgtcgtcgtcgtcgtcagctctggtcgtcctcgtggtggttctagccgcggcggtggcgtgctccgcgacgcgccccgtccccgcgcggcagcgggcggcggcggcggaggaggaggacgtgaggcggccggacacgctgcacgagggcacggtgctgatcccggggatggggcgctacgagatcggcagccactacatcccggacatcggcgggctggaccacagcgtccccgccgccacccacgggcagttcatccccggcgccgacgacacctgggtgcccaaccccggcttcgaggtccccaaccccttccgccccggcgcggccactccatgaacacgtacgagtacgaccccgcaacgccgcgctgaataccgtctcgcgccgcgctgaataacgctacactagctacgtactagtcgcctagtcggtcggcttgccgtgcttgtgcttggctgctgaatgcaagcatgtcctttgttgtgtggtttaatttgtcccacgtacgtctgtgcagtgtttttgcagtttgtgctccagtgaagaagtgtgcacgcgcgatgcgtagaaagcgcatcagaactttgcatggcccggttggtagcagctgcttgtttctcggtcactactgttacaaataaaatttgctggactggacacatagctatcatcatct

SEQ ID NO: 109152 - DNA, 653 bp, Zea Mays
cacaccacgaaagcagcagcaaagtcatcagcaacccacgatcggtcgatcgatcgggtacctgctagcgaattcgatcggtcgggtacctgctgctagcgatatatagcagcagcagcagccagcagatcgtcgccggcacgatggccagctcgtcgtcgtcgtcgtcagctctggtcgtcctcgtggtggttctagccgcggcggtggcgtgctccgcgacgcgccccgtccccgcgcggcagcgggcggcggcggcggaggaggaggacgtgaggcggccggacacgctgcacgagggcacggtgctgatcccggggatggggcgctacgagatcggcagccactacatcccggacatcggcgggctggaccacagcgtccccgccgccacccacgggcagttcatccccggcgccgacgacacctgggtgcccaaccccggcttcgaggtccccaaccccttccgccccggcgcggccactccatgaacactgtttttgcagtttgtgctccagtgaagaagtgtgcacgcgcgatgcgtagaaagcgcatcagaactttgcatggcccggttggtagcagctgcttgtttctcggtcactactgttacaaataaaatttgctggactggacacatagctatcatcatc

SEQ ID NO: 109153 - DNA, 110 bp, Zea Mays
ttgtgttgggtgtgtccactacagacggtcaatagagactggattgggcttaacccaactatcgttcctttaatcgggcccttgatcggaagggcccatgctaacctcgg

SEQ ID NO: 109154 - DNA, 762 bp, Zea Mays
gtcctccagctgttaaatcttttccgtgttcaacttgagagggcaaactggtttagtcatttgtgaactgtgatgagatcaggtgtgggatgtccttagcaaccaggaggccgttgacatcgtgtcgtcatccccaagccgatcaaaggccgcgatatccctggtcgaggccgccgctcgtgaatggaaagccaagtacccgacatcgaagaccgacgactgcgcggtggtctgcctatacttggatggcaagatggaccaggaacgcgactcgacggcgtccatggacaacatcagcctggactacgaaggctcagccgcggacccgaacgaagcgcaggagctgcaggagccggcgctgacccgcaacttcacggtcaggacggtggccggaagtgcccacgagaaggcgctgtcgggggcggcagacgcggccgtcggcggcggcgcagcctgcgcccacgaccagagctggtcgggccttgacggggtgacgcgggtgaactcgctcgtccagctccccaggttctccgaggagaaggcggcggttggctgatgagccgccggctgctgcatgcgattctttggttttggttgttgagttgtttgtttcctcgttttttttttttggaaatctagtttagtagttgccccgttgttgtttgagaggaagggacacggtagaaacagaaatatggtgttgtgatttgcatcggcgcgcgcgtaagctggtgtgtttgagccactgtggtggtggtggtt

SEQ ID NO: 109155 - DNA, 1932 bp, Zea Mays
ctcccacgcccgccgtccccgagagccgcttcttctttctccgtgactcggagctgtctacctcaccctcactgcctctgcgtgcgtgcgtcactgccggtctgccgtgccgctgcgcccgctcccgcaataaataaactcgcctctctctgttctccgttctcacctccctcctcatccatccagggacgcgccttgacttctcacgtcgtgtcgtgtgtgagcgccgcagcggtgctgctgatctgcgattcctccacgccacaccctacctgaccacccgacagggaatcctactccctcttgcgcgccgcggcggcggcgccggcatcttcggtctccgtgcgggtgtttccgttcggcgtttactggccgggcgagcgcggcattggaggagtcgggaggagggagaccggaggcgtgatcgatggggaactgcgtggcgagcgggggcgcgacgacggtcacggcggcgggggaggacgggaggcggcgggggaggaggtggaaggcgccgcgggaggagcagctcggctcggtccccggccggatcttctccaacgacggccgcagccgcaccgccgccgtgttcacgcagcagggccggaagggggtcaatcaggacgccatgctcgtctgggatgggttcggcggggaggaggacgtcgtgctgtgtggggtgttcgacgggcacggcccgcatggccacctggtggcgcgcagggtccgcgacgcgctgccgctgaagctcatggccgcggtgcgcgagtccaagcccggcttggacatggccgccgccgcgtggaggaaggcctttgcgcgcgcctacaaggccatggacaaagatcttcgctcccacgccaccctagactgcttctgcagtggcagcaccgccgtcaccgtcctcaagctcggctcggatctctacatggccaacattggtgactcgcgcgccgtgctaggctcaagggacggcggcggcatggtggccgtgcaactgactgtcgacctcaaaccagatgttcccagcgaggcagaacggatcaagaagtgcaggggcagggtatttgctctgcaggacgaaccggaggtgcctcgggtctggctgccgttcgacgacgcccctggcctggcgatggcccgggcgtttggggacttctgcctcaaggattatggtgtcatttcggttccagagttcttccactggtcgctcacggagaaggaccagttcgtcatccttgcatcagatggggtgtgggatgtccttagcaaccaggaggccgttgacatcgtgtcgtcatccccaagccgatcaaaggccgcgatatccctggtcgaggccgccgctcgtgaatggaaagccaagtacccgacatcgaagaccgacgactgcgcggtggtctgcctatacttggatggcaagatggaccaggaacgcgactcgacggcgtccatggacaacatcagcctggactacgaaggctcagccgcggacccgaacgaagcgcaggagctgcaggagccggcgctgacccgcaacttcacggtcaggacggtggccggaagtgcccacgagaaggcgctgtcgggggcggcagacgcggccgtcggcggcggcgcagcctgcgcccacgaccagagctggtcgggccttgacggggtgacgcgggtgaactcgctcgtccagctccccaggttctccgaggagaaggcggcggttggctgatgagccgccggctgctgcatgcgattctttggttttggttgttgagttgtttgtttcctcgttttttttttttggaaatctagtttagtagttgccccgttgttgtttgagaggaagggacacggtagaaacagaaatatggtgttgtgatttgcatcggcgcgcgcgtaagctggtgtgtttgagccactgtggtggtggtggtt

SEQ ID NO: 109156 - DNA, 1845 bp, Zea Mays
ctcccacgcccgccgtccccgagagccgcttcttctttctccgtgactcggagctgtctacctcaccctcactgcctctgcgtgcgtgcgtcactgccgggacgcgccttgacttctcacgtcgtgtcgtgtgtgagcgccgcagcggtgctgctgatctgcgattcctccacgccacaccctacctgaccacccgacagggaatcctactccctcttgcgcgccgcggcggcggcgccggcatcttcggtctccgtgcgggtgtttccgttcggcgtttactggccgggcgagcgcggcattggaggagtcgggaggagggagaccggaggcgtgatcgatggggaactgcgtggcgagcgggggcgcgacgacggtcacggcggcgggggaggacgggaggcggcgggggaggaggtggaaggcgccgcgggaggagcagctcggctcggtccccggccggatcttctccaacgacggccgcagccgcaccgccgccgtgttcacgcagcagggccggaagggggtcaatcaggacgccatgctcgtctgggatgggttcggcggggaggaggacgtcgtgctgtgtggggtgttcgacgggcacggcccgcatggccacctggtggcgcgcagggtccgcgacgcgctgccgctgaagctcatggccgcggtgcgcgagtccaagcccggcttggacatggccgccgccgcgtggaggaaggcctttgcgcgcgcctacaaggccatggacaaagatcttcgctcccacgccaccctagactgcttctgcagtggcagcaccgccgtcaccgtcctcaagctcggctcggatctctacatggccaacattggtgactcgcgcgccgtgctaggctcaagggacggcggcggcatggtggccgtgcaactgactgtcgacctcaaaccagatgttcccagcgaggcagaacggatcaagaagtgcaggggcagggtatttgctctgcaggacgaaccggaggtgcctcgggtctggctgccgttcgacgacgcccctggcctggcgatggcccgggcgtttggggacttctgcctcaaggattatggtgtcatttcggttccagagttcttccactggtcgctcacggagaaggaccagttcgtcatccttgcatcagatggggtgtgggatgtccttagcaaccaggaggccgttgacatcgtgtcgtcatccccaagccgatcaaaggccgcgatatccctggtcgaggccgccgctcgtgaatggaaagccaagtacccgacatcgaagaccgacgactgcgcggtggtctgcctatacttggatggcaagatggaccaggaacgcgactcgacggcgtccatggacaacatcagcctggactacgaaggctcagccgcggacccgaacgaagcgcaggagctgcaggagccggcgctgacccgcaacttcacggtcaggacggtggccggaagtgcccacgagaaggcgctgtcgggggcggcagacgcggccgtcggcggcggcgcagcctgcgcccacgaccagagctggtcgggccttgacggggtgacgcgggtgaactcgctcgtccagctccccaggttctccgaggagaaggcggcggttggctgatgagccgccggctgctgcatgcgattctttggttttggttgttgagttgtttgtttcctcgttttttttttttggaaatctagtttagtagttgccccgttgttgtttgagaggaagggacacggtagaaacagaaatatggtgttgtgatttgcatcggcgcgcgcgtaagctggtgtgtttgagccactgtggtggtggtggtt

SEQ ID NO: 109157 - DNA, 1782 bp, Zea Mays
ctcccacgcccgccgtccccgagagccgcttcttctttctccgtgactcggagctgtctacctcaccctcactgcctctgcgtgcgtgcgtcactgccgggacgcgccttgacttctcacgtcgtgtcgtgtgtgagcgccgcagcggtgctgctgatctgcgattcctccacgccacaccctacctgaccacccgacagggaatcctactccctcttgcgcgccgcggcggcggcgccggcatcttcggtctccgtgcgggtgtttccgttcggcgtttactggccgggcgagcgcggcattggaggagtcgggaggagggagaccggaggcgtgatcgatggggaactgcgtggcgagcgggggcgcgacgacggtcacggcggcgggggaggacgggaggcggcgggggaggaggtggaaggcgccgcgggaggagcagctcggctcggtccccggccggatcttctccaacgacggccgcagccgcaccgccgccgtgttcacgcagcagggccggaagggggtcaatcaggacgggcacggcccgcatggccacctggtggcgcgcagggtccgcgacgcgctgccgctgaagctcatggccgcggtgcgcgagtccaagcccggcttggacatggccgccgccgcgtggaggaaggcctttgcgcgcgcctacaaggccatggacaaagatcttcgctcccacgccaccctagactgcttctgcagtggcagcaccgccgtcaccgtcctcaagctcggctcggatctctacatggccaacattggtgactcgcgcgccgtgctaggctcaagggacggcggcggcatggtggccgtgcaactgactgtcgacctcaaaccagatgttcccagcgaggcagaacggatcaagaagtgcaggggcagggtatttgctctgcaggacgaaccggaggtgcctcgggtctggctgccgttcgacgacgcccctggcctggcgatggcccgggcgtttggggacttctgcctcaaggattatggtgtcatttcggttccagagttcttccactggtcgctcacggagaaggaccagttcgtcatccttgcatcagatggggtgtgggatgtccttagcaaccaggaggccgttgacatcgtgtcgtcatccccaagccgatcaaaggccgcgatatccctggtcgaggccgccgctcgtgaatggaaagccaagtacccgacatcgaagaccgacgactgcgcggtggtctgcctatacttggatggcaagatggaccaggaacgcgactcgacggcgtccatggacaacatcagcctggactacgaaggctcagccgcggacccgaacgaagcgcaggagctgcaggagccggcgctgacccgcaacttcacggtcaggacggtggccggaagtgcccacgagaaggcgctgtcgggggcggcagacgcggccgtcggcggcggcgcagcctgcgcccacgaccagagctggtcgggccttgacggggtgacgcgggtgaactcgctcgtccagctccccaggttctccgaggagaaggcggcggttggctgatgagccgccggctgctgcatgcgattctttggttttggttgttgagttgtttgtttcctcgttttttttttttggaaatctagtttagtagttgccccgttgttgtttgagaggaagggacacggtagaaacagaaatatggtgttgtgatttgcatcggcgcgcgcgtaagctggtgtgtttgagccactgtggtggtggtggtt

SEQ ID NO: 109158 - DNA, 711 bp, Zea Mays
atgcgcctccgtctccggccgaccggccggctctcctccatcgcaacatttcaagggggccgggcgaaagcaccaaaaatcccagcgcagatcactcgaccgccgcctgctccatttggaccctcccaaccgacagcgtaaggctctctgcaacagagccggggttccggttcgacccgacggacgaggagctggtcgtccactacctcaagaagaaggccgccatcatcgcctttacaagttcgatccgtgggagctacctttgtgcatgccttgaggcaaccttcggtgagcaggaatggtactccagcccgagggaccacaagtactgaagtatcctaatggagcgcggtcgaacagggcgcaacgtctggcaaccgcgagaaggtcggcgtcaagaaggccctcgtgtaataccgcgggaagccgtcaaagggcctcaagaccaactggatcatgcacgagtaccgtctcgcggatgcggcgagctcaacctccagtcggccgccgccttgcaacgtcgtctcggaagcaagaccacatctctccacatctctcagggctagttgggagccacaaaaaacccaatctagcttgagattgcattgcgttggtcaatagaatgtcaggagcccagtcgtcagcgtccggctttaccacctcgttagccggaggtggccgtggtgagcttataagtgagatttcctcttc

SEQ ID NO: 109159 - DNA, 1206 bp, Zea Mays
aaagagaccaggacgagccggcaggaggggaaagagatcacgccggccgccgatctcccaacacaaccagactccatgactggcggaagcggcgggagacgagaccacgagtccgaccgagacgcatcgacggccttgcccgtcccgggaccctgcgcctcgacgcagcgcgcgctcgccgagtgccgccgccgcgccgcgcgcgggccgctgcagcccgaggtgctgtgccgccacctgaaccgcgcgctagcggagtgcgtcgtgaccgcgtgctgccccgacgagatcgacgccgtccgtaccctctgcggcagcgctggcaccgcgctcaagcgcaagcagtgccagcgggcgcgcatcgatctcgccctctgcctcgaggcgcatcaagagccctaaatcctaatctgctatccgtggtgcatgtgaggaatctcttcccgtgtacagcgattttcgttgataaccacacatctccgttctattctgtagtctatttatatattttgtaaaatacaatcttgttatggaacattggagccccaagctcccaaccaactgtctgtaaataggagtggtaatagatcacgattcaaatatttcttcacaatttagttgagcccttagttagttttagttcaaaccattatcacccctatccgtaaaagatcacattggggattagtgctgaaggcaacattttagcaagaataaggacagacccagtgtgccggagactccagatgagagggtcaggagagaaaaatagcaaataatgaactctcaaaaaaaaaaaaaaaatgcagacgttttgcttcttggcttggatagttggatgcgaaattcatgctgtgttcacaagtttccagttgtattattgtgaaaaagaacatgaatcgcaatttgcttgctattgattttaaacagtgtgaagtgtagagcaacttcgaagaaccttgcctgtcccagccgatacttgcacttgaattgctccctccgtttttaaatatataacgttgacactgagctaatgagcctgtccaaaaacacggagtgagtgtttgggatttgctgtgtgggcttcgatattctaaatgcctcgtaaaatggacagccactgaaactattgattgaaacatttgaaaaagggatgttttgcatttgctgctctgaaactgctgggaggacaattctgagacagcg

SEQ ID NO: 109160 - DNA, 1983 bp, Zea Mays
atgttgtattcgagagtgaattccacataccctatctcttccagtcttcctacgctcctgtcggcgcgtcctccgcatcccggtgaccggtgtgttctccgatttgaggggcgtccctcgcacgctccggtctgctgctcctccgccctccggagtccattccagcggagcgcgctacggcacagatcggccgccgtccatccctttcccagctctccagagcctccgctgccgcgtccggtgagcacgtctcgaccggtttccaggtagtcacgtaccgcacctgtgcctctatctatcctctcctcgccgtatgcctcttggcgatttctattagtttttcattgtcacttagtttaagtcagctgctggtctgttctcgctgtctttccatactggtaggtccatggcttcagctattagctctgagcggtttggtgtccaacagttccaatatgcttgtcgaactgatgaactaagactagtctctggtggtttcacgagaggattatgggcattaaatatgttgatgtggcatattattaacgaagagagataaggtaaaaagttttatcgaatgaaatgagttccacgggcgatgaaacttatgtgcactgtttctaacatatcggagtcttgggaacattgacataaaatccccactgaaactggcctaataaataagctaatctgtgttgggtttgcgtcctgtactgctacatgatttcagtgccagactaaatactcagttcgattacttgtatgtgcagataactgcataaggccgagctcatgcaaaatggtgctatgccagggcgtatctgttggaaatgctcagttgctagcttttcctggtagatcatcaagccttaagagcacccagtttcttgttaaaacgaatcattttcctgcaagagctctacgtgttggtactgattctattcatcatgccatgcctacatcatccccaagggaaaattctgtcaggggaatcccatcactatcaagacagcacaatcagcatccaaggtccgttagttgtcaggcatcctcactggcatctttcagctaccctgagctgacatccaaacccagatggtggtggagaactctagcttgtgtgccgtacttgctgccactgcacaacatgtggtcttatgctgacgtgatctaccagctgcacacttatttgcaggggttttctctgttgtacaccttcatcgataccatgactctgtgtcctgggtggctctttctggtgatatttatgacagtgtacttcttcgttgtgaggcggaagtggtcgccgcactttctgaggttccatgtgatcctagcaatccttctggacactggctcccaagcagtggccaccatgtgtacatggatgccaagcatcgtttatcaggggaagccaatgcagtacctctggatgtctattgcattcatacagatcttcacagtgctcgagtgtttgcggtgtgctctttgtggaatgtatcctaatgtcccattcatatcccatactgctttcattcactctgatctaaatctgttcagataggtgtttataaggtccgggattcaagaagggtgattttttttgaaatggctacttatcataggaccagctggtacaatagcattcgaacaacactgcgattgatttttgttcctaagatgttattcaatgtacgttgactacctgcaaattttgttttgaggggcactacttgttttatccgaacttggttgagaacttgagatgaagctggaagttgagatgcattaaattgtgcattatatggtgacctgcagctctaagttgagaacttgagatgaagctggaacagaatggaggggttacgaagaaattttgagacttgtactgcctgtgaagtttactctttccatgaggactttgtgaatattttgcctaacaacagtttggtagagtttgggaaagaaacaacagttcattga

SEQ ID NO: 109161 - DNA, 1591 bp, Zea Mays
atgttgtattcgagagtgaattccacataccctatctcttccagtcttcctacgctcctgtcggcgcgtcctccgcatcccggtgaccggtgtgttctccgatttgaggggcgtccctcgcacgctccggtctgctgctcctccgccctccggagtccattccagcggagcgcgctacggcacagatcggccgccgtccatccctttcccagctctccagagcctccgctgccgcgtccggtgagcacgtctcgaccggtttccagttccaatatgcttgtcgaactgatgaactaagactagtctctggtggtttcacgagaggattatgggcattaaatatgttgatgtggcatattattaacgaagagagataagataactgcataaggccgagctcatgcaaaatggtgctatgccagggcgtatctgttggaaatgctcagttgctagcttttcctggtagatcatcaagccttaagagcacccagtttcttgttaaaacgaatcattttcctgcaagagctctacgtgttggtactgattctattcatcatgccatgcctacatcatccccaagggaaaattctgtcaggggaatcccatcactatcaagacagcacaatcagcatccaaggtccgttagttgtcaggcatcctcactggcatctttcagctaccctgagctgacatccaaacccagatggtggtggagaactctagcttgtgtgccgtacttgctgccactgcacaacatgtggtcttatgctgacgtgatctaccagctgcacacttatttgcaggggttttctctgttgtacaccttcatcgataccatgactctgtgtcctgggtggctctttctggtgatatttatgacagtgtacttcttcgttgtgaggcggaagtggtcgccgcactttctgaggttccatgtgatcctagcaatccttctggacactggctcccaagcagtggccaccatgtgtacatggatgccaagcatcgtttatcaggggaagccaatgcagtacctctggatgtctattgcattcatacagatcttcacagtgctcgagtgtttgcggtgtgctctttgtggaatgtatcctaatgtcccattcatatcccatactgctttcattcactctgatctaaatctgttcagataggtgtttataaggtccgggattcaagaagggtgattttttttgaaatggctacttatcataggaccagctggtacaatagcattcgaacaacactgcgattgatttttgttcctaagatgttattcaatgtacgttgactacctgcaaattttgttttgaggggcactacttgttttatccgaacttggttgagaacttgagatgaagctggaagttgagatgcattaaattgtgcattatatggtgacctgcagctctaagttgagaacttgagatgaagctggaacagaatggaggggttacgaagaaattttgagacttgtactgcctgtgaagtttactctttccatgaggactttgtgaatattttgcctaacaacagtttggtagagtttgggaaagaaacaacagttcattga

SEQ ID NO: 109162 - DNA, 1482 bp, Zea Mays
atgttgtattcgagagtgaattccacataccctatctcttccagtcttcctacgctcctgtcggcgcgtcctccgcatcccggtgaccggtgtgttctccgatttgaggggcgtccctcgcacgctccggtctgctgctcctccgccctccggagtccattccagcggagcgcgctacggcacagatcggccgccgtccatccctttcccagctctccagagcctccgctgccgcgtccggtgagcacgtctcgaccggtttccaggtaataactgcataaggccgagctcatgcaaaatggtgctatgccagggcgtatctgttggaaatgctcagttgctagcttttcctggtagatcatcaagccttaagagcacccagtttcttgttaaaacgaatcattttcctgcaagagctctacgtgttggtactgattctattcatcatgccatgcctacatcatccccaagggaaaattctgtcaggggaatcccatcactatcaagacagcacaatcagcatccaaggtccgttagttgtcaggcatcctcactggcatctttcagctaccctgagctgacatccaaacccagatggtggtggagaactctagcttgtgtgccgtacttgctgccactgcacaacatgtggtcttatgctgacgtgatctaccagctgcacacttatttgcaggggttttctctgttgtacaccttcatcgataccatgactctgtgtcctgggtggctctttctggtgatatttatgacagtgtacttcttcgttgtgaggcggaagtggtcgccgcactttctgaggttccatgtgatcctagcaatccttctggacactggctcccaagcagtggccaccatgtgtacatggatgccaagcatcgtttatcaggggaagccaatgcagtacctctggatgtctattgcattcatacagatcttcacagtgctcgagtgtttgcggtgtgctctttgtggaatgtatcctaatgtcccattcatatcccatactgctttcattcactctgatctaaatctgttcagataggtgtttataaggtccgggattcaagaagggtgattttttttgaaatggctacttatcataggaccagctggtacaatagcattcgaacaacactgcgattgatttttgttcctaagatgttattcaatgtacgttgactacctgcaaattttgttttgaggggcactacttgttttatccgaacttggttgagaacttgagatgaagctggaagttgagatgcattaaattgtgcattatatggtgacctgcagctctaagttgagaacttgagatgaagctggaacagaatggaggggttacgaagaaattttgagacttgtactgcctgtgaagtttactctttccatgaggactttgtgaatattttgcctaacaacagtttggtagagtttgggaaagaaacaacagttcattga

SEQ ID NO: 109163 - DNA, 1479 bp, Zea Mays
atgttgtattcgagagtgaattccacataccctatctcttccagtcttcctacgctcctgtcggcgcgtcctccgcatcccggtgaccggtgtgttctccgatttgaggggcgtccctcgcacgctccggtctgctgctcctccgccctccggagtccattccagcggagcgcgctacggcacagatcggccgccgtccatccctttcccagctctccagagcctccgctgccgcgtccggtgagcacgtctcgaccggtttccagataactgcataaggccgagctcatgcaaaatggtgctatgccagggcgtatctgttggaaatgctcagttgctagcttttcctggtagatcatcaagccttaagagcacccagtttcttgttaaaacgaatcattttcctgcaagagctctacgtgttggtactgattctattcatcatgccatgcctacatcatccccaagggaaaattctgtcaggggaatcccatcactatcaagacagcacaatcagcatccaaggtccgttagttgtcaggcatcctcactggcatctttcagctaccctgagctgacatccaaacccagatggtggtggagaactctagcttgtgtgccgtacttgctgccactgcacaacatgtggtcttatgctgacgtgatctaccagctgcacacttatttgcaggggttttctctgttgtacaccttcatcgataccatgactctgtgtcctgggtggctctttctggtgatatttatgacagtgtacttcttcgttgtgaggcggaagtggtcgccgcactttctgaggttccatgtgatcctagcaatccttctggacactggctcccaagcagtggccaccatgtgtacatggatgccaagcatcgtttatcaggggaagccaatgcagtacctctggatgtctattgcattcatacagatcttcacagtgctcgagtgtttgcggtgtgctctttgtggaatgtatcctaatgtcccattcatatcccatactgctttcattcactctgatctaaatctgttcagataggtgtttataaggtccgggattcaagaagggtgattttttttgaaatggctacttatcataggaccagctggtacaatagcattcgaacaacactgcgattgatttttgttcctaagatgttattcaatgtacgttgactacctgcaaattttgttttgaggggcactacttgttttatccgaacttggttgagaacttgagatgaagctggaagttgagatgcattaaattgtgcattatatggtgacctgcagctctaagttgagaacttgagatgaagctggaacagaatggaggggttacgaagaaattttgagacttgtactgcctgtgaagtttactctttccatgaggactttgtgaatattttgcctaacaacagtttggtagagtttgggaaagaaacaacagttcattga

SEQ ID NO: 109164 - DNA, 386 bp, Zea Mays
atgttgtattcgagagtgaattccacataccctatctcttccagtcttcctacgctcctgtcggcgcgtcctccgcatcccggtgaccggtgtgttctccgatttgaggggcgtccctcgcacgctccggtctgctgctcctccgccctccggagtccattccagcggagcgcgctacggcacagatcggccgccgtccatccctttcccagctctccagagcctccgctgccgcgtccggtgagcacgtctcgaccggtttccaggtccatggcttcagctattagctctgagcggtttggtgtccaacagttccaatatgcttgtcgaactgatgaactaagactagtctctggtggtttcacgagaggattatgggcattaaa

SEQ ID NO: 109165 - DNA, 2306 bp, Zea Mays
agggatggcgtgagccaggcgggagcgaggtcgtgtttgaccacctccccctccgcgtccccgtcgctgctgggcttggctttaccactggggcgggttcccacaccggggccagacgccgccaccgctgtccccgtctacaccgagttccccccgcgcgatttaacccctcgcctcgctcgctgcctccggttccctacaacgcgcacaccaaacgcgcacgcggcgttcgttcctcggccgctctccctacccacgtccttctccccccacagatctccgcgggccgtgaggttccttgattcgccttctccggggctgccggatctccgcggcggctggggatgggcaactgctgcgtaacaccgaacggagccgccgacgccggcggcggcaagaagcccaaggagccgaagcagaagaagggcaagaagccgaaccccttctcgatcgagtacaaccgctcgacgccggcgagcgcgccgaggctggtggtgctgcgggagcccacggggcgggacatcgcggagcggtacgagcttggagcggagctcgggcgcggcgagttcggggtcacctatctctgcacggaccgcgcctcaggggaggcgctagcctgcaagtccatctccaagaagaagctccgcacccccgtcgacgtcgaggacgtgcgccgggaggtggagatcatgcgccacctccccaagcaccccaacatcgtcacgctcagggatacctacgaggacgacaatgccgtgcacctcgtcatggagctctgtgagggtggggagctcttcgaccgcatcgtggcgcgggggcactacacggaacgcgctgccgccttggtcacacgcactatcgtcgaggtcgtgcagatgtgccataagcatggagtgatgcacagggatctcaaaccagaaaatttcttgtttgcgaacaaaaaagaatcagcagcccttaaggccattgattttggcctgtctgtatttttcactccaggcgaacggtttacagagattgttgggagtccttattacatggccccagaggtactaaagagaaattatggcccagaggttgatgtttggagtgcaggggtgattctgtacattcttctctgtggtgtccctccattctgggcagaatcggagcaaggtgttgctcaggcaattatccgatctgtcattgatttcaaaagagatccatggccaagggtctctgataatgccaaagaccttgtaagaggaatgctcaacccagatccaaagcgacgattgacagctcagcaagtgcttgatcacccatggttacagaacattaagaaggctccaaatgtcaatttgggcgaaactgttaaggccagacttcaacaattctctgtgatgaacaagttcaagaagcatgcacttagggtcatagctgagcatctttcagtagaagaggctgctgacataaaggatatgtttgagaagatggatcttaacaaggatcaaatgcttaatttcgatgagctgaagcttggtctgcataaatttggtcaccaaatccctgatgcagatgttcaaatactaatggaagctgcggatgctgatggaaacgggtccttggattatggagaatttgttacactatctgttcatctaagaaagattggaaatgatgagcatcttcataaggcatttgcatactttgaccggaaccagagtggttatattgaaatcgatgaactccgtgagtcattagctgatgaccttggacagaatcatgaagaggttatcaatgccattatccgtgacgtagacaccgataaggatggcaagataagctacgatgagtttgcagcgatgatgaaggccggaacagactggaggaaagcgtcgagacagtattcgagagagcggttcaccagcctgagccttaagctgcaaaaggatggatcgttgcagatggagagtacgcagtagtcgataacacccataggcaagttgtgaattacagaaggaaaccctgtgtagattttctggttgtttgttgacagctcttctgctcgtcctgatcttctattgctttctattcttcactcgtctgtttgaagcattgggggggattgttgatgccgtgattgtatttagactgcatgatccagcctcactgatttccacgccttagggcaaagtgtactgtacaagagaaagaggggaaaatgattaggagtttgtacgcatttcttaacttctgtggacccatttgtttgtgcattgttctgtgaatgtcctgatgacgagttcctgcatatggtgctcgat

SEQ ID NO: 109166 - DNA, 1406 bp, Zea Mays
ctcacttccgcactcccccacactacaccacactcgagagccatctcccagcacacgagcgggatggcttccaccaccaccaccttcctcgccgtcttgctggtcgtggccgcgtccgcggcgccggcacggtcctgctcaccgcgcgacatccacgcgctgctgagcgtgaagcaggcgctgggcaacccggcgtcgctgtcgacgtggacgccggcgtcgcccaactgctgcgcgtgggaccacctccgatgcaacgacgccgggcgcgtgaacaacgtcttcatcgacggcgcggacgacgtgcgcggccagatcccgtcggcggtgggcgggctgacggagctcatgtcgctgacgctgttccggctgccggggctgacgggcgccatcccggcctgcctcacggcgctgtcgaacctccagttcctcaccgtctcccacaccaacgtgtccggcgccatcccggagtcgctggcgcggctgcgcggcctcgactccgtggacctctccagcaaccggctgacgggcggcatcccggcggcgttcgccgacctgcccagcctccggtcgctggacctccggcacaaccagctgacgggccccatcccggcggggctggtgcaggggcagttccggtcgctggtcctgtcctacaaccagctcacgggccccatcccgcgcgacgacgcgcgcgacgagatcaacaccgtcgacctctcccacaacaggctcaccggcgacccctcccacctgttcgccgccggccggcccatcggcaaggtggacctgtcgtggaactacctcaacttcgacctcagcaggctggtgttcccgccggagctcacgtacctggacctgtcccacaacctcatccgcggcaccgtgccgctgtcgctggagcgcctgtccacgctgcagaagctggacctcagctacaaccgcctgtgcggcccgctccccaagggccacggcgtcatcaagcacgggtgcaagccgtacgcgcacaaccagtgcagcaaagggaccccgctcgcgggatgccaggacctggagtgagtgagccggtggccatggttttctatactctgctctgctctccctcgccggcgttcttttcgtgtcccaatcttgaaggacgacggtacggtgcctggtttagctatagacaaaaaaaggtacggccgcgtggtggcggtgctaatatgcttagccacgcccacgcgcggttgatctttgagcagttaagcgtgtacgaaatgacagctgtgtacgtgtactgtctggtggagtgtgctgtgtatctggtctcgatccgatcggcctaatgtatgaaaaaaaaaggatgtttacgtactaaatggaaaatcattttttccctcttcttttatatgaagttgcgcctg

SEQ ID NO: 109167 - DNA, 696 bp, Zea Mays
atcacagtccacaggtccgctgctgacacttgggttccggggcgacctctggcaaggatgcaggtggcagtccgcccgctcgctccgagcgccgtcggaggaggaggtgcgttttcggccggtcttgtccggtccgtgcgtgagtggagggggaggacgcatcggagggtaatcagcttctcgtcggcgggacaggggggcgaggaggcggcgcggcgcgagacgccggaggagacgcggaagcggctggaggagctggacgcgctgctggaggggctggtcgagcccaagatgcggccgccaacgccacctcctcctccggatccgtacctggaccgagccacgatgataactgggcggggatcatcagccgacgagctgccagagttttctccgacatacgtggcgttctcgacgcttggactcgtcatcctcaccatcttcaccaacgtcatgttcaacctgtacataaaaccctccgtggacggcgtcgatccaccgcctgaaagaatccagagaacggccctagtcaatccagcagacaggccgtccgaatagttttctgcgcagcacaatacacacagtatacggttttgatgatgaagacatgtgtcccaggtgggaatggactatttaattgtgtggacagtgggtggactcacacattattactagcgtcatactgcttctctcaag

SEQ ID NO: 109168 - DNA, 1289 bp, Zea Mays
attcagcagctgacccgagccgcagatggtctctcccggccgctactagaggcttagcgttgagagccacatgttgagtgaacagacggcggctagcactagcagcggcgagcatcaggagaggagcgtcgtcgaggacaggcggctacagccggtgggggagaacgaggaggcggagttcagggacatccacgcgctgagcccgccgccgagccagccttcgtcgtaccgccggagcaggcacgcgtccgtcgggagcgacaccgcgtccagcgagcccttcccgaccatgagcagggagttctcggccatggtcgccgccgcagcagccatcgccaacggtgccgccgccgacaggctcggggaggccgaggacgaggagaccaacccgctggccatcgtgccggacagcaaccccatcccgtcgccgcgccgggcccggggcccgcccaccccaggcgccggcgccgcccacgccaacggcgacggtggggtgtccgtggggcaggtcaggaaggaggaggtggagtccaagatcgccgcgtggcagatcgccgaggtggccaaggtcaacaaccggttcaagcgcgaggaggtcgtcatcaacggctgggagggcgaccaggtggagaaggccggcgcctggctcaacaagtacgagaggaagctcgaggagaagcgcgccaaggcgatggagaaggcgcagaacgaggtggccagggcgcggcacaaggcggaggcgaagcgcgcgtcggcggaggccaagcggggcaccaaggtcgcgcgggtgctggagctcgccaacttcatgagggccgtggggagggcgccctccgccaagcgctccttcttctgaaccctcccccaccgcccaccgggcctctcctccttcaccagttcctctgccctgctctgctcgtcgtcgccgcccgccgcctgtgcagttcagttgcatcgttcaccgcttcactccacgggatcagacagagtgatcagtgccgtgcttagctgtgtggaacgcttgttttagtgctgtgtccacatgtatgatttgtaaccttttcttctccctcctgtttatgtcagtacacgaaggatgtgctctgccggagtgttgagggcaagagctgcctgtattttgttgatatttcgtcatcaacagctgtgtatgtcagtacgaacaagataatggaagtccattaccactgtgtaaagtgtaaactttgtgcttgtctgctgcatgcaccgacgagcttcactacttggaacttcagttttgctgttgagct

SEQ ID NO: 109169 - DNA, 1383 bp, Zea Mays
tccagtcctgaactgccaccgcctccggcttctatttaagaaggcgccccccgccaccattctattcagcagctgacccgagccgcagatggtctctcccggccgctactagaggcttagcgttgagagccacatgttgagtgaacagacggcggctagcactagcagcggcgagcatcaggagaggagcgtcgtcgaggacaggcggctacagccggtgggggagaacgaggaggcggagttcagggacatccacgcgctgagcccgccgccgagccagccttcgtcgtaccgccggagcaggcacgcgtccgtcgggagcgacaccgcgtccagcgagcccttcccgaccatgagcagggagttctcggccatggtcgccgccgcagcagccatcgccaacggtgccgccgccgacaggctcggggaggccgaggacgaggagaccaacccgctggccatcgtgccggacagcaaccccatcccgtcgccgcgccgggcccggggcccgcccaccccaggcgccggcgccgcccacgccaacggcgacggtggggtgtccgtggggcaggtcaggaaggaggaggtggagtccaagatcgccgcgtggcagatcgccgaggtggccaaggtcaacaaccggttcaagcgcgaggaggtcgtcatcaacggctgggagggcgaccaggtggagaaggccggcgcctggctcaacaagtacgaggtagtcagtccatcgcatcgatctacacctccacactcactgactagcgtcgtccgaactgtccagtgcttgctgactgataccaacgcatgtaatgtgcagaggaagctcgaggagaagcgcgccaaggcgatggagaaggcgcagaacgaggtggccagggcgcggcacaaggcggaggcgaagcgcgcgtcggcggaggccaagcggggcaccaaggtcgcgcgggtgctggagctcgccaacttcatgagggccgtggggagggcgccctccgccaagcgctccttcttctgaaccctcccccaccgcccaccgggcctctcctccttcaccagttcctctgccctgctctgctcgtcgtcgccgcccgccgcctgtgcagttcagttgcatcgttcaccgcttcactccacgggatcagacagagtgatcagtgccgtgcttagctgtgtggaacgcttgttttagtgctgtgtccacatgtatgatttgtaaccttttcttctccctcctgtttatgtcagtacacgaaggatgtgctctgccggagtgttgagggcaagagctgcctgtattttgttgatatttcgtcatcaacagctgtgtatgtcagtacgaacaagataatggaagtccattaccactgtgtaaagtgt

SEQ ID NO: 109170 - DNA, 952 bp, Zea Mays
atgcctaattatgaagtctgggtgtatcacggcgaggagtttccccgtgaaaatgtgtctgaagcccacaacaatgatgacgtggaatatgatagaatggacgggatgcttcaagatttaagagaggatcctgattttgtgtttccaccacatactaaggagccacctccaaatgtggagcaactgcgagaagaacttaggcgacatcaggattacttgaggcaacaagctgcgcaacatgaatactatgctacacagattcaacaacaacaaacactcatacaacaactagcacagacccaagggatacacgtcccggtgcccccccaccacctcccgtacattatccttggtcttcacctccacctccacctacatctccacctaccgaacattagacccctccagctaccttgccgatgcaggaacgagaagacaggttagactttgtcgaagccctcttcgctagtggaggtatcatcactctacctcgatggtgatcggcgatcgtgagcttccatgttatgttttgtgatacttgagacttttattatgactatttatgagatattgtctcttattatgagtggatgagatgtgtcttatgactatggatgagacttttgcgatgtaattgatgagactatggatttaaatattgttatgtgattgtgtgtgagatattttatgtgaaaatatgttgtgctatagctgttgatatatttgttatgttgtggaatgtggtgtaaaataaaaataaacaacatttgtaatgttggtccaattaactttctagaggccaactggaccgtagaaagttaggggctacaataagccgtagtaagttagccagctaacttcctacgggctacagtaagccataggaagttagtcaactgacggtactgacggcgtgaacccactaacttccgagaacctactaacttccgag

SEQ ID NO: 109171 - DNA, 2127 bp, Zea Mays
tctccctctctctctccagttttctcaccaccaaccatgagatcaaggagcacaactacttggtttttggctctcctccacttaatcgtgttttgcaatatcaccggtgtcagttctctgtccttcaagctgaacttcactgagtcaaacagcaacggagcagccacgatccagttacaggaggatgccttctacaacaaggcggtcaggcttaccaaggaagagctggacgggcagatcgctcacagtgtgggccgagcagtcttggcagatccggtgaccctctgggatagcagcactggtgagttagctgacttcacaacccgcttcacattcatgataaaggcccgtgttgcagatggctcgtacggcgagggcctcgccttcttcctctcaccgtacccttcagttgtccccaaaaattccgaggatggtaaccttggcctcttcggtagtagcagcgccgatcagagtagtgagacatccaaccagatcgtggccgtcgagtttgacagccacaagaacccatgggatccggacgacaaccacgtaggcatcaacatccattccatcgtgtccgtggataacgtcacatggagaagcagcatcaaggatgggaagatggccaacgcatgggtgacttaccaggccagctccaggaacctgagcgtcttcctgacgtacaaggacagcccacagttcagcggcaactcctccctatcttattcagttgatctcagaaggtacctcccggaaaaagtggccatcggcttctcagctgccactggccagctggtagaggcccatcagatactttactgggagttcagttgcacggatgtgcgggtggtgaagagcaagaaggcgaaaagtttattagtcataagcttgactactagtgttagtggcattgtctgttctatgggtttggtttggtgcttcatgagtttgaagacgaagcatactagaagggcaagaaaggatcaagggaagcaagaatacgacgagtctattgacggcgagttcgagaaagggaggggcccaagaagatttcgatacgacgagctcgtgtctgctacgaagaacttcgctttggagagaaagctcggagaaggaggcttcggagccgtttacaagggttccctgaaggacccgaacctcaccgtcgccataaagcgagtcgccaaaggatcgacgcaggggaagaaggagtacatctctgaggtgaagatcatcagccggctgaggcacaggaacctcgtgcagctcgtgggctggtgccatgagcgtggggagttcttgctcgtgtacgagttcatgccgaacaggagcttgaacacgcacctctacgacagcagcaacctgctagcgtggccgctgcggttcaagatcaccgtcggcgtcgcgtctgcactcctgtacctccacgaggagtgggagcaatgcgtcgtgcaccgcgacgtgaagccaagcaacgtgatgctggactcatcgttcaacgctaagcttggggacttcgggctggcacgactcgtagaccacgaccgaggctcgcagactacggtgatagctggcacgatggggtacctggctccagagtgcgtcaccacgggcaaggcaagcaaagagtccgacgtgtacagcctgggtgttctcgcactggaggttgcctgcggaagaaggcctgtcgtgctgaaggaagacgacgacaagatcaacctagtcgaatgggtgtggcgtctctacggaaggaacgagatccttaccgccgttgacgggaggctcgacggcgcgctggacgagcgtgaagccgtgcgcctgatggttgtggggctctggtgtgcgcacccagactacagtctccggccttgtgtccgccaggtcataagcgtgctcaagttcgaggcgccgctgccaagccttccaccgacgatgcctgtggcggtgtacttcgcgcccccgatccatctctgcaggttctcctacacctcctctgatgacggaacgctgatgaaggagctggaagggtccggcgtctacgcgaagacgacgacgacgatctcatccagcgcaaccaacgcttctagttcacctccctctgttcgtttaccacaaatgggttactag

SEQ ID NO: 109172 - DNA, 903 bp, Zea Mays
cggttcgtttggcttacagaatataagttggccttgttatctgtcaccaggaaaataaacagagcccaggtgaccatgcgtcggagtggtaatctgagctggcgagctcaagtgcttatccagcggaagccccaaatggaggaggaaagatacaatgagaagagaaaagcaggccacagctcgaagaacctgcttttggttgctgctgtggtgatcaggaagggggaggaggggcactgcgaggacacgccttgctaacttaaaaggttgttcgggtctgggaatggctgatgtgagtgaatacttttgtgtagttttggctggttatccatcctcccatcccatggtgtaaaggtcggaggagtgcatagaatctgtctcgtagccccgttttttgtgcatggatggatgtcgaaggctgttctctccctctattctcttgtagcttctccagttcctcgtttcttttgggtggggggtctcagctttaaccggaggaggaaagattcaatcagaatgcagatctcaggtaactttgttatgcaactgatgctcccattacacactgtctgtcgatacactctgactggattgttttagtaccagcaagaagaggagaaaacaaaatctattccaactagaatagggtccagccatgattggtgtgggtggcatacagtgacatgcgtctgggtttgttgttgtaagtagctcttgtgggtggggggggggggggggaggaaatgaatgaatggaattgcctgattatggatgctgtacctgtggccccctgcgacgacagatcattcgcctctgcctctcaatgttgtgatgatgactgtgcagccctcgtccggagatgaaagtggggacagtgcatgtggaggggggagtctagcagct

SEQ ID NO: 109173 - DNA, 5913 bp, Zea Mays
aagcggccagacgagtgagaagggggcagcggcacgcagccggaaagtgaggcaggcgtggtgaagggcagggggaggcttgcaccgcagagaagccagaggagcgttagtagtagaagagcagagagggagagggaggaagagccacgcgacgagagccgaggagccatccaccgcccgcctaatccttgttcgctgctagattcgccagaccaccgaggcgctgctccccggatctacggggcggcgtcggtgctcatcggaatccagagaggtggcggttgtttgccggggatcggcgccgcatgtctcagatctgagatggacaggatccgggacggcaggaggggcggggtgtcggtcggaggcgttccgccgccgccgcctccgaggaggcgcctcaggagcaacggcggagggggccccagggactcgcctcgctccgagcgccgacggggcgagcgcctcatgctcaacggcgggggtggctgcgccagtcgggacgacggcgacgacatctccgacgagagcctcggcgacgacgacgacgacgccgagcaggagctcgtgccgcggtaccaccagcagcggcggtcaccgagcacggcgccacctccttcctcgccacctccgcccggcggtggccaccacagcagtagtagcagcggtggcgggggttatcacaaccaccatcacggccagcaccaccagatgcagtggaagggcggctccaatcccatcgtgtccaaggctgtagacgagatgattggtgtccctgttccgaggaaagcacgctccggtaggcactcctaccatgctcaaagagcagagttttcactccggcggtttcatccggatggctgatgatattcttggctgtgcttttgtgctcttgacagcttcaacgaaacgttcttcgcatgagtggcctgtccccggcggcggaaccagtggaggcagcaccggcgcaggagacggctcgcagattcaacggcctttgtcacggccaatctctccagcgtcagcctccactaccgtcccggctcggaagaagcttaaaccacttggaggtgggagcagcggtggtccaggacaagcgtcaaagcagcgaccatcaccgtcgccagctccatcaacaaccccgccacaaccaccgccaccgaagatgtcgaagtcgccgtctttcattcaagaggaaatcgaggttgccgaggtgctgttcggactcaccaggcagttctcgtgccctcccaaacaagaggtcaaccacaagctcgatcccagagatgtgccagagtccaagtgtgggaactcttcgtcggccccctcttctggcgcccgaccctctgattccacctccctttccgctatagcgccaaagaggaagaaaccacggctggcgaagtacgatgaagatagccgtccggcgagcccaacgaagccagagttggtggagccgtcctcaaagccggagccacctcctgtggctagatcagaagcaaagatggcaacgtcggcagcaaccgaaagtggcaccagcaccgcacctgcggctgttcaactcgagactttacgaaagccagagaagacggaggactcagagctccgtccaagcgaaccagatcggcgaaatcacagcctggagagccaggcggagctgccggcgtcgttgccggcgccttcagtcaagccggatgctgaagcaaagccggtaggatccgaggccaggaacggcgaagctactgcgacgacaaagattgagctggcatccgatggcgctcggcatgacaagttttccattgatctcatggctccccctcctgggaagctgtctgatgatatagatgcctcctccgaccctgatgcagataagaagggattggattctgagatggacatgttggggagaggaaattcggaaaagaaggatggtgaaaggactctgggagggctggatattgatttggaggaccagaaggtgcaaagaattccagccgatgagtccacgcccaagaagctcacactgcagttggatttggagaagcccagtcttggtgatgaaaaatcaccatcacagcgacggcagccgcatcaacatccacaacaattgcagcagctgaagccctcaaaagctgagataaagcacgagaaatctgctatgcctgctgttacaccacctatacctatacccgttggaggttggcttgggaatttcccaccgtttggttaccttagtccagtcccaggcctatcaggagctggtcttcatcatcccatggacgtgaagccagggtcttctagtggattacagcatgctgcattgcttccaccgccaacacgctcaaagagatgtgctacacattgctacattgcgcaatttatccagcaccagcagcgggttgcaaagatgaactccttctggccgccagctgttgcagcggcagccgccgccgccaacagatcagggccactctttggtgcaaggccattcagcatgggtgttgtgccaccgacagatgctgcctctatgcttgtgaacccaatgcaggggagctaccccatcagggctcacactccaatgcaagaagcaaaggctcctatggctacttcattccaggggagtctctcgaaggataaagcactgggcaatgctgctggtcctgaatcaagccagaggaaacaaccgcctgctcatgaaacacagcagtccactcccatgccaaacatgctgcaagccctggcattcatctttccattcaatcagcaacatgctatggtggcagctgcaaatgctgccaatcgagcaggggatgcaaaatcatctggagccagcaatgcaatgccgccatctgccagtgctcacactttggcagcaaactctggtgccacggccatgaacttgagctttgccaacttgcaaccggctgatgcccagttcttggcgatcttacagaatggataccaattccaggttgctgctcatcctggagggcctccatatcgaggcatggcaccaccaggcccagctgttccattcatcaatggacatgtgtattcctctcccatgctgcacccatcacagcagcaaggtgcgcaaccacaaagtcatcagaagacccagctgccaaacttgcccagttcatcacagaagcaccagccacaacattcccaagggctattgggatatgcaccaaatgctaacgcagcagcagctgctagtaattcgcacaattattcaagtggaaatcagcgccctgtccttgcgcaccgacaggagagtgacaaaactggagaagatggtctatcgagtgatgacaagccatcccactctcagaagagcgggtatgaacacaattttgctgttccagtccatctaccgaattttgcaatgatgccagctgctcaacctgctggcagtcagagtgagaagaagttaagtgaccatcaccaccagcagcagcagccacaagtcagtcgtggccagggtgtgaggattgatcttgcgtcttctcagccttttgtgatgccctttggctccattggtcctcctggatctgccccatctggtctcgacttctcggcattggcgcagagccatgcatttttacagagccatcaagaagcagcccggcatggttatcctcaacttaattttgctgcagctcaatctacgcagcacaagccccagcatggagaaacaaaatctgtcgctggggattcatccttgacacacattgccggagacagccagagaaagaaatcaacttctacaaagtattctggtgattcacagcagcattcgctgtccttcaccaggacagaaagcaagaatcatgtgcctcctttccttagtggcagcacaaatgaaagttcgtcccgaaccctaagccttattggaacagaatcttcaaatacatttatgggaagcaaatccacaaattccaccactcctgcctcaacaccacctgcagcttcgtctagcatttctcagcagcaccagcatttccttcagatgcaagtgcagcataagcatcagcatcagcagatgattcagcaccaccatttgaatcggcctagatctgccgcaccaagtacacaaaatagtgcaggtgggtacccagaccgtctcaatatggcgagctttcagaatatgatgtacccaccaaatgctgcccaaggccaagggagagttcaatccccccagttgaaggcatcctcagggagagggacaccttcatctactgctaccactccccctgctgctgcaccccctaatttgattgtgatgaagacaagtagtctccacccgcaacaagcaaagattcctatgcaggctctctccactcctggtcaccaatcccagagttctctaagcatgagttcatcaaaaatggctcctgtaactaacctttctactggaggaggggatctatctcgatcttcaaatgcccctgttgcttctggttcaccatccaattcggtgtccaaaagcactggtggcagcccgcctgccacaggaaatgcaaagggtgttcagcagcctgtccaattgccatcaccacaacagcagttagccaagaactctgtgtcgacgtgtggctccaagtctactcctgcaaaccatttcagtatggctatgccatctatccttggccaacagcctaattcatcgcctggttctaataccgggagcaagcagcagtcacatatgtcatcgtcaatgaaacagcagccgttccctcaaggccatttcttcatatccagcacgtatgctcctcaggctccaggagccggcggtgctgctgcccttggcctataccagaagcgaccaggcgacaagacacagccacaggcaccacaccagcagaacgccttgtcagccgctgctggcagtaacatgaaatcgcttcatccttcgtccggtggatttatgcatctcgcagcggcaacccagtctgcaggtggtggcatgccacacacccacatgcccgcggcgcaactgagtttcggaacaatgccggtgcctttaaaaccctcaagcgaccagaagcccgctgctggaaaataaacagagcccaggtgaccatgcgtcggagtggtaatctgagctggcgagctcaagtgcttatccagcggaagccccaaatggaggaggaaagatacaatgagaagagaaaagcaggccacagctcgaagaacctgcttttggttgctgctgtggtgatcaggaagggggaggaggggcactgcgaggacacgccttgctaacttaaaaggttgttcgggtctgggaatggctgatgtgagtgaatacttttgtgtagttttggctggttatccatcctcccatcccatggtgtaaaggtcggaggagtgcatagaatctgtctcgtagccccgttttttgtgcatggatggatgtcgaaggctgttctctccctctattctcttgtagcttctccagttcctcgtttcttttgggtggggggtctcagctttaaccggaggaggaaagattcaatcagaatgcagatctcaggtaactttgttatgcaactgatgctcccattacacactgtctgtcgatacactctgactggattgttttagtaccagcaagaagaggagaaaacaaaatctattccaactagaatagggtccagccatgattggtgtgggtggcatacagtgacatgcgtctgggtttgttgttgtaagtagctcttgtgggtggggggggggggggggaggaaatgaatgaatggaattgcctgattatggatgctgtacctgtggccccctgcgacgacagatcattcgcctctgcctctcaatgttgtgatgatgactgtgcagccctcgtccggagatgaaagtggggacagtgcatgtggaggggggagtctagcagct

SEQ ID NO: 109174 - DNA, 5113 bp, Zea Mays
aagcggccagacgagtgagaagggggcagcggcacgcagccggaaagtgaggcaggcgtggtgaagggcagggggaggcttgcaccgcagagaagccagaggagcgttagtagtagaagagcagagagggagagggaggaagagccacgcgacgagagccgaggagccatccaccgcccgcctaatccttgttcgctgctagattcgccagaccaccgaggcgctgctccccggatctacggggcggcgtcggtgctcatcggaatccagagaggtggcggttgtttgccggggatcggcgccgcatgtctcagatctgagatggacaggatccgggacggcaggaggggcggggtgtcggtcggaggcgttccgccgccgccgcctccgaggaggcgcctcaggagcaacggcggagggggccccagggactcgcctcgctccgagcgccgacggggcgagcgcctcatgctcaacggcgggggtggctgcgccagtcgggacgacggcgacgacatctccgacgagagcctcggcgacgacgacgacgacgccgagcaggagctcgtgccgcggtaccaccagcagcggcggtcaccgagcacggcgccacctccttcctcgccacctccgcccggcggtggccaccacagcagtagtagcagcggtggcgggggttatcacaaccaccatcacggccagcaccaccagatgcagtggaagggcggctccaatcccatcgtgtccaaggctgtagacgagatgattggtgtccctgttccgaggaaagcacgctccggtaggcactcctaccatgctcaaagagcagagttttcactccggcggtttcatccggatggctgatgatattcttggctgtgcttttgtgctcttgacagcttcaacgaaacgttcttcgcatgagtggcctgtccccggcggcggaaccagtggaggcagcaccggcgcaggagacggctcgcagattcaacggcctttgtcacggccaatctctccagcgtcagcctccactaccgtcccggctcggaagaagcttaaaccacttggaggtgggagcagcggtggtccaggacaagcgtcaaagcagcgaccatcaccgtcgccagctccatcaacaaccccgccacaaccaccgccaccgaagatgtcgaagtcgccgtctttcattcaagaggaaatcgaggttgccgaggtgctgttcggactcaccaggcagttctcgtgccctcccaaacaagaggtcaaccacaagctcgatcccagagatgtgccagagtccaagtgtgggaactcttcgtcggccccctcttctggcgcccgaccctctgattccacctccctttccgctatagcgccaaagaggaagaaaccacggctggcgaagtacgatgaagatagccgtccggcgagcccaacgaagccagagttggtggagccgtcctcaaagccggagccacctcctgtggctagatcagaagcaaagatggcaacgtcggcagcaaccgaaagtggcaccagcaccgcacctgcggctgttcaactcgagactttacgaaagccagagaagacggaggactcagagctccgtccaagcgaaccagatcggcgaaatcacagcctggagagccaggcggagctgccggcgtcgttgccggcgccttcagtcaagccggatgctgaagcaaagccggtaggatccgaggccaggaacggcgaagctactgcgacgacaaagattgagctggcatccgatggcgctcggcatgacaagttttccattgatctcatggctccccctcctgggaagctgtctgatgatatagatgcctcctccgaccctgatgcagataagaagggattggattctgagatggacatgttggggagaggaaattcggaaaagaaggatggtgaaaggactctgggagggctggatattgatttggaggaccagaaggtgcaaagaattccagccgatgagtccacgcccaagaagctcacactgcagttggatttggagaagcccagtcttggtgatgaaaaatcaccatcacagcgacggcagccgcatcaacatccacaacaattgcagcagctgaagccctcaaaagctgagataaagcacgagaaatctgctatgcctgctgttacaccacctatacctatacccgttggaggttggcttgggaatttcccaccgtttggttaccttagtccagtcccaggcctatcaggagctggtcttcatcatcccatggacgtgaagccagggtcttctagtggattacagcatgctgcattgcttccaccgccaacacgctcaaagagatgtgctacacattgctacattgcgcaatttatccagcaccagcagcgggttgcaaagatgaactccttctggccgccagctgttgcagcggcagccgccgccgccaacagatcagggccactctttggtgcaaggccattcagcatgggtgttgtgccaccgacagatgctgcctctatgcttgtgaacccaatgcaggggagctaccccatcagggctcacactccaatgcaagaagcaaaggctcctatggctacttcattccaggggagtctctcgaaggataaagcactgggcaatgctgctggtcctgaatcaagccagaggaaacaaccgcctgctcatgaaacacagcagtccactcccatgccaaacatgctgcaagccctggcattcatctttccattcaatcagcaacatgctatggtggcagctgcaaatgctgccaatcgagcaggggatgcaaaatcatctggagccagcaatgcaatgccgccatctgccagtgctcacactttggcagcaaactctggtgccacggccatgaacttgagctttgccaacttgcaaccggctgatgcccagttcttggcgatcttacagaatggataccaattccaggttgctgctcatcctggagggcctccatatcgaggcatggcaccaccaggcccagctgttccattcatcaatggacatgtgtattcctctcccatgctgcacccatcacagcagcaaggtgcgcaaccacaaagtcatcagaagacccagctgccaaacttgcccagttcatcacagaagcaccagccacaacattcccaagggctattgggatatgcaccaaatgctaacgcagcagcagctgctagtaattcgcacaattattcaagtggaaatcagcgccctgtccttgcgcaccgacaggagagtgacaaaactggagaagatggtctatcgagtgatgacaagccatcccactctcagaagagcgggtatgaacacaattttgctgttccagtccatctaccgaattttgcaatgatgccagctgctcaacctgctggcagtcagagtgagaagaagttaagtgaccatcaccaccagcagcagcagccacaagtcagtcgtggccagggtgtgaggattgatcttgcgtcttctcagccttttgtgatgccctttggctccattggtcctcctggatctgccccatctggtctcgacttctcggcattggcgcagagccatgcatttttacagagccatcaagaagcagcccggcatggttatcctcaacttaattttgctgcagctcaatctacgcagcacaagccccagcatggagaaacaaaatctgtcgctggggattcatccttgacacacattgccggagacagccagagaaagaaatcaacttctacaaagtattctggtgattcacagcagcattcgctgtccttcaccaggacagaaagcaagaatcatgtgcctcctttccttagtggcagcacaaatgaaagttcgtcccgaaccctaagccttattggaacagaatcttcaaatacatttatgggaagcaaatccacaaattccaccactcctgcctcaacaccacctgcagcttcgtctagcatttctcagcagcaccagcatttccttcagatgcaagtgcagcataagcatcagcatcagcagatgattcagcaccaccatttgaatcggcctagatctgccgcaccaagtacacaaaatagtgcaggtgggtacccagaccgtctcaatatggcgagctttcagaatatgatgtacccaccaaatgctgcccaaggccaagggagagttcaatccccccagttgaaggcatcctcagggagagggacaccttcatctactgctaccactccccctgctgctgcaccccctaatttgattgtgatgaagacaagtagtctccacccgcaacaagcaaagattcctatgcaggctctctccactcctggtcaccaatcccagagttctctaagcatgagttcatcaaaaatggctcctgtaactaacctttctactggaggaggggatctatctcgatcttcaaatgcccctgttgcttctggttcaccatccaattcggtgtccaaaagcactggtggcagcccgcctgccacaggaaatgcaaagggtgttcagcagcctgtccaattgccatcaccacaacagcagttagccaagaactctgtgtcgacgtgtggctccaagtctactcctgcaaaccatttcagtatggctatgccatctatccttggccaacagcctaattcatcgcctggttctaataccgggagcaagcagcagtcacatatgtcatcgtcaatgaaacagcagccgttccctcaaggccatttcttcatatccagcacgtatgctcctcaggctccaggagccggcggtgctgctgcccttggcctataccagaagcgaccaggcgacaagacacagccacaggcaccacaccagcagaacgccttgtcagccgctgctggcagtaacatgaaatcgcttcatccttcgtccggtggatttatgcatctcgcagcggcaacccagtctgcaggtggtggcatgccacacacccacatgcccgcggcgcaactgagtttcggaacaatgccggtgcctttaaaaccctcaagcgaccagaagcccgctgctggctgttctctccctctattctcttgtagcttctccagttcctcgtttcttttg

SEQ ID NO: 109175 - DNA, 1064 bp, Zea Mays
attataaaagcgagccgcgtatcttgatgcaccttcttccttctccgtccgtcaagggctcaaggctagctaatctatatagcgtgtctcctgcccagacgccggtgaaggtgcagaagagtggccccggggcccgggccggccgtgtgcccctgcgctggtcgagaagatgcgtgccggtggcggccccgccagccgggcgctgcggcgccgtcgtccatggcgagagcgtccgccggccagcctgggtgaattgcgttcgtgccggtgtgatcgactgcgtgagtgagactggggttctgtgtgtcagtgtgtgtgtgtgttcaggtctatccgagagcaaggtacgttgaatctgcttttggtcgccgccgcctttccttttggccctgcgttgcgtcgtgtcttcgacattggttggtggccgtcgcgccaccgccacgccgtggagccaccggtgggccggccggaaccggaaggcaggccgccgccgggtgctcggctttgcctagcgccatccatcgagatctccgtgccacctactgcgtgttgcctctttgagagggcgtccccgcggccctagtagctgacctggatgggagatactagtagatagacacgcaacccaacgcttcttgtgtcttgcatatggattctgattctttcggaatccaccaaatgattcctttgtttattgtttcgctgcttaatctccagcgctcctgaacgcctgaggccgcgccgacagaagggatccggcgagcggcgaaccggccggccagccggagcggtaccacggggttggccgtctccgtgtgaccgtgtcagaagagcacagcagccgggacacgaggccggctgcgggtgacctcatcaccctctgcaatctacatcactcactggacttctgatgaaaaaggaggacaaaacagggcctttcagcttctgcgctcatgttctttcttccgtcctctggcactggcagttcagatccacccccctgcaactgcaatttactactactagtactctactcttgcaattttcccagctggtcttgctcc

SEQ ID NO: 109176 - DNA, 1145 bp, Zea Mays
agcacgggtcacctcgccgggatcccacctcgccagtgccgcctcgccgctctcccacatcgtgtcctccgccccttcgcacggacgcacacgcacctcacctctcacaattccacacctcacctctccgcttcgcttcttgtcgctgcggcgcgcggccatggtctccctccgcttccctaccgctgccatcccccgcctcccgccatcccaggcccccaacggcgtcgccatcgctgccacggtcgccgctgcagccgcggccgcagctgcagtagcggccagcttgaccctcacgggcaagtccactggccggccagtcccgcaccctgcccctctctgggcctccctctccctggccgacgcggcggcccccagctccgtcgaaccccggaccggcgcgacattccccaccgaggccgccgttgggcgccgcctactcggcataggcctccggaagaccagcgtcctcgggctcaagtccatcgacgtctacgcattcggcgtgtatgcggatgacaacgatttgaaacagcagctgaaggagaagtactcgaagttctcggtctcggaactgaagggaaacggtgagctgatcaacgatgcgctagagcgtgacataccgatgacggtcaggctgcagattgtttatgggaggctgagtattcgctcggttcgcagcgcatttgagaagagtgtgggaagtaggcttcagaagttcggtggacaagacaccaaagagttgcttcagagctttgttgcggttttcaaggatgaatacaaattaccaaaggggtctgtgattgagctttcgagagaatctaaccatgtccttaaaatttgcattgaaggcgaggaagtggggagcattcagagcaagctcttgtgcaagtctctcttagatctctatatcggagatgacccctttgacgaaaatgcgaaagacgacatccatgaaaatatagctagcattcttaaaagttaaatgggatgcttaaggaaggttacatggaactgggagatttttcagggaagatatttttaattccagcaatacctcgactgtgcctagtaagtagcgcacaagtttttttcagtagcgcgtgaggaaaaggatagatccttccaagtacagccttttccaa

SEQ ID NO: 109177 - DNA, 352 bp, Zea Mays
ctgtgcagctcgggaaaccgatcagtcgcggcatcctgtgctgggtatatatcggcagaaagggcagtctacagcagggtggaaagaggcagtgagagtgattgacgtcgtgtgcagtttttttttgttttttttgttctttcttttgttttgacctatacactgttcacggattcctagatttttttaagcggatatggctttaggttttgcatgtctgtccctgtaaaactcttcgttaagcccttcaaagatatttttttacatgagcattaccttgtagacttgtagttgtagagagtgaggtaaatgatctaaaggtgaagtctttactactctataagagagcaaa

SEQ ID NO: 109178 - DNA, 352 bp, Zea Mays
ctgtgcagctcgggaaaccgatcagtcgcgacatcctgtgctgggtatatatcggcaaaatgggcagtctacagcagggtggaaagaggcagtgagagtgattgacgtcgtgtgcagttttttttttgtttttttgttctttcttttgttttgacctgtacactgttcacggattcctagatttttttaagcggatatggctttaggttttgcatgcctgtccctgtaaaactcttcgttaagcccttcaaagataattttttacatgagcattaccttgtagacttgtagttgtagagagtgaagtaaatgatctgaaggtgaagtctttactactctataagagagcaaa

SEQ ID NO: 109179 - DNA, 1732 bp, Zea Mays
attggagtcactcttagtcaacggcttcctttcgttctcagttccctatcggcactctttggtgcgcccggcgcttctccgtccgttcgccggcgttcgtggcttcgcgacctccgtctgcacccatggccgctgaaggcgaggtgtcaatgcactacacgacggacgacgcgctctcgctcgtcggcttcggccgtttccagaccctcgtgctagcttactccggcctgggctggatcgcggaggcgttcgagatcatgctgctctccttcgttgggcctgccgtggaggcggattgggggatatcaggagcggagcagggcctcatcagcagcgccgtcttcgccgggatgctcatcgggtccatcgccggaggcctcatcgcggacagatacggcaggaggaccggtttccttttcactgcagtggtcactgccgtatttggtttgcttagcgccttctcgcccaactacgcatccttactcacccttcgctttgttgttggtctgggattgggtgctggccatgtgctatctacttggttcatagagtttgtccctgctgccaaaagaggtacctggatggttgttttccatgcttgttggactgtgggaacaatattggaggctcttcttgcgtgggctatcatgccagtacttggatggaggtggttgcttgcattgtcctcagcgccatgctttgttcttctcattttcttccctctaacacctgaatcaccaaggtatctttgctcgagaggtaggactatggatgctacagttatcttggaaagaatagcaaggatgaacaaagggactctccctcctggcgtactaattttcagaccagaaaagcatgttgacaacaaccttgggacttctgagacagcactgctaattgcagaagataatactggcattgaagaggacacaagttccaagtccagtggcattgtcgcatttcaggcactctggtcatatgatttgataagatcaacctttcttctatggttcatctatcttgcaaattattttacttattatggggtaatattgctaacttctgaactaagcaatgggaagaggaggtgtgcatctgtaagaacacatttgatgcaaccaaacagtggtaatctttatagagatgtgctggtgaccagtttggcagagttcccaggcctgctcttggctgctcttctagtcgacaggattggtcgaaaaagatctatgggaggcatgcttttgctgtgcggtgttttcctggcgcctctttctctacaactaggggaaggcttagtaactactcttctattctgcgcccggacttgtatcatgggcagctttgcagttctatatgtttatacacctgagctctaccctgcaccgtctcggaacaccggtgttgggatcacttcttcccttggtcggattggcagcatagtttcacctcttgttattgttggcttgttagagagctgccgtcgaaaagaagctgtgttcgtggttgacctggtgctcttccttgctggagtcgcatgcgccctcttgcctcgagagaccaagggatgccaaatccagtgagagtttggactccataattccatgtatgtatgcttgcaaattacagtacagctaccattgcattttatcatgagcccttttgtggcctaatttaagattgatgtactggtacttgtaaaatatagaaaatacaaattccttctccatggatc

SEQ ID NO: 109180 - DNA, 614 bp, Zea Mays
aaattctaggattggttctggtaggaaaaatggtaggaaaaggaatgttgtagaagaagatattggagatgatttcttatcagatagtagtgagggaggaggtagcccaacctacaacgaatcaggtgatagtgactctaatgatggtggtggtgatgacgaagatggtgaacctagtggtccatgttttgcagctaggacacaacctaaattagctacagaccaatataatggtcctggtcaagatgaacaagcagcgcctctccgtccaagatcaaaaaggcagaagaagctctccatcaagggcctgtacatgcttcagaagtgatctaatcttcaagcacaagcacaagaatatggcgtatacatggactgattcaatggcaagattttgaacatgtggctctattgtatcaattgtgtgctttgtttcagtttcaacacaatattgctgccatatttggttcatgtggcctaacaatatttataactgtgattgatttctatgcattatttgaactatggactaccaaatatttgtgacacaccactagtgttatattcaccggtgcatggatgttgccaaagaactttatttatgtaatatttggttt

SEQ ID NO: 109181 - DNA, 455 bp, Zea Mays
acatgagcatgatgcatcaactggaaatgtatcgattgaaaatgctcagagcttagatggtcagtttagtaatatatctactgatccaataaatggtgctaaattggaggctgaagctgcaaccaagacagttgaaacgtctaaagtacacaggctgcaagatgggtttgagcaaccattggctgatgctagctgtgatgggcaagaaaactctgacagccctgtttctcatccagcattagatacaaaggttagtcatgttattttcttagtctgcttttcccaacagcatttattatcttatcatgcatgtatgcagcaggattttttattatttttgttttgcttaattattcttgctaccatgtcttggtccacgagaacaataatgttcaattctttagtattttactgtttcttttagttgctttcattttttaacctgcttacgttac

SEQ ID NO: 109182 - DNA, 525 bp, Zea Mays
gaggagcagtaagacaagggatctggagccggagccccgatggcggtgacaggaacctcggtggcagcggcggcgacgatgctggcggcggcggcgaccatcttcatcaccttcgtcatctgcttctacctcttcctgtgcgcgaagcggtaccgcggggccgccctgaccatcagcggcgacagggcccggcctcgctacgtgttcgcggacggcgcggggtgccacggcgggctggatgaggccgccatcgcggcgctgccgagggattaccatctgctgagccaaaaaaggagtcctgcaaagctatggctatcccagtatcaccccgtcagcagcagctagagacgaggcattaccatctgctgagccaaaaatggtgactgttgtcaagctatgaaaaatcaactgcaacgccctctatataatatttgtattggtagcctctctgcaaaatatatatagggataagacttgcctcggttatttcttttctagaccctactcacatggaagccatccaat

SEQ ID NO: 109183 - DNA, 493 bp, Zea Mays
ttggacatggataaggataggtttcgacccaaggaagaggacgaggaaactttaggaggccgtgcacgggatgccgtacctcaaggtggtgatcctggagggcctgcgcaagcacccgccgggccacttcgtgctgccgcacaaggccgccgacgacatggaactcggcggctacctgattcccaagggcgcgacggttaacttcatggtggccgagatgggctgggacgagcaggagtgggagaggccgatggaattcaccccggaacggttcctggaggacggcgacagcgcgggcgtggacatgacgggcaccagagggatcaggatgatgccgttcggcgtgggggcggaggatctgcgccgggctgtccatcgccatgctgcacctccagtacttcgtggccaatcaggcccggccctgagggtaggcagggtatgccgccgctcagggcccccaaagttagtagggcctccagtccgacctaaatag

SEQ ID NO: 109184 - DNA, 170 bp, Zea Mays
aaagagaataccttataatcatgttgaacaccgtctaactgagagcaacaccctcgttatgccaaagcaacaacaccgtgtttggagtcccattttagcaagtatcggctttgaaataccagactggcgaatgacgatgttggcggtattataatgtcaaataacttcgt

SEQ ID NO: 109185 - DNA, 1220 bp, Zea Mays
tcttcctcctcccctccaaccagcagctcaaagccaacaaagctcacatggagctccacttccagccgcagccaccagtgttccagctcgagggctacaccagcagcagcagctactactactactaccagcaggaggccgcggcgcaggccaagccgtccaagccacggtgccggaagaagggcagcaacaaccacagcaagttcgtcggcgtccggcagcgcccgtcgggccggtgggtggcggagatcaaggataccacgcagaagatccgcatgtggctcggcaccttcgagaccgccgaggccgcggccaaggcctacgacgaggccgcccgcctcctacgcggcagtgacgcccgcaccaacttcgcaccgcgcatctctcccgactgcccgctcgccgtccgcatccgcgggctcctccaccacaagaagatcaagaaggccaaggcctccgcggcggccgccgccgccaagcagcaggcgtcgagccctcctgcccccagtcccaccacaagcaatagcaatagtcatagtcatagcacgaatagtgcttgtggtggtggctccagcagcagcagcagctccagctccagcagcgtggtcagctgcgacgatgccatggccattcagcgcggcggcatcggtgtactgggcgccagcgaggtgtaccggccggagttcgccaccgcgggcgccgaggagtttgattcttggatgttcgactcggcgttcgcccagttcccggcgctggacagcttcgtggccgtcgacagcgttgtcccagttgctggtgccactgaggaaccgatcgtcgccgcgacgcggggcgccgagatggctgagttcgagcggatcaaggtggagcggcgcatctcggcgtcgctgtacgccatgaacggcctgcaagagtacttcgaccgggtgctcgacgcctccgcctgcgactcgctctgggatttgtctccgctttgtcactagattagcttcacctgttgtcctgttctttgctctgatcttccgactcctgggtggtggccttggccattgtcggtgaaagtaacaagtgtcaggtgtatccgtgtatgtgcttctgcagtacaaaggggccgaacgttagatgatcatcattgttgtagttgtagtcagtctatgcatttttgtgcaagaatgcctcaaatcttgccttatggcaaagcaaatcgttgcacatttcga

SEQ ID NO: 109186 - DNA, 1404 bp, Zea Mays
atggcgacgctcctccttcggctgctgttcttgctcggctctcctgtgactctcctaacatgcgtggccgcgggcgcgtcgtttcctgtcaatgtctggcccaagccgacgtccatgtcctgggcggagccgcacgcgtccgtcccggtgtcgccgtcgttccacatcatcgtcgcgtcgtcaggtaacccgtacctcgtctcggccgcggagcgctacgccaagctgctgttcaaggagacccgaggaccaggccgcggccgccgcgctgctggggggcgacctggcggcgttcgacgcgctactctcgacgctcatgtcgtcttccaacgccgaccgctctgcctgccgccgaggctgccttccaccgcctccgggcctcgcatccggagcccctcgcgctgcggctggccacctcgctcgctgcgcccaccacccccgccgacttgcgcgccatgtcgggggtcctcctccgcaagctctttatccccgaccccgtcctcctacgcattttccaacaacgccacgcccccggcgccgctctggccgcagctctcccccgcggggcagaccgcgctcaaggcgcacctcctctccgcgctccagtccgatcctcccaagcccatcgccaagaaggtctgcgatgccatctctgagctggccgcctcgctgctacgcgagaacggctcccccttttacgttgtcacggggcccgaggagagcgcctggcccgacctgctgccgttcctcttccgcgctgcctcggggcctgaggcgcccaaccttcaggagtcagcgctgctcatcttcgcgaggctggcggattacatcgcggaatcactccgcaaccatctgatgactatccagaacctcttcgcctctgccctggcacatcccacatcccctgatgttcggattgcggccctgggtgctgcagtcaacctcgtccagtgcctgtcaatcaactccgaccaggataagatgcaggatttgcttccagcaatgatgagggcgctcactgattgcctaaactctggtcaggaggcctccgcgcaggaggcactggagctgcttgtggagctcgctggctctgagtcaaggttcctgaggaggcagattgctgatgtcgaaggagcaatgttgcaagttgctgaggctgcacagctggaagatgggaccaggcacttggcgaagcaccatgctgcgctcattacacttgcacagattgcggaaggatgtgcaaaggatcacttcaagaaatactatgatgttgtcatgccatacctaaaatctattttgatgcatgcaactgataagtccaatagaatgctccgtgccaagtccatggagtgtatgtgccaagtccatggagtgtataagtttggtaggaatggctgtgggtaa

SEQ ID NO: 109187 - DNA, 349 bp, Zea Mays
atgagcgccttgagagaagcaggaaggtcagcatcaatgcaggtgacgcggcaggtacagcagccactgcagcgcgtggagggcgcggcgcgcaaggctgctcctcccccgccgcggtggtgcagcggcctcggcatgcttggacgagatgggaagcgcgggaggttcgtcgaggtcctcggcgaggagaggtgcggcgaggacgggatcgggacccgcggccgcgacgtcgtcgacgacgggcttcgtcgtgccatcctccgcgcagcagtgggacgtccagacaaggaggatgtacgcggcgaagagggagaggaaggaggcggcgacccagacggtgacggagccg

SEQ ID NO: 109188 - DNA, 147 bp, Zea Mays
atggatcggatagaacaagtggttgtggaatttcttgaggtagcagtcagctgcatcgtcttcctcaaaggcttatattctcctcatgagagtgctcttcatttgagttggtttagtcaagaattttttgtgtcatcaaagaagtag

SEQ ID NO: 109189 - DNA, 2625 bp, Zea Mays
cacacacacatccaacagcaatggcgaccaccatcaccaggctcttgcaccacctggcgctcttactcctcgttgtccagttcgccgacgcagttttcgtcccaaagaccaagaactacgctgtgctgaagcctcagtcatggggcaccacctacatagtccatgccaacttcctcgccaagccgccccacttcggctccctgaaggagtggtaccgttccatggtgaccacccacgcctcttccactcgggcggcgagctccagcagcatcctgtacacctacgacaccgtcatgcacggcttcgcggtccagcttactggcgacgaggcccggctcatgtccagcgcgcccggcgtgatcggcgtgtacgaggacagggtgctctaccctcagaccacgaggtcgccggggttcatgggcctcgaacccggcaacggcgcctggaagcagaccgacttcggtgacggcgtcatcatcggtttcatcgacggcggcatatggcccgagagcgcgagcttcaacgacagcgggctcggccccgtccggtcggggtggcggggcaagtgcgtcgacgcccacggcttcgacgccaacttgtgcaacaacaagctggttggagccaaggccttcagcgctgctgcggacgccgtggcgggtaggaagagccgtggcgtcccgtccccgagggacaaggatgggcacggcacacacgtggcctctacggccgccggtgctgaggtccggaacgccagcctctacgcgttctcccaggggaccgctcggggaatggcgcccaaggcgaggatcgccatgtacaaggcatgcagcgagaatggctgcatgcatgcggacatcgtagcagcggtggacgctgcggtgaaggacggcgttgacatcatctccatatccctcggacgaagttttcccatagccttccacgatgacgtcctcgcggtcgccttgtttggtgcagagcgcaaaggcgtcttcgtcgtcgtagccggcggcaatgccggcccgcaggcagctagggtggtcaactcagcgccgtggatgaccaccgtaggcgccgccaccgtggacaggctgttcccggcgcacctcacgctcgggaacggcgtcgtgctcgccggccagtccctttataccatgcatgccaagggcacgcccatgatcccgttagtgtccacggacggcatcaattcgtggacgcccgacacggtcatggggaaaatcgtggtgtgcatgttcggagcaagcgacgcggatggcatcttgttgcagaatgctggtggagcagggatagttgatgtggattcttacgagtggtctcgtgatggttccgcgctttattccttcacccttccgggtctcacgctcagctacaccgccggcgagaagctcagggcgtacatggtctcggtgccctatccggtggcgtccttgagcttcggctgtgagacggtcatcagccgcaagaatcgggcgccggtggtggcgggattctcgtcgcgtggccccaatcctgccgcacccgagctcctcaagcccgatgtcgtcgcgccgggagtgaacattcttgcggcctggtcaggcgacgcaccactagcgggggtcttcgttcccgatgggaggagagcgaactacaacatcatatcggggacttccatggcgtgcccgcacgtcgctggcatcgcggcactgatcaagaagaagcacccaagctggacgccggccatggtacggtcggcgctgatgacgaccgccgggacggtcgacaacagaggcggacacatcctcgacaacggtcacacggacacccttggccgcaccgacaacgtcagggtcgcgacgccgctggtggccggtgccgggcacgtccacccggacctcgctctggacccgggcctcgtctacgacgccggcgagcgcgactatgtcgacttcctgtgcgccctgaactacaccgcggaacagatgcggcggttcgttccggacttcgtcaagtgcacgggaacgctcgccggcggccccgccggcctgaactacccgtcattcgtcgtggccttcgacagccgcaccgacgtcgtccgcacactgacgcggaccgtgaccaaagtgtccgaggaggcggaggtgtacaccgcgactgtcgtcgcgccggagcacgtgaaggtgactgtcacgccgacgaccttggagttcaaggagcatatggagacgaggagctactcggtggagttcagaaatgaagccggatggcaccgagaggcagggtgggacttcgggcagatcatctgggcgaacgggaagcataaagtcaggagcccggtggcgttccagtggaagaactgacgacttctagtagtattggagtagaagatgcacaagaataagcaatatgttgagctgccgtgcttaaatctgtcagatgttgtcatgcagatgagttcattggttaggggaagggaaatcagtaattccgattctcggacagcaatcgtgtactatcactgtcatcattggccgcgagctgttttttcatgggctcagggcgtggctatctcgaatagctctcgtaaaagaatcgtaatagtaatttatttatctcttgattcatctt

SEQ ID NO: 109190 - DNA, 1125 bp, Zea Mays
aggaaattgcctgatgaccaagcaattctgcaaccgctggcaggcatgtcacacacaggcttgtaaaatgtccaggcctcgtctcgtttcctcttcgctcccccgtgacgtcagtacgccacccatcctcaccggctgtcggcaccagcccgccgccgacccccgccgccgtgtcacgactcacgacccattgtggtttcagatcagacccgaatcgcgagcagcgatctgtacgtcgtccccgttcgcacgcctagcgcgatggcgcacccgatgtacggctccgggccactcagatccaggaacgcggcgaactcggacgaaatccagctgcggatcgacccggtgcacggggacctcgacgaggagatcgacgggctgcaatccagggtccgcatgctcaaaggggtggcccaggagataaattctgaagccaagtcccagaatgattttcttcatgaactgcaaatgaccctcgcaaaagctcaggctggagtgaagaacaacatgcggaggttgaacaagagcatcatccagcagggctcaaaccatgttctccatgttgttctctttgcactgttttgcttcttcattgtctacctcttgtcaaagttctctagaagataattatgtcttcggtgggcaaatctagaataccatgatttgtatgtagtctaaagggaaagcaaaatgctattgtacttttatttggccttgtatcctcggtctatttgtcgaaagttgaaacaaatgagaaaaggggaaattagtacctctaagggctagtttggaaactcaaatccccttcgggattgaaggggattggagaggaaattaatttatttccacctcaatcttctccaatatcgaaggggatatgaggttcccaaagtagccctgagggttgatttggtgacaagtgaattgaaggggatccatgtgaggaaatcacttgctattcaccgttgggtgtttcgttgagtgtatgcaacgagttgagcatggatgaaaactggcatatactgggatgaaaaggacaaatgttaaccacatcattcagaacaattgcatagcttgtatgtgaatccattccagttttttttataagattatgttccattgtaa

SEQ ID NO: 109191 - DNA, 818 bp, Zea Mays
aggaaattgcctgatgaccaagcaattctgcaaccgctggcaggcatgtcacacacaggcttgtaaaatgtccaggcctcgtctcgtttcctcttcgctcccccgtgacgtcagtacgccacccatcctcaccggctgtcggcaccagcccgccgccgacccccgccgccgtgtcacgactcacgacccattgtggtttcagatcagacccgaatcgcgagcagcgatctgtacgtcgtccccgttcgcacgcctagcgcgatggcgcacccgatgtacggctccgggccactcagatccaggaacgcggcgaactcggacgaaatccagctgcggatcgacccggtgcacggggacctcgacgaggagatcgacgggctgcaatccagggtccgcatgctcaaaggggtaaggtttggattccctttcgcctcgatccttcgtggcgtttcatattcgtttcgtgatgcgtgatagctttgcttgattcgagggtccttgatcatcctcgatttttgaactgaaaacatgttgattcggtgtagccgttgtaggttttgggacggtgtaatgtatatttcacaactcttcgtttctgagttgacatataatgcgatatgtgatttagtgcctggtgctggtgcagcttgctacttcggctaagccggttctattgtcttcaaacctaagtgaattcccctttccgctttaaatgtcatccggtttatgatttagcgctaggtggtggtgcacctcgctagtgcagctaagttggctcaatcgtctttaaatctacattaattgtgaatggatggaac

SEQ ID NO: 109192 - DNA, 273 bp, Zea Mays
atgatccgatttggatccacactttttagcgaacctacagctgcaatggtagattgctcgccatctctgttcttcaaaactattagaggaagtggaaggaaggaaattgaagcatatacagaggcaacggaaaaccagccatggtgcagaaatctctccatcttatgtttattgcagttgatgttgtcggatgaaaacaatggccttaccgtaaattgccggaatccaacattgaaaatcaaaggctccttagatttgataggagcttcgtaa

SEQ ID NO: 109193 - DNA, 915 bp, Zea Mays
atgggcaacaatttgtgtgcttatctgatggctcagaaactcttatgcagatgtagagctgggctgaacactggacactgttgccaggtcaagacttaccaaggagtgtgccacgtcagacaaaaagcactgaataaattcattgaagttcaaatccatttagatgagcatctacttggtaaatttcagagtttcaggagcaatgaaccattcttagatgaagcacatcaatgtattgtggagttgcagtgtcctgattactacccagaaattgttaaagaagttgtcaatcttgccctatataaaggcaccaattttgttgatcctattgttaggctactggagcatttgtacacaaagaaaattttcaagactcaagacctggaatccggttgcttgttatacggtactctgctgaatggcattggcattgaccttcctaaagctctagcagaatttggtgagatcattggtcgcctgactttgttgggtgccttgagatttgaagctctagagttgattattaattcattgagggcattgtacagcactgtcccgcatgggtgctgtgaaccaagaaggcggccgcaggctgtccggaagattgcacttgtcctagagaaagctccaaaacagctccagcaagatttgatttcccttgtaccgaagttggtggatggttcggaacactctcttgcagcttgtgccctgttggatcatcttcaaaggccagatgcagagccttcattgagattgccagtttttggtgctctttctgagttagaacttgaaagtgatatctggaaacaagcatctgttcatgcactcgaattattgtctgactcgaacgatgagcctcttgaaagtgatatccaggagtgcccagcaccgaactcaatactcataaacttgtaa

SEQ ID NO: 109194 - DNA, 951 bp, Zea Mays
atgacgtcgggagcggcggcggtgggaggcctcgggcggacgccgacatggaaggagcgggagaacaacaagcgccgggagcgccggcggagggccatcgccgccaagatcttcacgggcctccgcgcgctcggcaactacaagctgcccaagcactgcgacaacaacgaggtgctcaaggcgctgtgccgcgaggcggggtgggtcgtcgaggacgacggcaccacctaccgaaagatccggtcggagctttggctgacctcaccgtgcgcttcttgcgtcgtctttgcagggatgcaagccgccgccagggatgatgagcccgtgctcgtcctcgcagctgctgagcgcgccgtcctcgagcttcccgagcccggtgccgtcctaccacgccagcccggcgtcgtcgagcttcccgagcccgacgcgcctcgaccacggcagcggcagcaacagccacacccccggccccgccgccgcagcagccgcagcggcggcggcggcctcctccctgctcccgttcctccggggcctgccgccgctccgcgtctccagcagcgcgcccgtgacgccgccgctctcgtcgcccacggcgggcgtcgcggccgcccgccaagcccgacccgcgcgcgccggcgcgaagagcacccggacaccatccccgagtgcgacgagtccgacgtctgctgctccgcggtggcggactccggccgctggatcagcttccagatcggggcggccaccacggcgcccgcgtcgcccgcgtacaacctcgtcaacccggccggtggcggcggcggcgcgtccgcttccgactccatggagctggacggggtggcgggcgcggagttcgagttcgacaagggccgcgtcacgccgtgggaaggcgagcgcatccacgaggtcgccgccgaggagctcgagctcacgctcggcgtcggcgccaagtga

SEQ ID NO: 109195 - DNA, 1104 bp, Zea Mays
atggccatgtcgttccacttccacccgctggccgcctcgcgcgtccacttctccccactcccgttcgccgccgccgcgggggcgccctccccctcctcctccgtcgccatcgcggcgcaccaccagcacggtcgccgccgcttctccgccatcgtggccacggcggccgccgcgtcggcggcgaccacggagttcgacttcaaggcgtacatgggggagcgcgcggtcgcggtgaaccgggccctggacgcggccgtccccgccggggagccccccgcggcgctgcacgacgcgatgcgttacgcgctgctggcgggcgggaagcgcgtgcgccccgcgctgtgcctggccgcgtgcgccgtggtgggcgggccggagccctgggccatgccggccgcggcggccgtcgagatggtgcacaccatgtcgctcgtccacgacgacctcccctgcatggacgacgacgacctccgccgcggcaagcccacctgccacgtcgtctacggcgagcccatcgccgtcctcgccggggacgcgctgctctcgctctccttccaccacatggccagcgtcgggtcctaccctccggacgtggacccggagaagcaccccgcccgcgtcgtccgagccattggggagctcgcgcgctgcatcggatccgagggactcgtcgccggccaggttgtcgatctcgagatgacgggcacatcagagacggtgcccctcgaacgcctcgagtacatccacctccacaagaccgccgcattgctcgaggcctcggtggtgattggggcgatcatcggaggcggcacggacgagcagatcgagaggctgcggaagtacgcgaggtcgatcgggctgctgttccaggtggtcgacgacatactcgatgtcaccaagtcgtcagaggagctcggcaagacggcggggaaggacctggcaagcgacaaaacgacgtacccgaagctgctggggctagaaaagtcgcgggagttcgcggaggagttgctctctgatgccgtagagcagcttgcttgcttcgacaaggagaaggcagcgcctctgttgcatctggccaactatatcgcccataggcagaactga

SEQ ID NO: 109196 - DNA, 1035 bp, Zea Mays
atggaggcggagaagaagccgccggcggtgtccgacgtgggcgcgtgggcgatgaacgtcgtcagctccgtcagcctcatcatggccaacaagcagctcatgtcctcctccggctacgccttcgccttcgccaccacgctcaccgggttccacttcaccgtcacggcgctcgtcgggtggatctccaacgccaccggctactccgtctccaagcacgtcccgctctgggagctcgtctggttctcgctcgtcgccaacacctccatcaccgggatgaacctcagcctcatgctcaactccgtcggattctaccagatctccaaactgagcatgattccggtggtctgcctcatggaatgggtgctcaacagcaagcactacaccactaaggtcatatccgcagtcatcgtcgtggccgccggtgtcgggatttgtactgtcacggatgtcgaggtcaatgccaaggggttcatctgcgcttgcgtggcagtgttctgcacgtcgcttcaacagatcacaattggctcctttcagaagaagtacaacattggatcatttgagctgctgagcaaaactgcgccaattcaggcactttcactcattatactgggcccctttgtggactactatctaaatgggcggtcattgttgaactaccctttttcaggaggggcaactttcttcatactgctttcctgctccctggcggtgttctgcaacatgagccaatacctctgcatcgggcggttctcagcgacctcattccaggtcctgggccacatgaagaccgtgtgcgtgctgatcctgggctggatcctgtttgactcggccctcaccgtgaagaacatcctcgggatgctgctcgccgtgatgggcatggtggtctacagctgggccgtggaagcggagaagaaggcggcagccccgatcccccggaacaagggcggcatgctcgacggcgaggacgtgcccctcaaggccagggtgagcggcgtgcccgcggtcgacctcgaggacggcgacgtgaagggctag

SEQ ID NO: 109197 - DNA, 1679 bp, Zea Mays
cttcgcacttctccggccactcactgtccgccaatcgaggtgcagctgcaatggggtcgccgttgccgcacgtcgccgtggtggcttttcccttcacctcccacgccccgaaggtcctgatggtggcgcgcgctctcgccaccgcggcgccttccgccaccttctccttcatttccaccaccgactccctggcgcggctccccaccggcgccggcgctgccccgtcgaacctgcgcttcgtggaggcgccgtcagggggaggggatggcccggggatcccatcgtggcgccggatggaactcttcctcgacgccgcagaggatggtgggcttcggcaggcgcttgaaacagcccgcgccgcggctggcggcgccgccgtgacctgcgtcgtcggggacgccttcatgtccatggccgcggacgccggggtgccctgggtcgcggtctggacgggaggcccgtgcgcgctcctggcgcacgtcatcggcgacaccatccgcaaggacatcggcgaccacgcggcgagccgggccgatgagcctctggcctcgtaccctggcctcgggatgtaccgcgtccgcgacctccccttcggggacgccggcgccggcggcgacatgtatcgcgtcatgacgaccctcctcggccgcgtggcggagcgcgtaccccgcgccgccaccgccgtcgcgctcaacgccttcccgggcctcttcccggaggacgtgtcggcggccctcgccgacgcgctccccaactgccttcccatggggccctaccacctcctccccggcgccgccgccgccgccgccgcgctagcagacgacggcgaccgccacggctgtcttgcctggctcgcccggcgcgacgcgggcaccgtcgcgtacgtcagcttcggcacggtcgccgcgctgccaccggacgagctccgcgagctggcctccgggctcgaggacagcggcgcgccgttcctgtggtcgctgcgggaggacgcgtgggcgctgctgcctccggagttcctggagcgagccaaggccgcagccgactccaggctcatcgtgccgtgggcgccgcaggccgccgtgctgcggcacccggccgtgggcgcgttcgtcacgcactccggctgggggtccgtcgtcgagggcatggccggcggcgtgcccatggcctgccgcccattcttcggcgaccagctgatgaatgcgcgtgcggtggcgcgcctgtggtgcttcggcacggcgttcgacgaggacaagccgatgacgaggggtggcgtggcggcggcggtggcgtcactgctgacaggggaggaaggggcacggatgagggctacagcgcgggacctgcaagccagggtggtcaaggccttcgggcctgacggtggatccgtcaacaacttccacaaatttgtcgacacttgcctgactgtagggagagacatgcacttgaacgcccgtggtaatcatccaatgtgaaacactaaaataaatctactagagcatggacagatctccaacatattggacctctctcatctttttgttttacatatttttagttcaaaataaattaacagatcataaacattctgtaacagagatagtaacacgttattgcctagcaatatctaagattactttttttcacaataaatacagtggcgcccattgtttgttgct

SEQ ID NO: 109198 - DNA, 762 bp, Zea Mays
cttcgcacttctccggccactcactgtccgccaatcgaggtgcagctgcaatggggtcgccgttgccgcacgtcgccgtggtggcttttcccttcacctcccacgccccgaaggtcctgatggtggcgcgcgctctcgccaccgcggcgccttccgccaccttctccttcatttccaccaccgactccctggcgcggctccccaccggcgccggcgctgccccgtcgaacctgcgcttcgtggaggcgccgtcagggggaggggatggcccggggatcccatcgtggcgccggatggaactcttcctcgacgccgcagaggatggtgggcttcggcaggcgcttgaaacagcccgcgccgcggctggcggcgccgccgtgacctgcgtcgtcggggacgccttcatgtccatggccgcggacgccggggtgccctgggtcgcggtctggacgggaggcccgtgcgcgctcctggcgcacgtcatcggcgacaccatccgcaaggacatcggcgaccacggtacgtacgccactcccggtccgccgccgttgaatctatttgctgcctgagctcgagctgctgcgctgcactctgcatctgtaatggtggcaacacggctgctgcagcggcgagccgggccgatgagcctctggcctcgtaccctggcctcgggatgtaccgcgtccgcgacctccccttcggggacgccggcgccggcggcgacatgtatcgcgtcatgacgaccctcctcggccgcgtggc

SEQ ID NO: 109199 - DNA, 1643 bp, Zea Mays
gtacttgtcggcaccagaatagcaccaggaaggagtcgaagaagccaggcagcccagcacggagctctactgtattattgtgtggctcagctcaacaagctcgccgcaccgtcgccatggacgccgccaccggcaactgttcctcctctccgctgcgcatcgtgatctgcccgtggctcgcgttcggccacatgctcccgtgcctggagctcgcggagcgtctggcttcgcggggccaccgcgtgtccttcgtctccacgccgcgcaacctggcgcgcctcccgccgcggcgccacgacgtgcacctcgtgcccctgcccctcccacgcgtggagggcctccccgacggcgtcgagtccaccaacgacgtgccccccgacaagagagacctccactggaaggccttcgacggcctcgccgtccccttcgctgagttcctggccgccgcgtgcgccgacgaggctaccaggccggactgggtcctcgccgacacattctcccattgggcggccgccgtcgccctcgagcacaaggtgccaagcgcgatgcttctcccgagcgccgccatgatcgcctcgtgctggcaccggccgccgtcgcacgccgagcagccgagaagcgcagtgtttgaggagccggcggaacggccggcgggtgtgctcccttacgagtgggataaaagagcgcacttctttgggccccaaagagcgtcgggcatgtccaccgcgcagcgctgcttcctgacactgcagaggtgcaggctgctggccatgcggagctgccccgagtgggagccggagaatttcacggtggcggcggcactcctcggcaagccgctcgtgccgctcggcctcctaccgccgtcgcccaacggtggacgacgacgagaggaggacggcggcagtacggcgcgctgctggctggacgcgcagccgccgagctcggtcgtgtacgtggcgttgggcagcgaagtcccgctgacggtggcgctggtgcacgagctcgcccttgggctggagctcgccggcgcacgcttcctttgggctctccggaagcccagcggcgtcgcggacgacgccgacgtgctcccgccgggattccgggagcgcacctgcggccgcgggctcgtcgccatgggctgggtccctcagatgagcatactggcgcacggcgccgtgggcgggttcctgacgcactgcggccggaactcgctcgtcgaagggctcctgttcggccaccctctcgtcatgctgcccgtcgtcggggaccagggccccaacgcgcgcgccatggagcggaccaaggttgggctgcaggtggcgaggaacggcaaggacgggtcgttcgaccgccacggcgtcgccgccgccgtccgggaagtcatgctggtggaagaagccaggaaggtcttcgtggcgaatgccctggaaatgcagcgtgttgtggccgacaaggaacgccatgagagatacatcgacgagttcatacgccagctgagatcttactccactccgccggcagcgagttaaaaaggcgtacttggtggcttggtgcctcgcactgtatgtctgtatggggtctaggatgtcaacggttacgtacccgtccagtaatattattccatacttacctatcaaaaacaa

SEQ ID NO: 109200 - DNA, 719 bp, Zea Mays
cctttctcagcgtctctctgtctccaagcgcgtcgtccgcctctcccacgcccggccgcccccgctgagccctcggccccggccgcccctcgcgcgcccggccgcccccgccgcgcccggccccgacgcgcaaggccgccccggcccagccgcggacgcccccgacgcgctcgccaccgatgtgcccgcccccgactcgccgtaacgctccctgtgtcgtgtcgtttcttgcagtcctctcctccctgcctccatatctcccacctcggccctctctccacgcgcttcacttcatccctgacgccgacgccgacgactccggccgctcaccccgacgaacgcgcgcgcgctcgcactttctgacgactccctccccggcccggctgcctgtcactgtctctccccttcgttcacgaagcagcagcagctgtaggatgtacagggctaagagagctgcttcgctcagagcgaagcgccagcgccttggcaagtacgagctcggatgcaccatcggggaagggacatttgccaaggtccggatcgccaagaacatggacactggggatcatgttgccatcaagatcctcgacaaggccaaggttcacaagaataaactagctgagcagattaggagggaaatctatacgatgaagctaatacaacatcccaatgttgttcgcctgtacgaggtaaaagcttcaactttccctcctaattaa

SEQ ID NO: 109201 - DNA, 716 bp, Zea Mays
cctttctcagcgtctctctgtctccaagcgcgtcgtccgcctctcccacgcccggccgcccccgctgagccctcggccccggccgcccctcgcgcgcccggccgcccccgccgcgcccggccccgacgcgcaaggccgccccggcccagccgcggacgcccccgacgcgctcgccaccgatgtgcccgcccccgactcgccgtaacgctccctgtgtcgtgtcgtttcttgcagtcctctcctccctgcctccatatctcccacctcggccctctctccacgcgcttcacttcatccctgacgccgacgccgacgactccggccgctcaccccgacgaacgcgcgcgcgctcgcactttctgacgactccctccccggcccggctgcctgtcactgtctctccccttcgttcacgaagcagcagctgtaggatgtacagggctaagagagctgcttcgctcagagcgaagcgccagcgccttggcaagtacgagctcggatgcaccatcggggaagggacatttgccaaggtccggatcgccaagaacatggacactggggatcatgttgccatcaagatcctcgacaaggccaaggttcacaagaataaactagctgagcagattaggagggaaatctatacgatgaagctaatacaacatcccaatgttgttcgcctgtacgaggtaaaagcttcaactttccctcctaattaa

SEQ ID NO: 109202 - DNA, 110 bp, Zea Mays
ctttcatgttgttcctcttttttatcttcatcttcttccttcctcctcccatgcacaatgaggcgcaggggagctagagcaggttaaaaatctcgaccgaaaatcgggcg

SEQ ID NO: 109203 - DNA, 111 bp, Zea Mays
aactgatatacaaatcgagaacactgttatatataaaatttctcgatttgccacagtttatcgtggttttatacgttcccgttgcaacgcacgggcactctcctagttaat

SEQ ID NO: 109204 - DNA, 2047 bp, Zea Mays
tggcggtccaaaagtcacgtcaccgttggcgagatgaggtcatgctcatatatctccaatcattgctctttgtctatatatacacgcgtttaacacaaagagttaggcacagcgctgcacaccaccttatcatctctaatcggagatcaaagaagcacagccgttaacgatggcttccgacgagctggcaaaggtcgtcgagccgaggaaaaagggcaacgtcaagtacgcctccatctgtgccatcctcgcctccatggcctccgtcatccttggctatgacatcggggtgatgagtggagcggcgatgtacatcaagaaggacctgaggatcacggacgtgcagctggagatcctgatagggatcctgagcctctactcgctcttcgggtccttcgccggcgcgcgcacgtccgacaggatcgggcgccgcctgaccgtggtcttcgccgccgtcatcttcttcgcggggtcgctgctcatgggcttcgccgtgaactacggcatgctcatggcgggccggttcgtggccggagtcggcgtgggctacgggggcatgatcgcgcccgtgtacacggccgagatctcgccggcggcgtcccggggcttcctgacgacctttccggaggtgttcatcaacatcggcatcctgctcggctacgtgtccaacttcgcgttcgcgcgcctcccgctccacctcggctggcgcgtcatgctcgccatcggcgcggtcccgtccgcgctgctggcgctgctggtgttctgcatgcccgagtcgcctcggtggctggtcctgaagggccgcctcgcggacgccagggtcgtgctggagaggacctcggccacgccagaggaggccgcggcgcggctggccgacatcaaggccgcggcggggattcccagggacctggacggggacgtggtcgccgtacccaacaaggggcgagacggcggcagtagtgagacgcaggtctggaagcagctcatcctgtccccgaccccggcggtgcggcgcatactgctgtcggccgtcgggctccacttcttccagcaggcctccggcagcgactccgtggtccagtacagcgcccgcctgttcaagagcgcggggatcaccgacgacaacaagctgctgggcgtgacctgcgcggtgggcgtgaccaagacgttcttcatcctggtggccacgttcctgctggaccgcgcggggcggcggccgctgctgctggccagcacgggcgggatgatcgtgtcgctcctcagcctcggcgcgggcctgaccgtggcggggcaccacccggacggcaaggtggcgtgggccgtggccctgtgcatcgcgtccaccctggcctacatcgccttcttctccatcgggctcggccccatcacgggcgtgtacacctcggagatattcccgctgcgggtgcgcgcgctgggcttcgccgtgggcgtggccagcaaccgcgtcaccagcgccgtcatctccatgaccttcctgtccctctcgaaaggcatcacaatcggcggcagcttcttcctctacgccggcatcgccgccgtcgcgtgggtcttcttcttcacgtgccttccggagacccgcggccggacgctggaggagatgggcaagctgttcggcatgccggacacggacgacatggctgaagcagaggacgctacagcaggcaaggagaaggtggcggaagtggaaatgtacatgccaagtaagatgtaaagcgcggctgcggctacagcgtcttcgtccccgggcagaggtcaactggaatagacggacaagatttttttttttttggagcaaatggtaaccagatgggcaggaataagattggcctatgaggtcggtgactcggtgccgtcgtccaaccgggattcttctgctcgttttctatctggaagtaccattccctgtcccgttcgacgtcgtttgcggatagtgcgatgtcgggagttagtggtgtcagagtcgcgcgtgtctgttctacaatgcagggctaatggacccagaataatcagtagcaactgcagaaaa

SEQ ID NO: 109205 - DNA, 1000 bp, Zea Mays
tggcggtccaaaagtcacgtcaccgttggcgagatgaggtcatgctcatatatctccaatcattgctctttgtctatatatacacgcgtttaacacaaagagttaggcacagcgctgcacaccaccttatcatctctaatcggagatcaaagaagcacagccgttaacgatggcttccgacgagctggcaaaggtcgtcgagccgaggaaaaagggcaacgtcaagtacgcctccatctgtgccatcctcgcctccatggcctccgtcatccttggctatggtagccattcttccgttgctgtcaaaacgttttgccttttgctttgcaagagtaactggtaggtgaagtttatgttctgttcaccaaccctgtagacatcggggtgatgagtggagcggcgatgtacatcaagaaggacctgaggatcacggacgtgcagctggagatcctgatagggatcctgagcctctactcgctcttcgggtccttcgccggcgcgcgcacgtccgacaggatcgggcgccgcctgaccgtggtcttcgccgccgtcatcttcttcgcggggtcgctgctcatgggcttcgccgtgaactacggcatgctcatggcgggccggttcgtggccggagtcggcgtgggctacgggggcatgatcgcgcccgtgtacacggccgagatctcgccggcggcgtcccggggcttcctgacgacctttccggaggtgttcatcaacatcggcatcctgctcggctacgtgtccaacttcgcgttcgcgcgcctcccgctccacctcggctggcgcgtcatgctcgccatcggcgcggtcccgtccgcgctgctggcgctgctggtgttctgcatgcccgagtcgcctcggtggctggtcctgaagggccgcctcgcggacgccagggtcgtgctggagaggacctcggccacgccagaggaggccgcggcgcggctggccgacatcaaggccgcggcggggattcccaggg

SEQ ID NO: 109206 - DNA, 93 bp, Zea Mays
ggtggcggctggcaccacgcgggaggaggagctgagtcgctgagatgccctagaggcgctagctgccctggtgggtcggagagggaggggccg

SEQ ID NO: 109207 - DNA, 721 bp, Zea Mays
agcagacccgggcgggccctggcaattcacgcacctcgcgtgcacacagacacaggcaggcacacagcgcaatcaccgtctcgcctcgcagtcgtactcacggtcttgcacacacccgtccccatcctcttccggtgtcgccatcccctccgtcgaccgccgcgtccggccgcggcaacccgacctgtgtcaatcgccatggcgtcttgctgataggaagatatcacgatttgagaagaatatcacaaagaggggctctgttcctgagacagccaagaaggcaaacgattatcctgttgggcctattcttcttgggttctttgtcttcgtggttgttggatcatctctctttcagatcatcaagacagcatcaaacgctggtctattctgaggtgaatcggttgacacatgcagtttgtcactagaaactatacaagtgtagggcgtggcttaatgtcgcctttttaatgttgtaccgtggagagttttaagttatatatgtaatggaagtgctaatttaagtcacctgtctgacaggaaagatgttggagtagtccataatacatatcgagtatagttatagttcgtgttaaatatttctatgctcaaattggtcgcatcattgggctattgtactcttcgatttatcgagtaatttggtaatctttcgcagaattttcgtcttgggtttgccccgagcccatgagaggttagtgtggtc

SEQ ID NO: 109208 - DNA, 732 bp, Zea Mays
agcagacccgggcgggccctggcaattcacgcacctcgcgtgcacacagacacaggcaggcacacagcgcaatcaccgtctcgcctcgcagtcgtactcacggtcttgcacacacccgtccccatcctcttccggtgtcgccatcccctccgtcgaccgccgcgtccggccgcggcaacccgacctgtgtcaatcgccatgactacctcaaggcgtcttgctgataggaagatatcacgatttgagaagaatatcacaaagaggggctctgttcctgagacagccaagaaggcaaacgattatcctgttgggcctattcttcttgggttctttgtcttcgtggttgttggatcatctctctttcagatcatcaagacagcatcaaacgctggtctattctgaggtgaatcggttgacacatgcagtttgtcactagaaactatacaagtgtagggcgtggcttaatgtcgcctttttaatgttgtaccgtggagagttttaagttatatatgtaatggaagtgctaatttaagtcacctgtctgacaggaaagatgttggagtagtccataatacatatcgagtatagttatagttcgtgttaaatatttctatgctcaaattggtcgcatcattgggctattgtactcttcgatttatcgagtaatttggtaatctttcgcagaattttcgtcttgggtttgccccgagcccatgagaggttagtgtggtc

SEQ ID NO: 109209 - DNA, 2358 bp, Zea Mays
cgattcccccgctaccaggcggggtccactttccccaaactgcccttcccaccaccccctcctccaaaaccaccacctagcttgctccctgtctcgtccccccttcacactcacctctccacacccccccgccaatggccgattcgccgaaccctagctccggggacctccccgccggccccgggggctcgccggagaagccggtcctggcggatcgacgcgtggccgcgctcgccggcgccggcgcgaggtacaaggccatgtcccccgcgcggctgccgatctcgcgggagccatgcctcactatccccgccgggttcagccccggtgccctcctcgagtcccccgtcctcctcaacaacttcaaggttgaaccgtctcccacaactggtactctaagcatggctgcaatcatcaacaagagcactcatatggacataatgccttcacctagggataattcagctggtagtggccaggaagatggaggttctcgggattttgaattcaagcctcatctcaattctcatttggcggctccttcagtcaacaatcaaaaccatcatgacactatgcaaaaatatagctcaaatcataccacaccatctagcaatttgaagactgaaaataaacctctctgttcacgggaatcgagtcacacagcacatgcttcaattgctccaaaccaaactgtttcgatagtttgtccgtctgacaacatgcctgctgaagttggtacaatggagatgcaccagatcaatagttctgaaaatgctacccaggagacacaaattgaaaatgtagctgaaaaatcagcagaggatggctacaattggcgtaaatatggacagaagcatgtcaagggaagtgaaaatcctagaagttattacaagtgcacgcatcctaattgtgaagttaaaaagctattagagcgttcgcttaatggccaagttactgaagttgtttataaagggcgtcataatcattctaagccccaaccaaatagaaggttagctgctggtgcagttccttcaagccagggtgaagaaagatacgatggtgtggcaactattgaagacaagccttcaaatatttattccaacctctgtaaccaagtacattcagctggcatgattgacactgttccgggtccagctagtgatgatgatgttgatgctggaggtggaagatcctaccctggggatgatgctaatgatgatgatttggactcgaaacgcaggaaaatggaatctactggtatcgacgccgctttgatgggtaaaccaaatcgtgagcctcgtgttgttgtacaaactgttagtgaagttgatatcttggacgatgggtatcgttggcgcaaatatgggcagaaagtagtgaaaggaaatcccaacccacggagttactacaagtgcacaaatacaggatgcccggtcaggaagcatgttgagagagcatcacatgacccgaagtcggtgatcacaacatatgaaggaaaacataaccatgaagtccctgtttccaggaatgcaagccatgagatgtccacagctcccatgaagcctgctgtgcatcctattaagagcaacatgccaggccttggtggcatgatgagagcatgtgatgccagggccttcaccaatcaatattctcaggcagctgaaagtgacaccatcagtcttgaccttggtgtaggcatcagccctacccacagcgatgcaacaaaccaaatgcagccttcagttccagaatctatgcagtatcaaatgcaacacatggctcctgtatatggtagcatgggacttccaggaatgcctgtgacagcagtacctggaaattcggctagcagcatatacggttctagagaagaaaacggaaatgaagggtttactttcaaagccgcaccattggaccgatcaactaacttatgttacagtagtgctggtaacttagtgatgggtccatgagtgtctctgctgatggtcatacctccatgaagcacatattaccgtaatcatgaagattgcttcagaaggtgctctactgtgtatcgtcatccacacataattgaatcggaggtggtcaaggtatacctgggagctgcagcgttgacacatgagccttttgctgtttggatgtacacttgctgtatgtgacgctgcagctcaacattcgttgtacagcaaaccagttatgattaattagattctgataatttggttatgtaaacttctttctgtactggaatatgggatagaaccaaagatccgtctggtggcaaagctttgttatgccctgcatatgaacgatgccagtttgatatccatatgaaatgaaatatatcatttcagcaaactg

SEQ ID NO: 109210 - DNA, 228 bp, Zea Mays
atgtgtattcacatagccaaactaaccagaataagctgttatttacatctgctcgcaaaatttccacagagaatggatcagatttcgaccataattcttgctttacctggccaagctagttgctaccactgctccagctctgcagccaaacccttgtctctgctcccgcaggtagccaagcaaagtctcagccttgtgcttggcacgggcagagccggactgcgatag

SEQ ID NO: 109211 - DNA, 474 bp, Zea Mays
atggctcgagcgctgctcctgctgcgagtagctatagctcgctaccctcctctcccaacctcacccgcgctcctccagctgcagccgctgccgctgctgcgctgccacgcgccctcccagtacaaatcccagctccgcttcctctcctccctctcctcctcgtccgtgccgaccagctcagatgctcccagcgacggcgagggcggccgtgacggggaagaggatggcgcgaagagcggcgaccgcgtcgattacttggggatgagcgacgaggagctcatggagcagtgcgatatgggcacgttcaaggcgtccgcccccggcgccagcgacgccgcggactcctactcgccctcgccgacgcgcacgggacacgtaattgggcagtggtggttcatggccaaggcacatttccatgaccagggcgacgtgcacaacatcgccatcgagtgcagtggtggtgtgaggacatga

SEQ ID NO: 109212 - DNA, 212 bp, Zea Mays
ggaggtgcgcaccacctccacaagcttattgaacagactcgtgatgagggcgattcctcctactcatactcgattcaacgcaaccacgcagctgctgaagtacctcgagaacccacttcactgcacctccacaagaaaggagttcacgatgcgtaggtttccatcccgataaaatcaaaagggctcaaatccccggaagaaaaggcgagatc

SEQ ID NO: 109213 - DNA, 1334 bp, Zea Mays
gtctctttgcttcgttactcggcggctggagcggtgtgctaccgctgatcagcgaaccggagatcagaagaacgcccggctgccgtagaacaccttgggagagggcttctcctgctgcccggcggcggtcggcttcttcaccgcggtcgagtcggcaccagtggagtctgcgctgggtgtggctgctgcgggactgctcttcccgctgctaccgttgtctatgtccaaggctggaagcttcattttggccagggaatccgtgaattgctgcatactcttcatcctccgacgcggcgcagggcgagttcgccggcgggacctcctggacggtgcgggacgagtcgacctccgcgtcggcggtctccgacgctgccttcgccttgtggtcagccgacgagtgggcgttcccggacggctccgagctggagttagactgaggggtggccgggaactccgtggtagacacgctgctgaccggcgtgtcgctctggaaggcgcccaccgagtcggcggtgctgttgtccgtcgagaagctatctacgaggcgcacggcggcgtcccggctcagggccgtggcgccgtcatcgtgctccgaggtcaggaggctgtcgcagctctgcgtttccacggccgcgcacggcagcctggtgtactcggagaccatgatctggttctcctccacgagattcaggtccgggaactcgatcttctcgtactccttcccgttcccgacgccgtcggcggcgttgttccccggctcctcctcctcctccgggtcggccagcgccggcttgggcgtcggcgagatgggcacgacctccggcacgaccccgatgtaggagagctcgagctgcaggaagcccgagggggtctggaagaggtcgctggtggtgagcgggaagtcgcgggcgagcgtgccgccgtcggcggcgacgacatccgggagcggcacgagcgcgaagcccagcagctggtcctgcaggtagttcttgacccggctgagcatccacacctcgcagcggagcgcggcgtcgacgtcccccgcgcgcacgccgaggcgcagcgactggtcgaacaccgggttgcggcccccgccgttgaccacctgcgtggacgccgccggcgcgccgtcccccggcagcgagagccgcgcgtacacgtcctgcttgtggtagatgcagatgttctggatgtcccgcgcgctacgcacgtgcacgtcgacgtacccgatcagctccgcggccgccgctgcaggcgccggaaccgctcctcccttgtgctgctgcggctgctccatggcaagaccacacctttactcctccaaggcttcagct

SEQ ID NO: 109214 - DNA, 1106 bp, Zea Mays
atggcaaggcgtgacgccgtgacgaagccacgagcagctcaggcttgcagagttgcagtgctgctccagtgtccagggctccaggctaggctctataaaaagtcctggtcgtccccggccgacacggacgggaagtcgcaaacagttatgatgttctgcggcgcgggcagcttcaagggcgtcgacaaggaggagggcgccggcgtcgggaagccggccaaggcgaaggggaagaaaaacaacccctacgcaacgcggggactggacaggttctccgtcgtgctgtcggagctagagtccaagcgggagaggatcctgcggcgcgtcggctcggacgccggcgccgaccatctcatggtccggttcgtgcagtcggaggccaaaggatgggtgcccatcgtcgtcaagctcccgcacgaggaggagcaggctgccgacgacggcgcacacaagaggcagggcaagggcaggacggccagcaagccgacgacctcgcatccgtcaacgccgcccgctgagcctgccagccccaaggacgaagacgccgctaagctcacgcacgtcgtggcggcgaagaagcgtaaggccggcggggtgcggtggtcctgggcctgggaaagggcgaagacgatgaggccgcgccattactggccgctggccatggcgctgctgctgctgtgcctcgtggtgttcgggagggtgttcgccatctgctgcacctccatctggtggtacctcttgccggtcttgagcggggaggaagccctgggcctggcgagaccgcccgcgacggcggcgaagccccgcaaggatgttgctagcatcagggccggcgacaagctagcgctggcgccgcctgcttcgcgtggtggcaagaggagtagcagcgctggcgccgctcatgagatgatttcacccagaagccatgcacatcgaaagaaggggtaatttactaatttgcagggtgtctcgtgttgtatagttttttttttagttgggtggccagaaagaacgaattttccgggttatctttcctggatttgttaattgttagagatgatttactgctcttttcgtgcctgtaaagaggatagtttggcaaccca

SEQ ID NO: 109215 - DNA, 2318 bp, Zea Mays
ccccaacgccgtcgtcgtcgtgtctccgctccagagtgatcgagcacactgacctggctctggcctgccccccgagcctcagctcgtgagccagagcgcctcgccatggccatggtgcagccggcggacgcgaccgtcaaggccaacgagatcctggcgcggttccggcccatcgcgcccaagcccacactggcggccgagggcgtggtggccgcgaaccgcgtgctgtgccatctgcagggcaggccgtgccgcgcgcggaaacgcggccgccccggccccgccgtcgtggcgccgtcgcccgagtcgggcttacagccgcccgccaagcggaagagagccacgacgccgtacccgcctctccggtgcacggggccgcgtgcgtccgcggccgtcccgggcagtgcaggcctccctctggcgtcggcgtcgctcccgccggcgggtgcgggtgctgccgaggacctcgcgaaggtggcggcggaggggaggcacgtccccgtggagcgcgacctgctgcggaagctgctggagcccaaggtcatctcgccgcgggcggtgcgccccgtgtgctccgccatccacgtcgggtgcatccaccgcgccgacgcgacctgcgccgccgccgtctcgaagacagcggttcgtgtggaggcggagctggaggtcgacgcgctcccggcggttgtctccgacgccagcaaccgcgtccggctcgtgaacgacgcgtacaaggagatggtggggcagcccgagtgcccgtggctcgacgccgtggctgccacgtcgaggaggatcagcggggaggtcgcgctggtggtagccaaccagtcctccctgccagagtcgtacggggtgttcacatgcacggcaaagatcgagtgggaggacgacgggaaggtcgcctccatcgatgtaccctgcgacgtcagccggctgcagtgcgagtccagagagtacctcttcgtctggaggttccgtaccgccgacgccgacgccgacgcatccgttggctgcagctccgaggagattagtgagagttaggggaagcttgcttgagctgcatcctgtgcgcgctgcagtgaaaccaggtgcataggctaagcaagctgcatctcaaaaactggccagcttcctctttcgcctagtccatagagtgtagacccagttctgaaatctggagtaaatataagatctcgactggagaatgcaaatggaaaattggaaatataacatgtactttttcatgaaactgacagtgttaatttctggtactacctgactataggttgtccatgaacacacggtcatgcacgagtggccgtgcttagcagactggcaagctcatgtgtgatacagccaaaagcaagtatgcatcatcattcaactcaaatgccacttttcagataccggccaaggaagcatacagtattgagatacaatgtcatcaaggaacaaacgttttcgaaggacactaattttgtttgattgcagaccatgcttattacaagtttgatagatgcatattctagctcgtactttcaccacggacactgttgaaagaaaaggctgtccaggaagaaaacaacaccgtcccaatgccaggctcacggacaagaggtctagactctagagctcaggaggaaaataacatcattccagtgtcagggtcacatgctgctggaggtcttatgcttgctccgccttcggggggcctttccacttgaagttctcagcgtaggccttaggctgcatggttcgaaaacaatccggttatcgcaaccaagccgatacattttcagcaacaccgatcagcgatcagaacgaaaaatattaattcatacgcgaacacaattattatattagcaaaaaatatggcatatgtgagacagatctcacatatgacagataccaaacgatgcaatgaagcatagcaatagaaaggtaaagtcccaaagaaagcctgttccggacactgtattgctttaaactagcaatcgcttctataatattacggcaaagtacggctcggtcctggaacccgtaccaaaaagcaaaagtccagtcaagcaaagactactggtaattagcgagttccatcgcctggttctgattggacctgtgcccggacggtcactacaatccaatagcatgcacgttgcatcaaataattgggtcagacttgtacagtgtcaggcaagtacagaaatagctgaggaggattattggccttgccttttagctttcaggacattccacaagcatgcaaatatttaactacggtaccacaccatccaccctatcagcattcagcacta

SEQ ID NO: 109216 - DNA, 1159 bp, Zea Mays
atatattgcccgcatcccccgccacgcattccctacgacacaccaacggcaatggcgcagcaagcgagctccccggcctgcccgacgactgctactactactactacatggacagagctcaccaacacgagctggagggacgacgactacaggcggatggtgatggcgtacctgatcgaggcggtgtacctgctggagctggagcggcaggagcggcgcgacgcggcggcggtggcgcagcagtggtgggagccgttccagttccgcctggcgcacgagctggtggacgaccgcgacggctccgtgttcggcgccgtcttcgagcgcgaccaccaagccagcccgaccccgaccccgagcggcgcgcccagcgccgtcgtcgcgttccgcggcgcgctgctgcgcgcccccaccatccgccgcgacgtcgaggaccggctccgcctgctggcccgggacagcctccgcggctccgcgcggctcgcgcgcgccgcgcaggcgctcagcgccaccgtcgaccgcttcggctccgagaacgtctgcgtctgcggccactccctgggcgccggcttcgcgcgccaggtcgtccggatgctcgtggcctcctcgccgcgccagcagcagcagcagcagcagcaggccgccgcggcgtccctcgagtaccacctcttcaacgcgccctacctgtcgctgcccatgggcgtcaggggcgtgctcaggacggcggactgcctgctcaaggcgctccgctccggcgtcgccaagtggcgcggcaaggcgctccggaacgtggcctacgccaactgcatcctcggctacaccaggctcgagagcaccaggaagttgtgaaggatcggatgcgcgatgcctccctccacacctcgaatcctctacgacgctgactcgaacggttcaaccgtcccccgcccgcgaaccaaactgtacctatggaatgcgaatgcgagccccgtgtgtgtgatcgattaccttgtagtacaaactagaaacaagttagaaattaattcaattctagcaggagtcgaataattaagcttccggcggcgaccggaggatgcaaggctttgcatgcatgctttgctttgtacaaatcttcaaatgtgaattatgccagttatatagcatagcattgttctccatt

SEQ ID NO: 109217 - DNA, 294 bp, Zea Mays
gttcaatctgagcagatctcaatttctcagtgatgttttttggttcaatctgagcagagtacaatttttctgtgatgttaccaagccaatttggaggaacatcattagatgtagcaaccctggcttgtttttttttcaatctgagcagagtacaattttttttctcattcaacaatttttccctttattcagatatgttgggtccaaatcgtcatttgctgaagttgagagcatcggcattggttgttgctatatcttgttggttgtttgcatgccttaggcgtagaatctttc

SEQ ID NO: 109218 - DNA, 1715 bp, Zea Mays
cgcaacgaatcccactatttcgcatcagttcgtcctgactcctgcgtccggctccggccgtcccactcccactcgaaagcacgacgacaaaacctcgaacgccaccgtcacgctcacgccttcgcccgaacttctccagttcttccggggagacgagaaaggaaccgaggatctcgttcctttggcgcagcgggcagcagaggcctcgccgagggagatggccggccggcgcgagtcgcccctgatgcgcggcggcggggcggggcctccgctgtctcgggggtcccgcatcgccgcggcggtagtggtcggcgtcgcactcggctgcctgtgcgcgtttctctaccccgccggcctcttcccccgtgcccccgactccgccagccattggccccgccaggctgaaccagttgcctgtgatacatctcgggaagttgccaaactaaagtcacggctggtattgttggaaaggaaaaatgctgcatttaaaatgcagatgaaggaattgtcaatgaagcttcaattggctggacaagggaaaaatgaggccctatataaggctggtccatttggtacggtgaaagctctgagaacaaatccaacagttactcctgatctatccatcaatcccagattggccagcttattggaacaggttgctgtgaagaaagaactgatagttgcactggcaaactctaacgtgaaagagatgcttgaggtgtggttcactaacataaaacgagccgggattccaaattatctagtagttgcattggatgacaacatagagagcttctgcaagtccaaggacgtccccgtttaccggcgcgatccagatgatggcatcgacaacattggtaagacaggcggaaaccacgctgtttctgggctcaagttccgcatactgagggagtttttgcagcttgggtacagtgttctcctctccgacatcgatatcattttcttccgaaacccgtttgatcatctttacagagattctgacgtggaatccatgagcgacggccacaacaacatgacagcttatggattcaacgatgtgttcgacgagccttcaatgggctgggcaagatacgcgcacaccatgcgtatatgggtttacaattccgggttctttttcataaggccgacgattccttcgattgagcttcttgatagggttgcttaccgcctttctcacgagcccaaatcatgggaccaagcggttttcaacgaggagctgtttttcccgtcgcatcctggttatgaaggccttcatgcgtccaagagaaccatggatatgtacctcttcatgaacagcaaggtcctcttcaagacggtgaggaaagatgctaatctgcggacgttgaagccggtgatcgtgcatttgaactaccatcctgataagtcggatcgcatgaaagccgtgattgaattctatgttgacgggaaacaaaatgcccttgaacgcttccctgatggatcagaatgatagacaccagcttttgtaggacaggaaaaaaaatgccaacttctagtttctagtcgtctcgaaagtaagcacgggttgacttcttacataatgcattgtcgttataaaatcccgtgtgcttgctgagatgtcaactttcactgagcatcaaaattcgtataattctctacttgctacaagccttggaaagctgctagtgtcagcccatggtatattcccgtggcat

SEQ ID NO: 109219 - DNA, 2020 bp, Zea Mays
atatctagccacggccttatcgggtcacaccagctgacaaccagacgcgccagggtttcaggcttccacgaatctccccgccgccctcaattcccctcggcgccgccgccctcaattcccctcggcgccgccgcctcctcccctcgcttcggtcctcggttagttaaccatccaggttctgtcaagatgtctgatagccatgagactgacaggaacattgagatttggaaaattaagaaactgatcaaggcattggaatcagccagaggcaatggcacaagcatgatctctctaatcatgcctccacgtgatcaggttgctcgagtggctaagatgttaggtgatgaatatggtactgcttcgaacatcaagagtagagttaatcgtcaatctgtgttggctgccatcacctcagctcagcagaggttgaagctctacaacaaagtgcctcctaacggattggttctgtacactggaactattgttactgaagacggaaaggaaaagaaagttactattgattttgagccattcaagcctatcaatgtgtcactctacctttgtgacaacaagttccacactgaggctttaaatgagctcttggaatctgatgacaagtttgggttcattgttatggatggtaatggtactctttttggcacactaagtggcaatacccgtgaagtgcttcacaaattcactgttgacctcccaaagaagcatggtagaggagggcagtctgctctgcgttttgctcggcttcggatggagaaacgccataactatgtccgcaaaacagctgaacttgctacccagtttttcatcaatccagctactagtcagcctaatgttgcaggattgattcttgccggttctgcagattttaagactgagctgagccaatctgacatgtttgatcagcgactccaagccaagatacttaatgtggttgatgtttcgtatggtggcgagaacggtttcaaccaagctattgaattatctgctgagattctagcaaatgtgaaattcattcaagaaaagaagttaattggcaagtattttgaagagatcagtcaggatactgggaaatatgtctttggtgttgatgacactctgaaggctcttgaaatgggtgctgtcgagaccctgattgtgtgggaaaatctggatatcaacagatatgtgatcaagaacagtactactggggaaattattataaaacatctgaacaaagagcaggaagctgaccagagcaatttccgtgacccatctaccaatactgatctcgaagttcaggaaaaaatgtctctcctggaatggtttgccaatgaatacaagaagtttggttgctcgctggagtttgtgaccaacaagtctcaggagggatcccagttctgtagaggatttggtggcattggtggcatgttgcgctaccagctggatatccgttcttttgatgagctttctgatgatgacgatgtgtatgaagactctgactagcaatcagccaatctcatgccagggctggcccatggaaggacgcaacagctcgacctcgccatacctacgcaggagcacacgaaaagcaactatccaaggattaatgggcatgggccagcgtcatcctcttcaagaggagcttaagactaagatgattttgagtcacaatcatgggagtaacgtgacaagaagataccctactatatcacaattattccagtaatgcgtcgagaagataccgttgtttaagtgcacaaaccaatacagtgacgtgccaagaagttaccgtattttaaggatgtttaattttcagtattcgtcggggtagtactgtgtcagaaacttatttgtacctaaaaaggccaaatattgccgttgccttggtgctttatgctatgttatcgtcttttgtgagtctgtgtgctaaggttgttgcttaatgctttgtgactcgcaagctgctactcttgcagtttttgcaacgacgaagctatgatatggagtacaattctgtgtcatc

SEQ ID NO: 109220 - DNA, 1812 bp, Zea Mays
tctcatttcttctggtttgtatgattttgtggtctgcaggttagttaaccatccaggttctgtcaagatgtctgatagccatgagactgacaggaacattgagatttggaaaattaagaaactgatcaaggcattggaatcagccagaggcaatggcacaagcatgatctctctaatcatgcctccacgtgatcaggttgctcgagtggctaagatgttaggtgatgaatatggtactgcttcgaacatcaagagtagagttaatcgtcaatctgtgttggctgccatcacctcagctcagcagaggttgaagctctacaacaaagtgcctcctaacggattggttctgtacactggaactattgttactgaagacggaaaggaaaagaaagttactattgattttgagccattcaagcctatcaatgtgtcactctacctttgtgacaacaagttccacactgaggctttaaatgagctcttggaatctgatgacaagtttgggttcattgttatggatggtaatggtactctttttggcacactaagtggcaatacccgtgaagtgcttcacaaattcactgttgacctcccaaagaagcatggtagaggagggcagtctgctctgcgttttgctcggcttcggatggagaaacgccataactatgtccgcaaaacagctgaacttgctacccagtttttcatcaatccagctactagtcagcctaatgttgcaggattgattcttgccggttctgcagattttaagactgagctgagccaatctgacatgtttgatcagcgactccaagccaagatacttaatgtggttgatgtttcgtatggtggcgagaacggtttcaaccaagctattgaattatctgctgagattctagcaaatgtgaaattcattcaagaaaagaagttaattggcaagtattttgaagagatcagtcaggatactgggaaatatgtctttggtgttgatgacactctgaaggctcttgaaatgggtgctgtcgagaccctgattgtgtgggaaaatctggatatcaacagatatgtgatcaagaacagtactactggggaaattattataaaacatctgaacaaagagcaggaagctgaccagagcaatttccgtgacccatctaccaatactgatctcgaagttcaggaaaaaatgtctctcctggaatggtttgccaatgaatacaagaagtttggttgctcgctggagtttgtgaccaacaagtctcaggagggatcccagttctgtagaggatttggtggcattggtggcatgttgcgctaccagctggatatccgttcttttgatgagctttctgatgatgacgatgtgtatgaagactctgactagcaatcagccaatctcatgccagggctggcccatggaaggacgcaacagctcgacctcgccatacctacgcaggagcacacgaaaagcaactgtaagaatccatctgtgtcaagatatatgttttctgcatcattccatactatttatgtttgactattcatctcgtttatttgtaaagatatatgttttctgcatcattccatattattaaagtttgactactattcatcccctttgttccagatccaaggattaatgggcatgggccagcgtcatcctcttcaagaggagcttaagactaagatgattttgagtcacaatcatgggagtaacgtgacaagaagataccctactatatcacaattattccagtaatgcgtcgagaagataccgttgtttaagtgcacaaaccaatacagtgacgtgccaag

SEQ ID NO: 109221 - DNA, 1045 bp, Zea Mays
atggggtggtctttttgtgctccgtggaagtccgacgtccgagaggggctcgccattgggcttggcatgggcacagtcatgctgctcctcttctgcggctactcgctgaagattcaagaattaccgtttatcactgtggttcaagaaaactacccgaatcgtcttggggtattgtttgtcatccgccttcctccagttgtcagagttattgcacagacatttcttcaaattgcaatatcacatggtatccgtggagatgaggacgacattgcctccaagtctgctccaccggcatccatcgatggtgcaaggtacggattcgagcctccggtccttcaatctagccaccaggtcataatcgaagggtttacagggaggagatctgaacatagctcttcaatcccaaagttaacatcgttggtaaaccccttctggtgttacctcacaaatatcactaaagtcattttagctttttgctgctccttatgtgcttcagattcagcaagaggttcttgcaagtccttgatgaagaagtcgaaggtgacgaacgccgagaccgtcatcctgatcgacgccaagaacctcacagcgcacctccttgagatctcggaaaaaatctacatgtcgatggcgtggatcagaaaaatgattgaatttgacatacttgagctacttggctgcagagattggatcctcccgtccagacaacctgatagaacgacagtgtataagaacagggctcttaggacgccttttgtcaagttgggtcataactctaccctgagaattgagatagatgatcatgtggtgcaagatattgagtccctcatctttgatgacacacataacaaatggtaagcgtctccgtggatggagcctgaagtatattcaaattcaaggcatgccacaaagcatctcgcgtgtgggatgctccggcgtgtggaaagtagaaaagccaaataaatgggtacatgtacagcaggcgtgagttcttaaatactcagattccttgtccataggcaaatgcatagttcatacgaatcag

SEQ ID NO: 109222 - DNA, 861 bp, Zea Mays
atggagatcgacatgatggctcagtttcttggggcggctgatgatcactgcttcacctacgagtatgagcatgtggatgagtccatggaagcaatagcagccctgttcttgcctacccttgacaccgactccgccaacttctcctctagctgtttcaactatgctgtccctccacagtgctggcctcagccagaccatagctctagcgttaccagtttgcttgatccagccgagaactttgagtttccagtcagggacccgctccccccaagcggcttcgatccacattgcgctgtcgcctacctcactgaggattcgagccctctgcatggcaaacgttcatcagtcattgaggaagaagcagccaacgccgcacctgctgctaagaagaggaaggctggtgctagtgctaccaccaagggatcaaagaaatccaggaaggcgagcaaaaaggataacatcggcgacgccgacgatgatggcggctatgcctgtgttgacacgcaaagctccagtagctgcacctccgaggacgggaacttcgaaggaaatacgaattcaagctccaagaagacctgcgccagggccagccgcggagcagcaactgaacctcagagtctctatgcaaggaagaggagagagaggatcaacgaaaggttgagaatcttgcagaacttggttccaaatggaacaaaagttgacattagcacgatgctcgaggaagcggcgcagtatgtcaagtttttacagctccagattaagctgttgagctgtgacgacacatggatgtatgcgccaatcgcgtacaatggaattaacatcggcaatgttgatctgaacatctactctctgcaaaagtaa

SEQ ID NO: 109223 - DNA, 116 bp, Zea Mays
ggaagtggctcatcttcatccaatgtttattttttcagtaaccagaggatgacaagcctactacaggagttggtcctaagttatacaataagcctgacttttctcgagtacacaaa

SEQ ID NO: 109224 - DNA, 96 bp, Zea Mays
gtttcacttgtgcacttagtgttggtttggatcgagttatccgttgtctccactgatcatcatcgaggacaacatccagtcatttgttcgcctgag

SEQ ID NO: 109225 - DNA, 858 bp, Zea Mays
tcattctccttggaccaaggaaagaatccgaccatggcaaacgaagcggcagagcctcgcaccgacgccgacggccccaccccggactctggcgacgacttcgagttctgcatcctgtcgtctggtggcatcgtcccggccggcaagggcgcgggggcgggggcggacatgtgcgtggccgacgagctcttctggcagggcaagctgctcccgctccgcccctcctcggccgccgacggcgccacgctgccgaggtcggagtcggcggcttccaccgtggggcgggtgtcgcggtccggcagccgcagcgcgagctccagctgcagcagcagcagcagcgggtgcgtcagccggagccagtcgtccaagagcgagcagggcgcgccgcggcggcggtcgctgtcgagcagcgtgttctacgcgcacccgagcccgtcgccgcagctgcggtgggcgcggccgcgccgcagcaccgggtccgcgcagcccggcgccgcgtggggcctgttccgcctcggcgtcgccggcgccccggacgtgtaccccccgccgccgccgcgccccggcgggggcgatgccaggggcggcgggggcagcagcaggagcgcgcggttcgagcaggtggccaccgccgtcgacaggaaggtcgggttaggccagctggcgctgttcggggacagcctcggctgcaagtgctcgcccgacgtggtcgagcccgcggccgcgcgcacggcggaggcggcgaagcggagcaggaagaagggcggcgccaagagcggccagggcgtggcccgtcgtagtaggatcctggactggctctggctccaagagctctccatcgtcaaggacaagaagtag

SEQ ID NO: 109226 - DNA, 1220 bp, Zea Mays
ccccgcgggcccaccgccagttgtgaaaatcccgccgctccatctcctggctggcctccgcttcgctttccttcccttccctgccggctgccgccgctgctatttatccctcccactctctccctgcgactccaaccgctgcagcagagacgcccgaggcagcgcagagcagcagaccgcacgtcacacaccaccattgcagcaatggcgcgcgccggcgctctctgcctggcgctgctgtgcctcgtagccgtgcactcggccgtggcgcagaaatccaccccggccccggccaccgcaccggccgccaccaccaacccaccggcgaccccgtccaagaagacgcccgcgccagccgcggcgccgcccaccacccccgccaccctggccccggccgccgcgccgcccaccacccctgccacccccgcgcccgccgcgaccccgccagccaccctggctcccgccgcgtcgccgcccaaggcgtcccctcccgcaccggcgcccaaggccaaggccaccccgcccgcccccgccgcctccccgccggtggccgagctgccgccagccgcctcgccccctgcccccgcccccgcctccccgcccaccaagcccgccgaggtccccgcgcccgcgccgtccaagaagaagaagaagccctcctcgtcctccaagaacaagaagaagaagtccaaggccccagcccccgcccccgtcgtcgccgaggcacccaccagctccaagcactccaaggctaaggcgccctcagccagcgaagccgacgcgcccggcccggtcggcgacgccgccgccgccgacaccgcggccgctggaaggaccgtggcaggcggaatcatggcagcgggcgcgctggcgctgggcctcgtcggcctgctcgactaggcacggcacatcatgctgcctgggtccgcccgccgtgacgacgacagaactccgacgcggaagatgcagccggtgcgccgcgcgcgctcaacttccatggatgccgccggctgacggttgtactcttgtccgttttttaaccgggcctcgtgtatgtagtagtactagtgcagtcagtgccactcacgttttgggtgccggtgctacgtgcggacgtaccgccgccgcctcggattctttctactattctcttctttaatttcctgtaccactgccacctcatcgagatgatttatttatatctttattccgcccattgt

SEQ ID NO: 109227 - DNA, 2023 bp, Zea Mays
gctttatcttttcctcggccctgcctggcgcctgctttcaccgtttccgcccgtcgccttccacctctcgcattccctccctcccgccctccctctcactacagctcaagcgcagcgcggcacggcaccctacgtccccgactccctccttcttccactccactactcgccgcgctccccatgccctccccgtgacgccgaaaccaaatcctttttgctcttccatattactagtcctcctctccttggtcgcggcggcggtgtaggtcggcggcattgcgagatatggagaaggagaggaagcaggggttcttcgccgcgctcaaggaggaggtcgtacgggggctgtcgccggcaaggaccagagggaagtccccggcgccgcggagcgcgtcgcccgcgaggatgctgatcccgcgccggcggaaggcgcccgcggctccgccgccgccgccgccgccgccggagaaggtgctgcagcagtacctgggggagcagctcgtcgcgcgctccggcagcctgttgcgccccggtggggaggctctggcgccgctcatcgaggggcccgacgccgagcgcctcgccgccggcgaccccgacgaggaggactccggccaccgcgaggggttcgggcactgggtccgcggccacctgacgcgcgcgccatccatggccgccgcaggtggtcccgacggctcgttccggcggtccgacctccgcctgctcctcggcgtcatgggcgcgccgctcgcgcctatcccgtccaagccggccgagccgctgcccctcctctccatcaagggaaccaccattgagtcgtcgtcggcgcagtacatcctgcaccagtacacggcggcgtccggtggctacaagctgctgcagtcggtgcggaacgcgtacgccatgggcaaggtgcggatggtggcgtccgagttcgagacggcgacgcgcgtcgtgaagaaccgcgggcccagcggacgcggcgccgccgccgtggagcagggcggcttcgtgctgtggcaaatggcccgcgacatgtggtacgtcgagctcgccgtcggcggcagcaaggtccacgccggctccaatggccgcctcgtctggcgccacaccccctggctcggcgcccacgccgccaaagggcccgtccgccccctccgccgcgtcctccagggcctggatccgctgaccacggcggggctgttcgcggaggcgcggtgcgtgggcgagaagaaggtgaacggcgaggagtgcttcatcctgaagctggccgccgacccgcggacgctgaagctgcgcagcgagggcccggcggagatcatccggcacgtgctgttcggctacttcagccagcgcacgggcctgatggtgcacatcgaggactcgcacctgacccgcatccagccgcacgccggcggggacgccgtgtactgggagaccaccaccagctccgccctggaggactaccgcgccgtggagggcgtcatggtcgcgcactcggggcgctcggcggtgaccctgttccggttcggcgaggccgccatgagccacaccaagacgcggatggaggaggcatggagcatcgaggaggtggcgttcaacgtccccggcctgtccgcggactgcttcatcccgccggccgacatccagtccggtccagtcggcgaggcctgcgagctgccgtcgtcccagtcgcgcgccaaggccgtcgccgtgcacccttcgcgcgtggccgccgtggatcgcgccactgccgccgccgcctgccgtggccggaagaccacgtggagagtggaagtgtgaggagtgagtggcatgcgtcagttattagcacttttagcagcggcagagtctaatctgtccatactagagtttaattttggccagtccagtcatgaatcaaacaatcgaattgaatcggatccactaacctgttgcgtctagtagatatctgtaaatagaaccgtgactgatcctgggcctggatgaatctttttatccctctgaccgcagaaattctagc

SEQ ID NO: 109228 - DNA, 742 bp, Zea Mays
agcttccttttttttgtatacagtgcattggttattattctaggttatagcacgtccgaggagaaacacagcacacaagcacggaaggaaccgtcgcgacattccgacgctcggcgcgctaaactagcagtacaagactagaagctgtgcaggatcgcgagcgaaatcctgggtcatcctccctcccttagagcggtagggcctaggggcacttggggcgctggttcttgggggacttcatgtccctgtagcaggggcactcgtccttgctggcgtacggccccgacggcacgcagccctggcacttgccgcagcacatcatgcacaggcccatgcaccgcccggccttcttcagcgagcaccggctgcggcacttgccgtcgcacacgccgtccggcaccgcgccgccgtctgcaatgcacacacagggtgtagtcaagtatttacagaaaggagagaggatctcgccctgcaatggttcggtaagattgggaggcgaaaagttacctgctgcctcggcgagatgcttgaacgaggaggcggcagcaaccaggacgaggagcaggagagccacggggatcgccttcatcttcagaagctcttgctgttcgcctgttcctccgagccgaggaaccactggctggctgggctgccgaggtgaaactccaatcgtgagtgaagtggcgacgttgctgtagcgccttcagagttgaggcgctttcggtgtgagtgtgagtcacca

SEQ ID NO: 109229 - DNA, 1800 bp, Zea Mays
catttacttgagcctgcactaagactgtcttcggtggatcgtgtaaaatagtggacgtagcgctgtagatgacactatttgacactgagtgaagtttgaaataggggatgagattggggatctgctggagatggccttatatcttactctgagcggttttgatgtttcttcatggtgatttggctgaagtttctatttattttgacaggttagagttatgaatattacgagccaaggaaattctactctgattagatggggtattttcccagcagaatccgataatgctatgtccaacgcaacagcaatgggtatcatatatcggttaactcagcatcatgttcagttgcctgaaaatcttggcagttatcagttgcttgagtggaatgtgcagcctttgccgagaaggtcatggtttcaagaacatgtagtctctatgctgcttgggattttactagtaattttggtcactttgtcagcctttttagtagtacttgtttggagaaagaaatttagtggtcaagcagcctacagacctgttgattcagtggtccccgagcaagaactccagccactataatccaaattaaagctgtttgacggaacaacatatagatgattctttggtagagatacccttgtgcgggggggttacgcatcacagcggcacgcatctgctgctggagtaagcccttctttgtatgtaacacaagctacaagtttacagaagaagcactgtatgattacatgacttctccattcaaaacttagaggtgttcataaactgtctagtgattcagatcaagagctcctctcttgtgcttacagtagaagaaggttttgttcatgtaatgtagattaagtagggggtagagaagaaactaggcacagccgcggaacgaaatggtgtaatatttattttagtgccgagggtatttgtcttcaaagcttttcagggcatgcttgattctcttgcctactatttttattattattaaggacgttcttgctcatccctgttctcttcggcggctagtgttgaagagccatcacatcccaaaagacaagcacacagatacagtgcattggttattattctaggttatagcacgtccgaggagaaacacagcacacaagcacggaaggaaccgtcgcgacattccgacgctcggcgcgctaaactagcagtacaagactagaagctgtgcaggatcgcgagcgaaatcctgggtcatcctccctcccttagagcggtagggcctaggggcacttggggcgctggttcttgggggacttcatgtccctgtagcaggggcactcgtccttgctggcgtacggccccgacggcacgcagccctggcacttgccgcagcacatcatgcacaggcccatgcaccgcccggccttcttcagcgagcaccggctgcggcacttgccgtcgcacacgccgtccggcaccgcgccgccgtctgcaatgcacacacagggtgtagtcaagtatttacagaaaggagagaggatctcgccctgcaatggttcggtaagattgggaggcgaaaagttacctgctgcctcggcgagatgcttgaacgaggaggcggcagcaaccaggacgaggagcaggagagccacggggatcgccttcatcttcagaagctcttgctgttcgcctgttcctccgagccgaggaaccactggctggctgggctgccgaggtgaaactccaatcgtgagtgaagtggcgacgttgctgtagcgccttcagagttgaggcgctttcggtgtgagtgtgagtcacca

SEQ ID NO: 109230 - DNA, 1925 bp, Zea Mays
ggtaaaataatgaccttaatggcaggtatcattgttcgtaatacacttgtgacctatgaccgtcacaatgaaaagattgggttctggaaaactaactgttcagagttgtgggagaggttacatatcggtgacactccttcaccagccccttcaagtgatacaagttcagaacatgatatgtcgcctgctcctgcccctagtaatttgccagagtttgatgttggtctcatcaccgttgatatgtctataaatgttacttacccaaatttgaaacctcatctccatgagctggccgagctgatagctaaagagctggagattgactcacgtcaggttagagttatgaatattacgagccaaggaaattctactctgattagatggggtattttcccagcagaatccgataatgctatgtccaacgcaacagcaatgggtatcatatatcggttaactcagcatcatgttcagttgcctgaaaatcttggcagttatcagttgcttgagtggaatgtgcagcctttgccgagaaggtcatggtttcaagaacatgtagtctctatgctgcttgggattttactagtaattttggtcactttgtcagcctttttagtagtacttgtttggagaaagaaatttagtggtcaagcagcctacagacctgttgattcagtggtccccgagcaagaactccagccactataatccaaattaaagctgtttgacggaacaacatatagatgattctttggtagagatacccttgtgcgggggggttacgcatcacagcggcacgcatctgctgctggagtaagcccttctttgtatgtaacacaagctacaagtttacagaagaagcactgtatgattacatgacttctccattcaaaacttagaggtgttcataaactgtctagtgattcagatcaagagctcctctcttgtgcttacagtagaagaaggttttgttcatgtaatgtagattaagtagggggtagagaagaaactaggcacagccgcggaacgaaatggtgtaatatttattttagtgccgagggtatttgtcttcaaagcttttcagggcatgcttgattctcttgcctactatttttattattattaaggacgttcttgctcatccctgttctcttcggcggctagtgttgaagagccatcacatcccaaaagacaagcacacagatacagtgcattggttattattctaggttatagcacgtccgaggagaaacacagcacacaagcacggaaggaaccgtcgcgacattccgacgctcggcgcgctaaactagcagtacaagactagaagctgtgcaggatcgcgagcgaaatcctgggtcatcctccctcccttagagcggtagggcctaggggcacttggggcgctggttcttgggggacttcatgtccctgtagcaggggcactcgtccttgctggcgtacggccccgacggcacgcagccctggcacttgccgcagcacatcatgcacaggcccatgcaccgcccggccttcttcagcgagcaccggctgcggcacttgccgtcgcacacgccgtccggcaccgcgccgccgtctgcaatgcacacacagggtgtagtcaagtatttacagaaaggagagaggatctcgccctgcaatggttcggtaagattgggaggcgaaaagttacctgctgcctcggcgagatgcttgaacgaggaggcggcagcaaccaggacgaggagcaggagagccacggggatcgccttcatcttcagaagctcttgctgttcgcctgttcctccgagccgaggaaccactggctggctgggctgccgaggtgaaactccaatcgtgagtgaagtggcgacgttgctgtagcgccttcagagttgaggcgctttcggtgtgagtgtgagtcacca

SEQ ID NO: 109231 - DNA, 905 bp, Zea Mays
aaccgtaagcaaaatggtgctacatccgacgtgccggacggggtgcgacgcgccgtgaattaccgaattacccctctatccgcctcccccctggccccctcttctaacaagtcgtcgcctcggcccggcttcgcccccctcggcgcgacgacctctcccccaggagagcctaccccctccctcattccccgcgcgacgaggccgcttaatggcgggtcgcggccggcctcggccgggctcgcaccaggctctcgtcgtcgccgccgtcatcctactcctggccgccgcgtccggggccggcgctggatcccccgatcggcccgcgccggggccgccgctgttcctcccgctcacgcgctcgtaccccaacgccagccggctcgccgcctcgctgcggcgcggcctcggcgacggggtccaccccaacgcgcgcatgcgcctccacgacgatctcctcaccaacgggtactacacgacgaggctgtacatcgggacgcccccgcaggagttcgcgctgatcgttgactccgggagcaccgtcacctacgtgccctgctcctcctgcgagcagtgtggcaaccaccaggatccacgatttcaacctgacctctccagttcatattcaccagtaaaatgcaacgttgattgtacttgtgacagtgacaaaaaacagtgcacttatgaaaggcagtatgctgaaatgagctccagcagtggggtgcttggtgaggacatagtgtcttttggcagagagagtgaacttaagccacagcatgctatttttggctgtgaaaattctgaaactggagatttgttcagtcagcatgctgatggtataatggggctgggtcgtggtcaacttagcataatggatcagcttgttgaaaagggtgtcataagtgatt

SEQ ID NO: 109232 - DNA, 2498 bp, Zea Mays
aatcgagtgatcgaccaacgccgtcccttatcgtcgagtttcgacctctcggtaccggctaaaccctagcggcgtcacgtgtgcgacggccaccggtgggcggtggagggttaggcgcgcaaccggcgaagggattcagcggtccccttcccccgtccgaggcgcggcggcgccctgcagattattattggttttgttgcaaaatggatacagaagcgactttaaacaagtctggtggttctgaatctgtaatgtcattactggaacagcttgctgaagtatttggaaacttgaaatcccacaccgaagcatttctgcaattgcagaatggtatgcaatgggaagatatcaaagggcatttcctcagccttgataagtcgtatggaagcaagtttgatgaattggtagagaagcagaaggcattagaagaaaagaaagctgaagcttgtaggttgattgcagagaaagaggctgatatttctataaaagagcgtgcctccctgaatcagcttcaggagctaagggatgctgctgtctcttctctagcagaggttcggcaaaaatataaggtggagcttgctgagatactcgataccagtgaaagcaaatacaaaaaggtaagcacctcaatcaatgacagcaatgcatctcttgcttcagaggagaatacccttgctactgggtcaggcgaggcatctgaagcttcacctgttgagactaagccgcgttctgtattgaagcaactgtgcgagcagatggacaccaaaggccttttaaaatttctttcagtaaattgtagaaaacttgctactgctagccttcgtgctgaactttctgttgcactaaaatgtgcaactgaccctgcccgcttagtacttaattctctggagggtttcttcccaccagaacaaacaaattcacctgggagtgaacataacggccttcaggtccagcgcaagagctgcattgttttaatggatgctatagcacctgcactagggacgaaggagcctggtggcaacgacccttggagctctgaaattaaagagcaagccaaggcaattgccgaagagtggaagagtaagttagctgaggttgacctggatgcttctaatggttattcattggaggcacaggcttttctgcagcttcttacaacttttaatgttgattcggtgcttgacgaagatgaactatgcaagatcgtagttgctgtctctcgtcgcaagcagactgctgtgtcctgtcgctctcttggtcttaatgaaaaaataccaggtatcattgaggagttggttaagaggcacaggcaaattgatgcagttcatttcatacaagctttcgggctttcagagacattcccccctgcaccactgctgaagacctatattgaggagtttaaggatacaattgaaaataatggggatgcaactgtgtccctgttaaaggacgacccaaaatctagggagctactcactttgagggctgtgataaagtgtatcgaggagtacaagcttcagaaggagtattcacttggacctctccaaaagcgtgtttctgagctaaagcctaagggtgagaaaaggccatcaactgatgctggtgggcgtacttatgcaaagaagcctcgaggccctggcatttcatttaccaggagacctggcggttccattggttcagctgctcgcaggcctccatttccgggctatagctggcagcgtgctcctgcgccaatgccttcccatggtcctgcaccaatgccctcccgtgcccctcttcctgatggatatggagctgctgaccggtaccattacacgccaccagccccagcatatgatgcaggcgcattttcttcttacggtgagccgttcagcaccccaaaaccattccagtatgccccagggtcagtggcagcatcgtacaactcgagtccctataaaatcgcgtatggtggcccgggagcgccagctgcaagcgcatatgcaggttattccggtggggcccaagcaccagctgcaagcgcctatacaggttattccggcgggtccggtccggcagcttctagcagctatgcaaactatctgggatccgtctattgccctccccagcaaccatagattcgcttcatctctctcagaaatgttgtgctggttataaggtgtgttgtgctggtgataaggtgtaactttactctcttttctttttgactcatccacagcactgggttttgggttttggaggtgtaactgatgtagtccagtttctttggaagctgtgtgaggcgccggtcaaaatatgagtgttctcatgtgcactcgtatttacctttagctgtgcttattccttaggatgtttatatctttctgtcaacaagtctgtcttatgtaggaaagtctgtcccatgtactccaggaacatgtaacttttttacttgctaatgttgtgattgagctggaaaagccaaaaagtgtcaaacttgcgaagcttgcgcatctgac

SEQ ID NO: 109233 - DNA, 2451 bp, Zea Mays
catgccccaaccactccaacccaggcaacacagcaatcagcagaaaaacatctccttggccttccatccatatgatccatccctccaggctccagctaactccaaactaccctctggttcgactcgcgttcgcatcgcaagcagcagcgtaccatcgaggcaatggcggtgatggccgaagtagtgtcgaccaccggcgcggcgctccggagcccggccacgcagcagccggcggcggcgggcgcggcgaagggcaccgacgctgagaagctccagttcatcgaggacatgacctccaacgtggacgccgtgcaggagcgcgtgctgggggagatcctcgcccgcaacgcggacaccgagtacctctccagcaggtgcggcctcgccggcgctacggaccgcgccaccttccgcgccaaggtgccgatggcgacgtacgaggacctgcagccgtacatccggcgcatcgccgacggcgaccgctcgcccatcctgtcggggcacccggtctccgagttcctcaccagctccggcacgtccggcggcgagcggaagctcatgcccaccatcgaggacgagctcaaccgccgccagctgctgtacagcctccagatgcccgtcatgaacctgtacgtgcctgggatggacaaggggaaagctctccatttcctgttcgtcaagtcggagaccaagacaccgggcggcctcgcggcgaggcccgtcctcacgagctactacaagagcaaccacttcaggaaccgcccgttcgacgcgtacaacaactacacgagccccacggcggccatcctctgcgcggacgcgttccagagcatgtacgcgcagatggtgtgcgggctgtgccagcggcaggacgtgctgcgcgtgggcgccgtgttcgcgtcgggcctcctccgcgccatccgcttcctccagctcaactgggagcagctggcggaggacatcgaggccggctcgctgaccccgcgcgtgaccgacccgtcggtgcgcgaggcggtcgccggcatcctccgccctgaccccgcggtcgccgagctggtccgctccgagtgctccgggggcgactgggcgggcatcgtcacccgcatttggcccaacaccaagtacctggacgtgatcgtcaccggcgccatggcgcagtacatcccgacgctcaagcactacagcggcgggctcccgatggcgtgcaccatgtacgcgtcctcggagtgctacttcgggctgaacctccggcccatgtgcgacccgtcggaggtgtcctacaccctgatgcccaacatgtgctacttcgagttcctgccgatgggcggcgccgtcgacgcgagccagctggtggacctcggccgcgtggagcgcgggcgcgagtacgagctggtgatcaccacgtacgcggggctgaaccggtaccgcgtcggcgacgtgctccaggtgaccggcttccacaactcggcgccgcagttccggttcgtgcgccgcaagaacgtgctgctgtccatcgagtcggacaagacggacgaggccgagctgcagcgcgccgtggagcgcgcgtccgcgctgctccgcccgcacggcgccgccgtggtggagtacaccagccaggcctacaccaagagcatcccgggccactacgtcgtctactgggagctcctgcaggccaaggggggcgccgcggtggacggggagacgctggaagggtgctgcctcgagatggaggaggcgctgaacgcggtgtacaggcagagccgcgtggccgacggctccatcggcccgctggagatccgggtggtccggccgggcaccttcgaggagctcatggactacgccatctcccgcggcgcgtcgatcaaccagtacaaggtgccccggtgcgtgacgttcccgcccatcatcgagctcctggactcccgcgtcgtgtccagccacttgagccccgcgctgccgcactggaccgccggccagcgctccggctccggctccggctccgactagacacagcggcagggcggcgaggcgtgtccgtgtccaggcgcgcttaattagactgtggaatcatctgctgcgtgtcgcagacgtagaagaatgcccgtgaaaacttaaatactatttgttaattttggagttttgagtacgtgctgccagttagaagcgtgagggtaacttaactcgatgcgatgagagttgggctgcttctgcttgaaccgatcagctgaagcaacagtggacgcatatgtatttccggtccggtagtagtggcactgctgtccgtatcacttagcagtacggagaacgaacgcagctaattttaacgtccatccaaatctgtgcgggctgtgcgcctgcacaagacaagctagatcttgctgcaatattccgattactacaaccggctaggagcctgtgaagaaagattcgtaatacatgattcagtgaagc

SEQ ID NO: 109234 - DNA, 2426 bp, Zea Mays
tccaacccaggcaacacagcaatcagcagaaaaacatctccttggccttccatccatatgatccatccctccaggctccagctaactccaaactaccctctggttcgactcgcgttcgcatcgcaagcagcagcgtaccatcgaggcaatggcggtgatggccgaagtagtgtcgaccaccggcgcggcgctccggagcccggccacgcagcagccggcggcggcgggcgcggcgaagggcaccgacgctgagaagctccagttcatcgaggacatgacctccaacgtggacgccgtgcaggagcgcgtgctgggggagatcctcgcccgcaacgcggacaccgagtacctctccagcaggtgcggcctcgccggcgctacggaccgcgccaccttccgcgccaaggtgccgatggcgacgtacgaggacctgcagccgtacatccggcgcatcgccgacggcgaccgctcgcccatcctgtcggggcacccggtctccgagttcctcaccagctccggcacgtccggcggcgagcggaagctcatgcccaccatcgaggacgagctcaaccgccgccagctgctgtacagcctccagatgcccgtcatgaacctgtaagttttctgctgctactcctccagtaccagtaacaattattggcagctagcacacacgtgcgcggcgcaacgcagcgcagtcgttgatggtggccatgagcgttggttgaatgatcgtgtacgtgcaggtacgtgcctgggatggacaaggggaaagctctccatttcctgttcgtcaagtcggagaccaagacaccgggcggcctcgcggcgaggcccgtcctcacgagctactacaagagcaaccacttcaggaaccgcccgttcgacgcgtacaacaactacacgagccccacggcggccatcctctgcgcggacgcgttccagagcatgtacgcgcagatggtgtgcgggctgtgccagcggcaggacgtgctgcgcgtgggcgccgtgttcgcgtcgggcctcctccgcgccatccgcttcctccagctcaactgggagcagctggcggaggacatcgaggccggctcgctgaccccgcgcgtgaccgacccgtcggtgcgcgaggcggtcgccggcatcctccgccctgaccccgcggtcgccgagctggtccgctccgagtgctccgggggcgactgggcgggcatcgtcacccgcatttggcccaacaccaagtacctggacgtgatcgtcaccggcgccatggcgcagtacatcccgacgctcaagcactacagcggcgggctcccgatggcgtgcaccatgtacgcgtcctcggagtgctacttcgggctgaacctccggcccatgtgcgacccgtcggaggtgtcctacaccctgatgcccaacatgtgctacttcgagttcctgccgatgggcggcgccgtcgacgcgagccagctggtggacctcggccgcgtggagcgcgggcgcgagtacgagctggtgatcaccacgtacgcggggctgaaccggtaccgcgtcggcgacgtgctccaggtgaccggcttccacaactcggcgccgcagttccggttcgtgcgccgcaagaacgtgctgctgtccatcgagtcggacaagacggacgaggccgagctgcagcgcgccgtggagcgcgcgtccgcgctgctccgcccgcacggcgccgccgtggtggagtacaccagccaggcctacaccaagagcatcccgggccactacgtcgtctactgggagctcctgcaggccaaggggggcgccgcggtggacggggagacgctggaagggtgctgcctcgagatggaggaggcgctgaacgcggtgtacaggcagagccgcgtggccgacggctccatcggcccgctggagatccgggtggtccggccgggcaccttcgaggagctcatggactacgccatctcccgcggcgcgtcgatcaaccagtacaaggtgccccggtgcgtgacgttcccgcccatcatcgagctcctggactcccgcgtcgtgtccagccacttgagccccgcgctgccgcactggaccgccggccagcgctccggctccggctccggctccgactagacacagcggcagggcggcgaggcgtgtccgtgtccaggcgcgcttaattagactgtggaatcatctgctgcgtgtcgcagacgtagaagaatgcccgtgaaaacttaaatactatttgttaattttggagttttgagtacgtgctgccagttagaagcgtgagggtaacttaactcgatgcgatgagagttgggctgcttctgcttgaaccgatcagctgaagcaacagtggacgcatatgtatttccggtccggtagtagtggcactgctgtccgtatcacttagcagtacggagaacgaa

SEQ ID NO: 109235 - DNA, 3636 bp, Zea Mays
tcagcgctcaatgttccagcgtgtagaatttgtcatccgagcttcttcgatccttcgacggagaaggcgctcgagaagattcaaagaagagtagtcaaggatatgaatataaccagaaaaggacacaaataaactatgcacattttcttcgaggtgccatctgttcggtcgaatctcctgtttatcaactcccttcccaattataattgcaggagcaagagcaaccagaatagagcaagtgtgacccatcttgtgccagtgccgccgttgacctctcaaaacacacataatttcaatcttgttggccctgctgagctctcttgatcaagtgattaactcatggctatgatcctagacgccttcgtgcccatgctggggcgaatggtcgctggtgccgtgaaggagaggctcgacacgctcctcggcgtgcccggggagatggaaaggctggagagcacactggaggacctcgtgaatgtcctcggcgacgccgagatgaagcgcatcacggacacggccgtcgacgcctgggttcgggagcttaaggacgtcatgtacgacgccgacgacgtcctcgaccggtggcagatggaggcccaggcccgcagcagcagcgacgcgcccaagcgctcgttccctggcgctggctgctgcgcgcccctcctcacgtgcttccgggacccggcgctcgctcacgccatggcggcgcagatcaaggagctgaaccggaggctggagagcgtgtgccgtcggagctccatgtttcgcttcgtcagcgcctcgtcgtccgtccccctccggcagcaactaccaccggcatccagcggcaacggtaagacgagctcggtgatcgtccacgccgatctcatcggggagaagatcgaggaggacgggaacaggctggtggaggcgctgatcgccgacgacctgcgcgagaacgtcctcgccgtgggcatcacaggcgccggcgggatcgggaagaccaccctcgccaagagggtcttcgctgaccagcgcgtgcgcgacgagttcgacctcagggtgtgggtgtgcgtgtcgcaggacgtgaacgaggctgacctgctgtggtccgtcctcgttggcgccggaggcggccaccagctccagcagcagcacgacgccacgccggacaggtcgtcgctggagcccgcgctccagcgggccgtctcgggaaagaaggtcctgctggtgctggacgacgtgtggagcgacgtggcctggaaggaggtgctacagaacgcgttcagggccggcgctcgtggtggcagcagggtgctcgtcacgacgaggaaagagacggttgccaggcagatgaaggccgtgcacatccaccgcgtggagaagctgcagcctgaagatgggtggcgcttactcaagaaccaggtagtcttgggcaggaatccaaccgacattgaaaatttcaaagacattggtatggagatcgtcacaagatgcgattgcctgccgcttgccatcaagacagtgggtgggctactgtgcacaaaagagagaacgttcagagactgggaggaagtctcaaggagcgccgcatggtccgtggcaggactacctgaagaggttcacaacgccatctacctgagctatgccgatctaccgcctcatttgaaacagtgtttcctgcactgctcccttttcccaaaagacgaagtcatcaaacgggtggatgtcgttcagatgtggatcgccgaggggtttgtacaagaggatgggtcctcagcgctgctcgaagatgtagggaacatgtattacagagaactagtcatgcgcaacctactcgaacctgatggccagtattacgatcagtcaggatgcacgatgcatgaccttcttcgatcgtttgccaattatctggcaaaagatgaagcgttgcttcttacgcagggccaaagcttatgcgacatgaagacaaaagccaagctgcgtcggctgtccgtagcaaccgaaaatgtgctccaaagtaccttcagaaatcagaagcagctgagggcgctaatgatactccgaagcaccacggttcagctggaagagttcctgcatgacctgcctaagctgcgactgctgcatctcgggggtgtaaacctcacaaccttgccgccttctctgtgtgatctgaagcatctaagatacttggagctgtctggtaccatgatagatgcaatcccagactcgattggagacttgaggtatctacagtacattggtctgctaaactgcataaatctgttcagtcttcctgggagcatagtgagactgcataggctgagagctctccacatcaagggggccagtgtgaatgacatccccagggggatagggagattacaaaaccttgtcgagctgactggttttttaacacagaatgatgctgctgcaggttggaacagcctggaggagctaggccacctgccccagctcagcctcttgtatctaagcaacctagagaaagcacacaccggctctgtggccaagaaagcagacctccaaggcaagcgccaccttagatacttaagcttggagtgcacaccaagagccgctggtggaaatcagatcaaagataataacacacagcaggagaaacgtcagattgaggatgtctttgatgagctctgtccaccggtttgcctcgaaaacctctcactaatcggcttcttcggacacaagcttcctaaatggatgagctcaggcgagatggatcttaagtacctaagatcaataaaactcgaagattgcacctactgcgagcagctccccgcattgggccatctcctgagtttagatttcctgctgatcaaacatgcgccatctattatgagaattggacacgaattcttttgcagcagcaatgctacacaaatagaccctcggatgctgttcccaaggctggagaaacttggatttgataggttggatggatgggaagaatggatatgggacaaggaacttgagcaggcaatgccaaacatcttttctctcaaagtcacaaaatgcaagctcaagtatttccccacagggcttgtgcatcaaaccaggaccttgagagaattgatcatatctgaagcttgcaacttgacatcagttgcaaactttctcctcctcagcgatctgcatctccatgccaacccaaatctcgagatgatcgccaatctccctaaactacgaaggctttcggttatccaatgccccaagttgaatgcacttgtgggtttaacagaactgcaaagcattacattgcaggactatgccgcagaactgtttccacagtacttggaagaaactagtgctgcaaagctagaggttttctgtaatgaagaactcttcaaacttataaccctgcaagaaggttcagagtggtgcaagatcaagaatatccaaaatgttaaagcatatgctcccaaaggaggcgaccgtaaaggatggtacgcattatacactaaggaaccgtttagcctgaccacaaacaacaaggggtgcgaaatatttgaagttgcaaagtcctaatgattgttgagttaattcatctagagccgaacggcaaactgtctctcatcttgtttgagtccattgactctacattggaaatcaaaatattgttgt

SEQ ID NO: 109236 - DNA, 291 bp, Zea Mays
atgtcgagtagtggtcgttctgggcctcccactcatcctggtggccagtgggatgttcaggatgaacagcaggtgctcacacctgggataatgggtaccgagtatgccactcctcccactgaaaccccagatcttgatgctgaccatgaagatgatgcgccacggaggtatcgtatgctggaaagtgtgttgggaactgataatgtcccagaacaagatgaaatacttgctgttgaagaattgttgacagccatcggtgaggagccatattcagtgactgaggctctgaag

SEQ ID NO: 109237 - DNA, 2344 bp, Zea Mays
cgcacgagcccacagatgcggcaagatcgaatccatggcgagagctagcagaagccgcggggcttggtgcttgaaccctcgatcattcttggaggtccccgttccttctccttgcattgctcgcgttcctcgacgcgagagcagaccagcacagagagaagaaaagaaaaaggagggttctttctcgcgtttcttctgtctattctgcggttctttcttgggagcagtaatgaggcggcatgggtggcagctcccgtaccatcctctccaggtggtggccgtgtccgtcttcttggcgctggccttcgcgttctacgtcttcttcgcacccttcgttgggaggaatgtgttccagtacgtggtcatagggctctacactcccctggttttatgtgtcttctttctatacatctggtgtgctgcagcaaacccagcagatcccggggtcttcaaatcaaagaagtatctgagcttgtacggaagcggcaaacacaggcatctgaaggaatgcagaaagggttcttcagatgttcggttacaacttgagggaactggagaaaagcaagagcatgaggtcgcagcatctagcgagatgtcaatgactcaatacaaggacaatattccatcttgcatgagttcaactttctctgcatttctccttctattctaccctctgtcttttgttctctcctgctgtcagtcacatgaatggtcctctgaacagcaagccactgaggaagggatgtttttctgcagtctatgtgaagttcaagtgttgaagtatagtaagcattgcagagtttgtgacaaatgtgttgatggttttgatcatcactgcaggtggctcaacaattgtattggaagaagaaattatgggaggttttttattctaatgtcaaccgcccttatcttgcttatcttacaatcagcaactggagtattggtgctagtgctatgctttgttgagcgaaaggaattctgtctgcaaattgtttcaaagcttggaagcagcttctctgtagtgccttttgttattgtggtggcatcatgtaccatcctagccatggtcgcttcactacctattgcccaacttctttttttccacattcttctgataaagaagggaatcagtacctatgactacatcattgcgctgagagagcaagaacaagatgatttgagtgggcagcagagtccacagatgtctcgtgtaagctcgtacactggactcagcagtactagttcctttggtccacttcgtcgtggttcatggtgcactccaccaaggctgtttcttgaggatcagttcgatgttattccatcggaggctgcttcttcgcataattctgctatgaagagaaaagaagacgagggaaagaggaagaagggctcaggggctgtgcaaataagcccatgggcattagctcgtcttaatgctgaagaagtctcgagggttgctgcagaggcacggaagaagtccaaagttttattaccaatcagaaaagatgactattcgcgagaccacgaaacagatagtagctacggaggcatgagcaatggcaggattgatctaggcaccgatagcaagaggagaacgaacagaagaggaagacagcccagtgatctctctctcaaacctgttgcaaagatatctacagatgttattgattctaccagcagggacatggccccagaagcactgtccaacttagcaccattgcaacttgaggcactgagcgccttccatcccagtagggctgcatcctgtgtgaatgctggtgggtcatctccagatagcagcttggattcgcctgacctgcatctgtaccgagtctcagctgtctcctcgtctggagctgaagacttacaactgacagctctcactgctccaggaagcactccacagcaagggatccaactgtcgaggtcgaccagcgatgggtacgaagcgtcagggggtgaagacagcgaccgcattccgtcacggatagtgcaccgctcgtcgaactgggcaagcatcatcctcaactctgaccagagtgcgtcctcatctggcattcttgtgccaaagaacagactgtcctgacttcatgtgaatgaagattgtaaatgatcagccaagaaccggagattccagtatctggccttctctgttgtcaatatcagattttttcgcagggatggttggatactgcgcaaatcattgtttttttagtctcggaatcgctaggtaggcagtgtctgaatttcttcctagggggttccgggttcaggtgcttgcaattttgctgccagacgacaatgaactgatttgtttagaggttagtaccttggatcgaatgcc

SEQ ID NO: 109238 - DNA, 2373 bp, Zea Mays
cgcacgagcccacagatgcggcaagatcgaatccatggcgagagctagcagaagccgcggggcttggtgcttgaaccctcgatcattcttggaggtccccgttccttctccttgcattgctcgcgttcctcgacgcgagagcagaccagcacagagagaagaaaagaaaaaggagggttctttctcgcgtttcttctgtctattctgcggttctttcttgggagcagtaatgaggcggcatgggtggcagctcccgtaccatcctctccaggtggtggccgtgtccgtcttcttggcgctggccttcgcgttctacgtcttcttcgcacccttcgttgggaggaatgtgttccagtacgtggtcatagggctctacactcccctggttttatgtgtcttctttctatacatctggtgtgctgcagcaaacccagcagatcccggggtcttcaaatcaaagaagtatctgagcttgtacggaagcggcaaacacaggcatctgaaggaatgcagaaagggttcttcagatgttcggttacaacttgagggaactggagaaaagcaagagcatgaggtcgcagcatctagcgagatgtcaatgactcaatacaaggacaatattccatcttgcatgagttcaactttctctgcatttctccttctattctaccctctgtcttttgttctctcctgctgtcagtcacatgaatggtcctctgaacagcaagccactgaggaagggatgtttttctgcagtctatgtgaagttcaagtgttgaagtatagtaagcattgcagagtttgtgacaaatgtgttgatggttttgatcatcactgcaggtggctcaacaattgtattggaagaagaaattatgggaggttttttattctaatgtcaaccgcccttatcttggtctgcatggtttgtgcaatttgggccagcttatcttacaatcagcaactggagtattggtgctagtgctatgctttgttgagcgaaaggaattctgtctgcaaattgtttcaaagcttggaagcagcttctctgtagtgccttttgttattgtggtggcatcatgtaccatcctagccatggtcgcttcactacctattgcccaacttctttttttccacattcttctgataaagaagggaatcagtacctatgactacatcattgcgctgagagagcaagaacaagatgatttgagtgggcagcagagtccacagatgtctcgtgtaagctcgtacactggactcagcagtactagttcctttggtccacttcgtcgtggttcatggtgcactccaccaaggctgtttcttgaggatcagttcgatgttattccatcggaggctgcttcttcgcataattctgctatgaagagaaaagaagacgagggaaagaggaagaagggctcaggggctgtgcaaataagcccatgggcattagctcgtcttaatgctgaagaagtctcgagggttgctgcagaggcacggaagaagtccaaagttttattaccaatcagaaaagatgactattcgcgagaccacgaaacagatagtagctacggaggcatgagcaatggcaggattgatctaggcaccgatagcaagaggagaacgaacagaagaggaagacagcccagtgatctctctctcaaacctgttgcaaagatatctacagatgttattgattctaccagcagggacatggccccagaagcactgtccaacttagcaccattgcaacttgaggcactgagcgccttccatcccagtagggctgcatcctgtgtgaatgctggtgggtcatctccagatagcagcttggattcgcctgacctgcatctgtaccgagtctcagctgtctcctcgtctggagctgaagacttacaactgacagctctcactgctccaggaagcactccacagcaagggatccaactgtcgaggtcgaccagcgatgggtacgaagcgtcagggggtgaagacagcgaccgcattccgtcacggatagtgcaccgctcgtcgaactgggcaagcatcatcctcaactctgaccagagtgcgtcctcatctggcattcttgtgccaaagaacagactgtcctgacttcatgtgaatgaagattgtaaatgatcagccaagaaccggagattccagtatctggccttctctgttgtcaatatcagattttttcgcagggatggttggatactgcgcaaatcattgtttttttagtctcggaatcgctaggtaggcagtgtctgaatttcttcctagggggttccgggttcaggtgcttgcaattttgctgccagacgacaatgaactgatttgtttagaggttagtaccttggatcgaatgcc

SEQ ID NO: 109239 - DNA, 79 bp, Zea Mays
atctcaacaaggtgaaagtgatagcctggcaaataaaagcagatgtttgtgcatagaatcaagtgttattggattgcaa

SEQ ID NO: 109240 - DNA, 5869 bp, Zea Mays
atgcctttggcgccccggtcggagccgatcggtggccgcctgaggagacgcagcagctcggcgggcgccggcggagaggcggcgggcacgtcctcctcatgcctttggcgccccggtcggagccgatcggtggccgcctgaggagacgcagcagctcggcgggcgccggcggagaggcggcgggcgcggaggtggaggcggaggcggaggaggaggaaggggagaatggcgctcttccgcaagttcttcctcaagaagaccccggatcggctgctcgagatctccgagaacgtctacgtgtttgactgttgcttctcgactgattccatgggtgaggatgagtatcgggattacttgagtggcattgtcgcgcaattgcaggaattttttccggacacatcacttatggcatccaatttttggtctggggacaaaagaagccggatatcagatattttatctgagtatgacatgacagtaatggactacccacaacagtatgaaggatgtccgttgcttcagctcgagatgatccaccatttcttgaaatcatgtgaaaattggctatcagtggaaggacaacataacatgcttttgatgcattgcgagagagggggttggccagtgcttgcattcatgttggccggactgcttttgtatcgcaaaatatatactggcgagcagaggacactagaaatggtctacaagcaggctcgcagggactttatacagcagttctttcccttgaatccccagccttcacatttgagatatctgcactatataacaagacaaggaggtggttcagaatggcctcctattagcagacccctcatcttggattcaatagttctccatgttgttccgcggtttgacacagatggtggttgtaggccatacttgattgtacatgggcaagactcaagtcctggtaacaagagtgcaaaggtcctttatgagatgccaaaaacaaagaagcaccttcagcgttatggacaggcagaggttcccataaaattaagtgtgtcctgccatgttcatggagatgtggtacttgaattcatccatattggcgataatatagagaataaggaaacaatgttccgggtcatgttcaacactgcattcgttcaatcaaacatccttgaactgaatcgtgatgatattgatgttgcttggaatgtgaataatcagttcccaagggactttcgagctgaggtacacttttcagaccctgtttcatttaagcctgctgctaccatcgaggaggtagctgatgatggagacgagactgatgttgcttcggtagacacaggagaggagttttatgaagcagaggagtattggcatgatgctagaaaagacccagcaactcattcaattgatggtggaatatcattaaatgacattgcagaatttgatggtggggcaacaactgaagaaaggagcagcctagagaagcaccgatctgatgagggtgtgaagattgctgtctcccagaattttggtagtatgaatgaaaaagtggcaattgcacctacctcaagttttgagaatcaagaaggattgcagcagcctcgtgaagttcttccaaatgctaaactaagcaaaaataatgatcaagagaacagtgatgtgcatgatatacaggtggttgctacatctgttgattcagagggacacaagtttggatctaccggtcaggaggacacgaaaggtgtaattgcacaaactttagtcacgacagtcgatctaagtggcagtgatggaattcactgccagactgatgaacaaacaaaaatgtcagaataccctgatttggactacactgcttttggctctcctagaagtttgtcacgtacagatggggatgcccacatgagaactaagaaaaatgaagggttgcagaatggtgatattaagattatcactgagaacacaataagtgtggacaacgagctagtgatctatgaagagaaaactatagttgtcaatggtaatgcaatacaggtagtaaaaaacgttgtcaatgaagagagcatcgcggctaagataggcaaaccaattactgagagtaggacctcattggacaatgacaatggcaagattcaaactgctaaaccttctgatatagccaatggcaaattggatgggtgtagattagaatcttgccttgaaaccgtgcctaccaagaaaaccactgtccatgacagaattgttgtcttaccagccactggagtagcaactgagataaaagccaagcaagaggtgcttgttgacaaacaggattttggtatagttcttcctcaaagtcgaacagtagccagggctaggagtccgaggcttggaagtgatgaccgagggcaaatccctgataaagctgtgttatcagtattgaaggagatggtagtaggcaatgcaaagatggaagatcaaccaaagcttgccaaaccaaaaataatgcgtagatggatctcaccaaagaaggaatctgacgctacctctgtgcgcagaccatctcaccctccatctagatactacagttcaccagctgcactaggtattcgatccatatctacagatggtaaaatcagcgttgtgaatgatgcacctttattatcactaaaacaaccatatggcagcaacttgacacgagaagcaacatctgcacagtctgctccatcgcctccacaaaaatccttgttactaggtgcacaaagtgcatcaagaagccaggtttctccaccgccaccgcctccacctccacctgcaaccaactattcttcaagttctacgcctatgcacatggggttagcttcaacaggtttgtcaaacttacctcaaggtgcttctccacctaggtcaccggtagcacaaaaacatgcatttgcccctcccgctcctcccccgcccccacctccacccccgaggtcaggtgtaggtggaaatactccacctccgcctcctccaaggctaaataacagtgcaatcgctccaccgccacccccatccaccataacacgatcaagtgctcctcctccaccaccaccaccacaatcaatgtcacgttctgctcctccgccacctccgccgccaccaccatcattgtgttctaatgttccattgccacctctttcatgcacactttctgctccacctcctccgccgccaccaccactaccttctatggcacgttcagcagcaccatctcccccgccacctcctcctagccgaggagcacccccaccccttccccttggtcgaggagcacctccacccccacccccaccaccaccacctggccgaggagcacccccacccccacctcctcctggccggggagcatccctgcccccacctcctccccctagccgaggagcacccccgcccccacctcctcctgtttcacgtgcaggacctccaccacctccgcctcctccaggtgctcgctgtggacctccacctcctccaccccctccaggtgcaagtgctccacctccacctcctcctccaggtgcacggccaggagctccaccaccaccgcctcctctaggagcgcggccaggagctccacctcccccacccccacctggaggtggtggaagaggacctctaccacctcgtgcaccaggtgtgccaactccacctagagcaccaggtgtaccgctaccaccaggaagtaatccatcattaggcagaggacgtggggctgtacgccctatgggatcagctattggggctgctgcctcacgcaagtcaactttgaagccattgcactgggtcaaagtgacaagggcccttcaaggtagtctttgggaagaattgcagcgcaacactgactcgcagagcgtttcagagttcgatgtatcagaacttgagagcctttttcctgcagctgttccaaagtctgatgacagctcaaaatctgaacgtagaaaatcacttggatcaaaaccagaaaaagtgcatctaattgagttgaggagggcaaataacacagagatcatgctgacaaaagttaaaatgccactctcggatttggtgagtgcagctctcacgctagatcaatctaccttggatgttgatcaagtggagaatctcataaagttctgtcctacgaaagaagaaatggaacttctcaagaattacactggagacaaacagattcttgggaaatgtgaacagttcttcttagaattgatgaaagtgcctagaatggagtcgaaactgcgagtattctccttcaagatccagtttggttcacaagttgctgatctgagaagaaacttggatatcatagactcttcttgtaatgagatccgaacttctctcaagttgaaagaaataatgaagaaaatccttctccttggaaatactctgaaccagggaactgctagaggggctgcggttggcttccggttggacagtcttctaaaacttacagacacccgagcaacaaataataagatgacactaatgcactacctctgtaaggtacttgctgcaagatctccacagcttttaaacttctatgcggatcttgttagcttagacgccgcatcaaagatacaactaaaaatgttggccgaggaaatgcaagcagttagtaaagggctggaaaaggttcagcttgagtatgatgcttcagaaagggatggtccagtatccaaaatttttcgtgagaaactgaaagagttcaccgacaatgctggatctgatgtgcagtcgttatcttcattgttttctgaagtgggtaaaaaggctgacgcgttgatcaagtattttggcgaggatcctgtccgttgccccttcgaacaagtgatctccaccctcttaacttttgtaacaacatttcgaaaagcacatgaggagaacctgaagcaagctgaacttgagaagaaaaaagctgaaaaagaggcagaagcagagaaggccaaaaacgcacaattaactggcaaaaatcactctaaatcatcaaatccaagccgacaagctaagcaagccatagagaggacaagatctgtaagcagacgaggaagagatgctgggtgattatcccgaatggccggctattgtggctgtgcttctgatctgcttgcgaggcaaatgaacgaccgcatgatgcatttctggcaaggggagtttcgtggacggacgccgtggcatccgtcgggtgcagcgcgatcgcatcaaagaaactttacatgataccagctgcggactctcactggagaatgccggcttctttttttatccatatcgtccatcagggtccagtgctaacttctgactgctgtaaagagcgaatgcgtcgtcacacccagcgtagccaattcatcagggatctggaggaggccagaaaggacgaagcggcggcggtgccgtgtcctacggtcctacctgtcagttgccgcggtgtcctcctgtcctgatccacgtcgccgccactgacagactcctctctcaccgtggcacgaattgatgagccacgaattgaggattgatcaaggtcttggcatcaacaaagctgccagcggtttttcagcttcattttagtttgtttatatagatctgtgccttgatcgaggtaggacgattcctagttatgagtttcaatttcttgtacgccaaggactggatctggaactgcggtcggtcggttgtaacgttgctttattatatggcttcaaagaggctaggaaatgagactgaggcgctagaaaagaaggttgtggagtggggtgagcccagtgtgccgtccggcaagcagggtaaaaaggctgacgcgatgatcaagcattttggcgaggatcctatccgttgccccttcaaacaagggagaagcaccaaaaatttatcagcactctaa

SEQ ID NO: 109241 - DNA, 5589 bp, Zea Mays
atgcctttggcgccccggtcggagccgatcggtggccgcctgaggagacgcagcagctcggcgggcgccggcggagaggcggcgggcacgtcctcctcatgcctttggcgccccggtcggagccgatcggtggccgcctgaggagacgcagcagctcggcgggcgccggcggagaggcggcgggcgcggaggtggaggcggaggcggaggaggaggaaggggagaatggcgctcttccgcaagttcttcctcaagaagaccccggatcggctgctcgagatctccgagaacgtctacgtgtttgactgttgcttctcgactgattccatgggtgaggatgagtatcgggattacttgagtggcattgtcgcgcaattgcaggaattttttccggacacatcacttatggcatccaatttttggtctggggacaaaagaagccggatatcagatattttatctgagtatgacatgacagtaatggactacccacaacagtatgaaggatgtccgttgcttcagctcgagatgatccaccatttcttgaaatcatgtgaaaattggctatcagtggaaggacaacataacatgcttttgatgcattgcgagagagggggttggccagtgcttgcattcatgttggccggactgcttttgtatcgcaaaatatatactggcgagcagaggacactagaaatggtctacaagcaggctcgcagggactttatacagcagttctttcccttgaatccccagccttcacatttgagatatctgcactatataacaagacaaggaggtggttcagaatggcctcctattagcagacccctcatcttggattcaatagttctccatgttgttccgcggtttgacacagatggtggttgtaggccatacttgattgtacatgggcaagactcaagtcctggtaacaagagtgcaaaggtcctttatgagatgccaaaaacaaagaagcaccttcagcgttatggacaggcagaggttcccataaaattaagtgtgtcctgccatgttcatggagatgtggtacttgaattcatccatattggcgataatatagagaataaggaaacaatgttccgggtcatgttcaacactgcattcgttcaatcaaacatccttgaactgaatcgtgatgatattgatgttgcttggaatgtgaataatcagttcccaagggactttcgagctgaggtacacttttcagaccctgtttcatttaagcctgctgctaccatcgaggaggtagctgatgatggagacgagactgatgttgcttcggtagacacaggagaggagttttatgaagcagaggagtattggcatgatgctagaaaagacccagcaactcattcaattgatggtggaatatcattaaatgacattgcagaatttgatggtggggcaacaactgaagaaaggagcagcctagagaagcaccgatctgatgagggtgtgaagattgctgtctcccagaattttggtagtatgaatgaaaaagtggcaattgcacctacctcaagttttgagaatcaagaaggattgcagcagcctcgtgaagttcttccaaatgctaaactaagcaaaaataatgatcaagagaacagtgatgtgcatgatatacaggtggttgctacatctgttgattcagagggacacaagtttggatctaccggtcaggaggacacgaaaggtgtaattgcacaaactttagtcacgacagtcgatctaagtggcagtgatggaattcactgccagactgatgaacaaacaaaaatgtcagaataccctgatttggactacactgcttttggctctcctagaagtttgtcacgtacagatggggatgcccacatgagaactaagaaaaatgaagggttgcagaatggtgatattaagattatcactgagaacacaataagtgtggacaacgagctagtgatctatgaagagaaaactatagttgtcaatggtaatgcaatacaggtagtaaaaaacgttgtcaatgaagagagcatcgcggctaagataggcaaaccaattactgagagtaggacctcattggacaatgacaatggcaagattcaaactgctaaaccttctgatatagccaatggcaaattggatgggtgtagattagaatcttgccttgaaaccgtgcctaccaagaaaaccactgtccatgacagaattgttgtcttaccagccactggagtagcaactgagataaaagccaagcaagaggtgcttgttgacaaacaggattttggtatagttcttcctcaaagtcgaacagtagccagggctaggagtccgaggcttggaagtgatgaccgagggcaaatccctgataaagctgtgttatcagtattgaaggagatggtagtaggcaatgcaaagatggaagatcaaccaaagcttgccaaaccaaaaataatgcgtagatggatctcaccaaagaaggaatctgacgctacctctgtgcgcagaccatctcaccctccatctagatactacagttcaccagctgcactaggtattcgatccatatctacagatggtaaaatcagcgttgtgaatgatgcacctttattatcactaaaacaaccatatggcagcaacttgacacgagaagcaacatctgcacagtctgctccatcgcctccacaaaaatccttgttactaggtgcacaaagtgcatcaagaagccaggtttctccaccgccaccgcctccacctccacctgcaaccaactattcttcaagttctacgcctatgcacatggggttagcttcaacaggtttgtcaaacttacctcaaggtgcttctccacctaggtcaccggtagcacaaaaacatgcatttgcccctcccgctcctcccccgcccccacctccacccccgaggtcaggtgtaggtggaaatactccacctccgcctcctccaaggctaaataacagtgcaatcgctccaccgccacccccatccaccataacacgatcaagtgctcctcctccaccaccaccaccacaatcaatgtcacgttctgctcctccgccacctccgccgccaccaccatcattgtgttctaatgttccattgccacctctttcatgcacactttctgctccacctcctccgccgccaccaccactaccttctatggcacgttcagcagcaccatctcccccgccacctcctcctagccgaggagcacccccaccccttccccttggtcgaggagcacctccacccccacccccaccaccaccacctggccgaggagcacccccacccccacctcctcctggccggggagcatccctgcccccacctcctccccctagccgaggagcacccccgcccccacctcctcctgtttcacgtgcaggacctccaccacctccgcctcctccaggtgctcgctgtggacctccacctcctccaccccctccaggtgcaagtgctccacctccacctcctcctccaggtgcacggccaggagctccaccaccaccgcctcctctaggagcgcggccaggagctccacctcccccacccccacctggaggtggtggaagaggacctctaccacctcgtgcaccaggtgtgccaactccacctagagcaccaggtgtaccgctaccaccaggaagtaatccatcattaggcagaggacgtggggctgtacgccctatgggatcagctattggggctgctgcctcacgcaagtcaactttgaagccattgcactgggtcaaagtgacaagggcccttcaaggtagtctttgggaagaattgcagcgcaacactgactcgcagagcgtttcagagttcgatgtatcagaacttgagagcctttttcctgcagctgttccaaagtctgatgacagctcaaaatctgaacgtagaaaatcacttggatcaaaaccagaaaaagtgcatctaattgagttgaggagggcaaataacacagagatcatgctgacaaaagttaaaatgccactctcggatttggtgagtgcagctctcacgctagatcaatctaccttggatgttgatcaagtggagaatctcataaagttctgtcctacgaaagaagaaatggaacttctcaagaattacactggagacaaacagattcttgggaaatgtgaacagttcttcttagaattgatgaaagtgcctagaatggagtcgaaactgcgagtattctccttcaagatccagtttggttcacaagttgctgatctgagaagaaacttggatatcatagactcttcttgtaatgagatccgaacttctctcaagttgaaagaaataatgaagaaaatccttctccttggaaatactctgaaccagggaactgctagaggggctgcggttggcttccggttggacagtcttctaaaacttacagacacccgagcaacaaataataagatgacactaatgcactacctctgtaaggtacttgctgcaagatctccacagcttttaaacttctatgcggatcttgttagcttagacgccgcatcaaagatacaactaaaaatgttggccgaggaaatgcaagcagttagtaaagggctggaaaaggttcagcttgagtatgatgcttcagaaagggatggtccagtatccaaaatttttcgtgagaaactgaaagagttcaccgacaatgctggatctgatgtgcagtcgttatcttcattgttttctgaagtgggtaaaaaggctgacgcgttgatcaagtattttggcgaggatcctgtccgttgccccttcgaacaagtgatctccaccctcttaacttttgtaacaacatttcgaaaagcacatgaggagaacctgaagcaagctgaacttgagaagaaaaaagctgaaaaagaggcagaagcagagaaggccaaaaacgcacaattaactggcaaaaatcactctaaatcatcaaatccaagccgacaagctaagcaagccatagagaggacaagatctgtaagcagacgaggaagagatgctgggtgattatcccgaatggccggctattgtggctgtgcttctgatctgcttgcgaggcaaatgaacgaccgcatgatgcatttctggcaaggggagtttcgtggacggacgccgtggcatccgtcgggtgcagcgcgatcgcatcaaagaaactttacatgataccagctgcggactctcactggagaatgccggcttctttttttatccatatcgtccatcagggtccagtgctaacttctgactgctgtaaagaggtgctaacactgacgctaactccattctttcttttgttttttcatgttaattgtccattctttctaacaacggtggtcaagtaatagtacagactggtgttttggtgggaaattgtaaaaaataggcattagggtagaaaatgtatggatataatgtaggagtatcagcctatcaggagtaaatatgagatgtaaagctcagcccgtagtttagatgtaaagttttgtactgagtatattctcactttctaatttctatgatcacgatgcagcgaatgcgtcgtca

SEQ ID NO: 109242 - DNA, 2767 bp, Zea Mays
gggcggaaggggtcaagctttccgatcttcattctttatttacaccgcggcagccggctctcagtctcagcccaatgctggcgtgagggaggggggtttgggagcggacaggggagacgattcttgaagaagatcacgcgctgatcttggcccgtgtccgtccgtgcgcgacctcggcgtatggttggtggcgattggcagtgctggtagcgcgccgccgccatgggctgcgtcgcgtccaagaacaccgtctcggtgacgccggcggccgactcgtccggcgggctcagggatcggagccatccgcgcgctcaggagtctgctgctcctgtgccgttgcccgtgcccgtgccttccctgcgtagctcgtcgtccgcggcgaggaggtcggagaaggtcaaggacgacgcggaggagccagggaaggccgtcgtagccgtggcggcgtcgtcccggagcttccgcctgcggagcctgcggaagagccttgagggtgagcaggtggctgccgggtggccgccgtggctcagcgccgtcgccggggaggccatccaggggtggatcccgctcaaggccgactccttcgagaagctggagaaggttgggcaaggcacatacagcagtgtattcagggcaagagaccttgagactggaaagatcgttgccttgaagaaggttcggttcgacaattttgagccagagagtgttagattcatggcaagggagatacaaatattgagaagacttgatcatccaaatgtcatgaaactggaaggcttgattacttcccggttatcgtgcagcctttatctagtatttgaatacatggagcatgatcttgcaggactttgctcctccccggacatcaaattcactgaagcacagctcaagtgctacatgaaccagttactgtcaggactggagcattgccattcacgacatgtggttcatcgtgatatcaagggtgctaatctccttgtgaataatgaaggggttctaaagatagctgattttggtcttgcaaatttctttgatcccagcaaaaaccatcctctgaccagccgtgttgttactctgtggtaccgaccacctgaactgctactaggttcaactcactatgatgcagctgtagatttgtggagtgttgggtgtgtgtttcctgagatgtatcgtgggaaacctatcctgcagggaagaaccgaggtggaacaactacacaagatttttaaactatgtggttcacctgctgatgattattggaagaaatcaaagttgcctcatgcaacaatatttaaaccacatcatccatatactagtaccctacgagatgtttttaaagagttaccagaaaatgcattgagtttactagaaactcttctgtcggtggagccctacaagcgtggtactgcatcaggtgctctttcctctgagtttttcaggacaaaaccttatgcgtgcgaaccttcgagcttgcctaattatgcacctaacaaggagatggatgcaaagttacgagagaatgcactcagaagaaaagcaagtagcagagggcacgggacagaagcatccaagaagtcttcaaggctcagtagagcagcaagagaacctagtgcagtccctaagcagataataagtagaacagaggaatccaaaactaatgtgaatgcaaccaaagatggtacaacacaggaccgtgcgaaactgaatggcgatgctaggctatttgtggacatacaaccagtgtcagcggctcaagttaaagagagtgctcgccacgttaagaatgaatcacgagagcaaatacctttctccgggccattgagtgtttcttcatctagtggctttgcatgggccagaagaccacatgaggaccgttcctttgctagatcacggaccagatctagctcaaggggccagtttcctgctgatgctgttcagggatgtaatacccaagctaaagagaatgctggccttagggagctgcatagcagagacatacctgtatcagtatcacacgtcggttccagagtccgagaccgggggcctcacgatgcggcgaagcgtgcagtcctgaagaagtggtcacagctagagcgtccagattcgttcgattcttgcgacacttaccactcccataacttctcgaacgccatgttccttgggggtactctctcatcgaagaatggcttcaagggcggtcataatcaagaagagaaggtcgagtactcgggccctttgttgtcccagtcgcacaaggtcgatgaactgttgcagaagaacgagcgccacatccggcaagctgttcgaacatcatggttcaggagaggaagaaaggtggacaagtgaggaaaagcttgaccatttctttccatgggagggcttgtgacgcttagagaaaggggagagcatgtcattagcttctgatgggcctctgctgccaatctgggaagcgggcaattgctgctgacgagtccattgttaactgaaaacatcatcaactttggtgatcctatctcacagcaaaacaaaattagctactgtgccttgctgcttctggggtttgttgtagattccccgaagtgccgtatccttttttttttgttgtacagagaaatattagcggctgactgacggggcggtgtggttgaacagaagattgtgtagttggaataaccagtaactaagctgcacaacatgcatggtgcggttgtagtaaaggcagcctctgaagaaaatgagaagtgaaatccaataactgttcgttgtc

SEQ ID NO: 109243 - DNA, 3239 bp, Zea Mays
cagttgctgctgctgctgccgcttctccggccaatatcggtgcctaaccttttcagtcccggcggcgcggcagggcgggtttcgccgttcttggctgccgcgccgtcattcttgttctggcggtttcgtgatctgcccccgcgcagcgtctgctctgcggtcgcggaaacgccgtgccttctccgcgcgtccgctcgataacccctgcgtctccgccccgccccgcccgaccacgccttgcggaagcgtcgccgtcgtggtccgtcgacgggagcgcgcggtcagtggagctgcgtcaacagagtcgcgcactgctttgttttggtgatggctcgcgtcgcgtcgcgtcgcgtcttgatggaatcattaactagtcttccaggtcaatcccgtcgtgttcttgactactagtgccgtgttcgacccgtgacgcctgtggttggcgggcggaaggggtcaagctttccgatcttcattctttatttacaccgcggcagccggctctcagtctcagcccaatgctggcgtgagggaggggggtttgggagcggacaggggagacgattcttgaagaagatcacgcgctgatcttggcccgtgtccgtccgtgcgcgacctcggcgtatggttggtggcgattggcagtgctggtagcgcgccgccgccatgggctgcgtcgcgtccaagaacaccgtctcggtgacgccggcggccgactcgtccggcgggctcagggatcggagccatccgcgcgctcaggagtctgctgctcctgtgccgttgcccgtgcccgtgccttccctgcgtagctcgtcgtccgcggcgaggaggtcggagaaggtcaaggacgacgcggaggagccagggaaggccgtcgtagccgtggcggcgtcgtcccggagcttccgcctgcggagcctgcggaagagccttgagggtgagcaggtggctgccgggtggccgccgtggctcagcgccgtcgccggggaggccatccaggggtggatcccgctcaaggccgactccttcgagaagctggagaaggttgggcaaggcacatacagcagtgtattcagggcaagagaccttgagactggaaagatcgttgccttgaagaaggttcggttcgacaattttgagccagagagtgttagattcatggcaagggagatacaaatattgagaagacttgatcatccaaatgtcatgaaactggaaggcttgattacttcccggttatcgtgcagcctttatctagtatttgaatacatggagcatgatcttgcaggactttgctcctccccggacatcaaattcactgaagcacagctcaagtgctacatgaaccagttactgtcaggactggagcattgccattcacgacatgtggttcatcgtgatatcaagggtgctaatctccttgtgaataatgaaggggttctaaagatagctgattttggtcttgcaaatttctttgatcccagcaaaaaccatcctctgaccagccgtgttgttactctgtggtaccgaccacctgaactgctactaggttcaactcactatgatgcagctgtagatttgtggagtgttgggtgtgtgtttcctgagatgtatcgtgggaaacctatcctgcagggaagaaccgaggtggaacaactacacaagatttttaaactatgtggttcacctgctgatgattattggaagaaatcaaagttgcctcatgcaacaatatttaaaccacatcatccatatactagtaccctacgagatgtttttaaagagttaccagaaaatgcattgagtttactagaaactcttctgtcggtggagccctacaagcgtggtactgcatcaggtgctctttcctctgagtttttcaggacaaaaccttatgcgtgcgaaccttcgagcttgcctaattatgcacctaacaaggagatggatgcaaagttacgagagaatgcactcagaagaaaagcaagtagcagagggcacgggacagaagcatccaagaagtcttcaaggctcagtagagcagcaagagaacctagtgcagtccctaagcagataataagtagaacagaggaatccaaaactaatgtgaatgcaaccaaagatggtacaacacaggaccgtgcgaaactgaatggcgatgctaggctatttgtggacatacaaccagtgtcagcggctcaagttaaagagagtgctcgccacgttaagaatgaatcacgagagcaaatacctttctccgggccattgagtgtttcttcatctagtggctttgcatgggccagaagaccacatgaggaccgttcctttgctagatcacggaccagatctagctcaaggggccagtttcctgctgatgctgttcagggatgtaatacccaagctaaagagaatgctggccttagggagctgcatagcagagacatacctgtatcagtatcacacgtcggttccagagtccgagaccgggggcctcacgatgcggcgaagcgtgcagtcctgaagaagtggtcacagctagagcgtccagattcgttcgattcttgcgacacttaccactcccataacttctcgaacgccatgttccttgggggtactctctcatcgaagaatggcttcaagctccagggcggtcataatcaagaagagaaggtcgagtactcgggccctttgttgtcccagtcgcacaaggtcgatgaactgttgcagaagaacgagcgccacatccggcaagctgttcgaacatcatggttcaggagagctgtttgattgtgtggtcacaggaagaaaggtggacaagtgaggaaaagcttgaccatttctttccatgggagggcttgtgacgcttagagaaaggggagagcatgtcattagcttctgatgggcctctgctgccaatctgggaagcgggcaattgctgctgacgagtccattgttaactgaaaacatcatcaactttggtgatcctatctcacagcaaaacaaaattagctactgtgccttgctgcttctggggtttgttgtagattccccgaagtgccgtatccttttttttttgttgtacagagaaatattagcggctgactgacggggcggtgtggttgaacagaagattgtgtagttggaataaccagtaactaagctgcacaacatgcatggtgcggttgtagtaaaggcagcctctgaagaaaatgagaagtgaaatccaataactgttcgttgtc

SEQ ID NO: 109244 - DNA, 3217 bp, Zea Mays
cagttgctgctgctgctgccgcttctccggccaatatcggtgcctaaccttttcagtcccggcggcgcggcagggcgggtttcgccgttcttggctgccgcgccgtcattcttgttctggcggtttcgtgatctgcccccgcgcagcgtctgctctgcggtcgcggaaacgccgtgccttctccgcgcgtccgctcgataacccctgcgtctccgccccgccccgcccgaccacgccttgcggaagcgtcgccgtcgtggtccgtcgacgggagcgcgcggtcagtggagctgcgtcaacagagtcgcgcactgctttgttttggtgatggctcgcgtcgcgtcgcgtcgcgtcttgatggaatcattaactagtcttccaggtcaatcccgtcgtgttcttgactactagtgccgtgttcgacccgtgacgcctgtggttggcgggcggaaggggtcaagctttccgatcttcattctttatttacaccgcggcagccggctctcagtctcagcccaatgctggcgtgagggaggggggtttgggagcggacaggggagacgattcttgaagaagatcacgcgctgatcttggcccgtgtccgtccgtgcgcgacctcggcgtatggttggtggcgattggcagtgctggtagcgcgccgccgccatgggctgcgtcgcgtccaagaacaccgtctcggtgacgccggcggccgactcgtccggcgggctcagggatcggagccatccgcgcgctcaggagtctgctgctcctgtgccgttgcccgtgcccgtgccttccctgcgtagctcgtcgtccgcggcgaggaggtcggagaaggtcaaggacgacgcggaggagccagggaaggccgtcgtagccgtggcggcgtcgtcccggagcttccgcctgcggagcctgcggaagagccttgagggtgagcaggtggctgccgggtggccgccgtggctcagcgccgtcgccggggaggccatccaggggtggatcccgctcaaggccgactccttcgagaagctggagaaggttgggcaaggcacatacagcagtgtattcagggcaagagaccttgagactggaaagatcgttgccttgaagaaggttcggttcgacaattttgagccagagagtgttagattcatggcaagggagatacaaatattgagaagacttgatcatccaaatgtcatgaaactggaaggcttgattacttcccggttatcgtgcagcctttatctagtatttgaatacatggagcatgatcttgcaggactttgctcctccccggacatcaaattcactgaagcacagctcaagtgctacatgaaccagttactgtcaggactggagcattgccattcacgacatgtggttcatcgtgatatcaagggtgctaatctccttgtgaataatgaaggggttctaaagatagctgattttggtcttgcaaatttctttgatcccagcaaaaaccatcctctgaccagccgtgttgttactctgtggtaccgaccacctgaactgctactaggttcaactcactatgatgcagctgtagatttgtggagtgttgggtgtgtgtttcctgagatgtatcgtgggaaacctatcctgcagggaagaaccgaggtggaacaactacacaagatttttaaactatgtggttcacctgctgatgattattggaagaaatcaaagttgcctcatgcaacaatatttaaaccacatcatccatatactagtaccctacgagatgtttttaaagagttaccagaaaatgcattgagtttactagaaactcttctgtcggtggagccctacaagcgtggtactgcatcaggtgctctttcctctgagtttttcaggacaaaaccttatgcgtgcgaaccttcgagcttgcctaattatgcacctaacaaggagatggatgcaaagttacgagagaatgcactcagaagaaaagcaagtagcagagggcacgggacagaagcatccaagaagtcttcaaggctcagtagagcagcaagagaacctagtgcagtccctaagcagataataagtagaacagaggaatccaaaactaatgtgaatgcaaccaaagatggtacaacacaggaccgtgcgaaactgaatggcgatgctaggctatttgtggacatacaaccagtgtcagcggctcaagttaaagagagtgctcgccacgttaagaatgaatcacgagagcaaatacctttctccgggccattgagtgtttcttcatctagtggctttgcatgggccagaagaccacatgaggaccgttcctttgctagatcacggaccagatctagctcaaggggccagtttcctgctgatgctgttcagggatgtaatacccaagctaaagagaatgctggccttagggagctgcatagcagagacatacctgtatcagtatcacacgtcggttccagagtccgagaccgggggcctcacgatgcggcgaagcgtgcagtcctgaagaagtggtcacagctagagcgtccagattcgttcgattcttgcgacacttaccactcccataacttctcgaacgccatgttccttgggggtactctctcatcgaagaatggcttcaagctccagggcggtcataatcaagaagagaaggtcgagtactcgggccctttgttgtcccagtcgcacaaggtcgatgaactgttgcagaagaacgagcgccacatccggcaagctgttcgaacatcatggttcaggagaggaagaaaggtggacaagtgaggaaaagcttgaccatttctttccatgggagggcttgtgacgcttagagaaaggggagagcatgtcattagcttctgatgggcctctgctgccaatctgggaagcgggcaattgctgctgacgagtccattgttaactgaaaacatcatcaactttggtgatcctatctcacagcaaaacaaaattagctactgtgccttgctgcttctggggtttgttgtagattccccgaagtgccgtatccttttttttttgttgtacagagaaatattagcggctgactgacggggcggtgtggttgaacagaagattgtgtagttggaataaccagtaactaagctgcacaacatgcatggtgcggttgtagtaaaggcagcctctgaagaaaatgagaagtgaaatccaataactgttcgttgtc

SEQ ID NO: 109245 - DNA, 3272 bp, Zea Mays
cagttgctgctgctgctgccgcttctccggccaatatcggtgcctaaccttttcagtcccggcggcgcggcagggcgggtttcgccgttcttggctgccgcgccgtcattcttgttctggcggtttcgtgatctgcccccgcgcagcgtctgctctgcggtcgcggaaacgccgtgccttctccgcgcgtccgctcgataacccctgcgtctccgccccgccccgcccgaccacgccttgcggaagcgtcgccgtcgtggtccgtcgacgggagcgcgcggtcagtggagctgcgtcaacagagtcgcgcactgctttgttttggtgatggctcgcgtcgcgtcgcgtcgcgtcttgatggaatcattaactagtcttccaggtcaatcccgtcgtgttcttgactactagtgccgtgttcgacccgtgacgcctgtggttggcgggcggaaggggtcaagctttccgatcttcattctttatttacaccgcggcagccggctctcagtctcagcccaatgctggcgtgagggaggggggtttgggagcggacaggggagacgattcttgaagaagatcacgcgctgatcttggcccgtgtccgtccgtgcgcgacctcggcgtatggttggtggcgattggcagtgctggtagcgcgccgccgccatgggctgcgtcgcgtccaagaacaccgtctcggtgacgccggcggccgactcgtccggcgggctcagggatcggagccatccgcgcgctcaggagtctgctgctcctgtgccgttgcccgtgcccgtgccttccctgcgtagctcgtcgtccgcggcgaggaggtcggagaaggtcaaggacgacgcggaggagccagggaaggccgtcgtagccgtggcggcgtcgtcccggagcttccgcctgcggagcctgcggaagagccttgagggtgagcaggtggctgccgggtggccgccgtggctcagcgccgtcgccggggaggccatccaggggtggatcccgctcaaggccgactccttcgagaagctggagaaggttgggcaaggcacatacagcagtgtattcagggcaagagaccttgagactggaaagatcgttgccttgaagaaggttcggttcgacaattttgagccagagagtgttagattcatggcaagggagatacaaatattgagaagacttgatcatccaaatgtcatgaaactggaaggcttgattacttcccggttatcgtgcagcctttatctagtatttgaatacatggagcatgatcttgcaggactttgctcctccccggacatcaaattcactgaagcacagctcaagtgctacatgaaccagttactgtcaggactggagcattgccattcacgacatgtggttcatcgtgatatcaagggtgctaatctccttgtgaataatgaaggggttctaaagatagctgattttggtcttgcaaatttctttgatcccagcaaaaaccatcctctgaccagccgtgttgttactctgtggtaccgaccacctgaactgctactaggttcaactcactatgatgcagctgtagatttgtggagtgttgggtgtgtgtttcctgagatgtatcgtgggaaacctatcctgcagggaagaaccgaggtggaacaactacacaagatttttaaactatgtggttcacctgctgatgattattggaagaaatcaaagttgcctcatgcaacaatatttaaaccacatcatccatatactagtaccctacgagatgtttttaaagagttaccagaaaatgcattgagtttactagaaactcttctgtcggtggagccctacaagcgtggtactgcatcaggtgctctttcctctgagtttttcaggacaaaaccttatgcgtgcgaaccttcgagcttgcctaattatgcacctaacaaggagatggatgcaaagttacgagagaatgcactcagaagaaaagcaagtagcagagggcacgggacagaagcatccaagaagtcttcaaggctcagtagagcagcaagagaacctagtgcagtccctaagcagataataagtagaacagaggaatccaaaactaatgtgaatgcaaccaaagatggtacaacacaggaccgtgcgaaactgaatggcgatgctaggctatttgtggacatacaaccagtgtcagcggctcaagttaaagagagtgctcgccacgttaagaatgaatcacgagagcaaatacctttctccgggccattgagtgtttcttcatctagtggctttgcatgggccagaagaccacatgaggaccgttcctttgctagatcacggaccagatctagctcaaggggccagtttcctgctgatgctgttcagggatgtaatacccaagctaaagagaatgctggccttagggagctgcatagcagagacatacctgtatcagtatcacacgtcggttccagagtccgagaccgggggcctcacgatgcggcgaagcgtgcagtcctgaagaagtggtcacagctagagcgtccagattcgttcgattcttgcgacacttaccactcccataacttctcgaacgccatgttccttgggggtactctctcatcgaagaatggcttcaagctccagggcggtcataatcaagaagagaaggtcgagtactcgggccctttgttgtcccagtcgcacaaggtcgatgaactgttgcagaagaacgagcgccacatccggcaagctgttcgaacatcatggttcaggagaggtaaccgtgtttcggaatctgtatatatgtaccttctctctctctctctctctctctctctctctctctctctctctctctctctctctctctctctctctctctctctctctctctctctctctctctctctctctctctttcatcgctcctgcttgatcttctactgatcatgtgtgaatagctgtttgattgtgtggtcacaggaagaaaggtggacaagtgaggaaaagcttgaccatttctttccatgggagggcttgtgacgcttagagaaaggggagagcatgtcattagcttctgatgggcctctgctgccaatctgggaagcgggcaattgctgctgacgagtccattgttaactgaaaacatcatcaactttggtgatcctatctcacagcaaaacaaaattagctactgtgccttgctgcttctggggtttgttgtagattccccgaagtgccgtatccttttttttttgttgtacagagaaata

SEQ ID NO: 109246 - DNA, 1322 bp, Zea Mays
attgaaaagttatatttcctatttattgataaaaccaatttgttgtcaaaatgaagtttcttttggtttgggaattctttgtcaaagagaattacccacttgttctgcaattaccaagcaggttctctcttttttaactctaaaccttgaaaatcttctgtggtatcataccctactttattttagggtgtcatcctaagttgatagtaagcttctgatggatttgagtgatataccagcaacagttcatgaggatgtgcctgaaactatttgaaatttccttgctcctaagtcctattgcacactcgttgctgtttcattgtgtttgtttgttgaatatggttgataaaaaaacttatgatacaggttgtggaggtttctacctccaagactggtaagcatggccacgccaaatgccactttgtcgccatagacatattcaatgggaaaaagcttgaagatattgttccttcatcacacaactgtgacgtaagttaatttctgtctgttctctgtttagctaaagttattttgatagttcacttcatatgttactgacaagttcaatattttttagattccgcatgtgaaccgtactgagtatcagctgattgatatttctgaggatggatttgtgagccttcttacttcagatggcaacactaaggatgatcttagactcccaactgatgagactcttgtggcccagattaaggaagggttcgaaagcgggaaggatcttgttgtgactgtccagtctgcgatgggggaggagcagatctgcgcgctgaaggatgttggccccaagtaacttccttggctttggagacggaaccctactctatctcaacttaaatcggaaaagaagtgtatcaccaaaggattgctaccgagacattcacctggcttgagctggcttttgctatagcgtgcaaggggttgctgggtgtcgtacctacctgacttatcattatctgtggttacattctggaccctgtattttctatgctttcatgtctctctactttctagtattaattatcaataagttggtttggaatggttgaattgcatccaatgcatgaagtttctttggttacctttctctttgctcgattgttctgcttccagtgttggtgtatactgtagtttctgagtattctctttgcgcctggggatccagaactggttttcggctttctactttcgattgtgcttcttacagtattacgggactctttggcttgggctttccgtgcaagcagctttttttcgagacagacttctaggctgttttgcaaaataaaacatgtctggttaag

SEQ ID NO: 109247 - DNA, 1432 bp, Zea Mays
aggagacgctgaaagggaagtggaaagtcttgagggaatgaaaaggaaagaaagcaaagaggggaaaaaaggcgagcaaaaggaggcggaaacatgctttcagccgtccgtggcgtgattcaaacgcgagaagatgccctgcccctgcagccgtacacggtccgatcacctgaccgaactgacggctcagatttgctcaacatctgcactataagtcgttccaccgacatgcgggcccgttatacatagaaccccacagtcagtgagacacatggtcttctctctggtggaagcggtgggtgcacatgctgctagcagtataaatatgctgaaagcctgaaaccctaggcgaagcttatcgcttatcatccgcgcctctacatttcttctctctctgctcctccgcctccgcctgatccatccaagacagggatcgccatgtcggactcggaggagcaccacttcgaatcgaaggccgacgctggggcgtccaagacctacccgcagcaggctggcaccgtccgtaagaacggcttcatcgtcatcaagaaccgtccctgcaaggttgtggaggtttctacctccaagactggtaagcatggccacgccaaatgccactttgtcgccatagacatattcaatgggaaaaagcttgaagatattgttccttcatcacacaactgtgacattccgcatgtgaaccgtactgagtatcagctgattgatatttctgaggatggatttgtgagccttcttacttcagatggcaacactaaggatgatcttagactcccaactgatgagactcttgtggcccagattaaggaagggttcgaaagcgggaaggatcttgttgtgactgtccagtctgcgatgggggaggagcagatctgcgcgctgaaggatgttggccccaagtaacttccttggctttggagacggaaccctactctatctcaacttaaatcggaaaagaagtgtatcaccaaaggattgctaccgagacattcacctggcttgagctggcttttgctatagcgtgcaaggggttgctgggtgtcgtacctacctgacttatcattatctgtggttacattctggaccctgtattttctatgctttcatgtctctctactttctagtattaattatcaataagttggtttggaatggttgaattgcatccaatgcatgaagtttctttggttacctttctctttgctcgattgttctgcttccagtgttggtgtatactgtagtttctgagtattctctttgcgcctggggatccagaactggttttcggctttctactttcgattgtgcttcttacagtattacgggactctttggcttgggctttccgtgcaagcagctttttttcgagacagacttctaggctgttttgcaaaataaaacatgtctggttaag

SEQ ID NO: 109248 - DNA, 1286 bp, Zea Mays
aggagacgctgaaagggaagtggaaagtcttgagggaatgaaaaggaaagaaagcaaagaggggaaaaaaggcgagcaaaaggaggcggaaacatgctttcagccgtccgtggcgtgattcaaacgcgagaagatgccctgcccctgcagccgtacacggtccgatcacctgaccgaactgacggctcagatttgctcaacatctgcactataagtcgttccaccgacatgcgggcccgttatacatagaaccccacagtcagtgagacacatggtcttctctctggtggaagcggtgggtgcacatgctgctagcagtataaatatgctgaaagcctgaaaccctaggcgaagcttatcgcttatcatccgcgcctctacatttcttctctctctgctcctccgcctccgcctgatccatccaagacagggatcgccatgtcggactcggaggagcaccacttcgaatcgaaggccgacgctggggcgtccaagacctacccgcagcaggctggcaccgtccgtaagaacggcttcatcgtcatcaagaaccgtccctgcaaggttgtggaggtttctacctccaagactggtaagcgtgagccttcttacttcagatggcaacactaaggatgatcttagactcccaactgatgagactcttgtggcccagattaaggaagggttcgaaagcgggaaggatcttgttgtgactgtccagtctgcgatgggggaggagcagatctgcgcgctgaaggatgttggccccaagtaacttccttggctttggagacggaaccctactctatctcaacttaaatcggaaaagaagtgtatcaccaaaggattgctaccgagacattcacctggcttgagctggcttttgctatagcgtgcaaggggttgctgggtgtcgtacctacctgacttatcattatctgtggttacattctggaccctgtattttctatgctttcatgtctctctactttctagtattaattatcaataagttggtttggaatggttgaattgcatccaatgcatgaagtttctttggttacctttctctttgctcgattgttctgcttccagtgttggtgtatactgtagtttctgagtattctctttgcgcctggggatccagaactggttttcggctttctactttcgattgtgcttcttacagtattacgggactctttggcttgggctttccgtgcaagcagctttttttcgagacagacttctaggctgttttgcaaaataaaacatgtctggttaag

SEQ ID NO: 109249 - DNA, 5169 bp, Zea Mays
atggataatgacaatggcgatgtggatgacctgggttcagggtggtttgaagtgaaaaagaaacatcggtccagctcaaaatacacattgcagaggtcttcaggtggttccagccataaaattccaaacttactatcacggtcaggtgctaacagtgacagttcaaggtggcatgacaaactgcaacacccatctccgagcataaatgctaatgttggtgttgatgggtctggtagtggagagacaacaaatgttcatggtgaagggtgcaatgatgtaagcaccagccccagtggcctgaatagtggcttaaatgcttcagcctcagaggatagagtagaaagacttgaagaactggcggtggctgaaaaaacaagtgaatctcccgaaaatgatctggctgatcatgcagatccttcactgcctcatgaaccatccacctgttcaggcagtcctgcaaaatgcgcagatctttctcagcatgtaaaatgttctccaaaaacagagtctgtaggtgttttgtccattactcctgtcaagtttggagactttgatgaagttccaggtctatcattaccttcagattcatacagagacaataatacttctagaggccacagacatactgaagatgttgcacatttaaaaaatgtgcaaaaagatgcaagtgaactcaaaccggagacagacacttgtactacaattgatgaggcatctccaattatggtacaaggaacagagacacccaatcatgatagtggtttgatagcctcagttgattctgttaccctatcctgctccaaaaatgatcatgaagttccagttacatcttcatctgttcctgttgcttccatggaaggtagaacgttacttcatgacgaagcaccagcttctgcagattttggatctgaaactgctgagagcaaagaaagattcaggcagaggctatggtgttttctttttgagaatctgaatagggctgttgatgaactttacctcctctgtgaactagaatgtgacatggaacagattaatgaatccatacttgtccttgaagaagctatttctgattttcaagaacttaaatccagagcagagcattttgataataccaaaaaatctcctggtgtaccaaaggagggcatgccaatggctgtgaaagctgaccataggagacctcatgccttgtcttgggaggtcagaagaatgacaagttctccacacaggcaagaaatactgtcttcatctctagaggccttccagagaatccaattggaactggcatgcaagcaggctggtatagcagcagaaagatttacatccagctcttctgaaaaagttttgggtagttcatcaaagctgactacagcatcggcaactgttaggaatataagtttgaaagttgagagtcaggtgaaacttcctgataccagcgtgaaaaagattgctggcgagaagctaagtagggatgcattcaagtctggtaagtcgtatccacaaagtatgccttcatattctgcaaggagtagaagagggtcattagaaccaatctctgaaatagagaaacacacctttaagaaggacagggagttgctagaaaacaaatttgacaggctcaagtcaaccgatgttgttaaaaagactacagctcatcttgaaaaggaaaagcaaattacagcaccttggaagtccatggatgcctggaaggagaaaagaaactgggaagatatactgaaatctcctgtacggagttctcgtgtttctcactctccaggtgttggaagaaaagttacagaccgcgctcgtgttctacatgacaagttgatgtctcctgaaaagaaaaaaagaagtgctttggatatgaaaaaagaagcagaagaaaagcatgcgcgtgcactgcgaattaggagtcaactagagagcgagagggttcagaggctacaacgtacctctgaaaagttgcatcgtgtcaatgagtggcaggctgtacgcagctcaaaactgagagaagtaatgaatgcacgtcatcaacgtggtgaatctcgtcacgaagcatatcttgctcaggttgcaaaaagagctggtgatgagagtactaaggtcaatgaggtccgttttataacatcactgaatgaagaaaacaagaaattcttgctgaggcagaaacttcatgattctgagatgcggagagctgaaaagctacaggtgatcaaaacaaagcaaaaggaggacactgcaagggaagaagctgttttggagcgaaggaagttccttgaagctgagaagatgcaacgccttgctgaaatacagcgcaagaaagaagaagctattttcagaagagaagaggagcgcaaagcatctagtgctgcacgggaagcaagggctgcagaacaacaacgtcgaaaagagataagagcaaaagcgcaacaagaggaagctgaacttttagcccaaaagttagctgaaaaacttcgtgaaagtgagcagcggcgcaagtattacctagaacaaatacgagagcgagcctcaatggatcttagggatcagccttcaccttttcagcgtcgctttccaagtaaagattgccaaaaccgttctagttctgctaacagcggagaagattcacagacaactggcaattccagtgctgcagattctatggttaagtcatcgaataatgcacagataaaacgaaggattaaaaagattcgccagagattaatggctctaaagcatgaatttattgaaccatccataggtgaaagtacaggaatcacgcacaggtctggtcttggagctgccaaagctaagctaagtagatggcttcaagaccttcagagacttcgtcaagctagaaaagaaggtgctgccagtattggattgattgtcagtgacatagcgaagtatttagaagggaaggatcttgagctgcatgcatcaagacaagttggtttgcttgactttattgcgtctgcattacctgcgtcacatacttcaaagcctggagcttgtcaagtcactgtctaccttttgcgcctgttgagagtgttgctctcacttccagctaatcgaacttattttctagtacaaaatcttttacccccaattattcccatgctatcagcatcactggagaattatattaaggtggcagcatccaactctggaagttcaaatcttttgtctaataaaacatcagctgagactacagagtcatcgggtgaagtgttagatggatttttatggactgtggccatgatcgttggccatgtacacatcaatggtgaacaacttcaaatgcagggaggtttgatagaactgattgtagcttatcaaataattcatcgtctgcgagatctgtttgcactttatgataggccacaggtggaaggatccccactcccatcatctatactgtttggcctcaaccttttgtccgtattaacatccaaaccgggaaatttctctactatcgattgggagtcctgcaaatgcaggacactaggtggaaatatagtgcaagaatatgaatatcttagttcacaggacagtttggggtgtcaatcaatgacacttgatcagtttggtgatgccaaatcgccaaccatatacagtgaactggctgaagatagcaaatcctgtaaacaacatgacttgagcattcctgtggacagaaaattggttgatgaagctagtaaagacttgttagtgatggctgctggcctgaacaactcagcaatgcaaccatctgatttgggcattactacagagaagcattctggaaatcctagccagggagatgaaaataacacagtggacagttttcttgaaggaagaaagacgaataatgtatgtgcattgtatagtagttcaggaaaaggcaatgagatgaaccttaagcagcctgcaatgctcttactttctgcactggctgagactggccttgttactctaccatcacttttgactgctgtgttgctccaggcaaacaacaacaggtcatcatcagagcagacattggcgattcttccatcaaattttgaagaagtagccactggtgtattgaaagttttgaataatatggcacgtttggatataacccttttgcagcacatgctgtctagatcagatctaaagatggagttcttccatttaatcagcttccttttgagtcattgcatgaacaaatggagagtgccaaacgatcaggaagttgatgacttggggagttggggtactggatcatgttatagtttctgccaggcttgaccatttgtgacccttttggatattattaccaagaaatttggacatactgccattttacacctgaatctcatggttggtttgctgcttctagagtctctgctacttcttggctacttttctttgttccatgctgggaaccaagctgttcttcggtggggaaagagtcccactatacttcacaaggtgtgcgacctgccatttgttttcttcagcgaccccgagttgatgcccatcttggctgctgctctgatcgctgtttgctacggttgcgatcagaacctaagcgttgtacagcaggaaataagcacggatatgctgcgctgcttgctcaagtcctgccaaacttcaggatcaaattctccagattccattgctgtggatggttctggaaacaattccactgaaagcattctggatatcaggaactcacagggtgacatcccaacaaggtcaagccgcaaaattggacggccagttattgggaagggtgtttcagggggtatcagattcaacagaaataaggttcagaaggatggtaggggaacaagagcaattgacgatgggcctctgaagcaaagagctcaagaagctgcatcgaacttcatgttgcatagaaagatcccagcttcttttttggacagagccgaggagttcttctgcagtgagacatgaaatcggccctgtggttcgcctaacttgtatggcacgagctactgaatttactgttttgcaaggatggtgtttcctgacctgatattttgatcgaatctgtagtctacagattaaaaaaatgagtcatgtacggaaacgaatgcactgtttgtacagaaacacagaagaaaaaactgataagagaatctgatttcgtatgaaagaaaggaactgtccataatttactta

SEQ ID NO: 109250 - DNA, 4947 bp, Zea Mays
atggataatgacaatggcgatgtggatgacctgggttcagggtggtttgaagtgaaaaagaaacatcggtccagctcaaaatacacattgcagaggtcttcaggtggttccagccataaaattccaaacttactatcacggtcaggtgctaacagtgacagttcaaggtggcatgacaaactgcaacacccatctccgagcataaatgctaatgttggtgttgatgggtctggtagtggagagacaacaaatgttcatggtgaagggtgcaatgatgtaagcaccagccccagtggcctgaatagtggcttaaatgcttcagcctcagaggatagagtagaaagacttgaagaactggcggtggctgaaaaaacaagtgaatctcccgaaaatgatctggctgatcatgcagatccttcactgcctcatgaaccatccacctgttcaggcagtcctgcaaaatgcgcagatctttctcagcatgtaaaatgttctccaaaaacagagtctgtaggtgttttgtccattactcctgtcaagtttggagactttgatgaagttccaggtctatcattaccttcagattcatacagagacaataatacttctagaggccacagacatactgaagatgttgcacatttaaaaaatgtgcaaaaagatgcaagtgaactcaaaccggagacagacacttgtactacaattgatgaggcatctccaattatggtacaaggaacagagacacccaatcatgatagtggtttgatagcctcagttgattctgttaccctatcctgctccaaaaatgatcatgaagttccagttacatcttcatctgttcctgttgcttccatggaaggtagaacgttacttcatgacgaagcaccagcttctgcagattttggatctgaaactgctgagagcaaagaaagattcaggcagaggctatggtgttttctttttgagaatctgaatagggctgttgatgaactttacctcctctgtgaactagaatgtgacatggaacagattaatgaatccatacttgtccttgaagaagctatttctgattttcaagaacttaaatccagagcagagcattttgataataccaaaaaatctcctggtgtaccaaaggagggcatgccaatggctgtgaaagctgaccataggagacctcatgccttgtcttgggaggtcagaagaatgacaagttctccacacaggcaagaaatactgtcttcatctctagaggccttccagagaatccaattggaactggcatgcaagcaggctggtatagcagcagaaagatttacatccagctcttctgaaaaagttttgggtagttcatcaaagctgactacagcatcggcaactgttaggaatataagtttgaaagttgagagtcaggtgaaacttcctgataccagcgtgaaaaagattgctggcgagaagctaagtagggatgcattcaagtctggtaagtcgtatccacaaagtatgccttcatattctgcaaggagtagaagagggtcattagaaccaatctctgaaatagagaaacacacctttaagaaggacagggagttgctagaaaacaaatttgacaggctcaagtcaaccgatgttgttaaaaagactacagctcatcttgaaaaggaaaagcaaattacagcaccttggaagtccatggatgcctggaaggagaaaagaaactgggaagatatactgaaatctcctgtacggagttctcgtgtttctcactctccaggtgttggaagaaaagttacagaccgcgctcgtgttctacatgacaagttgatgtctcctgaaaagaaaaaaagaagtgctttggatatgaaaaaagaagcagaagaaaagcatgcgcgtgcactgcgaattaggagtcaactagagagcgagagggttcagaggctacaacgtacctctgaaaagttgcatcgtgtcaatgagtggcaggctgtacgcagctcaaaactgagagaagtaatgaatgcacgtcatcaacgtggtgaatctcgtcacgaagcatatcttgctcaggttgcaaaaagagctggtgatgagagtactaaggtcaatgaggtccgttttataacatcactgaatgaagaaaacaagaaattcttgctgaggcagaaacttcatgattctgagatgcggagagctgaaaagctacaggtgatcaaaacaaagcaaaaggaggacactgcaagggaagaagctgttttggagcgaaggaagttccttgaagctgagaagatgcaacgccttgctgaaatacagcgcaagaaagaagaagctattttcagaagagaagaggagcgcaaagcatctagtgctgcacgggaagcaagggctgcagaacaacaacgtcgaaaagagataagagcaaaagcgcaacaagaggaagctgaacttttagcccaaaagttagctgaaaaacttcgtgaaagtgagcagcggcgcaagtattacctagaacaaatacgagagcgagcctcaatggatcttagggatcagccttcaccttttcagcgtcgctttccaagtaaagattgccaaaaccgttctagttctgctaacagcggagaagattcacagacaactggcaattccagtgctgcagattctatggttaagtcatcgaataatgcacagataaaacgaaggattaaaaagattcgccagagattaatggctctaaagcatgaatttattgaaccatccataggtgaaagtacaggaatcacgcacaggtctggtcttggagctgccaaagctaagctaagtagatggcttcaagaccttcagagacttcgtcaagctagaaaagaaggtgctgccagtattggattgattgtcagtgacatagcgaagtatttagaagggaaggatcttgagctgcatgcatcaagacaagttggtttgcttgactttattgcgtctgcattacctgcgtcacatacttcaaagcctggagcttgtcaagtcactgtctaccttttgcgcctgttgagagtgttgctctcacttccagctaatcgaacttattttctagtacaaaatcttttacccccaattattcccatgctatcagcatcactggagaattatattaaggtggcagcatccaactctggaagttcaaatcttttgtctaataaaacatcagctgagactacagagtcatcgggtgaagtgttagatggatttttatggactgtggccatgatcgttggccatgtacacatcaatggtgaacaacttcaaatgcagggaggtttgatagaactgattgtagcttatcaaataattcatcgtctgcgagatctgtttgcactttatgataggccacaggtggaaggatccccactcccatcatctatactgtttggcctcaaccttttgtccgtattaacatccaaaccgggaaatttctctactatcgattgggagtcctgcaaatgcaggacactaggtggaaatatagtgcaagaatatgaatatcttagttcacaggacagtttggggtgtcaatcaatgacacttgatcagtttggtgatgccaaatcgccaaccatatacagtgaactggctgaagatagcaaatcctgtaaacaacatgacttgagcattcctgtggacagaaaattggttgatgaagctagtaaagacttgttagtgatggctgctggcctgaacaactcagcaatgcaaccatctgatttgggcattactacagagaagcattctggaaatcctagccagggagatgaaaataacacagtggacagttttcttgaaggaagaaagacgaataatgtatgtgcattgtatagtagttcaggaaaaggcaatgagatgaaccttaagcagcctgcaatgctcttactttctgcactggctgagactggccttgttactctaccatcacttttgactgctgtgttgctccaggcaaacaacaacaggtcatcatcagagcagacattggcgattcttccatcaaattttgaagaagtagccactggtgtattgaaagttttgaataatatggcacgtttggatataacccttttgcagcacatgctgtctagatcagatctaaagatggagttcttccatttaatcagcttccttttgagtcattgcatgaacaaatggagagtgccaaacgatcaggttggtttgctgcttctagagtctctgctacttcttggctacttttctttgttccatgctgggaaccaagctgttcttcggtggggaaagagtcccactatacttcacaaggtgtgcgacctgccatttgttttcttcagcgaccccgagttgatgcccatcttggctgctgctctgatcgctgtttgctacggttgcgatcagaacctaagcgttgtacagcaggaaataagcacggatatgctgcgctgcttgctcaagtcctgccaaacttcaggatcaaattctccagattccattgctgtggatggttctggaaacaattccactgaaagcattctggatatcaggaactcacagggtgacatcccaacaaggtcaagccgcaaaattggacggccagttattgggaagggtgtttcagggggtatcagattcaacagaaataaggttcagaaggatggtaggggaacaagagcaattgacgatgggcctctgaagcaaagagctcaagaagctgcatcgaacttcatgttgcatagaaagatcccagcttcttttttggacagagccgaggagttcttctgcagtgagacatgaaatcggccctgtggttcgcctaacttgtatggcacgagctactgaatttactgttttgcaaggatggtgtttcctgacctgatattttgatcgaatctgtagtctacagattaaaaaaatgagtcatgtacggaaacg

SEQ ID NO: 109251 - DNA, 1161 bp, Zea Mays
tgcacattcaattcttgtctataatggtagcaagttccacctgtgtagtttgccgtatatctgactacgtggcagtttttgtcactttaggaggcattagaatatagttactagttttttattaactatgatcttgatactactcgtacttgaacaaatgtaatctctttttaatcaactatggtcttaatactatctttacttcttgaacaggcattttacattagaaatatgactaaaatagtgtgcatatatttgttataaaaagagtgtgcatataaaacgttccaccttataatgtccattatgaatgcatgttgtaggaagttgatgacttggggagttggggtactggatcatgttatagtttctgccaggcttgaccatttgtgacccttttggatattattaccaagaaatttggacatactgccattttacacctgaatctcatggttgactatttattgcactttccttctgaaatggctgcttttttacaactgcactttttgttcgctcccctgttctcaggtttaaggatttgtgcttattttttaggttggtttgctgcttctagagtctctgctacttcttggctacttttctttgttccatgctgggaaccaagctgttcttcggtggggaaagagtcccactatacttcacaaggtgtgcgacctgccatttgttttcttcagcgaccccgagttgatgcccatcttggctgctgctctgatcgctgtttgctacggttgcgatcagaacctaagcgttgtacagcaggaaataagcacggatatgctgcgctgcttgctcaagtcctgccaaacttcaggatcaaattctccagattccattgctgtggatggttctggaaacaattccactgaaagcattctggatatcaggaactcacagggtgacatcccaacaaggtcaagccgcaaaattggacggccagttattgggaagggtgtttcagggggtatcagattcaacagaaataaggttcagaaggatggtaggggaacaagagcaattgacgatgggcctctgaagcaaagagctcaagaagctgcatcgaacttcatgttgcatagaaagatcccagcttcttttttggacagagccgaggagttcttctgcagtgagacatga

SEQ ID NO: 109252 - DNA, 1777 bp, Zea Mays
gtccatccttctccctcctaggctccgtcggtctctctctctctttccttatccccggcccgtggcccgtgctaacggtgattagggttccgaatcgtgtttaagcgctgcgaaatcacggctggggcttcgtcctcgagtcgtcgtcctgctggatgtcacctcgtgtcccgcgccgacgccagtgctcgtcctcggagccgcctctctccgacgatcgccggagacggatacggtcgaagccgtcactgcaggccgcgctcgtgcgtcgtagcagatgtctagtagctccaacggccattatcctgctaatggtgcaaagattcttcatagaaaagaaaagaataaagagaaagtacagctcgacaaaaattcagccacttgggtgtgccagaaggacaggcattatgttgaaaaattagaaacagaattgatgaactgctatcaggaaattgactatttgcaggatcagttaaatatacggagcgttgaagcaaacttcatgggagagcacattcacagtcttgaactgaagctgactgaacttgaaaagttcccagaaagagtgagagcgatggacaatgagctgatacgatctgattcccagtgctggcttctgatggaagaagtcagatgtaaagaagaggagttgcagaaggcagcctcacagatagagaagcttgaaagtacagctttagattcacaatgcgaaattgagagcttgaaacttgatttgactaatcttgagcagagactatttgacgctgagagattttcccaacatgctggtgagcacaaagctcaatttgacaaactactgggagaacatgagctccagctacatgaagcacagaaaactattcatcaacttgtatgggagaataagcaactgaaggagttgttgcctgtaagagctcctaaacaatctcctcctggatctggatggaaagttaacaaaacattggagaacggtgtgcatgcagaatgcgaaagtggcgatgtaattcttgaaaatatggcaaaacgaaatgaagaatctgaacttctaattgagcagctcaaggaagagcttcgagaacaaaagttaaaggcaaaagaggatgcggaagatctcacccaagaaatggctgaactaagataccagataacaggcatgcttgaggaagaatacaagcgtcgatcttgcattgagcaggcagctattaaacatattcaggagctggaaactcaggtttccaaagagaagacaaaactgagtggggcacttaagcgattgcaggaatcacatgaactagctcgcacacaagctatggagattaagaagttgaaggctgctttagagagattgaattcggtgacgaacctgggtacagtttgcaaatcttgctcttgcgggttctctgcaatgttggtagagctgtctaattgctcgatcgaaggaccttcaggcagcgccagatctctcaattccaaccacattgatgagaagtcacagaatcaggctctaatagagtggcgtccccgtgaagcctcagatgatgacggtgggtaggaagttagatgcctgtacattcatgtgtgcaattggccaactgttgtagataattctttgtattcaccattgttgcctgtaagactgtaaatgcatatgcatttgttgccttagctaacaatgggagttaagctccccaggaagtgaaaatgtcgccttaagatttcacgcatgtcatgaaatttaccagcaaggatctgtcatcacggtttttgatgcaaagac

SEQ ID NO: 109253 - DNA, 1768 bp, Zea Mays
gtccatccttctccctcctaggctccgtcggtctctctctctctttccttatccccggcccgtggcccgtgctaacggtgattagggttccgaatcgtgtttaagcgctgcgaaatcacggctggggcttcgtcctcgagtcgtcgtcctgctggatgtcacctcgtgtcccgcgccgacgccagtgctcgtcctcggagccgcctctctccgacgatcgccggagacggatacggtcgaagccgtcactgcaggccgcgctcgtgcgtcgtagcagatgtctagtagctccaacggccattatcctgctaatggtgcaaagattcttcatagaaaagaaaagaataaagagctcgacaaaaattcagccacttgggtgtgccagaaggacaggcattatgttgaaaaattagaaacagaattgatgaactgctatcaggaaattgactatttgcaggatcagttaaatatacggagcgttgaagcaaacttcatgggagagcacattcacagtcttgaactgaagctgactgaacttgaaaagttcccagaaagagtgagagcgatggacaatgagctgatacgatctgattcccagtgctggcttctgatggaagaagtcagatgtaaagaagaggagttgcagaaggcagcctcacagatagagaagcttgaaagtacagctttagattcacaatgcgaaattgagagcttgaaacttgatttgactaatcttgagcagagactatttgacgctgagagattttcccaacatgctggtgagcacaaagctcaatttgacaaactactgggagaacatgagctccagctacatgaagcacagaaaactattcatcaacttgtatgggagaataagcaactgaaggagttgttgcctgtaagagctcctaaacaatctcctcctggatctggatggaaagttaacaaaacattggagaacggtgtgcatgcagaatgcgaaagtggcgatgtaattcttgaaaatatggcaaaacgaaatgaagaatctgaacttctaattgagcagctcaaggaagagcttcgagaacaaaagttaaaggcaaaagaggatgcggaagatctcacccaagaaatggctgaactaagataccagataacaggcatgcttgaggaagaatacaagcgtcgatcttgcattgagcaggcagctattaaacatattcaggagctggaaactcaggtttccaaagagaagacaaaactgagtggggcacttaagcgattgcaggaatcacatgaactagctcgcacacaagctatggagattaagaagttgaaggctgctttagagagattgaattcggtgacgaacctgggtacagtttgcaaatcttgctcttgcgggttctctgcaatgttggtagagctgtctaattgctcgatcgaaggaccttcaggcagcgccagatctctcaattccaaccacattgatgagaagtcacagaatcaggctctaatagagtggcgtccccgtgaagcctcagatgatgacggtgggtaggaagttagatgcctgtacattcatgtgtgcaattggccaactgttgtagataattctttgtattcaccattgttgcctgtaagactgtaaatgcatatgcatttgttgccttagctaacaatgggagttaagctccccaggaagtgaaaatgtcgccttaagatttcacgcatgtcatgaaatttaccagcaaggatctgtcatcacggtttttgatgcaaagac

SEQ ID NO: 109254 - DNA, 1490 bp, Zea Mays
cttagcatcatttttgcattctcagttttttgtgcgctactgcagatgtctagtagctccaacggccattatcctgctaatggtgcaaagattcttcatagaaaagaaaagaataaagagaaagtacagctcgacaaaaattcagccacttgggtgtgccagaaggacaggcattatgttgaaaaattagaaacagaattgatgaactgctatcaggaaattgactatttgcaggatcagttaaatatacggagcgttgaagcaaacttcatgggagagcacattcacagtcttgaactgaagctgactgaacttgaaaagttcccagaaagagtgagagcgatggacaatgagctgatacgatctgattcccagtgctggcttctgatggaagaagtcagatgtaaagaagaggagttgcagaaggcagcctcacagatagagaagcttgaaagtacagctttagattcacaatgcgaaattgagagcttgaaacttgatttgactaatcttgagcagagactatttgacgctgagagattttcccaacatgctggtgagcacaaagctcaatttgacaaactactgggagaacatgagctccagctacatgaagcacagaaaactattcatcaacttgtatgggagaataagcaactgaaggagttgttgcctgtaagagctcctaaacaatctcctcctggatctggatggaaagttaacaaaacattggagaacggtgtgcatgcagaatgcgaaagtggcgatgtaattcttgaaaatatggcaaaacgaaatgaagaatctgaacttctaattgagcagctcaaggaagagcttcgagaacaaaagttaaaggcaaaagaggatgcggaagatctcacccaagaaatggctgaactaagataccagataacaggcatgcttgaggaagaatacaagcgtcgatcttgcattgagcaggcagctattaaacatattcaggagctggaaactcaggtttccaaagagaagacaaaactgagtggggcacttaagcgattgcaggaatcacatgaactagctcgcacacaagctatggagattaagaagttgaaggctgctttagagagattgaattcggtgacgaacctgggtacagtttgcaaatcttgctcttgcgggttctctgcaatgttggtagagctgtctaattgctcgatcgaaggaccttcaggcagcgccagatctctcaattccaaccacattgatgagaagtcacagaatcaggctctaatagagtggcgtccccgtgaagcctcagatgatgacggtgggtaggaagttagatgcctgtacattcatgtgtgcaattggccaactgttgtagataattctttgtattcaccattgttgcctgtaagactgtaaatgcatatgcatttgttgccttagctaacaatgggagttaagctccccaggaagtgaaaatgtcgccttaagatttcacg

SEQ ID NO: 109255 - DNA, 500 bp, Zea Mays
aacaaagaacaccagaggagagtggggatgagagagagagagagagagagagagagagagagagatggtgagtgagaaggcttgtccagtggtggacaagtgaacaacccccctctgcagtctgcacactgcactgcactgatcccacaccacatgccatcatacaacacatgcatgccaaatctatccagcagcacctattgctgcataaagatttgctgttccactgtcctagccaatcagtgtgtcaccaaaggccacatagcttgcagctccggagcttccatcactgtacccttccggcccctccccctctccttgcttgaagctgctccctgctgtttcagctggcacctagcaggctcacatactcgatacctggctccattgatctagcttgcacaacacaacggcttctaacctttacgcatagtagcgttgctttgcttcgctgtctgtctgtctgtcagagagagagagagagagagagagagagagag

SEQ ID NO: 109256 - DNA, 561 bp, Zea Mays
atgttagctactttcaggccagtcagtgagggtaggatcctcccaggattgtccggcagcgcggcgggggatgggcttcttgctggtagagggatcggagggcctggcgttcgcggcggcggcggggtcgaggacgtcgctggtggcgagagcagccttgacgctctgcagcgcctcgggggttatggtctgcgcgtcccgctggaagagctgatgcgcctgatgcagctgttgctggtactgttggtagctgctcgccgccataggcggcggcatctgcggctgcggctggtgctgctgcaggtggaaagggagagggaagtagctgggccccgccggcgccgaagacgccgacccaggaggcggcgggggaggaggattcataggcatgtaggcggatcgattcgggagtgtcccaaacgacgccgccgcgatcaaagcattagggtttactcgtcgctcgtcaagcgctaccgccaaatgctctcaccctcatctatgcgtctgccaccttccgcaagatctttctgctggctacagatttatgtttcggtggagtag

SEQ ID NO: 109257 - DNA, 1181 bp, Zea Mays
accacacaacgatctagctacttcctctctcaagcccataggtgttgtagagcaactcaactagcaatggcttccaagagtacaatgcgttcccttgtcctcatcatggggctcctgctgctctcgtgtagcggcatgagcagcgcggcgcggctgctggaggagatggcgcccaaggaggagtacccgcaccctgaagtgccagagctgcccaagcctgagctcccgccgcaccctacggtgccggaactccctaagcctgatgagctaccgccacatccggtcgtgccggagctgccaaagcctgaggtgccagtgcaccccgccgtgccggagttgccgaagcccgagataccgccacattcgaccgtgcctgagctgccgaagcccgagatgccggagctaccaaagcctgaggtgcctgagcaccccgccgtgccggagctgccgaagcccgagcttcctcctcaccccaccgtgcctgagctaccaaagcccgaggtgccggagctgccaaagcctgaggtgcctgagcaccccgccgtgccggagctgccgaagcacgagcttcctcctcaccccaccgtacctgagctaccaaagcccgaggtgccggagctgccaaagcctgaggtgcctgagcaccccgccgtgccggagctgccgaagcccgagcttcctcctcaccccaccgtgcctgagctgccgaagcccgaggtgcccgcgcacaccgcggtgccggagccggagccggagctgccaaagcatgagctgccacctctacctgaacccgagttgccattgccaccaaaggccgagagccactacccggtgccagggatggccaagccgtgatcggcctagcactacccggaggccggagctagagatgatcacgatgtgatcggcctgtattagtgaacacttcatgtatatgtatttacgtacgcatgctttatattttatactttgatgtctgcatgcgatgttgtggacgtgccccatgcacacaactcgctaggagcgtgatgatgtttgcagttattgcagtagtgtatttgtattccctttgtaattttgtatgtaactactagtatagtgcccgtgcgttgcgacggcaacgacatgtaaattgttcgataaaatattagttcacaatgattacaatattttatgacgat

SEQ ID NO: 109258 - DNA, 821 bp, Zea Mays
ccagcaggcaacacaacacaacgacatcacaggaagaaccaactatctacattaccacgtgatacacggagaaccatgccgtcctcctccctcgccttcctcatggcactgctgctgctctcttgtagcaccaccatgagtagcgcggcacggtacctggaggaggagaccaagcctgcaccgcatcccaccaccaccaccgtgccagagctccccaagcctgaactgcctccacaccctacagtgccggagctgcccaagcccgagctaccaccacaccctacgactgtgccggagttgcccaagcccgaactgccaccgcaccctgctgtgccggagctcccaaagcctgaactgccgcaccccgctgtgccggaggttccgaagcctgagctgccgcacccggagccggaggtgccaaagcctgaactgccgccaaaccccaccgtgccagaggtgccggagcacgtgccggtggtgccaaagcatgagttcccgccactgcccgagccggagctgccacccaagccggagagccactacccggccgtaccagatgccaagccatgatcgacctacgatcgacgtcagtgttgttgtttcaggaataaatagttgttgtcccagtgtctatgtgtattgtatgttgtaggatcagtagctagtgtgaccttcagtgttgtacgttgtgctgcatgctttgagatgtacctatatatctctattgccttgagtgtacaatatatacatgcatgtatattgagatttgagtcggtttccttcaaattacttatatatatatgctaactattttgtcttat

SEQ ID NO: 109259 - DNA, 302 bp, Zea Mays
ttgtttgaactaaatgaggcctttgcctctcagtttgtctattgctgcaacaagttggggctggaccgttccaaagtaaatgtaaatggaggcgtgattgcccttggacaccctctaggtgcaacaggtgcccggtgcgtggctactcttctaaatgaaatgaagcgctggagcagagactgcagatttggtgttgtcaccatgtgtatcggatctggaatgggggcaacaactgtgttcgagctgtgttcggcctggctggaggtatctgaaagggaaataggcttacaccttttcctatt

SEQ ID NO: 109260 - DNA, 318 bp, Zea Mays
tttaaacctctcctcatctcttctctcacctttctcaaccccgtctctcaccttcctacgaccagtcaagcgaagcgagccaacccagccatggagaaggcgatcgatcggcagcgggtcctcctggcgcacctcctcccctccccctccccctccgccacctcctcgcagcctcagcttgcggcgtcgtcgtgcgcggccggggacagcgccgcctaccagaggtcctcctccttcgaggacgatgtcgtcgtcgtcgcgcatgtgttcttcctgcccccaggagatctttttgtggcaattatgccagagtcgtga

SEQ ID NO: 109261 - DNA, 696 bp, Zea Mays
cttccctccttgaatataacatagaaatcttggtctccacatgtttgatccaaaactggcataccagacatcagttttcgataaatctgatcgccactcaagagataaatcagatatttttttggtcagcacaacagatgcattgttatgtacttttactgaatcaactggatgctgttctgctgctgagcaacttgagttagtcttcactgcaaggctgtcatcatcaagtttcatctttgagaggtgttcacttatagcaacaccagtagcttcaataacactgacagatgcaacagtgccaaggagctcatcaacatcttcactatcagattcagaatcagaagcggaatatacctcgcttggtgcaggcttaatcctcaatgatacattttctggcaacttgctactcagaacaggccagcatgtcttcaattcattgcgtacctagccaacgtgaaattcaaaagacaaagcgactataagtatccaaatagagtaaagaactagacagcaatagtgtatgcagaccattaccgcttgtattactctccatgtagattcaaatggttgcatctctggagtgttgaatgtgaatttgtctcccaagagaacttttgcacaagcacaaactgagttcgctatggacctaaggttataacctccttcaagggccatcactatccttccttgagc

SEQ ID NO: 109262 - DNA, 1867 bp, Zea Mays
tcctagtatgaatagccttccatgcatggttttaacaggcactttgtagaaacgatgagcaacctgttgcagtgtgcaccaaactgtttatattatggctctgtaagttttgggttttgttttgttatctgagtctcctattcatttcaggtaaatctgaggtttctgccattctttataaagccggagagtgcatgcaggagcttctgaaatcatggaaagattttgaagcaactcaggaggctacaaatgttgaaagtctacaaaacggtcctactcttgaaattcggatacctgccgaatttgttacttccactaatcgtcaagtaaagggtgctcaactttggggaacagatatatatacaaatgattcagatcttgtggctgtgctaatgcatactggctattgctcgcctacgtcctcccctcccccatctgccatccaagagcttcatgcaactgttcaagttctaccaccacaagagagttatacttcaacattgaggaacaacgtacgctcacgtgcttggggtgctgggattggttgtagcttccgcatagaacgctgctgcatagttaagaaaggcggtggcaccattgatcttgaaccacgccttagtcacacatcagctgtggagcctacacttgctccagttgcggttgagcgcacaatgacgacaagagctgcagcttccaatgcattgcgacaacaaagatttgtccgtgaagtgacaatacagtacaacctctgcaacgagccatggttaaaatatagtataagcattgtggcagacaagggattgaaaaagtcactttatacttctgctagactgaagaaaggagaagtaatatatttggagacacattttaataggtacgagctgtgcttcagtggagagaagcctcggggtattggatcgagctctaatgcatctgatgcagaacctgagaaacaccagagcagtagtcaccattcgcaaaacggctctgtggagcatgaactccgggatgtgttccgatggtcccggtgtaagaaggccatgcctgaaagtgccatgcgctccactggtatcccactaccagcagatcagctcgaggtgttgcaggataacctagaatgggaggacgtgcagtggtcgcagaccggtgtttgggtggctgggaaggagtatcccctcgcccgagttcacttcctctccgggaactagcagcagctgatgttgcagccaacgaaggagctatcgtttcctgtggacaggagaggagcttgccaacattgtaggtttttttttttgctactgtataatgtatgatgcaccctgtcatgtgtacaaagaaagctcaactgttgtaggctgtttgtgttgtgtggcattctactagtagtagtcttcacattaaccatatttgttagggttgcttgctcctgcccatgcctgaaagatatattgttggttttaggtcctgataaaataattggcgatttgtaacttaagattagtattgacattaattcaaggtagtaaacaaaccataactctaattttgtatattgacatactgttctgtggatgtcttcagttgctatggagaggcaccgtttattttctttttttttctgtgagaatgaggcagttcacaatgctgcagaatgaggcagttcacgatgctggatgtcaaagcttacggaataaccccttttccggctgcaatttatgcgacgatctagctaagatcgactaaaaaggaaaccatatagccgaacacttgagatgctccagcccactgtctcttttaaataagctagttgttggaagcctgttgacacgattcacttgtctgacgagaaaaatagaacttggcagca

SEQ ID NO: 109263 - DNA, 2945 bp, Zea Mays
gtgatttgtttgaaatttcttgtctataaataaaaagtaaagtaacttgactgccctgtgttgaacccatatttttcttgcagtgcactgcattaaaggcactgcgatccttccttttgtatctgggttattcttgaagaattaattttcactctggaggaaaaatgagtggtcctccaaagaggttgcatgaggagagtagccactctacacctgcaaagcggcctttggacgacaacagcttgtactcaagcccttctgggaaagctattcagtcaagcagcagtgatttccatggtttttttgaacatgatggtagatttgccaaaattcaacgtgttgaggctcgtgatgataagaggccaccccttgtccatcggatgcatggtagctccaactttgttgatcacaccgtcttgtctgacagcagattagaaccaaagcacaataaagatacaagggacaataaggcggatgatcgtgacacaaaagctgatgctcgggatgtctatagtgatcccagtattgagtttcagtttaataaaattgacagtgatgtaaaaatagacaatagagctgatggaaatgaaataagggctgacaggaggggtcaccacgattacaaaggtgatactaaatttgacaaggataatcatcctattgttgcatcgagcttaggctggaaagacaacaaagaacataggggcaaaaggtactttgagcagccatctgataatgcggattggcgtttcccccgtcccggtttgcaaggtactgatgaaactctcaaaggtctaacttccatggaagaccgtaattcaagagatgcacatgattctgcttttgacaacaaagctgaatcaaaaggtgaagataagtttagagacaaggataggaaaaagaaggatgagaaacatagagactttggttcaagagaaggtgagagaaatgatcgtcggaccggtatccagcttggaggtagtggagttgagcgaagagaaatgcaaagggaagagagggatgctgaaaaatgggacagggaaagaaaagattccttgagagacaaggaaggcaatgatagggaaaaggattctgctaagaaagatccatctatggtaatggaaaaggataacacaatagttgaaaaacttttatctgatggacctgttaaaaatgctgaacatgagaatacaacaacagaaactaaggtgcttaaggacgatgcatggaaaggtcatgacagggatcctaaagacaagaaaagagagaaggatttggatgcaggagacaggcatgagcaaagaagcaaatataatgacaaggaatcagatgataatggcaccgaaggtgatacagaaaaagataaagatgtttttggaagtgttcaacgcaggaggatggtgcgaccaaggggaggtggtagccaagcatctcaacgtgatccccgatttcgatcccgaacgcgtgatggcgaaggggctcaaggtaaatctgaggtttctgccattctttataaagccggagagtgcatgcaggagcttctgaaatcatggaaagattttgaagcaactcaggaggctacaaatgttgaaagtctacaaaacggtcctactcttgaaattcggatacctgccgaatttgttacttccactaatcgtcaagtaaagggtgctcaactttggggaacagatatatatacaaatgattcagatcttgtggctgtgctaatgcatactggctattgctcgcctacgtcctcccctcccccatctgccatccaagagcttcatgcaactgttcaagttctaccaccacaagagagttatacttcaacattgaggaacaacgtacgctcacgtgcttggggtgctgggattggttgtagcttccgcatagaacgctgctgcatagttaagaaaggcggtggcaccattgatcttgaaccacgccttagtcacacatcagctgtggagcctacacttgctccagttgcggttgagcgcacaatgacgacaagagctgcagcttccaatgcattgcgacaacaaagatttgtccgtgaagtgacaatacagtacaacctctgcaacgagccatggttaaaatatagtataagcattgtggcagacaagggattgaaaaagtcactttatacttctgctagactgaagaaaggagaagtaatatatttggagacacattttaataggtacgagctgtgcttcagtggagagaagcctcggggtattggatcgagctctaatgcatctgatgcagaacctgagaaacaccagagcagtagtcaccattcgcaaaacggctctgtggagcatgaactccgggatgtgttccgatggtcccggtgtaagaaggccatgcctgaaagtgccatgcgctccactggtatcccactaccagcagatcagctcgaggtgttgcaggataacctagaatgggaggacgtgcagtggtcgcagaccggtgtttgggtggctgggaaggagtatcccctcgcccgagttcacttcctctccgggaactagcagcagctgatgttgcagccaacgaaggagctatcgtttcctgtggacaggagaggagcttgccaacattgtaggtttttttttttgctactgtataatgtatgatgcaccctgtcatgtgtacaaagaaagctcaactgttgtaggctgtttgtgttgtgtggcattctactagtagtagtcttcacattaaccatatttgttagggttgcttgctcctgcccatgcctgaaagatatattgttggttttaggtcctgataaaataattggcgatttgtaacttaagattagtattgacattaattcaaggtagtaaacaaaccataactctaattttgtatattgacatactgttctgtggatgtcttcagttgctatggagaggcaccgtttattttct

SEQ ID NO: 109264 - DNA, 1473 bp, Zea Mays
atttgcgggggaagctttgccttggtttatccctttcccagatagacccctcatgtgggacagtgggaagcctacaacactggatctgttctttttttattcatttgctgaaatcatttttgtgcaggtaaagggtgctcaactttggggaacagatatatatacaaatgattcagatcttgtggctggtagattccttcttgctgttccaaaattctaaacagttggggaagtttttttttaacttctaatgtgcgtttctgttagtgctaatgcatactggctattgctcgcctacgtcctcccctcccccatctgccatccaagagcttcatgcaactgttcaagttctaccaccacaagagagttatacttcaacattgaggaacaacgtacgctcacgtgcttggggtgctgggattggttgtagcttccgcatagaacgctgctgcatagttaagaaaggcggtggcaccattgatcttgaaccacgccttagtcacacatcagctgtggagcctacacttgctccagttgcggttgagcgcacaatgacgacaagagctgcagcttccaatgcattgcgacaacaaagatttgtccgtgaagtgacaatacagtacaacctctgcaacgagccatggttaaaatatagtataagcattgtggcagacaagggattgaaaaagtcactttatacttctgctagactgaagaaaggagaagtaatatatttggagacacattttaataggtacgagctgtgcttcagtggagagaagcctcggggtattggatcgagctctaatgcatctgatgcagaacctgagaaacaccagagcagtagtcaccattcgcaaaacggctctgtggagcatgaactccgggatgtgttccgatggtcccggtgtaagaaggccatgcctgaaagtgccatgcgctccactggtatcccactaccagcagatcagctcgaggtgttgcaggataacctagaatgggaggacgtgcagtggtcgcagaccggtgtttgggtggctgggaaggagtatcccctcgcccgagttcacttcctctccgggaactagcagcagctgatgttgcagccaacgaaggagctatcgtttcctgtggacaggagaggagcttgccaacattgtaggtttttttttttgctactgtataatgtatgatgcaccctgtcatgtgtacaaagaaagctcaactgttgtaggctgtttgtgttgtgtggcattctactagtagtagtcttcacattaaccatatttgttagggttgcttgctcctgcccatgcctgaaagatatattgttggttttaggtcctgataaaataattggcgatttgtaacttaagattagtattgacattaattcaaggtagtaaacaaaccataactctaattttgtatattgacatactgttctgtggatgtcttcagttgctatggaga

SEQ ID NO: 109265 - DNA, 2956 bp, Zea Mays
ggcgtctccactcgcgctcgcgcaccgcttggcctctcctccgccgcctcccacttccgtgctccccgctccggcgaattggtgcccacctgcgagctcgccccgttatagtgcactgcattaaaggcactgcgatccttccttttgtatctgggttattcttgaagaattaattttcactctggaggaaaaatgagtggtcctccaaagaggttgcatgaggagagtagccactctacacctgcaaagcggcctttggacgacaacagcttgtactcaagcccttctgggaaagctattcagtcaagcagcagtgatttccatggtttttttgaacatgatggtagatttgccaaaattcaacgtgttgaggctcgtgatgataagaggccaccccttgtccatcggatgcatggtagctccaactttgttgatcacaccgtcttgtctgacagcagattagaaccaaagcacaataaagatacaagggacaataaggcggatgatcgtgacacaaaagctgatgctcgggatgtctatagtgatcccagtattgagtttcagtttaataaaattgacagtgatgtaaaaatagacaatagagctgatggaaatgaaataagggctgacaggaggggtcaccacgattacaaaggtgatactaaatttgacaaggataatcatcctattgttgcatcgagcttaggctggaaagacaacaaagaacataggggcaaaaggtactttgagcagccatctgataatgcggattggcgtttcccccgtcccggtttgcaaggtactgatgaaactctcaaaggtctaacttccatggaagaccgtaattcaagagatgcacatgattctgcttttgacaacaaagctgaatcaaaaggtgaagataagtttagagacaaggataggaaaaagaaggatgagaaacatagagactttggttcaagagaaggtgagagaaatgatcgtcggaccggtatccagcttggaggtagtggagttgagcgaagagaaatgcaaagggaagagagggatgctgaaaaatgggacagggaaagaaaagattccttgagagacaaggaaggcaatgatagggaaaaggattctgctaagaaagatccatctatggtaatggaaaaggataacacaatagttgaaaaacttttatctgatggacctgttaaaaatgctgaacatgagaatacaacaacagaaactaaggtgcttaaggacgatgcatggaaaggtcatgacagggatcctaaagacaagaaaagagagaaggatttggatgcaggagacaggcatgagcaaagaagcaaatataatgacaaggaatcagatgataatggcaccgaaggtgatacagaaaaagataaagatgtttttggaagtgttcaacgcaggaggatggtgcgaccaaggggaggtggtagccaagcatctcaacgtgatccccgatttcgatcccgaacgcgtgatggcgaaggggctcaaggtaaatctgaggtttctgccattctttataaagccggagagtgcatgcaggagcttctgaaatcatggaaagattttgaagcaactcaggaggctacaaatgttgaaagtctacaaaacggtcctactcttgaaattcggatacctgccgaatttgttacttccactaatcgtcaagtaaagggtgctcaactttggggaacagatatatatacaaatgattcagatcttgtggctgtgctaatgcatactggctattgctcgcctacgtcctcccctcccccatctgccatccaagagcttcatgcaactgttcaagttctaccaccacaagagagttatacttcaacattgaggaacaacgtacgctcacgtgcttggggtgctgggattggttgtagcttccgcatagaacgctgctgcatagttaagaaaggcggtggcaccattgatcttgaaccacgccttagtcacacatcagctgtggagcctacacttgctccagttgcggttgagcgcacaatgacgacaagagctgcagcttccaatgcattgcgacaacaaagatttgtccgtgaagtgacaatacagtacaacctctgcaacgagccatggttaaaatatagtataagcattgtggcagacaagggattgaaaaagtcactttatacttctgctagactgaagaaaggagaagtaatatatttggagacacattttaataggtacgagctgtgcttcagtggagagaagcctcggggtattggatcgagctctaatgcatctgatgcagaacctgagaaacaccagagcagtagtcaccattcgcaaaacggctctgtggagcatgaactccgggatgtgttccgatggtcccggtgtaagaaggccatgcctgaaagtgccatgcgctccactggtatcccactaccagcagatcagctcgaggtgttgcaggataacctagaatgggaggacgtgcagtggtcgcagaccggtgtttgggtggctgggaaggagtatcccctcgcccgagttcacttcctctccgggaactagcagcagctgatgttgcagccaacgaaggagctatcgtttcctgtggacaggagaggagcttgccaacattgtaggtttttttttttgctactgtataatgtatgatgcaccctgtcatgtgtacaaagaaagctcaactgttgtaggctgtttgtgttgtgtggcattctactagtagtagtcttcacattaaccatatttgttagggttgcttgctcctgcccatgcctgaaagatatattgttggttttaggtcctgataaaataattggcgatttgtaacttaagattagtattgacattaattcaaggtagtaaacaaaccataactctaattttgtatattgacatactgttctgtggatgtcttcagttgctatggaga

SEQ ID NO: 109266 - DNA, 2968 bp, Zea Mays
ggcgtctccactcgcgctcgcgcaccgcttggcctctcctccgccgcctcccacttccgtgctccccgctccggcgaattggtgcccacctgcgagctcgccccgttatagtgcactgcattaaaggcactgcgatccttccttttgtatctgggttattcttgaagaattaattttcactctggaggaaaaatgagtggtcctccaaagaggttgcatgaggagagtagccactctacacctgcaaagcggcctttggacgacaacagcttgtactcaagcccttctgggaaagctattcagtcaagcagcagtgatttccatggtttttttgaacatgatggtagatttgccaaaattcaacgtgttgaggctcgtgatgataagaggccaccccttgtccatcggatgcatggtagctccaactttgttgatcacaccgtcttgtctgacagcagattagaaccaaagcacaataaagatacaagggacaataaggcggatgatcgtgacacaaaagctgatgctcgggatgtctatagtgatcccagtattgagtttcagtttaataaaattgacagtgatgtaaaaatagacaatagagctgatggaaatgaaataagggctgacaggaggggtcaccacgattacaaaggtgatactaaatttgacaaggataatcatcctattgttgcatcgagcttaggctggaaagacaacaaagaacataggggcaaaaggtactttgagcagccatctgataatgcggattggcgtttcccccgtcccggtttgcaaggtactgatgaaactctcaaaggtctaacttccatggaagaccgtaattcaagagatgcacatgattctgcttttgacaacaaagctgaatcaaaaggtgaagataagtttagagacaaggataggaaaaagaaggatgagaaacatagagactttggttcaagagaaggtgagagaaatgatcgtcggaccggtatccagcttggaggtagtggagttgagcgaagagaaatgcaaagggaagagagggatgctgaaaaatgggacagggaaagaaaagattccttgagagacaaggaaggcaatgatagggaaaaggattctgctaagaaagatccatctatggtaatggaaaaggataacacaatagttgaaaaacttttatctgatggacctgttaaaaatgctgaacatgagaatacaacaacagaaactaaggtgcttaaggacgatgcatggaaaggtcatgacagggatcctaaagacaagaaaagagagaaggatttggatgcaggagacaggcatgagcaaagaagcaaatataatgacaaggaatcagatgataatggcaccgaaggtgatacagaaaaagataaagatgtttttggaagtgttcaacgcaggaggatggtgcgaccaaggggaggtggtagccaagcatctcaacgtgatccccgatttcgatcccgaacgcgtgatggcgaagggtaatcttaaggtaaatctgaggtttctgccattctttataaagccggagagtgcatgcaggagcttctgaaatcatggaaagattttgaagcaactcaggaggctacaaatgttgaaagtctacaaaacggtcctactcttgaaattcggatacctgccgaatttgttacttccactaatcgtcaagtaaagggtgctcaactttggggaacagatatatatacaaatgattcagatcttgtggctgtgctaatgcatactggctattgctcgcctacgtcctcccctcccccatctgccatccaagagcttcatgcaactgttcaagttctaccaccacaagagagttatacttcaacattgaggaacaacgtacgctcacgtgcttggggtgctgggattggttgtagcttccgcatagaacgctgctgcatagttaagaaaggcggtggcaccattgatcttgaaccacgccttagtcacacatcagctgtggagcctacacttgctccagttgcggttgagcgcacaatgacgacaagagctgcagcttccaatgcattgcgacaacaaagatttgtccgtgaagtgacaatacagtacaacctctgcaacgagccatggttaaaatatagtataagcattgtggcagacaagggattgaaaaagtcactttatacttctgctagactgaagaaaggagaagtaatatatttggagacacattttaatagtctccacaggtacgagctgtgcttcagtggagagaagcctcggggtattggatcgagctctaatgcatctgatgcagaacctgagaaacaccagagcagtagtcaccattcgcaaaacggctctgtggagcatgaactccgggatgtgttccgatggtcccggtgtaagaaggccatgcctgaaagtgccatgcgctccactggtatcccactaccagcagatcagctcgaggtgttgcaggataacctagaatgggaggacgtgcagtggtcgcagaccggtgtttgggtggctgggaaggagtatcccctcgcccgagttcacttcctctccgggaactagcagcagctgatgttgcagccaacgaaggagctatcgtttcctgtggacaggagaggagcttgccaacattgtaggtttttttttttgctactgtataatgtatgatgcaccctgtcatgtgtacaaagaaagctcaactgttgtaggctgtttgtgttgtgtggcattctactagtagtagtcttcacattaaccatatttgttagggttgcttgctcctgcccatgcctgaaagatatattgttggttttaggtcctgataaaataattggcgatttgtaacttaagattagtattgacattaattcaaggtagtaaacaaaccataactctaattttgtatattgacatactgttctgtggatgtcttcagttgctatggaga

SEQ ID NO: 109267 - DNA, 462 bp, Zea Mays
atggatcccatgttcagtagcgagtggagtgtctccgagatcaagatggcaaaatcactcatcgctagccgcaacaccagcagcaacttagctagcgacgacgacgcaagcaacaagaagcacagcgacatcgtggacgagctccaagcaaggttcccatggaagggcaagcacgaggtaattggcttgtatgttgacctcacgatggagatgataaatacaccgcctgaggtgggagatgacggacttgtgttggacgacgacaattttgggatgccagtggaggaacaaccacagatgaaatacactgggaggttttggaccagggaggagcacaggaatttcctccgtggcctgaacatgtatggtcgtggtaactggatgtacatctctagggacttcgtccccactaagacgccaatgcagatctatagccatgcacagaagttcttccgtaggtag

SEQ ID NO: 109268 - DNA, 2132 bp, Zea Mays
gccttctaggcttccactctcaccgcagtcgccggtgtcgcctccgcctggatcgtccgccactgccagctgccattccgcctcggatctgagtcgccttgctgcctctgcgcccggacacagccgcgcattccccaccggctcgccgagcaggggccctgctcccacgctgctcactctccccaatttcccacgcacgcctagcgaggtcgggggttgaggtctggcggagatgggcggcgtgccctggaaccgggtggaacttacgctgctcgtactctacgcgctgggcttctacctcgtcgtgatctggaggtcgcttcgcctctcgcacgaatattccgggaggctctacggactacgcgtgggatcacttgcgggtcatctgaatgacctgtcggatgcgcaatggagaaacttccgcgggaacttgccaattctgactgttgtaatgggagcatttctgattctggtcaatacgttgagatattgctatggcctgaaaggtcgaggtactgctttgttgtggctcatactgtctttgagctatttatgctatcttcacggtgcttgtgttgtttttgttcttttaattgcactgattaattactcaatagtgaagctatttgctcattataagtattgcacaagtctcatttggagcttcaacttatctgttcttattcttaaccgagtttatgaaggatattcattctcattgttcggtcaaaatatggcttttctagacaactatcggggtacattcaggtggcacatatgcttcaattttgttgtattacggatgattagctttggatgtgattactgctggacaattcattcttctcattttgacttcaagaaacatatgcaaagatgtcaggtttgttattctggaaagacatgctactttgctttgcaggaaagagggctcagtcttgacagatatacatttcttatgtatttatgctacttgacatatgctccagtgtatattgctggacctattgttggatacaatgcatttgctgctcagttagaggtaccccagaaaaattattcatttgcacaaatatcttggtatggtctaaggtggattttgagtttccttcttatggaaggcatgacacactttttccactacaatgcctttgtagtaagccggctatggcagcagttatccccttttgaggttttcatcatcagttatggggtgttaaactttatgtggttgaaattctttcttatttggcgctacttccggttttggtcactggttggaggagtcgagactcctgaaaacatgccaaggtgtataaataattgccatgatctggagagtttctggaaaagctggcatgcttcttttaataaatggttggttaggtacttatacattcctcttggtggttctcaaagaaaactactgagtatctgggtgatattcacgtttgtagcagtgtggcatgatctagaatggaaacttatctcatgggcatggttgacttgcttatttttcattccagagatattggttaaatctctgtccagcaaatttcaggcaactagttcccttgggatgcttgttcaccgtgaatttaaagcaattgctggtgcagtgacaatcagctgtcttatggtggcaaatcttgttggttacgtcgtggggccatccgggattaaagttctgatatcaagaatggctgggaaggatgccctgccttcccttgccttcatatttactacgttctacgtgggcgttaagcttatgttccatatacgggatgctagcaagaaccaaggttgagggagctttaagatgatgtctccagttttgactcgcaagcaagcagatggcttcgccgtggctgaagatgatagcttcgtcttttttgtttgcatattttgtttttgttttctaaacagtgtcgagagaacatcagcgctataagcgttgacatgtgattttgcttttagaatatataaaggtaaaggctgactcattagcgtggtgaatgttgaagttgcacactgctatacgtccggttgtaaccatgatcgacgtgattcatctggctcaaatgcatatgcgaatttaatgtgttgctaaaccaactttgaaccttggtttc

SEQ ID NO: 109269 - DNA, 2282 bp, Zea Mays
gctgatgggagaagatacatgatccgccggagactacttttaacaggcactcctatccaaaacagcctgcaagagctctggtctttgcttaacttcatcctgcccaatatttttaattcatcccagaattttgaggaatggtttaatgcaccatttgcatgtgatgtcagtcttaatgatgaggaacaactactaatcatacatcgtttgcatcaagttttgcgtccattcttgctgaggaggaagaaagatgaagtagagaaatatctccctgtgaaaacacaagtaattctcaagtgtgacatgtctgcttggcaaaaagcatactacgaacaagtcacaagcagggaaaaggttgcgctaggatatgggatcagaaagaaggctctgcaaaatctgtcaatgcaacttaggaagtgttgcaatcatccctacctattcgtagagcattataacatgtaccagcgggaggaaatagttagagcatccggaaagtttgaattgcttgatcgtctacttccgaaattgcagagagctggtcacagggttttacttttctctcagatgacaaaattgcttgacgttttagaaatatatttgcagatgtacaatttcaagtacatgaggcttgatggatccacaaagactgaagaacgtgggaggttactggcagattttaataagaagaattcagaatatttcatgtttcttctcagcacacgagccggaggtcttggattgaacttgcagactgcagacaccgtcattatctttgatagtgactggaaccctcagatggaccaacaagctgaggaccgtgcccatcgtatagggcaaaagaacgaagtacgtgtgtttgttcttgttagcgttggttcaattgaagaagagatattggatcgtgcgaaacagaagatgggtattgatgcaaaagtaatccaggctgggttgtttaacacgacctccacagcacaggacaggcgagcattgctgcaggagatactcaggagaggaacaagctcactgggaacggatatccccagtgaacgtgagataaaccgcttggctgctcgaaacgatgaagaattccggttgtttgagaagatggatgaagaaaggaggctaaaggagaactacaaatctagacttatggatggaaatgaggtcccagattgggtgtttgccaatgataatgaaaccttacgcaagaaaaccgtggcagatgaattccggaatataattgttggttcaaagagacgtagaaaggaggttgtctattcggactcttttggtgatcagtggatgaaatccgacgagggatttgaagagattgcaaagatgactccaagggtgaagcgaactgcttattcgcctgacattcaagttgagtacaatgaaaggaggaaaaggcccaagtctgtggaaaacagcgcagatggcgcaagcaacccaacacggacacccgacaaaggaagggctggagtttcatcatacagcaaggatgagaccgaagatgatggtgaagacgaagtcatcaccagtggcttacagaagggtaacagtttcacatggaagacccttggaagaaaaaggtcaagccacttaagttcgtcgtcggactcaaaagggcgaccatcattctaatgtcagttgccttgatgcttttgctcgatgaagcccttctaataatggagtacccctggaggctagcagcgctaccatttcgaaagtaccttgaacctataaacttcaggatggaggctgtagctagcaggactaccattttgaaagtacattgaagctataaacttcagaattagtagtatactctggacttgttgccatgaattcgtaactcaaacgaacttaaattgcgttacagttcaagcctattttgggggtaaaggttattggtaaatagctggtgatggcttgccctgaatttgggctgtcttgtctgcacattccgttgagcagtcttcggctaatgcctgtccagattttactggtttatatggcaagcaaaactgtactaggtgctatctgatgtgcttccaccgaggcaagtcctcaaacaagtgtcatcttttattgtgtatagctagtagagttggctctgtgaatctatatgcacttacatagcctgatagacacacgataactacgtaaaaatagctttgtgcaaagataatttctttttgagttttcccctttaattaatcgcgttgaaactacgcgttcaaatttgtgcttccaagtgccaaacggaattcgctgcgact

SEQ ID NO: 109270 - DNA, 3175 bp, Zea Mays
gatttatcatatcaattcttgctgattattcatatacttgtgcagttgttagacttacagaagaaagttcggtcagatatcagtgctgagtattggctacaaaagaaatgtgcatatcctgagaggcaactcttcgattgggggatgatgcggatacggcatcctttttccatgtatggaataggagatagcttttcagtggatgttgatgatgttcaccgcagaaagagattcacagagaggatgtcaagacttgaggaggaaggaaaaaatcaggcagatatcaggaagaggaagttctttgcagaaattctcaatgcttctagagaacaccaggtgcaattagggactactttcaaacaaagaaagcagcggaatgatggcgttatggcatggcatgttcgggcacgccaacgtattacacggcaagaaaaaagcagaattaatcttctgaaaactggtgatcaagaagcatatatgaggatggttgaagagagcaagaatgaacgcttgaaaatgctccttgataaaacaaatgagcttcttgaaggaattggaaaagctgtacagcgacaaaaagatgctgaacatgttagtaagccagaaggagggagtgaagtgccaaaagggtcagaatctgaggattgttctcaaatttcgggcatcaagagtgaatcagctgaggagtctccttcagatgacgatggagacctccctggccctgcagatgaaagtaaattcaatgcaggacgtagacttgattttactgttcattctattgaagaaaaggtaacagaacaaccatctgctctcgaaggtggtgaattgagaccatatcagctagaaggtctccaatggatgctttctctatttaacaacaatttgaatggcattctggctgatgaaatgggtttggggaagacaattcaaaccatagctttgatcgcttatctgttggaaaagaaggaggttgcaggaccacacttaataattgctccaaaagcagtattaccaaattggtctaatgaattcaaaacttgggctcccagcattgggacaattctttatgatggccgtccagaggaaaggaggctgttaagggataagaattttgacggagagcaatttaatgttttgctcacacattatgacctgatactgaaagataagaagttcctaaagaaggttcactggcattatttgattgttgatgaaggacatcgtctgaaaaatcatgaatgcgctcttgctcgaacactggtttctggatacatgatccgccggagactacttttaacaggcactcctatccaaaacagcctgcaagagctctggtctttgcttaacttcatcctgcccaatatttttaattcatcccagaattttgaggaatggtttaatgcaccatttgcatgtgatgtcagtcttaatgatgaggaacaactactaatcatacatcgtttgcatcaagttttgcgtccattcttgctgaggaggaagaaagatgaagtagagaaatatctccctgtgaaaacacaagtaattctcaagtgtgacatgtctgcttggcaaaaagcatactacgaacaagtcacaagcagggaaaaggttgcgctaggatatgggatcagaaagaaggctctgcaaaatctgtcaatgcaacttaggaagtgttgcaatcatccctacctattcgtagagcattataacatgtaccagcgggaggaaatagttagagcatccggaaagtttgaattgcttgatcgtctacttccgaaattgcagagagctggtcacagggttttacttttctctcagatgacaaaattgcttgacgttttagaaatatatttgcagatgtacaatttcaagtacatgaggcttgatggatccacaaagactgaagaacgtgggaggttactggcagattttaataagaagaattcagaatatttcatgtttcttctcagcacacgagccggaggtcttggattgaacttgcagactgcagacaccgtcattatctttgatagtgactggaaccctcagatggaccaacaagctgaggaccgtgcccatcgtatagggcaaaagaacgaagtacgtgtgtttgttcttgttagcgttggttcaattgaagaagagatattggatcgtgcgaaacagaagatgggtattgatgcaaaagtaatccaggctgggttgtttaacacgacctccacagcacaggacaggcgagcattgctgcaggagatactcaggagaggaacaagctcactgggaacggatatccccagtgaacgtgagataaaccgcttggctgctcgaaacgatgaagaattccggttgtttgagaagatggatgaagaaaggaggctaaaggagaactacaaatctagacttatggatggaaatgaggtcccagattgggtgtttgccaatgataatgaaaccttacgcaagaaaaccgtggcagatgaattccggaatataattgttggttcaaagagacgtagaaaggaggttgtctattcggactcttttggtgatcagtggatgaaatccgacgagggatttgaagagattgcaaagatgactccaagggtgaagcgaactgcttattcgcctgacattcaagttgagtacaatgaaaggaggaaaaggcccaagtctgtggaaaacagcgcagatggcgcaagcaacccaacacggacacccgacaaaggaagggctggagtttcatcatacagcaaggatgagaccgaagatgatggtgaagacgaagtcatcaccagtggcttacagaagggtaacagtttcacatggaagacccttggaagaaaaaggtcaagccacttaagttcgtcgtcggactcaaaagggcgaccatcattctaatgtcagttgccttgatgcttttgctcgatgaagcccttctaataatggagtacccctggaggctagcagcgctaccatttcgaaagtaccttgaacctataaacttcaggatggaggctgtagctagcaggactaccattttgaaagtacattgaagctataaacttcagaattagtagtatactctggacttgttgccatgaattcgtaactcaaacgaacttaaattgcgttacagttcaagcctattttgggggtaaaggttattggtaaatag

SEQ ID NO: 109271 - DNA, 459 bp, Zea Mays
atgtcggcgtccgtcgacgccgcgtcggcagtagcggtgccggcggtgccccccgcggtggaggaggccggcggcgcggtggagcaggccaggacgctcatcgcagcgctcaacctgctctctcgcaacctaccgctgccccctgatgtcatgcgcgccgtctcgtccatctaccacgacgggggtgccggcgacagggcgggggaggaggagaagggaggggacgaggagatgccggccgcggatggggcggccgaggggaactgctcggtgtacgccgctggcggcgcgaccgagggtaaagcttttactttacaggggaccaccttgattgaagagcttgaagatgcaatattgaagaatcaaagaacgcccataacctactcagaattggcagcaatacgagaagggcggttcaatgcatccattcagcatcgactagctgaacttgaaggttaa

SEQ ID NO: 109272 - DNA, 107 bp, Zea Mays
gcatcaacgggcaggttctatgttgggtgttttcactagggtaggaaccactatatctatactatatttaaagcaccagtttcaatggtcgtcgtgcgtcatctttt

SEQ ID NO: 109273 - DNA, 387 bp, Zea Mays
atcgcaccatgtcggccgccgaaactgctgtttctccgacgacgccgctgcagccgcagctgcaatgggatccgaacgacgccgccgacgcggccagtcccaattctctctgggtggtcgacgagacgcaaaccctaaccgaggtcatgctccaaccccaaccaaaccacctgtcgcctcctccctgtcaacgggatcactgcctccggtgctcctgttggtggggacgtcgcggcatccgcttctgctgcggcggcggctaacgcgacgatagaagagcgggtgagggggtcgtggtccccagaggaggacgcggtgctgagcaacctcgtggaaagttcggggaattgcctgtgcgcggagggggcaaggaatgacgccgcgagt

SEQ ID NO: 109274 - DNA, 294 bp, Zea Mays
atgcatgccagcctccacctcctcctcttggagttccctctcccctgcaggctggccggccgcgtttccgtttcgtcttctggttcctggagcggcgaagacaacgcatacatcgcgctgccagacctgttcacctccggttcctttatctcgtcgctcacaggggggcgggtgtactcccaaggtcgattgcctcttcgcgtttcgtcttctgggagcggcggagacgggcagcaattaatgcaactatatgcaagcagcagcagcagccgccgcctgggctactacaaatag

SEQ ID NO: 109275 - DNA, 608 bp, Zea Mays
ctccggtcgagccacaaacacacagacaccatggccttcccagggactccggcgaggaagatcgtaccaggcggcttcaccgcagcacgaaccgccgtggccagcggcggcgctcttagcttcgatctggacggcgccgacgactttttctggggcctgtggcagctcgtcaaggcgaaggccgccgaggcagcggcctacctcgccgccctcttcgcggcgctggcggagaaggcggacgagatcttcccgccggagacccgctcggagacgctccggcagtggatgcgcgtcgccgtctccgtggtgatcccggccctagtggtcgccctcgtgctttgctgctgctgctgcgcctgccgcagggcgcgcggcggccgccgcgcgcgctttatggctgcgccgggccgcggcggcgcgcgcatgccgcggggcgcgttcgagaacaacccccggctttacttccgcgacctccgcgccgggaagcccctcttgtactagctatgctacgtgcattcgtggatacgcctgggcacgtacctacaggtgtacgagtacgtacgaggttgagagagagtgtggtaacgaaataattagtattttacctt

SEQ ID NO: 109276 - DNA, 467 bp, Zea Mays
agaggtccgattaaactatattttgtccaattttttaccttaagtaaataaggccaaaacatgactccatgccaagtttcactaatttttgaccaaatttgctatttatttatttatttttggctaggaaggcatttaacccacaaaatagtaaatagtccaaaaaagggacatctctgcatgaagtaaacttgtagtggatagatgaacaaattgtacaaatttgaatgaagaaaccacacaaaactaagaaatgtagctcaaaccatgtagttgtagtccaatgtcatgaaacttagtgagatatgtgtccgtttgtgaagcacctatattcaaacttttgcataatcctctgaattttttaccttaagtaaataaggcaaaaacatgactccatgccaagtttcactaatttttgaccaaatttgctatttatttatttatttttggctaggaatacatttaac

SEQ ID NO: 109277 - DNA, 1158 bp, Zea Mays
atggcgtccgccgcgcacgcgccgacgccggtgctcaaggacgagctggacatcgtcatcccgacgatccgcaacctcgacttcctggagatgtggcggtccttcttccatccctaccacctcatcatcgtgcaggacggcgaccccagcaagaccatccgtgtccccgaaggcttcgactacgagctctacaaccgcaacgacatcaaccgcatcctggggcccaaggcgtactgcatctccttcaaggactccgcctgccgctgcttcggctacatggtctccaagaagaagtacatctacaccatcgatgacgactgcttcgttgccaaggatccatcagggaacgacatcaatgcacttgagcagcacatcaagaacctcccgagcccttctactccatttttcttcaatactttgtatgacccttaccgcgtaggcaccgattttgttcgtgggtaccccttcagccttcgtgaggatgttccaactgctgtttctcacgggctttggctcaacattccagactatgatgcccctacccagctcgttaagccccttgagagaaacaccaggtatgtggatgctatccttacaatcccaaagggcgccctcttccctatgtgtggaatgaaccttgcattcgaccgtgagctcattggtcctgcaatgtacttcggtcttatgggtgatggccagcctatcggtcgctacgatgatatgtgggcaggatggtgcacgaaggctagtgactattaccagtacatgcttattgactgcacattgcttggtgatttctctctcgtcttagtccagtatctttgcactgacaaaaccatgccaaatgtctcgtctgctgcaacaaacagcaaagcgagcaacccgtttgtgaacctgaagaaggaatacaacggcatcttctggcaagaagagctgatcccgttcttccagtcagtctcccttccgaaggatgccaccaccgtccaaaagtgctacctcgagttggccaagcaggtgagggcgaggctcggcaaggtggatggctacttcaataagcttgccgattccatggtcacgtggatcgaggcctgggacgagctgaaccccgcaaaaggtggagtccgagtccccacagcaaatggccctcacaagaagtaa

SEQ ID NO: 109278 - DNA, 211 bp, Zea Mays
ctttttataagtttgacttcatgtgacttatttaagaaacatgagatcacaaactttctcttatttggtctctatatgtggaattatgtcatttataatctatgttcgttcagtcagtcgttgttaactcttatctaatcgctcatttcattggttgtgttgtaccaagacatattgcattaagtaaacaataacattagttaggcaaatc

SEQ ID NO: 109279 - DNA, 2001 bp, Zea Mays
gactgcagaactgaacatcccaacccaagtcccgaaccctccctcaccactcccccgatctccgccactccaaaatgtggcgccgccaccacctcctccggctacttccgcctccggccaccgccgctaccgccgcggccccttcccacttcctgcgctacctctctacctcaagcaccccgaccccggccgcctccctggcctcgtccctcgcgtcggcgctcactgcgctctccacgaccccgccccccgccaccaccccggacgcttacttctccctccacttctccgacgtgcggcctaccaacgcgctcctcgccgaggcgctcgcgctctccccgcccgccacctcccgcgccgctgccgatctcttccgcttcctcgtccgccgccgctcgctccacccctccgacggcgcgctcgcgcccatcgttcgccacctcgcccgccgccgcgacttccccgccgtgcgcgcgctcatccaggagtttccaaccgctctcgggcccaccacgctcgacgcctatctccagcagctcaccagagccgggcgcccaacggacgctgtcaaggtgttcgacgaattgccggagcagctccgtaaccgcgaggctctcactttgctggtctcctcgctttcttccgagggattcccctcgcacgcagagcgagctgccaagaaggtcgccagtgagatcttcccagatgataatatctgcactttgcttgtatctggttatgccaatgctggtaagctcgaccatgcgctaaggttgattggtgagacacgtagaggtgggttccatccaggattggatgcgtataatgctgttcttgattgtgtctgccggctctgtcgcaagaaggatccactgaggatgccaatagaagcggagaagttcttagttgacatggaagcaaatgggattcctcgtgatgcaggcacatttcgggttctgatcacaaatttttgcaagatccgcaagacaggggatgccatgaatctgttccagcgtatgggtgagtggggctgctcaccggatgctgacacgtacttggtgctcattaggagcttgtaccaagctgcccgaacttcagagggggatgaaatgataacgtggatgcggtctgcaggatttggagataaacttgataggaaggcatattatggattcatcaagattttatgtgggattgagagggttgagcatgctgtcaaggtattccgtatgatgaaaggttatgggcatgctcctggagtaaaatcatataccttgctcattgagaagctggccagacacaatttaggggatcgttctaatgcacttttcagggaggcagttgcacgtggtgtacctgtggcacaaggagagtacaatgttgacaaaaggtatgtcaagacaaagaaggagaagacggtgaagaagaggctgactttgccagagaagatgagattgaagagcaagaggttatacaagctcagaatgagctttgtcaagaagcccaagcgtcgaatgctccgggtttaagcataattttggttcggtctgctgcagaataacttcatgggaacacagcagtttggttggagcggatgatcatgggagcggacaccaccagatccagttatatctcggaagatcagaaaattatagtcccttaactgtgcctgcccttctgagtgactatgcaacatcatttttcgaaggcgagagctctgtatggtttctttttttttttttacttttttttggttgatgccatggcgactccggtgatgtttgatgcaacaccttgcattccattatagcacaataacgcaccatttcactgaatttaatttacacttgtggtgatgttctgtacacccttgtttttcgtagaaagcattggagttatgcaataactctataacttaataggccacttttttgctgaagtagtttgctgtttcctggttcccccacatctagagagggtttttttggataaaaatcgacg

SEQ ID NO: 109280 - DNA, 1868 bp, Zea Mays
gactgcagaactgaacatcccaacccaagtcccgaaccctccctcaccactcccccgatctccgccactccaaaatgtggcgccgccaccacctcctccggctacttccgcctccggccaccgccgctaccgccgcggccccttcccacttcctgcgctacctctctacctcaagcaccccgaccccggccgcctccctggcctcgtccctcgcgtcggcgctcactgcgctctccacgaccccgccccccgccaccaccccggacgcttacttctccctccacttctccgacgtgcggcctaccaacgcgctcctcgccgaggcgctcgcgctctccccgcccgccacctcccgcgccgctgccgatctcttccgcttcctcgtccgccgccgctcgctccacccctccgacggcgcgctcgcgcccatcgttcgccacctcgcccgccgccgcgacttccccgccgtgcgcgcgctcatccaggagtttccaaccgctctcgggcccaccacgctcgacgcctatctccagcagctcaccagagccgggcgcccaacggacgctgtcaaggtgttcgacgaattgccggagcagctccgtaaccgcgaggctctcactttgctggtctcctcgctttcttccgagggattcccctcgcacgcagagcgagctgccaagaaggtcgccagtgagatcttcccagatgataatatctgcactttgcttgtatctggttatgccaatgctggtaagctcgaccatgcgctaaggttgattggtgagacacgtagaggtgggttccatccaggattggatgcgtataatgctgttcttgattgtgtctgccggctctgtcgcaagaaggatccactgaggatgccaatagaagcggagaagttcttagttgacatggaagcaaatgggattcctcgtgatgcaggcacatttcgggttctgatcacaaatttttgcaagatccgcaagacaggggatgccatgaatctgttccagcgtatgggtgagtggggctgctcaccggatgctgacacgtacttggtgctcattaggagcttgtaccaagctgcccgaacttcagagggggatgaaatgataacgtggatgcggtctgcaggatttggagataaacttgataggaaggcatattatggattcatcaagattttatgtgggattgagagggttgagcatgctgtcaaggtattccgtatgatgaaaggttatgggcatgctcctggagtaaaatcatataccttgctcattgagaagctggccagacacaatttaggggatcgttctaatgcacttttcagggaggcagttgcacgtggtgtacctgtggcacaaggagagtacaatgttgacaaaaggtatgtcaagacaaagaaggagaagacggtgaagaagaggctgactttgccagagaagatgagattgaagagcaagaggttatacaagctcagaatgagctttgtcaagaagcccaagcgtcgaatgctccgggtttaagcataattttggtttggttggagcggatgatcatgggagcggacaccaccagatccagttatatctcggaagatcagaaaattatagtcccttaactgtgcctgcccttctgagtgactatgcaacatcatttttcgaaggcgagagctctgtatggtttctttttttttttttacttttttttggttgatgccatggcgactccggtgatgtttgatgcaacaccttgcattccattatagcacaataacgcaccatttcactgaatttaatttacacttgtggtgatgttctgtacacccttgtttttcgtagaaagcattggagttatgcaataac

SEQ ID NO: 109281 - DNA, 1672 bp, Zea Mays
gactgcagaactgaacatcccaacccaagtcccgaaccctccctcaccactcccccgatctccgccactccaaaatgtggcgccgccaccacctcctccggctacttccgcctccggccaccgccgctaccgccgcggccccttcccacttcctgcgctacctctctacctcaagcaccccgaccccggccgcctccctggcctcgtccctcgcgtcggcgctcactgcgctctccacgaccccgccccccgccaccaccccggacgcttacttctccctccacttctccgacgtgcggcctaccaacgcgctcctcgccgaggcgctcgcgctctccccgcccgccacctcccgcgccgctgccgatctcttccgcttcctcgtccgccgccgctcgctccacccctccgacggcgcgctcgcgcccatcgttcgccacctcgcccgccgccgcgacttccccgccgtgcgcgcgctcatccaggagtttccaaccgctctcgggcccaccacgctcgacgcctatctccagcagctcaccagagccgggcgcccaacggacgctgtcaaggtgttcgacgaattgccggagcagctccgtaaccgcgaggctctcactttgctggtctcctcgctttcttccgagggattcccctcgcacgcagagcgagctgccaagaaggtcgccagtgagatcttcccagatgataatatctgcactttgcttgtatctggttatgccaatgctggtaagctcgaccatgcgctaaggttgattggtgagacacgtagaggtgggttccatccaggattggatgcgtataatgctgttcttgattgtgtctgccggctctgtcgcaagaaggatccactgaggatgccaatagaagcggagaagttcttagttgacatggaagcaaatgggattcctcgtgatgcaggcacatttcgggttctgatcacaaatttttgcaagatccgcaagacaggggatgccatgaatctgttccagcgtatgggtgagtggggctgctcaccggatgctgacacgtacttggtgctcattaggagcttgtaccaagctgcccgaacttcagagggggatgaaatgataacgtggatgcggtctgcaggatttggagataaacttgataggaaggcatattatggattcatcaagattttatgtgggattgagagggttgagcatgctgtcaaggtattccgtatgatgaaaggttatgggcatgctcctggagtaaaatcatataccttgctcattgagaagctggccagacacaatttaggggatcgttctaatgcacttttcagggaggcagttgcacgtggtgtacctgtggcacaaggagagtacaatgttgacaaaaggtatgtcaagacaaagaaggagaagacggtgaagaagaggctgactttgccagagaagatgagattgaagagcaagaggttatacaagctcagaatgagctttgtcaagaagcccaagcgtcgaatgctccgggtttaagcataattttgggtaattctcatagtcatgctgatttcattgccatgtcgatggttatcttttctgaggaccagtccgtcattgttgttaatcactttgacctgcactactgccactaaataaatactggaaatttcaaatgc

SEQ ID NO: 109282 - DNA, 1545 bp, Zea Mays
atggctttcaatggcattgccacaaacctagttgtgtatctccgttcagttctccatgggggtattgcttccagtgcagcaactgtatctctttggtatgggacaagcttctttgtgccaattcttggagccgccatagcagatacttgcttgggaaattataagaccatcttgatctcccttatcatgtacctatttggaatagtactaattacagttgcaacgttcatgccttctacttcagtcttgtgcgacgtcagttcatgcttgtcatcaaatggaactcaaaccgtgattttctttgctggtttgtatctcactgctgttggatgtggaggagtaagatctgcattgcttccgtttggtgctaaccagttcaacaacgagaacagtctagacataaaaaagagaagaaatttcttcagcttgttctatatatgtgtcatctttggtgtgattacttctgggacaatcatagtttgggttcaggaaaatgttagctgggctattggatatggagtcgccactacatgcataggtcttgctttgataggatttctggtgggaacaccaatattccaagaagatgagccttgtggttctccagtgaagagtattttccaggttattgttgcctcttttaggaacatgagcttggaagtacctgctgatagctgtcttctgtatgaggtcgggagcaaccacatacaaaggacaaaacttgctcactctgatgattttaggttcttagataaggcggcagttatttctgatccaagcctggtgtatggaggctgtcgaagctcatggagcatatgtacagttactgaagttgaggaactgaaagtacttatccgcttgctcccaatatgggtgactggaatattctttggtgctgcgatctcgcaaatgcacaccacttttattcagcagggaactgtgatggacaccaagatcggttccctgtccattccaccagcatccttatactcatttgaagtgatatgtgtcacgctttgggtacttgctgtcaacaaagtgcttgtgccggcaatccgaacgtattttgcaaatggggtagagctcacacagttacagaggattgggatcggtcgtttcctgatgatctttgccatggcaatggcagcacttctagaaaccaagaggctgcatattgttcaggagggggaactgctaagcattgtatggcagcttccacagtacttcgtcattgctggggctgagtgcttcggtatcatcactcagctggagttctttcgtggccaggcgccagactccatgaagagcattttaacggcatttgcattgctcaccactgcccttgggaattacttgagctcagctatcatcaccctcatcgcaggggtgaccagggtatggcatagccctggttggataccagatgatctgaacaaaggacaccttgactactactactggtgtcttactaccctctcattggtgaattttgttgtgtatctgtattttgctagtaaatacaaattgaagaaagttgtttgttaa

SEQ ID NO: 109283 - DNA, 238 bp, Zea Mays
agaaagttgttagatactgtcgaaaatttatttaccgtgagaaacattatggtctacctggccttccttcaggatgatgcatcatgtcatggcgaggaaacacagagtctattggaagcaaatctagggtcacagctgaaaagtaaatgctctgattggagagcaccggcactcatcctgggtgagtcatgctatgtcaattctcacatttgttctgtgtagtatcaataaattcttc

SEQ ID NO: 109284 - DNA, 1535 bp, Zea Mays
cgctgctcgctccccctgcttcctctttctccccctcctcgactcctcgtcaagctcccctgaatcgcggcagcagcaccggggcagcaaggcgaggattttcctgctccgaatctacccggctcggcccgatgggctcgctgatgtcctgcctctccgacccaatcccgtcggggaacaggtccccgccgccgcagccgaagcggcgctcgtccacctcttcccgcggccgtggcggcggcgggagggactccgctaaggcctccgtgtccatagacgaggaggcgcttactgcagcagcggcgctcgtgctggggcagaggggcgcgtccggtggcctgggcgcgttcgagcggtccgcgtcggtgcggtacgcggccaagcggcagagccagggcccgccgctgccccgaagttgcagcacgcggccgaggtcgctcgctgaccccgagctccagccacagcaactcctagccaaggatttgaatactaaggatttggaaaccaacgtcattgttcttgttcatggtggtggattcggcgcttggtgttggtacaagactatatcacttctcgaagatagtgggttcaaagttaacgccattgacttaacaggctcagggattcaccattacgacacaaacaagattagcagtctttcagagtatgctgaaccacttacgtcttaccttaaaggcttaggcgatgctgaaaaggtaattttggtcgctcatgatcttggcggtgcctgtgtatcctacgcaatggagatgttcccatccagagttgccaaggcggttttcctttgtgcagcgatgctggcaaacgggaacagtgccctcgacatgttccaaaagcagatggacacgaacggtactctccaaaaggcgcaggaatttgtctactccaacggcaaggaccggcctcccaccgccatcaacatcgacagggcatcgcttagggacctgttgttcaaccagagcccttccaaggacgtgtcgctggcctcggtgtccatgaggcccatccccttcgcccctgtgctggagaagcttgtgctcacggccgagaactacggctcggtgcggcggttctacgtggagaccacggaggacaacacgattcctctgcccctccagcagagcatgtgtggtgccaacccaccggagaaggtgctgcggctgaagggggcagaccacgcgcccttcttctccaagccgcaggcgctgcacaagacgctggtcgagatcgccaccatgccgcatgtccgggcttcgtgagaacgtgtttgttcagcttcaggtttttgccggccggtgagcttacatggctgttgtacatgctgaggatgatggtatggcttgtggcggtgtggcagcgacagcgagtaggggatctagaatttcggcgtcgccttgacgaaggcatacccctccattatacactcacatctggcatcactttttttagaaaaaaaaaacaaaatcttattccagcctctatggctctagagttttagaatcaaccatttcatt

SEQ ID NO: 109285 - DNA, 4104 bp, Zea Mays
gcccgccggcctccctccctccccacgacgacagcctgcatgcccatggcgccgcaatgataacattcctctgagagctcgcccccgactccaaaaccgagcacacatctgctccggcttctacttctaccagtacacatccgcagtaccagccgtgtgcgcgtgcaggcaggactgcttccccttctcctcgccactgcacgccgcctagctcggcctcagctctgaccgggtgactcactgaccgacgacgcctcggaagcttctctgccgccggcctggccacgtcggtcgccgtcgtcggaccccgaatgagagccggcgatcgtcccgcagagcgcacgccgtcccgtgcctggtgatcgggggccgacaacgacagcttggggagcgaggcagaggcacacgcccggaccggaagacgatgccgcccgcgagggtgcgcggcgccgccgccggcctggccgacgacgcgcgggacctccagcgccagatgggctgcatggccggcatactccagatcttcgaccgccagcgtctcatcgctggggccgccggccgccaagccgcccggcagcgccaggcgcacaagaggctgcctccgccttcggctcctccaccgggcaatactcattcaaatagcagcagcaatgtcccagttcaaagttcaagtacctcaaagatcgttctggagaaaacatttagcaaatgtatgaccgagaacagcagcctttcaatcgaatcatcaagagcttcttcttcctcctcttcctgctcatccttctcctcccttgatggcaacaaatcagtccagcaggagcttccttacatcaacgaggagctctttgtgcagaggtcactgaagacctcgccaagtttgaaggaatctgacatgaacaccaagtctgggcatcctaatgtcggtttcagagacatagtgaaggactccatcaaccgagaccctggaggcctgactgtaaaaacctcggtgcaggaggcaaggaggaacgggcagtacaaggactcaccgaggccactgctgctgtccaaatcaatggatggaacctgtatcattgggatcgataggaccacaaaggttcctgcaaatgtcactgaatctggaaggtgtttgcaggaacggtcacgcttctcatgcgatgaccgaagactcctgcggccagctgaaacccaggaatgcaagaggccttcctcgaggctaaaagagcttcctagactgtccttggacagtagaaaggagtctctgagtccaggctcacgtcagaagagcatcagttacaagagaactgatgatattcttctggatactttgaggcctcaagattcccccagcaacaggagagctaacagtgtcattgccaagctgatggggttggaagaagcaacaaatgctacaggggtgctaaccgctgatagctgtgaacccacaagatcaccaagaccagcccaagccactcaacatgagcgtccatcgcgatcccccaaaaacacttgccaggattcctgcagcatgcagccgaagaaccaactgaaagccaagccttcccaaagaattgccacagaagcggctccttggaggcagcaggacagaagtgccaacaataccaaggcggaacaatgtcgagaggctgaagggagggcaagaactgcatctgtctatgctgatatagagagaagcgggggttttaacttcttagagtgtaataacaaggacttcagggctctcagaatattgggtgcattgaacgcgaaagatgccaagagcaagaatgacagcagtggcggatctgtggctattcacaggacagggtatgatctaaccactagctctggaagttttcaggctcctattgtggtcatgaagcctgcaagaaccactgagaaacatggggtttcacttgcttcggttgctcccatagctggcctgagaagcctcagaaagttgccggcgggtagatattcatctttcactggcacaaatgacaagatgcagcttcggatgtcaagagatcaatcgaagtctgaggaaactgtcagcagtgccagctcaccaaggcctacaagctcatcaagccccagaaatgtgttaaagaagtcagaacctgaaaggaggtctcgtccacctgtctcaccaaaatctccaagcaagaagtccaatgaagccgtctccccaaaaggaagaacaagatcgaagccttctcaggtgaaatgccaccgtgatgaggtcttgcagatcacagggaacagaataagcttggcaaaacaggttgatgtcagcattatggattgcccaaagcctttgggtggtaactcaaccttcgttccagaaggcaatactgctgcaacagcaagccaaaaggctgcttcaattctgggttcagaccaaaacattcattcgctggacaacattccaagccctgtctctgtccttgatgcatccttctaccacaaaaggatctcggattcattcaaagatggtgagacacattcttcagaggaatgctggaacccaaacagcttgcctgacacgccacagtcaaaggcgaacagtgaagtcaaccagattaaaccagaaaatctggaagttctgatccagaagctcgagcaactgcaatccatgagcgaagaagacgcaagtatcaaagaagtcatggcgtcagtcgctgcgaacaaagatcaccagtatatctacgagataatgttggcatctggtcttctgcacaaagaacatagtgtcacagcactacctggccaactccaaccatcaaactacccaatcaatccggagctcttcctcatccttgagcaaacaagaccagtctcagtttccgccttccaaactgtcggtggagctaagagaagctgtaagccttgcgcagggaagcttcatcggagacttgtgttcgacctggtaaacgaaaccatagctcagaagatgagcatctgcagatccggaagccagccagtgaagtttcttcgatcaaggaagctaagtgggtggcaactgttcaaggacttgtgcgccgtggttgacaggctaacaaaatgctccgaggaggaggagaacgaaaacatggtattggatgaggatgcaatcaatggaaccaaagactggatgagcttcgacactgtgctgcatggcatggtttgggagatcgaacgatccatcttcaagggccttatcgacgaggtcgtcagcggtgagaccacagagaagatgcgatttggacagaggaagctgcagaggcagctttctttcggtagcacaaactgaatatgcgccgtagtagtagtcatttgcgtcaagaagctttacagcaactagtaaatgtgaaacattttctgtttttttccctgaagactaaactgtagaaggagtataaatgcaaaaaaaaaaaaaatgatcctcaacactagtctttctgccagaagaagcaaggaatataaatataatgttcttagtaaacttgtgtgtgaattgtgatgttgttttgattgaatcatgccgcacaattacccaatctgctgtttctttcatgaagcaggaccgtttggcttctaaactttaggaacatctcatactattatagataacaagatagtcttctgccactctgccagagggccaacgacaaagtaggttctgaaactgtagtccaaactccaaactgtcttactactatttagccaaaagactgcaacggctccaacctggcattcgcacaagaacgatcaacacacgaagtaaacataatcgatgagtggtgtgcagacgacatctaacactgcagtgccagatcatgtagggcatgggacatgacaccggatgcaaactgggagcagggagatgaattgagcagacagggacgggccaggacaggcatttgctgaaagcggcggagcaaggcgtacctccaaccccagaccggcatccatgcttgtcactttccaaactgtgcgtccatggtggaataggccaagattgcaatgatccgcctcctggagttatctgacgacgactctcacagagctcccgcactcgatgccccttccgacttatccgaggctaaaagatttcgaattttc

SEQ ID NO: 109286 - DNA, 1821 bp, Zea Mays
ggtcagttctgttcttgagcgcactgccaccacagattggacggcttgtctgctctccgttcccggagtggcgtcgtgctcactctgctgggttgctttgccttatagtcttgctctgcggtttgatttgcttcatctttttttttcttcaatcttgtcactcctaaggtttcccccctctggttttcttgattccccgcttgggaatttgtgaagtttaacaggatttttttggctgagttcgcatgtttctgttcttggccatgcccatgctatgcttgcttggataagctttggcttcagcctagctcgcattgcacgatgcgttgttcctacttcctagaatccgatcgcaagtcctatgagctgaccactatttcgtggattgcccggggcgtgggctgctgatggtttcggcaatttgggttaatttttaggtaccagatcatctgatttctcagaagcaaaatgttgtttggagctcagtgacaccatcttgtaatgcctgtgattttacgggaaatggaggatcattctgtccatcccatgtctaagtctaaccatggctccttgtcaggaaatggttatgagatgaaacattcaggccataaagtttgcgatagggattcatcatcggagtctgatcggtctcaccaagaagcatcagcagcaagtgaaagcagtccaaatgaacacacatcaactcaatcagacaatgatgaagatcatgggaaagataatcaggacacaatgaagccagtattgtccttggggaaggaaggctctgcctttttggccccaaaattacattacagcccatcttttgcttgtattccttatacttctgatgcttattatagtgcggttggggtcttgacaggatatcctccacatgccattgtccatccccagcaaaatgatacaacgaacactccgggtatgttacctgtggaacctgcagaagaaccaatatatgttaatgcaaaacaataccatgcaatccttaggaggaggcaaacacgtgctaaattggaggcccagaacaagatggtgaaaaatcggaagccatatcttcatgagtcccgacatcgtcatgccatgaaacgggctcgtggatcaggaggacggttcctcaacacaaagcagctccaggagcagaaccagcagtatcaggcatcgagtggttcattgtgctcaaagatcattgccaacagcataatctcccaaagtggccccacctgcacgccctcttctggcactgcaggtgcttcaacagccggccaggaccgcagctgcttgccctcagttggcttccgccccacgacaaacttcagtgaccaaggtcgaggaggcttgaagctggccgtgatcggcatgcagcagcgtgtttccaccataaggtgaagagaagtgggcacaacaccattcccaggcacactgcctgtggcaactcatccttggctcttggaactttgaatatgcaatcgacatgtagcttgagatcctcagaataaaccaaaccttcagttatatgcaagccttttttgaggttgctgttgctgtacctgagaactgtggttaggttatgagtttgttcctcaaaactgacccatacatgacatgctaccttgtgctgagtttctgagacaaagccatcgaaacatgatcttgtggttcagtactttgctgccattagtgtctgataaactagctccccagtttgcagtttctctgaattccagcatgtctagcctcagccaacgttttgcatttgatgtgacgatgacataccatacacatttgtgcattcatctatgttct

SEQ ID NO: 109287 - DNA, 1639 bp, Zea Mays
ccgagcagcggagggggcggcaaaacatttcttgtttgtttattgcgccgaaaaaactaacagacccagaaaaggacagaaagaggctgcacagtaggcgcgtatatttggcagcaggagcggcctcgtcgtgccccgtatcactcctcagttgcttcgacgtatttctctctctatctatacgattccgaagaaggtagagagagaaactcgaaggggagaggacagaagagggagatacaggttaatttttaggtaccagatcatctgatttctcagaagcaaaatgttgtttggagctcagtgacaccatcttgtaatgcctgtgattttacgggaaatggaggatcattctgtccatcccatgtctaagtctaaccatggctccttgtcaggaaatggttatgagatgaaacattcaggccataaagtttgcgatagggattcatcatcggagtctgatcggtctcaccaagaagcatcagcagcaagtgaaagcagtccaaatgaacacacatcaactcaatcagacaatgatgaagatcatgggaaagataatcaggacacaatgaagccagtattgtccttggggaaggaaggctctgcctttttggccccaaaattacattacagcccatcttttgcttgtattccttatacttctgatgcttattatagtgcggttggggtcttgacaggatatcctccacatgccattgtccatccccagcaaaatgatacaacgaacactccgggtatgttacctgtggaacctgcagaagaaccaatatatgttaatgcaaaacaataccatgcaatccttaggaggaggcaaacacgtgctaaattggaggcccagaacaagatggtgaaaaatcggaagccatatcttcatgagtcccgacatcgtcatgccatgaaacgggctcgtggatcaggaggacggttcctcaacacaaagcagctccaggagcagaaccagcagtatcaggcatcgagtggttcattgtgctcaaagatcattgccaacagcataatctcccaaagtggccccacctgcacgccctcttctggcactgcaggtgcttcaacagccggccaggaccgcagctgcttgccctcagttggcttccgccccacgacaaacttcagtgaccaaggtcgaggaggcttgaagctggccgtgatcggcatgcagcagcgtgtttccaccataaggtgaagagaagtgggcacaacaccattcccaggcacactgcctgtggcaactcatccttggctcttggaactttgaatatgcaatcgacatgtagcttgagatcctcagaataaaccaaaccttcagttatatgcaagccttttttgaggttgctgttgctgtacctgagaactgtggttaggttatgagtttgttcctcaaaactgacccatacatgacatgctaccttgtgctgagtttctgagacaaagccatcgaaacatgatcttgtggttcagtactttgctgccattagtgtctgataaactagctccccagtttgcagtttctctgaattccagcatgtctagcctcagccaacgttttgcatttgatgtgacgatgacataccatacacatttgtgcattcatctatgttct

SEQ ID NO: 109288 - DNA, 1142 bp, Zea Mays
gcgacccattttgccaaatccctcgggaagagaaatttgtcaaaatgggtcgccctcctcgcgacgcagtgcgaccacgccgccaccttcgcctgggaaccgcgaccgctccatgaagaggggatcagatttgctcatcgcgacctaccttgggggttcattttgtgttgttgggttggatggggagaagtgtcgagcacatggtgcttgcagtttggtttgttcgtgttgacaatttctctgtggggcgttgcagggaagatgggggtcgaggagaggcaggcgcagaagagctcctaggaggagcatcccaagaacctcatcgtcgatgccatgatgctggactcccgcgctgtcaatctcgacaaggggccacctgtcgctctggacaagggggctgccctaagaatgaaagcattaaggtatgcagttggatattgcattcagagaggctcaagcgatagctgcaagtagttctaccttgtgcccagttttcttgttcttttagaaaattcttctgctacctatacctgaatgttactgatagcttacactaatggaagtcaaaatatcgtgggacatccagctgagcgagaagatagtgttgcatcaagttcagttttttttgtcatcaagttgtaggctgtgtggtacatccagctgagtgagaagacaatactgcaccaagcgagaagatagtcctgcaacaagttcagtattttatatcgcagctcttgcgatcggcttcctgctggtgacctgctaccttctcttgcagctcgtgccatcggcttcctcgacggcgaacgctcgtgaccgtaggaaccatattgtagaaacatttgcgtggttgaacaatagatttcaaagtgttttatgaaaattatagagagctattggagcattgtcttttttggatttattatttttaaagagatcccaatacccttgttttggaagctataactttgtgagttgatggagatgcttttactaattctgaattccgatgctgtaacaacatatctgaagagaattgttttggttagaactaggatctctattattcattgttgtgttgttgtaataagacttgccttgcctagctatatgcttgaatggaaggttttgttgggacaaca

SEQ ID NO: 109289 - DNA, 958 bp, Zea Mays
gcgacccattttgccaaatccctcgggaagagaaatttgtcaaaatgggtcgccctcctcgcgacgcagtgcgaccacgccgccaccttcgcctgggaaccgcgaccgctccatgaagaggggatcagatttgctcatcgcgacctaccttgggggttcattttgtgttgttgggttggatggggagaagtgtcgagcacatggtgcttgcagtttggtttgttcgtgttgacaatttctctgtggggcgttgcagggaagatgggggtcgaggagaggcaggcgcagaagagctcctaggaggagcatcccaagaacctcatcgtcgatgccatgatgctggactcccgcgctgtcaatctcgacaaggggccacctgtcgctctggacaagggggctgccctaagaatgaaagcattaaggtatgcagttggatattgcattcagagaggctcaagcgatagctgcaagtagttctaccttgtgcccagttttcttgttcttttagcttacactaatggaagtcaaaatatcgtgggacatccagctgagcgagaagatagtgttgcatcaagttcagttttttttgtcatcaagttgtaggctgtgtggtacatccagctgagtgagaagacaatactgcaccaagcgagaagatagtcctgcaacaagttcagtattttatatcgcagctcttgcgatcggcttcctgctggtgacctgctaccttctcttgcagctcgtgccatcggcttcctcgacggcgaacgctcgtgaccgtaggaaccatattgtagaaacatttgcgtggttgaacaatagatttcaaagtgttttatgaaaattatagagagctattggagcattgtcttttttggatttattatttttaaagagatcccaatacccttgttttggaagctataactttgtgagttgatggagatgcttttactaa

SEQ ID NO: 109290 - DNA, 372 bp, Zea Mays
gttacatagagtctatgttgatttgtatttctattgttttgatagaaaattcttctgctacctatacctgaatgttactgatagcttacactaatggaagtcaaaatatcgtgggacatccagctgagcgagaagatagtgttgcatcaagttcagttttttttgtcatcaagttgtaggctgtgtggtacatccagctgagtgagaagacaatactgcaccaagcgagaagatagtcctgcaacaactcgtgccatcggcttcctcgacggcgaacgctcgtgaccgtaggaaccatattgtagaaacatttgcgtggttgaacaatagatttcaaagtgttttatgaaaattatagagagctattggagc

SEQ ID NO: 109291 - DNA, 826 bp, Zea Mays
gcgacccattttgccaaatccctcgggaagagaaatttgtcaaaatgggtcgccctcctcgcgacgcagtgcgaccacgccgccaccttcgcctgggaaccgcgaccgctccatgaagaggggatcagatttgctcatcgcgacctaccttgggggttcattttgtgttgttgggttggatggggagaagtgtcgagcacatggtgcttgcagtttggtttgttcgtgttgacaatttctctgtggggcgttgcagggaagatgggggtcgaggagaggcaggcgcagaagagctcctaggaggagcatcccaagaacctcatcgtcgatgccatgatgctggactcccgcgctgtcaatctcgacaaggggccacctgtcgctctggacaagggggctgccctaagaatgaaagcattaaggtatgcagttggatattgcattcagagaggctcaagcgatagctgcaagtagttctaccttgtgcccagttttcttgttcttttaggtccatgaaagttcccatttttgtggtgttgcttagatggttggccctgttgactaccaaaatgacttggacttttggtgcatggataaatggactgcaagctttcttataacgtggcacatcataagaaacatacataactccaatttccgaaatatcttagtgcagaacaatgaatataagcctgtaacctctagcagagatacacaagagaagctctctttggcatttcactgaatttcctttagttggaagaatgtcgtatcactgtttatggttggcttctttaattaaaggagaacatctttctagtttcta

SEQ ID NO: 109292 - DNA, 504 bp, Zea Mays
gaagcatactgtagagtcatctatcctataagggatcgttcacagtggcctcatgttgatatggaccctgatgtaaaaggacctttagcaaaacgaggtgttggtaggcaaaggaaattacgaatgaaaggttgtctcgaaggtgggagtaaacctaagacaagtaataaagaaggtggtaggcaaatgaaaagaggccctatacgatgcaaaaaatgtggagaacttggtcacagacaaacaagttataagtgcccactcaacggtaccaaaaaaagaaataggaaacagaggagtcgcaaatatgcgggtacaaatgaaccttcacagaccgacattcagtctcccaagtctacatatgataggtacatttcacttataaatctcttgcttcaaatgtcgtcatataatgactaattaaaattttattttgtactagccttgtacttgtgtctgttagtggcatccaatcttcaagtgcgccaagtggagaagatggtccat

SEQ ID NO: 109293 - DNA, 983 bp, Zea Mays
gatcctcctaccgtgccgccgccggcctctccaccgttcattctcctatggcatctactcacgcaagcagtcctattcctgattccttgctcggcttgcgtggcccatggattcgatgtcatatcatgtgttgtttgctcacccgcctggtcgcagttcgtgtcggatggcgtgttcttcgcggagctgaatgagatgctcgcggaggacggctactccggcgtcgaggtccgcgtcacccccatgtgcatcgagatcatcatccgtgccacccgcgcccagaacatactcgcgagaagggccggaggatcagagagctggcttctgtgattcagaagcgctttaacttatcagagggtggcgttgagctctacgcagagaagctgaacaaccgcgggctctgcgacattgcccaggccgagtcgctccgctacaagcttctcggtgaactcgccgtgagaagttagtgggagggacttattactcttccattgctcaagtgttggagggttatgtacttctgaactagggcatgttatggtgttctcttatttgtcatcgagagtggtactaagggctgcgagatcagtttcaattggaacatgccaagctgaagcgatactcacctgcaaggagcgtcttctctgtgtactgcgtcgaagctttacctttttatgtaaattacgctgtaaatgtacagttcctctggacactgaatttctaagggctttttttatctttctgacgcaccattcactgatagctttatcgttgcatagtattttcttgaaattatatgccattctaacgaacaataatattgtagtatcattctttacaattttgattgatgacaatacaaccaaatcaatcaaataattaaataccaaaatgtaaatagaatctacttgttaggatgcaaatgtatgatataaaaagataccacttggtatttaaataaaaactttttggtcacgttaaaa

SEQ ID NO: 109294 - DNA, 917 bp, Zea Mays
gatcctcctaccgtgccgccgccggcctctccaccgttcattctcctatggcatctactcacgcaagcagtcctattcctgattccttgctcggcttgcgtggcccatggattcgatgtcatatcatgtgttgtttgctcacccgcctggtcgcagttcgtgtcggatggcgtgttcttcgcggagctgaatgagatgctcgcggaggacggctactccggcgtcgaggtccgcgtcacccccatgtgcatcgagatcatcatccgtgccacccgcgcccagaacatactcgcgagaagggccggaggatcagagagctggcttctgtgattcagaagcgctttaacttatcagagggtggcgttgagctctacgcagagaagctgaacaaccgcgggctctgcgacattgcccaggccgagtcgctccgctacaagcttctcggtgaactcgccgtgagaagggcatgttatggtgttctcttatttgtcatcgagagtggtactaagggctgcgagatcagtttcaattggaacatgccaagctgaagcgatactcacctgcaaggagcgtcttctctgtgtactgcgtcgaagctttacctttttatgtaaattacgctgtaaatgtacagttcctctggacactgaatttctaagggctttttttatctttctgacgcaccattcactgatagctttatcgttgcatagtattttcttgaaattatatgccattctaacgaacaataatattgtagtatcattctttacaattttgattgatgacaatacaaccaaatcaatcaaataattaaataccaaaatgtaaatagaatctacttgttaggatgcaaatgtatgatataaaaagataccacttggtatttaaataaaaactttttggtcacgttaaaa

SEQ ID NO: 109295 - DNA, 1666 bp, Zea Mays
gatcctcctaccgtgccgccgccggcctctccaccgttcattctcctatggcatctactcacgcaagcagtcctattcctgattccttgctcggcttgcgtggcccatggattcgatgtcatatcatgtgttgtttgctcacccgcctggtcgcagttcgtgtcggatggcgtgttcttcgcggagctgaatgagatgctcgcggaggacggctactccggcgtcgaggtccgcgtcacccccatgtgcatcgagatcatcatccgtgccacccgcgcccagaacatactcgcgagaagggccggaggatcagagagctggcttctgtgattcagaagcgctttaacttatcagagggtggcgttgagctctacgcagagaagctgaacaaccgcgggctctgcgacattgcccaggccgagtcgctccgctacaagcttctcggtgaactcgccgtgagaagggcatgttatggtgttctcttatttgtcatcgagagtggtactaagggctgcgaggtgtgagttccacaaataaaaaccattccagtttttgtttctatctcgctgcaccatgttatcctgacaatttttgctagtgtgctatttaaactgatggaacaattacagaacactttcctttgtcgaaattcatgagtgaattgttaacctagtatggtcctgcaggatagtgtgcatcagctttgccctgttttgatgcgtcttttgctgaaagtgtttcctgctatatcaatccgagttaaatgggcagttgggttaagcatatctgctttctccgacaatcattttcctcacatgtactcaggaagttatttttttgcgttctatatgctgctgttatctgttttgttggttagctttgtcagatatatttgtttcaacgacaagttagtgtaggctagagttgaaacccaacaaaaaccatatgtcaaggttaaagcgataggctaaatctttggtatatttcatcctttcaaatctcttactgctttatgtcaacttcgaccttcctctatctctctttttattgctattgtgacttgaaagatgttagaacaggtattctacatttatgttcttctcatccggattgccatatgttttcttcagttctgcacaactagttgctctgcaggatagtgtgtatcggctttgtgctaacttatatgcattttgtgccgtaagtgtttcctgctatatagactgaaggaaagtgggcagttgggttagacttgtatcctgtcttttccaacaatcattttcctctcatgtgacataatacatttattcttggaaactagtttttgaattgctgtcttagcatttacatgtttagctgctttattatactgtatgcatccaggggtatggaatatggtctgttgcatgtgctttttcctggtatgcaaagcatgtagtttgaattccatgggttgtgttatatgtttcgctatctaagtcagcttcatctgaaaatgataagcagatcagtttcaattggaacatgccaagctgaagcgatactcacctgcaaggagcgtcttctctgtgtactgcgtcgaagctttacctttttatgtaaattacgctgtaaatgtacagttcctctggacactgaatttctaagggctttttttatctttctg

SEQ ID NO: 109296 - DNA, 2207 bp, Zea Mays
gatcctcctaccgtgccgccgccggcctctccaccgttcattctcctatggcatctactcacgcaagcagtcctattcctgattccttgctcggcttgcgtggcccatggattcgatgtcatatcatgtgttgtttgctcacccgcctggtcgcagttcgtgtcggatggcgtgttcttcgcggagctgaatgagatgctcgcggaggacggctactccggcgtcgaggtccgcgtcacccccatgtgcatcgagatcatcatccgtgccacccgcgcccagaacatactcgcgagaagggccggaggatcagagagctggcttctgtgattcagaagcgctttaacttatcagagggtggcgttgagctctacgcagagaagctgaacaaccgcgggctctgcgacattgcccaggccgagtcgctccgctacaagcttctcggtgaactcgccgtgagaaggttatgctcttgaccgtgcatctttactgttgtagtcactctcacagcaggctcggctttttgctgtgccagaccctgtgttctaactctaaggtgacgaaattgatcaccccctccattgcattttatagttagtgggagggacttattactcttccattgctcaagtgttggagggttatgtacttctgaactaggtaaattttggagatagttattttagttgtgttttgtgcatgtcatctataaagcaaataggttaccgtgtaccaactttgtgtcggaagatgactatatcacctgtgccaactggtagtgtacctctgagaagctttggtcataggcttctgagatatttatggttggccacattacttgtctgtttgtttgtttttgtatgttttgagcttgttttattattgattattactgattactgatatgtgaatctttaattgctaaaatattcttgttagtatgcttggcacggcaccttttgtttacctctagtatttaatctttactaaattggtttgtttgattttcagggcatgttatggtgttctcttatttgtcatcgagagtggtactaagggctgcgaggtgtgagttccacaaataaaaaccattccagtttttgtttctatctcgctgcaccatgttatcctgacaatttttgctagtgtgctatttaaactgatggaacaattacagaacactttcctttgtcgaaattcatgagtgaattgttaacctagtatggtcctgcaggatagtgtgcatcagctttgccctgttttgatgcgtcttttgctgaaagtgtttcctgctatatcaatccgagttaaatgggcagttgggttaagcatatctgctttctccgacaatcattttcctcacatgtactcaggaagttatttttttgcgttctatatgctgctgttatctgttttgttggttagctttgtcagatatatttgtttcaacgacaagttagtgtaggctagagttgaaacccaacaaaaaccatatgtcaaggttaaagcgataggctaaatctttggtatatttcatcctttcaaatctcttactgctttatgtcaacttcgaccttcctctatctctctttttattgctattgtgacttgaaagatgttagaacaggtattctacatttatgttcttctcatccggattgccatatgttttcttcagttctgcacaactagttgctctgcaggatagtgtgtatcggctttgtgctaacttatatgcattttgtgccgtaagtgtttcctgctatatagactgaaggaaagtgggcagttgggttagacttgtatcctgtcttttccaacaatcattttcctctcatgtgacataatacatttattcttggaaactagtttttgaattgctgtcttagcatttacatgtttagctgctttattatactgtatgcatccaggggtatggaatatggtctgttgcatgtgctttttcctggtatgcaaagcatgtagtttgaattccatgggttgtgttatatgtttcgctatctaagtcagcttcatctgaaaatgataagcagatcagtttcaattggaacatgccaagctgaagcgatactcacctgcaaggagcgtcttctctgtgtactgcgtcgaagctttacctttttatgtaaattacgctgtaaatgtacagttcctctggacactgaatttctaagggctttttttat

SEQ ID NO: 109297 - DNA, 3093 bp, Zea Mays
ctttagtaagctacttctgcaaaaatataagttgatttttgctaaagcctctccttgactcctatttatccagcatacccttgagagtcttttctttagtcgggtaagacttgctgagtaattccatactcagggttttattctctggaacattgctaggatgccatcacgtcaagggcccacgatgagttgtagacattgttacacatatctaatcgttcagcttgggaaagaaccgagtcatattattcatctatcacagtgatgaggatgtatgccaccagttctttatcttcatcgatcaatcgttattcgagctcgtgacatttgcaaactcttttttttctctctctctctacgtactggagcacgactcatcgctccaatgcttcaacgaaatttatattagggcatgtacagtggtgtttaatgtggaggcgcttaaggtgtttaagggggttatttgtaaaaaaatcttaaagctgtctatccgtgaagagacgcatctggctcataaaccaagtagcaacagacgcctcacttccaactgtacgaatttgtcgtctgttctatcgatctgatgctatataaatacatttaattctgtatttattaataggctatgtttatagacattccattgtacaatagagtctcttagttatctcctgtgtttggagaaccgttttggtgtctctccactgtacatgcccttacatctccagaaaccgtaagcaagaaacatgtgcaattgattaacgggccgtttggatcccttcattttagaggaattggaattcactcaataaagtaacttatttagtttggaatttgacattccaccactttccaaagttcagatataagtctatatcaaattcatggggtggaggatgggaaataattttatatattagtagaatttgtttctactctgtaacttaagtgacactcttcgtttcacttctttatagtaaaaatgtagcacataaatatctccagcatcttgctaataatagtatacaaaaatattttatataaaatataattagtttaattgatatatgtctaaattattattattagaatggaattcaattccaatgatccaaacggggcgtaattgtaattgtaaagtgcacggacgatctccatttataaatctgcagtcaccatccatattccatccggactcccgcccgtctcggatccaggtccagggacgccgccctgcacccgcgccatgccgacgctcggcatcgcgcggctgctggacgcctccttccggcgccgcttcgccgcggcgggcctcgtcgaggcctccgtcccgctggacggcggcgcgaccacggtgcactgctggcgcttcccgccgagcgccgacgacggcggcggcgaggacgcccgccccgtcctggtgctcctgcacggctttgggcccccggcgacgtggcagtggcggcgccaggtgggcccgctctcgcgccggttccggctcatcgtcccggacctgctcttcttcggcggctcgtccacgtcgtcggcgcccggcgtctccgaggcccagcaggcggaggcggtggcgaaggtcgtggcggctgtggcgccggcgccggcgcgcgtgtcggtggccggcaccagctacggcgggttcgtggcgtaccacgtggcccggctgctgggccccggcgccgtggagcgggtggtggtcgccagctccgacctgctcaaggccgacgccgacgaccaagccttgctccgccgcgccggcgccgagcgcgtcgaggacgtcatgctgccgcgctccccggaccggctgcggcggctggtgcagctcgcctaccaccgcccgcgccgcttcacgccggggttcgtgctccgcgacctcatccagtatctgtacagcgacaaagtagaagagaagaaggagctgatcaaggggataacgctcggtaacaaagacaaattccagcttacgcctctcccccagcaagttcttgtgttatggggagagcacgatcagatattccctgtcgagaaggcatttgaagtggcaagggaacttggcgcaaatgctaggttggaggtgctcgaggacaccggccacatgccccaggaagaggatccgaagcggttcaacgaggccatcctcaacttcttgcttccagctccagagtcgtctttgtaacgcgatgtgggagctactcaggcccaaggatcaccgggagagttcataatttaagatgtatcctgcctgattgatgcagttatttgttggctcgatatcacttccaaggttgatggaattagtaattaaatatgttattatggggattgctatttatctgtcaacagatttcttcccccaatgaatgcttgcatctgtcatttcttatgctatctagtactcccctacatgattacccactatcatgacagaaacaaaacaaagttagatgatgtactttgtatatgcaaagtaatctagctaaaattaggcacaagtgtgtattcaaaccgtgtttgttggctccaaacccacatgcacatccacctagctcatagaaaacacgtatctttataatttatactatatacttaaatgtaaatagtaaccgtagcaatgtacgagcaactaactagtagtgctttgattatggcttccacttgttttttagcatgtctctataaacaacacggagactgatttccaatttcaacctgtgcccttcacatacctgataaccaaagccaagagatattaaagttagcaacaataaatatccttcgtcaaacaactacagccactcttgtatattttggttcaattggtatctttaatttctagtagtgacgttctttattttaattgatgtatattgatacacgaatatccacaagaattatgataaacctgtaatattattcagtctgttccataattcaatgttcctggacaggactagcagctgcaactgaaagaattatcaattgttaccgaagccaaggttttcaacagctgattacttttcatgaaaccatgtatgatgtatgacgtatgttacgcactcaagcgaaatgacatgttcagac

SEQ ID NO: 109298 - DNA, 1266 bp, Zea Mays
catccatattccatccggactcccgcccgtctcggatccaggtccagggacgccgccctgcacccgcgccatgccgacgctcggcatcgcgcggctgctggacgcctccttccggcgccgcttcgccgcggcgggcctcgtcgaggcctccgtcccgctggacggcggcgcgaccacggtgcactgctggcgcttcccgccgagcgccgacgacggcggcggcgaggacgcccgccccgtcctggtgctcctgcacggctttgggcccccggcgacgtggcagtggcggcgccaggtgggcccgctctcgcgccggttccggctcatcgtcccggacctgctcttcttcggcggctcgtccacgtcgtcggcgcccggcgtctccgaggcccagcaggcggaggcggtggcgaaggtcgtggcggctgtggcgccggcgccggcgcgcgtgtcggtggccggcaccagctacggcgggttcgtggcgtaccacgtggcccggctgctgggccccggcgccgtggagcgggtggtggtcgccagctccgacctgctcaaggccgacgccgacgaccaagccttgctccgccgcgccggcgccgagcgcgtcgaggacgtcatgctgccgcgctccccggaccggctgcggcggctggtgcagctcgcctaccaccgcccgcgccgcttcacgccggggttcgtgctccgcgacctcatccagtatctgtacagcgacaaagtagaagagaagaaggagctgatcaaggggataacgctcggtaacaaagacaaattccagcttacgcctctcccccagcaagttcttgtgttatggggagagcacgatcagatattccctgtcgagaaggcatttgaagtggcaagggaacttggcgcaaatgctaggttggaggtgctcgaggacaccggccacatgccccaggaagaggatccgaagcggttcaacgaggccatcctcaacttcttgcttccagctccagagtcgtctttgtaacgcgatgtgggagctactcaggcccaaggatcaccgggagagttcataatttaagatgtatcctgcctgattgatgcagttatttgttggctcgatatcacttccaaggttgatggaattagtaattaaatatgttattatggggattgctatttatctgtcaacagatttcttcccccaatgaatgcttgcatctgtcatttcttatgctatctagtactcccctacatgattacccactatcatgacag

SEQ ID NO: 109299 - DNA, 929 bp, Zea Mays
gcgccgcccaactcaagcataaaactcagccgcgcccatcttctgctcgcacggaccgcgcctccttccccctgctgtagctcgcgccctgctcttctgctcgtttcttctcgcgcgaagctccctcccatggcgtcaatctcgctgttcggcagttctctggaagccgtaccctgctcgcccagctcgcgaaaccctctgcgcgcggacctctctcatccccatggcgtcttcccctgctggttcgccggcgcccgagctccctctgcccgtcaattgcctcagcccgggagttcgtctgctttccccgctcgtccttccctcaaaatcgcctgaccgcgcgacctccatggagctcccttcagttcttcgcaattcgtggccgcgtccctcagctcgctctcccatgccgcacccagcccctgctctgctcgccgtggagctcgcctccgacccctgcttgccgcgttcctgcgcgccgtcgccttgctgcgtgcgtcgtggttttcttcctctgcgcgccaggctgttccggagcttcctttgctccattccttggttgcgtgtcgagcccctcgcgcaggccgcgagctgtctgttcgccgtagtcggagccgttctcagttgctcgccgtcgaagctcccctgttggctgcgtcctgcatgtcctgcatgcgctcactcctcatccatcggtttctggcgggtttacctttagcgtcgagtcgtcaaacccgtcatcctctgctcaaacccacctcgtcagctcgctccagacataatcctgtcgtcgttctgtgcgtcgggtgaatacgaagctagccgagtaatattcatcgagtgcgtgaccaaaaagctcgaaccagtcgtcaatcgtctcaacaacaaccgtatccacgactcccaccgttccaataattttgccgcat

SEQ ID NO: 109300 - DNA, 1621 bp, Zea Mays
cactaccccactcccaggcgccgcacaggtacgtcgccggcggcgatgacgacgcgcttcaagaagaaccgcaagaagcgcggccacgtgtccgccgggcacggccgcatcggcaagcaccggaagcatcccggaggtcgcggtaacgccggtggcatgcaccaccaccgcatcctcttcgacaagtaccatcccggctacttcggtaaggtcggcatgcgctacttccacaagctccgcaacaagttctactgccccgcggtcaacatcgagcgcctctggtcgatggtgcccgccgaaaaggcggcggaagccgtcggcgacaaggccccgcagatcgacgtcacgcagttcggctacttcaaggtgctcgggaagggggtgctgccgcccaagcccatcgtcgtcaaggccaagctcatctccaaggtggccgtcggatttttcgtggacgctccctagcggctcggcgtctccatgtgccgtgaaggttccagaacccacggggggtcgtcttcctccacaagattctgccaaaagatcctctcggatgcccccgcccacccatttcgccagtcgccatcgagctctcgcttccgccgcccgctgccgttgtatcaccccagtgctgagccctaggatgtgactggcggacgtctctatggccgagccgtaggtggaggcggcacctcggcaccgtgggagatggaggacgatgacaccgagggtgtaggcgagagcacctgtccccccgccgccgaccgaggaggctcctcctcggccggcggcggcggcggcgactcacacggttacactgacatcgagaaggaggtattcgaccgtctcatggagaagagaatcccggaggtcgtcgcggacccggtggccttccgcgaagagctccaccgccacttcgagcgcctgccgctgagctacgccatcgatgtgaacgtcgacaaggcggaggacgtgctgctgcaccggagcattctcaacgagtgcactgaccctgaaaatcgccccatcttccatgtgggcttcctgaactgcatcccgccctcgttggatccacagtataacactcaatccatctctataacactcaatccatctctacgagcgaaaacggtaattgtgggggttctcaggattccactttgagaaaatttgagccatgtgaagggatcgaggacctcagtttaactggacaaaaggttgtgggtgactatgtggccggttcttcgaggggagatgtagaaatcctccatgttcatgaaattattttttctaccattgacaaaccaaagctcctcgctcagctatctgctttgttgtctgaagttggactgaacatccgtgaagctcatgtcttctcaacgactgatggcttttgtttggatgtatttgttgttgatggctgggatacaaaggtgatttaccatagtatgattgtgtagtgctagcttgcttatctatgtatacttggagcatgttctgtaatctgtaggaaccatttttttccctgaaagaaactacagcaaccatttaggtcgcttgaacgttattgtcaaaaacataattaccagctggataatgtcatcattttgtccaattagccttt

SEQ ID NO: 109301 - DNA, 1587 bp, Zea Mays
cactaccccactcccaggcgccgcacaggtacgtcgccggcggcgatgacgacgcgcttcaagaagaaccgcaagaagcgcggccacgtgtccgccgggcacggccgcatcggcaagcaccggaagcatcccggaggtcgcggtaacgccggtggcatgcaccaccaccgcatcctcttcgacaagtaccatcccggctacttcggtaaggtcggcatgcgctacttccacaagctccgcaacaagttctactgccccgcggtcaacatcgagcgcctctggtcgatggtgcccgccgaaaaggcggcggaagccgtcggcgacaaggccccgcagatcgacgtcacgcagttcggctacttcaaggtgctcgggaagggggtgctgccgcccaagcccatcgtcgtcaaggccaagctcatctccaaggtggccgtcggatttttcgtggacgctccctagcggctcggcgtctccatgtgccgtgaaggttccagaacccacggggggtcgtcttcctccacaagattctgccaaaagatcctctcggatgcccccgcccacccatttcgccagtcgccatcgagctctcgcttccgccgcccgctgccgttgtatcaccccagtgctgagccctaggatgtgactggcggacgtctctatggccgagccgtaggtggaggcggcacctcggcaccgtgggagatggaggacgatgacaccgagggtgtaggcgagagcacctgtccccccgccgccgaccgaggaggctcctcctcggccggcggcggcggcggcgactcacacggttacactgacatcgagaaggaggtattcgaccgtctcatggagaagagaatcccggaggtcgtcgcggacccggtggccttccgcgaagagctccaccgccacttcgagcgcctgccgctgagctacgccatcgatgtgaacgtcgacaaggcggaggacgtgctgctgcaccggagcattctcaacgagtgcactgaccctgaaaatcgccccatcttccatgtgggcttcctgaactgcatcccgccctcgttggatccacagtataacactcaatccatctctataacactcaatccatctctacgagcgaaaacgaaaatttgagccatgtgaagggatcgaggacctcagtttaactggacaaaaggttgtgggtgactatgtggccggttcttcgaggggagatgtagaaatcctccatgttcatgaaattattttttctaccattgacaaaccaaagctcctcgctcagctatctgctttgttgtctgaagttggactgaacatccgtgaagctcatgtcttctcaacgactgatggcttttgtttggatgtatttgttgttgatggctgggatacaaaggtgatttaccatagtatgattgtgtagtgctagcttgcttatctatgtatacttggagcatgttctgtaatctgtaggaaccatttttttccctgaaagaaactacagcaaccatttaggtcgcttgaacgttattgtcaaaaacataattaccagctggataatgtcatcattttgtccaattagccttt

SEQ ID NO: 109302 - DNA, 1864 bp, Zea Mays
aagattctgccaaaagatcctctcggatgcccccgcccacccatttcgccagtcgccatcgagctctcgcttccgccgcccgctgccgttgtatcaccccagtgctgagccctaggatgtgactggcggacgtctctatggccgagccgtaggtggaggcggcacctcggcaccgtgggagatggaggacgatgacaccgagggtgtaggcgagagcacctgtccccccgccgccgaccgaggaggctcctcctcggccggcggcggcggcggcgactcacacggttacactgacatcgagaaggaggtattcgaccgtctcatggagaagagaatcccggaggtcgtcgcggacccggtggccttccgcgaagagctccaccgccacttcgagcgcctgccgctgagctacgccatcgatgtgaacgtcgacaaggcggaggacgtgctgctgcaccggagcattctcaacgagtgcactgaccctgaaaatcgccccatcttccatgtgggcttcctgaactgcatcccgccctcgttggatccacagtataacactcaatccatctctataacactcaatccatctctacgagcgaaaacggtaattgtgggggttctcaggattccactttgaggtacaggctatgacccacgcactttgcaacaccatggtgaagaattttacctttggtgcaactttaaatcaacctcttgtcatctgtagtttcgattagcctttttgaaaaaaaagctgtgccttgtatgagtatttttgtggtgttatgtcttgcttgctaaaaacatatgcttatatatatgctgcacagaaaatttgagccatgtgaagggatcgaggacctcagtttaactggacaaaaggttgtgggtgactatgtggccggttcttcgaggtctgtgtctacctcagttgaatggaagctgcatcaatgaaacctttgtgtatcaggctgccattcagccatatgacttgatctaaacaaccaccactgccatgatttcaatcgcaaaagctcatgccttaattttgatttataaaagcctgaataatatatccacggaccatggcataactcatgcttctggtttagattagaaataataatatcgcttatgcctgattggtgtaaattgatgagtgtttctaccatgcttccatttgttgtgaatggcactttccgcaactgtaggtcaatggaagagttattgcagcaagcttctttgacgtgaaaggagtacttttatttgtaaaatttggttgatcatgagcataaacttataagttagactttagaaattcagcatatttctatgaaatgattggccttgtcttcctcgtctgcttttatattttacgttttcccaaccaattttctgtatgtggaccttctttgtgggaaatcattctattaaattgcttgacttatgagttttggctggttcatggaacttctgaaactgacactcaaatattcacaggggagatgtagaaatcctccatgttcatgaaattattttttctaccattgacaaaccaaagctcctcgctcagctatctgctttgttgtctgaagttggactgaacatccgtgaagctcatgtcttctcaacgactgatggcttttgtttggatgtatttgttgttgatggctgggatacaaaggtgatttaccatagtatgattgtgtagtgctagcttgcttatctatgtatacttggagcatgttctgtaatctgtaggaaccatttttttccctgaaagaaactacagcaaccatttaggtcgcttgaacgttattgtcaaaaacataattaccagctggataatgtcatcattttgtcc

SEQ ID NO: 109303 - DNA, 909 bp, Zea Mays
cgccattcccagctcctagagtttcctcctccactccctcccccccgcctccactaccccactcccaggcgccgcacaggtacgtcgccggcggcgatgacgacgcgcttcaagaagaaccgcaagaagcgcggccacgtgtccgccgggcacggccgcatcggcaagcaccggaagcatcccggaggtcgcggtaacgccggtggcatgcaccaccaccgcatcctcttcgacaagtaccatcccggctacttcggtaaggtcggcatgcgctacttccacaagctccgcaacaagttctactgccccgcggtcaacatcgagcgcctctggtcgatggtgcccgccgaaaaggcggcggaagccgtcggcgacaaggccccgcagatcgacgtcacgcagttcggctacttcaaggtgctcgggaagggggtgctgccgcccaagcccatcgtcgtcaaggccaagctcatctccaaggtcgccgagaagaagatcaaagccgccggcggcgccgtcgtgctcaccgcctagttttcagtccttattcgcctcttggttttgagatctatatctggactagcagtgctttcttgtctcacctatttgtgttaagaagacgtagtttttaaatccattgctccttcctgtttggacagtgctttcatatcagatatttcaggtatattagagctaactgcgctatcaactgtgctattctcatccgttcaactgattttgtgatgcatattgcgatatctttcgtgttgtgaaactcgtatgtctcttttcttgcgctataaggttggtagaaacaatgtgaaatacgggtattgctagcttgttctctttgtattgtagagtgtagactaataaactcgactcaattctctgtgctgcgcctgctgc

SEQ ID NO: 109304 - DNA, 156 bp, Zea Mays
atggccatggaaagggagccggcgccgaggaaggcgcgctccacgccgagcagcccgaggcgcgacgccgcccctggcatctccgccgtggcatcgggcggcgccgggagctcgctggcgcgcacggggagctgcttcgccgctctcgtcgaatga

SEQ ID NO: 109305 - DNA, 1915 bp, Zea Mays
atggagcataatgctgatcgcacaccattaatagacatctcaaacacaagcgttacaggtgatcaaataggatcaaactcgcttggaccaatagacgatgctaatgaacgtaagaggcaaagggatagagaaagatatgccacgatgtccattgaacaaaagaatgagaaaaataggaagcgccgtgaagcacgtcaacgaaacaaaggactacccctaaagtctgagtcatctagaggtcctattaaaaacactccattggctggtaattctatcgaacgaaagaggcaaagggatagagaaaggcgtgcaacaatgtcggttgaacaaaggaatgagtacaataacaagcgtcgtcaaatgcgtcaacgaaataagggacaaaatgtgatgcccgatgtttcaggagatggcgacaaaaaagaaaatgtggatccagatgatgatagcgactggctgcatcggaacgagacattccagtcaaacgactatgtcgcaacgacagaccttctgccaccaggcagtgtgcatgaatctgttggtgtcattggggaaccgagtatcggcgttagggagtataggcttgaacgccttaggttgtataatcaaacaccaaagcgaaaagaggcaaagatagagtacatgagaaaacgtagagtgctacaggctgacactctgaatgttgcgtccatcgccatggaggacccaacatatacccctgaggttgtgcaccctgcaacggaaccttcaacagttaccacctgcgactgggttatccctgaattcattaggacacctttcctaccagctcaaacacagaccgaggatgtcggttcattcgatatgtctactgaagcaataagacataaacatcatgtgccgcgtggggaaagacaagctatcttagcccgtcgaaacaaacaatttcaagcatccattgcaaggaacgtgactactttgaatggggatactatcggtgacgccaacaacaatgcttcaacacatctaaagatgaatcctctaaaaccgtcgatgggagcagagaagcagatgtacggtcagccaagtggtgtaagaccatttggagtatcgctgttgattgctgggtatgatgacaatggcccacagttgtatcaggatcatacttctcctggaaggcatcagccatgggaaaaaaatgtgtcaaatgcaaagacatttcttggaaagagatacacagaggatatagagcttgatgatgccatccacactgcaattttgactttgaaagaaggatatgaggggcaaatttcctccaacaacattgaaatcggaattattcgagctgaccgtgagttcaaagttctaagcccatcagagatcaaggatttcttggaagaggtggatctctgcagtttgtttatgtgattcacgttcttgtgtgctgtatcgatacccaggtgtttgttgtgttcacattgcagatttgctgtagtgcatggatttcgtggctgtaagaaatcaagttcgctatcctactgatgcgcttttggcgtgtgataagttgtttcaacctgatgcgcctgtgcaagaggccatgagaagcgatatggcttggatcaatagagcgtgtcccaaattcagtacttgtgcgagaacaagagatcaatataatattgttggcaacgtgttaagtgcaaatcaagttttcgtgcaaaccaactaacataagtcacaaaaaattattaaattataactaacaaaagtcacaaaaaatattaaattatagatgtactttaaaatcaatttttcgtgcaaaccaattaacaaaagccacaaaaaatattaaattataactaacaaaagtcccaaaaaagcattaaattatagatgtacttcaaattcatcatatgataagagataaaagaagagaaaa

SEQ ID NO: 109306 - DNA, 706 bp, Zea Mays
attagatattagcatgagaagtttgtatatctgtatagtaacttatgtcagatctaatgtactatgagtcattctttattagatattgagatattacctgcatgttagacttcagtgtgtgagacttttatgtggcttttcccctttccttgtacaaattctatagcaggcttttatgtggcacaaacctgtagtaggatgcgccttattcccttttgctttgtaatctgcttgttattaatatgcctcattgactgcacagttcagcctaaatccccaaccattatagaagatgttctggacttctacgtctgaagttaactaacggtctaggatctgcttccatttacacttttttacttcaagagagtaagtagttgccagagcactttttccacatatttgtggataataagtagacatcaaactagatcacctggacaacagggaataaggtggcataactttagcaaaaaaatagttaaagttatgattctctttatgaattttcatagagattgtgatgtcaaatatctaagaagaaacgcatggaaaacttctatattgatagagtagtttcgttgcagaaaaaaaatactatattgaaacgtgtttgaggcgagaggcatatctttgcttctgaagtcctattttctaccataggttgggttgtactaatgttcagaagactcatcctactgcacgt

SEQ ID NO: 109307 - DNA, 761 bp, Zea Mays
atggagatcactgacccacgggcctaccttacgcacagtttgcccgcaaagagaggagcggaggtgtatgaagccctgatggagatcactagcccacgtgcctaccttattcactgtttgcccgcagagagaggattggaggtgacagacggtgccatcgaggctcccaaatcaatcgtgttcccccaggccgagaacagaatgcacgctcagaaatagcataccatcttcaaacagcccggggaaattaccaattaacaggggtgatattgttgaagtagatacatggattagtgctaatggtaaaaatggaatgcgtagacattggcatgtacatgattctataacaagccatacaatactaaaggtgacaagtacttctgacttttggtaatgtgagggtgtcggagagggaattcttcgaccgggtggcggagtgcacccgccctaaatcctaagatgaggagggggcttaagcgttttgcctgttggtagatgaacgatgaactcaggaacacgcgaggatttagagtggttcgggccgccggagcttaataccctactccactgtatgttggattgctgtgaaagcttgagagctgagagtctaagtctaagttcggtctaactgtgtctgagtctgtccctttgtaatgttgcatgcctccccttttatagctaaagaggggcgtacaagggtgctgagccccgacatgtgggcccaggaatataatggatgtaatatttggagttggtggagc

SEQ ID NO: 109308 - DNA, 1202 bp, Zea Mays
tgtttttttctacaggtgttttatgaattgcttttttacttcttgtttgatgtgaaatgaaatgtcatgtggtatctgatgcctggtctcgtttcagtggcctcgcgtctcgtaagagtggcagacagtgatcggcgggttctttgcgacacgggctgctcttcgaccatgagcttcttgttactattcccccgcgacatttgtttggcatttctgttaacgattttctttgtttatattacactaaagtcaaagcctgaagccacgtcggcaactggatctaccattatgacataagcagaaatctaaataacacaaaaaaatcaggattactatatatttgtgcacaaagccacgaagaattgcatgaattgtggacaaagctgaaattcaaggatgctgaaagcctgcagcagacttctgacatggagagtgtgaatcttctccaaagtggggggccatgagatcaatgttgcctcggatcaatcacaaacaaggttgtctggatacacttcagttccatatacaagcttccctgcccaggcagagctaactgttgtaggttgcagcaaaggattggatgcaaaagggcgctggacacgtgctcgtgtggcccaagtgagcatgctaatcagccccttttggttccttgcacagcttacgttcaatctgtctctaagatacaccactgtcacggtaagtgttactaagaactgaatgatacttccatattttaaagccaaacctggcccaggcaccacccaggcaccagaggcctccaaacggtcaaggatacaccactgtcacggtcaagtcctgcagaagctgaaactgatcatggataagactttgccttgtgtcacaatgggtgcatttgctggtggtccttggatcaggttgctcatgggtggtgaatgatctgacgacttcagaagaggatagatctgagattacctttcatgcatgtcaaggaagttaagtagctgatgccatcaaagaaatggagaaacgtcaggtgaaccgcgagcagaattccgtggcgcatttgttagcgcagttagttaggactctgttcatacagctgttcgattaagccaaatacctgatttagttttatattggttgttgtcaaagaatttgtgaaatattgaggttgataatatatgtggcgttcgtttttatgtaatcattgttcactaata

SEQ ID NO: 109309 - DNA, 652 bp, Zea Mays
cgtagcaccgccacaccgcacgcgtccgtggcggtgtatgtgtcctgtttgagcttcgcgagcttgtagaaggcacatttctgtccctacgttttacttgtttaatttgttttttttcagcgaacatgcattttggagagaccaacttgaatgtgcggagcagtcgatcacacaatattttcataatggtaattgtgagcagcagtagagactaagcagttctgtaattgcatttgttctaagatcattttctgtagttgcatggaagcaataactgaatcaagaatgctctatttatttcgatctcagccattttggaggacgaacgagcaccggggagagtccaggaggaggcagatactgctgggacatgtccaagccagtggagatgcagtggagatggagatcaacattggcatggagaagctgtgaaacccaccgcagcagaaccccacccagaggaagtggcctcgcgtctcgtaagagtggcagacagtgatcggcgggttctttgcgacacgggctgctcttcgaccatgagcttcttgttactattcccccgcgacatttgtttggcatttctgttaacgattttctttgtttatattacactaaagtcaaagcctgaagccacgtcggcaactggatctac

SEQ ID NO: 109310 - DNA, 100 bp, Zea Mays
acttgatttttcgcctatcttgcaatagcaactttaacactgaaaaagattgcttatggccactggcaagtatgaattgatcaaattctcaaaacatatc

SEQ ID NO: 109311 - DNA, 1216 bp, Zea Mays
atgccccccgcctccatagtccctgtcatcggcgacctcagatccaacaggttggtctgcttgcgccgtgatcgcggaagctaccgcgccttcgtctccgtggatgaggtcctggatttgtgtgtcactggcgcggaatatgagggatcgagggcggcgcaggcggcgagctcgtgggcggaacagactggtgagagcaagaggatggatcaggagcttgagccccaggtacaaagactaacatcagcttctactgtactaaggagggtgttggataatccagcactccaggactatcaagagaataatggatttggagacttgaactgtccggccgcgtgtaccgcgtcaccttcaccaaccggctcaacggggccgcaggcgcggtgccgtgaagcagatacggaccgccgggaaactgtacctccacaagtaaaatatttatttagccctctgtctttgtttttttccatattctaagtttatacctaataacacatttgcacatacttgatgcatttgtctatggtattttctttttataaagtgaatcatcttgacaatgaaatagtgcatttatcagttttgtaatgggacatcactcctcaagtatccagaaggtaaactagatgtatttctcatacatcaattgggcaagtctgagagatagctgtcccaatttgtccagaaatttatttacctgtacctccacaagtaaaatatgtatttagccctctatctttgtttttttccatattctaagtttatacccgatgtataaatctacagatactttcttacctttgtttagttacgataaactttatccatcaattattttgtatacttttctaacctatgtaaatttagaggttaatttggactgtttaatatttaaatgttgtgggtggattaaggggttatttagtgttttaagtacaaacagaggaggacaattcatgcacatactttagctttttattgcaatgatagataatttatatgaagtttaggacttattttggatataatatgtcagaatgacagagattcacctgataggcgagcatgagttctcgctaaaatgtagcattgagtattgactgcagttcagtaagtaaattaaagcatgatagtattgttgatccagtgaacccttcatcctatattctctttgagctaatcttcttgcaccttgatgtaaaccttgacatat

SEQ ID NO: 109312 - DNA, 2104 bp, Zea Mays
attcagtttgacttgagaatctagatagaatggtttttttttctcattcctaaaataaaatattgagggtggttttggaagactccaaaacactcaaaacaaatcaagagtttgaggtcacatttgtcatggcgcatcctgcatcaagcaaacaatttatttagttttgaatggctatggctgttgccttacaagctgaaagaagtgtcattgaaaagaagaaacccgatatcaaacaaaggagggtggttgtcactggcatgggtgtagtgacaccattgggccatgatcccgacgtcttttacaacaatcttcttgatggtgttagcggaataagtgagatagagaggtttgactgttccaacttccccacgagaattgcaggagagataaaatccttttccactgatggttgggttgtacctaaacttgcaaagcggatggacaagtttatgctatatctgataactgctggaaagaaagcattagaaaatggtggactcactgaagaactgaggaacgagttggacaaaaccaggtgcggggtcctcattggttctgcaatgggcggcatgaaggtttttaatgatgcaatttgaagcactgagggtctcttacaagaaaatgaacccattttgtgttccttttgcaactaccaatatgggctctgcaatccttgcaatggatctgggatggatgggaccaaattattctatttccacagcctgtgctaccagtaacttctgtatccttaacgcagcaaaccacatcagaagaggcgaagctgacgttatgctctgcggtggttctgatgcacctcttatcccaatcggattgggaggttttgtggcctgcagagcactttcacagaggaacagtgacccaacgaaagcttctcgaccttgggacatgggccgtgatggttttgttatgggggaaggggctggtgtcctcgtattggaagaacttgagcacgccaaggaaagaggtgcaacaatatatgctgaatttcttggtggaagcttcacatgtgatgcttaccacatgactgagccacatcctgaaggaagagggattactctctgcatagaaaaggcactagctgatgcaggggtagcaagggaagaaatcaactacgtgaatgcccatgcaacttctacacaagcaggtgacctgaaggagtatgaggctattgtgcgctgttttcgccagaaccctcaactgagggtgaactcgaccaaatcaatgactgggcatcttataggagcagctggtggaatagaagcagttgcttctatacaagctataagaactggttgggtccatccaaatttgaatttagaaaatcctgaggacactgtggatgtgggcatcttggtaggatcacagaaggagagatgtgaggtgaaggtggcgttatccaactcattcggcttcggtgggcacaactcatcaattctctttgccccctttaaggaactgccatcttcctcatcgtccaaatagattcatatatctggatctccacatagaagacaagtggactctgcaacttcctcggtgccatagatattacagggaggtccaaactgagcgtatctgagcgaacaaaacatcagcccccctacatgtttcatctatatcacgaagttgcagatatgtggtaactatcaaaaggatttaccgtacctgggccagtgttttcgccttcaccatacctgcccattgtcagtactatttcctagatttggagtagtcccgtagctaatcctcttccctgcggaggtgatgggattttatgttgtattgatgttgtcaacaatgtcgttcttagccatgaattgctggttccactgtaagcaccgctggatgtttatcgctttggctgtttttctgctgttcataactgagttaaagatttgtaaatggcgacgctgttcggcctttgatcatctgtgaaacttgagcggagggagcaacaagtatggcctagcctagcagtacgctagtgcctttgaagaaggcaggctagctgctgctcctcaaagtttagcacctagccgaccatagtctctttctcttttacagtcttctctaaaaaatc

SEQ ID NO: 109313 - DNA, 2425 bp, Zea Mays
attcagtttgacttgagaatctagatagaatggtttttttttctcattcctaaaataaaatattgagggtggttttggaagactccaaaacactcaaaacaaatcaagagtttgaggtcacatttgtcatggcgcatcctgcatcaagcaaacaatttatttagttttgaatggctatggctgttgccttacaagctgaaagaagtgtcattgaaaagaagaaacccgatatcaaacaaaggagggtggttgtcactggcatgggtgtagtgacaccattgggccatgatcccgacgtcttttacaacaatcttcttgatggtgttagcggaataagtgagatagagaggtttgactgttccaacttccccacgagaattgcaggagagataaaatccttttccactgatggttgggttgtacctaaacttgcaaagcggatggacaagtttatgctatatctgataactgctggaaagaaagcattagaaaatggtggactcactgaagaactgaggaacgagttggacaaaaccaggtgcggggtcctcattggttctgcaatgggcggcatgaaggtttttaatgatgcaatttgaagcactgagggtctcttacaagaaaatgaacccattttgtgttccttttgcaactaccaatatgggctctgcaatccttgcaatggatctgggatggatgggaccaaattattctatttccacagcctgtgctaccagtaacttctgtatccttaacgcagcaaaccacatcagaagaggcgaagctgtaagtaacttcaaccttccatattctctttgaaaagtaaagtttcatttgcaacccttatttataatctttcaggacgttatgctctgcggtggttctgatgcacctcttatcccaatcggattgggaggttttgtggcctgcagagcactttcacagaggaacagtgacccaacgaaagcttctcgaccttgggacatgggccgtgatggttttgttatgggggaaggggctggtgtcctcgtattggaagaacttgagcacgccaaggaaagaggtgcaacaatatatgctgaatttcttggtggaagcttcacatgtgatgcttaccacatgactgagccacatcctgaaggaagagggattactctctgcatagaaaaggcactagctgatgcaggggtagcaagggaagaaatcaactacgtgaatgcccatgcaacttctacacaagcaggtgacctgaaggagtatgaggctattgtgcgctgttttcgccagaaccctcaactgagggtgaactcgaccaaatcaatgactgggcatcttataggagcagctggtggaatagaagcagttgcttctatacaagctataagaactggttgggtccatccaaatttgaatttagaaaatcctgaggacactgtggtaagctccttggcttgtgtagtctgtgtggcgagtattctcgtggtgttttgccccgcaaggagttgtaagagtcgtctagactcctttttctttctttttaatataatgatgcgtaattctcctgtgtgttcgggaaaaaacaaatcttctttctacttctactaaataagctagatatgaatgaaagagcaaaatctatatgttgaatggtgttttaaatttttaatgttggtcttgatgcaggatgtgggcatcttggtaggatcacagaaggagagatgtgaggtgaaggtggcgttatccaactcattcggcttcggtgggcacaactcatcaattctctttgccccctttaaggaactgccatcttcctcatcgtccaaatagattcatatatctggatctccacatagaagacaagtggactctgcaacttcctcggtgccatagatattacagggaggtccaaactgagcgtatctgagcgaacaaaacatcagcccccctacatgtttcatctatatcacgaagttgcagatatgtggtaactatcaaaaggatttaccgtacctgggccagtgttttcgccttcaccatacctgcccattgtcagtactatttcctagatttggagtagtcccgtagctaatcctcttccctgcggaggtgatgggattttatgttgtattgatgttgtcaacaatgtcgttcttagccatgaattgctggttccactgtaagcaccgctggatgtttatcgctttggctgtttttctgctgttcataactgagttaaagatttgtaaatggcgacgctgttcggcctttgatcatctgtgaaacttgagcggagggagcaacaagtatggcctagcctagcagtacgctagtgcctttgaagaaggcaggctagctgctgctcctcaaagtttagcacctagccgaccatagtctctttctcttttacagtcttctctaaaaaatc

SEQ ID NO: 109314 - DNA, 2179 bp, Zea Mays
attcagtttgacttgagaatctagatagaatggtttttttttctcattcctaaaataaaatattgagggtggttttggaagactccaaaacactcaaaacaaatcaagagtttgaggtcacatttgtcatggcgcatcctgcatcaagcaaacaatttatttagttttgaatggctatggctgttgccttacaagctgaaagaagtgtcattgaaaagaagaaacccgatatcaaacaaaggagggtggttgtcactggcatgggtgtagtgacaccattgggccatgatcccgacgtcttttacaacaatcttcttgatggtgttagcggaataagtgagatagagaggtttgactgttccaacttccccacgagaattgcaggagagataaaatccttttccactgatggttgggttgtacctaaacttgcaaagcggatggacaagtttatgctatatctgataactgctggaaagaaagcattagaaaatggtggactcactgaagaactgaggaacgagttggacaaaaccaggtgcggggtcctcattggttctgcaatgggcggcatgaaggtttttaatgatgcaatttgaagcactgagggtctcttacaagaaaatgaacccattttgtgttccttttgcaactaccaatatgggctctgcaatccttgcaatggatctgggatggatgggaccaaattattctatttccacagcctgtgctaccagtaacttctgtatccttaacgcagcaaaccacatcagaagaggcgaagctgtaagtaacttcaaccttccatattctctttgaaaagtaaagtttcatttgcaacccttatttataatctttcaggacgttatgctctgcggtggttctgatgcacctcttatcccaatcggattgggaggttttgtggcctgcagagcactttcacagaggaacagtgacccaacgaaagcttctcgaccttgggacatgggccgtgatggttttgttatgggggaaggggctggtgtcctcgtattggaagaacttgagcacgccaaggaaagaggtgcaacaatatatgctgaatttcttggtggaagcttcacatgtgatgcttaccacatgactgagccacatcctgaaggaagagggattactctctgcatagaaaaggcactagctgatgcaggggtagcaagggaagaaatcaactacgtgaatgcccatgcaacttctacacaagcaggtgacctgaaggagtatgaggctattgtgcgctgttttcgccagaaccctcaactgagggtgaactcgaccaaatcaatgactgggcatcttataggagcagctggtggaatagaagcagttgcttctatacaagctataagaactggttgggtccatccaaatttgaatttagaaaatcctgaggacactgtggatgtgggcatcttggtaggatcacagaaggagagatgtgaggtgaaggtggcgttatccaactcattcggcttcggtgggcacaactcatcaattctctttgccccctttaaggaactgccatcttcctcatcgtccaaatagattcatatatctggatctccacatagaagacaagtggactctgcaacttcctcggtgccatagatattacagggaggtccaaactgagcgtatctgagcgaacaaaacatcagcccccctacatgtttcatctatatcacgaagttgcagatatgtggtaactatcaaaaggatttaccgtacctgggccagtgttttcgccttcaccatacctgcccattgtcagtactatttcctagatttggagtagtcccgtagctaatcctcttccctgcggaggtgatgggattttatgttgtattgatgttgtcaacaatgtcgttcttagccatgaattgctggttccactgtaagcaccgctggatgtttatcgctttggctgtttttctgctgttcataactgagttaaagatttgtaaatggcgacgctgttcggcctttgatcatctgtgaaacttgagcggagggagcaacaagtatggcctagcctagcagtacgctagtgcctttgaagaaggcaggctagctgctgctcctcaaagtttagcacctagccgaccatagtctctttctcttttacagtcttctctaaaaaatc

SEQ ID NO: 109315 - DNA, 2470 bp, Zea Mays
agtcgtccccgtccctccactcctcccgtcgagcacttggcactgccaatggcggcagccgcccacaccccttcgatgcgcgcaagccgcctcctttcctcctgagatcgacgcacctcctcctctcgtactccattcccgctccaagttcgtttcttcggcaccgagccatcgcacggccgcccccgcatctcgtcctgctctcaggtccttggcctccgccgttcttcgacaggggcgcgccccggtgcccactccgcgaaatccgagtcccttgtgcagctccgtagggtggaagagatccatcaggcggtgagcggtaggaggcgcccgtacaactgaggggacgggcaatggcggccgtggcaggcccactctgcacgtggctcgtcgccgcgtgcttgtctgcggcttgcgacgcagaagagtacaagcagaagcattgctgccccggcggaagcggcgctgggggcggcgtcatgctcggcctgcgccgccgcctcggcgcgcggcgtcgcggcttggcgcgctctggaatggctatggctgttgccttacaagctgaaagaagtgtcattgaaaagaagaaacccgatatcaaacaaaggagggtggttgtcactggcatgggtgtagtgacaccattgggccatgatcccgacgtcttttacaacaatcttcttgatggtgttagcggaataagtgagatagagaggtttgactgttccaacttccccacgagaattgcaggagagataaaatccttttccactgatggttgggttgtacctaaacttgcaaagcggatggacaagtttatgctatatctgataactgctggaaagaaagcattagaaaatggtggactcactgaagaactgaggaacgagttggacaaaaccaggtgcggggtcctcattggttctgcaatgggcggcatgaaggtttttaatgatgcaatttgaagcactgagggtctcttacaagaaaatgaacccattttgtgttccttttgcaactaccaatatgggctctgcaatccttgcaatggatctgggatggatgggaccaaattattctatttccacagcctgtgctaccagtaacttctgtatccttaacgcagcaaaccacatcagaagaggcgaagctgacgttatgctctgcggtggttctgatgcacctcttatcccaatcggattgggaggttttgtggcctgcagagcactttcacagaggaacagtgacccaacgaaagcttctcgaccttgggacatgggccgtgatggttttgttatgggggaaggggctggtgtcctcgtattggaagaacttgagcacgccaaggaaagaggtgcaacaatatatgctgaatttcttggtggaagcttcacatgtgatgcttaccacatgactgagccacatcctgaaggaagagggattactctctgcatagaaaaggcactagctgatgcaggggtagcaagggaagaaatcaactacgtgaatgcccatgcaacttctacacaagcaggtgacctgaaggagtatgaggctattgtgcgctgttttcgccagaaccctcaactgagggtgaactcgaccaaatcaatgactgggcatcttataggagcagctggtggaatagaagcagttgcttctatacaagctataagaactggttgggtccatccaaatttgaatttagaaaatcctgaggacactgtggatgtgggcatcttggtaggatcacagaaggagagatgtgaggtgaaggtggcgttatccaactcattcggcttcggtgggcacaactcatcaattctctttgccccctttaaggaactgccatcttcctcatcgtccaaatagattcatatatctggatctccacatagaagacaagtggactctgcaacttcctcggtgccatagatattacagggaggtccaaactgagcgtatctgagcgaacaaaacatcagcccccctacatgtttcatctatatcacgaagttgcagatatgtggtaactatcaaaaggatttaccgtacctgggccagtgttttcgccttcaccatacctgcccattgtcagtactatttcctagatttggagtagtcccgtagctaatcctcttccctgcggaggtgatgggattttatgttgtattgatgttgtcaacaatgtcgttcttagccatgaattgctggttccactgtaagcaccgctggatgtttatcgctttggctgtttttctgctgttcataactgagttaaagatttgtaaatggcgacgctgttcggcctttgatcatctgtgaaacttgagcggagggagcaacaagtatggcctagcctagcagtacgctagtgcctttgaagaaggcaggctagctgctgctcctcaaagtttagcacctagccgaccatagtctctttctcttttacagtcttctctaaaaaatc

SEQ ID NO: 109316 - DNA, 1522 bp, Zea Mays
gcaatggcggccgtggcaggcccactctgcacgtggctcgtcgccgcgtgcttgtctgcggcttgcgacgcagaagagtacaagcagaagcattgctgccccggcggaagcggcgctgggggcggcgtcatgctcggcctgcgccgccgcctcggcgcgcggcgtcgcggcttggcgcgctctggaatggctatggctgttgccttacaagctgaaagaagtgtcattgaaaagaagaaacccgatatcaaacaaaggagggtggttgtcactggcatgggtgtagtgacaccattgggccatgatcccgacgtcttttacaacaatcttcttgatggtgttagcggaataagtgagatagagaggtttgactgttccaacttccccacgagaattgcaggagagataaaatccttttccactgatggttgggttgtacctaaacttgcaaagcggatggacaagtttatgctatatctgataactgctggaaagaaagcattagaaaatggtggactcactgaagaactgaggaacgagttggacaaaaccaggtgcggggtcctcattggttctgcaatgggcggcatgaaggtttttaatgatgcaatttgaagcactgagggtctcttacaagaaaatgaacccattttgtgttccttttgcaactaccaatatgggctctgcaatccttgcaatggatctgggatggatgggaccaaattattctatttccacagcctgtgctaccagtaacttctgtatccttaacgcagcaaaccacatcagaagaggcgaagctgacgttatgctctgcggtggttctgatgcacctcttatcccaatcggattgggaggttttgtggcctgcagagcactttcacagaggaacagtgacccaacgaaagcttctcgaccttgggacatgggccgtgatggttttgttatgggggaaggggctggtgtcctcgtattggaagaacttgagcacgccaaggaaagaggtgcaacaatatatgctgaatttcttggtggaagcttcacatgtgatgcttaccacatgactgagccacatcctgaaggaagagggattactctctgcatagaaaaggcactagctgatgcaggggtagcaagggaagaaatcaactacgtgaatgcccatgcaacttctacacaagcaggtgacctgaaggagtatgaggctattgtgcgctgttttcgccagaaccctcaactgagggtgaactcgaccaaatcaatgactgggcatcttataggagcagctggtggaatagaagcagttgcttctatacaagctataagaactggttgggtccatccaaatttgaatttagaaaatcctgaggacactgtggatgtgggcatcttggtaggatcacagaaggagagatgtgaggtgaaggtggcgttatccaactcattcggcttcggtgggcacaactcatcaattctctttgccccctttaaggaactgccatcttcctcatcgtccaaatag

SEQ ID NO: 109317 - DNA, 867 bp, Zea Mays
gctattgaggaacatgacaactattttatgcagaagaggaatgctgctgctgtgctaggtctatcttctcttcaaaaggtcgttgcggcttttcgtatgttagcttatggagttccgactgacgttttggacgaatacattcgtattggtgagagtaccgctttggaagctttgcgaaagtttgtagtagctattgttgaggtattcggaccagagtacatgagattgcctaacgaacatgatatagctaggttgcttgcaattgcagtaagcagaggatttgcaggttcacacaatgatattaatgtgcttcataggtatcctatatttgcaaggcttgttgagggggaaggtccacaagttaagtacaacatcaatgggcatgattattcgatgggatattatctagcagatggcatatatccatcgtgggcaacttttgttaagaccatttcagagccacaaggtaataagaaaaaatattttgcaaaggcacaagaagcctatcgaaaggatgttgaaagggcatttggggttctacaatctcgctttgctatagttcgtgggccggctcgtttgtgggatgaagacacactccatgatattatgatggcttgcatcatactgcataatatgattgttgaagacgaacgggatgagtacggaggagaacaagtttacaactttgacgatatgggacaatatctttgcaactacgatgacatgggacaaagggtgacagtgtcgcacgattcttcacctgaacttgatgcattcattcaaaaatacaaaaatatcaagaacaaggaaacccactatcagcttaaggcagacctaatcgagcacttgtggcaaaaccattctgag

SEQ ID NO: 109318 - DNA, 1273 bp, Zea Mays
actagctagggttttcatccgtgacgaagtggtctatataaaaggtcagaaccgaaaccttaaccttattcggcgactatggcggcggcaccggcaggcggcggccctcgggcattgtcccagcgggagcaggacatccagatgatgctcgccgccgatgtccacctcggcaccaagaactgcgacttccaggtggagcgctacgtgtacaagcgccgcactgatggtatctacattattaaccttggaaagacctgggacaagcttcagttggccgccagggtcatcgttgccattgagaatccgcaggacattatcgtgcagtctgctaggccctatggccagagggctgtcctcaagtttgcgcagtacactggtgcccatgccattgctggcaggcacactcctggtacattcaccaaccagttgcaaacctccttcagtgagccacgccttcttatcctgactgacccgaggactgatcatcagcccattaaggagtctgcgcttggaaacattcccaccatcgccttctgtgatactgattcccctatgcgctatgttgatatcggcattcccgccaataacaaggggaaacagagcattggttgtctgttctggctgctcgcccgaatggtcctccagatgcgcggtacaattcttccaggacacaagtgggacatcatggtagatcttttcttctacagagacccagaggaagcgaagcagctggaggaagaagaggctctggttgcacctgactatggcgcggttgcagaatacactgcaccaggcgctgacaactggggcggtgaatggggtgctggcgaagctgcagctccagctgctagcattccagctgctggcgcagactgggctgctgctccagctcctcctgctgacggtgtctgggacgcagctgtggctccacctccagcagcagcccccggatgggaacaaggcgcggcccccgttgcggcgtcgacccctacctgggagtaattaataaagagtaaatgagcatggtggatggtttatactagtcatcagcggagcttgttggtaggcacttgctggagtagttgcttcgaacttctttttttcgtgttagatgaggtaaaaaaacaattttgtgttattgactctgctgtgagcgagtgaaccttgcacattttcgttatctcaaatggatagatctgttctacgcttgttttgtgaattgtaatagctgttcgtttcggcaagtgtctcgcctggcagacggttttgcgca

SEQ ID NO: 109319 - DNA, 1300 bp, Zea Mays
gcggtaaatcccctgacctgggtgaactggatgatggcggcgtcgacgggcagtgacatggcgcctagaatcagtcagctattagggtcagaaccgaaaccttaaccttattcggcgactatggcggcggcaccggcaggcggcggccctcgggcattgtcccagcgggagcaggacatccagatgatgctcgccgccgatgtccacctcggcaccaagaactgcgacttccaggtggagcgctacgtgtacaagcgccgcactgatggtatctacattattaaccttggaaagacctgggacaagcttcagttggccgccagggtcatcgttgccattgagaatccgcaggacattatcgtgcagtctgctaggccctatggccagagggctgtcctcaagtttgcgcagtacactggtgcccatgccattgctggcaggcacactcctggtacattcaccaaccagttgcaaacctccttcagtgagccacgccttcttatcctgactgacccgaggactgatcatcagcccattaaggagtctgcgcttggaaacattcccaccatcgccttctgtgatactgattcccctatgcgctatgttgatatcggcattcccgccaataacaaggggaaacagagcattggttgtctgttctggctgctcgcccgaatggtcctccagatgcgcggtacaattcttccaggacacaagtgggacatcatggtagatcttttcttctacagagacccagaggaagcgaagcagctggaggaagaagaggctctggttgcacctgactatggcgcggttgcagaatacactgcaccaggcgctgacaactggggcggtgaatggggtgctggcgaagctgcagctccagctgctagcattccagctgctggcgcagactgggctgctgctccagctcctcctgctgacggtgtctgggacgcagctgtggctccacctccagcagcagcccccggatgggaacaaggcgcggcccccgttgcggcgtcgacccctacctgggagtaattaataaagagtaaatgagcatggtggatggtttatactagtcatcagcggagcttgttggtaggcacttgctggagtagttgcttcgaacttctttttttcgtgttagatgaggtaaaaaaacaattttgtgttattgactctgctgtgagcgagtgaaccttgcacattttcgttatctcaaatggatagatctgttctacgcttgttttgtgaattgtaatagctgttcgtttcggcaagtgtctcgcctggc

SEQ ID NO: 109320 - DNA, 1840 bp, Zea Mays
actagctagggttttcatccgtgacgaagtggtctatataaaaggtcagaaccgaaaccttaaccttattcggcgactatggcggcggcaccggcaggcggcggccctcgggcattgtcccagcgggagcaggacatccagatgatgctcgccgccgatgtccacctcggcaccaagaactgcgacttccaggtggagcgctacgtgtacaagcgccgcactgatggtaccaatccaaatctttcgagactaaccaaatgtttacctccaatgcttgttgtctttgatatctagttttagatctgctcgtgttgacttctattggaacttgctatgcgcttgcgtatattaagatgcgatgtatagatcaactgagaaatattggcgcgtagtttcattcgagaaatagtgattcgtaggcatgtgattctagttaaatttaccgttgatagaagcgttagctactttaatatcgtttctccagtatggtcttgtggatttgtctagcataaagagctgaagaatccaaatgtgagctgtgatacacatgtgtacaatccaaatgtgacaacacaaatggtattcgtctcaatttcataccataaatatgagctgtgcaattggtttatactagattctatcaaaaataaaggatcaattgattgataccaaacatctttttgtctgtgttgctgtgattgttcactggaatcaatgggaagaatggctcgtagttcagtgctaactcgagttgcttatgctggcaatttcttatacctaacagtagtgcttttgtatattattatcatcattatctttcaggtatctacattattaaccttggaaagacctgggacaagcttcagttggccgccagggtcatcgttgccattgagaatccgcaggacattatcgtgcagtctgctaggccctatggccagagggctgtcctcaagtttgcgcagtacactggtgcccatgccattgctggcaggcacactcctggtacattcaccaaccagttgcaaacctccttcagtgagccacgccttcttatcctgactgacccgaggactgatcatcagcccattaaggagtctgcgcttggaaacattcccaccatcgccttctgtgatactgattcccctatgcgctatgttgatatcggcattcccgccaataacaaggggaaacagagcattggttgtctgttctggctgctcgcccgaatggtcctccagatgcgcggtacaattcttccaggacacaagtgggacatcatggtagatcttttcttctacagagacccagaggaagcgaagcagctggaggaagaagaggctctggttgcacctgactatggcgcggttgcagaatacactgcaccaggcgctgacaactggggcggtgaatggggtgctggcgaagctgcagctccagctgctagcattccagctgctggcgcagactgggctgctgctccagctcctcctgctgacggtgtctgggacgcagctgtggctccacctccagcagcagcccccggatgggaacaaggcgcggcccccgttgcggcgtcgacccctacctgggagtaattaataaagagtaaatgagcatggtggatggtttatactagtcatcagcggagcttgttggtaggcacttgctggagtagttgcttcgaacttctttttttcgtgttagatgaggtaaaaaaacaattttgtgttattgactctgctgtgagcgagtgaaccttgcacattttcgttatctcaaatggatagatctgttctacgcttgttttgtgaattgtaatagctgttcgtttcggcaa

SEQ ID NO: 109321 - DNA, 108 bp, Zea Mays
gtcttcgttgacattggtttcagagcgagtacgagaaagctttattgtcagcgaggaacagtgtaggaagttttcaagtgatcaggttacttacacttcatactcaac

SEQ ID NO: 109322 - DNA, 1999 bp, Zea Mays
aaagcctacggggtactgctacctcaacgagcgtatctgcttttttttttggtaaaagaatttgtttttgcaaagctagctcctacgctgccgccgccatgcaccgcttcgccgccgacagggcgcgccgcgcggtggccgcgtccctgcgcggcgcagcttccagagcagcagcagcgccgtcgcgtcacgctccggcgcctcgccatccaacctccccagtcggggcggcggcgccggttgctgccgccgccatggcgagggccgccatgtccacggcggtcgcgggcgtgccaccaccggtgtcgctcgacaccatcagccccaaggtgccgccagtgtcgctcgacaccatcaaccccaaggtcttgaagtgtcaatttgcagtccggggagagattgtcacacgtgctcagaaattgcaacaagaactgcagagaaatccagaatcgcttccttttgatgagatactctactgtaacattggaaatccccattccattggccaacagccagttacctacttcagagaagttctatctttatgtgagaatccagctctcctggacaaaagtgaaacgcatgctttatacagatgctatagagagagcacggaaaattctagacaagataccaggaagagctacaggagcatataggccacagtcagggtataaaaggtttacgtgatgaaattgctgccggaattgctgcccgtgatgggtttcatgcaagcgcagataacatcttcctaacggatggagcaagcccagcggtacacatgattctgcagttattgataaggtccgagaaggatggcattctttgtcctattccacagtacccattgtactctgcatcaattgctcttcatggtggttcccttgttccttatttccttgatgaagagacagggtgggcacttgaggttgatgagctcaagaaacaacttgaggaggctcgatctaagggcatcagtgtcagggcgcttgttgtcataaatccaggaaatccaacaggacaggtccttaccgaggaaaaccagaagaaaattgttgaattctgcaagaatgaaaggctcgttcttctcgcggatgaggtttaccaagaaaacatatatgtcgaagacaagcaattccactcgttcaaaaaaatcgcacggtcgctgggatacactgatgacgaccttcctttggtatcgttccagtcgatttctaaaggctactatggagaatgtggaaagcgaggtggttacatggagataactgggttcagtcctcaagtacgggaccaaatctacaagatggcatcgataaatctgtgctccaatatcaccggccaaattcttgctagccttgtcatgaacccaccaaaggctggggatgaatccttcgaatccttcaggttagagagggatggtatcctttcatcgttgggtcgccgtgcaaaggctttggaagaagcattcaacagtttagaaggtattacatgcaataaagccgaaggcgcgatgtatctgttcccacgccttcacttaccccggaaggcgattggagctgcccaagcagccggcactgccccagatgcttactacgctaaacgcctgctagaggccactgggatcgtcttcgtccctggttctggttttggacaggtccccggaacatggcacatcagatccacgatactgccgcaggaggacaaaatacctgggatagtatctaggttcaaggagtttcacgacaagttcatggatgaattccgtgattattgagtgtccatctcagttcagtcattgcatgaattctgccaagagggcatcctgtcattttgtcgcgatcggcaccgttactaattggtgttgccccctcatcgtcctatggatgcatgaacaaaaaaaaacatcttaacttctgttaggatatatggctagcagatcatgtatatggtaataaaaatattgttttatgttatagattgtattatttatagagtgcta

SEQ ID NO: 109323 - DNA, 2163 bp, Zea Mays
aaagcctacggggtactgctacctcaacgagcgtatctgcttttttttttggtaaaagaatttgtttttgcaaagctagctcctacgctgccgccgccatgcaccgcttcgccgccgacagggcgcgccgcgcggtggccgcgtccctgcgcggcgcagcttccagagcagcagcagcgccgtcgcgtcacgctccggcgcctcgccatccaacctccccagtcggggcggcggcgccggttgctgccgccgccatggcgagggccgccatgtccacggcggtcgcgggcgtgccaccaccggtgtcgctcgacaccatcagccccaaggtgccgccagtgtcgctcgacaccatcaaccccaaggtcttgaagtgtcaatttgcagtccggggagagattgtcacacgtgctcagaaattgcaacaagaactgcagagaaatccagaatcgcttccttttgatgagatactctactgtaacattggaaatccccattccattggccaacagccagttacctacttcagagaagttctatctttatgtgagaatccagctctcctggacaaaagtgaaacgcatgctttatacaggtcagatgctatagagagagcacggaaaattctagacaagataccaggaagagctacaggagcatataggccacagtcagggtataaaaggtttacgtgatgaaattgctgccggaattgctgcccgtgatgggtttcatgcaagcgcagataacatcttcctaacggatggagcaagcccagcggtacacatgattctgcagttattgataaggtccgagaaggatggcattctttgtcctattccacagtacccattgtactctgcatcaattgctcttcatggtggttcccttgttccttatttccttgatgaagagacagggtgggcacttgaggttgatgagctcaagaaacaacttgaggaggctcgatctaagggcatcagtgtcagggcgcttgttgtcataaatccaggaaatccaacaggacaggtccttaccgaggaaaaccagaagaaaattgttgaattctgcaagaatgaaaggctcgttcttctcgcggatgaggtttaccaagaaaacatatatgtcgaagacaagcaattccactcgttcaaaaaaatcgcacggtcgctgggatacactgatgacgaccttcctttggtatcgttccagtcgatttctaaaggctactatggagaatgtggaaagcgaggtggttacatggagataactgggttcagtcctcaagtacgggaccaaatctacaagatggcatcgataaatctgtgctccaatatcaccggccaaattcttgctagccttgtcatgaacccaccaaaggctggggatgaatccttcgaatccttcaggttagagagggatggtatcctttcatcgttgggtcgccgtgcaaaggctttggaagaagcattcaacagtttagaaggtattacatgcaataaagccgaaggcgcgatgtatctgttcccacgccttcacttaccccggaaggcgattggagctgcccaagcagccggcactgccccagatgcttactacgctaaacgcctgctagaggccactgggatcgtcttcgtccctggttctggttttggacaggtccccggaacatggcacatcagatccacgatactgccgcaggaggacaaaatacctgggatagtatctaggttcaaggagtttcacgacaagttcatggatgaattccgtgattattgagtgtccatctcagttcagtcattgcatgaattctgccaagagggcatcctgtcattttgtcgcgatcggcaccgtctgcccgagttccagccacggtcggtcggtcggtaccgactagctagctagcggtggatccgtggatgaccaccgatgaaccgttcggtatagaccatctctgctgccacgtgtgtcgtcttttcattagtccacattatttcgatgtccaaaatattttaagaacctaaggaaatatttatgaatcatgtaacatttatatttacatattatattttttatgtttgtgtcaattttatttatgatgtacaaactatgtaatttgtatttcttttatgaactatataattttatttgttcaattatata

SEQ ID NO: 109324 - DNA, 234 bp, Zea Mays
aaagaaggaacaactctccagatatattatacctgtcatcactaaacagatcaaagcacaaagaatgcaagtaatgtctcttggtcacttcacgaattcaaatcatacattttacttccggaaaacaaaaatacgaacagatcatgtctattggttatatcaattcagcaagaagtatgaacagggccaggaaagcattcaacgttgccaattaaagattcttggttacgtgta

SEQ ID NO: 109325 - DNA, 1089 bp, Zea Mays
atggaaacaagtcgtactagccgtgatggggcccgatcgacaccagcagccggtggatgggatcgctgccccgctctcgccgtcgttgccccattggtggaggcccggcttcgatcccctgcaatttatgtgctacaagtaagggttttgtgtgagaaggcgaatgagattctaatggaggaaagaaatgttcaggcagctcaaaaagacagaagagaactggagaagcacattgaagacatgcatgtccggattaccaccccattccacccagcttatgtcactgcagagaggataaagaaggcgaagaatcttgagtttcttctcacggcaggaatcggctccgatcatattgatcttccagcagctgctgctgcgggcttaactgtggctgaggtcactggaagcaacactgtctctgtggcaggagatgagctcttgcgcattctgattctgctcaggaacttcttgcctgggtaccaacaggtagttcaagacgaatggaacgtagcaggcattgcccacagagcttatgatcttgaaggaaaaactgttgggactgttggggctggtcgtattggcaggctcttgcttcagcgtcttaagccctttaactgcaacctactttaccatgacagacttcagattgacccagagcttgagaaagaaattggggtcaaatttgaggaggacctggatgctatgcttccaaagtgtgatgtgattgtgatcaacacacctcttacggagaaaacaagaggcatgtttaacaaagagaggattgcaaagatgaagaaaggtgtaattgttgtgaataatgctcgaggagcaatcatggatgctcgagcagtcgcagatgcatgttctagcggtcacattgctggatatggtggtgatgtgtggttcccacagccagcaccaaaggatcacccctggcgctacatgcctaaccatgccatgacccctcacatctctgggactacaattgatgcgcagctgcggtatgcggatggtgtgagggacatgctggataggtatttcaaaggcgaggacttcccggtgcagaactacatcgtcaaggaaggctag

SEQ ID NO: 109326 - DNA, 1415 bp, Zea Mays
gaattcccaacaccggcacgagcgccaaaacatttattgccttcaagtggagaggcttagcggcgcgaacgtcgaggagctttagcctccagggtaggctcctgctgatcggccaagcgcaaggttctcgttcttccaagcagacgtacagagagagagagagagagggtcgcgggggcggttgagggctcgtcgtcgacccatggccgtgaccgcgacgacggtcgcggcggcgatcacgatgctggcggccgtggcggcggttttcctcaccgtgctgctctgcttctacatcgtcctgtgcgccaagcaataccggggcgaggcgccccgcgcgggcggcggcggcggcggcggcgccagggcgtggctgctgcgcgccgtgttcggcggcgggggtgcggacggcggcggcggcgccaccgagtggtgccacgagggcgggctcgacgacaaggccatggcgaggctgccccggcgggaggtgggcgcgggcgaggcgctggactgcgccgtgtgcatcgcggaggtggcggccggggaggcggcgcgcgtgctgccgcggtgcggccacgccttccacgtcggctgcgtcgacgcgtggctccgctcccactccacctgcccgctctgccggtgccccgccgtcgacgacccgcccgccgtggccacgcccgtggccgaccgggagtcccccaacttccccaccaacgtcctcttcttcggctcccaggacgacgtcagcaccggccgctcgcggccgcgcggcgcgctgcggaggcttgttgggtgtggcggcgcgtcgccgccgcccacgcagccgccgcgccgtcacgatcatcgtcagcaccatcaggaggaggaggaggaggacgcgggcggggacgtcgagatgggcctcgccgcttccggcgagagcagcgtgtcgcggcccgtgaagccgccgcagcccggttcctgaggctggctgcttggtttcttttttcgtttccttccttgtgtggcatcacaggtttcgcttccattcttcgcgtcgcgtgcgtgcttccagatacggagagagaatcaatgatcaaccaaccagaaaagagagagacagagaaatgtacagatcccttcttatataaccgtccgtctgatgtaaattcgccgtgtggtacagatagatacagagcatgaggtggattcagcagcagtttcgtcgtttcgtcgtccactgcaagcacaacgcaacccagtaaactgaaggcaggatcgcgtgcctaatgtcgttttgaccacaaacaagcttagctgccgctgtcaaacgaaccaacctgtcgcgcatctctctcgctcgcccacaacaaggcagctagtacgcgtttggcgcaggaggaggccggggacctcgcggtcgcgcccgccaaaactgc

SEQ ID NO: 109327 - DNA, 301 bp, Zea Mays
ccgacatgctacatgaggagcaagcgctcggagctgcgacgtgtacggtgacatccaggtggacatgaacctctccttcatctacgtcagcgggatagaaagggagtggaggaccaggccgtaagcgtgctaccacgaccccgtggccatggcccacatccgcgagtacacactcaagacgctctcggagccggcggtggcgcccgtgtgcaccaggaaccactatgtccctggcttcctcttctccaacggtggcttctccggcaacctgtagcacggctacacagatgtgctagtgcca

SEQ ID NO: 109328 - DNA, 2200 bp, Zea Mays
ctacctctcccgtcgcacctcgccctctcccttgccctgccccagatctcggccttcagtcctcgctgccgccgcgacttgctcgccccgtctccctccggccccgcctcatcgcggccgtggtggccaaggaacacgagctcattggaaaacactcttaaataaagcttccaatgaacaagacaggagctcgacttcgcctagctccgaacaagcggtcgacgaggcggaggtctcgcgtcctgcgtgcgtcgcgccgttgcctggctccgtcctcgccgttcctctgtagaagctggccgctgacccccgcccgcctccgcttggccgtctggccgccccccgcgtggtcacctagatggctggccgtgcccctagatttgggttcctatcttgttaggacttccatcttcgttcattttgctgtgtgtccgtcagatagatgactaatgcatcctcaaagttctccaaggcggagccttgcatctttgtgtgtttgatttggttgagctgcaacccgtgctgctgtccttttcagtataaaaaaaaagatttagatgtaggttggcattcggatgaaaaatggaccgtgaaaaaaaggaggtccattcacctcgtgttctgtcatttgagcacggatcctttagtgtatcggaaagcgtgatatttctgataatcttctgcttttcagagaaaagctttgagtaattgagatgtatattcctctattgaaagaaaaagaggggttttcaagcaatatgaaagcctgatgctttcgttcttcgttttatttaagatcactttcctcccttgttcttatgaaatgtgcaactctttaatcagggatggcaaccgatagtgaagcctcgaaggcagctgaggttgtggttgactggcataaacaggacaaaaagaggatgctccatgcagtttaccgtgttggggatctggaccgcacaatcaagtactacacagaatgctttgggatgaaactgctgaggaaaagggatgttcctgatgagaagtacaccaacgccttccttggctttgggccagagaacaccaactttgcagttgaattgaccaactttgcggaggtctcgcgtcctacgtgcgtcgcgccgttgcctggctccgtcctcgccgttcctctgtagaagctggccgctgaccctcgccgtcgcgccgttttttattagatgaagaatgaatcaacccttgtagaagctaaagatagaagataacactactctgtttttgaatgtctgaagtgtaattttgcagccttgcaactataaaacaaacaatgtatggcttaattattgcagttgcacagtgtgaagatttaaaattgaagtgctatgaagagatggataagaggaagaaactttataatattgttcaagagacaaaaggaaattatcagggtttttttgtcgatgccgacccttaagcaaaaatgaggtgtcatcaagcctgaatgcaaatggtggaacaactaaaaagacatttaagtttgatagagtattcacgccgaaggatgatcaaggtgtgggcgtctccggcggcccgactatacgaagcgagggcgtatcggggctaaggacacgaaaggccaagcgcacagggcgtacggcagtaagcccgcctgcaccgcaccagaccgtcacccgcgacgtgcccatgtcatgacgccacggtggcggcacgctgacccatcgacgtcaccctcttcctcgcttccgctcgacagcctccagtttcctggtcagtcttcgtgccgcctctctgccacacaccgtctctcagagatggaatcaccacccctcacagttgaagcgaccgcttttaccgagaaaaatgatggacatgactttggaggatataatcaagatgtgaaagaaaaagaatcctggaggcaagaaaccccctaggcggccggtaaactctaagtctgaaggtttagggttttcatgctctcgactctgatagctaactcagaactgatattcaatgtaaaatattcagtgtgatagaaaaagaagcgagaggtgtgacgtggtatgtttatagctattgtgcagtatacaccttgcttacagggcccacgccaccatgatgtcacatttcaattcattttgtgacctctgatgaagagatttaaacacatctgttctatcctatccatagttttaacttc

SEQ ID NO: 109329 - DNA, 665 bp, Zea Mays
caccaaaagcacataagctagacaggttcaagttcttggtacacaggccgaagctcataacagggccctctggcacgcaacgcagggacgacactgctgtgccttcgttcacttcgtagttggtacatcataatatcatatagctttttttttatcgtctcaatgctcgagtacaagtagctgtgcacgggtaactagctcacacggtcacacaccacacgcatacacctaaagtcccaaacccacgcttctgcaggaccatgcagttgcagcggctgtcactctgcgcttcttcttcttctacttctaccaggtggatatcttcatgccgagatccttctgggcgaaggcgacgaggttctcaatctcggagtcgtccaggaagccgctgctgtccttgtccgcgtggcgaagggcgcggtcgctcctccaggcggtgagccagccgcggccgcggccgcggcggcggagcgcctcccggagctcgttccggctgatcctgccgtcgccgtcggcgtcgaactgcttcagccactccttgaactcctccagcgtcatgtcctcctcgcgggtggaggccacgccacggatcgccatggctggcgccgctggcagctcgtcctagctagctagcttgcaaactgtgaataaaagtgaagggcgct

SEQ ID NO: 109330 - DNA, 2181 bp, Zea Mays
gcaaaaacgcgaaacgttttcaccaacacggctatctgtcttctgtcccatcccattccaaagcgaatagaggggaaggtgggggcgggaggcaatcggagggcgagggccgaggaggagtcaaaaggcttctccagttgagcggcgggatgccggtaacgcgtaggcgcgccgccgtggcggcggtggcgcaggaggaggggcgcgatgcggcgatctacatatcctctgattccgatgcggggtcagacccggaggattcagaatccgaggaagaggaggatactagcgatgaggacttcatcgacgtcagcgacagcgaggccgatgatggggaaagcagcgacgaggaaggcgaggaggattcggagtcggaggctgaggctgaggctgagcaattgggcgcggatcggagcgaggttgcctgcaacaaaattgctggtcttctaagcagtgggaggagtctggagggtttaaagttggcggagtacaaggtgtatttaaagaagaatggtcttagccaaactgggggcatggacacttgtgtagacagaatagtactccattggaggttcaaagatgcggatccaaggagaatttatcctcggtcatccttttgtatcaactgtaaaggtgatgtttgtaggggcgatgccgttctattcaaacagaaggtgtacgagaagagtggaaaaaggcatgcaaaatgtataggtaatcgtatagtagccggcaaagtcatcaaggaaagttatggtaaacaaaaacagcaacacactttcacgattcaagtgttttggagcaaaggacctgggaaattaccacctttgcatctgttgcttgtcaaagggcgcaacctatacagaatgatgacttttcgtcagccttgggcaaatgaagcagaaaggctgaagattctagaagagaagcacaacagaggggatgatgcaaggcgtgttcgtgcattgaatagacctaattctgctggaaacactcttaaaggcaagaaaaaattgcacaaggaaaagcacaagtctcgatctgaaagacctcaccgccaatctaatatcaccgaactggataaaggcaaaaaacgacctgcacaatcctccaagtccgatctgcctaataaaagatctaagaaagaagggtcccaagttccttctaggaaaaaggatactggtggtaggatggcaaagaaaaatggtccctgccaagataagagcatttgtactggccagaacagctctctatgcaaagacaatagggagaagcacagtcatgctacctttcagaaaaagtgtcacgctgaacctctcaacaacggtccatctggttctgggtggaacagaactgctggcggacacagccaattcgaaggaagacacataactccagcttctcacgtcgaggcaaatcatggaaattttgtttctgtacagcatccttgcgtcgagaggcttcaacggcctactcaatcgcgtgaagttgctctggctcaccccggcggcggccatccatacgtactgtccagcgctgcaatgggcctccgacatcaaaatggagcaacggccggtgtgcacgcaccggcatatttcaggggacttccactcagtcaacagagggcagcatttccttcggccagcacgccgcaaactgggtaccatcctcatccagaagaattatttgttgcgccacacttcagatatcctagagggagtgctggtttccgccgataagacagtctggttggcgcctgctgcattttggtaactgcattggtggtaagacatgcggtcttcggcttattttcattgatgccatttcgttgccatgactcatgagcaaggagtatttgagtcttacctaatgtgcagagaggccagaactttgtttcatcttgagataaagcttccttcgtatataagaaaaaggaagatcctcacctcaattgaaggacttgattttctttgctttttttggggggcaggatgtgatggaaaaacagtgttaccatcgagtcgcataatcagggctctgcgtgcttcagacgggggaagggtttaatacaaacatgaatgctgcttttttttgtcgatctgagtccttagctgcaagattgacgcgagacatcggcttccaatatatgtacaccaatggtttctggaatttgagctagta

SEQ ID NO: 109331 - DNA, 2559 bp, Zea Mays
ctcactcgcaggccgcgtcggcaccgtgctgcctttactcctctccgaccaccttccccgtttcaattcgcttcactccccgcagtcgccactcgccgctccctcgaccccagagctctctctctctctccctccctcttcctagctccccctttccggcatggcctcctgctagctcccgtcggaacgcctcccagatcccagacgcagcgcgctaccccacgcgagcgaaggccggcgcgcgacatgggagggtgccacgcgaagccgctcacgcaggacgcggacggctcgccgccgcacgcggcgccggcgaccccgcccccgggcaacgctacccccggccccgggaagaagcactgggcggtgtccccgttcttcgcgttctccacgccgagcccgagccccgcgcaccacctcttcggcggctccgcggcgtcgccgcgcaagtcccccgcccccccgggctcggcgcccaccaccccggccaggcggatcctgaggctgcccttcccgccgccgtcgcccgccaagcacatccgggcggctctcgcgaggcggcacggcccgccgcggccgtccatccccgaggagggcggcggcgaaggggagggcggcggcggtgccaggggcctcgacaaggggtttgggttcaacaaggggttcgcggccaagtatgacttgggggatgaggtcggacggggccactttggctacacctgcgccgccacggttaagaagggcgcacgcaagggggagtccgtcgccgtcaaagtcatccccaaagcaaagatgactacatccattgctatagaggatgtccgaagggaggttaaaatcttgaaggctttgtcaggaaacaaaaacttggtgcaattttatgatgcctacgaggacaacgacaatgtatatatagtaatggagttgtgtgaaggtggagagctacttgacagaatactttccagaggtgggaagtactctgaggatgatgcaaaagctgtcctggtgcaaatattaaatgtcgtcgctttttgccacattcaaggagtggttcatcgagatctcaaaccagagaattttcttttcacatcaaaagatgagaattcccatcttaaggccattgactttggcttatcagactttgtaaaaccagatgagaggctgaatgacattgttggaagtgcttattatgttgctccagaagttctgcatagatgctatagcacagaagctgatgtctggagtataggtgtaattgcatatatccttctttgcggcagccgtccattttgggcacgcactgaatctggcatattccgttcggttctcaaagctgaccccagctacaatgaggcaccatggccttcgctgactccagaagcaatggattttgttaagcgattgctgtgcaaggatccacgtagaaggatgactgcagctcaggctttaagtcatccgtggatcagaaattataatgccattaggctgccgttggacattcttatattccgacttatcaaagcttatattcgttcctcatctttacggaaagccgctttgagggctctatcaaagaccttaacagttgacgagcttttctatctgaaagcacagttttctttattggaaccagacagaaatggatgcatcactcttgacaatatcagaatggccttaacgagagaagctactgatgcaatgaaggaatcccgagttcaagacattcttgtttcgttgagcgcccttcagtacagaagaatggacttccaagagttctgtgcagcagcagttagtgtgcatcagcttgaagcattggatagatgggagcaacatgcgcgatctgcttatgaatattttgagaaggaaggcaaccgagctattgtaatagatgaattagcttctgaattgggcctcagtccttcagtgccactgcatgtcgttctgcaagattggatcaggcatacggatgggaaattaagttttcttggatttgtcaagttgttgcatggcatgtccagcaggtccctgtcaaagatgagatagctgtcgataatctctaacgacagcgcgtgtttacaccgtcctgttgacttggttcacaggcaaattaacagggctaaagaatcgtacgattggagcttgcatatcaagggcgtctgagctctaacagcacctgatccgacactaatttaactatagagttatgtttattgttgcctgcctactgatcatttagccgatagggaaatgaaagaaaatctcacccatgtctgcaacatgtgatgtttctaacaaccttagattaggcgtcatcttctgttatgattctagaaattttgtaatgcttcttttctcgaactggagcaagttagctgcagtcaccaggttggcgactggagcatggacatatcactgtcattgtgacattgttactgtatcattgtaccgacagatgaaagtgcttgatgtggtatgtcaggttctctccgtgtatatattgattgatgagatggaattgtgccatttttaaatatcggaatattagtatgtcaacttgca

SEQ ID NO: 109332 - DNA, 108 bp, Zea Mays
ttttttattcattttagatttcaactgatcgtactacttgtcactcaagtcatggacagtttgcatgcggatttgactaaatcaatgataaaaggtttagggtttggc

SEQ ID NO: 109333 - DNA, 82 bp, Zea Mays
ttccaaacaactgcacaaatcttaagagagaggtaggaacaacagtggtcgttgttgctgcacaaacaaaggctattgctgg

SEQ ID NO: 109334 - DNA, 253 bp, Zea Mays
gatcttgtatttacggtcaatgcccacaaagttacagtttcaggttatggtagtgcatctgtcaaatatcagaacacaatggtgacttgctctcgcgtaaaggctcctgagagcgagcgatcagcgagcctgcctgttgtcgctgctcgctcggggaaagaagatcacacaaatgtaatatgagagctcgaaaagaagccgccgtctagcagcgaaagcagcagtagccactcccaccattctccttacatta

SEQ ID NO: 109335 - DNA, 605 bp, Zea Mays
agggtaaactaattgtcgatccaaggagcatcacaactagagtccacaacatttggtagaatttctaaaatagacatcatatggtacaatcataaattgaataatagtgtctgatcttattggcatttgagcaaacaccttgagggcttgagagcatggcgatactatatcaactacactcttgatctcaccaccttttcttcttctagaaaacagaaaccacagtgggagcaagtgaccagtcccctccctcacactgatttggacatgccgaaggaggagttaattggctgcggatggaggtgctcgccatagtggcgcttgatggcgagctccgcacagtacactctaccgaggatggggacaaacgcacggcggcgggcctcaacggaggggacgtggcagtgaaggaggtagaggaggcagagcgcgtcaccaccatggtcaaggatgttaggcaagttggacggcgagggtgggtacacgaggtggaggagacaaatacagagtcagggcatgatggcggcgaggcgaatgtgtgtaggagcaggacctctagagcactctggaaagcagtcacggatagtagctccttgtgctggtaa

SEQ ID NO: 109336 - DNA, 353 bp, Zea Mays
tcgcaggatagttctgatgttgaggtaaatgatctactatctgagttgaaggttttgaagttaagtttgcatgaaagaccaatgtcttctgtagagatttttttagtatgttcggcaaatggatttgtatccaaatatttcaattgcttattggatattatttattgtgcttgtgactgtggctgagagaagcttttcaaagttgaaattgttgaactatttaaggtcaacgatgtctcaagatcgactcaacggattgactactttatgtattgagaaaaaaattattagacgaggttgatagcaacactattatcaatgactttgcatcaagaaatattagaagaaatttt

SEQ ID NO: 109337 - DNA, 981 bp, Zea Mays
cgcgccgccgcatctcttcaacgctccatggtccccttcacctcccgccgctaccctacccatggccaccgcagccgctcgtgctaccctcccgcggcccctcctctctctcccacccttcctcctcccaccacatcctccgtgtgtcagcccgtcgttggctccgccttctattgccgtagggaacacgcggcgtcgcccttgcgctcctcgccacatgctgttacaggctgtcgtacccgtgtccgcggttgagggccttgtgccggtcatgttgaagaagaagcccatcgactagatctatctcgtcgtcgtgcgcctctctgccgaagagaggcaacgcctcctccgcggtgccatcacgtgctcctctcactactgcttccactcctcccagagtcccagtacacccccgccttgtggcatcgctgctcgccgcggccctgcacctcagccctgcctccatcccgagtcacacacctatcctttgaagaattaatggcgactggaagcagctttttacaggagtgccattctgctagatgccacacgctagctaaagcaaagatacacatagagcaaagaggggaaaagaatatgagctgaaatgcgcaaaaggctaaggaaagcagacaacttattgcaaataagaaatcagtacaaatgatgaatcgacctatgaaaattgagtccgatgggaatttggatccaaagaaaggtggtgctgtcttggattctactaaaactataggacttacaagtgttaagtagtgggatgactggcatatagttggatttcctggggcagagctattaagtactagtgtaagtgcattttaaatccaagtaccatgtctggtgactggtgatctcatttgggcatattaataatgtaaccttcttcatagctttcgtgtttattacagtaagacatgaaaatccttttgatttgaggaaaagcttctatgttgtcagaacaga

SEQ ID NO: 109338 - DNA, 2100 bp, Zea Mays
aataccccccgctcgccacctccatttcctcagaggaaacgccctgcacagcacgactcctccccatctaccgctacctttctacctacccatctagcacccctcgctcgcaaatcgcaatggcgctggccaccaactccgccgcagcagccgcggccgtgtccggtggcgtggcatcgcagccgcgccgcgcggccgtgttcctcccgctgaagaggcgtaccatctccgccatccacgccgccgacccgtccaagaacaacgggcccgcggtccccgcggccgcaggcgccaactcctccgcctcggcggtggccacgccggagaagaagccggcagcgcacgggaagtgggcggtctacagctggaggtcgaagaaggcgttgcagctccccgagtacccgaacgcggaggagctggacgcggtgctgaagaccatcgagacgttcccgccggtggtgttcgccggagaggcgcgccgcctcgaggagcgcatggccgaggccgccatgggccgcgccttcgtcctccagggtggcgactgcgccgagagtttcaaggagttccacgccaacaacatccgtgacaccttccgcgtccttctccagatgggcgtcgtgctcatgttcggtggccagatgccggtcgtcaaggtggggaggatggctggccagttcgccaagccaaggtctgagccgttcgaggagaaggacggagttaagctgccgagctacaggggcgacaacgtcaacggcgacgacttcaccgagaagagccgcgtgccggacccgcagaggatgatccgcgcctacgcacagtcggtggcgacactcaacctgctccgcgcgttcgccaccggagggtacgctgccatgcagcgcgtcactcagtggaacctcgatttcatggatcacaacgagcaaggtgataggtaccgtgaattggcccatagggtggatgatgctcttgggttcatgactgcatcggggcttacagtcgaccacccgataatgacgactactgacttctggacctcgcacgagtgccttctcttaccctacgagcaggctcttacccgtgaggattccaccagtggccttttctatgattgttcggcccacatgttgtgggttggtgagcgcactcgacaactcgatggagctcatgttgaattcctccgtggtgttgccaaccctctgggcataaaggtgagcgacaaaatgaaccccagtgagttggtgaagctgattgatattctgaacccttcaaacaaacctggaaggatcaccataattacaaggatgggggcagagaacatgagggtgaagttgcctcatctcatccgtgctgttcgcaatgctggactgattgtcacatggattactgatcctatgcatggaaacaccatcaaggccccttgtggcctgaagactcgtccatttgactccattctggctgaagtgcgtgccttcttcgatgtgcatgaccaagaaggaagccaccctgggggcgtccaccttgaaatgactgggcagaatgtgaccgagtgcatcggtggatcacggaccgtgaccttcgacgatctgagcgaccgctaccacacccactgcgacccaaggctgaatgcctcccagtccctggagctcgcctttatcatcgcagagaggctgaggaagaggaggatgcgatcggggctcaacagcagcctgccactgccgccactggctttctgagtagccggagccaaacacaaaggagggtaggaatagctgtggtgactcggaagagaaagagacagtcgacgccttgttttgttgatgcttagtgtggtgacctggtggtggtggtggtgggtgttcttggcacaagttacatgctggggatagctataggaggtacctgttgaggtgtgtaagacagtagctagcaaccgtatgccttggtttcctgtttgggtgcgtgacttgccgactttctagctgcttctggggttttgacctcggtaaggaaagaataaaaagataatcggagtgcaatgcttgctgaactggtgctcaataaattgatcccttgatgcctctattttcttcttttgtgttt

SEQ ID NO: 109339 - DNA, 1498 bp, Zea Mays
agaggaaacgccctgcacagcacgactcctccccatctaccgctacctttctacctacccatctagcacccctcgctcgccaagccaaggtctgagccgttcgaggagaaggacggagttaagctgccgagctacaggggcgacaacgtcaacggcgacgacttcaccgagaagagccgcgtgccggacccgcagaggatgatccgcgcctacgcacagtcggtggcgacactcaacctgctccgcgcgttcgccaccggagggtacgctgccatgcagcgcgtcactcagtggaacctcgatttcatggatcacaacgagcaaggtgataggtaccgtgaattggcccatagggtggatgatgctcttgggttcatgactgcatcggggcttacagtcgaccacccgataatgacgactactgacttctggacctcgcacgagtgccttctcttaccctacgagcaggctcttacccgtgaggattccaccagtggccttttctatgattgttcggcccacatgttgtgggttggtgagcgcactcgacaactcgatggagctcatgttgaattcctccgtggtgttgccaaccctctgggcataaaggtgagcgacaaaatgaaccccagtgagttggtgaagctgattgatattctgaacccttcaaacaaacctggaaggatcaccataattacaaggatgggggcagagaacatgagggtgaagttgcctcatctcatccgtgctgttcgcaatgctggactgattgtcacatggattactgatcctatgcatggaaacaccatcaaggccccttgtggcctgaagactcgtccatttgactccattctggctgaagtgcgtgccttcttcgatgtgcatgaccaagaaggaagccaccctgggggcgtccaccttgaaatgactgggcagaatgtgaccgagtgcatcggtggatcacggaccgtgaccttcgacgatctgagcgaccgctaccacacccactgcgacccaaggctgaatgcctcccagtccctggagctcgcctttatcatcgcagagaggctgaggaagaggaggatgcgatcggggctcaacagcagcctgccactgccgccactggctttctgagtagccggagccaaacacaaaggagggtaggaatagctgtggtgactcggaagagaaagagacagtcgacgccttgttttgttgatgcttagtgtggtgacctggtggtggtggtggtgggtgttcttggcacaagttacatgctggggatagctataggaggtacctgttgaggtgtgtaagacagtagctagcaaccgtatgccttggtttcctgtttgggtgcgtgacttgccgactttctagctgcttctggggttttgacctcggtaaggaaagaataaaaagataatcggagtgcaatgcttgctgaactggtgctcaataaattgatcccttgatgcctctattttcttcttttgtg

SEQ ID NO: 109340 - DNA, 920 bp, Zea Mays
agaagcctacgcgcagtcgcagagagaccatcccgccacggcagcaagcgaagcgagcctagccagccaaaccggggccaggccaggccgccagggggacgggacgggaaggaaaccgaggcaggcggcggcagcggcagcggcagcggtagcagcagcgcagggcgcacgcgcttctcgtttcgtgtcgccaggggaaggaggaggagcgagtgggttgggggatcggctggcggccgagggtccgggagctgcgggcggcatggggagggacgagatgctacggcgtagcctcgtggcgctggcggcggccgtggcgctcacggggctggccacggcgtcgctgcgcaaggcggcggtcacgtacggcttcggcatcctcgccatcgccggcgtcctgctcccggactgggagttcttcgaccgcgactactcccagtggctaacccccatgcccgcctcccgccgcacggccgccgccgcggctgccgaccgggagcacgacgtctggaaattcaagccgtatcctctccgggtggccatgctgacgacgatctacgggttcggtctttacaagtggtggatgtacgtatctagctagtgtgggtcgtccactcgtcctctccccccttgccgttcctcattgtgagcagatgcgatagatggagtatattgcctggctaatatgctgctgatagcctgatatgaagaaccaccctcaagacaggttgatgtatgtaatgtaacgagcgggtttttgtgatgcgcaaacgccacgccaatcattcttatctggaaacatgaatctaggttttattctttctccccctttgtcactccttcggtcttccttgttccatcatcatagcttcccaagggctacatgaacatgaatcttacagtttgcacatctatttttt

SEQ ID NO: 109341 - DNA, 995 bp, Zea Mays
aggctcccggatcgtctaatcaatcccgcattccccattgcacgccgtctccgctagggttttactccgccgcagccgcaccgcgccgccggagcagcgcgagaccgcgaggcgagccacgcgagagagatgaggctcctgacgcacaacatgctggcgtcgaacgtccggggcgcaaccaccggctacccgctgacgctggaggcgaccaactggtgcaccaaggaggtggagctcaactccgacttcatccgcggtctcctccccaagatcgactggcgcgcgctcgtcgccgccacccgcgcggtcggcctccctgagctcctccccgaggagcagccccccgaggaggagatcttcgccgacggcgccgccgacgtcgagggaagcgccatccgccgcatccaccacgcgctcctcgaggttcatgtccaggagggctccctcgtctgccccgacaccagccgctgcttccccatcaacaagggcatccccaacatgatgctccacgaggacgaggtctgattttgccgtgtcagtttcgccctggcctcttttgctcgcgcacctgctctacatggtctgtcgcgaagggtatcaggccttgtggacttcgtactcagattgtacctgtgaagtatggattgcagccttgcagattgtgccctcataatatgatagatagccgtgtaatactcggaattgccgtttcgtgttgttaatttggtgcacgtcatgctttgttcttaactgtctgcgaattgtttgttgccctgtgcctgaggaaatcgaaagaggtaaattacaaattgtgcacagcttttggcaagaaaattgtgggtgatttagtggaaccaattttgtctggtccatttggtgtttgcaaattgcaattcattctggtggatcatgacgataggccatagcctatagacaggtgtctgtaatctggtctccagtgtggaaactacttctgtgtcgtgtagttttgtgcc

SEQ ID NO: 109342 - DNA, 103 bp, Zea Mays
ggcatatcgcatgatttcttccagtttcccaaccgacaaatagatctgttatttgtggtctttatttctccaccaccaataatatggttgaccatgagttgct

SEQ ID NO: 109343 - DNA, 826 bp, Zea Mays
gttactctgtaagcccaaagctccgaaacagagcccaaaagactacgagctcgcggggaagacggggacttccggagagagagagagagagagagagagagagagagcaggaagcaggggctagacgcggatcggcgagcatgaggggcggcggcggcggcgggatgatggacgatgaagagagggtgggccatgcggagatcccgaccagtttcggtcccgagctgcgcgcctgcctccgatgccgcctcgtcaagacctacgaccagttcagggagaacggctgcgaaaactgcccgtttctagagatggacagagagcacgacaacgtcgtcaactgcaccacccccaacttcactggaattatctctctgatggaccccagtaggagctgggcagcccgttggttgagaattggcaggttcattcctgggtgctatacacttgctgtctcggaggagcttccagaagagtatcaagggatttgtcaagacaacaacgtgcagtatgtgccgcccaagcgtgtctaagtatcaagacggcaatgatggtgtcttggtcctgaagcagtatagataattaggtagaagtatctgtgcttgccaagggaactgctcctcttatgctttgtatccgagtgctaaggcagtctatttcatgttagtgataaggctgtctatttaggtggtgaaccggcgggtgattgaatcttatccaataaccttgatgcctgttcttgaaatctgtgacaatgcggctcatgtgcgtctgtcatgttctttcacatctatgtatatatgaagaaaaatgtaatagctaaaggtcg

SEQ ID NO: 109344 - DNA, 730 bp, Zea Mays
gttactctgtaagcccaaagctccgaaacagagcccaaaagactacgagctcgcggggaagacggggacttccggagagagagagagagagagagagagagagagagcaggaagcaggggctagacgcggatcggcgagcatgaggggcggcggcggcggcgggatgatggacgatgaagagagggtgggccatgcggagatcccgaccagtttcggtcccgagctgcgcgcctgcctccgatgccgcctcgtcaagacctacgaccagaattatctctctgatggaccccagtaggagctgggcagcccgttggttgagaattggttcattcctgggtgctatacacttgctgtctcggaggagcttccagaagagtatcaagggatttgtcaagacaacaacgtgcagtatgtgccgcccaagcgtgtctaagtatcaagacggcaatgatggtgtcttggtcctgaagcagtatagataattaggtagaagtatctgtgcttgccaagggaactgctcctcttatgctttgtatccgagtgctaaggcagtctatttcatgttagtgataaggctgtctatttaggtggtgaaccggcgggtgattgaatcttatccaataaccttgatgcctgttcttgaaatctgtgacaatgcggctcatgtgcgtctgtcatgttctttcacatctatgtatatatgaagaaaaatgtaatagctaaaggtcg

SEQ ID NO: 109345 - DNA, 2327 bp, Zea Mays
ccattcgactccacactccactcccagcctcgcctcccctcgcctttttagagagagaaaccacggctgccggcccccagcgagctagagagagaaaccaaggccaaggagcacagcaccccgtccgtccccagcaggagagcgagagacagaagggtgtgcgaaggaaagaagaggcggtgggagaggagggcgacatggagaggccggcaccggtgaggaagtctcacacgtcgacggcggacctgctgatctggccggagggggcgccgcaggagtcgcccgccggggccacgccgccatccaaccgccggccgcatcaggtgagcgccttcctttcgcttccccactgggcgccccaggtacactggctgatttgtgggaggacttcaccctgcctgaacctttctgttctctgttcggtgcagccgtcggaggcgctcaggaaggtggtgttcggcgggcaggtgacggaggaggaggccgagagcctcaacaagaggaaaccatgctctgctcccaagtggaaggagatgacaggaagcggcatatttgctgctgggggcgaggctgaagaagatgaatctgccaatgcctctgcaactcccattcggaccgctccaaagaattatcaggtactgcttatgtaggttgatttttactctgttttgtttaggcttcatccctggcaacccttctgcgttgaactgttgatattaggattattgttttattttcaggtgctggctaacttgttgtgacaagatggatcacttgatttatctatttatgttcttgctttgctataaattttgaatgtcgttgatataagctgctggttgctatgatcaaaacttttaaatgttatacatacgttctagtcctacctctccttagggggctagaggttgttgagatgaatcttgtgagaagggtttgggcaagcattattattttgtatacacattggttggtgagctttccttgtgatagaactgggcattttgattggtaagttgagctgaacgagaaatattcgagaactttgattgatagacacatgagacttaggtactattttttttttgtagataactttggttaagatgtcaataaacaacaaaccttgattaaactctaaacatatatagtacagcaagtttcataatttttctacagactgcttagcatgcttctaatccataatcatcttgatgctggcttcaaatggaaagggtgaatatgcttaggtttgatatagatttaacctcttacgtcgctggaacactgttacacagactaatcctactgcattttctcaaacacaggcaattagcaccataagccacatctcattttccgaggaagaaagcatttctccgaagaagccgacttcgatagcagaggtggcgaagcagcgcgagctgagcggcacacttctgagcgaggacgacagcaagatgaagaagcagatatcggacctgaaatccaaggagctgagcggccacgacatctttgctcctccggaagacccacggccacgcaactcagagaacggctcgacctcgcagaccccgggcaaaaatgcacacgtcctgacctctgaactcacctcgccctaatataaactctcgcagtcacagaagctgcatgcagtgttgcttactgctgctggttgtcgttctctcacaacaggtaagcaacttcaagttcggcgaggccgacgaggacggcatggtgaagaccgcgaagaagatccccacaaagaaattcaccgacctcgcgggcaatatcttcaagggcgacgagaccccccctgggacggcggagaagcacctgagcacagcgaagctgaaggagatgaccggcagcgacatcttcgcggacgggaaggccccctcgcgggactacctcggcgggatccgcaagccgcctggcggggagagcagcatcgcgctggtttaacagcaacagcaacctgatggacatagcagcccctacatcattcgtttctttctcctcgccgtcaccgtcttaggagtgatcttttgttcttcttctttttcctttcctttggaggactgatcgattggaacccccggcttgctttcctgttccccgtaacttgcgccagattttcgttgtcgatcccctctgatggtggtgttgtgtgggcatgacaacaacgatggttatctctaatttaacattgatttggcttggctactgtttgttggttggtcggtcatggcgtacctgatgcagcaacaacaacccagtggtgcactatctcatttcccgtgactggatgtctcagctgctgaggg

SEQ ID NO: 109346 - DNA, 1427 bp, Zea Mays
ccattcgactccacactccactcccagcctcgcctcccctcgcctttttagagagagaaaccacggctgccggcccccagcgagctagagagagaaaccaaggccaaggagcacagcaccccgtccgtccccagcaggagagcgagagacagaagggtgtgcgaaggaaagaagaggcggtgggagaggagggcgacatggagaggccggcaccggtgaggaagtctcacacgtcgacggcggacctgctgatctggccggagggggcgccgcaggagtcgcccgccggggccacgccgccatccaaccgccggccgcatcagccgtcggaggcgctcaggaaggtggtgttcggcgggcaggtgacggaggaggaggccgagagcctcaacaagagatctcccgagatttacggcacaactttgggcactgttatttcttttgtatgtgccgttgttgatctgtgctgctgtgggtggagaaattcgttggatttgaggaaaccatgctctgctcccaagtggaaggagatgacaggaagcggcatatttgctgctgggggcgaggctgaagaagatgaatctgccaatgcctctgcaactcccattcggaccgctccaaagaattatcaggcaattagcaccataagccacatctcattttccgaggaagaaagcatttctccgaagaagccgacttcgatagcagaggtggcgaagcagcgcgagctgagcggcacacttctgagcgaggacgacagcaagatgaagaagcagatatcggacctgaaatccaaggagctgagcggccacgacatctttgctcctccggaagacccacggccacgcaactcagagaacggctcgacctcgcagaccccgggcaaaaatgcacacgtaagcaacttcaagttcggcgaggccgacgaggacggcatggtgaagaccgcgaagaagatccccacaaagaaattcaccgacctcgcgggcaatatcttcaagggcgacgagaccccccctgggacggcggagaagcacctgagcacagcgaagctgaaggagatgaccggcagcgacatcttcgcggacgggaaggccccctcgcgggactacctcggcgggatccgcaagccgcctggcggggagagcagcatcgcgctggtttaacagcaacagcaacctgatggacatagcagcccctacatcattcgtttctttctcctcgccgtcaccgtcttaggagtgatcttttgttcttcttctttttcctttcctttggaggactgatcgattggaacccccggcttgctttcctgttccccgtaacttgcgccagattttcgttgtcgatcccctctgatggtggtgttgtgtgggcatgacaacaacgatggttatctctaatttaacattgatttggcttggcta

SEQ ID NO: 109347 - DNA, 1325 bp, Zea Mays
ccattcgactccacactccactcccagcctcgcctcccctcgcctttttagagagagaaaccacggctgccggcccccagcgagctagagagagaaaccaaggccaaggagcacagcaccccgtccgtccccagcaggagagcgagagacagaagggtgtgcgaaggaaagaagaggcggtgggagaggagggcgacatggagaggccggcaccggtgaggaagtctcacacgtcgacggcggacctgctgatctggccggagggggcgccgcaggagtcgcccgccggggccacgccgccatccaaccgccggccgcatcagccgtcggaggcgctcaggaaggtggtgttcggcgggcaggtgacggaggaggaggccgagagcctcaacaagaggaaaccatgctctgctcccaagtggaaggagatgacaggaagcggcatatttgctgctgggggcgaggctgaagaagatgaatctgccaatgcctctgcaactcccattcggaccgctccaaagaattatcaggcaattagcaccataagccacatctcattttccgaggaagaaagcatttctccgaagaagccgacttcgatagcagaggtggcgaagcagcgcgagctgagcggcacacttctgagcgaggacgacagcaagatgaagaagcagatatcggacctgaaatccaaggagctgagcggccacgacatctttgctcctccggaagacccacggccacgcaactcagagaacggctcgacctcgcagaccccgggcaaaaatgcacacgtaagcaacttcaagttcggcgaggccgacgaggacggcatggtgaagaccgcgaagaagatccccacaaagaaattcaccgacctcgcgggcaatatcttcaagggcgacgagaccccccctgggacggcggagaagcacctgagcacagcgaagctgaaggagatgaccggcagcgacatcttcgcggacgggaaggccccctcgcgggactacctcggcgggatccgcaagccgcctggcggggagagcagcatcgcgctggtttaacagcaacagcaacctgatggacatagcagcccctacatcattcgtttctttctcctcgccgtcaccgtcttaggagtgatcttttgttcttcttctttttcctttcctttggaggactgatcgattggaacccccggcttgctttcctgttccccgtaacttgcgccagattttcgttgtcgatcccctctgatggtggtgttgtgtgggcatgacaacaacgatggttatctctaatttaacattgatttggcttggcta

SEQ ID NO: 109348 - DNA, 642 bp, Zea Mays
atggatggtgcctgcgtcgccgtctgcaacctccggtgcgagatcagcaccgtcagcgtaacgggcctcggttgcggcggcggaggtgagctcttcctccggtgccacgtccccgcgggcggcgggagggcgatccagatcgacagccgcggcgcggggcagacgggcggcgaagccttgctgtggcgcgacgtggcgtcgctgagctgcgacggctcgccggcctgcgtccggcagctcgtggaccagggcagcgtcgtcttcgaggtgcgaaggcggcggggccgcgcggcgctgctggggcgggtccgggggtccgagctggtgggccgggccgaggtcccatggagggacgccggcgacctcggtctcggtgctgctgcggcgacgctggagcggcgtgtcgagcttgccgcgcccgcgatcggcagccgccgggtcccggcgcgcgaggcggcagtggcaccggtgctgtacgcgaggatcagcgtgcgcttgtcggaaacggcggtgcccgttagccggaggcgagcggacgcgtcggcgcgacagcacggcggtgagagcggctgcgagtggagtgtgggcgacgatgacgcgttcgcggcagtagcttgtgctgttgacgatgcgtttgagtag

SEQ ID NO: 109349 - DNA, 591 bp, Zea Mays
gtttggcagccccatattattcgctcgttcagttgagagagtgagtgggcaacgtcgtgttcaacgcgagcgcgagcaccgcggacgttgcgagatcgtcgtcggcacagccactccggcggccggcgccaacaactgctttgttttctgtcaatgcttcttgttcgtttctttcttgtggtgatttgtgtttactatagtctctacgtcctcttacaatttaatttatagtttccataaacttgatggcattgacaagaacaacgttgtttattccatgtttgcagagcccacagcttccggaacggctccggcagtcccaagcccgggctcttccaagtcgtcgtcgtcggcggcggcggcgatccgattcccggtctcagcgttcgccgttgtcgtcgccgcgactctgctctcgcactgcctcctctgaagatgcccgggtgtttggtggttttagttcatgatgatgagttgtgacgtgaacctgtgtatccgcactgtgtcataattcgttgagttcaattgactaatcgaccatgttggctgttggcatactgcatgcagctattcatgtcgttctgcaaggaa

SEQ ID NO: 109350 - DNA, 423 bp, Zea Mays
atggcgcgcctcggcctcttggccctcgcggtggccgtcctcgcgcttgcgtccggcgtggcgtcgcaggcgccggggccggcgccgtcggccgactgcgcgtcggcgctggccgggctcatgggctgcctgccgtacgtgcagcaggggagcacgcagggcaagcccgatagggagtgctgcgccggcgtcaaggccgcgctgaagagccccgccaccgtcgtctgcctctgcgccgccgtcgggcagaactacggcatgcccgtcaacctcacccgcggcgccgggctgcccgcggcgtgcggcgaagaccccgccgccttgagcaagtgcaacagtcagtactctgccgccctcgtctctgctctcacaactgctgttaaccaaatctcatgcatagttatctggtcattatgtaattag

SEQ ID NO: 109351 - DNA, 3583 bp, Zea Mays
ccctctctctctatctctctctctcgcacatctcacattctcaccaccaccacctcctcctctctctcccatctccaatggcggccgccacccacacctccccttccggctgctccgcctccggcaagccctagccctaggcaggctgctccactcccccacgcacacaccacacttctatggccgcgctactcgcgttcctcctcctcctgctgctgctgctctccgggggcgccgccggcgacgacgtggcggcgctgctcgagttcaagaagggcatcgcggggcgagaccgggacagggtgctggggtcctggtcgcggcccgcgacgaccgaggccggcagcggcggcgggtgccccgcgtcgtggcgcggcgtggcgtgcgacggcggcgcggtggtcggcgtggcgctcgacggcctcggcctggggggcgagctcaagctcgcgaccctcgccggcatgcgcgcgctccagaacctctccctcgccgggaacgccttctccggccgcctgccgcccggcatcggctccctctcctcgctgcgccacctcgacctctcccggaaccgcttctacgggcccgtcccggcccgcctcgccaacctctcgggcctcgtccacctcgacctctcccgcaacaacttcacctccgccttccccaccgacgggatccagcagctgcagaacctgcgccgcgtcgacgtccgcggcaacagcttctggggcaacgccaccgacctgctcgccaagctccgcaacgccgagcacgtcgacctcagcgacaacctcttcacggggaccatcgatttggacctccgcagcctctccagcatcgggaacacggtcaggtatctcaacctcagccacaacaacctggacgggggcttcttccggaacgagacggtgggcgcgttcaagaacttggcggtccttgatttgagcaacaacgggcttgctggcacagtgccgaggctcgatgcgtggttctcgctcgagtttttcagcgttgccgggaatgggctattcgggatgatgcctgagacactcctccagaattccatgcggcttgtcgaggttgatctcagcaggaacggcttctcagggtcattgccgattgtgaattctacgactttgaaggtgttgaatctctcttcaaatgtcttatcaggatcattaccagccaccatgggcaaatgtacctcagttgatcttagtgggaacctgttttcaggggaattagctatattacgttcctgggatgggattgttgaggtcattgacttgagctcaaacaaattggtgggaagctacccaaatgatgcctcccagtttcagaacttagtgtcactgaaattacgaaacaattcattgtcagggtctctcccttcggtgttgggtacctatcagaagttatctgtccttgatctgagtcagaacaccctcgagggatctgtgttgcctactttcttcatgtcaccaactttgactgtgttaaatctttctggaaataaattttctggaactattccatttgagagcacccattcaacggaatcaatacttctttcatctcaaccaggtctcaggattgttgatctgtccagcaattctttgactgggccattgccaccagatatctcgaacctgcaaaaacttgagttcctcattcttatgatgaatgaattatctggggagattcccagtgagataagcaagcttcaagcactggagtatattgacttatcacacaaccacctgacaggcagaattccggatatgcctcaaaatggcctgaaggtgttcaatgtatcttacaacaatctacaaggaactgttcccaaaagtatcgaaaagtttcctttatcttgcttccgacctggaaatgacatgttagttttcccagatggcctccctgctggaaatgatgattacaccggagtttctcagggccaaacatctcatgtacataaggctggtgttcgagttgctcttattattggttgcattggagctgttttgctagttatcttcatagccctagcattctatgtggtcaggtctcaagagctttgcggaagaaatggatttagaagtcagatcactatcagggatctgaaggggagaataagccctccaaatctgttcaagcccccgaaagataatgtgataccaagtaaaacaagtttctcaaatgatcatctcttaagagccgcagctagatcgatgtctgcccagaaagagttattggctgaagcctctgttgaatatggctacactgatccaaaggaagttgccgagtccacaagtttaggtgtgaccgagacttcttctgcaatccaggctcaggagtcttctccacggtctgcattgccaacatcgccacattttgctgattctagattccttgaggaacctgttgcttttgaagtatactctccagaccggctggctggagaattgatcttcatggacagcactttggttttcacagctgaggatctgtcacgtgcaccggcggaagttcttggaaggagcagccatggaacaacgtataaagctgttctacaaagcgggcatgtcctaacagtgaaatggctgcgtgtcggtcttgtgaagcataaaaaggagttcacaaaggagataaagaggattggcactatcaggaatccaaatataatttcatggagagccttctattggggccctaaggagcaagagagattaattatttctgactatgtcaatggtgatagcttggcactttacctttatgagtcgactccaagaagatactcccgcctatcggttcctcagcgtctcagaatcgccatcgacctagcccgctgcctccagttcctacaccaggagaagggcttgccgcacggcaacttgaagccaactaacatattcttggctggtcctgacctctctccaaagctggtggactacggcctgcacaggttcatgactccaagcggcaccgccgagcagatactgaatctaggagcgctagggtaccgagccccggagctggcgaacgcggccaagcccgcgcccacgttcaaggcggacgtgtatgcgttcggggtgatcgtcatggagatgctgacacggaggagcgctggggacatcatctcgggccagtccggcgcggtcgacctgaccgactgggtccagatgtgcagcagggaagggcggggcactgactgcttcgaccgagacatcgccggcctggaagagtccccgagggtcatggacgagctgctggcggtctcgcttaggtgcgtcctccctgtaaatgagaggcctagcatgaagacggtctgcgatgacctgtgctccataacagcgtgagtgagtttccccctcccccaatgtacatgtaaccgatcaattttccgcccgttggtcctgattttttctctatcccgtgggggttccagagccttgtagacagggcttgtttgatttgtaactgctagtgtaaagaggattcgatccacccattgattgattgatatcagccattgccgtctttcttcgtgagttgggggcaccagtgtcttatctgttcactg

SEQ ID NO: 109352 - DNA, 114 bp, Zea Mays
gatccgtcggcgtgggaggggccgaacgctctgctcgatctcatgcagaccgcggtgctggcgcgtgcgttccacctggcactgcgcgatccacgaacacgagggccctgttaa

SEQ ID NO: 109353 - DNA, 1611 bp, Zea Mays
aaggtacgaaagcccaacgggccccaaacagtccagaaggggctctcacaccggatccgctctggctccaacaacgtgatgggctccatggaagcgtcgaccgcgccggagaacggctcctccgctgccggtggcggagccggcggcacggcgtgcaacggggcgggcgccgcgtctaacggaggaggcatggagaggcggctgaggtcctcggccgcgtccgcgtcgtgggcggcgcaccttcccctggaggtgggcacgcgcgtgatgtgccggtggcgcgaccagaagctccacccggtcaaggtgatcgagcgccgcaagggctccgcgtgctcttcccccgccgactacgagtattacgtccactacaccgagttcaatagaagacttgacgagtgggttaagcttgatcagcttgatcttgacactgtcgagaccgttgtcgatgagaaagtagaagataaggcaacaagcttaaagatgacacggcaccagaaacgtaaaattgatgaaacacatgtggagcaaggacatgaggagcttgatgcagccagcttgcgggaacatgaagaattcacaaaggtgaaaaatatcgcgaagatcgaactggggagatatgagatagacacatggtatttctctccttttccaccagagtataatgactgcccgaagctgtttttctgtgaattttgcctcaacttcatgaagcgcaaagaacagcttcagaggcacatgaagaagtgtgatcttaagcaccccccaggtgatgaaatctatagaagtggaactctatcaatgttcgaggttgatgggaagaagaacaaggtttatggacagaacctttgttatctggctaagctatttcttgatcacaagacattgtactatgatgttgatttgttcttgttttatgtcctctgcgaatgtgatgatcggggatgtcatatggtgggatatttctctaaggaaaaacactccgaagaatcttataatttggcttgcattctcactctccccccataccaaagaaaaggatatgggaagttcctgattgctttctcatatgaactttccaagaaagaaggtaaagttgggacaccggagcgccctctctctgatcttggtctgctcagctatagaggttattggactagagtgcttctggaaattctaaagaaacataagggaaacatatctataaaggaactaagcgacatgacggcaataaaagcagatgacatattgagcacgctacagagcctggacctaatccagtaccgcaaagggcagcacgtcatctgcgctgacccgaaggtcctcgaccgccacctcaaggcggcggggcggggcggcctggacgtcgacgttagcaagctcatatggactccctacaaggagcaaggctaaaaggcgaactgctccgtgtctcagatttagactcgctgaccgatgcgatgcagtccctgtacatagcatctccccacagctcacttgacttgacttgactcgtgtaccgtgaaactctacttgtaactttgaacatccacatcgttgtctcctcatttctccttgcattaaccatgctacctttttttttttcttgga

SEQ ID NO: 109354 - DNA, 3073 bp, Zea Mays
aaggtacgaaagcccaacgggccccaaacagtccagaaggggctctcacaccggatccgctctggctccaacaacgtgatgggctccatggaagcgtcgaccgcgccggagaacggctcctccgctgccggtggcggagccggcggcacggcgtgcaacggggcgggcgccgcgtctaacggaggaggcatggagaggcggctgaggtcctcggccgcgtccgcgtcgtgggcggcgcaccttcccctggaggtgggcacgcgcgtgatgtgccggtggcgcgaccagaagctccacccggtcaaggtgatcgagcgccgcaagggctccgcgtgctcttcccccgccgactacgagtattacgtccactacaccgagttcaatagaagacttgacgagtgggttaagcttgatcagcttgatcttgacactgtcgagaccgttgtcgatgagaaagtagaagataaggcaacaagcttaaagatgacacggcaccagaaacgtaaaattgatgaaacacatgtggagcaaggacatgaggagcttgatgcagccagcttgcgggaacatgaagaattcacaaaggtgaaaaatatcgcgaagatcgaactggggagatatgagatagacacatggtatttctctccttttccaccagagtataatgactgcccgaagctgtttttctgtgaattttgcctcaacttcatgaagcgcaaagaacagcttcagaggcacatgaagaagtgtgatcttaagcaccccccaggtgatgaaatctatagaagtggaactctatcaatgttcgaggttgatgggaagaagaacaaggtttatggacagaacctttgttatctggctaagctatttcttgatcacaagacattgtactatgatgttgatttgttcttgttttatgtcctctgcgaatgtgatgatcggggatgtcatatggtgggatatttctctaaggtaaagttcacaatgatatgaatctatggtctattttgttaagctgcttcagtagtttctgtacaagatatgtttcgcgccagtggagtggatcatttaatgctagagaacatctgcattctgttgaatgtgtttttctcttttcaggaaaaacactccgaagaatcttataatttggcttgcattctcactctccccccataccaaagaaaaggatatgggaagttcctgattgctttctcatatgaactttccaagaaagaaggtaaagttgggacaccggagcgccctctctctgatcttggtctgctcagctatagaggttattggactagagtgcttctggaaattctaaagaaacataagggaaacatatctataaaggtaacacccttccatccagatatacctttttcgttgtacaaatttcgaaagctgattgaattatgatgcagcagttctagaaagaaactttctattggctcctcatattaccctacttaacccttgatctatgaccaaaaaaggttagcccctgtgtttcatagattacacttcaataaacaggtggattttctgtgctgcaattgcgtgttagtcaaacattccctgaataaggacatttagtagtcttctagaacataatgtatggtaatggtctttttggatgagaaagatcacctcaggaatgtttaggtttagtccagttccaacatcctctttccaaacatatcttaaaataccaggttacatgtggagtcagctttatattactcggtgctgttatctggtataaaaactggcttttcatcttagttatcctgctactgcatgtcttgcctgggccctgaaacttttgggtgcatgtgaagcgactagtttggtggtagatatcatcatctggaattctggatatttatgggatcgtagttgtcagcacagtgtactgtgtcgctattcggggaggtagtatgtacgggtggtagattgttatacctggcttcagctcttcaagcagtagatttttttttttaccgaaaaacaggtggatggagcagttagtcgatgttattcttttcactcctaggagaatcatgtttgttatcgaaagcactataacatcgcagaagagacaaaacatgtaaatagtaacatatatcatatcataggcagctgtaacttgtaacatcagatgtgcaaggattgtagcaaacaatatgctagacttcaaaccgagtagaagtgtactgaatagctttaattctataactgtgaagcccagtgcaatgttgacagggccacgtgcacccagtgaaatatgcagaaacttcctgcatggaaggacatttgatccatgtgctctgtgggtcttctgtctgtgccctcctgtccgtgttgctgctgcccttgaaaaaatttggacgtaggaagtatgcaaagcagatcatctgacgagagtacatggaacaattgtattctgaacgtcattgctgttgccttcttgtccttgatctgtaccagtgtttgttggtagagtgcacatgctcgtagtagaaccttttttttcatgaagacatgtacatgatcatagggtgcccctctagcattcatgagtgtttctgaatccaaaaggtagcataacactgttctaacaagctagttcgtacatgcatttttttttgtaacaaactcttgtgcttgcgcgcaggaactaagcgacatgacggcaataaaagcagatgacatattgagcacgctacagagcctggacctaatccagtaccgcaaagggcagcacgtcatctgcgctgacccgaaggtcctcgaccgccacctcaaggcggcggggcggggcggcctggacgtcgacgttagcaagctcatatggactccctacaaggagcaaggctaaaaggcgaactgctccgtgtctcagatttagactcgctgaccgatgcgatgcagtccctgtacatagcatctccccacagctcacttgacttgacttgactcgtgtaccgtgaaactctacttgtaactttgaacatccacatcgttgtctcctcatttctccttgcattaaccatgctacctttttttt

SEQ ID NO: 109355 - DNA, 1171 bp, Zea Mays
tttgacttggcctgcctctccgcctcgcttcgtcttcacttcccgcccggcgaaagagcacaagcagccgccaccaatggctgcctgagaccttgcgggcgagagcggcggagaaagcagttccagccttccaaagctgccgccgatgcaagctccgcgtgagggctacgggctggccacgatggacttcgagtacgtccccgcgtcccccggcagcagcaggtgggcgggcgagtcagcggcgcggcggcggcagcgccgactctcttcgccgtcattgaggacctacctcacgccggccttcgacgccgtggccggcggggagggcggcgtgtctgggtactcttcatcgtcgtcctccggcggtctggaactcgggttcgacgcctcgctcctccgctaccgccgctcctgcttggcggcctccgcggacctggatagccgtgtcctcctctactccccgcagtcgttgccaccgccgccgccgcagatgagggcggcgtatatgccagcggatgacgaggtttgggcacctggcgtcagccactacggctccaagcatgaggctggccggcttactggcgcaccaggttttcaggattcagaaaaccgcattgctttcgtctccccgtcacggacaagtagcaatcttcatactacagttctcggcgcctccacacccgtcaagctccctgctgaactccagttgcccgagggcagtgcagagctcccaacgccaaagccagaagctacgccttcagctctcaagttatctgctgatccagaaccagacgtggatgccgatgaaatcactgaagccctgtacggtggcagtggtcatcgcaggctccccattttcagggagatctgtccagaatgagtgtcagcctcagcattctcctcaacgtcgctgatggatgcatttcggctttagatgtatattctgtttatctatctcgtacccatagtcttggtagcagttactctggagggtcatttctagcttcctaaaggagaatctcttctattgatgtcttcattaagcgagaaagctatgatatacatgacttgattaagcaggcaattgacccgttttgcttggcgttggttggaggtgcacgtgcaccttcgaatatatatgaatttagcccctctcttttttttggcccta

SEQ ID NO: 109356 - DNA, 743 bp, Zea Mays
tttgacttggcctgcctctccgcctcgcttcgtcttcacttcccgcccggcgaaagagcacaagcagccgccaccaatggctgcctgagaccttgcgggcgagagcggcggagaaagcagttccagccttccaaagctgccgccgatgcaaggctggccggcttactggcgcaccaggttttcaggattcagaaaaccgcattgctttcgtctccccgtcacggacaagtagcaatcttcatactacagttctcggcgcctccacacccgtcaagctccctgctgaactccagttgcccgagggcagtgcagagctcccaacgccaaagccagaagctacgccttcagctctcaagttatctgctgatccagaaccagacgtggatgccgatgaaatcactgaagccctgtacggtggcagtggtcatcgcaggctccccattttcagggagatctgtccagaatgagtgtcagcctcagcattctcctcaacgtcgctgatggatgcatttcggctttagatgtatattctgtttatctatctcgtacccatagtcttggtagcagttactctggagggtcatttctagcttcctaaaggagaatctcttctattgatgtcttcattaagcgagaaagctatgatatacatgacttgattaagcaggcaattgacccgttttgcttggcgttggttggaggtgcacgtgcaccttcgaatatatatgaatttagcccctctc

SEQ ID NO: 109357 - DNA, 1390 bp, Zea Mays
tttgacttggcctgcctctccgcctcgcttcgtcttcacttcccgcccggcgaaagagcacaagcagccgccaccaatggctgcctgagaccttgcgggcgagagcggcggagaaagcagttccagccttccaaagctgccgccgatgcaagctccgcgtgagggctacgggctggccacgatggacttcgagtacgtccccgcgtcccccggcagcagcaggtgggcgggcgagtcagcggcgcggcggcggcagcgccgactctcttcgccgtcattgaggacctacctcacgccggccttcgacgccgtggccggcggggagggcggcgtgtctgggtactcttcatcgtcgtcctccggcggtctggaactcgggttcgacgcctcgctcctccgctaccgccgctcctgcttggcggcctccgcggacctggatagccgtgtcctcctctactccccgcagtcgttgccaccgccgccgccgcagatgagggcggcgtatatgccagcggatgacgaggtttgggcacctggcgtcagccactacggctccaagcatgaggcggttactgctttgccggttttatgtgccctggtggacaatgctgcctcaactagcttttgctgtggcattgctgcttaagggcatgtataagtacaacgacgatgcttgcttgggcgcttgcaggcagctaatgccttactggtttccatcactgcttgttcaagcaccatgcctgaggtcatttttcagcaaaacgactaacagtttgaggcttgaaaaagttggagattggcgtgaaaatttagatgttgccatcgtcaaattaggactcatatgcaggctggccggcttactggcgcaccaggttttcaggattcagaaaaccgcattgctttcgtctccccgtcacggacaagtagcaatcttcatactacagttctcggcgcctccacacccgtcaagctccctgctgaactccagttgcccgagggcagtgcagagctcccaacgccaaagccagaagctacgccttcagctctcaagttatctgctgatccagaaccagacgtggatgccgatgaaatcactgaagccctgtacggtggcagtggtcatcgcaggctccccattttcagggagatctgtccagaatgagtgtcagcctcagcattctcctcaacgtcgctgatggatgcatttcggctttagatgtatattctgtttatctatctcgtacccatagtcttggtagcagttactctggagggtcatttctagcttcctaaaggagaatctcttctattgatgtcttcattaagcgagaaagctatgatatacatgacttgattaagcaggcaattgacccgttttgcttggcgttgg

SEQ ID NO: 109358 - DNA, 2447 bp, Zea Mays
atggcgaccggggccgatctgacctccccaaccggcgccgctgcggcagcggccgccgccaggaaggaccgccacatcgtcagttggagctccgaggaggatggcgtgcttcgtgctcaaatcgctcttcatggcactgataactggacaattatagcggcacaattcaaggacaagacggccagacagtgcaggagaagatggtacaattatttgaactcagagtgcaagaaaggtgggtggtccagggaagaggatatgcttttgtgtgaggctcaaaaagttcttggaaacaagtggactgaaattgcaaaagttgtttcaggaagaacagacaatgcagtgaagaaccggttttctactctatgcaaaaggagggctaaggatgacgagctataccaagaaaatggtgtgccatgttccaacacaaatgcaaagaaggttctcactgaaacaggacgcctcacaccaggcggagctggctctttggtacatattaagcagacgaggtcttccagttataatttgaaggagaaccttgtaccaaatatgaaattatttgaactagagaagagcacacaagatgccaggcaacctcttgctaccatttcttcgaacaaccaagataacgtgaatacagttaaatctcaaaatcttgtcccaaccacaaaacaattgttaggtccagaacaacattgtgtgaagcgggagggtaattttctgaagaaggatgacccaaaagttgctactttattacagcaatctgactttctttgctcccttgcaacaaaaatcaaaagtgacaatacaagtaaaagcatggatgaagcatggcagcaactgcaagatcatttagtgaaaaaagagcacaacaaagtgccagaaaacagtgggtctgaaatagcttcacttttagaggagcttgatgatttaattgtagacccctatgagaggaaagatgaagatgaacagaagctaagcgagcacaatggacggaccgatgtggacaatgatcactgtaacggttcttcacaaactagcatagtagtaacgacaaatatggtcccagaggaaatgatgggagattgtccagtcgataactgcaatgaggatagtagtctttgtagaaaagtgctttctggaagtacagaaccttgcccaggtgcaaaaatgacaggatgtgggaatttgagcgaagaccaggttgctgaaggtagtgtgcttcaacgtgtagaatctatatctcctgttataacagatattgatgatttactcgtagacccgtatgagagtgaagcggaagatgaagaaaagtcaggggagcagaatggacagattgatgtgcatgctgagcagtgttttggttcttctcaaactatcatagaagtgatatcagacatggcccctgatgaagtcatggaaacttgttcagcagataaccgcgaagaacatagtagcatttgccgaaatgtgctttctggaagtatggcaccttgcccaggtgcagaaataccaacatctgaaaaaatgagtgaacttgctgaagatagcagacttcaatgtatggagtttgcatctcccgttctggcaaattttgcgagcaaggaatgtggagaaacaccagaaccacaagttcttaatgagattgttgaagatagcaggcttcaatgtattgaattcaactccccggctcacacaattctcccagataaaacaggcgccgaaaactttgcatccccaagttttgatgtggttgcaaaagatagtaagcctccgtctttggaattcacatcccctgctcatacagttgcaacattccaaccgtatgcagacggcatccctaccccaaaattcactgctagtgagaggagttttctgctgtcagttttagagctgacctcaccagggtcaaggcctgaaacttctcagcagccatcttgcaaaagggctcttcttaatagcctttgaaatgggtttgcataaaatcccaacaccaagcctgctatgcccctcagcataatttggctactcctatatgcatgaagtgtgcctaccctcaaagggtttcatagtatgttttgtttgttgtatagaatgatgcattggtgtagttgtattagcatacaggaacgaaagggtgatggtgtaagtgtttacagcttgtgttcaaaatatagaaaaagtaatattctttgtgtaattaactcttgtaattcttcccatgggtgcgagttattagattgttgcgtagtgtgatgtaatggctttcctttgttgagcttttggtatggaagaaccgactgcaggctatggctgtatgctttattgatttgtatggttggaacttggaaacatgatattcggttgatagactgcgttctctgcagctgatccggcactaagtttggtgtccattttcagaataaaattcatgtatttcccaggcc

SEQ ID NO: 109359 - DNA, 872 bp, Zea Mays
gtcatatttcctccagattatttggtttctaattaatatgggatgccttgttctggccattctcaaacctggcagactcaatcataactctgcccccatgttgttagtgtggacaattcatagctccttgcttgtgttctcgtaaaaatggagtgtcctgcatgtatctgctttagtagaatctcatgtctcattgaattagtcttgtgatcaagttgtggcgcatatgaaagagatcaaattattcatgaactgttatcattgtgatgcttatatttgaatcatttccgtagtttgggtagattgacagacaagtccagtttagaaatttggatttactagccttttgtccccttgatctaacattgtgttttcacagggtgggaaggcagctcgtcaacatcccctcgttcatggtcagggtcgaatcagagaagcacatcgacttctccctcaccagccctctgggtggtggtcctgccggaagggtgaagcggaagaaccagaagaaggcctcagggggcggcgacgctgaggaggacgaggagtagagggccacgtagggattctgcgaccgcaattggttgaaatgtgaggtggacactttagttgttgtgcctgagtgtgtttgttcattgtaatgaattcagaaattctactgtggtagacaattttgcacccccactactgacactcctgtttaaatttaaacattggcatcgtgtctagacaggatgaattgtattctggtttggccgtttgggtggctatttgctagtttggtctttaggccaatgtttaagactgaaacaaattggtagccaactttactttattatgctctgctggtctgtttggtgatttttttttac

SEQ ID NO: 109360 - DNA, 1015 bp, Zea Mays
ctagggtttacatcccttataaaatctcgtcttccacccccgcctcgctcagtcgcacttcctccggcggcggcaactcgacggccaaccgcgccaccctgccgcggcagccatggtgcatgttaacttctaccgcaactatgggaagactttcaagaagccaaggcggccgtatgagaaggagcgcctagatgctgagctgaagctggttggtgagtatggcctgcggtgcaagcgtgagctgtggcgcgtgcagtatgccctgagccgtatcaggaatgcagccagggagttgctcaccctggatgagaagaacccacgccgtatctttgagggcgaggcgctcctccgtcgcatgaacagatatggtcttcttggcgagggacagaacaagcttgattacgtgcttgccctcactgttgagaacttcctccagcgccgcctccagaccatcgtcttcaagaatggcatggccaagtccatccaccatgctcgtgtcctgatcaggcagcgccacatcagggtgggaaggcagctcgtcaacatcccctcgttcatggtcagggtcgaatcagagaagcacatcgacttctccctcaccagccctctgggtggtggtcctgccggaagggtgaagcggaagaaccagaagaaggcctcagggggcggcgacgctgaggaggacgaggagtagagggccacgtagggattctgcgaccgcaattggttgaaatgtgaggtggacactttagttgttgtgcctgagtgtgtttgttcattgtaatgaattcagaaattctactgtggtagacaattttgcacccccactactgacactcctgtttaaatttaaacattggcatcgtgtctagacaggatgaattgtattctggtttggccgtttgggtggctatttgctagtttggtctttaggccaatgtttaagactgaaacaaattggtagccaactttactttattatgctctgctggtctgtttggtgatttttttttac

SEQ ID NO: 109361 - DNA, 996 bp, Zea Mays
ctagggtttacatcccttataaaatctcgtcttccacccccgcctcgctcagtcgcacttcctccggcggcggcaactcgacggccaaccgcgccaccctgccgcggcagccatggtgcatgttaacttctaccgcaactatgggaagactttcaagaagccaaggcggccgtatgagaaggagcgcctagatgctgagctgaagctggttggtgagtatggcctgcggtgcaagcgtgagctgtggcgcgtgcagtatgccctgagccgtatcaggaatgcagccagggagttgctcaccctggatgagaagaacccacgccgtatctttgagggcgaggcgctcctccgtcgcatgaacagatatggtcttcttggcgagggacagaacaagcttgattacgtgcttgccctcactgttgagaacttcctccagcgccgcctccagaccatcgtcttcaagaatggcatggccaagtccatccaccatgctcgtgtcctgatcaggcagcgccacatcaggtttgtttatatgctgctgattcctcgattgtgcatcaatgttagttgtatcttaaaattttcacaaagagtaaaagtttgtaattgcggatcagagcagtttctatgttttctttgtgtatatgtcttatgttccttcaagttctggcattctttgagcatttcctatgttagttatgaattttcgattactgttatagtttgtgctcaattttccttatgttttgctgctgctggttgtatgttggttgtaaagacacatttgaccttggatgggccatatgatgaaaaaccatgtgcaattctcacgacggtcgtctgagacactttgtgtgtaatgttgcagtcatgtttctctgatgcccttggttacatttgattcttatttctgttacgtaataaattgttttgtgtgacccttgtctgctccctatcgtttctgtttactgtagtgtggcccctgctctgtcttct

SEQ ID NO: 109362 - DNA, 1445 bp, Zea Mays
ctcaggccgcggccataaccagcgcaccacctctgctgatctcttgttcttgtacggcgccggcgtggtggctagctagcagctgtaacttccaccaccagtactcagtactcacatcgaacacacacgaaccatcaataacccctctgcaggctgagggaaacgtgaaggccaggccagctgtgttctgctcacggagatcggacgaaagacagcttaggtccttgatcgtgaacacaccatggcgaggccgccgtgctgcgacaaggagggcgtcaagaagggcccgtggacgccggaggaggacctcgtcctcgtctcctacatccaggaccacggccccggcaactggcgcgccgtccccaccagaaccgggctgatgcggtgcagcaagagctgccggcttcggtggaccaactacctccggccgggcatcaggcgcggcaacttcacggagcaggaggagaagctcatcgtccacctccaggccctcctcggcaacaggtgggcggccatcgcgtcgtacctgccggagcggacggacaacgacgtcaagaactactggaacacgcacctcaagcgcaagctgcaggccggcagcggcgacggcgacggcgacggggcggccaagccgccggcgcacaggccgccgccgtccaactccaaggggcagtgggagaggaggctgcagacggacatcaacctggcgcgccgcgcgctccgcgaggcgctcaccccgctcggcgacctcaagccgcagccgcagcgcgacggcggcggtgacagcccggcctcgacctcgtcgtcgcagtgctccccgccgccagcgcctgccgccgcggggccgtacgttctcaccgcggacaccgtctcgcggatgctggacggatgggccggcttgaacgggaagcgccgcggcggggctccgggcacgcccggcggcgccgagaccgcgtccaccgggtcctcctcggaggtgtcgtacggcggtggcaccgccgtcgtcgcgccggccgctggtggcccggtgttcgagtacgagacgaagccgccggccgcgccgttccagctgatgatgccgctgtctgcgatcgagtcgtggctgttcgacgacgacacccacttccaccgtcctgtccagagcgccagcttgctggacgccgcccccatggattattacctgttgtagctagcgtgtccagcagctgatccagaccaagctaatccgttcaagcaaggaagtcggtggctgattagtcggctagctagctacctgtttctaaagttgttagttttcattatatttagccttttcttttctaggtgggtaaaagttgagtgcgtacttccccttgtgcaagctgcatgttgcatgggaaaataacatatatagctcttgcttgagaccactaagagcatctccaagagactagctaaatagtttg

SEQ ID NO: 109363 - DNA, 1578 bp, Zea Mays
ctgagctgttctattttacggacatgcgatgccctatggatggtctagatcatgcgcttttactgacccgactcactctctctgaaaactaggaaccccactcccctcccgaaactaccgccgccgccgctgccgccgcgatccaggtctcccgccccgcctgagatctcgacctcttcactcctcgccgctactgctcgccctcccgcgtatcctcgtctcagctctcaggttttcagcctgatcaaaccggtgtaaccagccgtgcatgattgcattggttcggctcgccggaagagcagcttcgcggagcagggtcggcatagcggcggcggcggcaccccctcctgtcggcttgtccgtgcagcgccggagggcgttccagggcgtgagaatggagacggggggaagcaagggcggccgtggcgctctggtggtcctggaaggcctggaccggagcgggaaaacttcgcagtgtgcccggctgctgtccttcctcaaaggcaaaggctacaatgccgaaggatggaggttccccgatagggccaccagtgtggggcagatgatctcttcctacctcgcgaacgattcgcagcttgatgacaggacgattcatctgctcttcagcgccaaccgctgggagaaaagagctttgatggagagcaagctacttagtggaactactctcattgtagaccgctactcctattcgggagtggccttttcagctgctaagggccttgacattgagtggtgcaaggctccagaaaatggacttattgctccagaccttgtaatatatcttgatgtacagccagagaaagcggctgaaagaggaggctatgggggtgagcgatatgaaaagatagagttccaaaagaaagttgcagagcattaccattcactccgtgattcgacatggaaggtggttgatggtttccttcccatggagactgttgaagaaaaactgagagatttagctacgagctgtattcaggactgccaagggaacccacttaccaatctggcctggtgaagtgccattatgcacaaagtaatggcggccacacatcgtcttgtgtgatcaaccatggccgggatagaattaggcatccggaagcattggcctttccatttgctctatcagtatcccttgtgcaatatatttataatctcaaagtgtgttttttctttcctaaagttaggccctgtttaaaacctctagagctaattgttagccaactaataagttgttagctggttttagctgggttgagacagctacaactaatgactatttgagaggtatagctaacaattagtcggtctattatctgatctgatccgtttaaaacctttcagttcattttagatgccaactattagttttagaggtttggaacaggaccttagtctgtctgccggtgtacggattttgtgtaacgtgaaacatgtgagagtgcaaaacacttaaatttctatgcttcatgtacctgtgaatgctgctggggtgaagaaacattggaaaaggaatgaaaaacagtagcactagaaatttggggtttccaagcaaatgaa

SEQ ID NO: 109364 - DNA, 972 bp, Zea Mays
ctgagctgttctattttacggacatgcgatgccctatggatggtctagatcatgcgcttttactgacccgactcactctctctgaaaactaggaaccccactcccctcccgaaactaccgccgccgccgctgccgccgcgatccaggtctcccgccccgcctgagatctcgacctcttcactcctcgccgctactgctcgccctcccgcgtatcctcgtctcagctctcaggttttcagcctgatcaaaccggtgtaaccagccgtgcatgattgcattggttcggctcgccggaagagcagcttcgcggagcagggtcggcatagcggcggcggcggcaccccctcctgtcggcttgtccgtgcagcgccggagggcgttccagggcgtgagaatggagacggggggaagcaagggcggccgtggcgctctggtggtcctggaaggcctggaccggagcgggaaaacttcgcagtgtgcccggctgctgtccttcctcaaaggcaaaggctacaatgccgaaggatggaggttccccgatagggccaccagtgtggggcagatgatctcttcctacctcgcgaacgattcgcagcttgatgacaggacgattcatctgctcttcagcgccaaccgctgggagaaaagagctttgatggagagcaagctacttagtggaactactctcattgtagaccgctactcctattcgggagtggccttttcagctgctaagggccttgacattgagtggtgcaaggctccagaaaatggacttattgctccagaccttgtaatatatcttgatgtacagccagagaaagcggctgaaagaggaggctatgggggtgagcgatatgaaaagatagagttccaaaagaaagttgcagagcattaccattcactccgtgattcgacatggaaggtaactcagtttctgcaagaatcaccaagatgaggtccttgtatttg

SEQ ID NO: 109365 - DNA, 1841 bp, Zea Mays
agcaattgttctcaccctcgccctcttcctcgtatccactcgcgaaaatagccaaagagcacattcccttacctgccatggcgatccatccccggaccaccggcggtcgcaggcagccgctgccgctacccctgaagggggccctcctagccgccatcgctgtcgcgacggctctctccgtcctgttcgtcctgtccttcacggacacgctgaccttcacggacacgctgccctacctggggttccggccccgggacgtcgacaagagggacggcaaccggaggtacctctactggggaagccgcgtagactgccccggcaagcactgcggctcctgcgcgggcctcgggcaccaggagtccagcctccgctgcgccctcgaggaggccctcttcctcgacagggtgcttgtcatgcctgcaaagatgtgtctcagttcagtgcacaatacaaagggggtccttcaatcaagcaatgcaacttcacaacaaaggtgggaaacaggttcttgtgcaatggaatccttatacgatattgacctcatatcaagaaccgtacctgttattttggataatccacggtcatggtacgagataatatcaagaagtacaaaactcggtgaggatggcttggtggtgcatgtgcaaggggttagcagagctgaactcaaacaaaattcaaattactctggtgctctcctcataaaccgcacagcaagtcctcttgcttggtttatggagtgcaaggaccggaccaagcggagttctgtgatgttgccatacacttttctgccaacaatggcaacaaggaaactgagggatgcagcaaacaagatgaaagagatacttggtgactatgatgctattcatgtgagacgaggtgacctactgaagaataggaaagatagatttggagttgagcgaagtcttcatcctcatcttgacagagatactcgccctgagtttatcaagaaaagaatcgcaaagtggattcgaccaggtcgcactcttttcatttcctcaaatgaaaggaccccaggcttcttttcatctctatcagacaagtacaggctggcatattcatctaacttcagcagcatattgaatccgatagtcaagaacaactatcagctgttcatggtggaaaggttgataatgcaaggtgcgaggacgtttgtgaagacaatgaaagagttcgatgaagatcttgctctctgcgacgatccaaaaaagaataccaaagactggcgggaaccagtttatacagatgactgacggcagctgttttgtattcatagatgcttaggtccaactatatcaacgacatcaacaactaaactttttagtcccaagcaagttgggtctaactgtatcactgatcttaaaggtttcacaaagatgaccaattacatgccatttatgagatgacataatagcttgagatggatgcatgaactatatatggcatgacaggagaggaacagagaaagcgaatgttgtctgaagtctaagcttgaacatcagatgtgactgctcttttgttcagctacagtgttcaattggattgttttacttcatttgttttaaaaaaagtttactaggtggtgggagactgtcgtgtatgtatagcatgtaactgctgttggaggagctatcaactggaatactggatgagatacattacttgctgcttctgttgctatttgtacttgtgttaacagcatcagttatactagctctgtcattcctagaaaaagagagaatgtggagcatcttgtcttatttctagtgatgtagaaattcgtgttagcgacacagtgatatatgtaatgtataatcaat

SEQ ID NO: 109366 - DNA, 1687 bp, Zea Mays
agcaattgttctcaccctcgccctcttcctcgtatccactcgcgaaaatagccaaagagcacattcccttacctgccatggcgatccatccccggaccaccggcggtcgcaggcagccgctgccgctacccctgaagggggccctcctagccgccatcgctgtcgcgacggctctctccgtcctgttcgtcctgtccttcacggacacgctgaccttcacggacacgctgccctacctggggttccggccccgggacgtcgacaagagggacggcaaccggaggtacctctactggggaagccgcgtagactgccccggcaagcactgcggctcctgcgcgggcctcgggcaccaggagtccagcctccgctgcgccctcgaggaggccctcttcctcgacagggtgcttgtcatgcctgcaaagatgtgtctcagttcagtgcacaatacaaagggggtccttcaatcaagcaatgcaacttcacaacaaaggtgggaaacaggttcttgtgcaatggaatccttatacgatattgacctcatatcaagaaccgtacctgttattttggataatccacggtcatggtacgagataatatcaagaagtacaaaactcggtgaggatggcttggtggtgcatgtgcaaggggttagcagagctgaactcaaacaaaattcaaattactctggtgctctcctcataaaccgcacagcaagtcctcttgcttgttcaggtttatggagtgcaaggaccggaccaagcggagttctgtgatgttgccatacacttttctgccaacaatggcaacaaggaaactgagggatgcagcaaacaagatgaaagagatacttggtgactatgatgctattcatgtgagacgaggtgacctactgaagaataggaaagatagatttggagttgagcgaagtcttcatcctcatcttgacagagatactcgccctgagtttatcaagaaaagaatcgcaaagtggattcgaccaggtcgcactcttttcatttcctcaaatgaaaggaccccaggcttcttttcatctctatcagacaagtacaggctggcatattcatctaacttcagcagcatattgaatccgatagtcaagaacaactatcagctgttcatggtggaaaggttgataatgcaaggtgcgaggacgtttgtgaagacaatgaaagagttcgatgaagatcttgctctctgcgacgatccaaaaaagaataccaaagactggcgggaaccagtttatacagatgactgacggcagctgttttgtattcatagatgcttaggtccaactatatcaacgacatcaacaactaaactttttagtcccaagcaagttgggtctaactgtatcactgatcttaaaggtttcacaaagatgaccaattacatgccatttatgagatgacataatagcttgagatggatgcatgaactatatatggcatgacaggagaggaacagagaaagcgaatgttgtctgaagtctaagcttgaacatcagatgtgactgctcttttgttcagctacagtgttcaattggattgttttacttcatttgttttaaaaaaagtttactaggtggtgggagactgtcgtgtatgtatagcatgtaactgctgttggaggagctatcaactggaatactggatgagatacatta

SEQ ID NO: 109367 - DNA, 1357 bp, Zea Mays
aacagccctctgacttccggttccgcgcgtgtgtataaatagacgtgctctgcctctgatccgatgagagctacaaagtctcagtggtcacacaatgcagccatcacgagagatggctaggcttggcgtcctcgtcttggttgcgcttctcgccgctgacaccacagctcaacttgctcaagcgcaagggtcctcctcctcctacggcagtgctcctcctcctcctcctccaactagcccgccgagcgcaagcccaccagcccagactccaccaccggctcctactccgccaacgccaaagctgaggtacaacttctacaagcgctcgtgcccttacgccgaggacatcatcaagcaagccgtgaggaacgccacgaacgtcaaccccggcctcggcgccggcctcatccgcatggccttccacgactgcttcgtccggggctgcgacggctccgtcctgctcgacgcgacgccggcgaacccgcggccggagaagctcggcccgccaaactttcctagcctgcgcggctacgaggtggtggacgcggccaaggcggcgctcgagaaggcctgcccgggcgtcgtctcctgcgccgacgtcgtccagttcgccgctcgcgacgccgtcttcttcctcagcggctccaaggtgctctacagcctccccgggggccgcttcgacggcagggtgtccttcgagaacgagacgctcaggttcctgccgccgccgtccttcaacctctcccagctcgtccagagcttcaaggtcaagggcatgagcgtcgacgacctcgtcgtgctctccggctcccacaccatcggccgctcccactgctcctccttctccgaccgcatctccacgccgccctccgacatgaaccctgccctcgccaccgtgctgaagcggcagtgcccggccaaccccaacttcaccaacgaccccacggtggtgcaggacatcgtcacccccgacaagctggacaaccagtactactggaacgtgctacgtcacaatgtgctgttcaaatccgacgcggccctgctgacgtcgacggagacggcgaggatggtgctcgagaacgccggcatccgaggaaggtttgagaggaagttcgccagcgcgatgctcaagatgtcgctcatcgaggtcaagaccgctgccaccggcgagatcaggaagaactgccacgtcgtcaattagttttgtttgatttgattcttcgttgttggattaatggattaacgcgggcttgacccaaaatagctttcaataatagccaatgctaatggctcactttaatactatggtgtattaataatttagtaccacattaaaagtttaagtgacaaagcaatc

SEQ ID NO: 109368 - DNA, 1345 bp, Zea Mays
caaccagcagagcgagtacgttgcactgcacgagcgaaaaaaatggccaaggttgccgccctgacgatcaccttgctcgggctcctggtgtccgtgacatgccagggcagcacttaccctgctcagcagcagcaggaggcttcgtcgtcgtcgtctagccctggttgcattctgcgagggtggatcccgttcttgcctccttgccgcgacgaccaagccccaacgccaaaccctctccctcctccctcaggggcagggctcaccgtgggctactacaagaactgccctggcgctgaaggtatcgtgagggaggccgtggagaaggccatggacaacggaaaccgcggcattggcgcaggactcgttcgtatcttcttccacgactgctttgttcgggggtgcgatgcttccgttctcctgaggaacaccagcggctccagcaaccagacggagatgttcggcctgcccaacataaacagcctccgcgggttccaggtcatcgacgacgccaaggccgagctcgagaaggcatgcccccgcacggtgtcgtgcgcggacatcgtcgccttcgccgcacgcgacgccacgcgcaacctcagctacggcgccatcgacttccagatgccggcgggacgcctggacggccgcgtgtccctcaaggaggaggccgagaagaacctcccggggccgttcgacagcctcgacgacctccagaagagcttcgcggcccagggcctcggcttcaacgacatggtcacgctctccggcgcgcacagcatcggcgtggcccgctgcaggttcttcaccaaccgcctgccgcctaacccctcggacatggaccgcgacctcgccaggagcctaaaggcgacctgcgaccaaaacggactcgactccaaggtggtgcaggaccccgtgacgccagttgccctggacaaccagtactataagaacgtgcacaacggcaaggtgctcttcacgtcggacgccgcgctcaactccactgacgacgcaaggaaggtggtggacggcttcgccaacaacgcggtagactggtaccgcgcgttcgccgatgccatggtgaagatgggcaacatcagggataggaccatcaacagacccaagcccgagatcagggagaagtgcttcatttacaatacctactgatcgacacgatatcaacattaagacgttccacgagatcctggaggagtctgtttgttttgatattttcctcttgcattcattatcatgcgattgatttcccttttatttgcatccaaaaatgtcatgctgagatttttgttgtaaaaggactttgaattcaagcaatacattttatttgtcc

SEQ ID NO: 109369 - DNA, 1344 bp, Zea Mays
caaccagcagagcgagtacgttgcactgcacgagcgaaaaaaatggccaaggttgccgccctgacgatcaccttgctcgggctcctggtgtccgtgacatgccagggcagcatttactctgctcagcagcagcaggatgcttcgtcgtcgtcgtctagccctggctgcattcttcgagggtggatcccattcttgcatccttgccgcgacggccaacccccaacgccaaaccctctccctcctccctcaggggcagggctcaccgtgggctactacaagaactgccctggcgctgaaggtatcgtgaggaaggccgtggagaaggccatggacaacggaaaccgcggcattggcgcaggactcattcgtatcttcttccatgactgctttgttcggggttgcgatgcttccgttctcctgaggaacaccagcggctccagcgaccagacggagatgttcggcctgcccaacataaacagcctccgcgggttccaggtcatcaacgacgccaaggccgagctcgagaaggcatgcccccgcacggtgtcatgcgcggacatcgtcgccttcgccgcacgcgacgccacgcgcaacctcagctacggcgccatcgacttccagatgccggcgggccgcctggacggccgcgtgtccctcaaggaggaggccgagaagaacctcccggggccgttcgacagcctcgacgacctccagaagagcttcgcggcccagggcctcggcttcaacgatatggtcacgctctccggtgcgcacagcatcggcgtggcccgctgcaggttcttcaccaaccgcctgccgcctaacccctcggacatggaccgcgacctcgccaggagcctaaaggcgacctgcgaccaaaacggactcgactccaaggtggtacaggaccccgtgacgccagttgccctggacaaccagtactataagaacgtgcacaacggcaaggtgctcttcacgtcggacgccgcgctcaactccacggacgacgcaaggaaggtggtggacggcttcgccaacaacgcggtagactggtaccgcgcgttcgccgatgccatggtgaagatgggcaacatcagggataggaccatcaacagacccaagcccgagatcagggagaagtgcttcatttacaatacctactgatcgacacgatatcaacattaagacgtaccacgagatcctggaggagtctgtttgttttgatattttcctcttgcattcattatcatgcgattgatttccttttatttgcatccaaatgtcatgctgatatttttgttgtaaaaggactttgaattcaagcaatacattttatttgttcac

SEQ ID NO: 109370 - DNA, 1279 bp, Zea Mays
accaggcgaccaccgctgccgctgctttgctttgctcccttctgatcaacggcagccacgccgagaccaactgccgccaccggaatggcggggtgccttggcgacccactggacaccgggtagaggaggaggggggggggggggggggggggggggggggatccggccagccatggcgagcgacgtgcccatgagccccgagctcgagcaggtggacggcgagatccaggacatcttccgcgcgctccagaacgggttccagaagatggacaagatcaaggactccagcaggcagtccaagcagctggaggatctcaccgccaagatgagagagtgcaaacgcttgatcaaagaatttgaccgtatactcaaggatgaggagaaaaaggacactcctgaggccaacaagcagctcaatgacaagaaacagttcatgatcaaagaactcaactcctacgtaaccctgaggaaaacgtaccagagcagcctaggtaacaagaggatcgaactattcgatactggtaccgaccaagtggccgacaaatctccagttcaaatggcatcagaaatgtcaaatcaagagctcattagcgccggaaggaaacaaatggaccaaactgaccaagccattgagcgctcaaagatggttgtagcacaaactgttgaagttggagctcagactgctgcaactctgtcacaacaaacagagcaaatgaagagaatcggcaatgagttagattctgttcacttctcactgaagaaggccagtcaaatggtgaaagagattggccgtcaggttgctactgacaaatgcattatggcgttcctgtttctgattgtctgtggcgttattgcaataattgttgttaagatcgtcaacccacataacaagaacatcagagatattccggggctggcacctcccgccatgaacaggaggctgctgtccatcgacgccttaggactatgagcgctgtgaatggctgctcccctgcagcacagcgctgcgcagcgcatcagagttctcttaacgagccacgatatatgatttcacgattcttttgtgcctgtatattgtgtttatgttgtttgcgtccgcccattccttccctattgcattggtaagtagtagcttcaggttcctagcaccggcgttctgattgtctgtgtatacgcggtactggttgtggatgtgagatattcttcatggttgttagtaaaaatagaaacggctgtgggagaagaaacagtaaatgaatccatgtttctttattcttta

SEQ ID NO: 109371 - DNA, 1198 bp, Zea Mays
caccattccaccaaacaaaccgaccaggcgaccaccgctgccgctgctttgctttgctcccttctgatcaacggcagccacgccgagaccaactgccgccaccggaatggcggggtgccttggcgacccactggacaccgggtagaggaggaggggggggggggggggggggggggggggggatccggccagccatggcgagcgacgtgcccatgagccccgagctcgagcaggtggacggcgagatccaggacatcttccgcgcgctccagaacgggttccagaagatggacaagatcaaggactccagcaggcagtccaagcagctggaggatctcaccgccaagatgagagagtgcaaacgcttgatcaaagaatttgaccgtatactcaaggatgaggagaaaaaggacactcctgaggccaacaagcagctcaatgacaagaaacagttcatgatcaaagaactcaactcctacgtaaccctgaggaaaacgtaccagagcagcctaggtaacaagaggatcgaactattcgatactggtaccgaccaagtggccgacaaatctccagttcaaatggcatcagaaatgtcaaatcaagagctcattagcgccggaaggaaacaaatggaccaaactgaccaagccattgagcgctcaaagatggttgtagcacaaactgttgaagttggagctcagactgctgcaactctgtcacaacaaacagagcaaatgaagagaatcggcaatgagttagattctgttcacttctcactgaagaaggccagtcaaatggtgaaagagattggccgtcagatcgtcaacccacataacaagaacatcagagatattccggggctggcacctcccgccatgaacaggaggctgctgtccatcgacgccttaggactatgagcgctgtgaatggctgctcccctgcagcacagcgctgcgcagcgcatcagagttctcttaacgagccacgatatatgatttcacgattcttttgtgcctgtatattgtgtttatgttgtttgcgtccgcccattccttccctattgcattggtaagtagtagcttcaggttcctagcaccggcgttctgattgtctgtgtatacgcggtactggttgtggatgtgagatattcttcatggttgttagtaaaaatagaaacggctgtgggagaagaaacagt

SEQ ID NO: 109372 - DNA, 723 bp, Zea Mays
ggcaggatcagcaaccagtaagatttacaagaagcaccacaatagtttgataactgtcagcattacaggaaacatcccacagtctaagatgggagcaaagatgctgaaaggtgctttagatggaactccaaacctttcccaacggagacaagaggtaaccaaactataggtaaccttgcagccaacagcatgactgtctttaatgcagtttgcttgcatttcagactctctcgtcatgcttcaaaagtggatacacttaacttcacagccatacttgctgcaagtagaaactgggaatacaatatgaatagctcgagtcttcaatcagtagcaacagctatgaaactataccaatactacagaaaatttcctcgatgtcaactcatatttcatggaagccttttaagccatctgggtacaatgagagcagatcataaccaccagcatcaggcatcactgtactgcgtactgcctgaacaaaatgccatagtccttctgaaccgctttatgccttgattgcataatcatcttaccaccacaactattaccgataggaataaccacagccagggctacgggtggagttcttttaacattaccgatagttggcacagtgagtccaactaaaatgtaacaggttaaggctacctactgtttcactcttgctaagatatcttgtgtgtaaaactacttaatccccaacttggcaaaatgcagagcatt

SEQ ID NO: 109373 - DNA, 713 bp, Zea Mays
acagagtaccgctgcgcgagtcgtgaccttcccgacgtgcgtgacgcctaaccaagccccgcaccgccccgcccgcccccgcccccgccccgccgcaggagacggggtcggcacggggcgatgaggagcagcgaggccatggagctcctgggcttccctccctactccaggccctccccttccgaggtgaaggctgcgtatagaagaatggtgatggagtcccatcctgatcgtgtcccaacgcatctgaaatcgcaggctgagtcaaaattcaaggagatagcagaagcatattcttgtttgaaggacggaagaagatcagggagtaggatggaagttcatgttatgcgttctggtgttccaactagccacggaagatcaaatagaacgttggttaaagccccgtttctactcataatgtttgcagcagtttcttttggcgccttcagcgcatcaagagcgtatcaacggcaaaaggaactgtgttcctctcagaacccatttctaccatagaggaagacggtgggctctgtccatgttcataggcgagaagagcttcttgctacgttgtatacagatgtaaaacaatcacaccatcctgaataaacgtgccaacctgtgccttctaactttgttgtttcagactttccaaacatgtaaaatcacttttgtattggtttcctgatttcgtctgccttgttgctactacgttc

SEQ ID NO: 109374 - DNA, 783 bp, Zea Mays
tcctgtttctttttatgaagtttctattggaccttcctgttaacattgtggtattatgattccaggtgtttgagatcaatgaatatctttatgttgtcgaactaaagaagtcatctggagactgctccctgtacagaaagagaggttgcatcgaacccagaacctttggctcagtggaaaggcttcttaccactacgccaagcctgtccttcatttgaatggcttaaatgttccggataatttcactttagcaggtatttgatttattatgtctatcattttgtttcaatgttgcagttgtgtgagacgctctcagaggacttgggcacatgcaaaagccagcaatttttaaagcaggactctatcagacaagatataggtagatataatagtagcttttaacaaagagacacttactaaatagcctatagacacaaactaacacaaacaatatactgaatttaaaacagtatattgtccatgcacctattttaaatgtgctctcttatgccttttgtcatgaaacctcaagaatcttagtttatgacaaattggcatctgacgatgtattgagctcctaagggataatatgatgtaaacaagtaaactacacatataagagattcagagttacctggtctctatgtttctctagcctaccccaacttgcttgggataaaaggctttgttgttgttgttggaatgtaagattgtttgtttttgaagcccctggttgacttccatgactcaagaaaaattgtgatatgttgttcgttgaaagaa

SEQ ID NO: 109375 - DNA, 1829 bp, Zea Mays
agcgctgctctgcttccctccctccgctccgcccccacctcctctaacgttacgtcagcctctagtcgtccaccagccggagcagagcctcttgttggtagcggatcggaatgcggatgggcaagtacgagatggggcggacgctcggggagggccacttcggcaaggtgaggctggcgcggcacgcggacacgggccggcccttcgccatcaagatcctcgaccgccagcgcatcctcgccatgaagatccacgaccagatcaagagggagatcgcgacgctgaagctgctcaagcaccccaacgtcgtccgcctctacgaggtttccgcaagcaagaccaaaatatacatggtgcttgagtacgtcaatggaggagagctgtttgacaagatcgcgttgaagggtaagctgacggagaaggaagggaggaaactgttccagcagctcatagatgccgtgggatactgccacgagaagggggtttatcacagggacctcaagccagagaatgtccttgttgatgcaaaaggaaacataaaagtttctgatttcggattaagtgcccttccacagaaccaacaaaaagatggtttgttgcataccacatgtggcagccctaactacatagcccctgaggtccttctgaacaaaggttatgacggctcgatatctgacgtatggtcctgtggtgttattctatatgtaatgcttacagggaatcttccattcgacgaccaaaatgtggttgtcctttaccagaagattctcaaggggaatgctcacattccaaagtggctctcccaaggtgcccaagatatactgagaaaaatcctggatcctaacccggttacacgcatagatgtggatggaataagggcacatgattggttcaagcaaggctatgctccagctatgccatttagcgatgatgaagaagatatcagcatggatgaagacagcctaaacatcaccgagcataatgacatccaagacaagatagcaatcaaccaaatcaatgctttccagctcattggaatgtcctcctgccttgatctatccggattttttgagaaagaggatgtttctgaaaggaaaatcagatttgcatcaaattattccccagcttatttatttgagaagattgagagcattgtcagaaaaatggggttccaggtacataagagcaacggcaagctaaaagtgatccaagactgcaagggactagcaaattcaagagggcaagagtcattattaatttctgctgaggtgtttgagatcaatgaatatctttatgttgtcgaactaaagaagtcatctggagactgctccctgtacagaaagttgtgtgagacgctctcagaggacttgggcacatgcaaaagccagcaatttttaaagcaggactctatcagacaagatataggtagatataatagtagcttttaacaaagagacacttactaaatagcctatagacacaaactaacacaaacaatatactgaatttaaaacagtatattgtccatgcacctattttaaatgtgctctcttatgccttttgtcatgaaacctcaagaatcttagtttatgacaaattggcatctgacgatgtattgagctcctaagggataatatgatgtaaacaagtaaactacacatataagagattcagagttacctggtctctatgtttctctagcctaccccaacttgcttgggataaaaggctttgttgttgttgttggaatgtaagattgtttgtttttgaagcccctggttgacttccatgactcaagaaaaattgtgatatgttgttcgttgaaagaa

SEQ ID NO: 109376 - DNA, 1585 bp, Zea Mays
atgaaaatgtaacaactcgagactgaactgtgatttctgacgagagatctgcgacgaggcgacgacccaaatggggaaaaccatagctaatccaagatctgaactccctcaaatcccgcaaccgggcccccaatcccttccaaacccaatctcccatctccgatccaatgccccctaccggcgacgacccgtcggccgccgccggcatctcattccccgacgcgggtggtggtggcgattctgaagacggcgacttcgccggctcccacctcctcgaccccaccgatccgggcctccccaaccccaccacctcctccgctaccggcctgccccacgcgatccctgcggccggtagcggcggcggcccggtcacctccggcaacggcggggagcggcggcccctgttccagcgcctctggaccgaggaggacgagatcgtgatcctccgcggcttcgcggagttcaccgccgcgcgcggcacggcgttcgcgtcgcaccagtacgacaccgaccccttctacgaggacatgcgccgccgcctccagctcgacttctccaagagccagctcgtggagaagctccgccgcctcaagcgcaagtaccgcaactgcgtctcccgccttcgcgagtccggcgccaccttcaccttccgctccccgcacgagcaggccatctttgagattgcgcgcaacatctggcgccccgcaaaacaaacacggccgcgatccctcggctgactccgacgatgaagacgccgccgccgccgccgcgacacagatacctgccaacaccagccccaacggagaagtcaggtccccgtcctctgcacggcagcgtcgccgcaggcgggcgacggaattcacccctgccacaaacatgttgcagccccctcagccagtgccactgtctgtgtcagtgcctgtcaagacggatgactccctcccagcacagccccagaccccaatgccgaccatggatggctcagagcctgtcaggttgccagtcgtgtcgcctcaatcaggagtttctgatgccgagaagacttgcctgactcctctatttagggagataatacatgcagcgatgaatgtcggagcaaacccatttggtgcaaagctgcctgagccgccgcttgggttgcccttgcccatggaaggggagaagtggcggaggcagcggattttggagctggaggtctacttgaagaggatcgagctgctgcaggatcaggcgaaggcaacgcttgaggagctcaagtcctccactcctgggacttaacccgtgataagatgagactctctttcgttttaggattcttgctctgatccttagtgtagatgcttaggcatttttgcatattttacatccataaaagaatattgttaacttggttggggcttggagcttttttatttgttgttctaaatgttcatgtgatattagcttccgattatgatcttctttctttccttataacataggttcatgggggtatgatttgagtgaacagtaaggtaccctatacaaagatgaattattacaattagtttattaagattacatatcattgctgcttttgtgttgg

SEQ ID NO: 109377 - DNA, 544 bp, Zea Mays
aattaagcacgtacagccccagctcatggcattcaccacgcaccccccacctgccttgtgctctctgtccatatcttccggcggccgtcgatcgactttacaagcagcagcaaagagatgtcggacggcacggccacctgcgtcgacatcatcctcgccatcatcctgccgccgctcggggtcttcttcaagttcggctgcggggctgagttctggatctgcctcatcctcaccttcttcggctacctcccaggcatcatctacgctgtctgggtcatcaccatgtagccggccggccgagaggaaccacggttccctgccactgccaggcagacatgcagctggccgtgctgtcttattaattgctagcttctgtttccgctgaagaatcatcaggacgcatgtacttggatcgatcgatggatcattaatgagctgtttctttctttctttgtttaaccgatcgaccagttcggccttttctaccttggatttgcgttaactgttgggttacgttcagatcagtacttggtttgtttgggtc

SEQ ID NO: 109378 - DNA, 565 bp, Zea Mays
aattaagcacgtacagccccagctcatggcattcaccacgcaccccccacctgccttgtgctctctgtccatatcttccggcggccgtcgatcgactttacaagcagcagcaaagagatgtcggacggcacggccacctgcgtcgacatcatcctcgccatcatcctgccgccgctcggggtcttcttcaagttcggctgcggggctgagttctggatctgcctcatcctcaccttcttcggctacctcccaggcatcatctacgctgtctgggtcatcaccatgttttttttttagataatggaacagaaataaggtcccagcctctacaccatccaagacagcgtacacagcgtatcgatacatccaacaagcgcttaggctcacaaacagactcaaaaaaccaagtttacccaagacagctagacgactaggccgcaattctatttgagaacttccacccaaacttagcgaacacctccataacgaccgactccaataagcggcatgccctgttcagatcggtcctcgcgtcctcgtctctaagcagcagcgaccaagaacg

SEQ ID NO: 109379 - DNA, 2176 bp, Zea Mays
aaaaaaaaccatcatttattcattcacaccacaaaaggtggtgcatgcacatccagaaaagactcagtgacatcatggctgatctcaccagaggaccgttttcttggccactaggacgtcaaacccgccaaacgcaacacggtataaatagcaagcacacttcacacaaacaacctcaccttcaagcgtcaagtagcaaaactacagctttccttcacccccagcaagaaaaccgagcgatctagcagactaccacagaagatttcctactcggccgcacgtgcagaccctgatctgactgagagaggcaggcagcagctcgatcggcagtaaccgtgagcgagccatgggactggcctggatggtgacggcggccgtcgcggcggtgctggcgtcgtgggcgttcaacgcgctggttcacctcgtctggcgtccctacgccatcacccggaggctccgcgcgcagggcgtgcgcgggccgccctacacgttcttcaccgggagcctcggcgagatcaagcggctccgcgccaagggcgccaccgtcacgctggacgtcgacgaccacgacttcatccccatggtgcagccccatctgcgcaaatggatcgcgctctacgggcggacgttcgtgtactggaccggcgcgaggccgaacgtgtgcgtggcggacgtgaacgtggtcaggcaggtgctcttcgaccgcaccggcctctaccccaagaacctcatgaacccgcacatctcccgcctgctcggcaagggcctcgtcctcaccgacggcaacgactggaagcgccaccgcaaggtcgtgcacccggccttcaacatggacaagctcaagctgatgacggcgaccatgtccgactgcgctcgctcgatgatctccgagtgggacgcacagctgcagaaggaggagagcgggcgcgacggtcacggccacggccacgtggaggaagagctgagcagccgcttcgaggagctcaccgccgacgtcatctcgcacaccgcgttcgggagcagctacagcgaggggaagcgggtcttcctggcgcagaggaagctgcagcacatcgccttctccaccattttcaacgtccagatcccagctctcaagtacctcccgaccgagaagaatctcaggacacggaagctggacaggcaggtgagggccatgctaatggacatcatcgaggcccgcctcgccagcaaggacaccgccggcggctacgggaacgacctgctcgggctcatgctggaggcgtgcgcgccgccaccggagcaccatggcgagatggcgccgaccacgctgagcatggacgagatcgtcgacgagtgcaagaccttcttcttcgccggccacgacaccacgtcgcacctgctcacctgggcctccttcctgctgagcacgcacccggagtggcagcacaggctacgggacgaggtccggcgggagtgcggcgacgacgaggtccccaccggcgacgccctcaacaggctgaagcttgtcaacatgttcctcctggagaccctgaggctgtacggcccggtgtccctgatccagaggaaggcgggctcagatctcgacctcggcggcatccgggtacccgagggcgcgatcctgaccattccgatcgccacgatccaccgcgacaaggaggtctggggcgaggacgccggcgagttcaggccggagaggttcgagaacggggtgacgagggcggccaagcaccccaacgcgctgctgtccttctccagcgggccaaggtcgtgcatcggtcagaacttcgcaatgatcgaggcaaaggccgtggtcgccatgatcctgcagaggtttgcactcgagctgtccccgaaatacgtccacgcgcccatggacttgatcaccctgcgcccaaggcatgggctccccatgctcctcaagcgactgtaggtttcattcgatcatggtgcgcgtcagatagatgtgaaattaataggagttttgtatttgttgcttatatatttccgtttatttttgctacttatatgtacccacataatgtatgtcaataggacttttgtatttgttgcttatatatttccatttatttttgctacttatatgtaccccacataatgtatatatgtcccagttttttttttattttggtgcctcgtaaattccacctccccc

SEQ ID NO: 109380 - DNA, 471 bp, Zea Mays
atgggccgtctcgaggtgctcacggcgacggaccgcctgctgccgcgctcggcgtgccggtaccagaggctgctcggcggcggcacgtcgccaccgccgccgcagccgatgagcgggagcgtcgtcagggcgaggcggccgctgcggctgcggaggagggcgtgcaaggcggcggggaggtggtggggcgccagcgccaccaccacgacgacggccagcggcaagcgcctgcgccccctgcgcctggtgcggctgctgctcctgctccccgcgcgccgggtggccgcgctggtcgcggagctcgtgcggcggctggcggcggcggaggccgccgcggactgccccgccatcgtcttctcctctcagtgggggctccccgtgctgtcgcactccgccagctgccggagctccaggctgcgggccctgtacctcgacaggaacctctccgccggcaccggctccccgtgctga

SEQ ID NO: 109381 - DNA, 979 bp, Zea Mays
agcgtgtcatcgccttcccctccctacaagccaaacgcgaataccacccccgtgacttcccgatctccggcgatggccgcgcggcgcctcggatcccccgcatctaggtggctgcgcccgtccgcgctgctcctcctggtcgcctctgctctcctctcggccccgtcgccggcccgggccctccggttcgacctcgagtccggccacaccaagtgcgtctccgacgagatcaaggtcaacgccatggccgtcggaaagtaccacatcgtcgggcccgaccccaactcacccgacgcccagctccccgagtcgcaccgcatctccctcagggtgacgtcgccgtacgggaacagcatgcactacgcggagaacgtgcagtcgggccacttcgccttcacggcggcggaggccggcgactacctggcctgcttctgggctcccgaccacaagccgccggtcaccatcgggttcgagttcgactggaggagcggcgtctccgccaaggactatcccagcgtcgccaagaagggcaaggtcgatatgatggaattggagctgaagaagctagaggaaactataaaaaatatacatgaagagatgctttatctgcgtgaaagggaagaggaaatgcaggacgtgaacaggcgaacgaactcaaggatggcttggctagggttcctctcccttggcgtctgcttatcagtggcaggtttgcagctgtggcacctgaagaccttctttgaaaggaagaagttgttgtagactgtagttggcccatggttcacggtagacctcagcgcaggtgtaacctatttttgggtgaactgccgatctgttacggagcttgaaatcccatgtaacaaacgttatgtcgtacttgagaaaatatgctttagcctgtccagttgaaattataagaaacttgaaatagatactaaattgtcttccattcaatagttcgtgttgcaatttggacttc

SEQ ID NO: 109382 - DNA, 943 bp, Zea Mays
ttttttttttcaaatatgtaagttgtaatggcatgaagttagccccaaactatgttctctattgtaacaggctcgaatcaaaaagataatgcaagcagatgaggatgttggaaagattgcattagcggtgcctgttttagtctatgttcaccagcttgaaccattgaacctagaagtgtttacagaaaattggccaaaacaccgaagccatatcatacatgatcacctatggcttcgccgctgtcatcagcacaagggtgtccaacgagctgggagcccgaaacatcgccaacgccaagaggccctcaccgtgttgctggcgctgtccctgatgctgggggtggcgttcctgctgctcctgggcctcggccacgacctcttggtgcgcctcttcaccaccagggtgctctgcggcgtcgccaggggctacgagtggcagcacctggcggcgtggaccaacctggtggccttctatatcatcggcttgccgctcgccatcctcttcggattcacgctcggcttccaaaccaaggtaggccagccatacgttggttattctgccatcactccactctccagtgagcgcgagttgtgttatctccttgcggactggcatgaaagccaccacaagacttccatcttgccgtgcttcctcgtccgaggtcggatcgatgatgatgttcttgccaaaacaggactggacaaggatgtaacaaggtcatacatcatgattccagcatctgccagtgcaagactagcgcatgatataatgatgggaagatcacctgaaattgaacaactgcaagtaaggcccagcattttaacaaggaaacttatgaagaaagaaatagccacgcaaggaaggtttccatccaaacaatacaaatcaactccaaagcgagacacgagaggtaggtatatggtgtaccattccacgtactag

SEQ ID NO: 109383 - DNA, 957 bp, Zea Mays
atggctgaactagcgattagcctggtggtcgccccactggtgtcccggttgaaggagaaggcgtccagctctctcctcgaccagtacaacgtgatggagggtatggagaagcaccacgagaccctcgtgcgctggctgcctcccatcctcaaagtcatcaccgacgccgagaggcaggcatctcgccgcggcgtggagaaatggctcgagcagctcaagacagcggtgtacgaggcgaacgaggtcttcgacgacttcgagtacgaggcgctccgccgtcgagccaagaagaatgggcacatcgccgagcttggcgttatgaccagtgtaaaactcttccctacccacaatcgtgttgccttccatatcaggatgggctataggcttcgcagagttgttgacaccttcaaggaccttataaaagaaatggacacctttagattcaacaagcttgagcccgaggcaacaacggcacggaaggagttgcgtgagatggattccattatcgttgatcctgaaaatattgttgccaggtctagagacgatgagaggaagaaaattgttaacatattggtcaatggccatgttaacagtcgtgatctcatggtcgttcccattgttggaatgccaggactaggcaagaccaccctcgctcagctcatctacaaggaccctgaggtcaaggagcatttccatctactaaagtgggtaactgtgtcagatgattttagtgttcttaatcttgccaacaagatatgtaatgcctcagagagagtcctcgaggatgcagtgaagaagcttcaggaacatcttaaaggaaagaggtattgctggagcttattagctattactaactctactttcttgcatgcctcctatgatgtttgtaagttattgtctactaaatcctcaatacgtcgtgtcatatcgtgtgttcctaatggacttgtttgctaa

SEQ ID NO: 109384 - DNA, 526 bp, Zea Mays
actaaccagaaaagagtggtccagcgcccaccacatggccgcgcgcgcaccgctcatcatgtcgcgcgccgcctccagcgtcggcccactcccggctgcggcgacgaccgtggccaggcaccagtccgcgcagtgtctccgtgcgaggggggctgtcgacggcctcttcttcgaccagaggacagcgcggccggtccatcacctcctccctggcgccaagttcgaagcgattgggagcaccgcggaggccgcgctgtcggaggggctcgcgcagaagctgcagggggtcgatgtgttcgatctgagcggcaaggcggtgcccatcgttgatctatggaaggaaaggaaggcagtggtcgcgtttgcccgacatttcgggtgtgtgttgtgccgaaagagggtagaccttctcgccgtgaaacagatggtgagagactatgcacgaggtatgcaaattaacaagactcatacaagcgcggaacagtgtgctgatggggcacaagggaaacacatgatcaggtcttaa

SEQ ID NO: 109385 - DNA, 369 bp, Zea Mays
atgacgctcgacacggagggcagcggcgcgccggtggccgccgggctccgggccgtcgtggcggcctccttcccgtccctgagcttcgagatctacccgttccgcgctgacgcggtcgccgggctcatctccgcgtccgtgcgcgccgcgcttgaggcgccgctcaactacgcgcggaacaacctcgacggcctgctcccgcgctgcgtgccgcgcacgatatacctcgacttcgacgtgcggcggctctgggagacgcagctgcccaccaccgcggtcgtcgccgcggccgagtactgccacacaaacttctcgcgctacttcaccgacgccatctgggacgaccccgtcctcgacgccagggattag

SEQ ID NO: 109386 - DNA, 405 bp, Zea Mays
atgcagatctacctcgtatgtagagaatatggacgggtaaggagcggatcggggcctcacctggttcgtcagtgcttcttcttgtgttcctggacgaacttagagttcttgagatcctcctcggtgaagttggccgtcatcttcgtgatgatgaatccggtgatggcgaaacccgtgaggaagggccagttgcgcttccactcccggcggaagaagaccggccacgggtcgaacgtcttcatctcctctgcctccggcttgctcgagatctcctacctccgctcctccgcctccgccttcgcttctggtgagaaatggatgggaggtgaatggaatatgtccgtccgcgccggcgccgcctccgtgcgagcgcgattgggtggtgggagggggatgggcaggtag

SEQ ID NO: 109387 - DNA, 1303 bp, Zea Mays
ggagccagcaactgttgtaaattcacacgatatatgaacccaagattttcctgctgctggtttcatgagaagcaacagcacacaagaaagccaacctcatatatacaagcagacagaacaagaaaccagaccatacttgtcactgcagctatttggcagcactgaggaggattttccacctaagatggactcagtgaataagtacttatcttatgagagtagcaatcctctggatgagagatctccttcatcctctctgcctataacccgcaagtttttccccatacactcggttgatgaagaggttcagcaccctcatattacagattatggggaagatgctacgatgggtgaagttagcacaaatcaggcatggttggcaccaccacttgatctcttcaaggattcagagcgtcccatcgagaacggatcgccaccaaatcctggttaccaatcctgttatgcctcaacatcttgttcagatcattcaacttcaacctcaaactcagatggacaggatcgaactggtaggattattgtccagctgtttggcaaggaacctagcacaatacctcggaaccttcgtgatgatatagtaaattggctcaaacacagccctactaaaatggagggttacatttgccccggttgccttgtactatccatgtacctattaatgccgggtattgcatgggatgagcttgaagaaaatctcctccagagagtaaactcattagttcaaagttctgatttggatttctggagaaaaggaaggtttttagttcgaaccaactccgagttggtatcatataaagctggaatgacccgtttaccaaaatcgtggagaacatggaatacccctgaattgacccttgtgtcaccaattgctgttgttggtgggcagaagacctccctcattcttaaaggccacaatctatctattcctggcacacagatccactgtacaagcatagggaagtacatatccaaagaagttctgtgctcagcatatccaggtaccatatatgatgattcaggtgttgagacatttgacttgccaggaaaactagatcttattattgggcgctgctttgttgaggtagaaaacaggttcaggggtaacagattccctgttatcggtggactatgtacactatgtttttttgaagaggatgtagtgttgactattacgacgcctagggaacttaacaactaccttcgcaaaggcactttttacttgtggatctatcatggcattattgcaaagatacaaaaaacattaaaaagactaaatgacatatag

SEQ ID NO: 109388 - DNA, 782 bp, Zea Mays
cgctgcctactccccatggcctcagcgaacaacgacgaccgcgaggcggcgggcatcctgcggctgctgatggggatggcggcggcggcggcgcccgcctcggcattgcctcggggcggcggcctgatgatggtgcagcacgtcatcctcgacgtcaacggggaactgttctcgggcggggtcggcggcggcggcgtgccgccggcgtcgaaggccgcgatcgccgcgctgaaggaggtgaaggccggggagggcgaggacgcgctgggcgagtgcgccatctgcctggacgcggtggagggcaccggcaaggagatgccgtgcgggcaccgcttccacgggcgctgcctggagcggtggctaggcgtgcacggcaactgccccgtctgccgccgcgagctgccagcgccggccaaggaggaggaggaggaggacagcgcggcgtcggcggagggcggcgaggaggagaggcggaggcccagggccgcggtcgtcgtcagctacctcgtgttcggaggcgggcgggcggaggtgcagcaggagccggagagggaggagccgtggaacattagaatagaggatgtggattagcattgatcactttcccattggttttcagattggtttgatggcggaggaggttatgtacatactagtaatgtcatgaacgctggaaatgggcgaagggggaatttgtgaatatttcgggagttcaatctgttgatcaatgcttatattgccattaagcattattcttttgaaaatgagcagcggtttgcttc

SEQ ID NO: 109389 - DNA, 2570 bp, Zea Mays
aagaaactggagaaaaagagaggagctcaaaagcaaggcgaggcctcctccgcccctttttctcccctcccaattcacacaggattcttcactcgcccgcccagttgtttcttttagtgccgcccccattccgctctgatccgagcctttcgctcaaagcctccagcttttgcaattgtttggtcacttcgggaatcaaggaataagttcttgcgctgtgcgcgatagagagcctgatccatctttccccatcctcttcccgtggcatttcggtgtgcttgcgctctgtgcgtggccactgcaaggggaggatttttggcctggtttctgtcttcttggggttctaaaatttcgggcgagatcttagcctcaaggaggttccttgcttttctggtattggcgactcttgttgctccctacaagtccaagaaaagaatttggaggccatggtgggggtcccttgcgaccagttctggtcgattattcgtgctgttgaattcaatatgccgctgtgacccacctctgcctggtttcttggaggaaatttgcttcaattgggcgtcgttgagctagagctctcctccagctcttgattcggtccatggggctttgccatggcaagccgacgcaaatcccggaggccgaggcggaggaggatccccatgtagcctccggagcgggtgacagtggggacgggccgacctcgccgtcggcggccgcgcccacggcgaagccgggcacgccgaagcagcccaagttcccgttctacctgccgagcccgctcccgccgtccagctacaagggctcgccggcgaactcgagcgtcgcgtccacgccggcgcgcggcgggttcaagcgccctttcccaccgccgtcgcccgccaagcacatccgcgctctcctcgcgcggcggcacggctcggtcaagcccaacgaggcgtccatccccgagggcggcgagccggagctcggcctggacaagagcttcggcttctcgaagcacttcttcgcaaagtacgacctcggcgaggaggtcggccgcggtcacttcggctacacgtgctccgccaaggccaagaagggcgagcacaagggccaggacgtagccgtcaaggtcatccccaaggccaagatgacaacagctatcgccattgaagatgtgagaagagaagtgagaatattgagttctctgacaggccacagtaatttagtgcagttctacgatgctttcgaggatgaagataacgtgtatatagttatggaattatgtaaaggaggtgaactgctggacaggatattggctagaggtggaaagtactctgaagaggatgcgaaggtcgttatggtacaaattttgagtgttgtatcattttgccatcttcaaggtgttgttcaccgtgatctgaaaccagagaatttccttttctcttcaaaggatgaaaactctcccttgaaggtcatagattttggcttgtctgactttgtgaagccagatgaaagactaaacgacattgttggaagcgcatactatgttgctccagaggtcctccacagatcttatgccaccgaggcagatatgtggagcattggagtaattgcctacatcttgctctgtgggagtaggcctttctgggcgcgcacggagtcgggaatcttccgagctgtcttgaaggcggaaccgagttttgatgaggccccatggcccactctcacggctgaagctaaagattttgtaaaaaggcttcttaacaaggattaccgcaagagaatgacggctgcacaagctctcagtcatccatggatccgtaattctcaacaagtgaaggttcctttggatatgataatctataagctaatgagagcgtacatcagctcgtcttcgctgcggaagtctgctttgagggccctagccaagacgctgacgacggaccaactcttttatgtgagggagcagtttgaattgctgggcccgaacaagaatggttacatctcattgcaaaatctgaaatcggctctagcgaagaactccacggatgcaatgaaggactccagggttgtcgattttgttaacaccgtgtgcgctcttcagtacaggaaactggatttcgaagagttcgccgcttccgccatcagcgtctaccagatggaagccctggagacctgggagcagcacgcgaggcgcgcgtacgagctgttcgacaaggaaggaaaccggcccattgtgatcgaggaacttgcgtcggagctcggacttggcccgtcagtgcctctccacgttgtcctccaagactgggtcagacacgccgacgggaagctgagcttcctggggttcatcaagctcttgcacggggtctcgtcgcgctcgatcccaaaggcctagcattgtacaccatccatccatcgtcgttgttgttgtagttgtactgaagtaaagctgttgtgtagacgagtgtacagatgaggatagggaaaagaaatgaacatgatggaagactggaagggccgtaagatttgcggctgctgtttgtcaatgccaaattgccattgcctgcagctgcagtagctgtgtc

SEQ ID NO: 109390 - DNA, 1556 bp, Zea Mays
ctttgtagaaaatgaatgcaacaaaatcacgcttggattgtctgtttaccattaattaattgttttctgcatcttgtgtaatcccatatttaagctcaagcatttcaacattctcactcaataaatcctctgtcagatgacaacagctatcgccattgaagatgtgagaagagaagtgagaatattgagttctctgacaggccacagtaatttagtgcagttctacgatgctttcgaggatgaagataacgtgtatatagttatggaattatgtaaaggaggtgaactgctggacaggatattggctagaggtggaaagtactctgaagaggatgcgaaggtcgttatggtacaaattttgagtgttgtatcattttgccatcttcaaggtgttgttcaccgtgatctgaaaccagagaatttccttttctcttcaaaggatgaaaactctcccttgaaggtcatagattttggcttgtctgactttgtgaagccagatgaaagactaaacgacattgttggaagcgcatactatgttgctccagaggtcctccacagatcttatgccaccgaggcagatatgtggagcattggagtaattgcctacatcttgctctgtgggagtaggcctttctgggcgcgcacggagtcgggaatcttccgagctgtcttgaaggcggaaccgagttttgatgaggccccatggcccactctcacggctgaagctaaagattttgtaaaaaggcttcttaacaaggattaccgcaagagaatgacggctgcacaagctctcagtcatccatggatccgtaattctcaacaagtgaaggttcctttggatatgataatctataagctaatgagagcgtacatcagctcgtcttcgctgcggaagtctgctttgagggccctagccaagacgctgacgacggaccaactcttttatgtgagggagcagtttgaattgctgggcccgaacaagaatggttacatctcattgcaaaatctgaaatcggctctagcgaagaactccacggatgcaatgaaggactccagggttgtcgattttgttaacaccgtgtgcgctcttcagtacaggaaactggatttcgaagagttcgccgcttccgccatcagcgtctaccagatggaagccctggagacctgggagcagcacgcgaggcgcgcgtacgagctgttcgacaaggaaggaaaccggcccattgtgatcgaggaacttgcgtcggagctcggacttggcccgtcagtgcctctccacgttgtcctccaagactgggtcagacacgccgacgggaagctgagcttcctggggttcatcaagctcttgcacggggtctcgtcgcgctcgatcccaaaggcctagcattgtacaccatccatccatcgtcgttgttgttgtagttgtactgaagtaaagctgttgtgtagacgagtgtacagatgaggatagggaaaagaaatgaacatgatggaagactggaagggccgtaagatttgcggctgctgtttgtcaatgccaaattgccattgcctgc

SEQ ID NO: 109391 - DNA, 720 bp, Zea Mays
aaattcttgtcactagatgactgttatgtcttattcaatcccttcatgttgtcttttatagccaactgtcaacataaagataaatattggcttctaaagttctgtaccaccagttctgtgatgatatggatgattttatttaagcctcaatgccacagcattagttctgttggtggattcctcacagtatgcctgttcctattgagatcttgccatgtcagcgacacttacaggcattttaatgattggtgcagcttattttgatcctactgaacagttagtgtgtccaggggcagtcctgatgaacaactacctactcaacaccctgaaattgttaagggatgttcagtaattgagctaggatctgggattggcattactggcatattgtgcagccgtttctgcaaggaggttgtcttgactgatcacaatgatgaagttctggaggcaaggttaaattgtttaggaattcattcactgatacctcagcttcactttcatataggaattatagaacaaagtaccattgagacttttgctttagttttagccattttgtatatataggtaaatgcatacagtttacaacagatagaaaaggacatttggcaatctgtatggcaatagtcgctgcgtacctttctgtccactgtactgtctatgtcttgaatgaagcgccagaagagtggtaaatcataaatgatgcagttaccttttata

SEQ ID NO: 109392 - DNA, 779 bp, Zea Mays
gcacgctggcacgttgcggcggcgcagagcacatccccaattccccaggaacaggctcgtaatttttccactgccatcgcaccctttcataaaaccctaaacccaggacccaggtttatcggtgaggcgagccgcgagtggaactgtggaagcgtcgagcttttttcttctttgtcttgctgcgcaagaagaagggaaacgagaggagggcggcgatggcgaagaggctgctcccgtcgctgaaccgggtgctggtggagaagctggtgcagcccaagaagaccgccggcggcatcctcctcccggaaacatccaagcagctgaatgctgctaaagtggtggctgttggccctggtgagcgcgacaaggcaggcaatctgatcccagttgctctgaaggaaggcgacactgttcttctgcccgagtatggtggatctgaagtcaagcttgcggctgataaagagtacctcctcttcagagaggatgacattttgggcacacttgtggactgattcagatcgcgggcaagcgggtggtggtgatatgcgtaggatttgaagctgggaacaaactccagaaagaactgtgccctgtcgtgatgtcataaatttgtggtgaaacatcatatcatgaggataaaacttgttgcttttttgtgatgcaatttagaaaactttcgaatttgaactggttcccaatattttgttctcctccctgtcccctgttgaagtgctctctgttttaagttagcaattaacgggatcggatttacttgtgaa

SEQ ID NO: 109393 - DNA, 666 bp, Zea Mays
agcttttccctccgtaaaaatagccgcaccccctacccaaaccaccggcgcgcacgccaagcggtgaagcagcatcggccatggaggagaccaagccagcgccagaggccatgctccgctgcgccagggccgcgctcctcctcgcctccctccgccggccacgcgcgccgacgccgacacaggatcgccgccggacctcctactctccctcctcggccgccgcagcggagctcgcgcggctccggtccgaggggctcctccgcagcgccgagatcgcagcggcgcggcgcgaggccgctgcccacgcgcgggtcgccggctccgagctgctcctcgtcctcgccgtggcgcccgccgtcctcctgctcctcctcctcgggcttctctaagccagcggcggcgtgggtagcgcgggggctggagtctggggccgcctctcctctccgtgagttcagttttggagtgcactaggtgttcgatgaaatgcatgtttgagtgtggcggcgagtatataagcatcagatttgtcccccttttgttttggctgcattgccctgtggacaaatgtggtctgggtttctgtgcggtttgggcattcgacgaaaagcctgttcgtgtttggtgatttcatttcaatttgattccggtgcttgttgccaacagaaa

SEQ ID NO: 109394 - DNA, 1009 bp, Zea Mays
gcttccacccacatggatgaaggcgacctcttcgcaacgccgagcactacaattcggctgtccgaggtacgtggttcacaacaaaaccaatcgactcagcatgcatatgaactactatagcgcggaaaaaaaattgcatggtccatggtgtgatctgacgctgctccctctcgtcattcctcaggagaacatggatggcgatggaagcatcatgaccaatgacagtagggactgtgggcagcggtacccgatgatgaaccaagaaccggctagaaggcctccgccaatgggccagcggtacgacccagagccatgctggaggcagtctcggccgcaggaactgagcaacgggcagacaaaggagcagttcgtcgcggagatgcttgccagaccctcgagcgtggagtcgggccccgggagaccgcaggcgaggcctaggcagcagcaccaggacaccccagcagctcaagccaggccgcagccggctgcgtccgagaaaccggcggctcaactcgacgcgaactctgtgcgagcgaagctggagctcgcgaagaacgccaagctcgaggcgaccaagaggaagctccaggaagggtaccaagaatccgataacgcgaagaagcagaggaacgtacagatggtgggtccgcagaacctgcccaagcaagggaacacgaacaacaaccgtagtttccagcctagcggtagcggcaggccaaggagtagcggcaacgtcaatagcaacaggaactggtcaagatgagaggcaccgattccaattccgattccaattccttcaagagcggcaggatcccttttctttttctttttctttttacatcggctacaacaatttttagtctaggccagtagtacataaacagcaataaggcttgttttcggaattgcatgtttggcatgtcacaatgctcggctggctggtctttgccgatgaaacctgtaaagataacactaccaaattctgatcttgagcttactatccatgcta

SEQ ID NO: 109395 - DNA, 1241 bp, Zea Mays
aagtgcgtgcgtgcgtgcgttcgtccggggctccgggctgtgccggccgggcgatcgatcggcgatggcgccgccgtcgagggactactggctcggcttcttccgcggcgcgggggacaacatcttcgacgccatcgaggcggccatcaccgtcgccgcatccgaccacccggccgccctccgggagcgccgcgacggcatcgccgagcgcctcttcaccgcgctcctggtcaccagcgccgcggcagcggccgcgggggcggcggcggcggccccgggaggaggagcagcggggggaacccccgtggctggggcgcccactccggcacagctccaccccgagggcgccgccagcgtgcccagcctctgcagctccgaccgcgccgaggccatcgccgacgacgccgcgccgcgctgcgacgatcctgtcctcgccgagacggagcgcatcaaggccgtcctcctcagcgaccaagagaagccggaggccgagttgctggagctactccggcggctgcaggagctggacctcgcgttcgacaccttggatgccaccgcgattggcaaagcagttgccaacttccggaagcacagctccaagcagattcggaatctcgtgagatcgctcatcgaagactggaaacacacagttgacgtgtggattgctcaccgcagagatgctgttgtagatcaaacacctcagtccatgggtccttcaagcttggagcaggaggatcgaggggcggcttccacccacatggatgaaggcgacctcttcgcaacgccgagcactacaattcggctgtccgaggagaacatggatggcgatggaagcatcatgaccaatgacagtagggactgtgggcagcggtacccgatgatgaaccaagaaccggctagaaggcctccgccaatgggccagcggtacgacccagagccatgctggaggcagtctcggccgcaggaactgagcaacgggcagacaaaggagcagttcgtcgcggagatgcttgccagaccctcgagcgtggagtcgggccccgggagaccgcaggcgaggcctaggcagcagcaccaggacaccccagcagctcaagccaggccgcagccggctgcgtccgagaaaccggcggctcaactcgacgcgaactctgtgcgagcgaagctggagctcgcgaagaacgccaagctcgaggcgaccaagaggaagctccaggaagggtaccaagaatccgataacg

SEQ ID NO: 109396 - DNA, 1172 bp, Zea Mays
aagtgcgtgcgtgcgtgcgttcgtccggggctccgggctgtgccggccgggcgatcgatcggcgatggcgccgccgtcgagggactactggctcggcttcttccgcggcgcgggggacaacatcttcgacgccatcgaggcggccatcaccgtcgccgcatccgaccacccggccgccctccgggagcgccgcgacggcatcgccgagcgcctcttcaccgcgctcctggtcaccagcgccgcggcagcggccgcgggggcggcggcggcggccccgggaggaggagcagcggggggaacccccgtggctggggcgcccactccggcacagctccaccccgagggcgccgccagcgtgcccagcctctgcagctccgaccgcgccgaggccatcgccgacgacgccgcgccgcgctgcgacgatcctgtcctcgccgagacggagcgcatcaaggccgtcctcctcagcgaccaagagaagccggaggccgagttgctggagctactccggcggctgcaggagctggacctcgcgttcgacaccttggatgccaccgcgattggcaaagcagttgccaacttccggaagcacagctccaagcagattcggaatctcgtgagatcgctcatcgaagactggaaacacacagttgacgtgtggattgctcaccgcagagatgctgttgtagatcaaacacctcagtccatgggtccttcaagcttggagcaggaggatcgaggggcggcttccacccacatggatgaaggcgacctcttcgcaacgccgagcactacaattcggctgtccgaggagaacatggatggcgatggaagtgagtgatcagattctcgctctcatcaaccaatcccctccctccctctgaccattcttggttaggaatttgtatttaccatctcggtcggtttgtgaattccaattcaggcatcatgaccaatgacagtagggactgtgggcagcggtacccgatgatgaaccaagaaccggctagaaggcctccgccaatgggccagcggtacgacccagagccatgctggaggcagtctcggccgcaggaactgagcaacgggcagacaaaggagcagttcgtcgcggagatgcttgccagaccctcgagcgtggagtcgggccccgggagaccgcaggcgaggcc

SEQ ID NO: 109397 - DNA, 294 bp, Zea Mays
atgaacataacttgccacacgatcagccaattccttaacaggaatgggttctccatagaccctagtccattaaattttcagaacagtcatataaaagatctcgcatcccatggtctcaaagacaaggtgtttacttttcataactggcagcttctgacttcgtccttgaaacaatttgcctgccatctgctgctaaaccagcaacagcctagccagagtgccggtgcactgaatggatcctccggtttgacccttccagcatcatctttgaggttaccagcttctcaacaccct

SEQ ID NO: 109398 - DNA, 356 bp, Zea Mays
agattctgcttcaaaaaacctgaccggtaccctttggccaaggcagcgcctctgatgtgtgctggaatcaccatatatacgcccatgattcggcacaacatgaaccaaccaagtaaatcccttggcgtgattggactgggtggattgggccacatggccttcaaatttgggaaggcatttgggttgaaggtcactgtttttagacgagtgaatcgaagagagttcaagccattaatctcctcggcgcagataattttgtcatatcatctgatgagaaacagatggaggtatacatatttgcccttgatctccttattagtgaacttagcagcaactcgttaattgttattaattcc

SEQ ID NO: 109399 - DNA, 3006 bp, Zea Mays
ggccgggctcttaaatcctagctaggctcagccaatccccgcgccaggatgccgtcaacctcgggtccggttgccgtggcgtcggcttcggcgtcggcgaaagccgcgccgtccccggacgtcgggatctcgccggacctgtacccgtcggaggacgacctggcctacgaggaggagatcctgcgcgagcccttcaagctcaaggggtggtggcgctacctcgtggcccgcgccgccgcgccgttcgccaagcgcgccgtcatctacgagcgcgcgctcaaggcgctcccggggagctacaagctctggcacgcctacctccgcgaccgcctcgaccacgcgcgcccgcaccccatcgatcaccccgcctactcctccctcaacaacaccttcgagcgggcgctagccaccatgcacaagatgccgcgcgtctgggtcctctacctcacctcactcctcgaccagcgcctgctcacgcgcgcgcgccgcgccttcgaccgcgccctccgcgcgctccccgtcacgcagcacgaccgcatctggccgctgtaccttcgcctcgcttcgctcccggcctgccccgtagagacgtcgctccgagtcttccgccgatatctccaattcgacccctcccacgccgaggacttcatcaacttccttgtatccaccaaccactggcaggaggctgctaaccgtctagcttccgtgctcaacgacgatgggttccgctccgtcaaggggaaaacaaggcaccagctctggctcgagctctgcgatatcctcaccaaacatgctgatgaggttgccggcctcaaggtagacgccatactgcgtggtgggatacgcaagttcaccgatgaggtcggcaagctgtggacctcactggctgattactatgttaggagaggcctttttgaaaaagctagggatgtattcgaggagggtgtttcttcagtggttaccgtcaaggagttcagcgtggtatttgaggcatatacacagtttgagcagagtatgcttgcggcaaagctcgaggctgctgaggaagaaggggctgaggatgtgaacgagggagggggcaagaagagcgggatcgataatttatcgaagaaattcctcgatggattctggttgaacgacgaagatgatactgatttgaggatggcaaggtttgagcggctgttggatcgcagaccagagcttcttagcagcgtgctgttgcgacagaatccacacaatgtggaggagtggcacaggagggtgaaactctttgaaaaggatcctgcaaggcaagtagcgacatatgttgaggccgtgaaaactgtagacccgatgaaggcagtcgggaagccccatactctgtgggtggcatttgcaaagatgtacgagaaacacaatcgtctagatagtgctgaagatatcttcaaacgggctactcaagtgaattataaggcagttgaccacttagccagtatctggtgtgagtgggcagagatggagctacgccacaacaattttgacaaggctattgagctgatgaggcaagcaacagcagagccctctgttgaagttaagcggcgggctgctgctgagggggatgagcctgtccaaatgaaagtgcacaaatctttgaaactgtggagcttttatgttgatctggaggagagccttggaaccttagactctacacgtgtagtttatgagagaatactggatttacgaattgccactccacagataattctcaattatgcatatcttcttgaggagcacaagtatttcgaagatgcatttaaagtgtatgaaaggggcgtgaaaatattcaagtatccccatgttaaggccatttgggtaacctaccttacaaagtttgtacatagatacaagagaagcaagttagaacgagcaagagaacttttccatgaagctgtccaacaggctcctccagaggaaaagaagcccctatatttacaatgggcaaaactggaagaggactatggtcttgcaaaacgtgctatgaatgtatatgatgaatctgtaagagctgttcctggcagtgaaaaaatggccatgtatgaaatctatatagcacgtgctgccgaactctttggtgttccaaggacaagacaaatatacgagcaagcaattgaatctggcctcccagacaaagatgttctgacaatgtgcatgaagttcgctgaactagagagaagccttggtgaaattgatcgtttcgcgtgccatctatgtgcatgcatccaactatgctgatccaaataatcctgacttttggaagaagtggaatgactttgagattcagcacggtaacgaagacacattcagggagatgcttcgtatcaaacggacagtggctgctagccgtagtcagacacatttcatactaccggagtacttgatgcagaaggatcataggttaaacctggacgaagccgttgacactctgaaacgtgctggcgtccctgaggacgagatggcagccttggaaaggcaactggctcctggaccatccactgcaccagcagcaacaccaactgccccagcctctgctaacaggacgatgaattttgtcagtgctggagtagaggcgcaggcagacagcagcaggcaacaggctggtaacaacgaggacattgagctgcccgacgagagtgacgacgaggaacccgatgtccaaattgcggagaagagtgttcctgctgcggtatttggtgagctcggcaagagagctgccgagaagaacgaggaaagctcaggtgcccaaggaaatgagcagctgggcgccctcgagaggataaagagacgacgccaatagtaagccgttgctaagattgtgcagccgtggtatcagcacgagctttatttaacgatgttgtacttgttacgtgtaaacaatttctttgtacaaacattgaagggagttgatcggcgtggccatttctgtgtagtcttgggtttgtttcttctccctcgaaagaacatgacacc

SEQ ID NO: 109400 - DNA, 1357 bp, Zea Mays
ggccgggctcttaaatcctagctaggctcagccaatccccgcgccaggatgccgtcaacctcgggtccggttgccgtggcgtcggcttcggcgtcggcgaaagccgcgccgtccccggacgtcgggatctcgccggacctgtacccgtcggaggacgacctggcctacgaggaggagatcctgcgcgagcccttcaagctcaaggggtggtggcgctacctcgtggcccgcgccgccgcgccgttcgccaagcgcgccgtcatctacgagcgcgcgctcaaggcgctcccggggagctacaagctctggcacgcctacctccgcgaccgcctcgaccacgcgcgcccgcaccccatcgatcaccccgcctactcctccctcaacaacaccttcgagcgggcgctagccaccatgcacaagatgccgcgcgtctgggtcctctacctcacctcactcctcgaccagcgcctgctcacgcgcgcgcgccgcgccttcgaccgcgccctccgcgcgctccccgtcacgcagcacgaccgcatctggccgctgtaccttcgcctcgcttcgctcccggcctgccccgtagagacgtcgctccgagtcttccgccgatatctccaattcgacccctcccacgccgaggacttcatcaacttccttgtatccaccaaccactggcaggaggctgctaaccgtctagcttccgtgctcaacgacgatgggttccgctccgtcaaggggaaaacaaggcaccagctctggctcgagctctgcgatatcctcaccaaacatgctgatgaggttgccggcctcaaggtagacgccatactgcgtggtgggatacgcaagttcaccgatgaggtcggcaagctgtggacctcactggctgattactatgttaggagaggcctttttgaaaaagctagggatgtattcgaggagggtgtttcttcagtggttaccgtcaaggagttcagcgtggtatttgaggcatatacacagtttgagcagagtatgcttgcggcaaagctcgaggctgctgaggaagaaggggctgaggatgtgaacgagggagggggcaagaagagcgggatcgataatttatcgaagaaattcctcgatggattctggttgaacgacgaagatgatactgatttgaggatggcaaggtttgagcggctgttggatcgcagaccagagcttcttagcagcgtgctgttgcgacagaatccacacaatgtggaggagtggcacaggtgaggtttgctataacacctgaactttattgatcgtgttgtctcggcagattaattatcacttggatgtacccttcgaatgcatggccccctcccccacc

SEQ ID NO: 109401 - DNA, 137 bp, Zea Mays
ctttctgaccaaaggtttatatgcatccacaaaacatcttagttttattttggtcatatatatatatatatatatatatatatatatattactttttgttgatgtattactgttgtatgtatatgggccggtctggc

SEQ ID NO: 109402 - DNA, 935 bp, Zea Mays
aattattatcgcttttgggacaggccggaaggaagcgtaaagggtagggcggtggttggtgacagcagcaggcctccttcctcctcgctcgcggcgcctccgcctatacctgttgcggcaggcaacaaggcaggcaggcaggcagcagcggagcgccttggtgatctacgaagaggatgaattccaggatctccctcctctgcgccctcgtcctcgcctcctccctcctgcactgcgccagatccgacggcaatgacgcgcagctcctcaagggcatcaacagctacaggtcctcgctcaaggtcccggcgctgtccgagaacaagaacgcggcgtgcctggccgagcagctcgcgaggcagttcaaggggcaggagtgcaccaacacgacgggcgccaacaccgtcatcggcaccgagcagcagttcccggactaccccaggtacctggaccgctgccacctcaacgcgtcggtgaccgaggacggccaggtgatgccggcgtgcgtgccgggcctcgcccccgccgtcgtcctcgccaactacaccaagtcgcagtacaaccggttcctcaacgacagccagttctccggcgccgggatcgcgagcgagggcgactgggtcgtggtcgtgctcagcaccagcacgggatccggcgactactcgccggctccgccgggctccaactgggcggtctcggcggctcggccgttcggcttcggccagctggtccttttgttggtggggtttgtagttttgctggtgaagtgagtgtttagtacgcatgcaccaacatcttcgtggcttatgttgtcacgttcaggtctcgttggctttattaagcttttttcacttgaaaagattgattacgaaacaaacatgtgatttattgttaaaaaaagtaaatcaatctatcgcaatagttaatggaggtca

SEQ ID NO: 109403 - DNA, 1186 bp, Zea Mays
catacaaactatggcttgagcatgaaaacaggacagatgatataacaataatcattgtgcatattcgagacatggaaaatgcagggagtgacaaagcggactatggtagcatcggagcatcaatagctgggcagacaatacagtcagagatacctgtatttgtacaaccagaagcaagtaacatgaacagatctgctgctaccggaatgcgatcaccgtcttttggctctccaactgaacggagcctctcatgtgttgctccttctcctacggatcctttgttgatacatggcagagtatcagatgcttccaagcctgggcaaagtgagcagcgagctgcatcacaaccaccggtacaaacttggcatcaaatagacggggttactactgagctggagcggtctatgcagcaaagcatccttccaacctcctgctgaaagtagagaatgcgagttgaatgacaaaaagaggcctcgagataacccaccgccatcttggagctactaaccgtaccatggatgcgatgtttgccagcagcaaatctcgtgctgttgctcgtgttttggtagagcacctgctgctgccgacgatgcgaggttcctgatcctgtgtgggatcatctaaccatgggctgagtggaattgagttattctccgtttcatttgtactttgtttacttttcacaagatatagattaattctaagttgatgcctgtcgaggtatcagtatcatttgagacgcaactgtgcattgtcgtccttccacagaattaggatctggaattgaaatgcgagtgccgtacagaacagatcagctgggtggcttttcagatgcaaagaagaatattggatttagcctgtaagctgacctgagagctctgtcaaccctttaaaagtgtgctacgcatatacgataccgtcagcgagctctgccaagaaacaaaggggcctgtttggttcagcttttttctaaccagtttttctgaaaatctggttgtggggagaatctggctgtggggagaatctgagtatcattactattacgtgtgaagtaagataaatttgtttatagtgctcatgatctagaaagtgacgaattcctactattacaacgactctaccgattatgtgtttatgttgattttggatgattttttgtcccaacgaattttatagaagctggctg

SEQ ID NO: 109404 - DNA, 817 bp, Zea Mays
cccatttcttaactccccgagcccccaaaatcacgcacccagagaggggagaggcggagtgacgggggagaggcggaggccacgccccaaacccaaaccctagccacacgcgacgccgatgggatgcgcgcagggcaagtgctgcctgccgcggcacccgaggaggggctccgccgccgtcggcgggcgcggcggcgccacgcttggccgcgccgcggtgcccggggccgggctggtgctggagtacgccgcgttggccgtggcggggctctacccagactccccggccagggagtcccaggacacgcacctcgtcgccacgcgcttcgcgggggatcctgacctccacctcttcgccgtcttcgacggccacggcgctgccggagcctcctgcgccgggttcgcgcgggacgcgctcccgcgcctcctcctcgcctcgctcgccgcgggcccagccgccgcgttccgggacgccatgctggccgccaacgccgagatgcatgcggcgcccggcgtcgacgactccatgagcgggaccaccgccgtggccgccctcgtcgccggcggcgcgctccacgttgccaacgtcggcgactcgcgcgccgtcgccggtgtctggcgcgccggccggctcgtcgccgaggacctctcctgggaccagaccccgttccgcgccgacgagcgcgcgcgcgtcaaagcctgtggcgcccgcgtcatgtccgtcgagcaggtggagggcatgcgcgatcccgaggacgtgggctggacgcccaacgagggggacccgccacgcgtctgggcgcgcgacgcactctac

SEQ ID NO: 109405 - DNA, 721 bp, Zea Mays
ctagttttcattctaaccaacgaaaagagctctccgcttttcatctgttgtgcaacttccctcctggttccttgacatgatgctcgctcactcgtgcacttcaatggcaactcctttttccactccaccttttcccttctttgcaactgctgctctgcttgcttgcttataagcacgcacattctgctgtcatatccgttgcttggtgtccaaagcaagagcctccaacaagctagctggttaaaccaaaccgagctcgccatgggtctccagcggaagattctgggaaagagaaccatccggcaggtgtctgaagaagaagaagatgttagcattccgcagctggtggagctgcggccgctgaagctgaagcggtcttactcccacggcggcgacgaggacgaagaaggtccacggcagctctcgccgctgtcgtcggcgacggcgagtggcgctggaaccgaacgccccccgcgctgcccgccggcgccgaagaagccgaggctgctgctagggtgtagcctggacgggttcaaggtgctgcgcgtgatggacctgcgttgcttcctgcgccgatgagccaagtgacatgcatgtagcttttgagtttcggctgcagcatccccgttacagtgtcccaactcccagagatgtgtactatgctctgctctgtcgagaccttcatctagctaatgtacaagtgtgagtgtcgatattcata

SEQ ID NO: 109406 - DNA, 1414 bp, Zea Mays
gaaagcgaggcgttttgttttctcccgtgctccccctcccggggaaggggcaacgagaaatcgaacccacacgcaacgcgacgcctccacccgctcgcctagtccagaatccagatccagcgcccgcatctctctctctcgcgcgcgcgcgcgagcgcgatgagctgccgcgacgggcgatcgtgctagcggtaacagcgagcggtgcgcgagggcggagtgggagtgtggatccgaggggcggcaaatctggcaggcgccgcggtggggctgcgggcgcgggggagggcggggggctgggcggacggcggggagggaggggaggactgcggtaggctcaggccctggcgcaggaggctgctcgcgtccatggcgctctcgtggtcctcggccctccgcctcgccgtcgccgccgtcctgctcgtcgccgtcgtcgtcgcgctcttcactctccccatcgagaagattttgaaggactttctggtttggatcaaggagaatttgggtccatggggtcctttggtgttggccctcgcttacatccctctgacagtcttagctgttccagcatcaattcttacacttggagggggctatctatttggcttgccagtggggtttgttgctgattccattggagcagcaattggtgcgactgctgcatttctgcttggcaggacgattgggaggtcttatgttctctccaaatgcaaagattaccctaagtttcaagcagtagctattgccatccaaagatctggcttcaagatcgtgttgctactaaggcttgtacctttacttccgttcaacatgttgaactacctgttatctgtcactcctgttggtgttggagaatacatgctggcttcttggttgggaatgatgccaatcactcttgctctggtgtacgttggaacaacactaaaagatctatcagatgtgacacatgggtggagtgagatctcgactactcgacggattctgataatatctggttttgtattatctgtggtcttgattatctgcgtcacaaaaattgcaaaatcatctctggagaaggcattggctgagaatggagagctccatgtaggaacatcgcagcttccaggtgtaacctctcccttggatctgcaacaacctcttgtaatcaagattgacacatcaaatgaagaccacgagaagtaaaagtgttgtgtttacaatctcagatgtaaattctttggttgttgagtcggtagactgtatatacacccatactctggtgaggcccgtaaatgggtaaaaaagacatcatccccccttccaaaaaagggaatgaagtttagtttactgataggttatagtaatacgatatgcgctttgtttcactccacgtgctaccttatctttggtgaaaatactcgcacttaactgg

SEQ ID NO: 109407 - DNA, 895 bp, Zea Mays
gccggggacggacggttggtgcaactggaaagcgaggcgttttgttttctcccgtgctccccctcccggggaaggggcaacgagaaatcgaacccacacgcaacgcgacgcctccacccgctcgcctagtccagaatccagatccagcgcccgcatctctctctctcgcgcgcgcgcgcgagcgcgatgagctgccgcgacgggcgatcgtgctagcggtaacagcgagcggtgcgcgagggcggagtgggagtgtggatccgaggggcggcaaatctggcaggcgccgcggtggggctgcgggcgcgggggagggcggggggctgggcggacggcggggagggaggggaggactgcggtaggctcaggccctggcgcaggaggctgctcgcgtccatggcgctctcgtggtcctcggccctccgcctcgccgtcgccgccgtcctgctcgtcgccgtcgtcgtcgcgctcttcactctccccatcgagaagattttgaaggactttctggtttggatcaaggagaatttgggtccatggggtcctttggtgttggccctcgcttacatccctctgacagtcttagctgttccagcatcaattcttacacttggagggggctatctatttggcttgccagtggggtttgttgctgattccattggagcagcaattggtgcgactgctgcatttctgcttggcaggacgattgggaggtcttatgttctctccaaatgcaaagattaccctaagtttcaagcagtagctattgccatccaaagatctggcttcaaggtatttgtttttgcagcctggaggttttagacacacaataggctgaaaatgacatttgactgatgtgggacctcccaactgtaaccatattataaatttg

SEQ ID NO: 109408 - DNA, 372 bp, Zea Mays
atgacgcggggtagagcagggctatccatgtctttggtctgtggtggcgtacttctgttccagccagcagtcaacggtagagttgaagaaacgagctttgtgagtttcactgatcgatggagatcacagaacatggcttacatgggtgagcaatccagtaaactgacctggccacagcgaggtgagaactatgagtgtgctcaccacacaggggggttgacacagctcaggaacaacttaactctgcagcaagggagaggattagcactggctggaacagcagaacaacttcacccttgtagtggttattggttagagcttgaagatagggagaggaatttccttgaatcaagttttatatctgccaactaa

SEQ ID NO: 109409 - DNA, 502 bp, Zea Mays
gaccacgtcggcagtgtggggcggttgagatccgtagaggccagctatgaggtccttcagatccgcggggcgcgacccgttggatgggacagacagagcgcactggggcgccgtgaccatcggcggcggcccggccagcccttcctcctcctggccgtcgtcgtcggcatcggcgccgaacagggagacgggcagcgggccccacggcttctcccaaggcgaggaggagggagcggcggctggcgcggccgttggggcagatgtgcccgcgtcggatccaagcccgcttgccacaaagtcgccccagtcgtcgtcgaaggccgtgaaggcggcggtggccggctacggcgcggaggcgaagtccccgaaatcgaggtcgtcgttaaggaacggtgcgggcgacagcgggaacgcgacggcgtccattggcacacgtggcgagacgcggtgggcggaagccccgccgaatgcggaggagcctccaatttctagtggctgttaa

SEQ ID NO: 109410 - DNA, 1523 bp, Zea Mays
atgttttttgcactgaatctggttgtgaaccaaacacacctcagctgctctgtccaaacgcaccctgacttccgagttccgacccccactgctttgcttgctctgcactccgctaattccttccgcggcgatcccgagcaagaaacccagcagcgcggcggatctcgccgggcggcggccgccactatgatgagcggtagctcgcctccgccgccctcgcttcctgccgggagtggaggcttcttcaggggatacacaaagctgtgcaagggcctcgccgtcatattgctcattgtgcaccttgtagtccagttgtttccgtccgccgtcacctatctcgcgcttatccctggaagaacgatcccttttgcttggaacctgataactgcaggctatgtcgagcaaacaattccagggatggttgtcagcatcattggccttcttttatttgggaagttgttagaacctctatggggttcaaaagagttatcaaagttcatttttatcgtcaacctttcaacttctgcttgtgttttcatgactgctattgtgctgtactatataactcagcaagagatctacctctatactcctttttctggattttatggggttctatcaggattgttggtgggcattaaacagcttttacctgatcaagagcttaatctttttgtgctaaaaattaaggcaaagtggattccatctcttgttgcattgatatccattcttggaagcatcttcatatacgactttatgtcttacctcccagttctgttgtttggcatgtatatgagttggatctacctccgttactttcaaaagagacttgagaccagcctgaaaggggatccaagtgaggagttctctttctcaagcttcttccctgaatttgtaagaccatttctcgacccaatagcatctgtattccataggttactttgtggaagatctgatgccaggggagaaacattagacacctcaccattacctggttcagattcgtttgaggcaaacaggaggagagagaggggtcaacgggcactggagcaaagattagctgagaagctggctgcagtcaggagttcagagggcggcacatcactggatgccgctgacaaagtttgagtcttctatgcaacgaacaacgagctgtgcggtgcagtttgtgatttcctggcaattcgtttctatgtgatttcaccagccccagcctcaccgccgagtgcttcattttttttatggtttctcatcctaatcatcatcgggaaccaactaatgaagcactgcgcgcccattttccccatggtttctctgtaatcaactagaagtgatcaagtaccaagcagtgtacaatgcgatgctccctaggacaagaactcatctatgttcggtttcctgttttttttcttccaaatggtgcggttgatacttgatagtagttgacacttgacaggaacaaaattatttttgtaaccttttagagctctgtgttggatggcaaattgacggtgctaacggtc

SEQ ID NO: 109411 - DNA, 1346 bp, Zea Mays
atgttttttgcactgaatctggttgtgaaccaaacacacctcagctgctctgtccaaacgcaccctgacttccgagttccgacccccactgctttgcttgctctgcactccgctaattccttccgcggcgatcccgagcaagaaacccagcagcgcggcggatctcgccgggcggcggccgccactatgatgagcggtagctcgcctccgccgccctcgcttcctgccgggagtggaggcttcttcaggggatacacaaagctgtgcaagggcctcgccgtcatattgctcattgtgcaccttgtagtccagttgtttccgtccgccgtcacctatctcgcgcttatccctggaagaacgatcccttttgcttggaacctgataactgcaggctatgtcgagcaaacaattccagggctatactcctttttctggattttatggggttctatcaggattgttggtgggcattaaacagcttttacctgatcaagagcttaatctttttgtgctaaaaattaaggcaaagtggattccatctcttgttgcattgatatccattcttggaagcatcttcatatacgactttatgtcttacctcccagttctgttgtttggcatgtatatgagttggatctacctccgttactttcaaaagagacttgagaccagcctgaaaggggatccaagtgaggagttctctttctcaagcttcttccctgaatttgtaagaccatttctcgacccaatagcatctgtattccataggttactttgtggaagatctgatgccaggggagaaacattagacacctcaccattacctggttcagattcgtttgaggcaaacaggaggagagagaggggtcaacgggcactggagcaaagattagctgagaagctggctgcagtcaggagttcagagggcggcacatcactggatgccgctgacaaagtttgagtcttctatgcaacgaacaacgagctgtgcggtgcagtttgtgatttcctggcaattcgtttctatgtgatttcaccagccccagcctcaccgccgagtgcttcattttttttatggtttctcatcctaatcatcatcgggaaccaactaatgaagcactgcgcgcccattttccccatggtttctctgtaatcaactagaagtgatcaagtaccaagcagtgtacaatgcgatgctccctaggacaagaactcatctatgttcggtttcctgttttttttcttccaaatggtgcggttgatacttgatagtagttgacacttgacaggaacaaaattatttttgtaaccttttagagctctgtgttggatggcaaattgacggt

SEQ ID NO: 109412 - DNA, 1945 bp, Zea Mays
caaaccaactcggaccaagcaaaaccacacacacacacgccacctccttgagtccttgtcggctcgccatcgccaccatcatttcgtgtcgagtctccgtttcaccctccccaaattcccctcaaatcgatctcccccgcaccccgaatccccgcgcccccgcgtctgaatccggcgccccccgccccgatccgtccgatccgcgccgaatcgccgttgctcggggcggaaccctagcccgatctccacctgtttcctcgcgatgggcgccggtcgtgtctgccgcggcggccctttctccgcctcccccgccgctggcgccgccgcggggcggccgttcccgccgctcaccgcgtcctcctcctcatctccttcatcggccccttccgagacagcgtccacgtcggtcaccaagacggtgaacggctcccaccacttcaagatcgcgggctactccctctccaaggggatcggcgtggggaagttcatcgcctccgagtccttcaacgtggggggattcgactgggcgatctacttctaccccgacgggaagagcggcgaggatggcgctgcctacgtctcgctcttcatagccctggccagcgaaggcaccgatgtgcgcgcgctgttcgagctcacgctcgtcgaccagagcggcaaggggcaagacaaggtgcatacccactttgggaggtctctcgagagcggcccatacaccctcaagtaccgcggcagcatgtggggctataagcgtttcttcaaacgagttgccctggaaacatcagactatcttaaagatgattgccttttagtgaactgcaccgttggtgttgttcaatcacatactgaaggaccaaagatatacacaattccagtaccacggtccaacatggctctacatattggtcagctattgacaagtgggaagaggacagacattgcatttgaagttgatggagagatgtttcctgcccacaaggtgattctttcagcccggtctcctgtttttagggcgcaactttttggtccaatgaaggataaggacatgaagtgtataaagattgaagacatggaggctccagtattcaaggctttgctccatttcatgtactgggatgagttgccggatcttgaagagcttactggtgtaaatacaacttgggtatccaccttgatggctcaacatttacttgctgctgcagaccgttatgcattggagagattaaagttgctctgtgaacttaagctgtgtgaagatgttgcaataaacacagtggcaaatactttggcactggctgaacagcaccactgctatcagctaaaaactgtttgcttaaaatttgtggctctgcctgagaatttgaaagctgtcatgcaaaccgatgggtttgattatttgcagcaaagctgtccatccctcctgaccgagcttcttgaatatgtggccaagataggagagcactccgtgagcccctgcctgtattcaactgaagtccttgatggtggagatgccaatggacgacgcgtgaaaccaaggatctaacggctgcccagatgagcctagaagagggagttccttgtcttttttttttgttgttgttgtaaagtgattccaatgacgggcgccttctgtggtgccataatcatgcatgttgtagcgttggtttgtgtgtgttgtgatttccccagccccattgctgctactgtagagggactgatatacatcctactgactagactgcgttgctgctgcaaagcagcttttcatcatatgccaaggatggtctggtgcaaaggtttgatcaatatgttctgcagaagttttacctttcgctaggccagatttgtcgattcatggtcatctgtattgactgtattcaattgaaatgaaatgtatccgttgaacattcactttcatactgatccgttcatctgtcctaccctt

SEQ ID NO: 109413 - DNA, 692 bp, Zea Mays
ccttgatctagaaggaatagtgcatgattgcagtctagactaggcggcggcgccacggacgagtgtgctgggctataaactgtatgggtcggccagctgtctgttggtttttgggcttttgagatgatgtccttgtataaattgggctgctgtcatctactataagggctgctgtcatctactataagatttagttttatatatggaccaagccaaaagtcattggtgtccagggacagcatgccttctacatggatccgcccctgtctgacatcttcaagacggtgagatgcatataacactgcaaaaaagagagaaggggaaaacatggtcatctccaatacaagggcaagggattttggatccatatgctgcagatcaagagcaaaagcggcttatgctccaaaggtttcaggaagagaaccctgggttcgacttttcacaggctcagttcagtggaacctgccctgacccaagaaccttcatgggagggatacgctccgagtgaagcaccctacctgcctatgtacgtttctactatatcctcggcatcttgatagatgcagcaggcgtgcttattatgtctgtaaatcggttggtgtctgttatggaaataattgtgatgtgtgaccatttgtgtgcaagcacattttgcgtgcttaattctagtttatagttgtgatcttcattca

SEQ ID NO: 109414 - DNA, 762 bp, Zea Mays
atggctgagaatctggcgcccgagaagcgccactccttcgtgcacaacggtgagccgtttcttccccctccgtatcctcctcagcccgccttcttcgtggcaccccacctctccgacttagggttcgatccccatccccgttacgagcagggcagaaggtgttcgagtgggaccagacgctggaggaggtcaacatgtacatcgagctcccgaagggtgtgccaaccaagctatttcactgcagcatccaggctagccacgtcgaggtcggcatccgcggcaacccgccatacctcaaccatgacctgacacacccagtgaagactgactcgtcgttctggacaatagaagacggtgagatgcatataacactgcaaaaaagagagaaggggaaaacatggtcatctccaatacaagggcaagggattttggatccatatgctgcagatcaagagcaaaagcggcttatgctccaaaggtttcaggaagagaaccctgggttcgacttttcacaggctcagttcagtggaacctgccctgacccaagaaccttcatgggagggatacgctccgagtgaagcaccctacctgcctatgtacgtttctactatatcctcggcatcttgatagatgcagcaggcgtgcttattatgtctgtaaatcggttggtgtctgttatggaaataattgtgatgtgtgaccatttgtgtgcaagcacattttgcgtgcttaattctagtttatagttgtgatcttcattca

SEQ ID NO: 109415 - DNA, 463 bp, Zea Mays
atggctgagaatctggcgcccgagaagcgccactccttcgtgcacaacgaagacggtgagatgcatataacactgcaaaaaagagagaaggggaaaacatggtcatctccaatacaagggcaagggattttggatccatatgctgcagatcaagagcaaaagcggcttatgctccaaaggtttcaggaagagaaccctgggttcgacttttcacaggctcagttcagtggaacctgccctgacccaagaaccttcatgggagggatacgctccgagtgaagcaccctacctgcctatgtacgtttctactatatcctcggcatcttgatagatgcagcaggcgtgcttattatgtctgtaaatcggttggtgtctgttatggaaataattgtgatgtgtgaccatttgtgtgcaagcacattttgcgtgcttaattctagtttatagttgtgatcttcattca

SEQ ID NO: 109416 - DNA, 2213 bp, Zea Mays
ccctcccctacgcccaatgccacgccggccccaccacgtccccactgccctgcgtaagccaccgcacgagcgaaaaggccacaccaacggtcacagattgggctctggcagtctcgccgaacgcagacacgccgtccgcaagtttccccagccaaatcctacctcgtctcgctttcccatcccatccctccccttccagccttcctccacggtccacgccaccagtcgagtccaccgctccataactccattcctccggcctccgcacgccctacttctccattccgcaaagaggggccaggcgtcaagggcgcggctgctctctgctggacgcgcgtcatgggcgccgccgagaaccccccggcgccgccgcggcaggagtctgcaccagtcaggggagcggctccgacgccggcgacggaggcggtggagaaggtggtcgtcgtggaccaggcgccgcccccgcaagcggcgtcgaggctgcaggcgcagcggccgctggcgccgctgcaggtcaccacgcaggcgccgccgccgcccatgacggtggcctccggcgccgtcgagccgccgccgcagttggcagcgtaccagcctgtcatgcagcctccgcagcaggggccgcttccgtcgctcaactcaagcaagtacaccaacggcataacgctgtgcctcttcctgctccaccttgccgccgcggcagccgccatggggttcttcgtgttcaagaccgtccaggagatcagccagcacccaaggtcgcacgacgcgcagcgagagcgcagcctgctgcgggactggctgctgcccgtggagggcgcggtggcgctcagcatcgtgctggccttcgcgtggcagaaggccgtgcgcgcgtggccgcgcgctatggtgcgcgtcatcctctggtccagcttcggtgtgaccctggccgtgggcgcgctgctcatgtgcttctcgatgctggccactgtggggctgggcgtggcgatggtggtgttctccatcggcaccgggctgtacgcgtgctgggtgacgcggcgtgtgggcttcacggcgcgggtgttcgagcgcgcggtgcagccggtggataagttccacggtttgaatggccccgcgtacctgatggtggcggcgggcttcgcgtggatctccgtgtggtgcgtggcggtgatcggagctgtgaacttccgcttccccgggctcaccatcctggggctggtggtcagcctggcgtggaccgccgaggtgatgcggaacgtggcgaacctgacggtgagccgggtgatcgcgctctactacctgcgcggcatgcagtcgagcgtgcagttcagcttccaccgcgcgctgtcgcacaacctcggcagcgcctgcctgggctcgctcttcgtgcccaccatcgaggcgctccgcatcctggcgcgcgggctcaacctgctggagggcgaggacgagttcatgttctcctgcgcgcactgctgcctccacgtcatgaacgccatcttcagcttcggcaacagctgggcctttgtccacatcgcggcgtacgggcgagggttcgtgcaggcgtcgcggagcacgtggagccagttcgaggcgctgccggggatggcggcgctggtggactcggacatcaccagctccgtgtgcttcctgacgggcgtgacgagcggcgcgctgtgcgtggcgctggcggggtcctgggcgttcgcgacgcaccggcactacacggccaccgtgtcgctgctggccttctacgtcgggtacctgatgacccgcatcggcatggcgctgccccaggcgtgcgtcggctgctactacgtctgctacgccgagaaccccacgtcgcggctcttcgacggtaacataccgaaccagctgagcaagatgcaggaaagccgcggcccgtccgtgccgacgccgcggttcccgcaccgccagcacgtcggcgcgtgagtgagacgacggagcttcttttccctcgtgtgccaccgccgctcgtcggtgtggcttgatccggatgagggcggcggctcgtacggcggtctggagatcaaattttatttttctagttttgtaaatttatttatccattttttagctgacagaaatggtgaatccccaatattttgggtgtatgtagacagagtactattcttgcataggagttatgtgaatattttaactaactgaatcagaatcaggctttgtccata

SEQ ID NO: 109417 - DNA, 1958 bp, Zea Mays
ccctcccctacgcccaatgccacgccggccccaccacgtccccactgccctgcgtaagccaccgcacgagcgaaaaggccacaccaacggtcacagattgggctctggcagtctcgccgaacgcagacacgccgtccgcaagtttccccagccaaatcctacctcgtctcgctttcccatcccatccctccccttccagccttcctccacggtccacgccaccagtcgagtccaccgctccataactccattcctccggcctccgcacgccctacttctccattccgcaaagaggggccaggcgtcaagggcgcggctgctctctgctggacgcgcgtcatgggcgccgccgagaaccccccggggccgcttccgtcgctcaactcaagcaagtacaccaacggcataacgctgtgcctcttcctgctccaccttgccgccgcggcagccgccatggggttcttcgtgttcaagaccgtccaggagatcagccagcacccaaggtcgcacgacgcgcagcgagagcgcagcctgctgcgggactggctgctgcccgtggagggcgcggtggcgctcagcatcgtgctggccttcgcgtggcagaaggccgtgcgcgcgtggccgcgcgctatggtgcgcgtcatcctctggtccagcttcggtgtgaccctggccgtgggcgcgctgctcatgtgcttctcgatgctggccactgtggggctgggcgtggcgatggtggtgttctccatcggcaccgggctgtacgcgtgctgggtgacgcggcgtgtgggcttcacggcgcgggtgttcgagcgcgcggtgcagccggtggataagttccacggtttgaatggccccgcgtacctgatggtggcggcgggcttcgcgtggatctccgtgtggtgcgtggcggtgatcggagctgtgaacttccgcttccccgggctcaccatcctggggctggtggtcagcctggcgtggaccgccgaggtgatgcggaacgtggcgaacctgacggtgagccgggtgatcgcgctctactacctgcgcggcatgcagtcgagcgtgcagttcagcttccaccgcgcgctgtcgcacaacctcggcagcgcctgcctgggctcgctcttcgtgcccaccatcgaggcgctccgcatcctggcgcgcgggctcaacctgctggagggcgaggacgagttcatgttctcctgcgcgcactgctgcctccacgtcatgaacgccatcttcagcttcggcaacagctgggcctttgtccacatcgcggcgtacgggcgagggttcgtgcaggcgtcgcggagcacgtggagccagttcgaggcgctgccggggatggcggcgctggtggactcggacatcaccagctccgtgtgcttcctgacgggcgtgacgagcggcgcgctgtgcgtggcgctggcggggtcctgggcgttcgcgacgcaccggcactacacggccaccgtgtcgctgctggccttctacgtcgggtacctgatgacccgcatcggcatggcgctgccccaggcgtgcgtcggctgctactacgtctgctacgccgagaaccccacgtcgcggctcttcgacggtaacataccgaaccagctgagcaagatgcaggaaagccgcggcccgtccgtgccgacgccgcggttcccgcaccgccagcacgtcggcgcgtgagtgagacgacggagcttcttttccctcgtgtgccaccgccgctcgtcggtgtggcttgatccggatgagggcggcggctcgtacggcggtctggagatcaaattttatttttctagttttgtaaatttatttatccattttttagctgacagaaatggtgaatccccaatattttgggtgtatgtagacagagtactattcttgcataggagttatgtgaatattttaactaactgaatcagaatcaggctttgtccata

SEQ ID NO: 109418 - DNA, 1718 bp, Zea Mays
aaccgaacaagccccaacagtgccactgtggcagttacggggaaacatccgacagcgacgatgcgcgaggccagtaccagatatgtccccgtcccgccacacgccttctgcccacctctcctccttcgggtcgtcgctccactccagtccaagtcctagcccgccaggaagccggagcatcgcgcctgcaccgcacgcccacaggcccacagcaagcaccaaacaagccaaacgatggcgctcctggtgctgcgcgcgcctgcagccgtccacgcggcctcccggctgctccctccgcagccgcggcggcggcggcggctcgtggccgtcgcctcggcggcgtcctccgcgccgtccggcgaggtgtcgtcccagcacggcggcggcggcggcggcggctacgggatcgtgggcgggcccaacggcaacgccgtcgtgcccgccaccaagtccaccgtcgtcgagaccaccgtcgagagggttatcttcgatttccggttcctggcgctcctcgcagtcgcggggtcactcgccggctccctcctgtgcttcctcaatggctgtgtcttcatcaaagaggcataccaggtttactggtcgagctgcgtcaagggggtccatacgggacagatggtcctcaaagtcgtcgaggccatcgatgtgtatcttgctggaacggtcatgttgatatttgggatgggtctctacggtctcttcgtcagcaacgcttccgcgggtgttggttctgaatccgaccgtgccctgagcggatcgtcgctgttcgggatgttcgctttgaaggaacgccccaagtggatgaagatcacctccctcgacgagctgaagacaatagtggggcacgtcatcgtgatgatcctgctggtgaagatgttcgagaggagcaagatggtgacaatcgccacggggctggacctcctcagctactcgatctgcatcttcttgtcgtcggcctctctctacatcctgcataacctccacaagggcgacgaccatgaggagtgaggagagtgtgcaatataatgccgaatctgtaactctatgacagaagagataatggttaggcttgggttcagctgccatgtaccttcctggacccacgtttcagtgagcatgggtgtcacctgacctgacatgccctttcaaagcctggtcctgaactcagaccaccatctgttttactatatggtctgtatagtatggttttatttcgtagtgattgaggagaatttcatttttcttccccctcttgtttcaatggactgtaagacttctaagagacctactgggctactggcgcctattgctttggttggtgtggttaactgacggtactgtggtgtattcgaaagaaaagaaaataactgatgatggtgtccagtactagatttttaaggtacacacggtgtaacttgtctatctgatacagaagttgtttgaggtagtaccttcttagagcctgttgcttctaatacaagccttgtcagcgttcctgtaagcctagaaaataactgatggtgttcagtactatatttgcacctaaactttgcttacacaacagtggttctctctatataaaatcagttcttttttatagcacacttctctagtgatagctcattcatttcatcactgtaaagatttgcttaaagatccgtttgattccatcttcattcgtgtacagattgctctgtgtatga

SEQ ID NO: 109419 - DNA, 2112 bp, Zea Mays
atggacgtatcggctctctgccccggcgggtggtctccctcctcgatcccccaccccgcccgatcgcttcccctccccactcccctctccaccagcccctcgccggtcaccaccctggtactggtgaccacctccttgtcttccaccccctcggcgacagggtccagtctgtcccggcggctgcactcccaggatgggcggtccaaggcccagagatggtgcggcgactcttcggctggaggttcccttccatctccacgatccattaaagatgcagcccccaccagctcggtttgcgccgccagcccttctccctcggcaagtcactgcgccgccagcccctctcctgcggcccttccggtggatgaggaaggctggcaggtggttggtcgtagacagaggtctcgtggtgtgcatctccctcgtcgagggtcccgagtggatctccgaggtcggtgctacaactgcctctctacctcccacctcgtagcttcctgtcggcggcctacacagtgcttgcagtgcttcagttttggacaccggggggcaaagtgctcgtcccttccggttgaagcacagaagcggacggtgtggcagcgtctgggctacgtcaagacgcgtcctccggtgagacaggaaacctcccagagagctccggtgtggtcgaggtttcctgtgcggcctccggtgtggcagagactctccaacatggacatggttccttctccggagggtaagtttcaggaaccgccccgcagtaaggtttcagtatggaagcgcctcgctgcatcacatgatcatgcaacgtcggaggcaaacgctgaggaagacaagatgtctcctcggcccatgcggaaaaaaagacgttccaaacacgaaaaaggtacagttgcgcacgatttgggtcccactcaggcatgcccacctccttctccccatctagatagtttcagctctgaggtggctaggccaccctcagcctcctcctgtgttctggatttttctgaagtccttgctagggaggaaattgcccttcgtcgtgctctattcgtctctgtggctggtacacgacctggggtttctggttctgacgtgttgaaggaggtgaggcattgttttggtgttaagttggaggacatgaagattcatcagacctaccctgaagacttcctgttgtttctaccggatgaagacacgacaaccaaggttctcaacgaaggaagacctctgaggggaccccgtttcagtttgatgctcaaaagatggtccagatttgctcatgcatcctcatcgtcgatggctgagttggttgatgttaaattaataggcattcctcaacatgcctggtgtcgatctacagttgaacatttgctgagggactcatgttgggttgaagcattacattcagaaactatggaaatgagggatttttcagccttggtggtgaaagcatggtgttttcatcctgaaaaactggttaggaaaatggatttacacatcttggaggctgggattgatgatcaggaaaagagattcttaacctataagatctccattgatatccttccaccaaagaccctacagctgtcatcggctaccccacctcctcctcctccaccaccgtcgggaagggaacctgatgatgatgaccctgacgatcaagatccccaacaatggcggcggccggtcccagttgatctgcggcagcctgtccagctgcgtctgggcccacgacttcctttgggccgcgcgcatgcggtaaatgtgcctgggggtgacccgagagttgaggagactgccccaggagttgaggagacaactgggaggtatgaggatcagttattgttgagcacgggagccaaggagattttgtctcagccaccggttcgggcggaagtcgaggaggaccttggggagagtgcgtgtgttttgactctttccgatgttgctggtgtgaaggcgcttggagggataactcatgctcctgacactcagttgggtgggacgctgggtcaggccacttcttctatgcacctgggaacctttttctcagggctgctggagaacttgtgccatgactcacccaccaggatccatatgatgaaactataa

SEQ ID NO: 109420 - DNA, 1644 bp, Zea Mays
accagtcaaacccgtccgacgacatcactcgggcgctctcggccgccgccggccaggtaccggtgcgccctgacgagctcctcccggaagcgcgccaggtccagccgcacgttctgccggtccaggtacaccttcttggtcacgtcccagccgcgctgcgccacgccggcggggtccgtcagcacggggtcgccggtggggtactcgcgggacagcgagctctcctcggggaggatcctgtacccgacgtagcgcagccccatccgcgccgcgggctcgccgtagtaggcgccggccgcccagtgcgtgcccaggggcaccacctggatgaacaccttccccggccgcatgaacaggaagtgcgtcatggcggcgccgtgcacgccgaccatggcgtcgctgccgttcagctcccggtatatcttgcacagctccgtcgtgcgctcgggccggatcacgcgcacgtcgaacccgacgtccgcggccagcgccgccacgtccgcctcgttctcgatcacgcgggaccccgtccgcgacacgatcaccagcctgggacggtcctcgcgaggacctcctggagctggaggcgcgccgccgccgccgccgcggcggtggcggcgctggcgcaggcgcttgcgagccgcgcgccgctccaggcgctccaggaatccgatgcggccgcggtacgcgtcgtccaggagcctgcggaagtcgccgatgctcttcccctcgggcgtcctcgccgggtccacggtcagctcgccgtggatgcgcaggccggcgatcaactcggggaagcagtgcacgcggcggtcggcggcgaagtcgatcggcgggaacgccgacagctgcgacaccacgtcgccgtacttggtcatccaccagtcgtggtactcgaggatcaccagcaccacgcgccgccggaggtggtgcgccgtcacgaacagcggcaggatcccgtcgttgaactcgtggtacacgttgcccgtgtacccgccggtggagaagagcacggccggcgcgtcgtgccgcacgtcgcaccgcgcggcgtcgccggggagcacgcggcgcaggcgcacctcgtcgatcgtcgccatcacgttcgcctcccacttgcgcgtgtacggacgtatccgctcctcctcctccgccgccgccgagctgttgccggcggacacgagctggaacgacgcgctcgccgagtgcatgcgcacgtcccccttcgcgaagcagatgtccgcgcgctccgacgtgcggtcgcagcagaggctgtcgttccccacggccgagcacggctcggacaccccgccacgcacggcggcggtcgccgccgctgccgctgccgctgccgccgagccgccttcgtcgctatgcacgaaggagaggaaggacacgggcgccacgaacagcgtccccacgcagaggaaggagaggaagagcatgcccaagaaacgccgcaggcccagcgccctaggttgcaccttcttgccgttcttgccgccgccgctgccgtggtcctggtagtagtacatgaccggccgccggccgccgcccttgggctgcgacaccttgcatgacacctcctgctccggcccgcccttcctgaactgcaagatgtagattctgtgctgttgctgctgctgc

SEQ ID NO: 109421 - DNA, 1463 bp, Zea Mays
ccagagcccagggcccagggcccagagcccagagttccacctccctgcccctcctcgtcgtcgcattcaactgcttcttgcggtagcgactagcgatcgacccaacttcccacccgcccccgcgtccgcgagctcgccgaagctaaggcctaagggtacccgccctcggcgctatgtcgctgtcgccggcggacagcgcggcgtactggctgcggtggcaggtcctcgtctgcggcgcgctcatcgcgctccccgcggcggccgcggcggcgctactgccgcggttgcggagggcggcgccgcctctgcgcgcggccgacctctgggtctcttgctgggcgcgcctccacccgggttggctcctcgcctaccgcgccttcgcgctcgcagcggccgtcgcgctcctggcgcgcctcctcgtcgggcacggcctcaccgtcttctacttctacacccagtggacatttctattagtcaccatatattttgcgtttgccacagctatatcagcccatggctgctgggtttactcaaggaaaagtttgaggaaatccgatgaatcccatggatttcttaatgctgatgtcgaaaatcgtgatgtttccaattccatttctggagagaggaaaaaagatgagacaaaaatgatggtgagctattatgaacaaatagcgaatgagagaagagcagggttctggggccggtgcatgcaaatcatataccagactagcgcaggtgcaacaatgttgaccgatgtcacattttgggggcttcttgtgccatttttctaccgtgacaagtttgggttagcgttggtcactgatggcatgcactccctaaatgctgtttttctacttatagacacagttctcaacaatatgcccttcccctggtaccgaatggctttctttgttttctggagctgcgcctatgtaacattccagtgggtccttcatgcttgtggaagcttatcctggtggccatacccgtttctggacctttcatcatctggagctcctatatggtacctcggcatggcaatcgctcatatcccctgcttctttttgtattggttggtcgtcaaggcgaagcacacttatttcccacggatgtttccacatgcttatgttaggacagtatagatctaaatatcagtagcatactatttcaacacctgcttggctcaagtgtacacccgtatagtctcattgaattcgccgcacctttgagatgggtctgagctctgaaaacaagccggtaccggcggcttgatcaatgaaatgcagaggctcacaatcacctggaaacagagtcttgtcctgtcttgctccttctcttgtaaagcatgtaatcagccacaactactgcatctgttcgaatcctaaaccctaaaaccttaaaatactgcagctgttcgactgctgtaattacaatctataaaaataaaataccgtacacagaaa

SEQ ID NO: 109422 - DNA, 3049 bp, Zea Mays
ccgcgcccaaccaaaacacatttctttcctataccttctcgcccgcttccgtgtatctatccgcccattccccgccattgcatccctgcttccccaacaatgccgtcctggaggcagcgcgcgcgcggcctccggcggtgctagctagatccgcggccaagcggggtacagggcaggggacctcgagcggcgaacagaaaggcgtggccgccgggacaggcgggggcgtccaatgcacgaccacacccgtgccagggcgtgggaggcgacggcgcgcaaggtgcagcccgtgggcaggcgccgggtgtccccgatgtctgccgcggacgactccgagacggcgtcgtcgtcgtcctcctcctcctcgcccgccggcgacgacgccgaccacgtggaccgcggcctccccaacggcgacttctacacgggccagtggcgcggcggcgcgccgcacgggaacggaaagtacctgtggaccgacgggtgcatgtacgagggggagtggcggcacggcaaggccacggggcggggcaagttctcctggccgtcgggcgccacctacgagggcgagttcaaggacggcttcatggacggctccggcacctacaccggcgccgctggggacacctaccggggctcctggtccgctaacctcaagcacggcgacggcaacaagagctacgccaacggcgaccagtacgacggcgagtggcgcgcggggctgcaggacggcgccggccgctacacctggcgcaacggcaccgagtacacggggcagtggcgcgcggggctcatccacggccgcggcgcgctcgcctggtccaacggcaaccgctacgacggcggctgggaggacggctccccgcgcggccaggggaccttccgctgggccgacggcagcgtctacgtcggctactggacgcgcgacgcccacaccggcattgtccagcagaagggagtctactacccgtccccggcggcgtcctccccgacggcgcgcgatccccgcgacgtgttcgccagggaccttccgggtttcctgggcgccggccccgacaccgcgtcgccgcgcaagtcacgcgcgtcgtctgggaccagggcgcccaacgggcggccgagctcagtgtccgggctgagcaacagctccggcggcgacaggaagtacgacaagatttgcatttgggagtccgacggtgacatcacgtgcgacattgtggacgggcctgccttgggggacgaggcggtgaccgcgcagaggagcgtgaggacggacgacggcggcggtgacgaccggggcctgccgccaccatcgccggcgccgcacgtcacacagtggttgcctcagcgggagtccaagcgacaaggggagaccatcgccaagggacacaagcactacgagcttatgctaaacttgcagctcgggatcaggcatgcagtggggaagcaaggcccaattgtgctcgatctgaaatcgtctgctttcgacccaaaggaaaaagtatggacgaagtttcctcctgaaggctcaaaatgcacccctccccacaattcttgtgacttcagatggaaggattactgccccaaggtcttccggacgctgcgcaagctgttcaaggtggatgccgctgactatatgttatcactatgtggaaatgaggctctcagggagctttcatctcctggtaagagtggaagctttttctacctaactaacgatgatcggtacatgataaagacgatgaagaaatccgaagtgaagatgcttctgaagatgctcccggcttattacaatcatgtccgggcatttgagaatactctagtaaccaagttttttggtctacattgtgtcaagttagctggagcgaatcagaagaaggttcgttttgtcataatgggaaatctattctgctcggaatatccaattcataggcgttttgatctcaaaggttcatctcttggccgcacaactgataagccacagacggagatcgatcagtatacaactctgaaggatctcgacctgaacttcatctttagattgaagaagcaatggtttcatgagttccaaaggcaagtggacagggattgtgagttccttgagcaggagaaaattatggattacagccttcttgttggtgtacatttcagagaaaacacagagaagcttctgactgaaggttccattgactatgatatcatcaacaacgtaccaacacctcgtctttcaagaggaaatacagatcggtttcttgctgatccaaacaggtctcctaaaaccaagctcggggccaacatgccttcacgagctgaactcaccgctcgcaagagcgactgcgaaccgcagctgatcggagagccaaccggggagtactacgacgtcatactgtatttcggaatcatagacatactccaagactacgatatcagcaagaagctcgagcacgcgtacaagtctttccagcatgacccggcctctatatcggcggtggacccaaggcagtattccagacggtttagggagttcatatacaaagcgttccaagaagaagacggctagacagacagctgcagacacacggtgaagctttttttgagatgccgccgcaggctccatgtggaggtgagctttcaactgtcaatggaaagctggagccgggcacgaacgacagagcaacggatggctgctgagcgtcagtggaagctatccgggtggcaagagctgcttcaatgcaagacgtacggctgttatcatcgtctgcctgtatatatatctagccatatatatacatacttacatacatacatatatatatagctcatcgctaaaattttgtagtgtaggagatcatacatagattcagctcacagatagaaagacaggcgcgcaagccggtcaggagatgtaattttttttttcacccgaggcacacaattcttttgctattgtcctgattgcaacctcttaacttaaacccttgggagatgagatcgctgtaatgtacagagtttttggtgacctagaactagaggtgatagctcagttttgttc

SEQ ID NO: 109423 - DNA, 106 bp, Zea Mays
ggaaagcaggagggaagaatgatttttgagaacctagactctatcttccaactactgctcatcttcttcctccattctctcatgtacccggattctctcccttcta

SEQ ID NO: 109424 - DNA, 2218 bp, Zea Mays
aaaacatgttctccattcgacctgagagaatcggaaggcatccatccaagtaaaccctgctgccgaacgaaggagcagcaaagccaccttccttctccaccacatcacctcacctctctcagtctcacgccgcagtcaccaactcgccacgcacgccttcgccgcctataaccggtaccggccaccaccactagctcccccgaggaccacaccccccaaggccccaagcccacgacgcgccacgccacgccgccagctgtcgctctccctcgcccctccccgctcctctcgccgcctcgcaatcaatggcggtggcgcggctgtgcgcggcggccgccgccgcccggctgcagccggcgctcgccgcgggcgcccgcggcctcgggacggcggcggaggtggccgcgggcgccaggtgggagcccatgggggcgcgggagtactacgactaccgccgggccatgtacggcgacatcacgcacaaggccatcctcgtcgacgccgccggcacgctgctcgccccaaccgagcccatggcgcaggtgtacagaacgataggccagaagtatggggttgattactccgaggatgagattctgatgcggtatcgctgggcgtatgcgcagccttggggtagatcacgtctgaggtgacctcagttgattgcaccccgctgttacatgttttgttggcatgggcacatgcctggtgcttttgtgcaactcaaacgagctgtggacctatacaagtggttagaagttgtcgatcgttctcgttcacttcagaggcttggggggtctttcggagcaatcagcttcaccctgcatgaaaagtgcattgcaaatcgagaacattgatgcaggaataagactgagttgtatgtcaatgtgacataatagcggtgggcatccttgcaagaacaagtcaataactgggacagttgacgagttgtatcatcaaaattcttctggatctagttccgagaacaggatttctcccaaatagcatagttttgctcgtttatttatgccactgctaaaaagacaaaaataaagaaggggcactaattcctaggttcctgccaactgcaaggatgcaggtttatttatatgatttaggcgctacaggacaaatactgtacagttgacaaaagaaacttgatctggttttgtgtgcttttcaagcatactcctacataacaataaggtacttcggggctgttttcttagacctatcaggagaaacaacttggacaaaaattgtcgccactaatttttctcaacatatctggccatctgggtggtggtcccaagtggtactggttctttcacttcatctgattctagctcagcttgcctgcccacttatgtactagaactagaatgaactgtcgggtttgttatgttactgaaaaagatctgtgcctgggaaaccctccagaattcaaatcccttttgaaaaccatgctgctgcttggactgcaaccgaaattccaatcctaactaatgcatttgagtttctccaggtatgtcaatgatggaaggcccttctggcaatacatagtgagttcatctactggctgctcaaatctagagtactttgaggagctgtatcaatattacacaactgaaaaggcttggcatctctgcgatccagatgctggacgtgtttttgaggcattgaggaaggctggtgtcaaaacagctgtcgtgtccaattttgacactcgtcttcggccacttttacaggcactgaaatgtgaccgctggtttgatgcagttgctgtatctgctgaggtcgcagcagaaaagccaaaccctacaatattcttgaaggcctgcgagctgttaggagtgaaaccagaagaagtcgtgcatattggtgacgaccgtaggaatgatctatggggagctagggatgcaggctgtgatgcctggctttggggcagtgatgtttactccttcaaggaggttgcggagaggatcggggttgaggtataggaagaagtcgctctcctgagccgcaagaagactcgtccttgtacatagtgttagggcgtcctgtacatagagacaaaatcctgtgtgcgactgtgccaaggccttctgtagcaaatactgatgtacatctttgcgtttgaatgttcgttgcggctgtgacctgcagaatagacctttggagacccctgcagcatctttcacgtttcatatcctgaagc

SEQ ID NO: 109425 - DNA, 6058 bp, Zea Mays
atggcatttttcagcaactccgggagcaaggccgattcagaagggtacaacttgaatgaaaaggccgatgatgatggcatacacgagtcaatccgggatgggaatgatggcctgaactctaggcagtggaacttaaatgagaaagcagaggatgcttaccacagcgaagcagagcaatatgagtctggccagtcaggtttgtacgcatcaaggcagcatgttcagagaggaggcagatcgtctggtggtccatggggcacaaattttctgaaggattccaggtccaaacagacggccaaggaagttgcatcaaatagcggtagaggaatggatgctgctaactcgcatgatgacatggatggtagcagagaggatgatgaactgaatagagcaaatggtgaggtgcctgctgaggaaatgctctcagatgactattacgagcaggacggagaggatcagattgaatcgttgcatcgtggcgggatgaagcagtcaagctgttccacttctggtggagcagcaaagtctggctcacgacaaatgaagaagatgtcaaagtacaatgcttatgataacgatgagtataatgatgagaatgatgatgacagcgatgcagatgaagatgatcctgctgacatggattttgagccagacggcgaaacagacaaggctactgataaggataagtttatggatagtgagaattctgacggcgacgacgatgatgaccttgaactctcagatgatgaagatgattttgttgagaatcggaggcaacctaaacgacttaagattgtagcaactaaaacttccaagggaggacagttgcccatgccagttcaaccaaaacgaggggtgtctcacagtgatgaagaatatttttcaggaaaagactcagatgttcccagcgattcggatttcaaacacataccgaaaaaacctgacaggttgcatcagaaacctgtgggccgcagtgatgttgccccaatcagttctcataatgagcttagaacttctggaaggaggaggacggtgaaaaagatctcatatgctgaaagcgaagaaagtgatgatagtgaggagaagtcaaataagcgacaaaagctcatcaaggaggaaccggaagaggaggatggagaaacaattgaaaaagttctgtggcatcaacccaagggtgtagcagaagaggcaataaggaatcaccggtcagctcaacctactgttgccagcctaacatcggactttgaccaacaatgggatgaattagagttctatataaaatggaaaggccagtcttacctgcattgtcaatggaagatactatcagagctccaaagtgttagtggattcaagaaggtaataaactacacgaaaagagtttctgaggaacagaggtacaagagggcactatcacgtgaagaggttgaggttgaacggatatttgctgatagggtcagcaaagctgatggagatgatctggttcccgaatatttagtaaaatggcaaggacttccttatgcagaatctacctgggaaaaagatacagatattgattttgctcaagatgcgattgatgaatataaggctcgtgaagctgcctcagctatacttgggaaaacagtagatttccaacgaaagaaaagcaaagctagtttgaggaggcttgatggtcagccagaatggctaaaagctggcaagcttcgtgattatcagctggaaggactaaactttctcgtcaatgggtggagaaacgatactaatgttatacttgctgatgaaatgggtctgggaaaaactatccaatctgtatccatgcttggcttccttcataatgctcaagaaatcaatggcccatttcttgtagtcgtgccactgtcaacattgtcgaactgggcaaaggaatttcggaagtggctgcccaacatgaatgttgttgtttatgttggcaaccgtgccagcagagagatgtgccagcagcatgaatttttttcagacaaaaaaggtgggcgtcatgtaaaattccacacgttgataactacgtacgaggtgattctcaaagacaaagcggttctttccaagataaaatggaactatcttatggttgatgaagcccaccggttgaaaaattgtgaagcgtcactgtatacaacccttttggaattcagcactaagaacaagctgcttatcacgggaacacctttgcagaacagtgtggaagagctttgggcattacttcatttccttgatccagtcaaattcaacagcaaggatagttttgttgagagatacaaaaatttgagttccttcaacgaaactgagctcgcgaatctgcataaggaattgaggcctcatattctacggcgggttataaaagatgttgagaagtctttacctcctaaaatcgagaggattctacgtgttgagatgtcacccctccagaaacagtactacaagtggattttagagcggaattttcagaatctgaataaaggtgttcgtgggaatcagttatttcagttggcacatcttggaattgaatgcaatttggctgtctcagatcttgattggaacaatgttactattctttctcacctactattgctaggtcaagcagttcctcacctgctattgctagctcaagaagtttctcacctggccgtgcattacctatcaaactggagcatgggcaaggccacaaggcaagacttggctgttgtatcacttcttaacattgttgttgaattgaagaaatgctgcaaccatccattcttgtttgaaagtgccgatcatggttatggtggagatagcatcggtgatcggaataaagttgaacgtattgttatgagtagtgggaaacttgtcttgttggacaaactattggtgagactgcgggagactaaccatcgtgtgcttatattctcacagggcctcttcagtgtggtttggtttggttcaaacccgcactacgggtgccctaagagagaaagcaaaaaaatggttaagatgttggacatccttgcagaatacctctctcttcggggatttcagtttcagaggcttgatggtagtacaagagcagatcttcgtcatcaagccatggaacactttaatgctcctggaagtgatgatttctgttttcttttatccacacgtgccggaggacttggtattaatctagcaactgcagatacagtgataatttttgattcagattggaatccacaaaatgatttgcaggttcttgatcacttggtcattcagaagctaaacgctgagggcaggcttgagaagaaagaatccaaaaaaggtggccccatatttgacaagaacgaactttcagctatcttgaggttcggtgcagaggaattgttcaaggaagacaagactgatgaagagaccaagaggaaccttgaaagtttggacattgatgaaattcttgagagagctgagaaagtcgagacaaagggtggtgaaggggaggaaggaaatgagcttcttagcgctttcaaggcatgtgatgtcgcaaacttttccagtgtcgaagatgatgcaacgttctggagtaggttaatacagccagatcctgcagatatagttcaggaaactttggcacctcgtgctgcacgaaataaaaagagctatattgaagatcctcagcttgacaaaaataataacaggaaaagacgggcagttgaaacacaagaaaagccaaggaggctttctggcagaactgtggaaacagttaattcattaccattggttgatggagcagtagctcaagtacgagagtggtcttttggtaatgttccaaagaaggacgcttctcgttttgtacgagcggtcaaaaaatttgggaatgcaacccagattggattaattgtggatgatgttggtggtgtacttgcgaaggtaccgcatgaagcgcagatagaactatttgatttgctggttgatggttgtcaggaagcagttaaggagaatacagacattaagggcacagttttggattttttcggtgtagctgtaaaggcctatgaattgctagctcgtgttgaagagcttcagttcttggcaaagcgaattgcacgttacaaagatccaatcaagcagtaccgcatccagctaccttataaaaagcctcagtggtcagcaagctgtggatggactgaaactgatgacgctagattgatggttggaattcattggtatggctacgggaattgggagaaaataaggttggatccaaagcttggcctgacaacaaaaattgcgccagcaacacttggagaaagggagacatttttaccacgtgctcccaacttggataaccgcgctagtgctctcctgcaaaaggagtatgctaagtttagcggtaagagcttaaaagtcaaaggaaacacccgccagacagtcaataacgacagtaatagtggagttcgatcaatgaggggccggcaaaaggatgtaccagaaaaagatgataataagccgaacaaagatgacattcagaagcgtagggtaatagtggaagctgaagcaagagaagaaggtgaaatttctgaatcggaggcagagaccaggtatcgtcaggacaaagaggagaagtggcttgaatggtgctctgaagttttagatgaggagcaggaaactttgaagcgcctggataggctgcagaatacaagtgtaaacctcccaaaggaaaaggttctttcaaggattcgcaagtatctcctgataattggggacaaaattggagaagttgtccggcaacacagtgaatcttataggcaatcccgcatggtcatgaggttatggaattatgttgccaccttttcaaacatgtctggggagcaactgcatgatctctatatgaaacttagtcaagaccaactggaaggtggagttggcccatctcatggtggcaatttcacatccattcctcccaataagggaggtaactcaaatcaacttcatccttcgagaaaccaaaggccaactaggtctctccagtacaattctgagtctttccataatgagagctctggaagttctgaagcctggaagcgtcgacggagagctgacacagataatcaatttgacacccagcctttgtgtcaacctccaattatgacaaatggaaataggttgcaggaatctagtagttctgcaggtattcttggttggggtccagttgaaattagacggtatggtaatgagaggccaaaacgtgctgttcatcctagtcatttccctactgggcatggacctttgctgtagctgaaggaagtagatgatgcgaacaaccttgttcattttggcataaccgttcccagtgaatttcagcttccatatagttataaatggtggatctccgtaggaattgaaattctttttccaaaacaaaaaggaataaagagcaacctcacctggatcacagttttgaattatatgccttaaaaggtaatgccaggactctagaggcgacttatggaattgttaacagctacactgaatatccttctgacaccatcacagcaacacaaatacatggtggcttgtgaactgccaagaggatcaatcgaggaagttttgcctgttcagttttgtgatctctcaacaatgatctatagttaaatctcaatacataaattatgctttacattgtaatatattgaaatatggttccgttatgctccctccctctcgatgtgttttgtgccgtttttctaccgtgttgatgtaaaagatgaaagaaatgcatgttctcattttgaggcaacaaaaagttgcagccgggagcataatagtgaaatgcgatggaattatcggatacttatcgattccatagtgttttccctgagacaatgtactgaatgaggtacggttataagaaatggtgataattagcttagtaggtgctcagccattctacaagtcatctggtagtccgaagttgcatgaggcctactttcccctggttgccccacttatgctcagtaagtatgcttctagggttgtatgatgatggcccaattgaatttttaatcctgtgtatgaa

SEQ ID NO: 109426 - DNA, 2220 bp, Zea Mays
ttatttttttatgtgaatagatacaaaacaaaattacaacctatatttagagaactattggagaactcacatttttttactccaaaagccatttagcaacttcttaaatctataatttagagagctaaaatttagctaactattggagttgctctagagccaacatcgtttcagagtcccatctgaactccgtagcgtgatagcagagggcggcagcagcagcaaatccctgctccttcctcctccccggccccaaaaccgcacaaacccctgctcctcctcccgccgccgccgccgccggggcacgccgggatgcagaagccagtggcctccgtcgtctccctatgtccgcagctatggcaccgccacttccgtcgcgctcccctcctcccccgcgcccgcggcctcccctcctcctctcctatcctcacacgccgccgctccgtactcccccgttccacttccactcacctcgccgcggtgtcaaccgctgccgccgccgccgccgccccatcagccacaccgtacccagtgtacgatcggcttctgccgtgccccttgcaggacgaccctccgagaatcgagcacctcgtggctcgggaggacgaggtggcagccgatttcatcgccaggtcgctcggcctgcctcctctgtatgctgcagacctcatcgagttcggtgctgtgtactacgcgctcgtcgccccgcagccgcctccctacgcttctccggagcattttaggctctttcgggaagtcaccgagccttccgtcctgcgccggagggcgtccatcaaggggaagacggtgagggaggctcagaagacgttccgggtgacggaccccaaccagcgcctcgaggccggcacctacctgcgggttcatgtgcatcctaaacggtttccaaggtgctatcaaattgactggaaatccagggtaatagcagtcgctgatgaatacgttgttcttgataaacctgccgcaacatcagtgggcggagcaactgataacattgaggaatcctgtgcagtctttacttcgcgtgcattaggattggaaacgccattgctgacgactcaccagattgacaactgctctgaaggctgtgtggtactatctaaaacgaaagagttctgctctgttttccatggactgataagggagaaacaggttaaaaaactctatcttgcacttactacagcacctgtgtcaacaggaacgattacccattatatgcgcccagttaatcgcgctcctagattagtttctgaagactgtattgaaagatggcatctctgtcaaatggaggtactcgattgtagcaaggtaccatggccaagctcttcgatcaggaaagcttacaatgtaaatggttgtgggtggccacagcaagaagctgcttacgaatgtaaaatcaatctcttgacagggaaaactcaccagataagggcacagcttgctgctataggcgctcctattataggggattctgcatacatgactgcagcaatggcagcgatggccaacccaagcataaacccattcggtagagagaggctgagttacaacagtgaagaggagaaagaagccgccgtcgaagcatggattgcctcccacgggaaggaaccaaaatccgtaattgggctgcaagcgtcagagatctcttgggatcacgagggcaagcaccattcttacaaggctggagttccgtggtggtggcaggatcctgactcctgagtgcgatggtggattggatgggggagttccatatgaacccctggaatctcgcctttttagaggacagatgtttttctacattgttccgagtgctgagcgaccactgtccaacacgaacattggtttggtttggttgctgcgcagaaattgttgggtcaccgaaaactgaatttgggcttgggagatgaaactaagcccgagtctgagctctcgaccaggccaacacgaacaccacaccagagctccttcaactgggaaaagcagatccaggccaacacgaacattgctttgctgttcattctagggcatgcaacgtcattcgttctatgactgtagctgtatggttgtgtgcaaggcctagcttctatttgggacagctctcaataatattccctggagattgagttggggtgagaccgtctctcataaagtcagtgaccgaaacatcaaattttttaaaggcaagcatcttaaaatcgataa

SEQ ID NO: 109427 - DNA, 1635 bp, Zea Mays
aaaaaagaaatcctaaagaacaaggattactaaacgagcacgctcgccggcgccgggaatcacgatcagatccaatccaagaccgcgccccagcccggcggatggatcccgccgccgtggccatcgtgacggtgccgttcccggcgcagggccacctgaaccagctgctgcacctgtccctgctcctcgcatcgcgggggcttcctgtccacttcgccgcgccggagccgcacctccgggaggcccgcgcgcgcctgcacggctgggggcccgaccccgcggcggtgtgcttccgcgcgctggacgtgcccgcgcacgactccccctccccggacccatcctccccgttcccggcgcacatgctgcccctgttcgagggcttctgcaccggcgcgcgggcctcgctagccgcgctcctggcggagctggccgcgtcgcaccgccgcgtcgtcgtcctctacgaccgcatggcggccttcgcggcggccgaggccgcgcgcttacccaacgccgaggccctcggcgtgcactgcctcgccgcctcctacaacgtcgggtgggcggacccggggcacgccctcctgcgacgccacggcctcgtgttccacccgcccgacgcctgcgccacgccggagttcgtcgcgctcgccaggcagatgggccaggagcgccggcgcgcgcccggagccggcatggtcgtcaacacctgccgcgcgctcgagggcgacttcctcgacgcactccgggggatcccgtcctccgacggcccaaggctgttcgccgtcgggcctctcagcccggtgctccccctccccggcgcgagcgggactcggcacgagtgcctgggctggctcgacgcgcagccgccctcgtcggtgctgtacgtgtcgttcggtacgacgtcgtcgctccgcccggagcaggtgcgcgagctggccgccgcgctgcgggacagcggggcgcgcttcgtgtgggcgctgcgggacgccgaccgcgcgggcatgcgcggcggggaggggggtgccgaggccctccgcgccgccgcggcgtccgagctcggccccgacggcgctggcgtggtggtcaccgggtgggcgccgcagctggagatcctggcgcacggcgccaccgcggcgttcatgagccactgcggctggaactccaccgtggagagcctcagccacgggaagcctatcctggcgtggcccatgcacagcgaccagccctgggacgccgagctcgtgtgcaagtacctccgcgccggcgtcctggtgcgcccgtgggagcggcgccatgacgtgacccccgcggccgacatccgcgacgctatcgacagggtcatggcctcggaggaaggggctgagatccggcggcgggccggggcgctcggggaggccgttcgcggcgccgtggtcgagggcgggtcgtctaggcaggacctggaggagctcgtcgcgtacgtgacgaggtgattccgtcgcgatggcccatgcggcgactgtgccgcgtggcggcgctgctgcctgcattaacgatttgtttccatggactatatttgaaatgaaatcagaaggttttaggccaggctatggtttcatttgagggttggccaggccatcttcgtagcctatctat

SEQ ID NO: 109428 - DNA, 726 bp, Zea Mays
ctagagcagcagagagcgggcgccggggctacgcgagcggggaggccgcgggagaaggcccctcgcgtgtgtttcaggcaggaggccgatttggtgcagatttggaaaggatggcggacgggcgaccagcttggcttccggacgcgtgacggcaaatttcactatgggacaatgttgatatcctatgacaaaaaaaaaaaggttacaagggagcaacagatggtgacagcaaaggagccaagggtaggcatcagtgtccagtatatcagcaatatggacatcattgatacacttgtaagcatggtgacccagaaggcaaagcagcatttttgctaacatatctgtccgtgcataggtgcgcctaaaagaagaaaaagatagcaccagttactactgagactagaattgtgcttgcaacaccagcacggatggtctttccggttctacctactgttgcggatctatcaaagaagacgaagaacaaatcatcctcatcaactggtgggtaagaaggattggaaaaagataattgctaacaatgtttaaactaataatgaggtcaatttgaccatcttttatatactcccttcatcctaaaatataatttgttttagattaaatatatattcattagtcaacatattaatgtagtttgtatatatttctacattatttattatcatccattcgaacgtggatgaaaaaagagggttaaaaagaactata

SEQ ID NO: 109429 - DNA, 2736 bp, Zea Mays
atgctgagctcgtcggcgtcgaggcgggaggccgcggcggcgcgggcaaccaagaacggcgagctccccaagtcggccgctgccgtcgcctggaaggacgtcgcggccaccgccaggagcggcgagctgtccaaggcggtgactggcgccgagctctccaaggcggtggccgccgtcagggacgccgcggccgtgcaacacgaggggtggatggtgcgctacggccgccggaagatcggcaggtccttcttccacacgcgctacttcgtgctcgagagcaggctgctcgcctactacaagaagaagcccaaagacaacatggtgcccctcaagtcactgctgatagatgggaattgcagggtggaggatagggggctaaaaaatcatcatgggcaaatgatttatgttctctgcgtttataaccagaaagagaaggagcatcaaatcacgatgggtgcacatgatatcgaagatgcattggcctggaaaaagaaaatagagctcctcattgatcagcaaccagactctgcagttaaaacccataagtcgttcgctacaatagactttgacatggaccttggagggcagttctccttgtcagatcatgacagtgcagctgaagatgaagaggaacgacctactttagttcgcaggacaactatagggaatggtcctcccgattcaatacatgattggaccaaagatgctgattttggtatgtccggtcagaatgagcccactcaactctattctaagaagaattggcgactacttcgatgccaaaatgggttgcgcatttatgaagaacttctggaagttgaataccttgcaagaagctgtagccgagctatgagggctgttggagtagtggaagccacatgtgaagccatttttgggctgatgatgagcatggatgcaacaagatatgagtgggactgtagctttcgccagggtagtttagttgaagaggttgatggtcacactgcagtactatatcataggttgcaattgcattggtgtccaaggttgatctggcctagggatctgtgttacgttcgatattggcgacgtaatgatgatggaagctatgttgtgctatttcggtctacagaacatccaaactgcatccgtcagcgaggatttgtgagagcttttattgaaagtggagggttcaagatttgtcctcttaagtgtcgcaatggaagaccccggactcaggttcagcaccttatgcagattgatctgaagggatggttcttgaactactctacttcctttcagtatcattctttgctgcagatactgaactgtgttgccgggctgcgtgaatatttttcccaaacagatgatattcatataactccaaggattcctgcaatggagagcatggctgatgtgaatttagcacaaaaggacgagaagcttaaagaagttgactccaaaactaaaccagaagatcaacaacaagcagaaaataaaaatatgggaacaattgatgaagaatcagatgacgatgaggactatcatgttcctgaagctgatatagaggaaatcactaacaaatctgacaatgaagctaaacacacagatgagcctccagaaaaaattgatttatcttgcttttctgggatacttcatcatgatccggatgagaaaagccgcaactgttggacagtacctgatagcaagcttttcaagttcgtagcaagaatttcccaaatgacaaatcgaagatacctgctgcaagttatctcatggagcttgcagccattgattggtttaaggacaccaagcgtatggataatgttggcaggcagaaaaattgtgttgctcaggttgctgctgagaaagggatgcatacattcattgtcaacttacagattcccgggtcaactcactatagcatggtcatgtatttcgtcacaagttccttgaaaaagggatcattactgcagcgcttctttgatggcgatgatgacttccgtaacagcaggctgaagctcataccatcggttccaaagggctcatggatagtgcgacagagtgttggcagcaccccttgtttgttggggaaggctgtggattgtaactattttcgaagtcctgggtatttggaggtggacgtcgacattggttcttctgcagtagcaaacggagttttgggcttggtgtttggtgttgtcacaacattagtagttgatatggctttcctaatacaggcaaacacatatgaggagctcccagagcaagttataggcgcagctcgtctatctaacgtggaaccgtctacagcagtagttcctgaccttgaaaataacagcgacggcaacaaagataacagcagtaacgacgctacgtcctctgaggatgattcgtcaaagaagaccaactgattctacctttctttaaagatttcgaaagaccaactgattcaacctttatttgaagatttcgatgagagccgcaggtgtctagttcattttttctccttttaacttctgtgctgtgcacgtatcttcgcgggcttgcaccagattgcagtctggtacatctcctttggcgccttcaattgagtccagaatttcacatgatctcctgtatccttctccattacagtccgctcttgccttatccatgtacatgctgctaccagacttggtgtagatagtactatgtgatgaacacgttcaactcagtaactgatcatctgagttgtagtgcttgctttgtgtgggt

SEQ ID NO: 109430 - DNA, 1747 bp, Zea Mays
cacgtcaacccgtcgccactcacataaaacgtcttgacctctctgctcgccgccggcgaggagacagtagcccgccgctgcacgcacgcgccgcgaggaggtctggagcggctagctcgtctagagctaagtcagcgaatctcccggaccgtcccttctcagttctcatggccgtccgccgcaggcccgcggctgctgctgccggggacctgcctccgcaggcgccaccggcagatgcagcgccgacgccggcgccagacgaactggtcctccggccgccaaacctccgcgtggccgctgtggcggcggtgctcttcctcgcgcccttctcttatctctcgttcgtgcgctaccgcttgggcgccgatctgcagcgatccatcttaaaatgcggcgccatgagcctcattgggttctgcgtcgcgctcaagctcatccctgtcgcggccagctaccacctccgccgccggatgttcggctacgacatcaacaagaaaggcttgcccacgggccaaattaaagtgcctgaagcactaggtcttgttgtggggattatctacttggtcattgctattatatttcagcagtttcactatgccccagactccatttggcttgttgaatataatgcagcgttggcatcagtctgttttatgattcttcttggatttgtcgatgatgttcttgatgttccatggagagtgaaactggcattgccaacgtttgcagcactcccattgctaatggcatatgctggtggcacttccatcatcattccaaagcccttaactccttatgttggactaacggttttggagctaggtttattttacaagctattcatgctcttgttagcagtcttttgtacaaactcgataaatatacatgctggtctaaatggacttgaagttgggcagactattgttatatctgctgcggttttgatacataatgtaatgcgcatagcatcttctacagatatcgaaactcagcaagctcatgaattctctatttatcttgtcttgccattcctaaccatttcattagctttgctagcttttaactggtatccctcgattgtttttgttggtgatacctacacctattttgctggaatggctttggctgtgataggaattttgggacatttcagcgagacattattgctcttctttttacctcaagttcttaatttcctatgttcagtcccacagctctttcactttgttccttgcccaagacataggttgccgaggtttgatcctgaaacgggtctgttgactggtaccaaagatggtaatctggtgaacatattccttaggttatttgggaagtgctcggagaaggccctttgcataaggctccttatttttcaggctctatgttgcgtattctgcttctggctaagatacatgctcaccggatggtacaaatgatcacctgcgaaaggctctccatcttgtcgcccagctcttgggaaaacccggttgcgtctgatggctattgtttcctcgacgtactttatcaggaacatgggatctgcagaggagcaattggaaggctgaaagagcagaaggttgagcgggaggagtaatctgattaattgaattttgtttgtgattaggccttattgggcctggggtttgggccgtctggccttgtaaggagggtgtacttaaaccctgaatcttctggtaattggcaggaagaaaatagaagaaaaaccaccaaacagaatttctgttta

SEQ ID NO: 109431 - DNA, 2438 bp, Zea Mays
gtcaacccgtcgccactcacataaaacgtcttgacctctctgctcgccgccggcgaggagacagtagcccgccgctgcacgcacgcgccgcgaggaggtctggagcggctagctcgtctagagctaagtcagcgaatctcccggaccgtcccttctcagttctcatggccgtccgccgcaggcccgcggctgctgctgccggggacctgcctccgcaggcgccaccggcagatgcagcgccgacgccggcgccagacgaactggtcctccggccgccaaacctccgcgtggccgctgtggcggcggtgctcttcctcgcgcccttctcttatctctcgttcgtgcgctaccgcttgggcgccgatctgcagcgatccatcttaaaatgcggcgccatgagcctcattgggttctgcgtcgcgctcaagctcatccctgtcgcggccagctaccacctccgccgccggatgttcggctacgacatcaacaagaaaggcttgcccacgggccaaattaaagtgcctgaagcactaggtcttgttgtggggattatctacttggtcattgctattatatttcagcagtttcactatgccccagactccatttggcttgttgaatataatgcagcgttggcatcagtctgttttatgattcttcttggatttgtcgatgatgttcttgatgttccatggagagtgaaactggcattgccaacgtttgcagcactcccattgctaatggcatatgctggtggcacttccatcatcattccaaagcccttaactccttatgttggactaacggttttggagctaggtacgtgtatcccctttaaacaggttgaaagtgtatatttactctttggtggttgcagcacttgtgtttgttttttgctgttataaaaccaagagacggttaagaaatccacaggcatagcagatctcactatgaaatccttatgcatttgttagtcattcaatcttgattataagttataaaatagaatttgtttgtcagtgtctatgtttttcaacagtcaacaccatattttatctagtgtagtgtcaatcaagttttgcctgctgatactggtttattttgttcctcatttttatggcagaggttccctgtacgtctttgatctttagcttttttccattgtccaaaataagccacccactttggatttttgtcaaagtgtgccactccttataggtacattaacttataatatttctggaaaactttaaatgtttttatgggatatttttacattatgtagtattttggagatttgtgggactttagaagttgactttattatatcatcaggatccatatgcttaccatctcttgcaactctgttatttgtatttttaagagactcacaacctgtttactgacattttgtttagtatctgacattttgtattgactgagcatgataattctgtaatagcataacattttgcttcattactggcgacagtgctttatgcttggtgtgcggatgctgattggtttattttacaagctattcatgctcttgttagcagtcttttgtacaaactcgataaatatacatgctggtctaaatggacttgaagttgggcagactattgttatatctgctgcggttttgatacataatgtaatgcgcatagcatcttctacagatatcgaaactcagcaagctcatgaattctctatttatcttgtcttgccattcctaaccatttcattagctttgctagcttttaactggtatccctcgattgtttttgttggtgatacctacacctattttgctggaatggctttggctgtgataggaattttgggacatttcagcgagacattattgctcttctttttacctcaagttcttaatttcctatgttcagtcccacagctctttcactttgttccttgcccaagacataggttgccgaggtttgatcctgaaacgggtctgttgactggtaccaaagatggtaatctggtgaacatattccttaggttatttgggaagtgctcggagaaggccctttgcataaggctccttatttttcaggctctatgttgcgtattctgcttctggctaagatacatgctcaccggatggtacaaatgatcacctgcgaaaggctctccatcttgtcgcccagctcttgggaaaacccggttgcgtctgatggctattgtttcctcgacgtactttatcaggaacatgggatctgcagaggagcaattggaaggctgaaagagcagaaggttgagcgggaggagtaatctgattaattgaattttgtttgtgattaggccttattgggcctggggtttgggccgtctggccttgtaaggagggtgtacttaaaccctgaatcttctggtaattggcaggaagaaaatagaagaaaaaccaccaaacagaa

SEQ ID NO: 109432 - DNA, 336 bp, Zea Mays
atgctttttacaggcacaactggtgggacaacagcttctgtcttcttcacattctcaaataaatcattgttggcaggaacattaacaggggggcatccattagccagaatggctctgccatttggaaggcttgatcctgcagctttcttttcattactgcatgtattctcctttgtgatggcactggtctcgctgtttgctgattttgcaggaagaacaacactggaagtagataccttctctaaactcagcactgaaaagttcagggtgccaaactggatctccgtccgttcacattctttgctgacgcttttatttggacttttgagaggctga

SEQ ID NO: 109433 - DNA, 1561 bp, Zea Mays
ggaaacttcctcccttccactctgccggcaggtcccgccggtgccggtgggacccacgcaataatttagacccaatcaaaccacccacacaacgcaacgtggcgcggcgcccacagaaaatccgtccgagcccccgtttagttcagctggcagctgactggctataaacacccgacccagctccgcagcgcggcacggcacacggcttttggcagctacaaaccacccaaaagccacccccagaaaccggcggtccttgggtgttccggatctgagccagcagctgagaagaggatgagcgccgtggccgccatggcgacgtcgtcgctgaaccccaacgcgccgctcttcatcccggcggcgtaccggcaggtggaggaattctcgcccgagtggtatgagctcgtcaacaccaccgcctggttccgggaccactggttccgccagcaccagcaccacgaggccgccttcgccgccgccgccgacgccgagctcgacgtcgccgcgctcctccccgacgactccgtcgacctcctcgacaccgacgacctcttctacgcgcctgacgtccaccacccccacaacgccaagccggcgctgctgcccgggtacgacctcgacatgctcagggcgctgagcctcagctccccccgggccgccgccgcgccgtcgccgtcgccgttgctgcgcgcccagcagcagaggcacgcggacaggccggcgcaccacgccaggggcgccgcgcgccgcgtcatcatccaccagcctcgctagaagcagcctgctcatggcgggccgccgccatggctgttgtgcctagtgtaacctcaagcaagtctagtctgtttctgtctgtgtatacgactaaaaaaacaacagatggaagattcggacgaggcggccagtgctctctcctcgtagccagcttctcctgttccagctcagttcttgttcatccagcagagcacccaaaaaaaaaaaaacaggcggagtgatgtacttactattcctcctcctcctcctcccatgtccatgttgttgaatatatatatgatggcaagcagcctgatcttttcaattcttcttccattactacctcgctttgcttcagttgtcctatgattcagatggaactgagttgtcaacgactccaggatgctacatgtgccgagctactctccagatgactttcgggatgtctagctgtcagcatccactgaagaagaatcggtccttgaaacgaaggccgtaggaagcactgatggaccactgattttaccaccaaacaacaggtgtaacataaagcaacctacgccagttgcactgtctgtcagcaggtataaccgatggtagtttagcaacagattgcaaccagactagctcagtttgctccagaacatttgcgctataccagatttcctaagtcgcagccacttcagtccattcctcagaaagccacaaagagaagtccatgtcggccgcacaccttccttacagacgtcaggacgactccttgacagggacatgacaccttcaaaacgaataattcgaagctttttat

SEQ ID NO: 109434 - DNA, 776 bp, Zea Mays
gtcgtgttgcgttggcacaccccagacgcgtggcgtcgacgtggaaccgagctcggcgccacagatcttggctcggcgccacagatcttggcgccgagctcggttgtgttattaaaatatttgttgcagacatgagcacaaagcccatctagcccacttggtagagcacaaggtttctaaccatgtggtcgtgggttcaagccccatagtttgcattttttttttgtttttttttgtttatgtcgttggtgtgtccgcttaaatttatttctcgcctagattttttttatctttgttttgtcactgaagtcagttcagcttatataatttacctatacttacactgaagttgccacagacctattcttgatctcaacctgggggtacatctaatgtagtatccaaaaaatttaacacgcactttacaaataattgatggcggtgtagaacttctggacttaaaacaaagagaatgggatttgcgcgctgacttgcaagcatcggctattctttagcctccagcaaatgattcatgacgaggcggaggctccttagctgcttccagatttgagcgtgttactgagcctgcaataatagccaaccataagttgcttcctccaataatgtctccagctctctcatcacgtaaatgcaaaaggcgtgtttttttgtaattaatacatagaactgcatcttgatcgacggacagtacagccactacttgataatgtatgaagaactattttaactgatgatacgaatggtttattaaagac

SEQ ID NO: 109435 - DNA, 1512 bp, Zea Mays
atgacgccaccctcctccggccgtctctcggccctcctccgccggtgcgcagcgagcggcgcgctctccccaggcgcgcagctccacgcgcaggcactggtcggcgggcgccttccggacaccaccctggacacagacctcgtcctgctctacagccgctgcggggcgctccaccgcgcccgcgaggtgttcgacggaatgccctctccgtccatgcacgcgtacaacgtcctcctcgcggcctcccctcccgatgcggccgtgaagctcgtgtcccgcctcgtcgcctcgggcctgcgccccgacaggtactccgtccccgccgtgctccgcgcgtgcgccgagtcgcgcgacgcgctcctcggttccgtgctccacggtttcgccgtccggctcgggttgctggccaatgtcgtggtctccggcgcgctgctggacatgtacgctaagaccgggacgctgggtgacgcgggcagagtgttcgacgagatgccggagagagacgccgtcgcgtggaactgcatggttactgggtacgcgagggctgggaggtcagaggaaaccctggaactctttcggaaggcgcagatcgagtccgcgggtatggcgagggatctgcgggccgtgccgagcgtgctgaatgtctgcgcagacgaagggcagctgatgaaagggagagagatccatggcaggatggcgcggtgccttgcttctagttcagataccgtggtggggaacgcgttgatagacatgtacggtaagtgtggccaggttgacggagcgcaggcggtgttcgcgagcatggaggagaagaacgtggtgagctggtcgtcgctgatatcttgctacggcgtccatggcatgggaaaggaagcgctgagggtttacgaggagatggtgtccgttggggtgaagccaaactgcgtcacgttcgtctcaatcctgtcgagttgcagccactccgggctcgtgagcgatggccggaggatcttcgagtcgatgcgcaaggtccacgcggtagagcccaccgctgaccactacgcatgcatggttgatctcttggggcgtgccggagccatcgaggaagctgttgggctggtaaacgagatgcctatggagcccggtgctagtctgtggggagcgttgctctctgcctgcgcgatccataacaacgtcgatgtcggagaggttgcggcttataggctgttcgagttggaagaagacaatgctagcaactacgtcactctatgtggcatatacgatgcgattggccgatctgacagtgttgcagggttaaggtcgaggatgagagagctcggcatggtgaagacgcctggctgcagttgggttcatgtgaagggaagagcctacgccttctaccaggggtgcgtgccacggtacttgaggagacagatgcttcgcgttttaggccatctgctcgaggatatggctggttcaggatatgagaatgaacatctgagcatgtgccatgggatagttgggtactgaatc

SEQ ID NO: 109436 - DNA, 79 bp, Zea Mays
gcatttgacgctgtatatgtcagtgggggtatcatggttatgggcttatggcaagaaaggtataggcgttctcctgatg

SEQ ID NO: 109437 - DNA, 110 bp, Zea Mays
gtgtagacatgtgtcaccagaggcttcctattgtagtcagaaaccaaggaaggagattatgaaggacacacaaagggaggtaccactaaagaaggcacaacagaagttgg

SEQ ID NO: 109438 - DNA, 790 bp, Zea Mays
actagagtctagactagagccgcccgcccgcccgcccgcccgtgtgccgtttaccggagcacaacacaacgcggccccctcacggcgtggagtggattgggccgacgccgatcgagagcagaggagaggagcgcggtcggatagggtttgtctgggtgaggttttgagcgagagcgcagggcgagggaaggaggaggaggaggactggctcctggaggaggaggccggccggggcttggatggtcgcggagcgctcccgtaggtggtgtccatgggaaggtcgttcagggactcgctcaaggtgctcgaggccgacatccagcacgccaactccattgcttctgaatttaggagggaatatgatggcgcctcccttcagatgaggatggcatattgccctgctgcccactttttcctttttcttgtgcagtggacagactgcaaccttgctggtgcacttgggctgttgaggattctaatttataaggtttacgctgatgggacaaccaccatgtgtactcatgaaagaaaagcaagcattagggaattttatgctgtcatatttccctccttgatgcaattacatgaaagaatcaatgaagtggaggatagaaaacagaaagcaatatgtctagagaggtacagaagacgagatgaggatccgaaaactgtggtatcagagattgatgataatatagaggaggaatgtggcatatgcatggaaataaatgtcaaagttgttcttccaacctgtagccacgctatgtgcattaaatgctatcgtgaatgg

SEQ ID NO: 109439 - DNA, 240 bp, Zea Mays
tttcatttttttatttgcaatttgggcatttccgtgggtactttttactttaattagaaagaaaagctattagaaagaaaagcttctttttcgaaagattacccctgtctttgtttatgcttcggattggaacaaatgactctaattcacccacgcctgcgaatcagtcgacattttgtacaaattttacgaacggaagctcttattttcatatatgggtattcctttcttaaactatga

SEQ ID NO: 109440 - DNA, 1460 bp, Zea Mays
ttcgatcgttgcggttgccgggcgggcgcgtcgtctgttctctctctctttctctctctctcgattacttctcgttcgtgcagtgcagatgaactcttaatgttcgttttttttcccttgaagttctgctttgttctgtgacataagtgaggtactacatcgaaaaacgatctgattttatttttcaggtcacaaacctgaaaataccaatctacgatacagatctagaaaccacgaatacatattttgtcggggctaataggggggaaaaaagaagatattctgtggcatcggaactctgtaacactgttggtttctgtgaacgcttcaggtaaggcaaggcaaggtaagtgacgagacaaagatggtgcaggaggagctgccgcaggcatggtggttcgacagccacaacctcgcgaggccgtcgccatggctgaacagcacgctctcagagctggatgacaagaccaagcaaatgctgaagctgatcgaccaagacgcggactcgttcgcccagcgcgccgaaatgtactacaagaagcggccggtgctggtggacatgctcggcgacctgtaccgcacgcaccgctcgctggcggagcagtacgacctgctgaagcacggcagcggcacacggcacacggtgttcggcctgtcttcctgcacacagagccggtcgtcgacgaacggcaggaccactcctcgctcctcctgctcggcctctacgtacgactcggagtccgaagtggacgaccccgggcaggaagaatacgaggcagagcagctggcgcgtgcggggatggccaagacggagtcgccgccgccgccgccggagcagcagcagcaagaacagcgtgagcaggcggagcagcagatgcgcgcggagatcgagaggctcaaggcgcagaacgcggcgctgcagaaggcggccgaggagagcgcggcggcgctcagggcggagctggccgggaaggacgaggagaagcgggaggtgatcaggcagctggcgtcgtccatggacgtgatgaggcaggagaacctcacgctgcgcgagcacatcagcaggggatcgtcgaagcgttcctctgcgccccgcgcgggagctgcgttcgatctcaggaaggtggccaggggcctcttctccgcgaggctgttcaccgcgcactgcaggcctacgggccccatcgtcgcgctctgagcaggatgccaggatcgtgaagagagacagcgtagatatgcatttgttgtaggcgagtgatgtgcatattataggatggcatcgatcgatattccctccgctgtctgtttctcaggttcaactaaactagagggagcactcgttttttactatgatggcgtagtagtagtagttaactgtagttaaatatttactagtcatatggatgcatgtttgtatgatggcgttaattattgttaagtattattttgtcagttcctca

SEQ ID NO: 109441 - DNA, 1393 bp, Zea Mays
catgaacctagggccctgtccgaacgcgcctcccacggcggcgcgtgcgactccccaacatgggaaataaatagatgtcccaattacccatcgagccgtcgtcgtggagcggcaggatttgaaaaatctcgcgagagggccttgtccttgtccacttcctccgcttcgccgtccctcaaagcagcggaaggggagaggccagggtgcagcagcaggaccccaacggcaacctccgccacgcaccacggagcaaccaagcagcaggtaaggcaaggcaaggtaagtgacgagacaaagatggtgcaggaggagctgccgcaggcatggtggttcgacagccacaacctcgcgaggccgtcgccatggctgaacagcacgctctcagagctggatgacaagaccaagcaaatgctgaagctgatcgaccaagacgcggactcgttcgcccagcgcgccgaaatgtactacaagaagcggccggtgctggtggacatgctcggcgacctgtaccgcacgcaccgctcgctggcggagcagtacgacctgctgaagcacggcagcggcacacggcacacggtgttcggcctgtcttcctgcacacagagccggtcgtcgacgaacggcaggaccactcctcgctcctcctgctcggcctctacgtacgactcggagtccgaagtggacgaccccgggcaggaagaatacgaggcagagcagctggcgcgtgcggggatggccaagacggagtcgccgccgccgccgccggagcagcagcagcaagaacagcgtgagcaggcggagcagcagatgcgcgcggagatcgagaggctcaaggcgcagaacgcggcgctgcagaaggcggccgaggagagcgcggcggcgctcagggcggagctggccgggaaggacgaggagaagcgggaggtgatcaggcagctggcgtcgtccatggacgtgatgaggcaggagaacctcacgctgcgcgagcacatcagcaggggatcgtcgaagcgttcctctgcgccccgcgcgggagctgcgttcgatctcaggaaggtggccaggggcctcttctccgcgaggctgttcaccgcgcactgcaggcctacgggccccatcgtcgcgctctgagcaggatgccaggatcgtgaagagagacagcgtagatatgcatttgttgtaggcgagtgatgtgcatattataggatggcatcgatcgatattccctccgctgtctgtttctcaggttcaactaaactagagggagcactcgttttttactatgatggcgtagtagtagtagttaactgtagttaaatatttactagtcatatggatgcatgtttgtatgatggcgttaattattgttaagtattattttgtcagttcctca

SEQ ID NO: 109442 - DNA, 805 bp, Zea Mays
tccaccacgaccatgacgcggtggaagagtacgccgggtgcccttcgatcgccgagctcgcggccatcctcggcgtcgccgggtacgacgagaaggcggcggcggcgggcggggacgtcggttggtggtccacctgggaggagccccaggtggtgtgcttggaggacgtggtcgttcctaccacatcttgtcatggcctccatccgctcctcgcaccgccgtccccaaagaaccggagctccggcggtgagctggctgacgtggtaatccggcagctggaggagctcgccaagtcggaggcggcggccgtggcggcgtcttacgcggagctggagccgggtgacggcgagcagctgcctccatgggcgtcgccggagctcgacattggagccgccgcagacttcggggctctcgacgctgctgacgctgacgccgcctggcatgatgcagcgaccatggctttcgcagcagtgccttcccacgaggagcaggaggcgtggatcgcgaccgcctgtgacgtcgacgcgcgccgggcggaggtggaggtggaggaggcgcgcgagcaggctgctccggcgccggacgagccgtgcctgtcctcgttcgtggacatgtcggagatcttccccgccagcgtcacgctcagcagcggcggcgacgtggacaatagcggcaacaagccagacgaggaaacggccccgcgaccgcagctgttggccacgacggcgctggtgccggtgacggaaaagaagggcggctacgacgtggcccaccccgaccgcggcacggtgatctcgcgctacaa

SEQ ID NO: 109443 - DNA, 1607 bp, Zea Mays
cagaccaggtagcagcgcacaagacgagatcccaacctcgcgatccactccgagtcgcccctccccttccgccgccgatggcgctgccgtcgagcgcctcgcattcggcgcggctgcggctgctcaccgtgccggcgctgcttctgctgttgtcctccgccgcgctgctcgtcttcctcgtcctcccctcgctctccccctcctcggcctcctcctccgccgcctccgggcacctctgtgcctgctcgccccccgccacccacaccaccaccaccgtcaccaccaccaccaccaccgcctcccctgcgcccgtcaccacctcccccgcggacgtcgcctggctgaaggcccagctcgcgtccaactccctcctcctcgccgctggcggcggccacgacgcctggcaccgcctgcgcaagggcatcaacccccgcacacgagagcagcagctcttcgacatcaacagacaccatggcatctctcactatccggacgaagaggcaaccaaccacaccgcgctgccgtgccccggcgagctccttgtggaagagcaccacagcaactacggcgagccctgggccggtggccgtgacgtcttcgagttcctcgctaacgcctccgtgctgacgccaacggagcaggtccttgaaatcggatgtggtacgcttcgtgtcggcctgcatttcatccggtaccttgaggctgggaggttccactgcctggagcgggacgagctgtccctcatggctgcgctccggtacgaactgccggcgcaggggctgctttacaagcggccgatgattgtgagaggggaggatatggacttcagcaagtttggggacacagttatgtatgatctcatctatgcgagcgccgtgttcctccatatcccagacaagcttgtttggactgggcttgagaggcttgcggggaagctgaggccacatagaggccggatttttgtctcacataacattaagttttgctcaagactgggaggcgatgagtgcacacgacggcttgccaaattgggccttgagtatgtggggaagcacactcatgatagcttgttgtttaaccactacgaggtctggtttgaattccgcaggccaaaagtttagatcttgatggtacagaaagagagagtggttggcttctgtgatgcaattttggcagtttcaagcacagattaagccatgccttgtactgtttgaacactactgggacctgacttgagattgagattgatgttcgctcggtgcctaattcaagcatatgcatatacaccaaaagtcatgattgagcaatgctgtggtgcttcagtgtgtcttcccagtttcattcggtgagtggtggatgaaggctttagtttttattagcaccgattactgtatgttctataacttcagtaacatttctggtagaaactatgtgggtagctgatgtcaaagcagtaggatacatgcttctattccgaaagctacctctgtgggctgtggccaaaatagactcttacgagcacacatggttttgtaagctgtaacaaggataactttggttgtcttgtttttgcattttatagagcatgcacatttttatgctgctgt

SEQ ID NO: 109444 - DNA, 1701 bp, Zea Mays
ccagaccaggtagcagcgcacaagacgagatcccaacctcgcgatccactccgagtcgcccctccccttccgccgccgatggcgctgccgtcgagcgcctcgcattcggcgcggctgcggctgctcaccgtgccggcgctgcttctgctgttgtcctccgccgcgctgctcgtcttcctcgtcctcccctcgctctccccctcctcggcctcctcctccgccgcctccgggcacctctgtgcctgctcgccccccgccacccacaccaccaccaccgtcaccaccaccaccaccaccgcctcccctgcgcccgtcaccacctcccccgcggacgtcgcctggctgaaggcccagctcgcgtccaactccctcctcctcgccgctggcggcggccacgacgcctggcaccgcctgcgcaagggcatcaacccccgcacacgagagcagcagctcttcgacatcaacaggtatgcctggcctgcacctgcactcctagtcccgaatcgctgctactcttgtccgtggagttgacatcttagtgttgcacaaccgcactgtagacaccatggcatctctcactatccggacgaagaggcaaccaaccacaccgcgctgccgtgccccggcgagctccttgtggaagagcaccacagcaactacggcgagccctgggccggtggccgtgacgtcttcgagttcctcgctaacgcctccgtgctgacgccaacggagcaggtccttgaaatcggatgtggtacgcttcgtgtcggcctgcatttcatccggtaccttgaggctgggaggttccactgcctggagcgggacgagctgtccctcatggctgcgctccggtacgaactgccggcgcaggggctgctttacaagcggccgatgattgtgagaggggaggatatggacttcagcaagtttggggacacagttatgtatgatctcatctatgcgagcgccgtgttcctccatatcccagacaagcttgtttggactgggcttgagaggcttgcggggaagctgaggccacatagaggccggatttttgtctcacataacattaagttttgctcaagactgggaggcgatgagtgcacacgacggcttgccaaattgggccttgagtatgtggggaagcacactcatgatagcttgttgtttaaccactacgaggtctggtttgaattccgcaggccaaaagtttagatcttgatggtacagaaagagagagtggttggcttctgtgatgcaattttggcagtttcaagcacagattaagccatgccttgtactgtttgaacactactgggacctgacttgagattgagattgatgttcgctcggtgcctaattcaagcatatgcatatacaccaaaagtcatgattgagcaatgctgtggtgcttcagtgtgtcttcccagtttcattcggtgagtggtggatgaaggctttagtttttattagcaccgattactgtatgttctataacttcagtaacatttctggtagaaactatgtgggtagctgatgtcaaagcagtaggatacatgcttctattccgaaagctacctctgtgggctgtggccaaaatagactcttacgagcacacatggttttgtaagctgtaacaaggataactttggttgtcttgtttttgcattttatagagcatgcacatttttatgctgctgt

SEQ ID NO: 109445 - DNA, 930 bp, Zea Mays
atgccgaggagactcaagactaaacttggaggtgctactgaagaatgtgactttgattcaaagggaaatctcggaaacctgctcctgatcattgtcccgactgtatgcgacgaagacgggaacccgtttggggatgattcaagcacttgccgctcacgcagtctctcctacttgtccttgtccatggctctgggttgcctcttcatatggacgcacacgtacagcctgatgcagaagtccggcaagctgtacaacaagatgcagtctaaaagcatccagtgcccagccgacagtgacgaggagcatgagcacgcgaaagaagatgggccagctggctgcgctgacgaggaggcacctcttccgacgtcagtcaagcctcgcgagcacgagcacggggaagaggaagaacaccaaatggaggcccctcccttgtcctgcgagagcgaggtcgctgacaaggggttctggacgaagctgaaagacgctatccaccagttcatcgaggagctgatggcaccgcgcaccatatccgcgataattgggttcgttgttggcctggtcccatggctgaaatccctaatcgttggcgacggagctcctttaaaagttatacaggattccctccagctgatgggggcttcggaagtcggggctaaagcgtgcggtgatcgtcgcgatcatgtgtgtccgcttcgtgctcctcccgctgatcggcatcgccgtgtccgcgccgcgtacgagctcggcttcctgtcccgtgacccgctgtaccgctacatgctgatcgccgtgcctcccgcgatgaatatcgaatcactgagagttgaagcaattcatgtgtctcaacagtatgatgtgataccacataccaggcatagtttcagaattgaatatgctgatgacacattcttcaagagaattttcagatga

SEQ ID NO: 109446 - DNA, 2126 bp, Zea Mays
cgtgtcacatgcgctcgagaatttttaggaaagcgtttcatctgcgagagtttcatttgggggctctaaaatagcctcaccctcctcgtgccttatcttcatctcacctgctctttctcctccgtgctgatcggcagtctctaagctttgcaacaactgatagccgaattccgcgcgccggtccctaaaaaaatgcaagtactaggaagtagataagatgcatttccctgtaatttttcgttattatatatactcagcacgggaaggaggggagacactctgttcaaccaccagccgagttcgcagcggcactccagggtccaggcccagcagcctcttcggctcttcgttgggggtgcgtggacaccggaaattgcctcggggattgcgttcctgatctaagcccggcatgaagggctgctcagagcgtttgctgctcctgctgctgctggcatcgtcgttgttactgtccgtcgtggttgccgcgcagcagacttgccctgccgacctcgacagcaaatgcgacggtggcgcgcctgatgactgggagggggaattcttccccggcgtcccgaaaatcaagtatgagggtccaacaagcaagaaccctcttgcttataagtggtataacaaggaggaagtcattctcggaaagaagatgaaggactggatgcgcttcagtgttgcgttctggcacacgttccgtggtactggtgctgatccttttggtgcgcctacaaaggtttggccttgggaggacggcacaaattcgttggccatggctaagagaagaatgagagctcactttgagttcatggagaagctgggggttgacaaatggtgcttccatgatagggatattgcccctgatgggaaaactctcgaagaaacaaatgctaacttggatgagatagttgagctggcaaagcagctccagggtgagaccaatataaagccattgtggggtactgcacagctctttatgcatcctcgttacatgcacggagctgctactagcccagaggttaaagtatatgcatatgcggctgcacaagttaagaaagctttggaggtcactcactacctaggtggtgaaaactatgtgttttggggtggaagagagggttaccaaactcttctgaacactgatcttaagagagaacttgaccatttggctaactttcttcaagctgctgttgactacaagaagaagattggattcaacggaacactgttgatagagcctaaaccacaggaacctacaaaacaccagtatgactgggatgttgcaactacgtttgcttttctacagaagtatggtcttaccggagagttcaagattaatgttgagtgcaaccatgctactctatctggacatagctgccatcatgaactggagactgcacgcattaatgggctgcttgggaacattgatgcaaacactggtgatcctcaagttggctgggacacggatcagttcatgacagacattgcagaggctactttggttatgtcaactgtggttaagaatggtggacttgcacctggtggcttcaactttgacgccaaattgcggagggaaagcactgatgttgaggacttgtttcttgctcatatctccggaatggacaccctggcccgtggcctccgcaacgccgccaagctgatcgaggatggttccctagatgctctcgtccgcaagcggtaccagagctttgatagtgagattggtgccttgatcgaggctgggaaaggagactttgaggcgctagagaagaaggtccttgagtggggtgagcccactgttccgtccggcaaacaggaactggcggagattctgttccactctgctctatagatggcgccatgtccgtagcggtagctcctggaataagcaagcactgagcctgcgccctcccaacgcgcgcggtcgtcctcaccagtcaccaccaagggaatgtttctggttgcgcgcgatgaaccatgtacaatacaccgtggaactgaaataaattgaaatagctagtcagaatttttagaactgttgcctctttgtttggaacggaatgaaactgaacttggttagtttgagcttatccttgcattttttctttgatgcggtggtt

SEQ ID NO: 109447 - DNA, 339 bp, Zea Mays
ggggtcggcgagccggcggcggcctcagatctgaggattcgcgaggggcaggcctacctgaggaggccgacgtcggcgcctggcgcggcgagggccgcgcatggtcccgcagaggtggtggtggggacgggtggtacggcgagtcccgccagcgcggcggcgttggggcgggcggcaggagcgggtcgccttcgccgccgtcgtgcctgcggccctcccggtacaaatagtcccttcgatccggcggtggcggaggcatccacggcgccgttgtcgtcgtcgccccagctgcggctgtgccagcctccgcccgccgcaaatcgcatgcgcacggcgaag

SEQ ID NO: 109448 - DNA, 522 bp, Zea Mays
aaacagtactgtgcaacatgacaatcgcattttattactctctattaaccaaccaaatacagtacaaagcaacaaaatagcattccaaccttttatgaaagaaaaaaaggtgttggtttggttccacaaccattattattgtttgctgtctcgctcggacgcatgccacttcttttcaatacataacaaaacagatacaccaaagggtactactacacaaggatgccttcatcgcctatcagacgccaccgattccgcagagaagagatacttcactcgagacagcaccgagtcgtgcgctggatcatatggatggtccttggatgggatctccagaatagcagggactggcttgttgtagctatccaccagaaatcttatcatgttggcaatctgtcacacgcaatagacatcagcagggatacagcttataagatggacgtttctctgatcacctagctactaccacattgcatgatttccacaatgctcctaaaacctttttcctcctttctcgtatta

SEQ ID NO: 109449 - DNA, 1667 bp, Zea Mays
aatttgcattattaaaatgccatggctttttacgcttcctgagcgctcgtcaccatgtacgccaagctgcgctgcatcagcatggatgatcccaggatggtcttcagtcttaattatgccatgatggctaacggcaacggcggccagatgtgacgctgaagctgggggtcggcgccagcgagtacgtctccggcgctctcatcgacttgtacaccaccaagcgaggcagcttggaggtgtcctggaaggcgttcggggagagggagaccgtccaccaccggagcctcattgcctggacggcgaactcaaagcgcgggacgtcggcgagaggctcgccagcgtcctgacggagacggaatccggcgttcgtgctgcggcctgcggcccgtttgtttccgattatttcagattctctggcggccagaagccgcgcgcctcgcaccccaaacgcccagcttctcgtgccgcggccgtcgtagaaggcttgtccgagaagccgagcagacccgtgacctcttcccccgcgcattagggttccgctctcatcctcggtgcccgctcagctcaccgccgctacttccggctaggccgtcgccgtggcgccccaccagatggacgagtctggaaaggcgatagccaagtgggatgctagagcagctaggatttacaatgaaatatgtgtagaagaggtcaatgcccacaacaggccccaacactttctcaactcagaagggtatgcaaacctcatcatgaaattcaaagaaagaactggacgaacatataccatagatcaaatgaagaatagatggaacacactgaaaagaatgtacatacaatgggagatactcaatggaagagctactggcctgggcagggatcctcacactggctcaatcagtgccaccgatgagtggtgggctaggcagaatgaatctatgcctggttgcttaatcttcaaaaatgctcctctcgagaatgagaacgagctccgcatcatattcggaccactaatgagtcaaccccccgttcctggagaagcaccaaaaccaaaaggatgcagcatcatcttctgatgatcacgaagacgatgatgcaagccttgtgggggagaacagcacaactgctcctaccaacaaacagaaagagaagagggctgtgtaccatgactctccgaagtctaagaagagaaaggctttgaaggatgaatatatgaagaggatagtggaagcttttgagacccgtattgccagctcaatcaaaactaagagtgaccctgtccgtgaagacatagctagtcaattaaagactgtcattgatgatggtaatgcagaaggcagtgacgagcacttctttgctacacaactgttgattgagaaacgctatcgcgatgtgtttgcgacgttgaagactaaggagggtagggtttcctggctgcgtcgcgcgtacgagatgattgacaggtcaaataagtagtagtagttgagagttagttttggtctctgggagtgaagagatgtcctaagctttctgtgcaaaccagtttgcttgtttgaatgtcggtttcaaatttcctgaactagctattccaagctactcttgggagttaccttgtttgtggattgacgtatttgttacaaataaagttgtggactgcaaaaaaaattaaa

SEQ ID NO: 109450 - DNA, 1635 bp, Zea Mays
atccaacgacccacactgagacgtcccctccccgctccgtcctctctcctctgccgccgagacgacgcgatggcggggtccgccgccttgccgccgctcgccgccttcgcgtcgctccttaccgcgcggcgcttcgccgccgccaggtccgcgctccggtccctgctcacgccgcgcctactggcggtgccgttcgcggacctcgccgcctcgtcgctcccgcgcggcgcgccgccgcacgccgtggtggcgttccacgacatgctcttccgcgcgtacgcggacgcgggcgcggcgtgccgcgcggccgaggcgctcgacgccgccgtgtcccgcctcggcagcctcgacccgcgctcgctcacgttctcgctgctctcgctccgccgcgccgggcgcctcgcggacgccgcgggcctcctggagcgggcgctcggctcgtgcccgggctccgtctcgccgttcgccgcgtccgtcgtcgtcgacgggctctgcaagtcggggcgcgtggacgacgcgcgccggctgctcgacgatatgcctcgccacggcgtgagtctgaatgcgctgtgctacaactcgctgcttgactgttacgtgcgacaaaaggatgacgggcgggtccaggagattctagagatcatggagaacgaaggcatcgaggcgacggtcgggacgtatacgatccttgtggatagtttgtcgaccgccagggacatcagcaaggtcgaggctctgtttaatgagatgaaggcgaataatgttgtgggggatgtgtacctgtacaccgctgtcatcaacgcgtattgccgagcagggaacatgcggagggccgccaaggttttggatgaatgcgttggcaatggcgttgagccaaacgagcgtacatatggtgtattgatcaaagggttctgcaagattgggcagatggaggctgcagagatgttgctggcagacatgcaagggcaaggtgtagggcttaaccaaatcattttcaataccatgattgatggctattgtcgcaaagggatggtggacgatgctcttaaaataaaggcggccatggagaaaattggcgtcgaactgaacatctacacatacaacacactggcctgtggactgtgcaggatgggtgtcgtgccaaattacgtcacttacactacactgatcagcatacactgcaaggatggcgacatggtggaggctagaaggctgttccgagaaatggcagagaaaggggcgacgcccagtgttttgacctacagtgttatgattcatgggtacgccaagaaggggaggatccgtgaggctgagaggttcagaaaggagatggagaagaaagggtttgttccagatgtatacacctatgcatcgctagttcatgggcactgtgtcaatgggaaggtggatgtggcgctgaagctattcgaagagatgaagcagaggggaacggaacctaatgtcgtggcctatacggctctgatatcaggtctggcgaaggaagggagatcagaggcggcgttccagctgtatgatgatatgctgaaagctggattgatcccagatgactccctatattctgcccttgtaggaagccttcacacagataaccggaaagatgttaaggtttcttag

SEQ ID NO: 109451 - DNA, 1799 bp, Zea Mays
tgatgagcaattcaaagaattaatctctggtcaacaagagctttgaccgcctaattttgtcgtgtagataggtagcggcggcgcgtgcgtgacagacatgagacatcacatgaggctgcacgagttggcgttgtcctcgttgaacatgctagactcctgcatgcccggcgggccgtacatgaactccgccggcaccatgggcgggaacccgccgtacggcaccacggccgcgggcgcgtagtacgccacgctcgagctcgggtgcgccacgttgtagcagctcagcaccgggtgcgccacgttgtagcagctcagcaccgggtgcgccgcgtagtacgggaaggcgccgccgtgcccgcgcgggctctcgggccccggcgacgcctgcttctcggccggggcctcgcaatcgccgctgtccttcggcttgtttggattcttgtccttcttgcccttcttgccgccgccgccgggcttgtccgcgccagcctcctccgcggcgtcctgctgcttccccggcgcaggggagcccttcttcgtctccggggccggctcgcatttgccagtcttcttgtcctgctggctgggtttcgccgcggcctcgcctttgtcggccttctcgtccttgctgagcttcgccgcggcctcgcctatgtcgaccgtcttgtccttgctgggttgcgccgcggcgtcggcgtagtcggccttcttgtccttggccggcttcttctcctgggccctagcgtccttgttggcggctgccgctggcaacgcggcaggcgcgacctcctcgggcttcttcttggcctcgacgggtgccggcgagctgggccagagcgccgcctgcttgccggccttgtgcaggcgccggacgagcgcgtcggcttccacgctgccggtgaccgtcaccttgtgctgcgccgcgtccaccgtcaccttgtacacgcctgaaggcaacagcaacagctagcccggtcagtcagcagcctgtctgtccttcgccagcacggtgaaacgtaggaccgcacgcacgtaccttcgatgctgtggagcaccttcttgaccttcttcttgcagccctcgcagtggatggacacccgcagcgcggtggtctgcagagagtaagacgtcaggcgatatgacagggaaatgcagcgcgtgcgtacgtgcagaagaagctctcgctcaccgtgtactgcagtggctctgctgcttcccctgacgccatggccgagagcgaggtagagtagcctgagcttcactggatgaccggagctgatcctctggctagcgctatctttctctgtgttgcagttgcagttgcaggggtggcaagcaatgccaggggagggggggatgattagccagctagtaacatttataatgcccaaccagcgtagccaccgtgtactgaaggaggagctcaggagcaagtaaatgttgacaccgacaggtggccccgcgcgtcgcaggggcctccggctccgggcgcggatctcgtccagaccagacccgcatttggttggtcacatcaatcattgcgagttggaggaggaggccgccgatgatgatgcatcacggttggcagtggcagctccctcattagcagttgttgttgttgttgattgctggtatatataacacgcacacgcacaaaatcgtctatttagcttttgcaagatcgtgcatgtgaccctgataatattttctctttctccttttctctctctcttttatgccaaatttatgactgaagagaatatgaccaacagatactgtcctatgtttaggaccatata

SEQ ID NO: 109452 - DNA, 1521 bp, Zea Mays
cagacctccaggctccagtgcacgacgacgaatcgccatagccatccagtccgtcgatcatcacaccacccggccgcatcatccatctgtccaccggccgccatggcgcaggcggagcgcgagcacctgagcgtggtcatgttcccgtggctcgcccacggccacatcaccccgtacctggagctggccaggcgcctcacctccgaggacggcggtgacgtcgacgtgaccgtgcacctcgtgtcgacgcccgtcaacctgtcggcgatcgcgcggcagcagacgccacggatccgcttcgtggagctccacctcccggcggcgctggacctgccgcccgcgctgcacaccaccaagcacctccccgcacgcctgatgccggcgctcaagcgcgcgtgcgacctcgccgcgccgcgcttcggcgcgctgctcgacgagctccgcccggacctcctcctctttgacttcctctacccgtgggcgccgctggaggccgcctcgcgcggcgtgcccgcggtgcacctcagcacctgcagtgccgccgccacctccttcatggtccactggttcggcagcgcccgcgccggccgcgcgttcccgttccagggcgttggactcggcggcgccgaggaggaggccaagtacacgtccctgctcctccgcgagcaccccgacggcctggtccccgagcgagaccgcctgctgctcagcctcgcgcgctcctcggggttcgtggccatcaagacgtgcgccgacatcgagcgcccgtacatgggctacctctccgagctcctgggcggcaaggagatggtccccatcggcccgctgctcgtggacggctccgacaccggcggcggtacgacgtcgcccgaccccgaccgcgtcacgcggtggctcgacctccagccccccgcctccgtcgtgctcgtctcgttcggcagcgagtacttcatgtcggagcagcagctggcgcggatggcgcgcggcctggagctcagcggcgagcgcttcgtgtgggtggtgcggttccccaagggagacgagggcgacgccgcggcgcgcgcgctgccccgcgggttcgccccggcccccgggcgcgggctggtggtggaggggtgggcaccgcagcgccgcgtcctggagcacccggcctgcggcgcgttcctgtcgcactgcgggtggagctccgtgctggagtccctggcggcgggcgtgccgatcgtggcgctgccgctgcacatcgaccagccactggacgccaacctggccgcggagctgggcgccgccgtgcgcgtgccgcaggagcggttcggggagttccgggccgaggacgtggcgcgcacggtgcgcagggccatgcgcggggaggagagccgcgcgctcaggcgccatgctgcggagctgcgggaagtggtggcgcggaacgacgcggacgacgcgcaggtcgccgcgcttgtgcagcgcatggcgcgcctctgcggcaagggacagcagcgtgtggccgtgcccaactgaactccg

SEQ ID NO: 109453 - DNA, 1421 bp, Zea Mays
ccgcccatacagcacaacctagggcatcaggagtgggaatcctcttcttctcgcgcagcatcgcctcccaagtccacaacttacgccgccgctcgctccaccgcgcaagaggctgctgctgccgctcacccacccccgctcgcgcagaaggccgccgcagctcttactactggtgccctaaacgccgatatccctgttcgcctccctttccccacccaaaaccccggccttcagggttccggcaccatgccgcagggagatcacatcgagctgcaccagaagcgccatggcaagcgcctggaccacgaagagcgcaagcgcaagcgcgaggcccgcgaggtgcacaggcgctcgaaggatgcccgcaatttgattggtgctaagggcaagaggttcgccaagaaacgctatgctgagaaggcacagatgaagaagaccctgaaaatgcacgacgaatcaaataaacgacagaaggttgatgatgatgtccaagagggtgctcttcctccgtatctgctggatcgtgatcagacacagcgcgctaaggttctcagcaacacaataaagcaaaagaggaaggaaaaggctggcaaatgggatgttcctctgccaaaggtcaggcctgtagctgaagaagaaatgttcaaggttctacgaactggcaagcgaaaaaccaagcagtggaagagaatggttactaaagccacctttgttggagctggatttacaaggaaaccaccaaagtatgaacggttcattcggccaactggtctgcgtttcaccaaagctcatgtgactcacccagagctgaagtgcactttcaaccttgacataatttctgtgaagaaaaacccaaatggtccaatgtacacttctcttggtgttatgacaaggggaacgatcattgaggtaaatgtcagtgagcttggtctggtaactcccgctggaaaagttgtttgggggaaatatgctcaagttacaaacaacccggagaacgatggctgtatcaatgctgttttgctagtgtagagccatagtgagattttgttgatggtggtgaatcgtcccatttgtatctgctccgatatgctattttttgaccatgtcatggctaatcccagtagtttgttgtgcaccatgggcataatgagcattctgtattcacgctgtgtgctacaaacatatatggagtaatataaattagcagtattttctttcgagctacaacgtactgtcttcgaaacagtgtcaaattggactgtttgaaatactacatagtggcatcgtgtgaatgttacatgctgatatatcgtttttgtttaattgtttgtttagcatgtttaattggtcttgtagtctatggtctgtttactcctaataatagccaaacgtttaggcgatatctgcctcgaataaagaag

SEQ ID NO: 109454 - DNA, 1393 bp, Zea Mays
aggcgcgccttctccctccgcttccgctccgtttggtttccaccctttccgcgtactccacgtcgccttctcccatctcctctttcctacccaccgccgccgctccagggccccgaaatgtcggacgaaggcggcaccggcgagccgctcagcgacagccagaagcgggagatcgccgtctggttcctctccaacgcacccgccggcgagatccactacgtcgccaaagatgtgcgcgcgctgctaggggacgacgcggtgtacgaggccgccgccgcggaggccttcccggagtacaacaaggcccgcctcgtgtccctcgagctccccgaccgcagtggcgacataatcatcacagcttatggggagattgacaagaacaattatctggaccccaggactgcgcaagttgctagtatagatcatatgaaacagacttgtacgaaactgaggcccgctgaagatgaagagcttccatcggcttacattgaagagtttaggtgtgctttagatgttgaattgtcaaaatatgttgctgaagcttatcccaaagggacctgtgccgtttattgtactagtggaaaggatatagagggaccaggagcagatttctgtttcgcagcagttatttctgctactaagcgtagcccacagaacttttgcaatggcagttggcgttcaatttggactatggaattcaattatgagttgcagtttgttgatattaaaggaaatatacaggttggcttttttacttaacaaggtagatgctcactattttgaagagggaaatgtccagctggatactaacattgatcgcaaggactccaccataatgcagtcacctgacgactgtgcagtttcaataactagcatcattcgacatcacgagtctgaatatttgtcatctctcgaggaatcttacttaaatttgtctgatgcaactttcaaggatcttcggagaaaacttccagtgacccgtactcttttcccatggcataacacactggcagtcagtcttacgagagaccttgccaaacaattagcgcttggaaaatgaagtctttgcaggccatgtcaccggatggcttcaagtgtttttttaatatccatgtgctgttctgtagtaatcagcattcttcatctctgagcttcccaatcccattgtaaatcaagaacacacttttttttttgtggagatgtaaaagatttcgccttccctagggtttctttggatgccgttaggaaccaaacagcctcttactgacgggtgtgaatcatatgtttcttcatcaatgctccaatctgatggattattgtaggtgttctgtatgagtttaaaaacaaggaccattcaaaaggaatgtgtgcgaaactatcctttggatagaga

SEQ ID NO: 109455 - DNA, 1437 bp, Zea Mays
ccgattggaggcctcttcctggagtcctggaccatcatctatcgtcaatcgtcgcgactcgcgacgaggcgcgccttctccctccgcttccgctccgtttggtttccaccctttccgcgtactccacgtcgccttctcccatctcctctttcctacccaccgccgccgctccagggccccgaaatgtcggacgaaggcggcaccggcgagccgctcagcgacagccagaagcgggagatcgccgtctggttcctctccaacgcacccgccggcgagatccactacgtcgccaaagatgtgcgcgcgctgctaggggacgacgcggtgtacgaggccgccgccgcggaggccttcccggagtacaacaaggcccgcctcgtgtccctcgagctccccgaccgcagtggcgacataatcatcacagcttatggggagattgacaagaacaattatctggaccccaggactgcgcaagttgctagtatagatcatatgaaacagacttgtacgaaactgaggcccgctgaagatgaagagcttccatcggcttacattgaagagtttaggtgtgctttagatgttgaattgtcaaaatatgttgctgaagcttatcccaaagggacctgtgccgtttattgtactagtggaaaggatatagagggaccaggagcagatttctgtttcgcagcagttatttctgctactaagcgtagcccacagaacttttgcaatggcagttggcgttcaatttggactatggaattcaattatgagttgcagtttgttgatattaaaggaaatatacaggtagatgctcactattttgaagagggaaatgtccagctggatactaacattgatcgcaaggactccaccataatgcagtcacctgacgactgtgcagtttcaataactagcatcattcgacatcacgagtctgaatatttgtcatctctcgaggaatcttacttaaatttgtctgatgcaactttcaaggatcttcggagaaaacttccagtgacccgtactcttttcccatggcataacacactggcagtcagtcttacgagagaccttgccaaacaattagcgcttggaaaatgaagtctttgcaggccatgtcaccggatggcttcaagtgtttttttaatatccatgtgctgttctgtagtaatcagcattcttcatctctgagcttcccaatcccattgtaaatcaagaacacacttttttttttgtggagatgtaaaagatttcgccttccctagggtttctttggatgccgttaggaaccaaacagcctcttactgacgggtgtgaatcatatgtttcttcatcaatgctccaatctgatggattattgtaggtgttctgtatgagtttaaaaacaaggaccattcaaaaggaatgtgtgcgaaactatcctttggatagaga

SEQ ID NO: 109456 - DNA, 1275 bp, Zea Mays
ccgattggaggcctcttcctggagtcctggaccatcatctatcgtcaatcgtcgcgactcgcgacgaggcgcgccttctccctccgcttccgctccgtttggtttccaccctttccgcgtactccacgtcgccttctcccatctcctctttcctacccaccgccgccgctccagggccccgaaatgtcggacgaaggcggcaccggcgagccgctcagcgacagccagaagcgggagatcgccgtctggttcctctccaacgcacccgccggcgagatccactacgtcgccaaagatgtgcgcgcgctgctaggggacgacgcggtgtacgaggccgccgccgcggaggccttcccggagtacaacaaggcccgcctcgtgtccctcgagctccccgaccgcagtggcgacataatcatcacagcttatggggagattgacaagaacaattatctggaccccaggactgcgcaagttgctagtatagatcatatgaaacagacttgtacgaaactgaggcccgctgaagatgaagagcttccatcggcttacattgaagagtttagcaatggcagttggcgttcaatttggactatggaattcaattatgagttgcagtttgttgatattaaaggaaatatacaggtagatgctcactattttgaagagggaaatgtccagctggatactaacattgatcgcaaggactccaccataatgcagtcacctgacgactgtgcagtttcaataactagcatcattcgacatcacgagtctgaatatttgtcatctctcgaggaatcttacttaaatttgtctgatgcaactttcaaggatcttcggagaaaacttccagtgacccgtactcttttcccatggcataacacactggcagtcagtcttacgagagaccttgccaaacaattagcgcttggaaaatgaagtctttgcaggccatgtcaccggatggcttcaagtgtttttttaatatccatgtgctgttctgtagtaatcagcattcttcatctctgagcttcccaatcccattgtaaatcaagaacacacttttttttttgtggagatgtaaaagatttcgccttccctagggtttctttggatgccgttaggaaccaaacagcctcttactgacgggtgtgaatcatatgtttcttcatcaatgctccaatctgatggattattgtaggtgttctgtatgagtttaaaaacaaggaccattcaaaaggaatgtgtgcgaaactatcctttggatagaga

SEQ ID NO: 109457 - DNA, 138 bp, Zea Mays
atgaacttcaagcggttctcacttactgacatcaagattaatatcaaacgtgtcccaaagaacacaaccttgatcaaggttctggaggaagctgatgtgaagaccaagttggagaatggctcatggggcataagctga

SEQ ID NO: 109458 - DNA, 470 bp, Zea Mays
ggaagatgatgagagccaggttccattccgttttggcatgcaaaaaggtgactgtttttagccaagaagatgatgagatccactgctcaaagcaagggcaagagttcaaagctcaagcccagagtctccacatcgagatcctccaatccccatggctgtgtagctgaataatggtgcaatggagctctttggcgacggcgacgacgacaggccaacgctctcgtccaacctcttggacttcatgcgtgttgatattagccttacatgttccataatccatatgcctggtgagtttgcacttctgacgagtacagtgctctgtagacagacttggattaagagcacaatgcatccttctctgtcctctctatttaaaatccataaccaaactcttcatccttccatgttttatttatttacaggacacaatgtttgatccggtctctctttcatgtggccacatattctgc

SEQ ID NO: 109459 - DNA, 221 bp, Zea Mays
gatcgattttgcatatacttatctttgtattgcgtcaatatgagaatatccttcctaaattatttatcttattaattattaacttagattttcccaagatcttggccgctattccaaattaaaatattctactattccgaagacaatgaaaataagtaggacccaaaaaatttgtggggttctattgatgccttgaataacatgtaatttttcctatagac

SEQ ID NO: 109460 - DNA, 2602 bp, Zea Mays
atgcgtgccgcgagccctccgctgccgtccctgcaccaccatgacccggaccacctgctccgcctagtggacgatctctgcgcgtcgggccgctccgcggaggcgcaccggcgcgcgtccctgctcctcctctccccggcgagccgtctccacgcgcgtgccgccgatgcgctcctgatccgcctcctgcgcgcccgcacgccgctcctcacgctccgcctcctccaggcgctccccgccgccgcgaccgcgcccgcgccctccctccccaaccgcaaccgcctgctcgcgcacctctgccgcgcggggcacgtgctcctggcgcaccgcttcctcctccgcatgggcgcggctccggacgccttgtcctacgccgcgctcctcgacgggtacgcgcgggcgcccgacgctcgcgccgtgcagaggctgctcgacgaaatgcccgcccgcggggtgccgcccacctccctcgcgcgcacgttccttgccaaggcgctcctccgcgcccgcgacgtcggcgcggcgatggatgtcgtcgacacagccctctggcccagcgcggcgggcggcgatcggctccgtgaggaccaggaggtcaccagcgcggcgttcgccaacctcgtgcagtgcctctgtgccgaggggttcttccacgttctgttccgggtcgccgaggagatgccgcagcggcggtgcggcgtgggcgacgacttcgcgtacgcgcagatgatcgactcgctgtgccaggccgggcagcaccacggcgcgtccaggatcgtctacatcatgaggaagagagggatatgcccgagcgccgtctcctacaactgcattgttcacgggctgtgcaccatgcccaagcctggcgcatgcctaagagcgcaccagctggtgatggaaggcacgagttttggataccgcccgagggaggtgacgtacaaggtgctcgtggacgagctgtgccgtgagaatgagctcgccaaggccaaggatgtcctggagctgatgctgcagcccaccgtccagtgtggccaggacagtggtggagatgcgggtgaggagaccaggacaaggatatacaatgtgtttcttggggcactgcgtgttgtggacaacccgagcgagcagcttggtgtgcttgtttctatgctgcaggctggatgcaagccggatgtgatcaccatgaacactgtcatccatggcttctgcaagtccaggaggacccaggaggcaaggaggatcatggacgacatgctcagcgggaagttctgtgctcctgatgttgtcacctttaccacactcatatctggatacctgggtgcaggtgatcatgcacaagcccttgatgtactgcgctctttgatgcctaggcgtcggtgctctccaactgtcgttacttacaactgtgtcctcaagggattgtttggcgttgggcaagttgatacagcaatgcaggtgcttgaggaaatgagtgccaataaggttgctgctgatcctgtgactcatactgtggtgatcaaagggctctgcgatgcagggctgctcgagaaggcgaaggaattttgggacaatgtcgtctggccgtcagggatacatgatgattatgtgtacagtgctgtcttcagaggtctctgcaaacagatgaaactggaacaggcatgtgatttcttgtacgagttggttgattgcggggttgctcccagtgtagtgtgctacaacatactcatagacgctgcctgcaaacagggatcgaataagttagcatatcagctagttaaggagatgaaaagaaacgggctagcaccagatgctattacttggaggattcttagcaaactgcatcactatgacgaggaagaacgagaggggaaccagcatcaaatgtttgatgtggatcgaatttctacagaaggcagagaggagcgtcttgtcttgactaaagataagatgcctttgctgccgtcatctgaaaattttcatggagttaatgaggatgataacgctgctgagactgaggaagagattgactatttaccagatatggctagtaaatctgaagccgaggaggttggatgctcaacaaaaatgacagtggaggaggcaccagataatactaagcaaaccaaagaacagggcaattgtctgagggataatccaacaaggggaacaacaattgacaaagctgatataacatggggagatggccttaagaactcggataatcaaccttcagtaaaagagccactctctacagtggtaagaaaggtgtttgggctcctgtagaacagttccttccttccagactactagactagtttggagggcaatagatcagctaattgaaactcttcagttgtattgtactggcaactctagagttaagatttccagaaacatatggtatttaatgctgttcggtttctctttctggttgtccgatttaacgtcctatctattgtgtatatatcttgtagtgatgcaaagtttctaatgatctcaaaaggcaatagcatagcaacacatttttctgggccgtgttatttctgaacaagctgtagttggtgtaagcattcctgatgaaaaattgaaaacaacaaaataa

SEQ ID NO: 109461 - DNA, 82 bp, Zea Mays
ttgctccgttgggtttgggtggagcggggtgcggggagcactaaacaagagcacccattgcccatttatatttagctctaag

SEQ ID NO: 109462 - DNA, 513 bp, Zea Mays
atggaggacgacagcaccgaagctgcatcctcagcccgtgctacggtaccgccgccgggctggacgcgtgcgctcgccaacaccggcgcgtcgggcctcgcggccgccagcctcgtcctgctcctgctctacctcaccggccgcttcctctggctctacaacaagaacgccgcgagggcagccgattcctcgcggacgccaggagcagcggctggtgcgtcgacgtcgctgctgccagcagcttctcctccgccccgccgcgacgttccgctgccgtcgtctctctcgaccatcccggtgttcttcgtcttgcacgtggccgcgcccggactcggcggcggggagaaggcggaatgcgcggtgtgcctggcggagttcggggagtgggaggccggccggcttctgccgcggtgcgggcacgctttccacgaggagtgcatcgccacctggctccgggtcagcaccacgtgtccactctgccgggccgccacggctccttgtgcatccgtttga

SEQ ID NO: 109463 - DNA, 1727 bp, Zea Mays
agtttctaatgcgatcccttttccttcttcctcttggcctgtctcgccaagaaaatagagagtcctgtaaaggcaaacttcttcctcttccctgggaatttcttctgagcagttgcatcgctgctatacacgactgcatgcctgcggttcaggatatgtccgagcgacatagtagaagcttcgcttgcgtcgtcccagacgcttttgtcatacccatctggtcccattagcttcatactcagtatctgccctattgacaacgttggtttcaagggaccctttgaaacaccgacgatatccatattctgagaatctctggaacggggagctggatgtttgaacctgggagggtcatggaccgacctcctcctgtgtccagtcgtggatcgacatctgcgaagagcctcttctactgcgctcttccctcggttagcagcatccaccctcttctgggcatcctgtagcgccttcttacattcctcaacctgtaatcgagcttcctccagctttctgagggagtcagattctgtcctgttagcttcatctacctgcaccattgcagcatcgattttctttcttgagcgttcatcagcctcctgagctttggcagcaagctcagagtactcttccaatgaaaggctcacatcttccatgccctgaagatcctcaactgaagcttcattgcgtagtaggatcttgatttcagcaagggcaagagcttctgctgcccttgccgcctcttctatcttcctggctgcacggcacctcacctcagcagtgccgatgctagctctcatctgctcaatttcggcagacagcatagcagcttccgatttggcagcactcgctgcattcctgagctgctctagctcagatgtcatcttcttgatctctatgaagatgtccgattgatcgtcacgcctcctctgcagatcccgcagcgtctgcagcttctgtgcagtccggttcagctcatcctccagagaagcaatcagtgtcgtgttggcacataccttctctcggcttctctccaccaagattctctctttcgcaatgtcgttccgcagcgactcgacggaggcccttatagctgcaagatcactcgtggtcctgtttagattggcttttgcctgctcaaggcccttcagcactgaagtaccaggagactggtgcagctgcacatgaagcgcgcccataaccacatcagtttcagcattctcaggctgcacttctgcaacctcttcagcggcagtgggcagctcggcttgaccccgaacactctcttcagggatgcaaaatgcaccggcaccttcgttctgtatctttagcttcaaatctgcgaccaccttcttggtggactccaactctttgagcacatcaagcgtctccctttccttgacgccgagctccttctctagctgcgcggtctgctcctccagatcggccagttcgtcgcccccctcctgcttctgcagcagaaggtacgcgaacatacgcttgatgaggtcggagctccaggcggcgctgccgccgaagcggtcgacggcctcgcgcaccgacttgaagggcgtcgaggtgtcgacctccgccctgccttgcaggccggcggcggcggaggcgccgggtggggcgagttcttgcgcctcggcctcgccggcgtcgttcatggggactcgtgcccctctcttctttcttgggttccgtccgtggggttttggttggggtgg

SEQ ID NO: 109464 - DNA, 1576 bp, Zea Mays
aaaagcaacacaacatccaatgggagttgggaggtgagcttaccctgcatcgtattcgtcggcacccaccagcaatctagcgcggaccaaccaactctacagcacatcttcttcctccttcctcgcttgctttgcttgatccatagcatagcctcgcacagcaggacgcatcacaagaaccaacaaaatattcacacatgacacaacgcggtggcgggcacgcacacggccggctcaagcagctcggtccagaacagcgcggcgtcggcgccgtcgtccttcaccacctccaccacggacacggcgtcggcgagcctaaccacgctcactttggccacgacgccgccctcctccccctccacgcgcacgcccctcttcccttccttccgcacgcggtaccctcccttccgcccggccgcctccacgcggcccagcacgcccgcggcggcctcgcccacgaacacccgctccttgcaccccccgcccaggaacagcgccgacaggtcgcacccgggggagaagctcaggatgtcgaacgcggtcggctccctgcccgcgtcgtcctcgtccgccgccgccccgacccacgcttcttcgtcttcatctcctccgccgccgtgcatcaggcgtcccatctcctcgtcgctggcgccgtgccggaaccaggggtgcgccacgatgctgtccgcgtcagcgcgcgccgacgggtccgggtgcagcacgcgccgcagcaggtcgcgcagcgcgggcgagaaccacgcggggcaccggaacctgcccgcgtagatcttgcggtacatgttcaccaggctcgcgtcgttgaagggcaggtacccggccgccagcacgaacagcacgacgccgcaggaccagatgtccaccttcgccgggtcgtactcgtaccccttccgcgacaggatctccggcgccacgtacgccggggtgccgcacgtcgtgtgccggaggaggtccccgccggcgccggccactgcgccgagcccgaagtcggccaccttcagcgcgccggccccgtccagcaggaggttctcgggcttgatgtcgcggtggcacacgccgcgcgcgtggcagtagcgcacggcgcacaccagctgccggaaatagtgccgcgccaggtcctccgtcatgcggcccgacgcgtccacgagcgagagcagctcgccgccggcggcgaggtcgagaacgaagtgaacctttgtgcgcgtcgccagaatctcgtggagccgcaccacgtggcggtgccgcaggcgccggaggatgcctgcttcccgctcgatggccacgggccggtcgctggcggcgcgcgggttggggaacgacttgatggccacggaccggccggtgcgcaggtcccgcgccaggtacaccttggcggacgcgccgcggcccaggaggccgccgagctcgtacctcccaaggagcacggtcccggcggcggatgcgacggcgccggtggcgggcggcatcgtggcggcggcgtttgctcggccggcgccgttgtaatggtcgggcgcgacggggtaattttcacgtaccacctcacgggccgatgatcgtg

SEQ ID NO: 109465 - DNA, 2227 bp, Zea Mays
cttagtgattatatatatagttttgtggttgatactttgtttattatttgacctctagcttggcagtaccggggttttcaataaggactaaacacgttagggaataatgcttccagaaagatgtgcttgtatgttgaagagctatcctgcgagggactcggcagagtagcatgccatactcatcatcatgcatatatcatttgctagatcttgatgaccttgaagctcaagagtatctttcacacgatggcttcttggatcaccatcttgggggagacgattgaagtcttgcattggtcctctttttcttgtcaaggataagcaagtacccgcgcgctatctgtgtgcacacacacgggcatgcatgcatgcaagatgatggcgggacataataaaagaaacattattctcatgcacaagtatgagatggggagattgcttggtcaagggaccttcgctaaggtctaccatgctcgcaacaccaggacctcagtaagtgtcgcgatcaaggtgatcgacaaggggaaggttgtgaaagtcggcctcgtcgaccagatcaagcgagagatttctgcgatgaagctcgtcaggcacccaaacgtcgtgcagcttaacgaggtcatagccaccaagaccaaaatatacttcgtgttggagtatgttaaaggcggggagctcttggctaaagtaaagcgaggaaggcttaaggaagatgtggcgaggaagtacttccaacagttgatctgtgcgctggacttctgccatagcaggggtgtctaccatcgggacttgaagctagaaaaccttttgctcgatgagaatagcgacctcaaggtatcggattttggtctaagcgcgcttgctgaatgccgaaggcaggatggcctgctccacacgacctgcggcacgccggcctatgttgctccggaggtgattaacagaaagggttacgatggtgcaaaagcagacatatggtcatgcggggtcatcctctttgtgctattggctggttatcttcctttctatgataagaacttgattgacttgtataagaagattgacagtgcagatttcagatgcccgacctggttttctactcatgttcggaggcttttgctaaggattcttgatcctactcctggtacaaggatctcaatagaaaaaatcatggagaatccctggtttaggcagggcttagatcatgcaaacctactacttagatataatttaaagactaatgatgcccctcaagtggacacggacaagaatgaagattttgatccaccgagcaccaacataacaacagatagcaagcaagaagacgaaaagaagcctgccaacatgaatgcatttgatataatatctcatctatcaagtggtttggatctctcaggtttattccaagaatctgacaagaaaacagaatctaaattcacttctaccaacacaagctcggcaatcatatcaaagattgaggatattgccaaggatttgcgactgaagttgactaaaaaggatggtggtttgttaaagatggaagcttcaaagcctggaaggaaaggggtgatgcgtatcgatgctgagatatttgaagttagcccaaacttccatctcgtggagatcaaaaagactaatggtgacactctagagtatcaaaaggtcatgcaccaagaaatgaggcctgcacttaaggacatagtatgggcttggcaaggtgagcaattaaagcagcagcaggaacaacaacaatagtcgtgttaaaaactatgagatagtgtataacgttttttaggcagattccaatattacatgcatttgtgtagttctcacttcattatcaattcttgttccccttgtattaccccctgcaacctgttttaactcggcgcgtcgactaaaacaggttgtcggatgcgtcatccaccccacgtctgtgcgcgcaaaaaaggaatgcatgcatgagtcaaacacgttccgtgcatgcgcgtaaatttaagaaatagatgtgtggcggtttctatttttaaatgctttattttctctataaatataggatcagtgcaacagtcatgcattttattacccgctgcatgcgcacaaatttatgatgtaaagaatatgcaataaaagaaaataaattggtatgcatagaaacaaaaaatgtatccaatgctttatttcctccataaatataggatcccttcaacagccatgcaactaaactcgt

SEQ ID NO: 109466 - DNA, 2090 bp, Zea Mays
tatacagcagctcaacgagggatcccacccacatcctcgccgcccgtcggcttgcattgcagttgcagcagcgcacaattaattggaagcgatcttctttcccgggtcatcaagtcctctcctcatcggccaaccatcacacagcacctccgcgagggatcccgcctctgcctggccgccgcccgtcgcctttgcagcaaggaagaagcgatcttctctcccgacaagtcctcgccggatctaagctagcgtgtggcttggcagtaccggggttttcaataaggactaaacacgttagggaataatgcttccagaaagatgtgcttgtatgttgaagagctatcctgcgagggactcggcagagtagcatgccatactcatcatcatgcatatatcatttgctagatcttgatgaccttgaagctcaagagtatctttcacacgatggcttcttggatcaccatcttgggggagacgattgaagtcttgcattggtcctctttttcttgtcaaggataagcaagtacccgcgcgctatctgtgtgcacacacacgggcatgcatgcatgcaagatgatggcgggacataataaaagaaacattattctcatgcacaagtatgagatggggagattgcttggtcaagggaccttcgctaaggtctaccatgctcgcaacaccaggacctcagtaagtgtcgcgatcaaggtgatcgacaaggggaaggttgtgaaagtcggcctcgtcgaccagatcaagcgagagatttctgcgatgaagctcgtcaggcacccaaacgtcgtgcagcttaacgaggtcatagccaccaagaccaaaatatacttcgtgttggagtatgttaaaggcggggagctcttggctaaagtaaagcgaggaaggcttaaggaagatgtggcgaggaagtacttccaacagttgatctgtgcgctggacttctgccatagcaggggtgtctaccatcgggacttgaagctagaaaaccttttgctcgatgagaatagcgacctcaaggtatcggattttggtctaagcgcgcttgctgaatgccgaaggcaggatggcctgctccacacgacctgcggcacgccggcctatgttgctccggaggtgattaacagaaagggttacgatggtgcaaaagcagacatatggtcatgcggggtcatcctctttgtgctattggctggttatcttcctttctatgataagaacttgattgacttgtataagaagattgacagtgcagatttcagatgcccgacctggttttctactcatgttcggaggcttttgctaaggattcttgatcctactcctggtacaaggatctcaatagaaaaaatcatggagaatccctggtttaggcagggcttagatcatgcaaacctactacttagatataatttaaagactaatgatgcccctcaagtggacacggacaagaatgaagattttgatccaccgagcaccaacataacaacagatagcaagcaagaagacgaaaagaagcctgccaacatgaatgcatttgatataatatctcatctatcaagtggtttggatctctcaggtttattccaagaatctgacaagaaaacagaatctaaattcacttctaccaacacaagctcggcaatcatatcaaagattgaggatattgccaaggatttgcgactgaagttgactaaaaaggatggtggtttgttaaagatggaagcttcaaagcctggaaggaaaggggtgatgcgtatcgatgctgagatatttgaagttagcccaaacttccatctcgtggagatcaaaaagactaatggtgacactctagagtatcaaaaggtcatgcaccaagaaatgaggcctgcacttaaggacatagtatgggcttggcaaggtgagcaattaaagcagcagcaggaacaacaacaatagtcgtgttaaaaactatgagatagtgtataacgttttttaggcagattccaatattacatgcatttgtgtagttctcacttcattatcaattcttgttccccttgtattaccccctgcaacctgttttaactcggcgcgtc

SEQ ID NO: 109467 - DNA, 2757 bp, Zea Mays
atggcggcggcggcgtacttgggcggccgcggccagggagcagacggcgggtggttcgtgccaggcgccggcgacgggtgggcgcccccgtgggggaggcgcggtgggggaggagcggcggcggcggcagctgcagcagcaggcgagagggagacgctggcggtggtgatggcgaggagggcgcctccgccgtcggcgatccgccgggacgcggtgcgcgttgcggaggcggccgccggcgaggtgctgctgcgcgtccaccccaccagggaggcggagcgccgccgccaggacgtcatcgcctacctcacacgactcatcggatcctccctcggctgcgaggtctttgcgtttgggtcagtgccgctgaggacgtatctccccgacggcgacgttgatataactgtactggggaacacatggttaaacagtacactcattgacgatgttcgcagcatgctccagtcggaacaggaaaactgtgacgctgagttgaaactaacaggcctgcacttcatcgacgctgaggttaagctcataaaatgtgtgattgagaatattatcgtggatgtctctttcaaccagattggcggtgtgtccacgttctgcttccttgagctggttgaccgtcaggttgggaaaaaccatttgttcaaaaggagcattatgttaaccaaggcttggtgctaccacgaaagtcgcatattaggagcccatcatggactgatatctacttatgccttggaaacacttgttctttacatattcaatatgttccacaagtctctgcatggacctctggaggtcctttataagtttttggaatattttagcaagtttgactgggatcgatatggcattagcttaaatggtcctgttgatttgtcatcattgccgagcttaactgtggaacccacagaagtacaaggtgagttattgcttggcaaggacttccatcaaggctctctggatagactcgttgtaattccaaatgagtttgacggatgcgacacacaatttcgccagaagtttttaaatatagtcgatccactcaaggcgaataataatctcggcagaagtgtcagcaaagcaaacttttatcgtattcggagtgctttctcattcggagcacaaaagcttggtcaaattctcttgttaccatccgagtacatttgtgatgaaatttacggatttttctcaaatacactgaagagacacggaaagggtgaaagactagacattgacgctagtagtgcattccaacccttgcttggtcccgagagtacacttagtgaagatggatcgatgtttaaatcttcttgcataaatgagggtgaaaacggaagttcatgtcattcatcagaactgcctgacatgggctcgagtgtgacagatgtgcataagaattcaggtaagtatttgcctggtctttttcaggatcttccttggaataaaatctggttcatggaatatgcatctgatttgaaagaaaatccacaaacttcagcaagttcaaggagccactcatccttttctcaagataatggtaatggcaacagtaaagagtgcttcgagaattatgcagcagaggaaggtttacaccagatcagtagattaaatgtgccgcaacagatttatgcagggcatccatcgcatagattggctaactcgactagtgcaaatatcttggatttctccagttcttgttttgttgatgagtcagattggactgctccccttgcaggaaaaaagctactcccacccttgttgctgtcaaatatgctggatctctcaggtgatctggagttgtacttgggatgccttcgcaaagttcagtaccacctggagtcattgtttgatgaactcctacaggctgttgaagaagcatgttttgctgatgtgctagatgaggattccttcaatatgccagacatgatcttgaagttaaaaactagcactagatcctcaagcctgccattagattcatctactgatagcgagagaaggaaattatctcctgtgtattgttctcatagcataggagatgattcacaacaatcacatggcgaggcacaagtggatatgttttggcagcagaacgtgccattgtcccccaatggatcaacatttccttcatctccttcaaccaattcagataattatcctgtttcttggttttgtttctctcctaagacgcatggaaccggcacatacattcccaatgtgagttatcaaacatacagggagcgtatcatgcttgaaagagataccatacgagcaagaaaacaaagacagaggttacctggtcgccggtattactcagccgagcaaggattttccggttcacaaaccgaagaagacaccatagctcaaagtgcaacgaaccaatcgcccaagaagcaaaacagtgtgcagcagagtggctattcaggcaagagcacagttccggatgcagatttcgtttgtttcagggagcatgtggcaacagaaggtggaaccaaacagctggcagtaggaagagagacaatgcctccatcatcgtcatcagggatagcacttgctcaaaacggccaaggaaatcgtatctgcgagccttcctcacccgccacagcagatttgttacatgcggcagaaagtttggagtttggatccttggggcctttctcgttgggacttgtctcaacttcaacacagtttgaggaagcattcccagcgctccccactagaaagagagctgaaggagccgagaaccactaa

SEQ ID NO: 109468 - DNA, 227 bp, Zea Mays
gcatttacaaactcaaattcaagtcaaagctcaaattttaaaatgaaatgcagaggcgaaaattccagcatgagatgcatcaacattttgttcatctatttatttatctattaatcctattaagaaatgctttcacaaaagaaaaccttgttacaaggtattccaaattcaaactcagattttaggtttaaaattcaaaataaatttaaagtcaaaactccaatatg

SEQ ID NO: 109469 - DNA, 5429 bp, Zea Mays
cagcagcgctgcagcgaccacccgcggctgggtgcgcgcgttcgttgtcccttccacatccaccggaaagctacgcctcctcctcctcctccaccacctcgtctcctctccactctcaatcgctctctctctctccgtgggcgatgcgctcagcctgctcaggtcagcgttgatctatcggagggaggactgcctgcgctcgccggccacccatggctatggcggcagcggcggcggcggctaccaagaggtgcatgaacccggcatgcggcgcgccggcgtcggtgctgggggcgggaggggactggaggaagggctggccgctgcggtccggatgcttcgccctactctgcgacaagtgcgggttggcatatgaacagtttgtgttttgtgatatatttcaccaaaaggaatcaggatggagagactgctcattttgtgggaagcgcctccattgtgggtgtgttgcttcaaagaactcttatgatctacttgacagtggaggagttcattgtgtcacttgcatgaaaaattcattagcccagtccgcttctggtcaagtggttccaaagctttttccatctccaatcaatctacgttttttcggtaaaagtgacgagttattgtcaagtagaaattttgaacagccaccctctcttacattggattccagaaatgatgatattgcttttgtaaataagagcaatcacctgttcatggtaaaaggtatagaggctggacaaagcagtaacatcttgagacaaaaagagatagagaatggttcaaggcagattaaatgggaacaaccaacccttagttttggggacatgggaaggcctttcctaactaggtctcaaagtgcattagagtcacctcaatgtactcgaagagatgacaataaggatccaactacagatagcacaagtgagtcattttcagaagcatgtctgagcatgagcctaggtattgcaaacaatgtaaacaggatggaggctacttcaacagcggaaaggcctgtgctattgtcaacaacagccattgctgaaggaagagaacttgccactacactatctccctttcaacacgcacaaagggcacggcatttcctgaccagacctccaaggattggtgaaggtgctgcttttgatccaacaagagacatgtttccacatcttcgtgttgctagaccacctgctgatggaaggggacgcaatcaattacttcctcgttattggccaagaataacagaccaagagctgcaacagatatctggagattcaaattccacgattgttccattgtttgagaaggtcctgagtgcgagtgatgcaggccgcatagggcgccttgttcttccaaaagcttgtgctgaggcatatttccccccaatttcccaaccggaaggtcgccccttgacaattcaagatgcaagaggaaaagaatggcattttcagtttaggttttggccaaataataacagcagaatgtatgtcttggagggtgttacaccatgcatacagtctttgcaattacaagctggcgatacagtgacctttagtcgtatagatcctggagggaaacttgttatgggctttcggaaggccacaaatactgtcagtctgccagactcacagatctcagctattgcaaatggttcccttctcagtgagacactcttttctactgcaaatgagaacataggtgtcgtaagtggttatcctggatttcttcactcaataaagggagccgcagatctccatccaaactctctatatgatcatcatatgaacttagttgatggggatgtcagttggaataaggcagataaatttggcagcaggccagatgagggatccttgcaatttttacaaaaacgtagtcacaatattggttccaaaagcaggaggttcttaatcgatgctgaagatgccatggaactaaagcttacctgggaagaggctcaagagttgttgcgccctgctcccactgcaaaaccaactgttgtgatgattgaggactatgaatttgaagaatatgatgaaccccctgtctttgcaaagagatcaattttcaccatccgtgcaacaggggaacaagatcagtggattcaatgtgacgactgctcaaaatggcgccggttgcctcttaatgttattgttgcgcccaaatggacatgcaccgacaactcatgggactcaaaatgctgctcctgctctgcgcctgaagagttgaccccaagagagttgcaaagtgttctgcagcagtatgaagaaatgaggaggcgaaagggcagttatggtctgaagctgaacgtcgctgaaatggatgcatccagccttgatgctttcgccaccgccgcagtatttggcgaagtcgggaaccaaggcagcgcctcagtggcgacaaccacaaagcacccccgacatcgccctggctgcacatgcatcgtgtgcatccagccgcccagcggcaagggcccgaagcacagccccgcgtgcacctgcaacgtgtgcatgacggtcaggcgccggttcaagacgctgatgatgaggaagaagcagcggcagtcggagcgcgaggaggcggaggccggcaagaagatcgcatgggtgaacagagacgagcctgaggggagcagcctgtcgagatccccgcagacgcttgacagcacccgagacaacagtgatgtgacggcgaccatgttggacaaggtgtccgacgtgaacaagcaggggcacatcgacgtcgacctcaacctccaccctgctgcccctgccgtccaggctgcgcagcagcagccccggccggtgagcatgatgggtctcttggaagtggcgggccggccgcttgacaactacatgaagcagaatggcctgacgagcctggtgggggagcaaggtggtggcagctccagcacggccacggtccctcctccggctctggtggagagtgaggagcggacgtccaacgagggcctcgtcccatcagcatcggcagagcgggaaccgaacgccatggccgtcgacgaggctggcgagaaccagcaggacaaggctgccgacgacgacgacgacgccgtcgctgccgccgctacttgacgtgattttttttcatggagctgcttctcctggaggctgggagtaacttacgtgtacgtatgaggcttgtgttggttggtgttgtaatctgacgcttaaacattggcttcaataactcatacagagtgagaacctgaaagtatcagtctagagcaagttctttttactggtgctgaaagtatcagtcttgcgcaacccaaaaggaggaaacaaaaattttagaccctccaaaattgtactcccctttggtatgtacaatctgaagtggtaacaaaaatgcactacttttttctaatagaactccgatccaagacatgcttgttttttgtttaggaaaaaaggctaggttcacctgattgtttctgatcttcttccatgtaatattttaacacatttttctttcgaacaaaatataactcagctgtttcaaaaccgtcaaaaaaaaacaacttatgattagctgctcctttttttactgctccaaggctggcctgtgagcaacattgcacccccaccacaggtcaggttcatccagcccatttattattctaaaaaaaaactctactccaaaagatgtgtccagcccagtgaagcccgaaaggaaagaagccagccgctcccgtgggcgacgacatggtcctgtgtccgtgtgaggtacacatgactacgggggccccacctccttcgttcccaatcccagatcccgcactctctttcagaacccaacacgccactgcctagctagtagctagcagagcagctagccaagcaacccagccgagtagccgaccagagagagcgagagaggcagagaggagcggacctgcccgtcgcaatggcgatgccgccgaagcccggcgacccgccgcagcgctcgcctgcgcggagccccaacctcaacctgccctgcccgctgccgccggtcccgggcgggccgcctgcgccgtcggccgccgggttgcccccgccgcgcgcgagtcaccaccgccgcgccagatctgaggtggcctttcgcttctcggacgacctggccggcggcgtgggcggcggcttcgacgagatcggctccgaggacgacctcttctccaccttcatggacatggacaagatcgccggcgccgaccgcgaccgtgccgccgagacctcctcgccgccgcgcccagccaagcaccgccacagcgcctcctttgacggcttcgggatgggggctgccgccggtggcctggccgggcagcaggacggcggcggaggcatgtttggagaggtgatggaggccaagaaggccatgtcttccgagcagcttgccgagctcgctgccatcgaccccaagcgcgccaaaagaataattgcaaacagacaatctgcagcacggtcaaaggaaagaaaatctagatatataacagaactggagcggaaggttcaaactcttcagacagaggctactactctttcagcgcagctcacactattccagagagacacaactggactttcggcagaaaatgctgagctgaagataaggttgcaggccatggagcagcaggctcaactgcgggatgctctaaacgatgcgctgaagcaagaagtggagaggctcaagatagcgacgggcgagatgccgaagtccaacgaacaattcaacatggggatgcagcacgtctcgtacagcggcccttctttcttccatctcccggagcagcacgtagacattcagctgccgcaccatttccagcagcctccgcggaacgtccagatgctgtcccaccccaactccctctcggatatggcgcagcaagactcgcttgggcggctccgggggctggacattggaaaagggtccatggctatgaagccagaggcagaggtcgtggtgaagtcagagggcagctctgtatctgcaggtgaaagcaacaccaccttctagctatacaatacatctgccttccaagaagcctccgtttggtttagagttcttttgttcatagtctgacatcctccttccttgagctgcttcgtccttctcagtaggcctattttttttattccattggttatatctactagttaacattggtcggttgccaatcgttgttgtcgtggtggctgatttctatagggacattgatgtgttggtttcgagtttgttgttgttgttgtgtgtgtggttggttgtttcgagctaggggctgaaagggcaccgagtgtttttttctccacctgttttagttttgttatagatttgacaacaatcgttatgatttctccttctggaaaggtgtacattgtgttgctatgctaatttgtagtgatatttttgatgattccaactgt

SEQ ID NO: 109470 - DNA, 617 bp, Zea Mays
aaaacttaacagtccgtatattccgctcataattcctcaccggcctgcctcagagagagaaaaagcggagattagcggcggcgatggcactcccggcgtcgagctccggcctcttccgcttcgtctccccgcgcagccgcccccaatccaccgacatcgtggctgccgcctcctggggagtcttcgccggcaccgccggcctctacctcgtccagccatttgactggattaagaaaactttcttcgagaaaccaccccaaccagaggcataaaaggcttgcaagtctgcaactttggtacttcacttttatccggaatggttcctgactgaagagaacttggataactcagcaaataatacgagaccccctcgtgtttccttgtttgttttttattattcagatgtaggcaatccccacgagggagacagggaacagagaaactgcttggttcacctgtgtctatataatactcctgtgttatccaacatgcatgttttaaaacctgtggcaaatatatcttgctgattaatattggactatgatgtcatgttcgaatgttcccatcactaaaaggaggaaaaacaatgatggcaacttggcgatgctttcctttca

SEQ ID NO: 109471 - DNA, 662 bp, Zea Mays
aaaacttaacagtccgtatattccgctcataattcctcaccggcctgcctcagagagagaaaaagcggagattagcggcggcgatggcactcccggcgtcgagctccggcctcttccgcttcgtctccccgcgcagccgcccccaatccaccgacatcgtggctgccgcctcctggggagtcttcgccggcaccgccggcctctacctcgtccagacaaagaagggaaaaagactggtggaacaaggaagccgcagaattcgaaagataacaagtgatatctacagcaaggcccatggttggaagccggttgacaggcgtctccagtgacattttgctgctgataatacatcttttgcttctggatgtattcagtttgtctgcttttggtagataaaaactagcttttagtcatttctggtgatgcgatgttcctggctgcttttgggatctatcctttgtagatattcagtgatgtctgttagactgtcggacttcttctggtttgctgtgttccttcagttgggtttcatacccctgtgtagctgataatgtggtaggcttatcggcttgtgactgttggatttgtcgtgaattctgtaagaactgtgtttggtttctatttcttaatgaaataggggtatcccattgtcaaaaaaataa

SEQ ID NO: 109472 - DNA, 1232 bp, Zea Mays
ggcttctattagccaatataggtctagcctgctcccaaaacttaacagtccgtatattccgctcataattcctcaccggcctgcctcagagagagaaaaagcggagattagcggcggcgatggcactcccggcgtcgagctccggcctcttccgcttcgtctccccgcgcagccgcccccaatccaccgacatcgtggctgccgcctcctggggagtcttcgccggcaccgccggcctctacctcgtccaggtcaggatcaatcggcctgctcgcatctcttatccgccgctggctcttctggatcgtggctcgtcgcacgtgtacaaggctcgtaggctcagcagtagattgttgtgtgtgatctttgatgagtcttctggatctgccgatgttatatctttcttagggatccgtttcccggcctggtaaacgattaagcactctattggggctgcccagtcaaacatttcctctggatctaatgatatggtgggcagaaggggatgcacatcccacgttttcgtgatgacctagccacctggaattgctatgtcaaacgtctctcaagaatccgaagatagctgcaataaacaaagtacttcaaacgttgaagtggagagaaactcgataccaggtcattaataagttactgatcctttttggatgtggtgctgttatttgggctatttggcgtactcgtaatgattgctgcttcaatgctaggctgattgatgatctatctaatgtgattttctcctgctgttattggattgatgcttggtctattcgacagacaaagaagggaaaaagactggtggaacaaggaagccgcagaattcgaaagataacaagtgatatctacagcaaggcccatggttggaagccggttgacaggcgtctccagtgacattttgctgctgataatacatcttttgcttctggatgtattcagtttgtctgcttttggtagataaaaactagcttttagtcatttctggtgatgcgatgttcctggctgcttttgggatctatcctttgtagatattcagtgatgtctgttagactgtcggacttcttctggtttgctgtgttccttcagttgggtttcatacccctgtgtagctgataatgtggtaggcttatcggcttgtgactgttggatttgtcgtgaattctgtaagaactgtgtttggtttctatttcttaatgaaataggggtatcccattgtc

SEQ ID NO: 109473 - DNA, 2402 bp, Zea Mays
accctttactactcccgccccactcttcctttttttttttcttttccgcgcggggatttgagttggaggaggcaggcagctgggttggggacgaggacgacgcgcagcgcaggagcaacgcccgagggaaagcagcgtacccatccattctccggatgtcccatggcaattccggacgccggagcggttcgccgcgtcagatgcccgaggtgccactgcgtcctcgaggagcccggcgccccagtgtaccagtgcggtggatgcggcgctagccttcgagcaaagaaccgcaccggcaccagcgcaggagacaccgacctgcctccgcctcctcagagcagccacctggacgccagcgacgtcgcgaccaccagcaggtccaggtccagcaccccgactcctcccgatgtcgggagcagtagcaggtccggcaccccgacccctccgcatggcgggagcactcctaacgccaccgcgactggccatgccgagtccgccgaccccgtgccgccgaggaatcgtgtttctgaccaagtggcgttggtcgagaagagggggcgcgaacagacttcggccgctcaggaggtccatgacggcagcgcaacaagaaatgccggtggaaacagagacgccacctctgaatcgctggatgattcagacaagaggacgaaacgccagatcgaatcgaccgatgctgcgagaaagaggcactcaggtgaagctgcagcgcagccgcagtaccaccagcaccaggacggtcatcaacaacttgcgccgaaaccatcagctgctcaacctgcacggggacaagaagaagaagaagatgcaggggaaaaggcgccgagcccatctcgtcgcgctgagctccaagaacaacatctggggcccctgcggaagaagattctcaagacggtggatgagctcaaaggcgacctctcccaacttttcagcaagtcccctgagctcaacgcgccacgcgcgcgcccacctcgtcttcccaaacaagaaggctacgtgtcccgcgcggcggcggcggcggcctcggtcctccctgccagagcgcgtcacgccgccgctgctaccgacggttaccgtggcagcgcagctcgtgcgccgctgaagccccgtcaagccgctgctcctcctccgcgtggcttgccgtcccggcgctaccgccagtgcagagcgcacccgggctcccatgacgtggagccgaggtcgtgcagtcacgggcacggctgctgccgccaccacggcaagccggagtgcagcagctgccgagggtactgctgcaggcccagagcgcagccgccggccgccaaggaccccaagcggcgcttggcgccccggaaccactgccggccggtgctcaagggcgcgccgttcatcgtctgctccagctgcttcaagctggtgcaggtgcccgccgacttcgccgtctcgtccaggacggtgcgcaagctccggtgcggctcctgctccaccgtcctctcctactcctacagggacccggccaggaagaaggcctaccaggactccgtcgaccggtgcagcacagtcggctccgagctgcacggcggcaaaggcgacgaagggccggacccgttcgcgccgttcatcgacggcttcgggctcagcagctactcgacggaggacgagcagcggctgcccgtctcgaggaacacgtcgttcgacaccctcgacgggaccaaaggcgtgggacgcctgcaccggctgatggggtacgggtcggctagcgagctgctgcgccactcccctgacctgtacgagagcttcagcgagcggacgacgcctgacgtgagacagcacgacaggaaagggaaagccgtttgcatcgacgatgacgacgacaactacgacgtcgatgactctgacgaggaagagtacattggcgcgctgaagcgatcagcggctaaagggtccggctggtcgctcccatggatgcccggcaaggggactccagcaacgggaggcattaggatcaggtaaataccaggaaaggattgtgtatattgcaggaataggttcaggtttggaattcgaatgggaattcctatcgttgtagttttctattcattttcagtgcggtattggatttataggctgtttgtttgccatttttttcgagcgcgaaaatgctgtaaaatgaaatgtaattattcagcattggcagtctcattatggctttgtttgggaacaagaaaattgatggtgcctgatgaagaaacggaagtgtataacaaagaaatatcgcagtatcttttttgaaagatattgttgcggtatgttgaaacacaagaactacaaacatgaatttgtttgcatgaggtgcaagcggagagcacttccattaataaatcaatgcttgtaattctattaaa

SEQ ID NO: 109474 - DNA, 936 bp, Zea Mays
accatttgcctacatcgttttagttgatgtgatagcatctgcagaacctgagtctttcttccatttatcatattggattggaagatcaaatattatacctcttgttgctagtttcattctcatttgacttccatgttactttcactaggtaaacactcctagtgttctatagttgacgcttgcatggaactatgatgctagttcatgattctgccaatgatgagttgcaattttattgcctacattgtttgactagtcttctgtgataagaagtgcaattactgaggcttgggtagagttatatatttgttgcatgcaatatccacttatcagtttcactgtcacttatatatttattggtatttttgggtatggatattatattctcgacttctctcctctcctacgaaccaaacatttcccgttctgaaaattcacgctctgttattgtgtgcgtacattgattgagtgaaaagagtgatagcatctgcaaagttctgaagctattctttgaaatcataccggaagactcctattttgattccaactctaacgagttatttcttttgttatctagtgtggatcttcacggtccgttgcaccaatcaaagctggattcgttgcgcaagttggtcggcggaaggcctaagcgcaaaccaaattggtcctttgcgctgcctgctctgttttggtcgtgtatttcttgttttttttcgtgtcatgttaatgcagctgaggttcggtttatgattgtcctatctttgtgtggctgaaatttgaggccataccaattcgacaatattacattattttgccggatggacattctgccgtgcaatgttgagagcaagatgtgtcaacagttacattttgtcttgcattcaaaagatccatcgaatgatggcgcagtcctgtggcggctggcgagtgtcactc

SEQ ID NO: 109475 - DNA, 1509 bp, Zea Mays
aggaccgatgtactgcgtccgatctaaatcaacggctcaggttgacactgagaggaggaaaagataagaggaaaggatctccaccgagaaaaccctaattcgaacaaccgcgccgccgtcaccgactcaccgtcgtctctcgctcactcgctcgcgctctccatccagatcggagcgctcggttcggataggggcgactaggaggtgaaggcgggcgcgtcagccatggcggacgaggagcacccggagaggagggaggaggcctccgaggtgagccggctctgtccccgtcgctgcgctgatcgagataggttgtttcagttagttctagttctagtgccgttcggttgattgccctgattcgatgcggttccagctagtgttgagcttgtgagttgtgggttggatctgaggttctgttccgccacatgtttatgtgtatgtatttttttcccttctacagcttgccccctttgatccaaccaagaagaagaagaagaagaaggttgtcatccaagagccttctgatgaagtggacaagcttgcagagaagacagaatcgctagcagttgcagaacctgctgaacttaacttcactggaatgaagaagaaaaagaagaagcaggtggatcttgattcatctattgatgaccttggagatggggaggacactcaaggtgatcaagttgtagaggaacaaggggacggtattgtgcttggaggtggccctacatatccttgggaaggaactgaccgggattataaatacgaggagctgttggacagagtgttcaacattcttcgtgagaacaacccagatcttgctggtgataggcggagaaccgttatgaggccacctcaagttcttagggagggaacaaagaagacagtttttgttaattttatggatttgtgtaaaacgatgcataggcaacctgagcatgtaatgatgtttttacttgccgaaatgggaacaagtgggtcacttgatgggcagcaaaggttggtgatcaagggaagatttgctcctaaaaactttgaagcaatcctgaggagatacatcaatgagtatgtcatctgcaatggatgcaagagccctgatactattttgtccaaagaaaatcgtctgttcttccttcgctgcgaacagtgtggatcttcacggtccgttgcaccaatcaaagctggattcgttgcgcaagttggtcggcggaaggcctaagcgcaaaccaaattggtcctttgcgctgcctgctctgttttggtcgtgtatttcttgttttttttcgtgtcatgttaatgcagctgaggttcggtttatgattgtcctatctttgtgtggctgaaatttgaggccataccaattcgacaatattacattattttgccggatggacattctgccgtgcaatgttgagagcaagatgtgtcaacagttacattttgtcttgcattcaaaagatccatcgaatgatggcgcagtcctgtggcggctggcgagtgtcactc

SEQ ID NO: 109476 - DNA, 1507 bp, Zea Mays
aaactggatcgctgccgttggcgccgccaccgccgatgtagggtggagcactcagcgtgccgtcgtcgcatgcggcctcgaacatttacgtctggccgtgccggtgctgggaaggaaggggatcgaggggcagcagaccgcagagagacgacagccaccgaggcaattccaactttttaaggtacttttccaggaccgatgtactgcgtccgatctaaatcaacggctcaggttgacactgagaggaggaaaagataagaggaaaggatctccaccgagaaaaccctaattcgaacaaccgcgccgccgtcaccgactcaccgtcgtctctcgctcactcgctcgcgctctccatccagatcggagcgctcggttcggataggggcgactaggaggtgaaggcgggcgcgtcagccatggcggacgaggagcacccggagaggagggaggaggcctccgagcttgccccctttgatccaaccaagaagaagaagaagaagaaggttgtcatccaagagccttctgatgaagtggacaagcttgcagagaagacagaatcgctagcagttgcagaacctgctgaacttaacttcactggaatgaagaagaaaaagaagaagcaggtggatcttgattcatctattgatgaccttggagatggggaggacactcaaggtgatcaagttgtagaggaacaaggggacggtattgtgcttggaggtggccctacatatccttgggaaggaactgaccgggattataaatacgaggagctgttggacagagtgttcaacattcttcgtgagaacaacccagatcttgctggtgataggcggagaaccgttatgaggccacctcaagttcttagggagggaacaaagaagacagtttttgttaattttatggatttgtgtaaaacgatgcataggcaacctgagcatgtaatgatgtttttacttgccgaaatgggaacaagtgggtcacttgatgggcagcaaaggttggtgatcaagggaagatttgctcctaaaaactttgaagcaatcctgaggagatacatcaatgagtatgtcatctgcaatggatgcaagagccctgatactattttgtccaaagaaaatcgtctgttcttccttcgctgcgaacagtgtggatcttcacggtccgttgcaccaatcaaagctggattcgttgcgcaagttggtcggcggaaggcctaagcgcaaaccaaattggtcctttgcgctgcctgctctgttttggtcgtgtatttcttgttttttttcgtgtcatgttaatgcagctgaggttcggtttatgattgtcctatctttgtgtggctgaaatttgaggccataccaattcgacaatattacattattttgccggatggacattctgccgtgcaatgttgagagcaagatgtgtcaacagttacattttgtcttgcattcaaaagatccatcgaatgatggcgcagtcctgtggcggctggcgagtgtcactc

SEQ ID NO: 109477 - DNA, 237 bp, Zea Mays
ctattttggcattgtactttggtccattttggactgttttcttctcttaatttaatgatgcgcagctcccctgcgcgtttaagaaaaaaaataacacaaaaatctgaaagaaagctagaaaggaagtgtgtgtatggaatgttggcactaagtggtgcaattgaaggttcaaacattcagctagctatggaatgttggcactaagtgcagtagcggaccccgctgctacgcttaggg

SEQ ID NO: 109478 - DNA, 94 bp, Zea Mays
aaatgctaaactattcagctcttcaaaatcttccgaacggaaccgctccttggtatgaaaaaaccgcaccatcccaattagctacagaatcaaa

SEQ ID NO: 109479 - DNA, 1736 bp, Zea Mays
cccaccaacccccgcaaccaacaatggcgcccgccgctgccaccggcgactacctagacgacgacgagttcgacgactacaacccgcacccctacgcgggcggatacgacatcaccgccacctacggctcgcctcgcccgccctccctcgccacctgctaccccgtcgcctctcccgccgcgacgcctgcacccaccgccccgcaggtgccgcggcctccgctccctcagacgcccgcacccgctccggcgccagcgccacagccccctaagccgagctcgccaccggccccggccccggcccccgcggcggagccgtactactggcccaagccgtacgactacggggacgcgccgcgtcacctgcccatgtaccccacgccggaggtgttccgcggctggccgttcctgccgccgccgccggggccgcactgccgctccacgtgcgcccgcgtccgcgcccgtgactactggaggcagtgcatgcgggggctggactacctcttcggccactccgacggctacggggagcgccacatcggagtcgactccctcggggtccccgtctacgccaaccggaaggggggcgtcgaggactccgtcgcagtcgaggtggcgccgccggccgtcgggactgtccagtggcacgacgccggcgaactgcagtttcagaacaacagatcgtcttggtatggtgacaccgaagaggaaacacattcttatgagcaacctacatacacttcatacgatcgatcttatgagcaacctacctatacttcgtatgatcgatcttatgaacagcctacctacacttcatatgatcgatcttatgaacagccttcctacacttcatatgatcgatcttatgaacagccctacagttttcacgctgttcccgatgagactacctggtttcctaatcagacctaccaggatgtctacaaagaggaggaaccacaattccaggaattcttctcgtatgatgaagacaataaaatttcgtctcaacctatttttagctacaatcagcattttggtgaacaatcactgcatattcatgttgagcctccagaaacagtttcttctcacaagctggagtactatgagaatttctcgatgtacaacaaccaaaatgatggtgataatctggagagttcaagacaatcatatgagacacagtcctatgtgcacatgccttacgatcaacttgaaccttataggccttcatggtctctgaattcaggatactatcaggcctgcacagaagggataactccagaatatgacaatcatacactggcatctgatgaaaactgggatatgtcaagcttatttatgtctccattctatcctcaagaaacacgatcttatgagcagtctcatggtgatgaaaatgtctaaattggaagagcaactggaacatgctttctgaagataatcatcagatagctaaattgggtgatggaactaaccatattagtcaattctggaacttcggagactacgcaacctatactgtatactctgtgttgtagcaatgttgcttcaggttcagttgtatttgtataactgtatttacatgctgactagagatacattcaccctatgttagatttttcagtttgcctaaagctgaagcggattttgcgtgttctatttcgttaccagagtcttgtctgtaccacaatactctgtgttatagcttcaaataaattattttcttcgttacatgagtgc

SEQ ID NO: 109480 - DNA, 518 bp, Zea Mays
cagaattgttttgtgctccatttgatcattgtttcttcacctttaacatagctgttttgtttctgacagtggcacaaaagaaaagttagaatggtttcaattggcaatttcaatggattatgtttttgtgttgatcaaatcagaatataggaattcttttgtgattttacatgcttctcctcttttgtgctagagtatttgtcgtcttcatttttgtgtaacaaaattgtgtgatatgtaacctgcagggtgatggaactaaccatattagtcaattctggaacttcggagactacgcaacctatactgtatactctgtgttgtagcaatgttgcttcaggttcagttgtatttgtataactgtatttacatgctgactagagatacattcaccctatgttagatttttcagtttgcctaaagctgaagcggattttgcgtgttctatttcgttaccagagtcttgtctgtaccacaatactctgtgttatagcttcaaataaattattttcttcgtt

SEQ ID NO: 109481 - DNA, 258 bp, Zea Mays
atgcccagaccgtggaagcgataccgaagggtctttatcaagcacgacgccgcatatgcatccacgctgaccatgggaccggacaacctcagccacaaggacctcagcatcggggtctctacagtgacccatgcgccggaagggatggggcaatacgccataccaggaatacgcctacgcatgatgaaatgtgacgctaaggaaatgacgaaagatgaagctatactgcatacttctctaaacctcacctcgagctga

SEQ ID NO: 109482 - DNA, 1969 bp, Zea Mays
attaacatcacacagcaaacttgaaatgcagacattcagaaccactcatcagagtcttttagaacaccaaacggacaggtagcagtagcagcagcagcagcaacgaagatgtcattcagacatggtcgctagccgtacatgcatgctatatattattcgtccattcaggaaccgaggacgcgaagacacagacagataacagctagagcggaggaggacgaattaggcggcggcggcagcagctaggtaaggttccttggattcatctagctcgtctctctgcgtatataagacaacaaggtgaactaatagtcaattaatatacagatagatgtatatacggcaaaagacaagcaacgtacgttcacgttcaccagggcaggatcttccagcgctggttgtcgcccttggcccactcccagaggacgacggtggtgccgtcgtggacgccgccgtggtccttgtcgccgtggaaggcgtccatgttgaggtagatgttgttcaccatgcgcacgcagcggaagccgtgcccgacgtcgcggctctccgtccacagcaccgactcgtcaacgtactcggggttgtagggcacaaggcgtaccgggtggctctgtcccagcgagtgcttgatggcttcgccggtgaccttgttcaccagcgcgaacgctgggtacccttcctcgtccttgatgctagtgctgtgcctcatgtccttcacccatacctggaactcgtccctggggttggttggcgccaggcacacggtgccgttcctgacggtgaggctgtacccttcgccggccttgcagtagacgcggacggtctgttcagacgccagagcgcgaggcaggttgctgtacccgtaccccgccgggtagcccccagcagatggaggacggtacccgccgtagccaggctcctgcacaggcacaggcggaggcggcggcgcgtagccccctgcagctgggggaggagggtacccgccgtagcctggttccacctgggcaggcggaggaggaggcgcgtagccccctgcagctggtggaggagggtacccgccgtagcctggttccacctgggcaggcggaggcggcggcgcgtagccccctgcagccgggggacggtacccgccgtagcctggttccacctgggcaggcggaggaggagcgtacgggcgcggcgcgtaggcctcgtccccccagggcagcaccttccagctctggttggggcccttgcaccactcccagagcaccacggtggtgccgtcgtgcacgccgccgtggtccttgtcgccgtggaaggcgtcgaagttgaggtggatgttgttgaccatgcggatgcagcggaagcccttgcccacgtcgtggctctccgtccacagcaccgactcgtccaggtactccgcgttgtagggcaccagcttcacctgcatacatatgcgtgtgtgtgtgtgtatttgtgggcgtgtaatgcaacacgtacgtacggtgagaaatcgagagagcagatagagacggccgcgccggcggcggacttacgggatgggactggccgagcgagtgcttgatggcgaggccggtggccctgttgatgagcgcgaacgccggctggccctccgcgtccttcaccttcgtgctgtgcctcatgtccttgtaccagtgctgcacatgcatgcgcaggcacaagtatacagatccatgaccaaccactatcgtcaatggcagaaagagagagagagagagagagagagagagaggcatgcctggtactcgtcgcgggggttggtgggcgcgaggacgacggcgtcgtggcgcacggtgaggcagtacgcctcgtcggcgcggcagaagatcctgaacagcgtctgctcgtgcggcggcggggcctggtggtgcccgccgtggccgtggtggtggtggtgcccgaacatgcttccttccctttcctgaagctgagacctcgatgtgaa

SEQ ID NO: 109483 - DNA, 150 bp, Zea Mays
ctatcaggacggggatatgcagggccggccaggtagacttgccgattgcgtcgtcagaaaagaacagcaagtgcctgtgcaaaatctggaagtcccaaattacagatcgtgtccatctcgagtttctcgtctcatgcgttgtgaaagttg

SEQ ID NO: 109484 - DNA, 1926 bp, Zea Mays
gatgatgggaggagggacgctgatgatggaccacggcatggcggctggtggcaaggccctgtacggcgagtgcttctttggagaggaagacctcgtcaacccggggccggcgccggcgaacgaggagatgacgacgatgaacttccccttggacgagatgatgatgagcgacgacgacgtcgacggcatcgaagagctggagcgccgcatgtggcgcgaccgcgtacggctcaggcgcctcaaggaggagcagcagcagaagagcggccgcccttccgccggctccggcgccaagcaggaggccagcagcagcaggcagcggcagtcgcaggagcaggcgcgccgcaagaagatgtcgcgcgcgcagggcgggatcctcaagtacatgctcaagatgatggaggcctgcaacgcgcagggcttcgtgtacggcatcatcccggagaacggcaagcccgtcaccggcgcctccgacaatctccgcgcctggtggaaggagaaggtccgcttcgaccgcaacgggcccgccgccgccgccaagtaccaggcagacaacgccgccgcgggaggcggaggcggcgtggcggccgccgcgctggcgggcccgcactccctgcacgtgctccaggacaccacgctggggtcgctgctctccgcgctcatgcagcactgcgacccgccgcagcgccggttcccgctcgagaggggcgtgccgccgccgtggtggcctcaggccgccgtgccgggggacctcctcggcccgccgccgtacaagaagccgcacgacctcaagaaggcctggaaggtggccgtgctcacggccgtcatcaagcacatgtcccccgacgtcgacaaggcgcggcgcctcgtccgacagtccaagtgcctgcaggacaagatgacggccagggagatcgtcacgtggctcgccgtgctcaggcaggaggaggagctctacctccagctgcaccccggcgcccgcccggcgccgtcctccgccgccgccgccgccgcgacgacgatcccgtttcgcgccagctccggcgagtacgacgtcgacggcgaggacaccggcatgaaccaccagccaccctccatggacgatgcgggccacaacaagttcgtcatggtcgcgcccgcggcgctgatgaaggaggaggccaccgacgccgagttcttccagaagaggagcgccgcggatccggagttgatgctgggcagcagcttccgcgcctacacctgcggcaacgtgcagtgcccgcaggggttcccggaccggaacgcgcgcaacgcgcaccagcacacgtgcaagtccaataacaacagcgtcggcgcggctgtgccgccgcagcttcgcgccactgagtccgtcttcccggcgccgttcggtccgcccggccaggcggaggcgctcggcggcctgggcttcgacctgcccgtggacggacagaggtcgctcgcggagctgatggacatgtacgaaacagccaacgtgggcggcgcgcccagcagcctggtggtgagcaacgtggacacggtcgcccctggcgtgcgggtgtccgccccgtttccgacgccgtgtctatttggcgacaccgtccgcaacgtgatacagcagagcgcggcggcgttctacggccgtggcgacgacgcgccgttcggaggcgacgtcgccgccgcgtcgccggagctgaggttcggctctggcctgaacgtggcgggaggcggcgcgttgcagccgcagccgcacaagtccacgggatcctccaacgccaattggttctactgactgactgcggcagaatcatggatggaatggagctttgttagttttagtcagtcctgtactacttatttaagctttgtaagcctgcaaatgtccagccataaaccacttcgttcttaatgggaacttccgtcttgctc

SEQ ID NO: 109485 - DNA, 1925 bp, Zea Mays
caaagcactggaagacgaaacggcacggacccaggagtggatcaaagcacatggaagtcgaaacggcacggctagtagttatatcatctgccgtgccgatccaaaccgaaccctattctttgcggtttccacttccaccaaacaatcctcagcgatgtcggcgccaccgccggctggcgagtaccaagacgacgagccgctgcagcgttcgaccgtaccggcgaaggcccccacagccaacggcgggctggccctgagcacgcagtgcgagttcccggccatcgcgaggagcgcgtcccgggacagattcgcggtgctcgtgcacgccaaggcgccgtccgacgtggcgcgcgcgccgctcgacctcgtcaccgtgctcgacgtcagctccagcatgaaggggcagaagctggagctcctgaagcaggccatgtgcttcgtgatcgaccagctcggtccaactgaccgcctatccgtcgtcaccttcgccgacgacgccagccgcctgacccgcctcagtcgcatgtcggactcggggaaggcctgcgcgaagatggccgtgttgtcgcttggtgtcctgaagaataccaacatcggccgcggcctccgtgtgggcgctcaggtgctagccggtcgccgggagaagaacgtcgtcgccgggatgattcttctctcggacggtcaagacacctccggcttctggccgaccgtcgggcccgacggcaccaagagctacgcagcccttgtgccgccctcgtccgcgccgatccacactttcgggttcggcaccaaccacgacgccgccgcgatgcacgctgtcgcggaggccacgggcggcaccttctccttcgtcggcaacgaggcggcgatccagagctcgttcgcgcgctgcgtcggcgggctcctctcggtggccgtgcaggaggcgcgcgtcgccgtcacgtgcctgcaccggggcgtctggatccaggaggtcaagtcgggcgcctacgtcagccacttgggcgccgacggcatcgctgccaccatcgacgtcggcgagctctacgaagcagaggaaaggcggttcctggtgctcgtgtacgtgccgatggtccggtcgacggaggaggtcacccgcctcgtcaaggcgaggtgcacctaccgagaggccgcgacgggcctggcgcgccacgtcgccgcgcgcgcagccgtggtgcagaggccgctggagctggcgacgctgcccgctccgtccgtggacgtggagcgggagcgcgtccgcctcgcggcgaccgagggcatcgcggccgctcgggtagccgctgacggcgggcagaacgccggcgccgcacggatcctcgagtcccggctcaaggccgtggaacagtcggcgccgggggaccccacgtgcgaggcgatcaaggaggagctgcgcgacctcagcgcccgcgtcggcgaccgggcggagtaccagaagacggggcgcgcgtgtctgctggtcggcatgagctcgcacgcgcagcagcgcgcctcggggatggacgtggaggcgacgagcaaggctagcgcgtacctgactcccaagatggaggagatggtggatctctcgcgtgagactgggagcagcgggaagcaggagcagccagtcaaacaggccaaggtagaagaagaagtgtaagggacgatctcgttcgtttcgaattctggtcgagctaattaatccaatttagctcaagtcttcaactatctatgtatgcgtagggctttcagtttgatctaccccaagtctgcagctcgttgctgatgtcgtttttataaacttggcatgtcgtcatgttatcgtatcatatcatcatcaccaccatcaagagaagtaatgctcatatgatcatgctcgtgtatgttcaaattgctgcatttacatatcatcatcaccaccagtg

SEQ ID NO: 109486 - DNA, 1719 bp, Zea Mays
cgatcatcggctacctaccagctcgctgttcttgctgaagccctggagctatatagcttcgatctgcgcagcacaggttgtctgtcgactagtgattagtgaagaagatggcggcgcgtgaccaccgagagctgagcggcgacgaggactccgtggtggcggccggagacctccgccgcgggccatggacggtggaggaggacatgctcctcgtcaactacgtcgccgcgcacggcgagggccgctggaacgcgctggcacgatgcgcaggtacgcggtgctgcatgctggttgccacgctacgagacgacgaccagactaataacacaatgaactgcgcatatgcagggctccggcggacggggaagagctgccgcctgcggtggctcaactacctgcggccggacctgcggcggggcaacatcacggcgcaggagcagctgctcatcctggagctgcactcccgctggggcaaccgctggtccaagatcgcgcagcacctcccggggcgcaccgacaacgagatcaagaactactggcgcacgcgggtgcagaagcacgccaggcagctcaactgcgacgtcaacagccagcgcttcaaggacctcatgcgctacatctggatgccgcgcctcctcgagcgcatcggctccgacgactccggggacggcgccttcgttatcgacgccgccacgccgacgccaacgccgacgctcctcacggccgccacgtggtgcgtggacgacgtcgagctgtcctgcaccaccgccgtgtcgtcgtcgtcgtccgtgtccacggacagcatgcaccagcagcagcagcagcagcagctcgtcgccgtgtccccgccgccacagcccgccgcctttggcgagagcaacaacgacgcctcccactacggtgtccacaacagcaacgctgctatgtccatgtggggggacacgctgtgccaaccaccgcactcggcgacgccgcacctggcgggcgccgggacctgcagctggtcagacgagtctctgctggtacctgatgccggcggcggcgtgtacgccgacatggggcttccggacctctgcgacaccgacaccatgtgggccgccggcgccagcgccgacgacgacctgtggtacacgcagataatggggctgtgaaattaaagcaagtccgccggcggccggttggatttggcctcatggatttctatctagcccggtggaagcggcgggcagcgagttaattaattagtattgtagatgacacacacaacacagtcagcagcaagaagtctacacaatcgtctagacgggctggaagaaggagaaggccattattggtgggcttttgaccgtgaagactgaaaccatgcgtcgtcttcgtcccactttggccgccaataatttttcttctccagttcttgcccattcattcgctgctatactttctagctagaagctagcagctttagtatatggtcatggtcatggagtagcagctagcagagcactatctagtttaccaccataaggtgtttgctttttttcttcctcatcctcacctccattgattctttgtgggtaaatatatcggagtggttattggtttgtaactttgttaagtgtctggtgatgatcctggaaagaaagaaacaaagaaaaaggtctcggttgaaataaaagctgaaacaccaatcaatgcctgcactgggtgtttagtttgttc

SEQ ID NO: 109487 - DNA, 97 bp, Zea Mays
ccgtaccatccccgtccttgtcgaagaggctgaaggcctccttgaactcggcgatctggtcgtcggtgagttggtccgccatgggcgtggtggtggg

SEQ ID NO: 109488 - DNA, 1659 bp, Zea Mays
attgtgctggagtttgttatgggtggagagctccatgatatcataccattatgctaatggagaacccaaaagcaggaaggggtctgaggttttccaagtggctccatctctcaatgtggctgagctgaagaaggcaaagggagatactcaaaatgtacaaattttactcaaacagttcaaataatcaataattcagtatacaaatcttactctgtccatggagctgaaggacgtcgttcgggagcatgatgattaagtccaagacagaagttcctcaccatgaaacagttgtagaattttaagcttacagaactcattgtggtggtggtggggagggcggctgagatgagggatatgttgttagttttccctgtacatagctcttgttttcagcgcctaagacctgataatgatgatctggaatgaatgaagaggtacatgaaacagatgagaaggctgtttcctgtagtgaatactggaatatggtgctgatatattcataggttcagaatataatgtatgttattagtcggtcaaacttcgggaagacaatgttgcctccaacaatacaacaccttgcactggatgtctgaatccatttgtttcagttgcatccaacaatacaaatcggcggtttggaataaatttgcacaaagagcttctgccacgataactgcagatcatcgcattaaaaacaaccggccatccattgatgctaaaaaaggtgaagcagaagttgatgtgtggaggtggtgggagggggaatgtagctacatatggtttcaactgcaaccaagacacagcagggagggcaatcattacagtttcacatgaatcaacagttctgaaaacacactggagggaagaacaaagcagcaactgcattgcctttcaaaaactacaactagcagaatgtttcactggaagtcgatgaaataagagttgcattgcatcttgactaatatgcaatgcacaatcctctctgccttgagcttatgcttctgtggctcacttggccatcatgaccttaacaaactcctcgtagttaatctggccatcaccatcgacatcagcctcacggatcatctcgtctacctcctcatcagttagcttctccccaagatttgtcatgacatggcggagctcggcggcagagatgaagccgttctggtccttgtcaaacacacgaaaggcctccttgagctcttcctcagagtcggtgtccttcatcttgcgagccataaggttcagaaactctggaaaatcgatggtgccgttgccatcggcatcgacctcattgatcatgtcctggagctcagcctctgtagggttttgccccagtgaacgcatgacagttcccagctccttggtcgtgatgcaacctgtacaagatacggcacaaccatttctgtaattataactaggtaaagtagtgactgaagagagaaataattcagcaagttagggagaacccagatgtcaaaaggtggtaatatcttaatcgaaaagtttgaaatgctatgtggaaagcagggcagtttctaagtggtaaatcatcatgttttgaccgagcacgcatagccactggaattgagccaatcagtgtgggtgccgtttccccaatagcagtcggtcccagttttcctttttgggggtcaa

SEQ ID NO: 109489 - DNA, 2348 bp, Zea Mays
actgtccatataaatatgtgatgcctctttgagtttgagccgtggcctcactcgtagtcgtagctcacacaatgggcgtgcagagagccagtggcgtgtccttgctccatgcactgcttgttgtgttctgggcattgtcttctcgtcgtgcgaaggggcagaacccatctggccacctgagcgtggatgcctcgccgcagaacgttaggaagatccctgataagatgtttggcatctttttcgaggagatcaaccatgctggagctggtgggttgtggtcagagctcgtaagcaacagaggatttgaggctggtgggcctaatacaccttcgaatattgatccgtggctgatcattggggatgaatcaagtatcattgttggaactgatcggacatcatgttttgaacgtaacccagttgcacttcggatggaagttctttgtggttctaaaaaaactaatgcctgtccatcgggaggtgttggggtctataatcctggctactggggcatgaacattgaaaaggggaaggtttataaggtgagcctgcatgttaggtcatcagatgcactgtccttgactgcttccttgacaagctccgatgggctacaaaagctcgctgctcataccatcacaggtagcaagaaaacctttgcaaaatggacaaaggtagaatttcatttgagatccaaccaaaataacagcaactcaaggtttcaacttacaacaagtaaaagcggggtagtttggcttgatcaagtatcagttatgccaatggacacttacatggggcatggttttcggaaagatcttgcttctatgttggccaatctcgagcctcagtttctcaagtttccaggtggcaactatgccatgggaaattatctacgaaatgcatttcggtggagtgagactgtgggaccatgggaggagagacctggtcactttaatgatgcctggggatactggactgatgatgggcttggattttttgagttccttcagttggctgaagaccttggggcttccccagtttgggtggtgaatgatggagcaagccttaatgaagaagtttccactaaaacaattgcatcattggttaaggatgttgttaatggcatagagtttgccagtggaggacctaagacaacttggggttctgttcgtgcagcaatgggacacccagaaccctttaagcttgattatgtttcaataggaaatcaagaatgttggatgctctactatagaggaaattaccaaaagttttactcagcgattaaatctgcctacccagacatcaacattatatcaagttgtgataggccaactatttcgccatccaaccctgccgatctttatgatgttcatgtctacacctcttcgactaatatgttttcaaaagctagtatgtttgacaacacaccacgtggagcaccgaaggcaattgttagcgagtacgctgtgaccggaaatgatgctggcaaaggaacactggtagcagcactggcagaagctgcatttctcattggattggaaaggaacagtgatgtggttgagatggcaagctgtgcacccctttttgtaaatgacaatgatcgcaggtggagcccagatgccatcgtcttcaactcggggcagcactatgggtgtcccaactattggatgctacacttcttcaaggaatctagcggcgccaccctccatcctacagccattcaggtctccagctacgatcagctggttgcgtctgccatcacttggcagaacgctaaagacaagagcacttacctcaggataaaggtggtgaatttcggcaatcaagctgtggatctgaacatatcggttgtggaactggccaccggcgtcaagaagtctggatcgaagcagacggttctaacgtccagcagtccgcttgacgagaactccttccagcagccagagaaggtggcgccagtgtcgagcccaatggcgaacgcggggcagcagatgggcgcttccgtggggccgtactccctcacctcgtttgacctgctgctggagccgagcaagcatgacagcgtgtaaaactgtcaactgaagaagcatgacagcggtgtacgtaaaggaggtcaaagatagaggagacaggtcagaggtcaaaattgagaccttgataccatattggattggattgtatgtatcaacaagttcaacctaaaagtttaagctgatagtgaaatgcggacagttcacattctaacaaatcccagtcaatgttgcatccaacaatactttgtacttgatgtctgaatccatttgattcagaagatagcgctttattgttttgccaatgcaaatacacatgcgatc

SEQ ID NO: 109490 - DNA, 84 bp, Zea Mays
actgttcttaatcgtatcgtaataattctatgtagacaatatcggagcacaagcttgagcataaagggaagcaacacagcagct

SEQ ID NO: 109491 - DNA, 2418 bp, Zea Mays
cccgacgctcccatgccgccgccgccgccgccgagcgtgcggggcttcctggacgcgcacttcgcctcccccgacgacctcgcggcggcgcccgcgctcgcggagctcttgcgccgcgagtgcgacgggctcgacgcctcgctccgccgcgccgaggcgcggctcggtgccgcggccgcgtcctggctcgcgcgctactctgaggcccgcgcaaacctcctccgcgtccggtcacgagggggacgcctcgttgcggaggacgacggcgccgaggcggtgaggacggtgggcctgccggcgctcgtgcgggagatccaacggatcgacaccatccggctctacgcggaagctactctacagctggaatctttggttggcaacctggaagatgctgcattttccattgttaggcaggccccaaagtcaaaactgtcatccatacttcgaaaatcgaatgaaactgaatggaagcaagggaagctgctccatgctgttgacgctgtgaaggatattgagcgagaattagtacggatcagcactagtaggccacagtgggccaaccttgtcatggctgttgattctagagtggacaaaactctttccattctgaggcctcaagcactcacggattatcgggctctactagcatcactgggatggccaccttcattgtcttcaccagacacagagaaggataagtacccccaaattccgaatcctctagtcttgatgaatgagggaaataaagcgagatactctcaaagcttccaagcactgtgtgctctccaacatgtgcaggggaaccgtgaatcacgcctgtgtcagacagcaaaagtgactcctgccctggcagatttgaagtatttcactaggaccgcttgcttcgacaatgggctttgggcgattgatgaattagttcaccctattgcttcaaggatggaatatcattttgtcaaatggtctgaacagccggagttcattttcacccttgtttacaagataacaaaagattttatggatggagtggatgatgtactgcagcctttgattgatcaagcaaggctagtaggattaagtgccaaggaatcttgggtaactggaatggtgaaaattcttgtaggataccttgagcggcaaattttcccggcacttgtctgctcttatcaggatcatgctactgttggaaaacctgaagtagattcctcttggttgcacttaaatgacgtaatgatttcttttgataaaagaatgcagcttctagcggattcaggaatccagaaaatgacatcactttctgaaggtctgtctaggtccttgtctgtcttttcaatatatgctgagcaccctgactggcttcagatatgggctgatgttgagctttgttcagcacaggataagctgaaatctgaaatggaagatgagacaagttggtcatgtagtggtcagcatgaccagcgtggtcacatggaaaattcaacgaagtttcttctctctacaagagaagactacaaagctcctccggtgtgtgaatttgttaccaaaactgctttgtcaatggttgaaagaggccgtgttctgccaaacaggggaatgcagatccagtataacagatcctcttcggttaggttcctgaatggcttttttcttgtattgcgcgaacgatgtgaagcattgcaattgtcgaacacggcactagaggatcattctttgtcaaaaacttcgtgtgcaattaacgccgctcgttactgtgaaaacgtgcttcgggaatgggatgaagatactaccttcttggatatgggtcctcaaggatctctgtatacagatgaaatcggctttttagtcaaattagggaccgatcacctggaacagatactgtcttgggttctgcttgagtttgaagatctgtcctgggaatatgttcagagcattggatcatggagtggacagaccatcttagatgatgagatcctggatgaagaaaacacaggagtgtctcctggttttgttcccagtctagatgttctgatggacaggaccgctaagttgaaacgatatcttaactccaaggatttccttgatctgtggaggagtatagcggaaggccttgactactacatctacagcagcatacgatgggccgaagtaagtttctctgatcctggaatcacccagctaagagttgatataaaagcacttctccacatctttaggcccttctgttcaagacctgaagcttttctcccttttctaagtgaatccctgaggttgttaaccatgaaaaaatcagatgcacagtgcttgctggaaacactaatggatgacacgaagagtgacgattgcctaaagcgtgaaggattgcaccatgtaaatgctagccaggctgcaaagatcttaagcagcaggaagtttagtgggtaa

SEQ ID NO: 109492 - DNA, 971 bp, Zea Mays
aaggtccatccaaccaaccacaagatcgaaacactaacaacaacatggacgccatctcctgcctagcgcctctgctggcgacctccatcgcagacgcggccatcgcccgggcgctccacttctcctcctcctcctcctcctcctcctccgtcgccgccaccaccaccaccatcatatcaccagactcctcctccgcctcctcccaccacaacgacctccccccggtgccggtgccggtgccaccgcacgccgcctccttccaccccgtgcgccagaaccaccaccaggcgctggcgctggcgccgaggggagcgcgcgcggggaagcgccggtcgcgagcgcccaccaccacctacatcagcaccgacaccgccaacttccggctcatggtgcagcagatcaccggcgcgcaggaggcggacggcggcgacgtggccggggtggacgtcacggcgctccaggtccaggcggccgcgctgctgggcgccgccgccgccgggagcccacagctgctgccgggcgacgacgaggcgtcggcgcttcgtcgccaccagctccaccccctcgaccttcagcagcagccatgcttcccgacgctggactcttggaacgtcatgtacgagaccaacagcagcggcgcgggaatgctgtgacgatcgagcagagcgccgtacgtcgccggctgccgacctgccgtaccgagtttcatacatgcgtgatgtgcatgcccgccaccaccgtagatgcacgtccggctgatctagctactgtgtactgtacaatagaagatggatcgagcagccgacagacacagattagctagcgtatctgctgtactgtatcagccatagaaccttgcttacgatccatatggattgcggtgagaacagagacgcaagcggtggctgcaaaggtgttgggtcatgtttgtttcagcttttttctaacaagtttttctaaaaatttgagta

SEQ ID NO: 109493 - DNA, 1508 bp, Zea Mays
gtgtgcagcactttccgctcccatttcgaaactcctgatcggccgaccgttgcttccaaccagccccgcctcaggcccccaacggctaccaaatcgccatcgccactttagagagagggagcgagggagctaggatggcgtccagagatgcgggcgccagccccagatccgcgccgcatcgccctggagcggtggcgcccaaggacggcgccgacctgctcagcccgcggttccgttcagccgccgcgctggccgggtgggacgaggagtccgtccttctcgccgcgatggtcgtcgaggacactcccgtccgcgagtcccgtcgcaagaggcgggcctccacctcctccgccggcggcagcgccggatccagcaccaggaagatgaggccgcgtaggcagtctccggccaagatcccgccggtggttctcgcgctcgacgatgacgacgacgacgacgcggcagtgaatgctgccaccaaggaggaagagaaagttgtcgttgtgggcgacaaggaggcgtccggatctggcgacaaggcggcgtccggatctggcgacaaggcggtggccacgggaaacctgccgtgcatggatcgcctccgggaggagctctcttgcgctatttgcctggagatctgctttgagccgaccaccacgtcttgtgggcacagcttctgcatgaaatgcttaatacatgctgcatccaagtgtggaaaacggtgtccaaaatgcaggcaattcatcagcaactcaagatcgtgcaccatcaacacagtgctctggaacaccattcagctgttgtttcccggtgaagttgaggcaagaaagaattcgacctcaccatgcgataaggacgcgagccgcagcccactcagagctaataggctatcacaaggtggcaatggtatgagaactagaactaggagcaggagcagcagcaccgaagctagaacaagaagcagctacaggagcttcatggaacccggcagtacaacaagcaccaacactggtgcgaacttcatcagcgcacaagtcaacacaagaagcaggaggggcttcgtccaggcctcgcagctgctgttgcctaggaggagcgcagtaaggttggaccaatccgaagatgctgcgttggcttacaggttgcaacaggaggagttcatgaatgcctttgaggagcctgagcaggagaggcagcagccacggaacgccgtgtccacagcacgagacactctgagagccatcgcctcccgagccgtccgcctccgtgctcgaggctggcatgtttaatattattctttcgtcaactactttacacaaacctcttgtttgttattctactgtgtaatttttttttaagtaggctgacccaaatttggatggccataatcataatcctttggcgcatggaacatttgctgttgtacacagtactgttcaacacatagccatttgtccgatttttttgtatttttgtcctttttctggaaaaaaattaacgtttagacc

SEQ ID NO: 109494 - DNA, 1352 bp, Zea Mays
cgaaactcctgatcggccgaccgttgcttccaaccagccccgcctcaggcccccaacggctaccaaatcgccatcgccactttagagagagggagcgagggagctaggatggcgtccagagatgcgggcgccagccccagatccgcgccgcatcgccctggagcggtggcgcccaaggacggcgccgacctgctcagcccgcggttccgttcagccgccgcgctggccgggtgggacgaggagtccgtccttctcgccgcgatggtcgtcgaggacactcccgtccgcgagtcccgtcgcaagaggcgggcctccacctcctccgccggcggcagcgccggatccagcaccaggaagatgaggccgcgtaggcagtctccggccaagatcccgccggtggttctcgcgctcgacgatgacgacgacgacgacgcggcagatggcaaatcgatagtgaatgctgccaccaaggaggaagagaaagttgtcgttgtgggcgacaaggaggcgtccggatctggcgacaaggcggcgtccggatctggcgacaaggcggtggccacgggaaacctgccgtgcatggatcgcctccgggaggagctctcttgcgctatttgcctggagatctgctttgagccgaccaccacgtcttgtgggcacagcttctgcatgaaatgcttaatacatgctgcatccaagtgtggaaaacggtgtccaaaatgcaggcaattcatcaggcaagtcttagctgtgcaatctcgacaagcgatgtgtaaaggctttgactaaattattgtatctctctctgcagcaactcaagatcgtgcaccatcaacacagtgctctggaacaccattcagctgttgtttcccggtgaagttgaggcaagaaagaattcgacctcaccatgcgataaggacgcgagccgcagcccactcagagctaataggctatcacaaggtggcaatggtatgagaactagaactaggagcaggagcagcagcaccgaagctagaacaagaagcagctacaggagcttcatggaacccggcagtacaacaagcaccaacactggtgcgaacttcatcagcgcacaagtcaacacaagaagcaggaggggcttcgtccaggcctcgcagctgctgttgcctaggaggagcgcagtaaggttggaccaatccgaagatgctgcgttggcttacaggttgcaacaggaggagttcatgaatgcctttgaggagcctgagcaggagaggcagcagccacggaacgccgtgtccacagcacgagacactctgagagccatcgcctcccgagccgtccgcctccgtgctcgaggctggcatgtttaa

SEQ ID NO: 109495 - DNA, 606 bp, Zea Mays
atggcgtccgcggggcgccccgccgagcggaacgccgcggcgcggcccacgaggcaggccgtggcgaaggggtgcggcagcacgctgcggcgcgtgtcgagcaccttgttgaaatggcgcacggcctcgccggggaagccggcgtccagcgccgccaccgcggcggcgcggcggcggaggagcagcttcacgtgcgccagcagctgcgacacggactccgcccttgtattggcgggcgccagcaggttcgacgggggcgggaacctgtcctccgaccagcacacgctctcgcgccggaacgccgcggaggcgaggcggcgaccggtttggagaagcaccaacgcgtcctccatcaggccgaggtggaagcaagcctggcccaggaccaagtacctccactggtgggcgtggatgctggagaaggtggcgaccaggcggcgcttgaggccggacacgtcgaggcagcacaggaagcggccagcgtcggggcggtcgtggtccggtgacaggagatctgccccggagccagacgagcaggatgaggaggacgaggcggtggtggcgtcgtcggccgagcacgacttggcgcagcagctggggatgtag

SEQ ID NO: 109496 - DNA, 664 bp, Zea Mays
tggattgtgtggtgatggatgatgaatggattgtgtgcaaagcataggatgctcctactgccgctgccggacaagaatccctgagctccatttattcctccttgcagcagcaaagcaagcatcgtcagcctgcctcgcgtctcgtcgaccatccaaatccactcccttctctagtccaaggagctcaggaggtcgaggaagaaggaatggcgccgtcgtaccggccctaccacgtcgccggcgaggatcagcagcgtaaggtgaaggcgggtgggaagtggttggccgcgtggagcgtgctgggtgttggcggcgacccggcggagatgaagcggcggaggcgggtggccagctacaaggcgtacgcggtggaaggcaaggtgaaggcgtccatccgccggggcatccgatgggtcaaggccaagtgcgaccgcatcgccgccattcacaactagctagtagagcagagctgagctgagcatgtcgtcggttcctttccttgtgcgcttgcattgcattgcattgtgtttttacctgttcaggatccatttccatttaccagcttcttgttgttgttgttgttgttgttgtcacatgtatgtgcatgatccattctgaacccggttttaatccgaaacaaatcagccactagagcaaagttcat

SEQ ID NO: 109497 - DNA, 2286 bp, Zea Mays
aagatcaacggagactccctgtccctacatactcgtcgtcacccacgcacgcgcttcagcttcagcttcgtcctcgtcttcgtcttcgtgtcatcgtgcgtgtgtgcgcttggacggaaacggcctctcatcctccgacgacccagactcgatccactcaccaccaccggcttattcgtttatacggaaacagattcagcttctgtgcctgcttcagccatggccatgctgcccgtcgtcgtccgcatggccgccatgcccttcatcttccttgtgctcctcgcgcacaccgcctcggcacagcccgacgccggctgcaacgggatcctcctcacctacacgctgcagcgccgggacaagatcaggcctcacgtggcggcgcccaactcccagccctactccttcagcgccagcgccaccgtcgtcaacgccggcacccgcccgctacgctcctgggcgctgctgctcaccttcgtgcacggcgagatcctcgtctccgtcgacggggccgtgctcacctcgggcgccgccctgccctacaacaccacggcgggggacgccgccggcaggcccacgcccacgtccttcaccgggtacccgcagacggacctcctcaccccgatcgccacggccggggaccccgccaagacacaggccacggtcagcctcgtaggcacgctcttcgccgggccggagccctacgtcccgctcccctcgtttctctcgctcgccgacccttcctacacctgcccgccggccaccaacgccacgtcgtcgccgacgaacctcaccacctgctgcgtgttcacggcgggtggggaccccaccggcggcctggtggagagtggcttcctcccgcgccgcaccggcgacctggtcatcacctacgacgtgctccagtcgtacgacaccacctacctagcgctcgtcacgctggagaacgacgcgctgctcggccgcctcgacgcctggcagctgtcgtggaggtgggagcacggggagttcatcagctccatgcgaggcgcctacccgcgggaggtggacacggccgaatgcctctacggtccccagggccagtactacaaggacctcgacttctccaaggcggtgctcaactgcgaccgcaggcccgtcgtccacgacctgccgccgtcgcgggccaacgacacggagatcggccggatcgaccactgctgccggaacggcaccatcctgcccaagtccatggatgtcgcgcgctccaagtcggcgttccagatggtggtgtacaagatgccgcccgacctcaaccggaccaagctctacccgcccacagggttcaacgtcaccggcgccgcgtccgcgctgaacccggagtacgcgtgcgacccacccatctcggtgagcccgtcggagtacccggaccccagcgggctcacgtcgatcacggtggccgtggcgacgtggcaggtggtgtgcaacatcaccacgtcgcccaagaagccgcccaggtgctgcgtctccttctcctccttctacaacgagtcggtggtcccctgccggacgtgcgcgtgcggctgcccctcgtccgcgccgacctgcagcaccacggcgccggcgatgctgctgccgccgcaggcgctgctcatgccgttcgaccggcgggccagcgaggcgctcgagtgggcggaccagaagcacctcggcgtgcccaaacccatgccctgcggcgacttctgcggcgtcagcgtcaactggcacgtcgccaccgacttcaccggaggatggagcgcgcgcctcacgctcttcaactgggacggcacggacatgccggactggttcacggccatcgtcatggacaaggcgtacgacggcttcgaacaggcctactccttcaacgccacgggcgtcgggaacagcaccatcttcgtcaggggcgcccagggcctcaacttcctgctcggggagaggaacatgagcggcgtagattacccggtgcccgggaagcagcagtccgtcttctccttcaccaagaagaagacccccggcatcgacatcatcgccggggacggcttcccgtccaaggtcttcttcaacggcgacgagtgcgccatgccattgaggattccgagccaggggaccagtgtcgtcgtccctatgcagctgtgtttgcttgtttccgctttcatgttattgctgctgtaataataacatttgcgatttttgctcatcatagctattcatctatgtaattttttttattaaaaaaatcaacagctctaattcagcaataacacaaggagtatt

SEQ ID NO: 109498 - DNA, 2421 bp, Zea Mays
cttgccccctctcactcctctctcatcgatcagaagcaggagagatggttcctgcacttgctgacgccaagcactatctttcatatcgccgggccggcctcttttaccatttctttctctttctctgttttggacaagatcaacggagactccctgtccctacatactcgtcgtcacccacgcacgcgcttcagcttcagcttcgtcctcgtcttcgtcttcgtgtcatcgtgcgtgtgtgcgcttggacggaaacggcctctcatcctccgacgacccagactcgatccactcaccaccaccggcttattcgtttatacggaaacagattcagcttctgtgcctgcttcagccatggccatgctgcccgtcgtcgtccgcatggccgccatgcccttcatcttccttgtgctcctcgcgcacaccgcctcggcacagcccgacgccggctgcaacgggatcctcctcacctacacgctgcagcgccgggacaagatcaggcctcacgtggcggcgcccaactcccagccctactccttcagcgccagcgccaccgtcgtcaacgccggcacccgcccgctacgctcctgggcgctgctgctcaccttcgtgcacggcgagatcctcgtctccgtcgacggggccgtgctcacctcgggcgccgccctgccctacaacaccacggcgggggacgccgccggcaggcccacgcccacgtccttcaccgggtacccgcagacggacctcctcaccccgatcgccacggccggggaccccgccaagacacaggccacggtcagcctcgtaggcacgctcttcgccgggccggagccctacgtcccgctcccctcgtttctctcgctcgccgacccttcctacacctgcccgccggccaccaacgccacgtcgtcgccgacgaacctcaccacctgctgcgtgttcacggcgggtggggaccccaccggcggcctggtggagagtggcttcctcccgcgccgcaccggcgacctggtcatcacctacgacgtgctccagtcgtacgacaccacctacctagcgctcgtcacgctggagaacgacgcgctgctcggccgcctcgacgcctggcagctgtcgtggaggtgggagcacggggagttcatcagctccatgcgaggcgcctacccgcgggaggtggacacggccgaatgcctctacggtccccagggccagtactacaaggacctcgacttctccaaggcggtgctcaactgcgaccgcaggcccgtcgtccacgacctgccgccgtcgcgggccaacgacacggagatcggccggatcgaccactgctgccggaacggcaccatcctgcccaagtccatggatgtcgcgcgctccaagtcggcgttccagatggtggtgtacaagatgccgcccgacctcaaccggaccaagctctacccgcccacagggttcaacgtcaccggcgccgcgtccgcgctgaacccggagtacgcgtgcgacccacccatctcggtgagcccgtcggagtacccggaccccagcgggctcacgtcgatcacggtggccgtggcgacgtggcaggtggtgtgcaacatcaccacgtcgcccaagaagccgcccaggtgctgcgtctccttctcctccttctacaacgagtcggtggtcccctgccggacgtgcgcgtgcggctgcccctcgtccgcgccgacctgcagcaccacggcgccggcgatgctgctgccgccgcaggcgctgctcatgccgttcgaccggcgggccagcgaggcgctcgagtgggcggaccagaagcacctcggcgtgcccaaacccatgccctgcggcgacttctgcggcgtcagcgtcaactggcacgtcgccaccgacttcaccggaggatggagcgcgcgcctcacgctcttcaactgggacggcacggacatgccggactggttcacggccatcgtcatggacaaggcgtacgacggcttcgaacaggcctactccttcaacgccacgggcgtcgggaacagcaccatcttcgtcaggggcgcccagggcctcaacttcctgctcggggagaggaacatgagcggcgtagattacccggtgcccgggaagcagcagtccgtcttctccttcaccaagaagaagacccccggcatcgacatcatcgccggggacggcttcccgtccaaggtcttcttcaacggcgacgagtgcgccatgccattgaggattccgagccaggggaccagtgtcgtcgtccctatgcagctgtgtttgcttgtttccgctttcatgttattgctgctgtaataataacatttgcgatttttgctcatcatagctattcatctatgtaattttttttattaaaaaaatcaacagctctaattcagcaataacacaaggagtatt

SEQ ID NO: 109499 - DNA, 354 bp, Zea Mays
tcgacgacatggtggagccccgcacgaaaagttccagttggctgtgtcaaatctaacagccaaaggccctgctgttgttgcctgagggggatgctggttaaggaagctctctttctgaggaaaatctattggaagtccctgtgcaaaagcatttcctttgattgtgtggacagtgtggaaaataactgtgtttcagtgttatcttgtccgtctttccttagttgcaggctattcggtgattcttttgaggtttggtgtatagatgtgttcagtttttggtattttagaaccccattcttttagtgttgaagttaaattgattgcatgtgatagtggcattctattgtattgact

SEQ ID NO: 109500 - DNA, 1483 bp, Zea Mays
agaagaaaaacacactttcacttgtcatattcaaggagatagtgttaacgacacagactaaatcagcccatattgaattgctagccagtaaagtggttccatttccaagaatccaaaggcactactgaactattatggcagaaatatagcaattactgaactaaaaatgcagtggaagagtgttttaaatgtgacttcagtatactagggagtctagggcaagatacttggctcttgtgaaagccacgttgattctctcagaatcagagagcctactttcccatctttattggaccaaactgttgaaatcaaaataatgtcctcctcaccaccatgaaatccatcaatagattttactcttaacagatagaaagtcatgcttctcaatgcaatcacttgagcagtataagtagatattataccaacacttgttctctgcctcttctcagtgcactctacaattgttttagacaaaagaaaaggacaccagttagctttatcaaaaactctggagaacagttaatctagccaataaaatatttctttcagaatgatgttttaacaccttataaaaaaataaaagaatgcaaaatatgacgagttgacgaccttggcagtaagcaatgaaaacatggtgatcaataattcaatatctagactaagaatgtacggttttgtcattttgtgctatttgagtaagcacggagaataaacaagttatatatgcatgtccattccaaagatggcagcacggaatattatgatgttggtattgccatttcttgtctcctgtgcagccttctgtcatgcttgttctttatatttatttgctatgaggactcctattaggacggcccagacaatggagatgatgtatacgataattgcagatgagttcaagtcaatggacaataaggacatgcgccctgaagatcacttgaacttcttttgtcttggaaccgggaagaaccaccatctaatggcagcccagaatcagagaaatctacatataaaagtgcagagggtatggcttagctcaacccttctgattacaccaaaactgaatatggtttctgagcaaatccaaaccgtgcctctgacaaacccagccaatgatttgcctgtactactactacagtccctgtcgctgtgcttggtggagctcatgaggcgcgacgacgtcggcgctgctgcggctaacaggaacaggaatggcagcgtgatgagggtgaaggagaaatgcagcgaggaggagggcgactcagtgtgctccgtctgcatcgacggcggagagctgctgctctgcgacaagtgcccgtcggcgttccaccacgcctgcgttgggctgcaggccactccggagggcgactggtgctgcccgttgtgcagatgcggcgtgtgcggcggcagcgacttggatgatgataccgctgaggggttcacggacaagacaatcatctactgcgagcaatgcgagcgataa

SEQ ID NO: 109501 - DNA, 240 bp, Zea Mays
atggcgtgcagagttggaagggagagagagagtgatcgtgcgcctgtgtggatcctcaacgagcgcgtgatggttggcctcggttcgttggtcgacggcgagcttcgatgcttgcgttgtcgtcgttgggcggagaaggacctcgtggccactagaatttctcacccgtgccgctgctccgccgcgggaccactagtgccatggtcggagaacatcagcatcctcaccattggtacgtga

SEQ ID NO: 109502 - DNA, 951 bp, Zea Mays
aatatatatattttttgtgactgacacgttgttgatattttttgtttgttccttgtagcttgaatgaatctttgcttgaagaaacctcagctgcggtgacattcagggaaattcggcaacgagacccgtccttttctctttctgattttgttgctgatgtccaagaaatgatcaagccagttttaactgcatattcaaagggtgatgcggagactctaaaaaactactgcaccaaggaagtgattgagcgctgcaaaggagagagagaagcttatgcatcacagggaatattttttgatcacaaaatcctgcacatttcagaagctgatgtattggaaacaaagatgtttggatcttcacccataattatcttacgcttccaaacacagcagatatactgtgttcgagatcgagaaggacaagtcacagaaggaggacaggataccatccaaaccgtcttctattcgtgggctatgcaactcatggacagcgacgaggtgccagaagaagaatcctattacccagtctggcggctgcgtgagatgcaacaagctggcatcaaagctctcatatagctagctgttcaacgagcatgcaagaacgttgatattctttcttttttatttttggctgatttgatgcatcttctcgcagagttagcttgtagcagcgtatactgatagcaacttggtgaaagtgcattatttaatccaacttataagcctcaacaaatttgtaatgacaagagtagcttgaaacaggaaaaaaaataccgatgagcagctttagcctatctcattagtctttctatctcacattctcactccttatccactgcaatgtcctttatctgctccatcagcacaatcctgcttgctgtccaaaatatttcttgacagttccgtagctgcaatgcaaatgacaggaatattgaaaaggtcgctgttatta

SEQ ID NO: 109503 - DNA, 1926 bp, Zea Mays
atcttcacctgcgtccgcgtgtgctgtctccctctttctctctctgcgacgactgggtgggctaccgccgccgccgccctacgttagataccgaggccttcgccggcgacgaacacccgccagggatggcgaccacagcactgctccgggctctccggcggccctcatccgaagccgcgctgcgattggctacaaaggcaaatgtgcaaacaactaatggatatagacatctgaataacaggaacctaagcgttttcaatgagttttctaagcaactaaagggtgaggccaagagcaatcctgaattccagaaatccatgaaggagttcagcgagaaacttgatgtggtgaaggaagatctcaaagtaagaactaagaaaacgactgagacaatatacaagcgtgttgatgatgtttggagtgaagctgaggagacatctaaaaaggttactgcaaatatcaaagaaaaaatgtttgctgctaaagaagaggtaaaggaaagttttggagttggaaaagaagagagtacaagttgcagggatggtttgcctgaaggttcaaaacatgagaaaactgaggcatcctcacattcagatggcacgactgaagatgccacagacagccatacattgtttactaaattgaagtcaacaatctcatctgcttcaccagtagtatccggtgcgtttgcaaagttgaaggacacaaaagtctcaactttagctaagcagggatatgaaatcgtcaaggatgaattaagctctaactctagcagaaagaaaaaacaccaagctaggcatgcttctgctaaagtagaaaagagtacaagaaccgatttagttcttacgccaacaaaaaagacagtattgggtgaaaaatgggaagaatttaagaataagatccgaggtcacccggtctacagaagagtggatgaatacaccaagcctgttgtaaccaagggacaagaggtagctgaagatgtcagggaaagatgggagacaagtgacaatccagtggttcagaaaattcaagacttgaatgaatctttgcttgaagaaacctcagctgcggtgacattcagggaaattcggcaacgagacccgtccttttctctttctgattttgttgctgatgtccaagaaatgatcaagccagttttaactgcatattcaaagggtgatgcggagactctaaaaaactactgcaccaaggaagtgattgagcgctgcaaaggagagagagaagcttatgcatcacagggaatattttttgatcacaaaatcctgcacatttcagaagctgatgtattggaaacaaagatgtttggatcttcacccataattatcttacgcttccaaacacagcagatatactgtgttcgagatcgagaaggacaagtcacagaaggaggacaggataccatccaaaccgtcttctattcgtgggctatgcaactcatggacagcgacgaggtgccagaagaagaatcctattacccagtctggcggctgcgtgagatgcaacaagctggcatcaaagctctcatatagctagctgttcaacgagcatgcaagaacgttgatattctttcttttttatttttggctgatttgatgcatcttctcgcagagttagcttgtagcagcgtatactgatagcaacttggtgaaagtgcattatttaatccaacttataagcctcaacaaatttgtaatgacaagagtagcttgaaacaggaaaaaaaataccgatgagcagctttagcctatctcattagtctttctatctcacattctcactccttatccactgcaatgtcctttatctgctccatcagcacaatcctgcttgctgtccaaaatatttcttgacagttccgtagctgcaatgcaaatgacaggaatattgaaaaggtcgctgttatta

SEQ ID NO: 109504 - DNA, 1348 bp, Zea Mays
gatccctcgaggagattatcgacgagagccacgccatcgtctcctcctctgtcggacccgagtactatgtcagcatcctctcctttgtcgacaaggaccagctcgagccgggatgctccatcctcatgcacaataaggttctttctgtagttggtatattgcaagatgaagttgatcctatggtatctgtgatgaaagttgagaaagcacctttggaatcttatgctgacattggtggactagattcccagattcaagaaattaaagaggctgttgagcttcccttgactcatcctgagttgtatgaagacattgggatcaggccacccaagggagtcatattatatggcgaacctggaactggaaaaactctactcgccaaggctgttgccaattcaacatctgcgactttcttgcgtgttgtcggtagtgaacttattcaaaagtaccttggggatggtcccaagctagtcagagaattgtttagggtggctgatgaactttctccctcaatagtcttcattgatgagattgacgcagttggaacgaagaggtatgatgctcattcaggaggggagcgtgagattcaaagaactatgttggagctgctgaatcagctagatggttttgactcacgtggagatgttaaagtcattctagcaacaaaccgcattgaaagtcttgatccagccttgcttcggccaggccgtatagaccggaagattgaatttcctctaccagatattaaaactagacgacgcatcttccagatacacacatcgaaaatgacattagctgatgatgtgaacttggaagagtttgttatgaccaaagacgagttttcgggtgctgatattaaggcaatctgcacagaggctggattgcttgccttaagagaacgcagaatgaaggtgacccatgcagatttcaagaaggcaaaggagaaggtgatgtacaagaagaaggaaggtgttccggatggtctctacatgtagccaatctattcatcatgccgaacaagttacccgattgtgtgtgtactagcacatctcttcatcatgggagatatgttaccacaatacttgttgcatactgtgctaagtggtcaggagaaccttgtattaattaattatcctttcattgtctcaaagtaaaaatttcccttgcgctaaaaatatgcatccgttcagcatccgtgtgacgtgttggcagcttgatcgcatggtgactattgcgtacacgaaattgcaacttatttgaatgaaaaaattggatattagaggaaattcgcatctctatatatatgtagtttgttgtgaagcaaaaaaaaaaaaggaaaatgttgaga

SEQ ID NO: 109505 - DNA, 392 bp, Zea Mays
gttgatcctatggtatctgtgatgtacaagaagaaggaaggtgttccggatggtctctacatgtagccaatctattcatcatgccgaacaagttacccgattgtgtgtgtactagcacatctcttcatcatgggagatatgttaccacaatacttgttgcatactgtgctaagtggtcaggagaaccttgtattaattaattatcctttcattgtctcaaagtaaaaatttcccttgcgctaaaaatatgcatccgttcagcatccgtgtgacgtgttggcagcttgatcgcatggtgactattgcgtacacgaaattgcaacttatttgaatgaaaaaattggatattagaggaaattcgcatctctatatatatgtagtttgttgtgaag

SEQ ID NO: 109506 - DNA, 1008 bp, Zea Mays
atgccgctacacctccccgccatgcaaggccgctccgcctacatgcaggtgctgctggagaacgacgccattgtctccgttctcacaggctcctacagatggtgggcaacaggaagagagctgaatatcggacaagcaagtttccattcagaaccgagcaacgcttcaaaccagttcatcccagaccaattgatgcagggacattatggcttggccacaattttcgggccaagtagctcgcagaaccttcacgacaatctgaaccaattcgatcaggcttcctcggctcctaccttgcaacaacagtcgtttaccgggaatggtcaactgacccagggatatcctggtgatatgcatgtgttgcagtttgtggagccaaccccccagattgaccatcagaatggcgatgaggctccaccacatacatgtcttagaaggatggcactactattgaaaacaaacggaaagataagaggagctatcatgtgtttatgtaaccttcttggggaacggtatattagatatcttgaaaaggaaaggagtttgaaaaggagaagattgtttccccagatttcaaacagaagtcaagaaaacagtttggattcagattgtgagcaattcaattgggatgactttgaagttccagagataaagagtgcacttaatgaagtccttgaattaaatcaaacagaaaaaatagatcaggccaagagaattgggcctgttaatcaaaaaaacattaacaatgataatgatgtcacgaaggacacaatatgttcacaggaactgccaaataatcaggctctacgaggtgaaaccaaaacgagtgcagtttcagaaagcggattctgtgatcctgaaaaaacatgcggacattcaaatgcagaaagtgaaaacatggaagtcttttgcaaacctcaagaaaaaatcattaaggatcaccgaaataagattattgaaagaggcatatggaaatcattggctgttgagaaatcctataagggttga

SEQ ID NO: 109507 - DNA, 76 bp, Zea Mays
ttggaaccagtttataacgtatactgatactaaggccctgtttgggagagcttcacttcaagaatttcaattttgt

SEQ ID NO: 109508 - DNA, 999 bp, Zea Mays
gtagtttagagaggcgcagcggcctgtagccgcctctgacccgcagcagcgcctccatggctccattgccttctctatcccgactcccgagtcccggcgccatccaggttcgtgtgggggcgggcattcatggcagggcaatctgacccgcacctctccatcttctcgccctccgaggtaaccaaccccttcccttccacactgcactggcagggactatcttcgtctgtgctgctgcaggtggagttcgtggcggaggatgagatcgtcgaaatcgtcctcaacatccgcatggacgcccttaacatgatctacgggggatttcgggcccttcttcccacagattcccaccaaggtgccgctctggctcgccgtggcgctcaagaagcgtagcaagtgcaccatccgcaccccggactggatgactgttggtattggaagcggaaggagagtcgcctcgggaattccagccattgccattccactatattgaaatttctaagtgctggtgatgacatctcagatgcatacctggtgaggtctctaattgaggacatcagagatgtcagattccacaaggttaagaatggattagagacgatatctggacgcacctatgccgtaaagctcaaaaatctctctgcaatggaagtgaacattgtccgcccttttcatggtgagaactttgcaggcattctataagcacgatagtccacagatgattcagcaagcagataatgtagggaccagagcaacactagttacagaccgtggcccccagaataagcttcccttgtagatattgtttcaacttgcttgtggattctcggaggtagttgtccccataaaaaatgtgccctaagaatcttaagatgttgcgcacaaaatagttccatatcagaaagctggtacatatatataattctattctgattggttggtgacccggtacaatttataacagcttaatacattgcactgtatggaccagaaagaaga

SEQ ID NO: 109509 - DNA, 2067 bp, Zea Mays
gtagcagtctctctctcgggccctcggcgtagcagtctgtctgtctctcttcaccctcctcccttcccttcccttcccttctcgcgcctccacaactgcccgcccgcccgcccgcaaacaccatgggcaccacgtacaagtgctgcttcatcttcaagcgccggttccacacccgcgacgcgccgccgcccgaggacgtccgcgcccttttctccgtccacgccggcgggggaccccacatgggcgccgacgatctgcgacgctacctggtggccacgggccaggaggaggccgaggtggagcggctgctggagcagatcgtccagggccgtgcccgcgtcccgcgcctcgcccgcccgctcctctcgctcgacgacttccaccgctacctcttctcgcacgacctcaacccgcccatccgtcacccgcaggtgcaccacgacatgacgcgcccgctctcccactacttcatctacaccggacacaactcctacctcaccggcaaccagctcagcagcgactgcagcgatacccccatcatcatggcactggagagaggggtcagggtcatcgagctcgacatgtggccaaattcaaccattgacgacatcaacatcgtgcacggcaggacactgacaaccccagtttctctcatcaaatgcctgagatccatcaagaaacacgcctttgttgcatctccctatcctgtcatcataacacttgaagaccacctcccctctcaactccaggagaaagttgccaagatggttgttgaagtatttggcaacatactgtactacccgccagacgacacccatgagctcaaagaattaccatcacctgaacaactcaaaggacgtgtcctcctctcaacaaagccccccaaggagtacctcgaaaccaagcttagtgactccacgaaggagggtgatgctgacctccatcttggcaaaggaaccggtgatgacgcggtgtggggaaaagaagtaccagattttcggaccgagatccagtctgctgaaaaggacgacgagaacgacgacgttgatgatgaggaagaacaaaaactgcagccccatatagctccacagtataaacaccttattactatcagagcagggaagccaaaagactctctagctgatgccttgaagagtgatccagaaaaagttcggcgtctcagtttgagcgagcaacaacttgccaaagcggcaaaggatcatgccacagaaattgtgaggttcacacagagaaacatactgaggatataccccaagggcactcgagtcacttcatcgaactacaatccgttcgttggttgggtgcatggtgctcaaatggtggcattcaatatgcagggatacgggagagcgctgtggctaatgcacggattttacaaagcgaatggcgggtgcggttatgtgaagaaaccagatttcttgatgcagacagaaccacaagtcttcgacccaagagaaccccagcctgtgaagaaaacgttgaaggtgaaggtgtacatgggcgatgggtggcgaatggacttcaagcagacacacttcgatcagtactctcctccagatttctacacacgggttgggattgctggagtcccagcagactcggtgatgaagaagaccaacgcgatcgaggacaactggaccccggtgtgggagaaggagttcagcttcccgctgactgtcccggagctcgctctgctgcgggtggaggtgcacgagtacgacatgtcggagaaggacgacttcggtggccagacagtgctgccggtgtcggagctgcggcccgggatccgggcggtagcgctcttcgaccgcaaagggatgaagtacaaccatgtgaagcttctcatgcgtttcgagtttgcctagcctgaccctgaccatgcatgcccccccccccccccccccccctcctgttgtgtgaatggatattgcagtctcagtgtgcttcctttgtacatagattgcttggcttggatgatatgtgcaacagacaattccttcagttgttatgatcaaataataaagaggcagcgtccttatgaacaag

SEQ ID NO: 109510 - DNA, 707 bp, Zea Mays
gtagcagtctctctctcgggccctcggcgtagcagtctgtctgtctctcttcaccctcctcccttcccttcccttcccttctcgcgcctccacaactgcccgcccgcccgcccgcaaacaccatgggcaccacgtacaagtgctgcttcatcttcaagcgccggttccacacccgcgacgcgccgccgcccgaggacgtccgcgcccttttctccgtccacgccggcgggggaccccacatgggcgccgacgatctgcgacgctacctggtggccacgggccaggaggaggccgaggtggagcggctgctggagcagatcgtccagggccgtgcccgcgtcccgcgcctcgcccgcccgctcctctcgctcgacgacttccaccgctacctcttctcgcacgacctcaacccgcccatccgtcacccgcaggtgcaccacgacatgacgcgcccgctctcccactacttcatctacaccggacacaactcctacctcaccggcaaccagctcagcagcgactgcagcgatacccccatcatcatggcactggagagaggggtcagggtcatcgagctcgacatgtggccaaattcaaccattgacgacatcaacatcgtgcacggcaggtaatatgaaagcgtttttatttttcttaatttttggcttaattcttctgatgatgacctctgataaaagaaaaaaaaa

SEQ ID NO: 109511 - DNA, 564 bp, Zea Mays
caggattcgatcaagttcgtgcaaaggttggtgatggcggagtacaacaaaacgagggccatcatccctgcagacgacgattactcctccaaccgttctcaaatcatggtgtggcgtgtcgacacaacgctgctctagctagccctcttgccacgctaagagcgatagataaagatgcatgcatgcttaaaataaacattccatgacttattacatagtaatgccatacacgtacgtatgtatatgtaaacttttgctgcattagaattatatatatagggaaaagaatggcaagcagcagtctgcatcagtcgttgtcgtcgaaatgctcaaggcaacgcatcgcatcgcatcatcctcttgcttgcctgcgtgcaatccttttcttgtccgccctgcattgcatgtccctttttctttttcttcttgtttgccttgtgcggctatctgtcttgcaacccggcctgaagaaaaggaattcgatttcaaaaaaaagatctctataaaaatttagtattagttttaggggcaattccctttatgatatcggaaaatatacttatt

SEQ ID NO: 109512 - DNA, 1373 bp, Zea Mays
gctggtctcacactctcactagatctctctcacatgcatatgcatgcattagcttttccccaccagcatgcactagctgactagcatctgtgtaatcggtgaccgctcttgacttgttagctccccgctcccacggtagctaaagctagctaggtgggtggtagcaccaccatggcctcgcccaagcattcccatcgccatcatcgtgcggcggcgacgaagcatcgtcggccgctggcgctgcggcgtgcgatgctgcattcgtgcgtgtgcttcctggtgggtctcgtgaccggcctggccccttccgactggacggacgccgcctcgcgcgcggccgtgcacgcgaacggcgcggccacggcgcaggtgttccgcgcgctgcacgccatgaaccagacggcggcggcgggggcactgggccagctgctggcgctgcagcactaccagcagcagccagtggtggagaaggagaaggagaaggagaagaagcctctggatctggtggtggtggtgacgactacgacgacgtcgacggggttgtcggagcgcgagcggcggtcggcgggtctgacgcgcacggcgcacgcgctgcgtctggtgtcccctcccctggtgtggctggtggtggaggcggcccgggaggctggtcccacggcacggctgctgcggcgcacgggggtggtgtaccggcacctgacctacgcggagaacttcacatcggaggcctgggaggaggagcggcaccaccagaggaaccaggcgctagcgcacatcgagcggcaccgcctgcgcggcgtcgtcctcttcgcggggctcgccgacgtgtacgacggccgcctcctggagcagctcaggcggcacatcaggacaaggagtgtgggcgcgtgggcagtggcgacagtatgggagcaggagaagagggtggccgtggaagggcccgtcgtcgtctgcaacaccaccaccaccaccaccagcgcagcatccacagcatgtgcatggttctccgcctccgactccacattattggcggcagcggcagcagcagcgcccccagtgacggccgacgactccgtccacggctttgccttcgccagcgacctcctctgggacccttccaggtgggaccgcttccccacatccgagcccgaccagtcgcaggtacggccaattaatgcaataccatccctccctcccactcccttgattgattgacgatgcatgatgagtacaattaaataatgcaacgccaccctccaattcagccataatcctgcaggcgcgtcgtcgcttttagctagcatcctcctccccatccaagaaaaaaaatacagtagagttaatgctaaagataaagagcataccgagttatt

SEQ ID NO: 109513 - DNA, 1312 bp, Zea Mays
tccttcccggcggcacgatcgcccgccccaacggccttcgatccacctactagaagcttccggtctacgtacgtaaatatataatacgatgcgcactgcgtcgccgggctggctcccaccgaattcattccacccccgtctcctccgatcggacggaccaccgggcccagcagcggggcggatcgcgtcagcagccatggtgaaggcctaccccacggtgaacgaggactacctcaaggcggtcgacaaggccaagcgtaagctccgcggcctcatcgccgagaagaattgcgccccgctcatgctccgcctcgcatggcactccgcgggcaccttcgatgtggccaccaaaaccgggggccccttcggcaccatgaagaaccccgccgagcaggcgcacggagccaacgccggactggaaattgccatcaggctgctagagcccatcaaggagcagttccccatcctatcctacgctgacttctaccagcttgctggagtcgtggcagtcgaggtaaccggcggacctgatgtccccttccaccctgggaggcaggacaagcctgagcctccaccggaaggccgccttcctgatgccacccaaggttctgatcacctcaggcaggttttctccacacagatgggtttgagcgaccaggacattgttgcgctttctggtggtcacaccctgggaagatgccacaaggacaggtctggatttgagggagcctggacgtccaaccctttgatctttgacaactcttacttcaaggagcttctgagcggagagaaggaaggccttctgcagctaccaagtgacaaagccctcctctctgatccatccttccgcccacttgttgacaaatacgcagcggacgaggacgctttctttgctgactacgccgaggcccacctgaagctttcagaattgggatttgctgaggcgtaacgaaccagaagagtgtggtggctgtcgccggccggccttgtgtttttgttgtctgcttttctcttgaacgaagatgtgatgaactcagctgaagatgtagtgtgtatgttgtcatggtttatttttctattttatttatctatctataatatctatcggagaaggtttgatatgaagcggaacactgattaacgatgccaatgcctccacatccaaacccgttatgtttttgcatgcaggtgggtttcaagcaacacttataacaagtgtttgaaacatacaccagggtcctttctaatattaattatagtatgccacataattgaaacaattattatagaattaaaattattatttagtcta

SEQ ID NO: 109514 - DNA, 1216 bp, Zea Mays
ggctggctcccaccgaattcattccacccccgtctcctccgatcggacggaccaccgggcccagcagcggggcggatcgcgtcagcagccatggtgaaggcctaccccacggtgaacgaggactacctcaaggcggtcgacaaggccaagcgtaagctccgcggcctcatcgccgagaagaattgcgccccgctcatgctccgcctcgcgtaaggctgctcccccttcttattcttcgcccgatcccgatcctattcggaaatccagaaactgctaccactccaactccttccttgtcccctcgcagatggcactccgcgggcaccttcgatgtggccaccaaaaccgggggccccttcggcaccatgaagaaccccgccgagcaggcgcacggagccaacgccggactggaaattgccatcaggctgctagagcccatcaaggagcagttccccatcctatcctacgctgacttctaccagcttgctggagtcgtggcagtcgaggtaaccggcggacctgatgtccccttccaccctgggaggcaggacaagcctgagcctccaccggaaggccgccttcctgatgccacccaaggttctgatcacctcaggcaggttttctccacacagatgggtttgagcgaccaggacattgttgcgctttctggtggtcacaccctgggaagatgccacaaggacaggtctggatttgagggagcctggacgtccaaccctttgatctttgacaactcttacttcaaggagcttctgagcggagagaaggaaggccttctgcagctaccaagtgacaaagccctcctctctgatccatccttccgcccacttgttgacaaatacgcagcggacgaggacgctttctttgctgactacgccgaggcccacctgaagctttcagaattgggatttgctgaggcgtaacgaaccagaagagtgtggtggctgtcgccggccggccttgtgtttttgttgtctgcttttctcttgaacgaagatgtgatgaactcagctgaagatgtagtgtgtatgttgtcatggtttatttttctattttatttatctatctataatatctatcggagaaggtttgatatgaagcggaacactgattaacgatgccaatgcctccacatccaaacccgttatgtttttgcatgcaggtgggtttcaagcaacacttataacaagtgtttgaa

SEQ ID NO: 109515 - DNA, 1256 bp, Zea Mays
tccttcccggcggcacgatcgcccgccccaacggccttcgatccacctactagaagcttccggtctacgtacgtaaatatataatacgatgcgcactgcgtcgccgggctggctcccaccgaattcattccacccccgtctcctccgatcggacggaccaccgggcccagcagcggggcggatcgcgtcagcagccatggtgaaggcctaccccacggtgaacgaggactacctcaaggcggtcgacaaggccaagcgtaagctccgcggcctcatcgccgagaagaattgcgccccgctcatgctccgcctcgcatggcactccgcgggcaccttcgatgtggccaccaaaaccgggggccccttcggcaccatgaagaaccccgccgagcaggcgcacggagccaacgccggactggaaattgccatcaggctgctagagcccatcaaggagcagttccccatcctatcctacgctgacttctaccagcttgctggagtcgtggcagtcgaggtaaccggcggacctgatgtccccttccaccctgggaggcaggacaagcctgagcctccaccggaaggccgccttcctgatgccacccaaggttctgatcacctcaggcaggttttctccacacagatgggtttgagcgaccaggacattgttgcgctttctggtggtcacaccctgggaagatgccacaaggacaggtctggatttgagggagcctggacgtccaaccctttgatctttgacaactcttacttcaaggagcttctgagcggagagaaggaaggccttctgcagctaccaagtgacaaagccctcctctctgatccatccttccgcccacttgttgacaaatacgcagcggacgaggacgctttctttgctgactacgccgaggcccacctgaagctttcagaattggggtaagcggtgctgatagatctatcatctatttctatgtattatgattctatgtattatgactgaatgattgtatctcttgcactatgcagatttgctgaggcgtaacgaaccagaagagtgtggtggctgtcgccggccggccttgtgtttttgttgtctgcttttctcttgaacgaagatgtgatgaactcagctgaagatgtagtgtgtatgttgtcatggtttatttttctattttatttatctatctataatatctatcggagaaggtttgatatgaagcggaacactgattaacgatgccaatgcctccacatccaaa

SEQ ID NO: 109516 - DNA, 647 bp, Zea Mays
actaaccaagcagacaagttgtacgcctgtgctagatttgcaattttgcataactgaactggattaggtaagttcataagtagttggtctgttgatgattattaatactcttctacaagctaattgagttggctctattattacttgtgtcaacggcatgtgttgagagaacatttttagctattaatataattaagagagaattgcataacaagattgaagatgattggttgaatgatttaatggtttgcttcactgagaaagagatcttcaaattcattgatgatgaactcattattcgacgatcttcaaattcattgatgatgaactcattattcgacgatttcaacgtctcaaaactaagagacaattgtgaggtcaacaaaaacttaacggtactattgggtggatcggctaactgatccagagacgtagcttgtggactgtcgatctccacagcaagcttagtccacgagttctgtgccttatgacatattaaccagtaaacaagttagaatgtgcccatactttttttatatatatagcaactctactggggaacattgctttgatttttgatatgtgtgtatatatatattcattttcaaactaaaattaattaatggctcaagttaattgttaagaaa

SEQ ID NO: 109517 - DNA, 3814 bp, Zea Mays
cggtcgattgcggagctcggggcgattcatgtcaagaagatgctgcagcgggcggcgagcaacgcctactcgtggtggtgggcgagccacatccggaccacccagtccaaatggctcgacgcaaacctccaggatatggagaatcgagtcaagatcatgctcaaactcctcggacaggaagccgattcctttggcaagagggccgagatgtactaccacaccaggccagaggtgataagccatgtggagcaagtctacagggcttacagagctctcgtcgaacgctatgaccacatatccaaggagctccataaggccaaccacaccatcgctactgcttgtccagaagaggtgcagtatgcaatgttagaagaggaggaccatgatttccccaaagcaatcacaccaatcaagacacacaagtccttggtccaagagattctcaacgcaaagagacaaggtccgtcagggtcaggatggaacaagccaccctcccatccacgcatgagcgccgaggaggcacaagaagagatcggcagacttcagaaatctatacttgttctgcaaaccgagaaagagtatgttaagagttcctatgagagtggtattgctcggtaccgggagatcgagaagcagattgcagatacacagaatgaaatctgccttattcaggatagatttgatgcacatgcagccatcggcgatgatgaagcccgtgccttgatgacaataacagctcttagatcctgtcagggaaccatagctgagcttgtacgtcattttgaggagttgatcaagcttgcagctgtggagttggaaaaaacaaagtctctacgagcacagctgtatgctatgatggatggcgacactgacacatgttcaagagaggcaagcagcacagacacgtcggtggtggcaagatcttacccagttaccaaggcaatacttgagttgcagcccatatatgagaaacttgacaagtttttttccagtgggtctgaatcctctgcggaggagatcgcagagaatgttgatgaacttgttgataaagtcatcaacttggagctcaagttcccaaaacagacagcacagatcaatcaactcatacaagagaatgaaaacctaaagaataaattggatgagttacaagacgagatggcacttcgtgatgaccaaagtgaattaaatgaacagatcaagcaattagaggatgagtttagcacagtccgagttcttgaaagatcaattcttgaggaagaagcctctgtcagcacaggcttttctgaagtttttagctgcataattaatatctcaaaggcacttggatcttttggccctgaagacctgcataatttgtcagctgcggtagaggatggtgcaatggttccaagagacgtgttcctggagcagtctgcagaagagagcaagggtggggacttcagagacatagaggcaccaactctaaggcatagtttgggccaagatagagaagatgtctcggaagtggttagtgataatggtaatgatggcatccatggctcaaggaatgctaatgaggaaataatccctgggagttgcttaatgcaacaagttaggtacaaattgcgtctacattttgatgaccatattgatccgcttttcagttcagaaaatgaaaacatagttcacgattcaggtgagggcaatgttgatagctcatcaggaaaagtatttcagagttcatcagaaactgagaacggaagtagaaacttccctaatggtgaaattatgagaggtgaatatccattgggaatagtcggacagactcatctcctccactcaggtagtatggatcatttagacaggaaatatgactctaatgaagcttctcagtcattaatggaagtcgctgagggaaatattgatgatggaaattctttttccagcagtagtgtaatccaggaggaaggacttggagatagtaaatcacaaaataccagtgggcagattagtccaattgcttcctcagacttgtacaggttaaaggaatacgattccgtagaagaatcctcatttccaaaagctacttgtttcagtggtgctgataagaagagcctgcacatggggcatgcagatgaagcaaaatctgttgaagaatcgccacaccaagttgatcaactaaatgggccacaaaatattgaaagttcgaacgaatgcaaccaagttggattgcttaaagaggatgattgcatttcattagttcatgttgataatgtccatgatatgaagaacatatattcctcagaagtgagggatgaaacttctatctgtgcgccagctggagattatgagcaagttccgacgaattcagagaggaagacttcacatggcagagagcttgcaagcgaagcaactacctcgaacaaccatggaggaaggagtcagggtgtaaagtctggtttgatgggggaggactttgtacctagctggcaagaatttcttcctgatgggcttgaaggtaaagaagcaatactactagctgattgtacttcagttctgcggaactacaaagaaacaaagaggaggcttagcgaactggaaaggagaaaccaggagcatcttgaagagacaaaggcagttatacgggagttaaggaatgcaaattccatgaagtatgttgagatacggtcactaagggatctcctggattcctcagaggtgcctccaagtaaagcaggtggtaactcaaacggattcttaagtttgagatcttttagagaaattgacagatcaattgccactttgggtagagatatttctgccgtggaggaaaacagttctagtaacatcgagacacctaacaacacgtcacttcataaaatgacgaggttcagaaacgacattgacgctttggtggaggaaaatttgcagttcctggtaaggtatagcatggcttgctatcgcatgcaggagtttgacagaaggtaccaggaggcacaggacgaaatggaagataataagtctagagaaccagatactccagcagagcccggacctgctgagaagaagttgagagagctccgaactgaactggatgtatggtttgagcagagcgcgcttctcgatcaagaagtgcagcttaaatctgcgtctctttgcagaatgcaagaggagatagcggaagccctgcgtggtagcctggagatggacagagccaggtttacaccatatgaagctgccaagtttcaaggcgaggtcctaaacatgcagcaatctaccagcaagattgagggcgagatgcaggcagcatcagaacacatgagggggcttcaagccaaagttagccatgctctggaggggctacgtgagagttttgagatttcatcccaacgcttgtcgcggccagagaccgaaagaagccacgagaaacaattcaagcattttccaagtcggacaagggtaccgttgcgaaacttcctgtttggaacaaagcgaaagaaaaaatcaatatttgcgtgcatcaatcccacattccagaaacaattcagcgatctgtgaggtgcgtgagcgtgggtaccatgaccatagttttccttattttgaaaaaaatgacaaaatgaacctggggtagttttgttccccagagtacatgcaagcgcaggttttgtttgaatttagcttgtgtttgtttgtaatggtaatttgttcatttgattgaaataaacagggtaaattatttgataccgttgaaatgtactgtgtgttgcccctgttgtattgggccttgacacatctaactctattactaatatcagtcacaactctggttaaagtt

SEQ ID NO: 109518 - DNA, 515 bp, Zea Mays
tcgtggggaggatgtttggagactggagtgtccatgcgctggggtcatcaaagtcgttggacaatacgtctaaggagtgttgtcttcccgttaatcttgcagcacatatatgcaagcagtcctacaatcattcaaaattaggagcagcgatatcatgggacgatgctctgcgatcgagcatgagacactttcagcacaagtactacaacctgttcacctgcaactggcacttgtttgtggcgagctgtctgaaccggcttgcctacaatggctccctggagtggaatgtcttgaacgtggctgcccttgtctggtttcatggctgatgggtggacagaatgagtactattctagcaaccgagcagatcatcagaaatccagaattatcaataattatctaacgtctgcatcccgaactagaatcaccacaccggtctgtcatgaccatgagaacctacaacaaagcagatctatgttttatacaaattttttactcccgtcgcaacgcacgggca

SEQ ID NO: 109519 - DNA, 784 bp, Zea Mays
cacttgcctttttgctttttctggaatccgatgctatttgggcaataccagaccattttgattttaatccatttctgcaccaataatatttttccctaacagtgatgcatttttaccttgtaatctgaagtctcattttgaagagaaactaagggacacgggtaacatttacatgtttttttgtagaatatctgtgtttgtaggcaacctgtctaatcaatacttgtctcacagcatgtggactgcatatcacttaccttttcgcttcttctggaattcgatgcaatttgagcaatatcatatcattttgattttaatccatttctacaccaataatatttttctaacagcgatgccttttttacgttgttgattgaagtctcattttggttcaatggaggaacctgaacatcttgagatgagggtggatcgcttttaaaaaatttctcatgttgcaggtgcggcgtcccctccatctcaactccaccgactaccgctcttcttgctctccgccggaggcctccttccagttgcaggtgtaggtgcggcggcttgtcactggagtttaggtccaaagtgatatagcattacatcccagctggaggaggtcagcgaccaaagtacatttgcaacgtaaattgttttacataaaacggtgaagctgtgacgatggtacagagaggcgcgctccggcagcgctctgcttttttagatgaagattcaacttcgatagagaacaggctgattgcttggatgatttggattttgcaattatgcatgagat

SEQ ID NO: 109520 - DNA, 252 bp, Zea Mays
tcccatagactgcttgaagtaatgatagctcaccataacatgatatttagctggatcgatacaataggagataattatccacctcctcttgatactaacctggtaattgcagttatgtcaatgtggactagattgcagccagtttatgctgcaaacacgtggaatgaagccctaaacaaacgaattggcactgaggttgtagattactgttaatacttattctccctattgggtattgggcattcacaagat

SEQ ID NO: 109521 - DNA, 703 bp, Zea Mays
tctatggcgcggactgcaccgtggcctggacggctaccgcgacgcgcacgacgttgccacgccacagcaccatcacgacgaactctcaacatcaatcggacccaaactgcaaaccgaacagcctatccaaaccaaactcgtctcgctcctgcctcctggcgtcacgcagagaagcaagtgagggcgcgccatgggaagcagtggtgtgcagtcatgggagatgagcagaggcgcaggacagcttgggaccgggctcagagacggcgaccaggggaatggctcagtgcagcctgggcgcgactcgccaggcgaacagagcgtgcggcaacgggtgctcgaggcggtgctccatggcgatgggggcgctgcggaggtcggcggccatggctaagagcagggaatgacgccgaccagcagagcacaggggaggagaggggcagggaagaagtaccgcggcgcgcagggctccacggcgcggtggccatggccgagctggggggcgtgccgtcgagccagaggtggggaagaagaagatggctgggcgagcagggcgcggccgacgagcagagctcggctgggaggagtgggaggccgcggcgctgggagctcggggagggaggaggagcagggagcttggcgcggcttggggatgagagagagagagggcgacgcggcagggaggagcagagggagtagacacgcg

SEQ ID NO: 109522 - DNA, 1216 bp, Zea Mays
caagcaagatcattatcaaaccagtctctctctcttgcaatgaccctttcaagcgcctagggctgctatcctagaaccaagccttcggcagaggggtataacctcgccggagaagacagttatctccatggacagaaggtccatgacacctggtatcagctctaggttatcctcaccaccaccagccgctacgcaatcagtcgccgcaacgccctcccacccgccctctccaactccagatgcattcactcggctcgaagagagttttggttgtctcacagagaagtgggatcagttcgttgtgatgttccaccgctacaaggagaagacagagaaggaactccaagcagcggtgcagcttcaggcggcagcgcgagggttcctggcacgccgctaggtacagtcccttcgtggggagaagcaccttgctgtggcctccagggccaccccatggccgtcatcacatgagcaggccgtggtgcgcctgcaagccgcagtgcgtggcttccttgttaggcgggcggtgcggaagctgcacttgctgatcagctcatcgctgcaccaactcgcagcctgcgcgcccaaccaccaggtctcgtctatactttttgaaccccctgcagaagtcgagatctgggtatgcagcccccctgcatggccaaagagggtcgtctccttcattcgggcaactgccttggtgctggacagacccaacataagaacgggctcgttcctccttcacctttcatccaacgtgaagtccgcagttcagctctttccttgagatccaggaggacaggaggacatagctgcacttcaaatttatattttagttccacaattattttgtattttcgtcttaaataataaaggtaagccgagatgtaaaagacctaaccttaagtcgtgtcaggtaagtctatggcagttcgagaacgagctggtcctcaagcgagggggagatgtcatgggcataatagggagcgagaggcaacagctaggctgggataaggctagagaataagattgagatgagctgggataaggttagagaataagattgaaatgagagaattgtggagagttggttagcatcggataagtccaagaaagtatgagttagttgagagtttataggagaagttggttagccatagggctatttataagccacatggtagtagggaataaatcaagaaagattattatcaaacca

SEQ ID NO: 109523 - DNA, 312 bp, Zea Mays
gttgttcaagacctgaatcccacttcgggagactttttccccggcccaactcaagaagatactaacatagaggagatggttgctggaataacttggccaagtcatttgccacctggatggacggtcgagtgggatatgacctccgcaggagaggatcatgtggagtagctcgtggtcggctttgccatcctacttatgtatcattagcttatcgttagcacgacgttacctttatttccgctgccagtgaaacttggaaccaatggtttatgttcaaacctatgtcttgtaataataataatcgtccttaat

SEQ ID NO: 109524 - DNA, 909 bp, Zea Mays
atggacggtagaacctgcgaccgcctgcgtggaggccgtcgacgggcacacttgcttcctcttgctcactgcggcgacaagtaccttagctatgggagtgaagatgctgccctgtggcggcttgttgcggtagaaggcaacgccagcgacgaggctgagcaggccgacggccatggcggcggccgagaccccaaatccgacgtccatcccggagcgggtctgcacccagacgagcacggtgagcgccaccagctcgcccacgcagaagctcaagtaggctgcattgaagtagctcgacagccggcgggcggcgtcgctgccgctgccccgccggaactggtcggccccgtgcgcgatgatgttaggcttgaggcagccgctgcctagcgccacaaggtagagcgccgcgaagaagatgctggccttcaagcctctcgcctcctcgcacgcctgccccggcgccatcatgtcgcatggcggcggtcgaagctgcggcaggtgcgcctgaaccgccagtaggatgaaaccctgccagtgccatataagtaagtagatatatattaacaatatgtagagattattattactaattgccattcagaggagattaagttagttggtgcactgcagcagcttttgctgttgccattcttctgatgcactgaatccaaagatgaggcaggaaaaaagtggattggcgttcggggcgcgcactcaagaggcgcactagacggctggcattgggagtgatgatttgttcctgtcctttcattgcctttatttctcccttgcttgcctctctacagatcaaagcactgttttctcactgagcaagcaaactgtttgttactgtatatcttttccttttgtttcaggccgttaattaaagtaccaagcttgttttctttg

SEQ ID NO: 109525 - DNA, 738 bp, Zea Mays
attgtggggaatcagagtatcgccccctaccaaagatgtttgttccaacatccgattatcacaattaactcccccctcaatctgagtatgagcaccagtaggttcatccgaagaagaagcggattcgctggaagaaccataggctccatgctcacccgaggggacaccaaaactcgaagatgaatccgccaaatcaaaggaaataccagtttgagagttgtacttaccgtgtatcagcttgcatgcctgccgaagcctcccatgatttgatctccttgtccttggggagcatgcccagcctccgctatcttccgccatcagctcaacgaaagcagactgctcgctgctggacttcgccaaggacgtggacgcgctcatggactgggtctgcctgcagctgccgccggagctgcggcaggaggcggtgcgggccgtggaggccgggcggcgcgcgggcgccgacggccgcgtccgggtccagccgtacctgctagctgccgtgctccacctagctgtgtctctacccaaaccacttctactcatgcatccatacatgagttgaatttacataactacacacccttaaattaacttggcccggccaaggtcgttaattgtgatcagctatctatcgctttgtgagattaatctaaccctcacacacacatatgttctaagatagttgcgaatgaagaaaaaccatgaaagcagacaagatacctacacttgacgtacgct

SEQ ID NO: 109526 - DNA, 1412 bp, Zea Mays
accacgctcgcggcccggcccggtacatacattaacaaagctgcagcttcgaggcctcagctcccgactcccgagccggcagcgattcatagcatcagctattcatccgcgcgtggtgcaatggcggaggctcccacgacgccgccgcggaaggcgaagccgccgatgtcgcgcctcatgcggctttccatcaaggtcgtggacagggtcaccgacgccacccgccgggcagacgggacgctgaatcgttttgcgctctcgctgctggacccgcgtgtcccggccatctcctccccttgccgtggcgtcgcctcccgggacgtcatcctcgacggcgccctccgcctccgcgcgcgcctattccacccggccacgacgtcaaaatccacggcccctctccccgtgatcgtctttttccatggcggcgggttcgcgtacctctccgcggcgtccccggcctacgacgccgcgtgccgccgcatcgcgcggtacgcctccgcggcagtgctctcggtcgactaccgccgtgctcccgagcaccggttcccggcgccctacgatgacggtatcgcggcgctgcgcttcctcgacgatccaaagaaccacggccaccccaccccgctcgacgtgtcccgctgcttcgtcgcgggcgacagcgctggcggcaacatcgcccaccacgtggcccgccgctacgcgtccgacgtcgcctcgttcaggaacatccgtgtcgccggcctgatcgccatccagcccttcttcggcggcgaggagcggacagcctccgagctccgcctggacggcgccgcgcccatcgtgtccatcgaccgcaccgactggatgtggcgggcgttcctgccgcccggctgcgaccgtacccacgagggtgccaacttcgcatccccagcagccgccgccggcctcgactcccaggcgttccctcccgtcctgctcgtcatcggtggcttcgacccgctgcaggactggcagcgccggtacggcgagatgctgaagagcatgggcaaggatgtgcgggtggttgagtaccctgatgccatccacgccttctacgtcttccccgggttcgacgacgcgcgagacttcatgatacgcatcgccaagttcgtcgccgaaagcgccagcggcggaagtagcagctagcgagttgtcggagctggagatacagtctgcacactgtgcagtggtcaggtgtttggtgcaagtggcgtgtcgtgcgtcgcaatttgcagccttggctgtggcgttttggaggatgcggcggtatggttgcgtggttgagtgagagtagaagatgtgtctggttgttattgttaactttcgtaaaagtttggtctgataagtctgatgaatgatgtaattttaattaactaatcaggttggtgatttcgtga

SEQ ID NO: 109527 - DNA, 1601 bp, Zea Mays
gaaccgtccgcctgtttatattaacaaccgtgtggttaacaaccgtcacatagatgtgatttaacacacaaacccacacaatcccatcgtcatgacgccaagatcgtgtccgagtgcgactgtgcgcgcgtctccgtctcgcttgttttaagcacggcaagggaagaggacgacgggtggacgcttggacaaacagccttgtcgtgtactctctctttctctcctcccacagttccgctcgattccaagagtccagcgccacacgacatcctccgcgcggccggccatgggggaagctgcggatccggcgacggggagggtggcaccgccgatgtcgtggcgtacgcggctctccgtgctcgccgcggggtacctcaccgacgccacgtgccgcgccgacggcacagtcaaccgccgcctgctcggcatgctcgacaagggcgtagcggcgtccgcggccccgcgcaacggcgtcgcctcgcgggacgtgaccatcgacccggccgtgcccctccgcgcgcgcctcttctacccctgcgctcccgccgccgccgaggacgacgacgcggaggcggagcgtccggcggtgcccgtcgtcgtgttcttccacggcggcggcttcgcgtacctctccgcggcgtcccccgcctacgacgctgcgtgccgccgcatcgccaggtacgccggcgcggcggtgctgtccgtcgactaccgccgctcgcccgagcaccggttccccgccgcctacgacgacggcttcgcggcgctccgcttcctcgacggcgggcccgggcccgaccccgaccccggcgcgatcgcgggcgccccgccgatcgacgccgcgcgctgcttcctcgcgggggacagcgccggcggtaacatcgcgcaccacgtcgcccgccgctacgcgctggacccttccgccttcacgaacctccgcctcgccggcctcatcgccatccagcccttcttcggcggccaggagcgcacgcccgccgagctgcggctcgtcggcgcgcccatcgtctccgttccgcgcaccgactggatgtggcgcgcgttccttccccacggcgcggaccgcacccacgaggcgtcatcccccgacgtcgccaccgcgggcatcgacggcgcccctgatttcccgcctgccacggtcgtcatcggcgggtacgacccgctgcaggactggcagcgccggtactgcgacgcgttgcgcggtaaggggaaggaggtgcgggtgctggagtaccccgacgccatccacgccttctacgtcttcccggagttcgcggagtccaaggacctcatgctacggatcaaggagatcgtcgccagcagcgagtgatgggggacggacggcgtgggcgcgcgcagctgtcgctcagatgcgtggtggatgtatctgcgactgtgctaagtggctagggtcagtgttgtggactggacggtgctgtctagtgtgtgacgtggttcgtcgtgtgggacgcgccacaattaaactagtgttaaataatgatgacgatcggcaatgataattctaattttcttgtttgatgattagtatctccattgcattgacaaaaaaaaatggaaacgag

SEQ ID NO: 109528 - DNA, 108 bp, Zea Mays
ggtgtgggacatgcgatgaaattttttaaccacatcctgaaattcggtctcacgggaagtcgaacacgggactcgaggagtgctactcagaccacctaaccaactcag

SEQ ID NO: 109529 - DNA, 852 bp, Zea Mays
aaaaaagttgcataatgtagaagcccatgttgaagatgagagaaaatagaaccacattccataaacccaaaatagcaatcagctcatctgtcagcgccacaggtgaccggaaaaccacggccggcgttcctgcttctctacccggtccgaattgctgaccggatcaacccgagaccttgcaggattatcgatctgattgcggcatgatccgcttcatcctgctgcagaaccggcaggggaagactcgactggccaagtattacgtcccgctcgaggactcggaaaagcacaaggttgaatacgaggtacaccggctcgtggtcaatcgggaccctaagttcaccaacttcgtcgagtttcgcacacacaaagttatctacaggagatatgctggactgtttttttcaatatgtgtggacataactgataatgaattggcatacttggaatgcattcacttgtttgtcgagatattggaccatttctttagcaatgtttgtgagctcgatttagtgtttaattttcacaaggtttacctgatactagatgaatttattcttgctggggagctgcaagaaacaagcaaaaaggcaataattgagcgaatgggtgaactggagaagctggaatgacgaagaccaggaagatgctgccgcgtgtgttgtattccaatttgtattattcgtttcaggtgttttacatttgctctcctggttcgttccggctgacagcgtgatgcccatgctgtcactcgaaagaatggtagtagtagctagcatgagtacattataaacgtaccttcgaaaacataataatttcccagcaattatttcgttcccctctgcagtgaaa

SEQ ID NO: 109530 - DNA, 903 bp, Zea Mays
gtactatcacgatcagcaagacctcgacatataagctaacgatcagcagaacacgtgctacatcgaatactttcctccaaaacagcatcacgtagcaaatggcagatgcagttttgttcagcaggaaggcgtcggcttcagcggccgtcgtcgtcctcgcggtagcggtggtgacaatggcgtgccttgcggctccggtcgccgcgctggtaccgtacgggcgccctggtggcgggctgtgggacctgatgctcctcgacgacccattccgggtgctggagcagtcgccgctggcggcgtcatcggtgcccagagccagcctcgactctacgtcggcggccggggtggcgctggcacggtgcgactggaaggagacccccgatgcgcacgtcatctcggtggacgtgcctggggtgcggcgggaggacgtgaaggtggaggtggaggagaacagccgcgtcctgcgggtctcaggcgagcggcgggccgacgaagagaaggaaggcgatcggtggcatcgcgccgagcgcgcggccggacggttctggcgccggttccggatgcccgccggcgccgacgtcgaccgcgtgtccgccagattggagaacggtgtgctcaccgtcaccgtgcctaaggtggccgggcaccgcggccgggagccgcgcgtcatcagcatcgccggcggcgatatgggcggcgtggacgtggcggaggtcatggcgtccaaggctgagatgtgaatgtgatctgacttttgggcgtgacgatgcattcagacagtcatgcttgtgtttcttcttgcgtgtatccggtgcgtattgatcccgttgcgtgagttaatatgtactcataaaagagtatttctagtttctctatgaattaattaatctaaaatttaattaa

SEQ ID NO: 109531 - DNA, 1254 bp, Zea Mays
catgcaccatctctctcttcttctccacctctctactttctcatgacccatgcggtcgtataagacatgaaggtgttcaagggcaagatttgggcagcaataggatcactcatggaccacgccggcgccgcgtccaccaccgccaagtcctcctcttcggcggccgccgttcccgaccgagcactcctcacagacatcgaggcggccatcgagcggtgcaccggcagcagcggaggcggcggcaacgacgacgaccggcacgtccacgagatcctcttcctcgtctccaacgcgcggggcgccatcaccttcctctcccgccgcatcacggcgcgcctcgaggccgcgcgcgccccggccgccgcgctccggtctctgctcctcgtccaccgcctcctccgcgccggcgaccggtacttcgagcaagacttccgcagcctctgggcctcccgcgagctccgcgtcgacgcgccccggtgcagctgctcgcccctcgctgccggcgtcggctacgccagcggagcgtgcgccttcgtccacggctactcggcctacctggaggggcgcatgcagtgggtgatcaaccaggccggtaacctggagcccgcgcggaagccgccaccgccgccgcctgaccacgacgccggaaagcccatgccctcctcttcctccgacgacgccggcgccgagacgctcctcttcaagctcgccatgtgccagaggctgctcgacctcgccatccaactgctgccggacaacaacacgagcgccagcaccgcggcgcggtcggccttcggcattgtgctccgtgagagcttcaaggtctacgatgccttcgcggaaggcatcgacgtcatgctgctactgtcgaagagcctcgccgggcaaagcaagccttcgagggccaccgctcacgagatactgaagaaggcgtgcgtccagacgctggagctcaaggagttctaccacaagtgcaagaggagcagcgcgaacagcaagagcatcgagtaccctctcgtcagggtcgtcacgccagcgcaggccgttgtgatggagatggagctggagctggtgccgatcccggaggaagatggctgccaggaagaagtcgaggccaaacctcaagcagaggcgatcgacggtggtggttcgccgtttgcgcacaagatggagacgacgatcagcacggtatgggtcgggttcgacgatgaggaccagaagctgatcactgctcctgatgctggtgatccctga

SEQ ID NO: 109532 - DNA, 2293 bp, Zea Mays
tacacgctgtacaccacccaaaagaaaagatcagaccattcttctagacattgcacagacgacatgtaccaagaaaaaaaatgtttcggtcccatctgtaggttgcaagctttccatcctttctgtgtctgtgtgtgtttttttttctgcctgcttgaggagtccactaggcctagtagttttagcttaaagatgcaaacttttccacgacaaataaaaacagaaaaggcgtcgtcaaaaccgggcagaaaacaccagctttatactaaatgtttttatatcggcttcgctgtgcgttcggtccaataaccaagcgccacgtcgcacgggcactcctctatttaaccgcctagcagctgctatgcgaggccgcacagcacatcccattcccctcgtctcatctcaagagcgactagagagaggaagagaacaagcgataagctcatctcgcacgcaagatgcgggctccaaggggcggaggcggctgccgcggcggccaggagcatgtggagctgatccctggcatccccgacgacgtggccgtggactgcctggcgcgcgtcccccacgcctcccaccgcgcgatgcgccgggtctgccgcggctggcggagcgccgccgcggcgccggccttcgcgtcggcgcgcgccgcggcgggcgccaacgaggacctcgtgtacctgatgcagttcgggaacccgtccggcgacgacgggcccaaggacggcgacgacgggcccggcagcaccccggcgtacggcgtggcggtgtacaacgtgacgacgggcgagtggcggcgggagcgcggcgcgccccccgtggtgccggtgttcgcgcagtgcgcggcggtggggacccgcgtggccgtgctgggcggctgggacccgcgcaccttcgagcccgtggcggacgtgcacgtgctggacgccgccacggggcggtggcgccgcgccgcgcccatgcggtcggcgcgctccttcttcgcctgcgccgaggccggcggcaagatctacgtggcgggcggccacgacaagcacaagaacgcgctcaagaccgccgaggcgtacgacgccggggccgacgcctgggacccgctgcccgacatgtcggaggagcgcgacgagtgcgacggcatggccaccgtggccggcgaccgcttcctggccgtcagcggctaccgcacggcgcgccagggtgggttcgagcgcgacgccgagtggttcgacccggcggcgcgcgcgtggcgcaggctcgaccgcgtgcgcgcgccgccctccgccgcgcacgtcgtcgtccgcggccgcgtctggtgcatcgagggcaacgccgtcatggagtggatgggcacccgccgcggctggcgcgaggtcggcccgtacccgccgggcctcaaggccggcaccgcgcgcgccgtctgcgtcggcggcggggagaaggtcgtggtcaccggcgcgctcgacggcgagggcggccgccacgcgctctgggtgttcgacgtcaagaccaagagctggaccgtggtccgcccgccgccggagtttgccggattcgtcttctccgtcgcgtccgtccggatctgaggatctccattttctactagtacgtacgtgcaccgttttcgtcgttgctggatccgatgaagactcatcccctccaagatctacgtttgcaatggatggatctgcgcatccgctgacttactagtccgccttgccttcgattcgtccaaggatggtgacgatggtgatcgacgccaacaatgagagatatacatggaggagcgggagccatgggcggttgtaaaatctgaaaaaaaagtggtgagagtgtgaatttggatctggtggtgagtgaatttggatgagtgtggtgtttttgtcccgaggtgaaggacacagactgttgtttgttgctcttgccctacagccatgcttttgctatcgctagcctactagtaataaaaaccactgtacataccggactgtgccatgcgtgtgatctggagcttgaggaattgcgccggatctcatgtcaatggcagcgttgaacagctgccgtgcgccccatctcgaaggcataatctccaattgtttatcgtttctctgactactcaacggctgagcttgattgcaatccaagctttgcgtcggcccatgaatgaatccaacgatgatggaatgggagcagagagttgacactgccccgcgatatttttctttaattccagtcggagggtggggtgaagcttcgccttcaccaggagccgtatagtcccacccatccatttgatatc

SEQ ID NO: 109533 - DNA, 1599 bp, Zea Mays
ctcccaccgcgcgatgcgccgggtctgccgcggctggcgccaacgaggacctcgtgtacctgatgcagttcgggaacccgtccggcgacgacgggcccaaggacggcgacgacgggcccggcagcaccccggcgtacggcgtggcggtgtacaacgtgacgacgggcgagtggcggcgggagcgcggcgcgccccccgtggtgccggtgttcgcgcagtgcgcggcggtggggacccgcgtggccgtgctgggcggctgggacccgcgcaccttcgagcccgtggcggacgtgcacgtgctggacgccgccacggggcggtggcgccgcgccgcgcccatgcggtcggcgcgctccttcttcgcctgcgccgaggccggcggcaagatctacgtggcgggcggccacgacaagcacaagaacgcgctcaagaccgccgaggcgtacgacgccggggccgacgcctgggacccgctgcccgacatgtcggaggagcgcgacgagtgcgacggcatggccaccgtggccggcgaccgcttcctggccgtcagcggctaccgcacggcgcgccagggtgggttcgagcgcgacgccgagtggttcgacccggcggcgcgcgcgtggcgcaggctcgaccgcgtgcgcgcgccgccctccgccgcgcacgtcgtcgtccgcggccgcgtctggtgcatcgagggcaacgccgtcatggagtggatgggcacccgccgcggctggcgcgaggtcggcccgtacccgccgggcctcaaggccggcaccgcgcgcgccgtctgcgtcggcggcggggagaaggtcgtggtcaccggcgcgctcgacggcgagggcggccgccacgcgctctgggtgttcgacgtcaagaccaagagctggaccgtggtccgcccgccgccggagtttgccggattcgtcttctccgtcgcgtccgtccggatctgaggatctccattttctactagtacgtacgtgcaccgttttcgtcgttgctggatccgatgaagactcatcccctccaagatctacgtttgcaatggatggatctgcgcatccgctgacttactagtccgccttgccttcgattcgtccaaggatggtgacgatggtgatcgacgccaacaatgagagatatacatggaggagcgggagccatgggcggttgtaaaatctgaaaaaaaagtggtgagagtgtgaatttggatctggtggtgagtgaatttggatgagtgtggtgtttttgtcccgaggtgaaggacacagactgttgtttgttgctcttgccctacagccatgcttttgctatcgctagcctactagtaataaaaaccactgtacataccggactgtgccatgcgtgtgatctggagcttgaggaattgcgccggatctcatgtcaatggcagcgttgaacagctgccgtgcgccccatctcgaaggcataatctccaattgtttatcgtttctctgactactcaacggctgagcttgattgcaatccaagctttgcgtcggcccatgaatgaatccaacgatgatggaatgggagcagagagttgacactgccccgcgatatttttcttta

SEQ ID NO: 109534 - DNA, 99 bp, Zea Mays
ctggttaattgcctgcttgcttttttcgttacgcgcggtcttgttaattgtgtagtttggccttgtgcggttgactggttgtctcagactcagagcacc

SEQ ID NO: 109535 - DNA, 2774 bp, Zea Mays
tcccgtcggtctagacttttagtccacggtccaccccctgacccaaaccctggaatctcgcccaccgccccactcgccgcccccgctggtcatccctccacccaaccccgctcctcggggaccgctcgtcgccggagccgccggcggcctcgagcgatagggatcgacagcgagctcgcgagcccgtcccgcaacctgatctgcgaggaccaccgggtgggaggctgcgagatcgacgacgggctcggttcgattcggctggcgcgagcaccagcctatctatctgagacgggcatcggcggcggagagacctggcgcgcggcggaacgctgaggttatcttgtattctcgtcaagacaactctcttccctcagagcactgaacaatcattgtgatttatgactaactctgagtggtgaaagaattaagaaaatacagaacaccgcgatggctgttagatgctcctgtactgctcttttccctctattcttctgttttatgatctgtcagctttgctatggcactgtaactgatatccaatgtctgaagaagctgaaggcatcagttgatcccgacaataagttagaatggacattcaataacaatacagagggatccatatgcgggttcaatggtgtggagtgctggcatcctaatgagaacagggtcctttcgcttcatcttggtagctttggtcttaagggcgaattccctgatggacttgagaattgtagtagcatgacttcgctggatctctcaagcaacagcctctctggccctatcccggctgacatctcgaggagacttccatttgttacaaaccttgatctgtcatttaatagcttctcgggagagataccagaagcactagccaattgttcttatctcaacattgtcaatttacaacataacaaattgactggaacaatcccagttcagcttgctgcactcagtcgcctagcgcagtttaatgttgctgacaatcaattgtcagggcagattccttcatctttgagcaagtttccagcatctgattttgcaaatcaagacctttgtgggaggcctctaagcaatgattgcactgccaattcaagcagtcgaacggggataattgttggttctgctgttggtggtgcagttataactttaataatagctgctgttattttattcattgtcttgcggaaaatgcctaagaagaagaagttaaaggatgtagaagaaaataagtgggcaaagactattaagggagcaaaaggagcaaaggtatcattgtttgagaaatcagtttcaaagatgaacttgaatgatcttatgaaagcaacagacgattttacaaaggacaatattattggaactggtcgatcaggaactatgtacagagcaacacttccagatggttcattccttgctatcaagaggttgcaggacactcagcattcagaggaccaatttacatctgagatgtcaactctgggaagtgtaaggcaacgtaacttagtgccgcttttgggatactgcattgtcaagaatgagaggctcttggtgtataagtacatgccaaagggttcactttatgataatttacaccagcaaaacagtgacaaaaaggcattagaatggccattgaggctaaaaattgccattgggagtgctagaggtttggcgtggcttcatcacagttgcaaccctcgcattcttcataggaacattagttccaagtgcatattgcttgatgatgactatgagcctaagatttctgattttggcttggcaaggcttatgaatcccatcgacacccacctgagcacatttgtgaatggtgagtttggtgacttagggtatgtagctccggagtatacacgcactcttgtggccactccaaaaggggatgtgtatagctttggagttgtcttacttgaacttgttactcgtgaagagcccacacatgtgtcaaatgcgccagagaacttcaaagggagtttggtggattggataacgtacctgtcaaacaactctatacttcaggatgcagttgacaagtctttgattggaaaggacaacgatgctgagctgcttcagtgcatgaaggttgcatgctcttgtgtgctttcttctccaaaggaaaggcctacaatgtttgaagtttaccagcttctgagagctgttggagagaaatatcatttcagtgcagctgacgatgaattgacgatgctacctcaaaatgccaatcctgaagatgagcttattgtagcgaactagtttagcctatgtgatgagtgggtgcttgtcggataccaaatgttgcaggagttgcttcaacttggaataatcagaattatttctctatcttctctatttttctggcgctgcatgtcaggcaagcactaggatttgtcgttcgattcgaaggtctatcaatgtgtgctgtactgctgtttacgtttgtacatccttgccttgtgtatcctcaggattgttttcttctggtgttgtaagatggatcaactgtatcattatcgagattttagctgtagtggtagcaatgtgaaacactgttggccgatcattcatctgcagtttttgtgttttttttttcgtttaacatttctatttattatttccatgctcctttctaattcaaacgttagaccagtggcgactggtttccagtggtgagagttttagtttgtggtttgatgaagtctgagacatgctgttaggtacctggcaggatgtttctgtatgtgcgcgatgctgtacttatatattac

SEQ ID NO: 109536 - DNA, 219 bp, Zea Mays
atggcggcggagggcgacaaatccgagacggtggcggtggtggagggcactgtcgcctcacgtcccgctcgcgactgcgtcggggaaggacgacgatggagcggcagcagagcggatggcagcggtgtggacgatagtggcggcggagggcgtggttgctcggatccgcttgtgtcccttccaaactggggaaggttgcccggcctcaggtggccatga

SEQ ID NO: 109537 - DNA, 1722 bp, Zea Mays
atggggggatctccacagttcacagtagttccaggtggtagtatcttgtgtgtatcagaggatgagatatccaatataatatcacgagctcttgctgtatccgaggaacgtcgacacttactgatggatgctatcgctgagactgaaccagcagataccacaaggagtaaaacaatggacaagtcttacaactctttatctgaaagttcatctacttctctgtggtcttcagattctgaggcaagcatttcgtctgacgacctctccagctatgatacctcgcttcttctatcgtcctctctccatccagaaatagatgtcaacgggacaacaactctcaaatggaggtactcagtcatctgtgtacactctaaccagttctacaacctccgaaggaaatgctgcccatcggagcttgcatacgttgcctcattgagccgttgcaagaggtgggatgctcagggcgggaagagcaaggcattctttgcaagaacaattgatggcaggctcatcataaagcaaataaagaagacagagtttgattccttcataaaatttgcgcctgattacttcaggcatgtcaaccattctctggacacggggagccagacttgccttgccaaaatcttagggatctatcagcattatgatgagcctgctggttcagtcatggagctgctggagcacttggagggggaggcgaggtcagacacgcggaagctccaccccctcgtcgacgagttcatccccaccatcgacggcgagaacggcatctgctacacgcacccggagaggctccccgctacgtgtgagcaaggacgggcttgtccggcacttcttccaccggccgtccagggcgtacacgacggggacgaggaagcggcggaaggtgcacagcggcgacgacggcggcaagacgcggtggcacaagacgggcaagaccaggccggtgctgtccaacagcaggccccgcgggtacaagaaatcctggtgctctacacaaactacggcaagcagcgcaagcccgagaacaactgggtgatgcaccagtaccacctcggctccgacgaggaggagcgcgacggcgagctcgtcgtctccaaggtcttcttccagacgcatcctaggcagtgcggttacaccatggccagggagtccgccgtcattgtccctgccgccgccgcagtcaccggcagcagcaacgcgtttattgccggccatcaccagagtggcggtggtggtagtagcgtcctcagagaagcaaacggcggagctgatcagctctacagcccaggagcaatgatggggacgaatcctgcagctgcaaaacacagaaaatctggccaagacctatttatctatttacaggtaagaggaggccatgctgcgcacatctgtcggcatgaaggccagtacaaccagcaagacgagcaggcagaccggcagccacaacagcagcgacggcggcggcggcaggggaggcagcaccagcggcagtatcagcagcgagacggtgaggcaggcgagcacgaggaacgccccgatgctgaagtaggtggacgcgatgaccttcttgtcgaggaaatccgcctcctgctgacgctgctgcagatgccgcttcacggcattcctcctttgtattgccgcccctccttccatcgcgctagatcggcttgccatgtgttctttggtgtaggtggaggtggagaccagtcgcagtga

SEQ ID NO: 109538 - DNA, 606 bp, Zea Mays
atggcccagcagcctggctgcgctcccgtgctgcagctcttgtgtttgcgtcgcctggctggctcgagagccaggctgtgcgcgtgcaaattgagtctctcagcctggctccacagaaacgagctcagggttgcaaagaaacatcttgctggaaggattgatcgtgtagattgtagtttagatgaatgccaagtaattacagaagccacaagggaagaggttacaatcatccatggagatctaagtgccttccagaaggaaatggaaacagttcatctcgtagttcgtagtctggagacaaagcttggacgcctagcttatactcaagatcggacaacacgaggaatatatgatttgtgtgaattcactaaaagattggatcagagcccgaaagctgatactcgtcaggttacatcatcaacttctcgtcctgctattgaatcctcagagagaattattagggttgcttctttacccccgactttggaaccagagtctcctagaattgaggcacctaaggttgtgcgctcatctacagtcatgtcagcatcaggtcttagtttgctagctggaactacaataccacctaaaagatgtgcacattga

SEQ ID NO: 109539 - DNA, 77 bp, Zea Mays
ggaaatagttggcagaatgcctataataaaagacggtgcattaagtacggaaatcaagcaatgggtgatataggcaa

SEQ ID NO: 109540 - DNA, 1831 bp, Zea Mays
gtctgcgtgtgcgcgctgactcccccctctcccaaaacccccacactcccccttcggcatctccgatatccgttcagcaatgaccatgaacgctgcgatcgcctcccgactcggcctcgccgtctccaggtgtggggctgggtcccgagtggacagccggccgctgacgccggcagtgggtttcacggcggggccgagggcgcgctcagtagccgtcaccgccgcctcctcttctccggcgaccggtggcgtgacgccggtgccaccccgctcgaatcgctcggttatgaagcgtcacacgctatcagtttttgttggtgatgaaagtgggatgatcaatcgaattgctggggtttttgctagaagaggatataacatcgagtcattggctgttgggttgaacaaggataaagcattatttacaatagtagtgtcaggaacagacaaaatattaaaccaggtcgtagagcaactaaacaagcttgttaatgtcataaaggttgatgatttatcaatggaaccacaagttgaaagagaacttatgcttataaaagtaaatgcagagcgagaaaagttacctgagataatgggtttggttcgcattttcaaagcagaagtggttgatctttcagactacacactaactattgaggtaactggagatcctggaaagatggttgcaatacagaagactctgagcaaatatgggatcagagaaattgctagaactggcaagatagctttgcgccgtgaaaaaatgggagaaactgctccattttggaggttctctgcagcttcttatccggatctcgaagtggcaataccttcaaatttccagcaaaacactggtgtgaaggcaatcaatcagaatccggaagaatcttcagggggtgatgtttatccagtggaatcttatgaaagcttctcatcaacaagtcaaattctggatgctcattggggtgttatgactgatggcgatccaacagggttttgttcacatactctatcaattcttgtgaatgatgtccctggagttctcaatcttgtaacaggtgtattctccagaaggggctacaatattcagagtcttgctgttggcccagctgaaaaagaaggaacttctcgcatcactactgttgttcctggaactgatgaatccattgccaagctagtacatcaactgtacaagctcattgatgtttatgaagttcaggattttacccacttaccatttgctgctagagagttaatgatcataaaggtcgcggcaaatgctacagctcgaagggatgtcttagatattgctcagatttttgaggcacagaaagttgacatatcagaccacacaattacactactgctcaccggagacattgacagaatggttagattgcaaaagatgctagagcagtatggcatctgtgaggttgcacggacaggccggattgctctgctccgagagtctggagttgactccaagtacctccgcgggttttccctcccgctgtaattctccatttccagacattacactgcgcgatttcaggtcgccacggtcattttgacttctgagaatggagctggaggaatcattcaaaaatccaagggtgagaactgtagaaataatagctgttaagtttcttgcttctgcaagtatcacgcagcacatggggagagatgaagtatcatacacaacaatatgtctgcagtcagaaacgatcgatgaggggtccaatatttttttcactacacatgttgtatacgtacactggtagtatcctagttgaaggaaacgcaatatatatatattcactacacatgttgctcaacc

SEQ ID NO: 109541 - DNA, 1828 bp, Zea Mays
gcagcagctatgcgagactttcattgtgttttgcaacaggagcacaggcaggagagaggcgagatgcgaaggctagaggtccttgcatggtcttgcgccattgccacggtggtgctagctctcgcgccgggtgtggctgcggccagcgaagcaacgcatgacgtggacgacgtcagcctcgccgtctcaaggatcggcaccgcagcaccgtcgccgaccagcaacgtcacggcgatctgcctgtcgacgccgtacccgagcgcgtgcgagacggcgctctcgtcgccggcgcagggctcgtccggcacggacgacccgttcgcgacgtccgtgcactacgcgatggcccgggtcgcgtcggcgcgcgctgtggcgcggaacctctcggccgcgcatctccgcggcgcccgcccgccgccgggcgtgcaggactgcgccgagctgctcgacatcagcctcgaccagctgggcgacgcgctcgcggcggccgcgcgcgacgcggacggggtgaccacgtggctgagcgccgcgctgacgaaccaggccacgtgcgacgacagcctcgcggccgacccggactccgcggggcgcggggccatccgcgcgcgcctctccgcgctcacccagttcatcgccacggcgctggctctgcacgtcaacaagtccaaggctcaccacagcggcggcggctcaccgtcgtcaggctcgctgccgactccagcatcgccgttcccgtcctgggtaacccagcaggacaggaaactcctggagtcgtcccacgcgggagccagtggcggcctcgcggtggacgctgtggtggcgctggacggcagcgggacgcaccggaccattaacgaggcgatcgcggccgtgacgacgaccgcggcgaacggcggcggcgcgaggaaggtgatacacgtgaaggccgggcggtacgaggagagcgtgaccgtctccagcaagcagaagaacgtgatgcttatgggcgacggcaagggaaagagcgtcatcgtcggacacaagagcgccggcgaaggttacaccacctacgcctccgccaccgtcgctgcgatgggctcgggcttcatcgccaagggcctcaccatcgtgaacagcgccgggccagggaaggggcaggccgtggcgctgcgcgtcggcggcgacctctccgtggtgtaccagtgcgccatccaggcgtaccaggacacgctctacgtgcactccggccgccagttctacgccgacgacgacatcgccggcacggtggacttcatcttcggcaacgccgccgtggtgctccagagctgcgacatccaggcccggaggccgagccccgggcagaaggacacggtgacggcgcagggccgcaccgaccccaaccagaactccggcatctccatccaccgctgcaggatcaccggcgcgccggacctcggcggcacgccggtgtacctgggccgtccgtggcagaggtactcgcggacggtcgtcatggagagcttcctcgaccgctcggtctcgccggccgggtggctcgagtggtcgggccagttcgctctgagcacgttgtactacggggagtacggcaataccgggcctggtgccggaacgagtcggcgagtgacgtggactggggtgcacacgtcactgtccaagtcagatgccgcgaggtttaccgtggcggaattcatcctcggagacgaatggttgggtggcactggagtcaactatatttcaggactgtgaggtgaatgtctcgcctccttgtccgtatatgtgtacgtaattcagtgattttaataataactaaataaaagattcctgggta

SEQ ID NO: 109542 - DNA, 500 bp, Zea Mays
gcatcaagaaaccattaatctcttcagtgtgaagaaaaagagcttagctagattcatggcgctgctcaagacaggctccaagagcactctggttgtcgccgtcgtatggctgctgatagcaacccttgctacggctgatggcgctactcaaaagaagctccaaggggcctgcgaaaaaatagtgaaaggcgcctgtagtgagaaggtctgtggcggaatgtgcgctatgataggctccaacgctgttgggtcatgcaaggtcgatggccgggtctcctactgctgctgccaacaaaaaacccccacacacatcggtgtccactagctgggatctagcttgctttttgatccagacgtatgattgttgaactgaaatttttcgttattataagcaaagtgtatggttcgtgattggtctacaaataatacatggtaccaaagtatgttacatgcatctttcaatagacttctgatacaatacatattgtcatctttcgata

SEQ ID NO: 109543 - DNA, 384 bp, Zea Mays
atgatgagggtcatggacaagctcaaagggaagaagcgtggagaccgtggtgactcctcgagatgtatagtgctcagatgggatctcaaatgggaccccagttcacccatccgtcacaatctggacagaccccaaacaccaatgaaacacaggattatgagaccggacaaggaaacccatagatggacatacagtggtcgatgcccccctagaggacagattcttcctcctccacaaccaggtatgggatattggccgccaccgccatggggatatcctacacatccaatggggccttggggacgccccccatggccaacacaaccacttccatcactagcggaagttttacgccgaggtgttggtagagtaactctctgtcag

SEQ ID NO: 109544 - DNA, 3402 bp, Zea Mays
accaagatgatgccgtcgggtccgccgaacccgatggggcacgggcagccagtgggcggcgctgccccgtcgctactccggacgagttcttccctgctcagtggcggtggtcagccgggtatgggcggaggtggtggtggcatgctttcttcacagtcgcccttctcttcccttgtctccccacgcacacagtttggtggcaacggtcttctgggaggtgcctctctgctgaaccggccgccattcgggaatggtggccctatgccaggtccagggtcaatgcaggctgttgggatgcagatgagtacactccagcagagagctgggctggatggtgccagcgatttcattagcgcggaagggtcggatcctctatcattcccgtcttcttcacaggtcaatttgggcaatcagatgggatcagataatctgcaggcgacttcgcagcagcagcagcagcagatggatgccatgcaggatatgcaacagcagctaccaatgtcttacaaccagcaacagttgccaccacaacactcgcagcagctccagcagccacaggctacagtcaagttagagaatggaggaagcatgattagcatcaaaccagagcagcagatggcacaacctgaccagatgatgcgaagtgctagtggtgtgaaacttgagccacagcagctgcaagcccagatgatgagaagtttaagttcagtcaagatggagcaacagacttctgattcatcagcattcctgcagcagcagcaacaacaacaacatttgttgcagctgacaaaacagattcgaaattgtccggagcttgtatcaataggtggaccaaatgcaattgcaaaccctcaagctgccacagctgctcaactgaccctcttgcagcagcaacggcttctgcatatgcaacagcagcagcaacaacagattctaaagaacttacctttgcagagaaaccagttgcagcaacagcagcagcatcaacagcagcagcagttacttcgtcaacagagtctaaacatgagaactccaggaaagtcgtctccttatgagccaggaacctgtgcaaagagattgactcattacatgtatcatcaacaaaacagaccacaagataacaacattgaatactggagaaactttgtcaatgagtattttgctccaaacgctaaaaagaggtggtgtgtctcgctttatggaagtggtcgtcaaactactggagttttccctcaggatgtatggcactgtgagatttgtaatcggaaacctggccggggttttgaaacaacagttgaggtactaccgcgattatgccaaattaaatatgccagtggtacacttgaagaacttttgtacatcgacatgccacgtgagtcccagaatacgtctgggcagattattttggattacacaaaagcaatccaagaaagtgtctttgagcaattgcgtgttgtacgagaggggcatctaaggatagtttttaatccagaccttaagattgcatcttgggagttttgtgctaggcgtcatgaagaacttgttccgcggagatctataataccgcaggttagtaatcttggcgcggctgtacaaaagtaccaggccgccacacaaaattcgacgagtttgtcagctcaggacatgcagaataattgcaactcgtttgttgcatgtgcccgtcaattggccaaggcactggaggttcctttagtaaatgatttaggatacacaaaacgatatgttcgctgccttcagattgccgaggtcgtaaactgtatgaaggatttgattgatcacagcaggcagactggatctggacccattgatagcctgcataacttgccacggaggacaccttcaggggccagcactcttcaaccacagcagcagcaaactgaggagaagcaggccattccccagagttcaaaccagagtggtcaaaattctgctcctatggctggtgtgcagccttctgcctctgccaatggtgatgtgacatcaaatgttactctcagttgtgcaccttctacatctgcgccttcaccatcagttgttgggctcttgcaaaattcaatgaattctagacaagaccatgcaatgagcagcaacaacggtggtccatatagtggaggcaatgtggctattccgaaggtgaactctacaagctcgctgcactcaaacccacctacatctttcccttccccagcaccgacaacgtccaataatagcatgatgcccgctcctcaaaatacaaatcaactaagctccccaacgacatcaccaagcatacctccgatgcagccacctgctgctcggcctcaggaggccgagccaagtgactcgcaaagctcggttcagaagatcttgcaagacctgatgtcgtcgcagatgaatggtgttggccactcggggaatgacacgaagacaccgaacggactaacccatggtgctaatggggttaactgcttactcggcaatgctgccgcgaataactcggggataggaggaatgggatttggcgccatgagcgggttcggtcatgggatgaggacggcaatggcgaacaatccgatggcgatgggtgcaaggatgggaatgaaccacggtgcacacgacctatcgcagctgggtcagctacagcaccagcagcaacatcagcagcagcatgacataggaagccagctgctgggcggatttagatcagggaacagcttcaataacatgcagtatgactggaaaccctcacaatagagcgagcgaccagaaaccataagagtgcagtgtgacggtgcatctgcccttgctggcaacgcgtgtggagcatttatggtgccatagtctcccctttgggcttccgcattaatgctgccgtgaaagggtaccataagcgatagcgtgcgtcccggctggtacatgcaaagtctgtaactgtcagtttgccaatctcttcttgatctactcccctgagttttacaacattttgccgattctttactgggagttgcaattccaccatgtgccacatcctttgtccactcttcacccatttaatgctgtgaaaaaaaggttcaagtagttgtagcatggtataacaggtgtgtgtgtgggaattccatattagctcttagggcatgtacagtggtgtttaatgtggaggctcttaagctgtttaaggggtgtatttgcaaaaaaatcttagagccgtctctccgtgaagagacgcctctggctcgtaaaccaagtagtaatagacgtctcacttcctactgtacgaatttgtcgtctgttctatcaatctgctgttgtacaaatacatttaattctgtatttattagtagactacatttatagacactccattgtataatagagtctcttagttgtctcttgtgcttggag

SEQ ID NO: 109545 - DNA, 750 bp, Zea Mays
ccgacgcatgcaactatctcaatcgtcgtcgtcgtctatttatccaccgcaccgcgcgccgaggcgtcaccgtcgacacgtatgtaccagccctgtgcatgctgggccgccacgcttagcactcgcaggtcacagcacaggcagcgcctcgctctcaccaaccgcgccgcccgcggccgctacaaatagtaccctcagcgcgcgcccagcacggcacgccggcgtcgatcgcaccacgcacgttactatcatcactcgaccaaactaacaacagctcaggctgaaacagcgatgacgacgacgacgacaacgctgccgacggggcgcgccgtggccctgctgctgctcctgctggccacgacggcgacggaggccgcgaacccgtgcaacccggcgcagctgacgccgtgcgcggggccggcgctgttcggcggcgcggtgccgccggcgtgctgcgcgcagctgcgggcgcagcaggggtgcctgtgcgggtacgcgcgcagccccaactacgggagctacatccgcagccccaacgcggcgaggctcttcgccatctgcaacctgcccatgccgcgctgccgttattagcgggcagtagtatatatactagctagctattccaatacaatcatgctcagtcgttggtatatcgtacgtactcatgtgaagcatgcggtgcacaccatggatcatgtaggacgttctgttacatgaataaaatccaggacgtctgagtttgtgcggcaa

SEQ ID NO: 109546 - DNA, 2924 bp, Zea Mays
cccgtctcaccaaacccccatatgattctgacggtaatagtcattcgccgccgctcctaatcctcaccatcatcacgtgcaattaacaaccctctccgaccaatccccgtcataattacaaggaagaccttgcttcccgttccccctcctctgcgttcatggtgctggtggccgtcgaccgccacctccgctgcgggggcctctaatggcgcagtacaggcagcagtacggcggtggcttctccgactcccgcggccatcagcaccaggcgctcccggactggcaccggcctcaccacgcctctgccaagccatcctcccggatccgccgccccgggaagcccgcgccgcgccgccgatcgcctgccgctgccgttgccgccgcgctcctcctccttgccgccgtcttcctcctctcgcgccgcatttcacgcagttctgcagaggtcagccaagattcgagcgccggggaggcgttgccagagtggaaccagagcaaaagctggaagaagctcaagttcgggcaaggcggaggtggccggagcgcgcgagactccaggtactgggaccgggacgataggcgccgcgacgaggactacactgaggacgagaaggagaagaactcaggtggaactggggcctccacagatgctggtggcagtggcgataaaggtaccacctctgaggcaggtggcgaggataaaggattgactctagagactggcagtggcgctaaggatgttccagaggcgtctgaaggtgggaaagcagggaccttgtacaatgagggtggcaggaaggagctggcgcagtatgaggctgcagccatgggagccacaggaacaggggtgaaggaggttgatccagacgatgagtatgatgatggcatcgatatgcaggatgatttggaggatgctcatctgcattcatctgatggtgggaggaagcttggtggtggcagccatgagagtgttgaggagaaggacgatgtaactactgagaggcgcacagaagcaggtggagggatcgctgataatcatgatattactagtccagacaaaaagaaggtttcaggtactggagataagaagcatgtgtccaagaagaaaccaaaacgtaagaagtctggttcaacttgtgaaatgaagtttctcaactcaaccgctcagcttgtggagcctgggagaaatgagagattctctagttttaatttgaagtatgtagaagttgaagaaagacctattggatcagaatattgggaaccgagatttgccggccaccaaagtctgcaagaaagagaggagtcatacaaagcccatgaccaacagttgacatgtgcttttgttaagggtccaaatggtacaagcactggttttgatatatctgatgatgatcgaaagtacatgagtaaatgccacattgctgtatcatcctgcatctttggaaattctgatcgactgaggactccatttagcaaaacgattacaagcctctcaaagaagacagtttgctttgctatgtttttggatgaagtcacattgcaaactttagaatctgaaggccagaaaatggacggcatgggtttcattggtatatggaagatcatattgattaagaatatgccgtataatgacatgcgtagagtggggaaaataccaaaatttttggcacacaggctatttccatcatcgaggttctcaatctggttagacagcaaactgagactacaaactgatcctatccttatcctagagtattttctctggcggcatggttatgaatatgctatttccaatcactatgatcgccattgtgtttgggaggaagtagcacaaaataaaaagctgaacaagttcaaccacacaataattgaccagcaatttgagttttatcaagcggatggactgacaaggttcaacccatcggatcccagcaggcttctaccaagctatgtccctgaaggctcttttatcgcaagagagcacacaccgatgtccaacttattttcctgcctgtggtacaatgaagttgatcgattcacacctcgtgaccagctcagctttgcatatacatacttaaaactgagaaggacaaatcctgacagaccattccgtctcaatatgtttaaggattgtgagagacgatcaatagcgaagctattccatcaccggacagaagagagacacaacagtgcacaattaacaagatgacacatccttcctagtgatggagggcagaagagagaggtcagggattgtattctttgatatagttcagctatccacaagactctccattgaaactttatgcccctgtctaggagtttgtactttatataatgcaagccttctttcctttgtcactccagtcctgcaggccagttcccgcctaacatttttttgcagttgacaaggcggattaggagtttctaactgtttggtttttctttgttctccgtaaatctctgtttattcttttgataatatggcccatggatgatctggggaagctatgagtgatcatggacttttcccagattgcccatgcacaatgtattattaccacaccactgtaggactgtgtagtgaggccattgttctcctgcaattctgactgaaatgtaccatacacaactagtaaattactcaccccttacgcgagtctttgatcgatgtatttacacagttaaaagaatattgcttaagcatatagaaacaataatatatggatacatgtaaacagaagtgatagaattatcttaaacagtagtagaatggttcagtctagaaatataacaacataagcaggatatatgttatattacatcggtactgcttgtagagattgagtgactataaacatgcacaaaagcaacaaaatattgatcttaaagatcaaagaataatgaggcgcttgaagaaagtt

SEQ ID NO: 109547 - DNA, 2499 bp, Zea Mays
cttttaaagtatctttttattttatccatattggtatgttgttacatttgtcagcatattcatggctctattgttgtggcggcttcgacggctgtggtggcggctgtggttgtggcgggtttgttgatggagctagggacggtgatggtcgctgctttgacgctggtcctggaccaccgctgctcccacctccaagtggtttctgggacggtgacggtgatggtcgctactgagctgggtgtggatacatgcccaagaacaataggtgacttgggaatcataccattgttctgtccagtcctaatttataggacaaagcccgctatggtaatacttatggacatgtcggctcgcatgtcttcccgtctcaccaaacccccatatgattctgacggaagaccttgcttcccgttccccctcctctgcgttcatggtgctggtggccgtcgaccgccacctccgctgcgggggcctctaatggcgcagtacaggcagcagtacggcggtggcttctccgactcccgcggccatcagcaccaggcgctcccggactggcaccggcctcaccacgcctctgccaagccatcctcccggatccgccgccccgggaagcccgcgccgcgccgccgatcgcctgccgctgccgttgccgccgcgctcctcctccttgccgccgtcttcctcctctcgcgccgcatttcacgcagttctgcagaggtcagccaagattcgagcgccggggaggcgttgccagagtggaaccagagcaaaagctggaagaagctcaagttcgggcaaggcggaggtggccggagcgcgcgagactccaggtactgggaccgggacgataggcgccgcgacgaggactacactgaggacgagaaggagaagaactcaggtggaactggggcctccacagatgctggtggcagtggcgataaaggtaccacctctgaggcaggtggcgaggataaaggattgactctagagactggcagtggcgctaaggatgttccagaggcgtctgaaggtgggaaagcagggaccttgtacaatgagggtggcaggaaggagctggcgcagtatgaggctgcagccatgggagccacaggaacaggggtgaaggaggttgatccagacgatgagtatgatgatggcatcgatatgcaggatgatttggaggatgctcatctgcattcatctgatggtgggaggaagcttggtggtggcagccatgagagtgttgaggagaaggacgatgtaactactgagaggcgcacagaagcaggtggagggatcgctgataatcatgatattactagtccagacaaaaagaaggtttcaggtactggagataagaagcatgtgtccaagaagaaaccaaaacgtaagaagtctggttcaacttgtgaaatgaagtttctcaactcaaccgctcagcttgtggagcctgggagaaatgagagattctctagttttaatttgaagtatgtagaagttgaagaaagacctattggatcagaatattgggaaccgagatttgccggccaccaaagtctgcaagaaagagaggagtcatacaaagcccatgaccaacagttgacatgtgcttttgttaagggtccaaatggtacaagcactggttttgatatatctgatgatgatcgaaagtacatgagtaaatgccacattgctgtatcatcctgcatctttggaaattctgatcgactgaggactccatttagcaaaacgaatccaataacatctcttagaaatgtatttcttattacactttcacagattacaagcctctcaaagaagacagtttgctttgctatgtttttggatgaagtcacattgcaaactttagaatctgaaggccagaaaatggacggcatgggtttcattggtatatggaagatcatattgattaagaatatgccgtataatgacatgcgtagagtggggaaaataccaaaatttttggcacacaggctatttccatcatcgaggttctcaatctggttagacagcaaactgagactacaaactgatcctatccttatcctagagtattttctctggcggcatggttatgaatatgctatttccaatcactatgatcgccattgtgtttgggaggaagtagcacaaaataaaaagctgaacaagttcaaccacacaataattgaccagcaatttgagttttatcaagcggatggactgacaaggttcaacccatcggatcccagcaggcttctaccaagctatgtccctgaaggctcttttatcgcaagagagcacacaccgatgtccaacttattttcctgcctgtggtacaatgaagttgatcgattcacacctcgtgaccagctcagctttgcatatacatacttaaaactgagaaggacaaatcctgacagaccattccgtctcaatatgtttaaggtgggcacggttgaccgccgaagtagctacttcgaaaattgcaagcgttag

SEQ ID NO: 109548 - DNA, 96 bp, Zea Mays
agcacacgcgaccgacgggggtcacgagatatttgcagctaggccacagtttgcggttgggcacatgtggttatcgtgaatgatctgaatattcag

SEQ ID NO: 109549 - DNA, 1255 bp, Zea Mays
tggattgaacccattcaaacccgcatcaacccgctaaccaaacacacgctaaaagctattctccacggaaatttccccattaccatccctcctcaaaagtgcccgtttcatgatgcatccaatgaggcagactcgccatttattcgtccactcaacctcaccacaatcagtttctttctacagtcatctctgataattaactaaaaaggtaccgctctctgtttgcaattgtacagaatctcaatgggatacacaggcatgccgcaccagagcaaaacacgccacagacccctccctcccattctcttactttgccctcttccctcgcaaaaactaaagccggaggcttggcgagtacgttggcgccagcttttgtcccccctcctctgtcccattacccatagcgtccacgccaaggctgtttacagctcgtccttgacgggctcggtcttctcggctgcgtcagctgccttcccagatgccgtcgccgtcgcctggacggcgctggcggtctccttgctcttgttgatgaagtcgacgatgtcatccgccgtcctgccactgtcgtaggaggtgaccttcccgctgggagtcacgaagtacatggttgggtagccttggacctcgaactcactgggcacgtcattggcgaagcagaccatcttagcaatcacaacttcctcgtcacttagaagagtggtggctgcctcttccaagatgggcgccagcttcttgcagtgcccacaccagggggcatagaattcaataagaactgcaacggaattagaccacatcgtggatgttgtcagccacaacaaccttaacaggctcattgttgacctcaggaataggctcagacttcttgaacggcgtcaatttgccatcctacaaatatagtagatcaatgagctctacaatcatattaatcaaatgaaacaaataatcgcaagagtgtattaaagtccaaacaatacttacaaagtactccttcaaccaagagacaatctggtcagcctcaatgtgatccttcaagaacttcttggaatcaccatcctgaatgaggataaggggtgtctggtcctctttcagaccaaagtactggaaggcaccctggctggcttcaatgtcaccaataaggaacttgatttccttgtccttgaactcctcagcggcagcatagtaaacagacttgaaagaatccaatggtcccgtggagaagttcaaaaacagcatagcctgccaatcatttagtgtc

SEQ ID NO: 109550 - DNA, 434 bp, Zea Mays
atggatgacttcactttccccactctccatgcaggagtgcagcttcttccatcagcattcccgcaccagctcggccttggtggctccccttcgccgtggttcctcgccgctgctgccgaggaggaggaagaggaggaggagaagatggacatgctgtgggaggacttcaacgaggagctcgcgagcgtgccgccgctgtgcccgctgagccctgtgatcaacaagggagggctggcgatgaaggaggcggccggctggctcgacgacgacgagatgattgtccttgacctggagaagcacggcaagcatatgcaccctcaggacggcagggtggtccggcgccggaagtggagcctgatgctgatgctcaggctcgtcaagaagctgttaatggtcaagaagtacaggaacccgagaactgcacccatctgatc

SEQ ID NO: 109551 - DNA, 217 bp, Zea Mays
tggtgaaacagagttttgtgtgtatgtaccaacagctaaaatgtaaatacgatattatcatagttgagtacaggaataattatctcttatatcttattgcaaaatttgaaacagttctcctgtagatggttagcttgtattttacgctacaattacctcagatcacttgttgtatcttacaccaatttacgaaatttcttgatgcgttttatgacaa

SEQ ID NO: 109552 - DNA, 888 bp, Zea Mays
atggtgaggcctcgtccaggcaacagcacaagcgacgacgactacggcagcacaagcgcaggaaacgcctgcacagtggagcaagtagagaacctcaagtcagctctgagcgtgatgcccatgtggtcagccatggtgatgtcgttcctgctgcagagctcctcgttcggggtcctgcaggcagccaccatggaccgccgcgtcggcgcaacaaggttccagatacccgcgggctcgatctcggtcttcgagatcctgaccttcacggcgtggtcaagctgctacgacgcctgcatcgtgccggtcctccggaggatgacggggcggcagcgcgtgctgacgctgaagcagcgcatgggagtcggcgtgtccctggccgtcgcctccatggcggtggcatcggcggtggagacccatcggaggcagcacgccgcgacgacggcggcgaggcacggagacgcagacggagccgcccctcccctcatgtccgcgctgtggctggcgccccagtacgtgctcatggggctgtcgggcgcgttcggtgccatcgcgcagatcgagttctactacgccgtgctccccaagtccatgggcagcttcgtgctggcgctgctcttcttcgggagcggcgtcgccagcatcatgtcgacggtgatcgtcaagctcgtgaacgtggtgaccagcggcaagggcggcgggggtggcgcgccgtggatctcggacgacctggaccagggccggtacgactcctactacgcgctgctcgcggttcttggcgccgtcgacctcgtctacctcgtcgtctgcgctaacgtcttccatgagtcgacgcagaacatgacgctggaagctggcgctgatggccaagacggagaggctcgaggctag

SEQ ID NO: 109553 - DNA, 861 bp, Zea Mays
atggaggaacatcagcaatctaatcatgcagtgggaaggaaaggtgtgggaaggaaaggtggtatgcgaatggttccaaccataatcgccaatgaagtatctgaacggatcgtgagcgcatctgtcggcgcgaaccttataatttacctcacaacgaagtatcaccttggcgctgcaagcagcgccatcatcatcttcgtgtacctagccgccgcgaatttcctgccggtgtgcggagccatcgtgtccgacgcattgctaggtcgctgccgcatggttacactgacgcttttctcctgcactattggaaccacacttctgtgcctgacatcggtgatcgcgcgcctgacaccgccagattgcgtgcagccaaacgaaggctgcgcgccgcctactccgatgcagctgctcgtgctgtgcgcctctcttggcttcatggcgctcggcgcgagcggcgtccgcccctgctgcctggcgttcgccgaggaccagatcgcgcactgggacaccgcgaagaaggaccgtgcgctccgggctctgttcagctggtactacgcgtccgtggggttctcgcagatcgtggccgtcaccgtgctcgtgtacttccaggacaagatgggctggaaggtcgggttcatggtgtcggccgccatcatggcgtccgtcacgctcgtgaactgcgcggcggcgtcgttctacgtgaaggtgaagccgcagaagagcatgtgggttggcttactgaaggtggtggttgttgctgtcaagaaccgtgaccttgtgctgccagaggcagatcatggcgctcagttccattgtttaccgggttcgacacagacggttccatcaaacaaaatcaggtga

SEQ ID NO: 109554 - DNA, 834 bp, Zea Mays
atggaggaacatcagcaatctaatcatgcagtgggaaggaaaggtgtgggaaggaaaggtgccaatgaagtatctgaacggatcgtgagcgcatctgtcggcgcgaaccttataatttacctcacaacgaagtatcaccttggcgctgcaagcagcgccatcatcatcttcgtgtacctagccgccgcgaatttcctgccggtgtgcggagccatcgtgtccgacgcattgctaggtcgctgccgcatggttacactgacgcttttctcctgcactattggaaccacacttctgtgcctgacatcggtgatcgcgcgcctgacaccgccagattgcgtgcagccaaacgaaggctgcgcgccgcctactccgatgcagctgctcgtgctgtgcgcctctcttggcttcatggcgctcggcgcgagcggcgtccgcccctgctgcctggcgttcgccgaggaccagatcgcgcactgggacaccgcgaagaaggaccgtgcgctccgggctctgttcagctggtactacgcgtccgtggggttctcgcagatcgtggccgtcaccgtgctcgtgtacttccaggacaagatgggctggaaggtcgggttcatggtgtcggccgccatcatggcgtccgtcacgctcgtgaactgcgcggcggcgtcgttctacgtgaaggtgaagccgcagaagagcatgtgggttggcttactgaaggtggtggttgttgctgtcaagaaccgtgaccttgtgctgccagaggcagatcatggcgctcagttccattgtttaccgggttcgacacagacggttccatcaaacaaaatcaggtga

SEQ ID NO: 109555 - DNA, 1848 bp, Zea Mays
agtctctaggctctggagacctcgcgcaccatcccaccagcagcaagcgcccactaattccgcaccacaacgcgcactctccggcaccaccgccgtcctcgcgacgtcacatagtacgcattacgcactcgcgcgcgcgcgtgcgcgtacatttacgcagcgatgagctcgagaacgcaccacccctgctttgcgtctgtggagtcatgggagcaagcggcgatggcgcacgacggcttcctcggcgatcttgcctgcccgctcccgctcgctcacgctgcaaccgcggcgccgttcgacccgctgcgggtacatgtggcgcacgcgctcacgggcgccggcgcggggtgggaacacgacgccgcgacgggcgcgctcgtgccgtcgcggccgcgaccgctgtcgccgtcctcgctcgcggcggccaccgccgtagtagttggaggaggaggagacgccgtggaggccgcgctgatggagcagcttgcgagcaggctcggcgtcagcgtgccttcgccgccgccatcgcggtacgcgtcctgccacggcacgccggcgggctccccctccaagtcggcggcgccgtgggtgctggccggggacgcggcgcctgcggagcgcgccacagggctcccgtgcttcccggcctcctgtggggagctctcgcgcgtgcccagctgccagtcgtcgcttctcggcgagcacgcaccgactccggcgcccgcgccgttgcctggcgctgctaaacagcacgcgagcgacgggtcgtgcagcgatggcccctgccggaagcggaaggcgtcgggcggcaaggccaaggacgtggtcaccacggccacacccaagtcccgggagccggagacgatggccaagagacgcaagctctcgacagacgccgcccgcgacgaggctgggtcgcacgggaacggcaaggggaaggaggtggcgccggcggcagagccagagccacagccacccaaggactacatccacgtgcgagcgcggaggggccaggccaccgacagccacagcctcgccgagcgggtgaggagggaaaagatcagcgaacgcatgaagctgctgcaggacctcgtgccaggctgcagcaaggttaccgggaaggccgtgatgctggacgagatcataaactacgtacagtcgctgcagtgccaggtggagttcctgtcgatgaagctgtcgacggtcgacccgcgccgggagctcgacgtgggctgcttcgtcgtccccaaagacgacgtaacgatgcaggccaacaggctgtgcgcgcccgcgacgtcgtcgtcgagctcagccttctgctacgccgcgcggagtgttgttacgaacgccaaaggattcgagacgccgctgcccttggcgaaccatggcgtcgcggcggacgacaggccacttgagcggcggactcgagacgcaggtccccaggcggggagcttgtgggaagaggacgatctgcagagcctggtcctgatgggattccggggccgttgatcgttgacgctctgattaggctaggccgctagggacgacagttcgtttccaccgaccgccaaccaaagcgagagttgcagggccacgtaacagcagggttgggctccaatcattgggaactctccatgattgtacacagacaggacgcttacacgctaatttccagctcggcggaggccaagaaacgaaacaaaaaaaaaaggcgaaaagaagatgtttttttctcgcattccccctcacgaatttgcagtttaatcgatgtaagataactcaatgtaattattaatggtatttgagtcttatagacatcaagttgatgaaattttatactacacaaga

SEQ ID NO: 109556 - DNA, 1899 bp, Zea Mays
agtctctaggctctggagacctcgcgcaccatcccaccagcagcaagcgcccactaattccgcaccacaacgcgcactctccggcaccaccgccgtcctcgcgacgtcacatagtacgcattacgcactcgcgcgcgcgcgtgcgcgtacatttacgcagcgatgagctcgagaacgcaccacccctgctttgcgtctgtggagtcatgggagcaagcggcgatggcgcacgacggcttcctcggcgatcttgcctgcccgctcccgctcgctcacgctgcaaccgcggcgccgttcgacccgctgcgggtacatgtggcgcacgcgctcacgggcgccggcgcggggtgggaacacgacgccgcgacgggcgcgctcgtgccgtcgcggccgcgaccgctgtcgccgtcctcgctcgcggcggccaccgccgtagtagttggaggaggaggagacgccgtggaggccgcgctgatggagcagcttgcgagcaggctcggcgtcagcgtgccttcgccgccgccatcgcggtacgcgtcctgccacggcacgccggcgggctccccctccaagtcggcggcgccgtgggtgctggccggggacgcggcgcctgcggagcgcgccacagggctcccgtgcttcccggcctcctgtggggagctctcgcgcgtgcccagctgccagtcgtcgcttctcggcgagcacgcaccgactccggcgcccgcgccgttgcctggcgctgctaaacagcacgcgagcgacgggtcgtgcagcgatggcccctgccggaagcggaaggcgtcgggcggcaaggccaaggacgtggtcaccacggccacacccaagtcccgggagccggagacgatggccaagagacgcaagctctcgacagacgccgcccgcgacgaggctgggtcgcacgggaacggcaaggggaaggaggtggcgccggcggcagagccagagccacagccacccaaggactacatccacgtgcgagcgcggaggggccaggccaccgacagccacagcctcgccgagcgggtgaggagggaaaagatcagcgaacgcatgaagctgctgcaggacctcgtgccaggctgcagcaaggtaagtaaacatcgacggccgttgctcaaaattcggttgaaaacacacgcatatttcaatttccaaagactcctcgacctcgtgaaggttaccgggaaggccgtgatgctggacgagatcataaactacgtacagtcgctgcagtgccaggtggaggtgcgtgcgtatgatctgcactctgctctgtctgctcttcttaggacgtagagcatagctttttcctttttaattaacggaaaagaaaacacgagctcttctgaactcgagcaaaacgggtttgcttgcttccgggacagttcctgtcgatgaagctgtcgacggtcgacccgcgccgggagctcgacgtgggctgcttcgtcgtccccaaagacgacgtaacgatgcaggccaacaggctgtgcgcgcccgcgacgtcgtcgtcgagctcagccttctgctacgccgcgcggagtgttgttacgaacgccaaaggattcgagacgccgctgcccttggcgaaccatggcgtcgcggcggacgacaggccacttgagcggcggactcgagacgcaggtccccaggtacgtcaagacctgctgcgtccatctatttcctgtcgctgtgcgatccactccaaactgtagatcgccatggatttcaggcggggagcttgtgggaagaggacgatctgcagagcctggtcctgatgggattccggggccgttgatcgttgacgctctgattaggctaggccgctagggacgacagttcgtttccaccgaccgccaaccaaagcgagagttgcagggc

SEQ ID NO: 109557 - DNA, 132 bp, Zea Mays
gttttgtatcttttttttttgtataatactgatgggagtaattttacatggatttgaatttcaggtgactattaaatttaataaatcttttttttatgttccgagagaactcgtctttccccgttccatgaa

SEQ ID NO: 109558 - DNA, 462 bp, Zea Mays
atgaggggtgtgacagcctcctacaggctgcagctcccgcatcacatctacagtgtggccgccgccaccaccaccgctgtgtcaattccacaatgtgtgcactgtgcagcccaaggattatttaacttgagcagcgagagggaggtgttggatcagaatttctattttggaacaggtgagcagaggatgcatacggcggcggcggcagactgttggcagtggtcgcacgacatcgtcaggcggtcaggggctggagtgtgttggtcacctgacccacagggtacaacactatttggcaccaaaatatgttgggtcgatccaatgggtatcaacatcaatttttacattttgagtattgggtcagtggtcgacccacaatttctgcatccctactttctaccaaccacgcccttcctacaaaaagcaaaagaaaactcacatactggcactgataaaaactaa

SEQ ID NO: 109559 - DNA, 211 bp, Zea Mays
tcttttttcttttcttttccccctcttctcgtttgctgccttctcgggcactttgttttcttggtccacttgggacctttctttcctcttaatataatgacatgtagttctcctgcgtgttcgagaaaaaaaatgatgtcaattcctgcacttgtacatgtgctcatgtcaatgttttaaggattgagctacgaattgtttaatggtataa

SEQ ID NO: 109560 - DNA, 1503 bp, Zea Mays
caaatccaaagttcgacgaaaagggaccaatgtcgatcgccataaaagccgtctatctcgatctggacggtacaaaaccctgcacgcctccccatccacctgtcactcttaccgccagccccacatcacggagcatcccccttaataacagcaaactaccacacccatgtccacctccgtctccgccgccgccgttgccgctctcgtcccacccctcaccggccgccggtcgccgccggcatctcgcgtaccgcagatttgccgcagaagaatcagatccaaaccccgtatcttctcttcttccccctccttccccattgtccccgccgctgccatggccaccggcggcgccgcccccaccgcctccgatgccgggtccaagaagaagttgctcatcttagactccgaggaggatctcgcggtttctcttgcgaagtacactgcggagctgtcggagaagttcgcggccgagaggggtgccttcaccgccgtgctctctggcggatccctcatcgaggcactcaggaagctgacggagccgccgtacctggattcagtggactggagcaagtggcacgtcttctgggtggatgagagggtcgtgcccaaggaccatgtggatagcaactacaagctcgcctatgatgggtttctctccaaggtgccgattcctcctggacaagtttatgctataaacgatgcgttgtcagctgaaggagcggcagacgactacgaagcgtgcctgaagcagcttgtcaagaacggtgtgatttctatgtcagcggcgactggatttcccaggtttgatctccagcttctgggaatgggacctgatggccacattgcgtctctcttccctggccaccctcttgttaacgagaaagagaggtgggtcacatacattaaggattctccaaagccacctccagagagaattacattcacgtttccagtaatcaactcatccgcatacgttgcgatggtggtgactggagctggaaaggcggcagcggtgcagaaggcgctctcagacaagcaaacctcgtcagacctgctgcctgttgagatggctgtgctacaagatggagaattcacctggttcactgataaggcagcggtgtccttgctgcagaacaagtagagtctccatggtaaccttggctcggctcgaagccattttagctcataaaataaaagatccatgggcctgcgtgcatagctgcattcgtcctccaggatttcgtgtaacggagactcgatccttttatgtgtattgttcggagtaatgttcaaaaactctattgtcttccggcttttctgaaacattgctcggtaagtgtttggtttagtacatggttcgctgttccgcgctagacgcatggataggaaatgtggctgcattgaattcttccaggcttgtcgatcctggcatgttccagtttccagtggttttcagtgctcgtgccatctcagatatgaagagtggtctgcattcccggtgat

SEQ ID NO: 109561 - DNA, 1598 bp, Zea Mays
ccgcctgacctccctcgagctcctgccgcgcctcccgcggggccctcgcctgccagtccccgctcctcctcgtcgcccttttgccctccttcaccgaggcgttattccacgtctcgctccgctgcctccaccgcttccgcttcccctggcgcccccctcccgccgcaccctccactactacccccgaggatcctgagcagctctccacctcccccaaggtccccgcgccgttcactcgcgtcatcatccctgattcaattatggggcgagtgaggcctcagtgaaagaatttacttggcttgagtcaggccaagccagtgcaaccaaaactccatcttttgtctcctggaccattcaattatggggctagttcttcatataaagccatgccatgcctttgaggctaatgctactgtctgcctctctcctgtgatttcagattggtcctagagacatgggcctaaaggtgtttcattggttgaatcggaggatgcattctaatactgagtactgcagcatccatggtagcaaagccatggaggacaaggactctgtgcctcatagtgtggttgagaaagatactgaagcccttctgctccatgatgtgcttcttaatggtatacttgcaattggcacacttggccatcacgtggactcactttgccctgtggcttgcattgaagaagatgatctctttatcatggatgatgagaaagcaattgtggaagagagagatgatgaggaacccaggaatgatcaggtgaaagaagatgttgcattggaaacagagccatgtgaaccagtatggcctattgttgagcctgctaagatgcattcattgtcaatgaaagaagacaactttacatgctttgtagcagaagaaatcctgatacgtgaggtggaagatgggggaggtgctaatatccaggaacgaccacttctgatgttagaaaaggtggagaaagtaagaactacacttgctgatttatttgcagcagaagtattctcatcaagttctccaagggagtatagttgccaggatatcattgacgttgctgtggcatccacttcaaagcatgcatcatgcatggaaaagatgcatcaaaagaaaccaaggaagccaacaccaaaaccactgaaagcgacaagaaaattaagtcgggtcatgaggaagatgttggggaagaagatccacccagagcagctcaatgggcgtagcaatgcagagggcccccttactgcatgatgtttattcttgccgacaaatttgcttctctatttggttacattggatccctatggctcagattccttgccagagagaagcgtccatggacagtcgtcgacgatgtggaagttccgttttttgttgttgtgttttgtcgccagtgaagcgtgcatgaataccaaccattctgctttcccatgttctcttgcttatttgcatgtataaatcaactgttggggtgtgtgtctgtgatcttgtaagctgtcatcatctggcgccacggcctgcgctgcgctgcactgcactgccttgtcgtcgcggcatgccaaatatatatattctttaataaaatatctgctttacgtttgca

SEQ ID NO: 109562 - DNA, 303 bp, Zea Mays
cttggccacggctaccctgtaccccgtccaggccctcaggctcacccctgctgcactgtccgtcgggctcccatcgagctcggtcctgcacgcgctggccaaggccgcgccgaccgccacgttgggcgagatcacactaggtgagaacgcgctgggcgatgtaatgctggacaggggcgcctcgtccgcatcataagcccagcctagggacacgccgaccatggaagttgtatcatcgtcctggtgtttcatgagtattacgtgaacattaagagttgtttgcatcctgcaagttacaaatac

SEQ ID NO: 109563 - DNA, 1626 bp, Zea Mays
cccgaagacccgagtgcacttccgttgccgccgcccgccgggcgatttttaggtcctcgctttccccacgcgtgtggcgtgttccgctcgcgcccgcccggcctcccaccctctccagcgccgccgcctcctcttcccggccgaaggagcaccgccccagccgatcttctctcccccacgccccatcaggccgtttctggctgctcttgggcctccctcgccctccctgacggccccgagctcgccctccatctccgccccagctcgcgccatctcggtgcctcgagctcgtcgtccgcgcttctgtggccactgccgggaagcatgaggaggaggcctgggatcgctggcttgcagaatgcggcggctactcgtgaccaattccggctggtcggggagaatgtggccaaggtgaggaccgatgtcatgaaggagcagcttgcgacgttccggtcacagctcgaggaattcgctcgcaagcataagagtgacatccgtaaaaacccagtattcagacagcagttccatgagatgtgcgcaaaagtcggagtagatccattggcatctaataaaggagtctgggcagaacttctagggattggtgacttctactatgaacttggggttcagatagttgacatatgcattgctaccagatcacataatggtggcttgattgacttactagatctccgcaaactgctcggtcagaagaggaaagctactcttgaatcattatctgaagatgactgtttgcgtgctataagcaagctaaaagtccttggtagtggttttgaagtaatttctgttgggaggagaaagcttgtgcgttcagttcctaccgaattaaataaagaccacagtgggatacttgggctagctcaggtttgtgcttgtaatgttcgatgtcatagtacatcatagaggtgatgccatttctcatgttggcaaccacaaaggccttatttatagcagctgtatattagtaatcaagagtaggttggaagccttaaattacttttcggttcccctctgctgataacatcattgacatgtaggctgatggctatgtcacggtggaacaagttgaaaaggaattctcatggtctactgggcgtgcgattgatgctcttgaaactttgctcaaggaggggcttgctatgatcgacgatggccacagggatggcaagcgaagatattggttcccatgcgtcactgtcagctccgacacagcagctgttgaagtcaagtcataacctgtaagtaaaatgtcgattccacagtgtgttcacgtccccattccatgaggatgaggtggaaaccagtggcacggatgtgtgtaatgattggtatgttaagaattcagttggaacatcacactttgaatatgaaaggtggcatgattcttatttaggggcagttcgtttcttccggaacggatgcatggatggaacaatttctagctggtttgtttctctaatttgtataagttttgatcagctggaatgattcctggtccattcctagacaaacgaacaaggccttagaattcaggtttctttttttttgtacaatatttagagttaatataattctggccttctggctggcagaatgtttgtggct

SEQ ID NO: 109564 - DNA, 1460 bp, Zea Mays
catccatcccgaagacccgagtgcacttccgttgccgccgcccgccgggcgatttttaggtcctcgctttccccacgcgtgtggcgtgttccgctcgcgcccgcccggcctcccaccctctccagcgccgccgcctcctcttcccggccgaaggagcaccgccccagccgatcttctctcccccacgccccatcaggccgtttctggctgctcttgggcctccctcgccctccctgacggccccgagctcgccctccatctccgccccagctcgcgccatctcggtgcctcgagctcgtcgtccgcgcttctgtggccactgccgggaagcatgaggaggaggcctgggatcgctggcttgcagaatgcggcggctactcgtgaccaattccggctggtcggggagaatgtggccaaggtgaggaccgatgtcatgaaggagcagcttgcgacgttccggtcacagctcgaggaattcgctcgcaagcataagagtgacatccgtaaaaacccagtattcagacagcagttccatgagatgtgcgcaaaagtcggagtagatccattggcatctaataaaggagtctgggcagaacttctagggattggtgacttctactatgaacttggggttcagatagttgacatatgcattgctaccagatcacataatggtggcttgattgacttactagatctccgcaaactgctcggtcagaagaggaaagctactcttgaatcattatctgaagatgactgtttgcgtgctataagcaagctaaaagtccttggtagtggttttgaagtaatttctgttgggaggagaaagcttgtgcgttcagttcctaccgaattaaataaagaccacagtgggatacttgggctagctcaggctgatggctatgtcacggtggaacaagttgaaaaggaattctcatggtctactgggcgtgcgattgatgctcttgaaactttgctcaaggaggggcttgctatgatcgacgatggccacagggatggcaagcgaagatattggttcccatgcgtcactgtcagctccgacacagcagctgttgaagtcaagtcataacctgtaagtaaaatgtcgattccacagtgtgttcacgtccccattccatgaggatgaggtggaaaccagtggcacggatgtgtgtaatgattggtatgttaagaattcagttggaacatcacactttgaatatgaaaggtggcatgattcttatttaggggcagttcgtttcttccggaacggatgcatggatggaacaatttctagctggtttgtttctctaatttgtataagttttgatcagctggaatgattcctggtccattcctagacaaacgaacaaggccttagaattcaggtttctttttttttgtacaatatttagagttaatataattctggccttctggctggcagaatgtttgtggct

SEQ ID NO: 109565 - DNA, 2130 bp, Zea Mays
agtttcccggctccctcgctcacgcgccgcggcatcactccggccggctggccagtcgcccactcttcccacccacaccgccgctgcctttccttccacggcgaactctccgcgggcgacgtccagactggcaacggcattccaataaaagaatgcgcccctgctctggccaactctctccacctgcattccccgttccgctaaaccctagccgcctccggcgcgtagtagattcgccatcagagacgacgctcggcggccctgaggagggatgacctacgtcaacccagacccccagccgctcgccgccgctacggcggatgattccgcaacccagcatcaagctgcggtgaccgccgcgccgcagtcgacgcgaggcgctctcgggttttttgcgacggcggagccgaagcagggcgcgaccatggtggcgccatcgtccccgcagggcgttcccgggttcgcggtcgtgccccaggcccagggggtcgagaacatagcgccccccgcgtccccgcaaggccctcccgggttttgcgtgacgcccgggctcgcgccacagcaaggtgctccggtgatggcgccgccgcagggtgtaaccatgatggctccgcaacagcagcatttcgcgcctgcgatggtgcctggctcccagcaagttatgcagatgctccttcaagccctccaagcccaagcccaagcccaagcccaggccatggttgctcaccaacccgctcaaggcatggcgccatcgcaatgtttgcccatgtgccatccgtccacggtggagatgcagcaagctcaagctggacacgtgacggcaccaccacctgtgccactcggccctccattgatgatgcagcagcagcagcaaccttcacaagctgatacagtgataatggcacaaccgcctctgccactcgaccctccattgttgcagcagcagcagccttcacaagctgatacagtgataatggcacaaccgcctctgcctcttggctctgcgatgcttcagcaacagcctccacagggggccacgatgatgatggcacagccacctctgccattattccctccatcagtgatgctgcaacacaatccacagggcaaccaggtgacgatggcacagccacaattcgctgctctaccatgcaagcgccagcgtcttgaccaatatgacaacaattacggacagcatatgactggccatcaggaggaaacagcaataaccaatgctgcaataggacaattttatgggcctaatatacacaatggggttccttattttggtgcacctgagccctcccttcctccagatgcaacaaacaccatttatgttgagggcctccctatcaactgtactagacgggaagttgcgcatatatttcgccaatatatggggttccttgaaatgagactggtcaacaaaggatctaataaacatttgtgctttgttgattttgcaaccccagcacaagctttttttgccatgagaaatcttcaaggctacaagtttgatgagcaggaccctcactcacgcattttgaacctgcagttctctcgctctcctcgtatgggttcacatggtgggtcctaggcactgaattgtgcaggtcttgttttcttctacaacttcttgaactcctgatatcttgacgcggcaaacttgttcttgctttcatcagcatcttgattttgccttaaggcttcagcttagtctatgtggaagaattgttgcaactgacatcggtacttaaagtactggaggttgccttgctgtatgatatagtggattccattctctactggtgctttcttgggtcatccactattgatcggtattgtcagctggttagtggggcagattatctgttgatggacgtgaaccgcaatttgcaggtgtctcggtggttccagcctgtttcgaacatattggtttgcatggttgccagggccattttgatgtaaatggattcatgagaattggattatagcatagtttacagttatcctgtacctgatgatgacttttgcttaggaacatgttaatccaccggtacccaattcagagtttacagttggtttttgtggtagtatgccgaagtatttttgttgctgtttctgactttc

SEQ ID NO: 109566 - DNA, 1773 bp, Zea Mays
agtttcccggctccctcgctcacgcgccgcggcatcactccggccggctggccagtcgcccactcttcccacccacaccgccgctgcctttccttccacggcgaactctccgcgggcgacgtccagactggcaacggcattccaataaaagaatgcgcccctgctctggccaactctctccacctgcattccccgttccgctaaaccctagccgcctccggcgcgtagtagattcgccatcagagacgacgctcggcggccctgaggagggatgacctacgtcaacccagacccccagccgctcgccgccgctacggcggatgattccgcaacccagcatcaagctgcggtgaccgccgcgccgcagtcgacgcgaggcgctctcgggttttttgcgacggcggagccgaagcagggcgcgaccatggtggcgccatcgtccccgcagggcgttcccgggttcgcggtcgtgccccaggcccagggggtcgagaacatagcgccccccgcgtccccgcaaggccctcccgggttttgcgtgacgcccgggctcgcgccacagcaaggtgctccggtgatggcgccgccgcagggtgtaaccatgatggctccgcaacagcagcatttcgcgcctgcgatggtgcctggctcccagcaagttatgcagatgctccttcaagccctccaagcccaagcccaagcccaagcccaggccatggttgctcaccaacccgctcaaggcatggcgccatcgcaatgtttgcccatgtgccatccgtccacggtggagatgcagcaagctcaagctggacacgtgacggcaccaccacctgtgccactcggccctccattgatgatgcagcagcagcagcaaccttcacaagctgatacagtgataatggcacaaccgcctctgccactcgaccctccattgttgcagcagcagcagccttcacaagctgatacagtgataatggcacaaccgcctctgcctcttggctctgcgatgcttcagcaacagcctccacagggggccacgatgatgatggcacagccacctctgccattattccctccatcagtgatgctgcaacacaatccacagggcaaccaggtgacgatggcacagccacaattcgctgctctaccatgcaagcgccagcgtcttgaccaatatgacaacaattacggacagcatatgactggccatcaggaggaaacagcaataaccaatgctgcaataggacaattttatgggcctaatatacacaatggggttccttattttggtgcacctgagccctcccttcctccagatgcaacaaacaccatttatgttgagggcctccctatcaactgtactagacgggaagttgcgcatatatttcgccaatatatggggttccttgaaatgagactggtcaacaaaggatctaataaacatttgtgctttgttgattttgcaaccccagcacaagctttttttgccatgagaaatcttcaaggctacaagtttgatgagcaggaccctcactcacgcattttgaacctgcagttctctcgctctcctcgtatgggttcacatggtgtctcggtggttccagcctgtttcgaacatattggtttgcatggttgccagggccattttgatgtaaatggattcatgagaattggattatagcatagtttacagttatcctgtacctgatgatgacttttgcttaggaacatgttaatccaccggtacccaattcagagtttacagttggtttt

SEQ ID NO: 109567 - DNA, 680 bp, Zea Mays
caggtttaggaaaagatacaatttcttatttgatgaagactttcctgctgaaaaagaaagactgcaaaaaatgattaagaaatctaaggacccagatgccattggagaaatgaagagtcgtgtcacgtggattgataagcaggtgaagtctcatcctccaaagaacgttgaatcggaaatcttgcgtgagcatatcaagaaagagagggaggcagcaaaggctggaaaacgaccatactatctgaagaaatctgaacttcgcgaaaggaagctgatgaacaagtacaacgagctcaaggaggcaggaaagcttgatgcattcatggaaaagcgacggaagaagaatgcctccaaagatcatcggttcatgccataccgacgtagtggagatgcataatagtttcctaattctggaggcgagcgaaaggatgattttaggactgtcttctcatggtggctggacactggacagtcagtgtctctgttactttgttgccctagccgtacaatcgttagcttcgtgcacaatctacattgagcttagtaacactttttttttgctatactaaattatggatatgttccgttttgcacaacctcgtttcagcctctttcctacctttttaagaacgttagcactcgtcctgaattgagcagtggcagatctacagaagcatgtt

SEQ ID NO: 109568 - DNA, 1333 bp, Zea Mays
gcagtctgcagacctggaaaacattcggaaaaatgcctagcagaagtactctacccatcccccatttctcaaaaagcccaaaccccaggcgtcgctctgtatttttctctcctcactcaacgcggcgatgccccctagatcggatcacgccgccggcagcggcgccgcggcggcggccacgcaggcccacttcgactccatcgatccactcttccatgtgctccgcgtgctacccttctccttcctcctgccgccgcgcacccgcctgaggctgccgtcgaacctggcgcttccctctcccatgaccgtcttctccctcatcctgctcacctactttgcggtcgtctccggactcgtgtacgacgtcatcgttgagccccctggcatcggcagcgcccaggaccccggcactggcgccgtccgccccgtcgtcttccttccagggcgcgtcaacggccagtacatcatcgagggactctcctccgggttcatgttcctccttggcggcattggcatcatcctcctcgacctcgccgtcgaccgcacgaggccccggagcctccgcgtctcgtttggaagcgccggcgcagtcgccgttgtcatcgcctacgccatggccatgctcttcctccgcatcaagatccccggctacctctggtgaggttgataaatcttgcctgttaactagaccagatccgtcgcgagatctcgctgcatctaaatagacctgcgtgctgtgcagtgtggactgtgctctttcaattttgtcaattaatgttccatcacacaatttgtatggtatcaactcggaactactgggtgaggattatcattttgcaatgataccaaacaaggctttacttggtattgagtttcagggattgcatggaatcccactatttatgttaacctgttgtagttgattgaatcagtataatttgttattttctactaagcacctgtttggatacataagctagttacagttggggctaaaaattagtccaaattagctgaaggctggctagctagttgtctaacaactaattgaagaattagctaaaaaattagaccatctatttgccctcatgtttgggatgtactagggctaattttagctagctaacaattagccctcgtatccaaacaagcctaagtagcatagaccaccttatccattgtctattgtatgccttggacatagtggtgtcattggaagaatgtggggatgcagcttcagaatgtctgaaatctgaatgtaagatatcttttgctaacatatagatcttagatcggtttaccaacaagggtattgggtcctacagtgtttttt

SEQ ID NO: 109569 - DNA, 384 bp, Zea Mays
atggcgggcgtgttgcgcgggcttcgcacctgcttgtccctgacggcgtcggcaatccgctgcttgacctctggaacgcggggacagggaacgaagattaggggaaaccggataggcggaggatggggagcgaaccggaaacgcggcggagacggggaccgaccggggagggaggtgacgaaggagaagcgggagaagaggtggagcagctgctccctcgtcatcatggtctcgccgccggccgccgccatgtccgttgccagctgcccagctgccgcgcccccttccagcaccagcagcctggtggttctggttcgagtggtgcgtgtgtctctattcgtatctttggaaggaaagagtggacaaatggcgctcgttaaatga

SEQ ID NO: 109570 - DNA, 201 bp, Zea Mays
atggcggtggaggacgacaaatctgagacgatggcggtggtggagggcactgtcgcctcacgtatcgctcgcgattgcatcgaggaaggacgacgatggagcggcggtagagcggatggcattagtgtggacgacgatggagcggcagcagagcggcgacagagcggatggtggtggcgacggagggcgcggtcgttctga

SEQ ID NO: 109571 - DNA, 390 bp, Zea Mays
atggccggacttggggaaagccgggcgccgaggacaggcttcaagctgagcgcgcacaggggagcttggggcgccgagctgggaccaagccaggggcgcgacaaggtccagggaacaacagccatgggcgaactcgagcagaggggccaggggcgcgctgaaggtcgagatggagctgggcagtggccatggagagaggagctgagagaaatcagaccagggagccgagcacagggagggacgccgatcaggggaaactcgccatgggagatccggccgacggcgccagagggagatgaagccgagcggagctgttcgcgcgaggaaaaagcttggggcagaggagcagggagctgggcggtcgcgaccagggagatgggcaggggttga

SEQ ID NO: 109572 - DNA, 516 bp, Zea Mays
gaaggtttagcaccaataaatttgatagttgaagacaagttccatcgtgctactcctggtggtactgggggtgtgaagaccataggaaattatgcttcgagcgagcaagtaaatgcaggcataaaagctgaatccttgttttgtgatagtattgtctgtacgacccttgcaattgagtattttctgcatgcttgtagccttgtaattgatgttgaaccggatgtggaatctgagaaagaagttgataataaactggaggatgagatgcacgaggatgaagatgataaacgatattcacctgagcctatacctcaacagacagataaccaatttgaagaggaagatggatccttttctccacagctaatgcatggcaacgaagatgaagatgcaattgatcatgaagaagacaaagctgagctggtagagttctatgtttctattttctaataatattagtttagaaacatgattggaagttcagaactgtaacagttattcgttcaagtgcagtta

SEQ ID NO: 109573 - DNA, 582 bp, Zea Mays
atggagatgcagagtggattgagaagtcaaacaggaatcgacaatagccaccgccatcaacaggacagggaaaatgatgaggtcgtagtcaaccatacctatggggctgatggacacattcggttggcgaagcgaatggaggctcaaactggagttgtcctaagaccaatcgatgcttataggcaagggcatagagcgaaaacagtgaaatctctgatgagctatgcagtcaagcggccgctgagcgtctggagacttacaggtaggagatggttagtaagtatggagaagactatgattggcaaggagtgcctaccatcgacgctgaagttgtgcattctattggaggaaaggcccatggacgagtacatggctgcttacaacgcacaggcgcaacaacaaatcaacagatctagggttatgggccacaacacgccaccaccggtgataccagcaccaggaggagtttttagaggggagggagctactacagaagagactccaaaccagacagacaacttcgtcaacaacttcttcgcttctagagctagtggccataactcaaatgactcctatatgtga

SEQ ID NO: 109574 - DNA, 699 bp, Zea Mays
gcaagcaagaagaagagagtggctggctggctgacctcgccgatgccggaggacgcgccggtgacgaggatgaccttgccgcggaggtcctcgcccctggcgaaggggcggacgaggaggcggtggaggaggcggcacacaaaggccacggggaggtagacggcgagcaccagcgccagccccacgtgcatgaagcagcccaggaacgcgttcaccactgcctccttgctcatcatcttccttccttccttccttagctatgctctcttccctggccctggtgggcttggcttctttcttccttccttccttacgtgttgctcgatagtatatatgtatatatggatcgctttagctggctggctggctcgccgccggcggccttctgctcggacccttggatctcccctgcctgcgcggcgggggcacggtggacctaaatagagctagctagcctgcgcaggccggaggaccggagtcggaggcgccggaggtacggtgtgtgatgccctggcgtggtatggtatttatgggtgcctggccggagaggagatggtgaaggaaattattaataaaataatcataataataacgggtgggtgggggttgctgcacctgcagggggaattcaacatgtatatactatatatgtagatgctacaattattattatataataaataacactagtattcgtcc

SEQ ID NO: 109575 - DNA, 95 bp, Zea Mays
ctcaaagccaaatccaaatatgtaaaaaaactgtgcgcgcctgcacgtgcatacatgatacatgcccatatgcatgggtggcgtttgtgaaccgg

SEQ ID NO: 109576 - DNA, 785 bp, Zea Mays
atcaccaagactcagccaatacaaggcaagcagaagacgacgtaagtctcctatcctagctaaaggaagcacaaaggaattgaacatatggccacttctcacaagcttcagccggtcctcgctgtcatgttcttcaccatctttgtgataggagcgaatggcgagcgatgcaacacgtcgagcatcgcggtggacaccgtcaactccggcgcgacggtaccctggggagacaccatcttctcggtggaggtgaagaaccggtgcccatgcgccgtcaggaacgtgcgcctcgacggcgggggcttcgcgaccacggtggacgtggaccaggccgccttccgtgccgacggcggcggcggcggcagcggcgtctacctggtgaacggcggcgagccgatcgcgagtatggccgccgtcagcttccagtacgcctgggaccatttcttccagatgactccgaggagcttggaggtcgacgacgacggccagtgctagctacgaggaggaccgaccgtaccatgcatggattggtgcccttactgtatcttataaaagctcaacatgtgtttcccggcctgctgggtgttttcttcagctgggtggctagcttatagactgccatccttcgtatatatacagagtacgtgttctagtggattaaaagtatagtgtttatttcagtatgttcagagactgagagagatgtacggtgagtttagactgggagatagatacaaggtgttgatcgagttcgacgaaggccctgtttaatttcgttcagctaa

SEQ ID NO: 109577 - DNA, 796 bp, Zea Mays
ctctataaatgcaacactgctgcgcatcaacttcatcaccaaacaagcaagctagctggtcaccagttgttaacatatacatcagcaagctccacgaaagcaagaagaagaagaaacatgacgaccactgctgcggtcgtcaagctcctgacagccgtactcctcttcttcgccgtctctcttcggggtaccaagggcgagccatgcggcacgtccagcatccacgtgcagaccgtcaacacgggcgcgacggcggctgccggcgacacgctgttcgaggtccaggtgaaaaacctgtgcttatgcagcgtcaggaacgtgcgcgtggacggtggcggcttcgcgacgacggtggaggtcgacccggccctgttccgcccagtggacggcggtgtctacctagtgaacgccggcgagtccatcgcgagcatgggcatcgtgagcttccgttacgcttgggaccacttcttccagttgactcctaggagcttggaggtcgacggccagggctagtagctactcactccgtttctttttatttatcgctggataatgtaaaatttcaatatccagcgataaataaaaaaacggagggagtactagctaccaaactactagagtcgtagcaagctggttgccttgttgaagtatactgtagtgtggggctgtgggctgtatatcgcttttgatatacagtgctagtaataacgcataaatcttccacgattgtttaagccttttcgtttgtgtcggattgcacccggaatcgttccagctaatcaaagtttatataaat

SEQ ID NO: 109578 - DNA, 652 bp, Zea Mays
ctctataaatgcaacactgctgcgcatcaacttcatcaccaaacaagcaagctagctggtcaccagttgttaacatatacatcagcaagctccacgaaagcaagaagaagaagaaacatgacgaccactgctgcggtcgtcaagctcctgacagccgtactcctcttcttcgccgtctctcttcggggtacgtaaggcctgcaaatcgacctgctcgttgtgcaaactttgtcagtagggcatgtttgcgtagtgacgaaatttcgacaaattctgagacgatttagttcgcttaaatttgaattaagcgccgtaaacacatgcatccaagaacatattgtacatataatctgtagacattattctttgcattggtacccagtacccctaattattgatcatatattcttgaaaggttccagcatttgttaattacgtactgagcaacaggtaccaagggcgagccatgcggcacgtccagcatccacgtgcagaccgtcaacacgggcgcgacggcggctgccggcgacacgctgttcgaggtccaggtgaaaaacctgtgcttatgcagcgtcaggaacgtgcgcgtggacggtggcggcttcgcgacgacggtggaggtcgacccggccctgttccgcccagtggacgg

SEQ ID NO: 109579 - DNA, 848 bp, Zea Mays
gagattagtatcggtgaccactgaccatcagtgaagtctgcactgcataccctccacccccgcgtccgagcgcgaccctggccccggcccgtctcgcctgaccgccgccacgccgacggctgaccagcacgcgggcccagcacccccgacctcgtcctcaccggctcaccctgaccgccgccgcccaccactcacctcgcctccccaacttctgccagctcgcatcccgccgcaagaaacgcccgtgccgccgctgccctagcacctaggccagcgcccaggtccccttcttctcgcccttcgccagcgacgagcacccaataggtctgaaggatgagaaagggactgcatcctcagatgcaatggatctcatatgtgacgcagagtggtaggctgatcaataccatgatgaccaaggtgaaccataccggcaaagtgtaccacatgagggccaagcgacaaatggctcaaagcctcggccagatcgcaaagttcaaacgtcgatacgagcaggaagcagtggaaagcaaggacaagtagttgggacggagctatggcctctgtaacctaagtcggttctgttgactgcacagttttcagctaaggacatgattttattttagatcacatcatcttttgttccacttcagaattgggtttgtaccccgtcgttagcaaactatggcacttgttccatcgtaaagccccaagaaaatagtctattgattgcttttttttttctctgtcctttgagtttcatgattcatttttcttttgttattgctatgtttgatgatcttgtcttttatggtctctaacaacagtaattctagtatgtggtgccttga

SEQ ID NO: 109580 - DNA, 316 bp, Zea Mays
aagagacaattgcatatttaggattccaaacattgtgtttcgcatccaaaacatttgctttacaaaaagagatacaaatatggcgttgcctggaactttttctaaacaaattcgtagcaccaccatctcagactaaaaaagaagcatctgccctcccctctaggctctacattatctcacccggtcgctatgccacagtttctatcagacaaccgaaccaaaccatcgcagcctactccatgccagtaccagaccagttacaaattctcgatgcattcaaagcttaaaagccctaccaatttcactggtccccgac

SEQ ID NO: 109581 - DNA, 1368 bp, Zea Mays
gtcctcatttctattcccagtttcccaccctccagacccacaacaccaaacgccacctgtaaaatcctcacgccacatcttcagccacaggcgcgcgatatccccgctcaaaaaagccatgtcaatggcggcagccgccgcccccgccgcggcatcatccacgctgctgcgggcaagcaacttctctattgcgcgccccgtcccaagcggcgttgtctgctgcatccgcgccgtcagtgggcggagagcatcggtagtgcgcgtggcagcggctggcgacagggccgcgccggccggtgcctttccggcggcgctgttgttcgattgcgatggtgtgctggtggacactgagaaggatggccaccgcatctccttcaacgaaaccttcgccgagagggaattaggtgtcagctgggatgttgaactgtatggagaattgctcaggataggtggtggaaaggaaaggatgacagcttacttcaaccagacaggatggccggctaaagcaccaaagacagatgacaaaagaaaggagttcatagcttctcttcacaagaggaaaacagaattattcatggccctaattgagaaaaagttgcttcctctccgtccaggtgttcaaaggttaatcgatgaagctttaggaaaggcagttaaagttgcagtgtgcagtacatcaaatgagaaagctgtttcagcaatagtgtcgtacttattggggcctgatagagctgataagattaccatatttgctggagatgtggttcctcacaaaaaacctgacccagcaatctacatattagcagcaactacacttggagttgatccacaaagctgtgttgttattgaagacagtactatagggctcgcagcggcaaaagctgccggcatgaagtgtatcgtaacaaaaagcggctacactgcagaagaggacttcgagacagcagatgcagtgttcgattgcattggtgacccgccagaagtgcgcttcgatttggatttctgcgccaagttgctcaagaaacaatatgtgagctgaaagggggctagtgcaagtgatataccaagtacgaggttcctgaatatggagaaagagtccatggcatgccaatgttggttcttcaagccatgacctgatactaggacttggaagtccacgttctacccaatagtaacttatagaatgacattcactactgcccacccagttggcagttgcaaatgtgttagtcattcaacaaattggaaaccactcgaataagggatcaccaagtccaaactcttcagtcaaagcaataacaattgaggttacgagtcgaaaaatatgtaaggcaatcaaactattataagtgggtgtttgaatgtact

SEQ ID NO: 109582 - DNA, 1339 bp, Zea Mays
ccagacccacaacaccaaacgccacctgtaaaatcctcacgccacatcttcagccacaggcgcgcgatatccccgctcaaaaaagccatgtcaatggcggcagccgccgcccccgccgcggcatcatccacgctgctgcgggcaagcaacttctctattgcgcgccccgtcccaagcggcgttgtctgctgcatccgcgccgtcagtgggcggagagcatcggtagtgcgcgtggcagcggctggcgacagggccgcgccggccggtgcctttccggcggcgctgttgttcgattgcgatggtgtgctggtggacactgagaaggatggccaccgcatctccttcaacgaaaccttcgccgagagggaattaggtgtcagctgggatgttgaactgtatggagaattgctcaggataggtggtggaaaggaaaggatgacagcttacttcaaccagacaggatggccggctaaagcaccaaagacagatgacaaaagaaaggagttcatagcttctcttcacaagaggaaaacagaattattcatggccctaattgagaaaaagttgcttcctctccgtccaggtgttcaaaggttaatcgatgaagctttaggaaaggcagttaaagttgcagtgtgcagtacatcaaatgagaaagctgtttcagcaatagtgtcgtacttattggggcctgatagagctgataagattaccatatttgctggagatgtggttcctcacaaaaaacctgacccagcaatctacatattagcagcaactacacttggagttgatccacaaagctgtgttgttattgaagacagtactatagggctcgcagcggcaaaagctgccggcatgaagtgtatcgtaacaaaaagcggatctaccgtaaatatgtttccagctacactgcagaagaggacttcgagacagcagatgcagtgttcgattgcattggtgacccgccagaagtgcgcttcgatttggatttctgcgccaagttgctcaagaaacaatatgtgagctgaaagggggctagtgcaagtgatataccaagtacgaggttcctgaatatggagaaagagtccatggcatgccaatgttggttcttcaagccatgacctgatactaggacttggaagtccacgttctacccaatagtaacttatagaatgacattcactactgcccacccagttggcagttgcaaatgtgttagtcattcaacaaattggaaaccactcgaataagggatcaccaagtccaaactcttcagtcaaagcaataacaattgaggttacgagtcgaaaaatatgtaaggcaatcaaactattat

SEQ ID NO: 109583 - DNA, 103 bp, Zea Mays
atttctcacaattaattttcaaatttaaagtgtttttacactatattaaaaattatgtgtttttctcagtcacgcaagagagttatgtatctttgcattaaga

SEQ ID NO: 109584 - DNA, 104 bp, Zea Mays
ctctctcaatacatctcaatccactctaatcccactcattactagagtacccaaactaggccttagggaggccaaaaacatagatacccaaaaggatccattgg

SEQ ID NO: 109585 - DNA, 2641 bp, Zea Mays
aaggccaagcacaggccctccctccctcccttccctgcatccgccactcccactctctccctccccacctcctcctcgtcccgttgaatcattcagcttttgaaactatttttttgtgctctcaaggcaaaagagcacacttaactcttccacgcctgtctctctctctctccctctccagtcacacacacactatctctgtccatcggccgatcggcggcatggccacgccattagctccagcgagctccttcattaccaggccactggcgctggcgctagtgctcgtcgcggccgcgctctgccgtccggcttcctgcgcagccgccgcggccgccgcggacaggatcacgcggctccccgggcagccggaggtgagcttcggccagtactccggctacgtcggcgtggacggcgacggcggcggcaagcgggccctgttctactacttcgtggaggccgatgcccccgaccctgcctccaagcctctcgtcctctggctcaacggcgggcctgggtgctcgtcgctgggcgtaggggccttctcagagaacgggccgttccggcctagtgggcaggtgctggtgaagaacgaatacagctggaacaaagaggccaatgtgatatacctggagacgccggctggcgttggctactcatactctgccgacgctgcctactaccagggcgtggatgacaagatgacagccatggacaacatggtgttcctgcaaaggtggctccaaaagttcccacagtacaggggcagggacctgtacatcgccggagaaagctacgcagggcactacatcccgcagctcgccgaggccatggtggagttcaacaacaaggaggagaggatcttcaacctcaaaggcgtcgccctgggcaacccggtgctggagttcgcgacggacttcaactcccgcgccgagtacttctggtcgcacggcctcatctccgacgccacgttccgcgccttcacctccgcctgcaactactcccgctacgtcgccgagtactacggcggcgcgctgtcgccgctgtgcgccagggtgatgaaccgggtgacgcgcgagaccagccgcttcgtcgacaagtacgacgtcacgctcgacgtcttcctctcgtccgtgctctcccagtccaagaccctctcgccgcacgagcaggtcgggcagcgggtcgacgtgtgcgtggaggacgagacggtgaggtacctcaaccggcgggacgtgcaggcggcgctgcacgcgaggctcgtcggcgtcgacaagtgggcggtctgcagcagcgttctccagtacgagctgctcaacctgcagatcccgaccatcaacgtcgtcggatcgctcgtgagatccgggatccgagtgctggtttacagcggcgaccaggactcggtgatccctctcacggggagccggaccctggtacagagcttggcgcgtggcatggggctcaagaccaccaccccctacagagtctggttcgaagggcagcaggttggaggatggacacaggtgtacggaggcggcgcgctgtccttcgccaccgtcagaggcgcctcccacgaggcgcccttctcgcagcccggccggtcgctcgtgctcttccgagcgttcctgcagggccagcctctgcccgaaaccttctcgtgatgagcaatggctggctggctggctctggtgcggctcttgatctgaaggcaagtcactggtttcctggacgcagcagctcttctgcgcgtgcgagggggtgggttttgcactctagtaaactgtaagaaggtgttccggtgtgttcgctgtttcttcagcatccaaggctcggcaattgtctagagaagtggaaagaattcgtctctcgtctgcgtgtgttcgtttttgtctgtaaatgttctgctagtgctgcaagaacattgcatattcttggacacgaagagtgggaaaaaaacacacacacacacacgaagaaaacaagtgttggcaaaccggcaggcaatgatgcccaagaaaagctatacggcaggtgccatgagatcggcagagacgaacacctgtaaatgcaggcatgaagaagcaaaagcacctggaaggggcggcagcggcaccatgagagcccccgccgcccggtccaccgattcacgtccgtgtccatgatcctaggataggtgccaccgtttcagacttcgagtaaaggcgttctctcggccatcgattccacggagcgcggcaggaagagctagctggcatgtgacggtctgatggccgtctttctgcactgcctctgaatcgggagcaccggacggacaatgatggctggctatgaggttgtagttgtacagggagacgggtgggtcttccaggagtaaaggggactccagcagaggagacgagccagccacgcatgagcgctagggtagggtgctcgaaagtttcagcagataggataggatggaacataggctgtggtaagcatctctagcagttccaaaaaaaatccctaaaaatcaattaaggatgttattaaccgaaaatcatgctccaacaatctcataaatgaggtcccaaatatatcaacttcgtaaatattcttctttgtttagtccccagacttatggagttgtctagcattctcg

SEQ ID NO: 109586 - DNA, 1252 bp, Zea Mays
tcgatcgagaaacatgctattaattaacgctgcctctgtttcggtttcgggaatgctatgcagggcactacatcccgcagctcgccgaggccatggtggagttcaacaacaaggaggagaggatcttcaacctcaaaggcgtcgccctgggcaacccggtgctggagttcgcgacggacttcaactcccgcgccgagtacttctggtcgcacggcctcatctccgacgccacgttccgcgccttcacctccgcctgcaactactcccgctacgtcgccgagtactacggcggcgcgctgtcgccgctgtgcgccagggtgatgaaccgggtgacgcgcgagaccagccgcttcgtcgacaagtacgacgtcacgctcgacgtcttcctctcgtccgtgctctcccagtccaagaccctctcgccgcacgagcaggtcgggcagcgggtcgacgtgtgcgtggaggacgagacggtgaggtacctcaaccggcgggacgtgcaggcggcgctgcacgcgaggctcgtcggcgtcgacaagtgggcggtctgcagcagcgttctccagtacgagctgctcaacctgcagatcccgaccatcaacgtcgtcggatcgctcgtgagatccgggatccgagtgctggtttacagcggcgaccaggactcggtgatccctctcacggggagccggaccctggtacagagcttggcgcgtggcatggggctcaagaccaccaccccctacagagtctggttcgaagggcagcaggttggaggatggacacaggtgtacggaggcggcgcgctgtccttcgccaccgtcagaggcgcctcccacgaggcgcccttctcgcagcccggccggtcgctcgtgctcttccgagcgttcctgcagggccagcctctgcccgaaaccttctcgtgatgagcaatggctggctggctggctctggtgcggctcttgatctgaaggcaagtcactggtttcctggacgcagcagctcttctgcgcgtgcgagggggtgggttttgcactctagtaaactgtaagaaggtgttccggtgtgttcgctgtttcttcagcatccaaggctcggcaattgtctagagaagtggaaagaattcgtctctcgtctgcgtgtgttcgtttttgtctgtaaatgttctgctagtgctgcaagaacattgcatattcttggacacgaagagtgggaaaaaaacacacacacacacacgaagaaaacaagtgttggc

SEQ ID NO: 109587 - DNA, 1986 bp, Zea Mays
aaggccaagcacaggccctccctccctcccttccctgcatccgccactcccactctctccctccccacctcctcctcgtcccgttgaatcattcagcttttgaaactatttttttgtgctctcaaggcaaaagagcacacttaactcttccacgcctgtctctctctctctccctctccagtcacacacacactatctctgtccatcggccgatcggcggcatggccacgccattagctccagcgagctccttcattaccaggccactggcgctggcgctagtgctcgtcgcggccgcgctctgccgtccggcttcctgcgcagccgccgcggccgccgcggacaggatcacgcggctccccgggcagccggaggtgagcttcggccagtactccggctacgtcggcgtggacggcgacggcggcggcaagcgggccctgttctactacttcgtggaggccgatgcccccgaccctgcctccaagcctctcgtcctctggctcaacggcgggcctgggtgctcgtcgctgggcgtaggggccttctcagagaacgggccgttccggcctagtgggcaggtgctggtgaagaacgaatacagctggaacaaagaggccaatgtgatatacctggagacgccggctggcgttggctactcatactctgccgacgctgcctactaccagggcgtggatgacaagatgacagccatggacaacatggtgttcctgcaaaggtggctccaaaagttcccacagtacaggggcagggacctgtacatcgccggagaaagctacgcagggcactacatcccgcagctcgccgaggccatggtggagttcaacaacaaggaggagaggatcttcaacctcaaaggcgtcgccctgggcaacccggtgctggagttcgcgacggacttcaactcccgcgccgagtacttctggtcgcacggcctcatctccgacgccacgttccgcgccttcacctccgcctgcaactactcccgctacgtcgccgagtactacggcggcgcgctgtcgccgctgtgcgccagggtgatgaaccgggtgacgcgcgagaccagccgcttcgtcgacaagtacgacgtcacgctcgacgtcttcctctcgtccgtgctctcccagtccaagaccctctcgccgcacgagcaggtcgggcagcgggtcgacgtgtgcgtggaggacgagacggtgaggtacctcaaccggcgggacgtgcaggcggcgctgcacgcgaggctcgtcggcgtcgacaagtgggcggtctgcagcagcgttctccagtacgagctgctcaacctgcagatcccgaccatcaacgtcgtcggatcgctcgtgagatccgggatccgagtgctggtttacagcggcgaccaggactcggtgatccctctcacggggagccggaccctggtacagagcttggcgcgtggcatggggctcaagaccaccaccccctacagagtctggttcgaagggcagcaggttggaggatggacacaggtgtacggaggcggcgcgctgtccttcgccaccgtcagaggcgcctcccacgaggcgcccttctcgcagcccggccggtcgctcgtgctcttccgagcgttcctgcagggccagcctctgcccgaaaccttctcgtgatgagcaatggctggctggctggctctggtgcggctcttgatctgaaggcaagtcactggtttcctggacgcagcagctcttctgcgcgtgcgagggggtgggttttgcactctagtaaactgtaagaaggtgttccggtgtgttcgctgtttcttcagcatccaaggctcggcaattgtctagagaagtggaaagaattcgtctctcgtctgcgtgtgttcgtttttgtctgtaaatgttctgctagtgctgcaagaacattgcatattcttggacacgaagagtgggaaaaaaacacacacacacacacgaagaaaacaagtgt

SEQ ID NO: 109588 - DNA, 718 bp, Zea Mays
tttttttgttttttcccgttcacaaatatgcttctctgtagtcgtaattttacagttagctacaataatctaataacatagcaattccataatttgagccgaagttgtggttgaagcctgtacttatcattattttccatatatacacaactaatacagaatatgacaccacaaaaagtattcttcaagagaactaaatagatatttgcactaacacttgctcttgtctcatccaaaatttgacattatctgaaggttacaaaacagtgagctacaactgatacaacccactgcaaccgaagaagaaattcagaattcctagccaccaaactacgaagacaaaaatgtcgaggagttgctttatatagatccagacatgtttcctgtaatcactgtcacctgctcctatattccacttcttttgtacatcaacaatgtgatatactgcatcttttttttctcttttgtgatgcagccacaaggttatagatgcactgtcactattcacgcattatacaagatatatagcagatggtggttcccattttgcaccactcatcaagagcaacaacacttttggagagatgtatctgtataaatataaaccagctgttggactatttctgatctgtatatattgaagcagcgcctagaaacatattgttaccagctcttggtgcacactactttaatactacttaatatgtattatagtctc

SEQ ID NO: 109589 - DNA, 375 bp, Zea Mays
atggcaggaatagaggccgagctagagggcgacgttgctggagcgtacagaccgagctggggcttcacggcgagctcagagggagcagagaccagggcgaactggcggctgggcggtcaagcgctgggaataggaagcgccgagcagggaggaagaagctttggggagatgggacgagcagaggaagtgccgcgcagaataagagccagagagaagctgggagccgcagcacggaggagcatggggaggaagatgagcagggatgggcgagctcaggctccaagaagccatgggagggagagcgagccggagggagccgcacacagcagcaggcgcggtaccaagcgcgaccatgggagcgagccaggcgcgtga

SEQ ID NO: 109590 - DNA, 778 bp, Zea Mays
agtagcaggagcacaaagtgcagaagcagagccagtcctaactgcttagccaggaaagaagcagagcgtgcttagccatgtactcatccagctgccatgtgatgtccgagaagccaaacggttccaaggcggtgacgctgctgctcaggctgtccacgctggttctgtcgctcatctcggcggtcgtcatggccaccgccaccagcgactgcaccatctacggccacggcggcgccgccaaggtcactatcatgttcaagaactaccggcccttcgttttcctggtagttttgaacatcgcggcggcggtgctggaggcagcagccatctacctacaggtcgtgaagggcgacgacggcgacgaggcgcccaagcttccccggatcatcctggttgtcctcgacgtcgtggtgctcgcgctggtcaacgcggcgacgggcgcggtggtcgcggcggtcatcgcctacggccccgagatcgacgcgtgcaccgtcgcaggtggtggccgattccgcgagcaggtgcgcaggtccgagctcctgtcgatcgccgcgagcatctccgctgtgtccgccgccgtcgctaaggacgtgccgctgcccttctccgtgtggcccctctcgtcggaatcaggcgactactactgatcttggttattatttgtcaggtgatgttgagtactgtgagtgtgaaggctttctgccagcgaaattccaatttatgtcaactgaatgccactacgataagctatccttcgaaaaaatttcagcacaaatca

SEQ ID NO: 109591 - DNA, 303 bp, Zea Mays
atgaaccgcccttctcatggtgttcatgagcttcctgttaagagacatcctgctaggtctagaggtgctttgcctcatgctgataggcctcaaacagtgacaccacgtggtggtcatgcccgactggctgctggtcgtgtgccatatgaccaaggaccccatgacagaggctttggttcttacttcctcagcggaccacaatttccttctcgtggtgatcgcttcccttcgggactagggatgtttggtgttttccctaatacttttcaggggcaaatgtcgcaacactggacggaggcctag

SEQ ID NO: 109592 - DNA, 392 bp, Zea Mays
acttcctccccatcacgtttttcctctacccaggtcgagctcgccctactgtgcttgcctgtgctcgtcggccatctccctggtggccgacctcgcccctgccccagccacagcttccccttcggccctgctgctgcaagcactcagcctctcctatggcacacgccccacctgcgacaccgtcgacccccggtgaggttctgttctcgccctgtcgttttagcgctcgacgtcgattactaatgtgtgaattgtgtgtgttgatgagggagttaaccggtaaagaagcgaggtccgtgcgacgtttgccaagtgttcgatggaaggtccgaaccgggaacctcgcctttctcgcggatcttcgggtcggtttgtgaattggtgagcctgtt

SEQ ID NO: 109593 - DNA, 290 bp, Zea Mays
acttcctccccatcacgtttttcctctacccaggtcgagctcgccctactgtgcttgcctgtgctcgtcggccatctccctggtggccgacctcgcccctgccccagccacagcttccccttcggccctgctgctgcaagcactcagcctctcctatggcacacgccccacctgcgacaccgtcgacccccgaagcgaggtccgtgcgacgtttgccaagtgttcgatggaaggtccgaaccgggaacctcgcctttctcgcggatcttcgggtcggtttgtgaattggt

SEQ ID NO: 109594 - DNA, 272 bp, Zea Mays
gattgttcttccagtatgttattcacgtcagagaatcatgggtttggatggcgggtggtatttatctgaatccaaccgaatctaatacagtttacaatatcgaagctgatctcgttggccttggtccgtgtgtttctcgtatagatctaaatattcgaaaataaataacgagtaaaaatttatctgactccagagtattcaccaaataaattaatatctaaattatgtactcaatattattttgatccaactaatccaaaaatccaaaatcc

SEQ ID NO: 109595 - DNA, 566 bp, Zea Mays
acttagttagctcaacaacgcgtataaataagcttgttgcccgctggaacaagaacacgacgacgagaacgacgacagcggcaggacgaaggagctagcaggagcaacggcagccctcggctcacgtcacatggcgacgacggcgatcggatcaggacgcgggtccgggacggcggcgctgtgctttctcgtggcctgtctcctcctggcctcgccgtcgtcgttcgttgctgggactgaagcggcggcggcctacggtgcaggcgcaggcgcaggtgcaggcaggaagctgatgcagacatctgcgggagctatgggataccccggaactaatctaccaccagcgacatacccggcggtgccttgttgcccgtgaactctgatcctacagctgccgcggccgatacaaccctgcatattttatacaaatccaacaaagtaactattacatgcatatgctacgcgcgtgcttgttacagtgtacagtatatatgctgtaggtgtgtgagctatattattgttcaaaataaaaataaaaaaacctagcttgtggcacaaacattttc

SEQ ID NO: 109596 - DNA, 311 bp, Zea Mays
tttatttattttatagccggacacctgcatcattcttcttttctcttttatttattttatggccgaacacttgcattgcatcattaggatacatgcaagacgccaagtttttgcacgtttcaccaccatatggacgccttaccgttctgcgtcgccagattcttcctcaagctcagtttgttacggacctccccaatttccggcaacaacttgatccagccgttacgaccatttaatgatgtacaattctcctgagctttcaagagaaaaaagaggtaacatgaaaaaagccaatactttcatgctttggc

SEQ ID NO: 109597 - DNA, 1035 bp, Zea Mays
atgtttggaagagcatctcctaggatgaacttgatccaatctgcagctatgaaaaaaatatcccccagatctactactaacaagcgcaagaagagaacatcaccaaaagataaagagaaagagttaaagagagactacaaggctcttaaagaggcaagacaacaaagcggggtctcatgggatgagcggttgtgtagaatagaagcagaagaacccatttggaataacctcaccactagtaacgagagacttaagaagtttcggactaaatcttttccactatttgaggctttaggagagctatatgatgggaatattgctgagggaaccatgaattttacttctattgagccttctcgacctcatgtcacacaaccttgtcaaggtgctgctacacagccttctcaagccgctttcacacttacacagccttctcaaatcgctttcacacagccttctctagctgctttcgcacagccttctcgaaccgcttttagacatccttctctacccgctttcccatagtcttctcaagccgcttttgcacagccttctcaaaccactttcacacagccttctgaagacactttcacacagccttctcaagccgctttcacacaaccttctcaagctaatatctcataagccatttctgatgaagatgacgagcttagagtattggatccaacaacccctacatcagtgagcaaaaggacaaaaaatgttggtactggtaattcaagaacaagaattaacaagcatacacaagatgggaatgtggttgagatgatgggaaggtttctagaaatgaaagaaaaacaagctgaggcggaggaaagggccacaactaatgcaaatgaggatgatttccctattcaaacatgcattgctattgtggatggaatggaagagctttctgatgatgagaaggttgatgcttatgatgtgtttaaggatgcccaaaaccgggacattttcatgactgccaaagatgctacgcgcataaaatggttgaggaagaagattgcaagaaca

SEQ ID NO: 109598 - DNA, 742 bp, Zea Mays
aactaggaatagaagagaagaggaggacgaggagttaatgctctttcttttccctgctctttatctaattactaatggagggagagagagaaaagagcaaggcatgcttctattctacctggcaaggagagacttaaagagattcttgaagggcatgggaagaaatgtcttgtcgcattccgtatggagcctcgtatattcaaagatatagtaacatttcttagagaagaacacatcctacatgacacaaggggtgttaccatggaagaaaaactaggaatgttccttttcatgttgtcctataatgctagttatgagtatttacaacatgaattcaaacatagcggtgaaactatccatcgacacatccaatcagttttccatgtaatcccactctcatgtatagatttgtgaagcccgccactggaatttcagttcattggaagattagcacggatgaacggttctttccttacttccaaaattgcattggagctattgatggaacacatgttccaattaccatttcggcagaaaagcaagccccctataggaatcgaaaaggcacactaagtcaaaatgtaatgttggtttgtgattttgacttgaacttcacttttatatcatctggttgggaggggttagctacagatgctagggttctaaggtctgtactacttgcaggattccatgttcccgagggaaatattatcttgtcgatggaggatatgttaacacacca

SEQ ID NO: 109599 - DNA, 491 bp, Zea Mays
gggccgatacatgctaatacccgggggacagaaaaatccccacccgaggcgtggaagacacctcgtcgtcctcctcgcgtgcgagcgccgccaccgcgctcacatcagtgtcgcctggcgtcagcgcattgtgcccttcccatcgaactctgccgaccccacatcttcccatacgagtggtgtttctccaaggttcgctgttggccatatccacgtcgtcatcctcgatccagacgagtgtgtgtgccatatccacaggtcttcgacagatttagggtgaggataagtagcaggctgctcggcctacctcctcattggccagaagctctcctcagttctccactttgcccagcatgagcctcctcgcctcctcgttggtttcctatgaggccagattgagccaagtaattctcggctctctattttcctgttatctcaaaggctgaaaatatgagagatgagagatttcaagtgctattttctattttata

SEQ ID NO: 109600 - DNA, 1968 bp, Zea Mays
atctccgctttccgtcttcccgcgaaccgacgccattcttcgccccggttccacggctcgaatcgcatgaccgcatccgatcccgcccggcccctcctctatacactggaccgatcgcctgggccgctgatggagggagggacgcccgcgacggcggcggcggaggcgatggaggccacggggaaagccaagaacgacggggtggtcaaggaggtgatacggctcgagcgcgagtccgtcatccccatcatcaagcccaagctcgtcatgaagctagcttacctcatcgagcgtgagaacgaccggactgagttcatgaagctatgtaagagggtggagtacacaatccgcgcttggtaccttctgcagtttgatgatctcatgcaactctatgctttattcgatcctgttaatggggagaagagtttggagcagcagagcatgacatccaatgaacttaaaaccttagaactcaatttcttaacctacctttttcagatcatggaaaagagcaacttcaagttgttatctgacgaagagtacgaggtggcgcagtctggtcagtatcttctaaacctcccaatcaaggttgatgaatccaaggtagatagcaagttgttgacaaagtactttagggagcacccacatgacaatctaccagcatttgctaacaagtatattatcttccgtcggggcattgggattgatcggacaactgactacttcttcatggagaaagtggatgtcatcatatcccgagcatggaggtcattgcttcgagtcacaaggatcgatagactgttctcaaagaaacaagtactgccaagaaaggacacaaagaagactgatggaataaatgatgatgtagaagagccagacctctatgtcgagcgtgttcgcctagagaaaatggagctgagcgtaatgaatctgttgagaaaaatgacaattcaagagcctacatttgaaaggatgatcgtggtgtataggaaggctagcccagaaagtaagccagatcgagggatatttgtaaagcacttcaagcacattccgatggccgatatggagttagtcctgccagagaagaagaacccaagcttaacaccgatggattgggtcacatttctaatttctgctgtgattggtttggtcactctgataggcagtctagaaatgcccaaggctgacatatggtttgtcacagctatcctatctggtctggttggatactgtgcgaagatatacttcacattccaagcaaacatggtccaataccaaaacttgattacaaagtcgatgtatgataagcagcttgatagtgggagaggaacactcctccacttgtgcgatgatgtgatccagcaggaagttaaggaggttatcatttcttactacattttgatggagcaaggaaaggccactgtacaggatcttgattcacgttgcgaacagctcatcaaggaagagtttggtatggagtgcaattttgatgttgtagatgctgtaaagaagctagagaaactcggcattgtttctcgggactcgattgggaggatcctatgcgtcccattgaagcgcgcaaatgagatcataggaacaactactgaagaaatggtgatgcgagcccaacaagcttcgggataattacatcattcagtcaaaacttatgcgatgcaaaggcctgccgcgctgatgcattcttttgagcagtttgctggtgtagaggagatgttgttattctttcatctgctcatccttctctctttttagtgtacgggcagttcaacaagtggactgtagagagcacacgatttacatgtacagaaccgttgcttcctgattgctttcgcgtagattagttacttcctgattgctttcgctgcttcacaccagcctgcttatgatatacatacagtatcatgtattggaacatttaaggaaacataaggcagcttgcttctgataata

SEQ ID NO: 109601 - DNA, 1026 bp, Zea Mays
aatcgcctccccaccccattcttatctcctcgccaccgcttgctatccgtcgcctcgccgcgcgcgcgtacgttcggttctcggccactgctcagctctcgctgcagcgatggccctgcaggccccgtcactcatgcgcgcgccggcggcacagcggtccgcgccgccacggccctccttctccgccccgtggtcgctgcggctgccggcgcctgcgcggcgccgggtggccactgccgcgcggatcaccatgcgggtcgcgtccaagcaggcctacatctgccgtgactgcgggtgggtgagccacagccacccaagcggccgggggggggcagctctttatttcgcccgcgcgcgccgggcggctgcgctagctttagcttgccgtgctgtggcctgccctgctcggatgcatgctgccgtgcccgtgctcgtgcctgatttgttgcctctgtctgtgtttcttgctgcaggtacatctacaacgacaggacgccgttcgacaagctggctgacaactacttctgccctgtttgtggagctccgaagagaaggttcagaccctacgagccagcagtctccaagaacgcgaacgccaccgatgccagaaaggcgaggaaggaggagctgaagaaggaggagagcatggggaaagccttgcctattgccatcgtcgtcgggatcattgccttggctggcctgtacttctacctcaacaatgtctacagctaaacgacgaatagatccgtttggtgcggcgaacaggattcatgccgttttgcagtctttttccctttgttaatcgttgcaatgtgctgtcttggtgcatgtactactagggctccaagactgtatacaagttttgctgttcatcttgaaataccacacattacataaccagcagttaacatgaagtgttttacttacttatttccagcgtttagtttggcgttcggattcgaacaggtcatctgtgggctaaacgagtttgatcaagtaaaaatctcagcgagctttatgctgtcc

SEQ ID NO: 109602 - DNA, 847 bp, Zea Mays
aatcgcctccccaccccattcttatctcctcgccaccgcttgctatccgtcgcctcgccgcgcgcgcgtacgttcggttctcggccactgctcagctctcgctgcagcgatggccctgcaggccccgtcactcatgcgcgcgccggcggcacagcggtccgcgccgccacggccctccttctccgccccgtggtcgctgcggctgccggcgcctgcgcggcgccgggtggccactgccgcgcggatcaccatgcgggtcgcgtccaagcaggcctacatctgccgtgactgcgggtacatctacaacgacaggacgccgttcgacaagctggctgacaactacttctgccctgtttgtggagctccgaagagaaggttcagaccctacgagccagcagtctccaagaacgcgaacgccaccgatgccagaaaggcgaggaaggaggagctgaagaaggaggagagcatggggaaagccttgcctattgccatcgtcgtcgggatcattgccttggctggcctgtacttctacctcaacaatgtctacagctaaacgacgaatagatccgtttggtgcggcgaacaggattcatgccgttttgcagtctttttccctttgttaatcgttgcaatgtgctgtcttggtgcatgtactactagggctccaagactgtatacaagttttgctgttcatcttgaaataccacacattacataaccagcagttaacatgaagtgttttacttacttatttccagcgtttagtttggcgttcggattcgaacaggtcatctgtgggctaaacgagtttgatcaagtaaaaatctcagcgagctttatgctgtcc

SEQ ID NO: 109603 - DNA, 1953 bp, Zea Mays
atgtccacgtccccagcgctcgaccatgaccatgaccatggtcaccacctcctctcctcagcctcacccacctccacagactcgccggcaacggcaatgcggccgcggccgccgtctctcccgcctacgatcccggcctgcgacccgcacgacgggccagcaagcctgcagctcatcgaggacctgaccacccacgccggcgccatccagcagcgcgtcctcggcgagatcctcgccatgaacgccggcacggactacgtccgcggcttccttggcgccaacgacgacgacgactccgccgagggacgccacgccgacgagctcgcggccacgttcaaggagcgcgtgccggtcgtggagtacgaggacgtgaagccgtacatcgagcgcatcgccaacggtgccccctcgtcgctcatctcctccaagaccatcaccgagctcctcactagctccggcacatctggcgggcaaccgaagctgatgccatccacagaggaggagctcgaccgcaagaccttcctctacaacctcctcgtccccgtgatgaacaagtacgtggaaggcctggacgaagggaggtgcatgtacctgctgttcgtgaagccggagatgaagacgccgtcggggcttgtggcgcggccggtgctcacgagctactacaagagccggcacttccgggagcggccggacagcccgtacacgcggtacacgagccccaacgaggccatcctgtgcgcggacagcgcgcagagcatgtacgcgcagctgctctgcggcctggcccgccgcggcgaggtgctgcgcgtgggcgccgtcttcgcctccgccttcctgcgcgcgctcaagttcctcgagggccactggcgcgcgctgtgcgacgacatccgcgccggccgcgtggacgcggcgcgcgtcaccgaccgcgcctgccgggacgccgtcgccagggtcgtggcgcggccggacgcggcgctggccgacgccatcgccgcggagtgcgaggccggggccgcgtcgtggcggggcatcgtgcggcggctctggccgcggaccaagtacatcgacgtcatcgtcacggggtccatggcgcagtacgtgcccctgctggagttctacggcggcggcctgccgctggtgtccaccatgtacgcctcctcggagtgctacttcggcatcaacctccgcccgctggaccggccggaggacgtggcctacacgctgctgcccaacatgtgctactacgagttcatcaaggtggagaaggacggcgaggaggtccgggacggggaggtggtggaccttgtcgacgtcgaggtcggagcctactacgagctcgtggtcaccacgttcacaggtctgtaccggtaccgcgtgggcgacatcctacaggtgtcaggcttccacaacgcggcgccgcagttccggttcgtgcaccgccgcaacgtggtgctgagcgtggacaccgacaagacctccgaggacgacctcctccgcgccgtcaccgccgccaagcgcctcctggcgccgctgggcgccatcctctccgagtacaccgcctacgccgacacggcctccatcccgggccactacgtcctcttctgggagctcacgccgccgccaacgttgtcgagcggagccgcgggcgtcatggcggcgtgctgcgccgaggtggaggccgggctggactccgtgtaccggcggtgccggagtcgcgaccgctccgtggggccgctggagatccgcgtggtgtccccgggcgccttcgacgagctcatggatctctgcgtctcccacgggtcctcggtcaaccagtacaagacgccccgctgcatcaagcaccccgacgccatcgccgtgctggaggcgcgcgtcgtcggcaggttcttcagcgacaccgtgccgcactgggagccgttcaatgtcgtcgacgctaacgccgccacggaagcg

SEQ ID NO: 109604 - DNA, 483 bp, Zea Mays
gtcatccaaaaattgcacaagaataaatgcgaagtacttttcatcaagcttgatatttccaaggcgttcgattctgtcagctgggcttacttggtagaagtccttgcgattcttggctttcgtgccaagcaaattgacaaaattcgtcgtagtttcttgtggaagggagaggaaccagaaaatatttctgggggacactgccttgtcaggtggccgttagtgaagcgccctttgaacctaggtggtttgggaatcgtcaatctggtgcgttttgcaagagctttaagacttcgttggctttggtttgaatggaaaaatcaagaaagagcttaggtcggtttggacattccctgtagcaaggttgatcggggtctctttcatgcgtctacagtggtgacagtgggcaatggggttaaagcctttttttggcattcgtgttggatcgattgcacgtcggcacgattgatagctcccacgctcttt

SEQ ID NO: 109605 - DNA, 116 bp, Zea Mays
gtttgtggttgtattggccctctttttattttatataatgatgtgtagttgtcctgtgtattcaagaaaaaaactatactagctaacaatattatagacacaagaccttaacttag

SEQ ID NO: 109606 - DNA, 1304 bp, Zea Mays
cttggcaaccaaaccatcatcatcgtacgtcgatcgtcgtcatgcaatcgtccttgttagcacgcgacagcaaccacgccgcggctgccacctgcccgtccggcgacggcctcgcgtgtgtgcttggcgtcggcacagccaacccagccaactgcgttcagcaagacgagtacaccgaccgttacttccgtatcaccaacagcgaccacctcacgcacatcaaacccatcatgaagagagcatgcgagatgacgggggtcaaaaagcgctacgtgcaagtcgacgaggacctcctccgggagcacccggagttcctggaccctggagcggcaagccttcccagcaggctagccgtggtggccgccgccatgccggggctggtggcggccgccgcagcgaaggccatcgccgagtggggccgcccagcgacagacataacccacctcgtcttcagcaccagcaccagcgtccaggtgcccgccgtcgacctccgcgtcgcgtccctgctggggctaccccccaccgtgcggcgcaccacgctgtgctcccacgcctgcaccggcagctccggcgcgctccgcgtcgccaaggacgtcgccgagaccagccgcggcgcgcgggtcctcgtggcttgcgccgacatgctgagcgtcctcggcgtccacgcgccgcacgacgacgacgacgacgccgtggggatcgtcgcccacgccctcttcggcgacggcgccggcgcggtgctcgtcggggccgacccatgggacccccgcgagcgcccgatcttccagatgctggccgcgtcccaggccacggtgccgggcaccgaccacgtggtcgccctcgagctcgccagcgccggcgtcgcctaccggatcgaagccggggagctggcggcgctggtcggcgccaacgtcgagcggtgcctgagcgacgcgatggcgccgctcgccgccgttgggtgcgtcggcgcctggaacgacctcttctgggtgctgcaccctggtggccccatcatcatggacagcttcgcggcggctctcgggctccagccggggaagctggccgccagccgccgcgtgctcagcgagtatggcaacatgatgggccccactctcatctttgtcctcgacgaggtcatacgccgtcgccggcaaaaccatcaggataggagctgcggatgggggttcatggtggggctcggccccgggttcacaatcgaagtcatggcgttacgtgcgtgcggtgacattgacaatgacaagtccactctgccgccgacgccacgactcaagagttctctgtag

SEQ ID NO: 109607 - DNA, 1219 bp, Zea Mays
ttgcttgcaggtaggttactggttgcacttgtttgtgaatacttggagtgaccacaactaagtcacacaatgaaactttaagtgtaacctggtgaccggtgaccattcataatatttcatttttacattttggatatcaatatccattaatatgtatccctattttgtttgtatatcagctgaacttctgatagaatgaactgaaagacttctctaacaaaagtggagctgaggggagcaagagtgctgaaagcctgaaagtggtccaatgtttttagatgttctcgaatgttatctgaaatatgaggtttatctcttgcttgatcaacaatagaagcaaacaatcatccttttgtttatttatgtttcccaatataaaggaaaaaggggaaatattttggtgcagtgtgcccaattcttttgtccctagaaaactgtgtagtcgcctatagcaggcactatagtcagttttagctattttagacaccactactatttgtacacacatttctattagcctattttagcctgctatatccatgtatgggccttatgggaactctgcaattactatggatcctcttatacattatgttcgacatagagacaaggtagtatattgagttggaccaataatccttcatatttatttatgtgaattatgttgtactggtgtcctgtccttttgtttgtgctttataatttgtaattcctagctgctgatatggtctgatggatgggaggtggctgaaatcgttcagataagtgccaatttgttgttttcttttttaatgaatggttttctatttcagctgatgaaccttttatagttcttttattatatgctgccactgattgctaatagggtgcatgtcttctatttctaggtatggtgcataaaaaagtaggaaccacaatgagattgtgatgctgcacatggcacatcaaggtgcgcaagatatgtaccgtagaaattatcgtaaagtgcacacagctgtatgtatagatgtttagaagtggccgaagttaggcttgctcaaccggggcaatgatttacttagcctgctgaaatgtactataggtagcattcaagtttgtgaccatcatgcaagtacatgtgggtttgttgaaattgagtggtcatcggagatgtagcaaaatgttccctatcgagagctcgtgtactatatttgttttatgaacttaatttttattacaa

SEQ ID NO: 109608 - DNA, 2421 bp, Zea Mays
tttgaaccaaataaaatatcaaggaatgcattaaagttgaaaatacattgatcacacagccaaactccttgggatatttttaagttccacttcaattttccttgcagtagtctgttttctttgcaacaaaagtgaacatcattcctgacagtactctgttttctttgtatgttctgatataatattacatcattcctgaatttcagaattagataagcaaactttagcctttttcaatttcctgttttattatgttttaaaactccatgtagtcagtacagtaacaattcctgacttatgaaactttattcatcttaattttcgaaattctgttctggattcttgattgcctgatatattgctatatgctcatttgagataagtcagatgccatgttcactttgtagaaacctgcacaagttcctacaggtgtgtaacaaacaaaatgatggtttgtacctttatgagatatgatagtgagcatctgagcgggtggaacgagcctgcaacaaaccgagcttggctcagctcgcccatctgacgagcttgaaaaggcggctcgactcgctcctagcgtcggctcggtccgagcggagcgtgttgcgagcccgagccagctcgttgcgctcgagtttttttccagccgatagttgttcctttctataaattcaccttgttctttctcaacatgtatgtagaaatctatgttgtatttcttaagccaaattagcaaatattttgtcagtaggtgtaataagtccggtcgcacctacaccgatggccatacccaacgtgagtcaagccaagtccattcccctcccttgcttcctcaacttgttgtcttgtggtctgctatttgtctcagagaaggtggtgccatcatcatcagttgtgattatgaattatattctaccgataggcttagataatttttggaacacaacattgctccaaaaagtttttctgaagaaaaggtatcaatctgcagtttggtaagtgagtctgaatctgcagcaccaaggacttcaagaattagtctgaacctgcacttacagttccatgggtcttctcaattattaataatattatttttaatgaataattgaatatatattgagtctgtatcatagattcagtcgccttaacaccctttgctgttttcccacttaagttagttaatgagatgaatggatgtaaattacgtagtgaatgtatgataagtccaggctacatgttaaaagacacacttggctacttgagctctgtattgccatgaagaaatcttactgacgggtgctttcatctgctatttggatccgttgctgatggatcttataaaggttgcggagacaaaaacaaggagcatggaagaggaagtaatcaagctgcagaaatgcttacaggacaaggatgagcaactgtgttcatccacaagtagcacggaacagctacaggagaagcaggtgttgcatcagctaagttagctcggatgtagtgcatgtcattgctgaaagagctgaatgagaaggacagctcactcaaagaccatagacttcgagtgaacaatctaggtgagcagcttgatcttctccagaaggatgtacaagcaagggaggtcacacaaatgcaacttaaagatatagttataaggatcgagaccaacatcatggatgaagttgccaaagcttttgaaattgcgatgttgagagggggaatcggaatattgtctactcactggacgaacaaaaccaagaaccttgaatcacagttaaaaagcaccagagaactgatcaggagctgaagaagagggttctgaagcttgaattttgtctctggtcctgtcatcccctggtgtgttcgccaccgcacctaccgctgttactagctcccttgctcttctcttgctgcgactgggatatagcatcgtggatcttgaacctaggccagaatttaggcaggtctagaaccaccatgatgcctggaacatagtcctattttatctgacaactctttcttgtcctgattcttggcggggtttcggcatcttctgataggaccatgctaacaggatgctcaacttttacgctccaggaacccaaatgaaccttcaacttgcttattctgtgagatctgtgagcaagcgagttgtcctagaacagttggctcctcacaatgggtattcgacgctagccccatccctgccacagacttgggaaaggcacagtgatttttatggtgacatgaagacattcctctttaaattatatctttaagcatccatttttcgccctactggtgcatacaagaatttgcaatgggtatgttttgtcctgtatgacatatctccttattttattttcttccttgtttgtgttactactaatcatctctagaatataaagggtagtttacaccattaga

SEQ ID NO: 109609 - DNA, 1355 bp, Zea Mays
atggccatacccaacgttgcggagacaaaaacaaggagcatggaagaggaagtaatcaagctgcagaaatgcttacaggacaaggatgagcaactgtgttcatccacaagtagcacggaacagtaccatcatgagttggatgatcttagaacacatctgtcatttactcaagctacaggagaagcagagctgaatgagaaggacagctcactcaaagaccatagacttcgagtgaacaatctaggtgagcagcttgatcttctccagaaggatgtacaagcaagggaggtcacacaaatgcaacttaaagatatagttataaggatcgagaccaacatcatggatgaagttgccaaagcttttgaaattgcgatgttgagagggggaatcggaatattgtctactcactggacgaacaaaaccaagaaccttgaatcacagatattattatgcgctcttgtcacaacaattgagaacatgaacctgggggcatggcgtggaggggcacccacggtagctgatttgtttctctacgtccagttcttggaaaaggctacctgcactaattcagcattgggaagtgtcatgtgatgacaccttagatccaacagtacctcttataaactatcagaccttcccaataaaagatggttgagtttcatggtaaacttatttatatactacactaaacaagctaactggctaagcttagcagaaaatgttcactacgatctgccaaaaccacttataatttgtgccagatggaggagaaactaatcttttaaactgaagcatatgcatagctgaaactaaattcttatttgaagcataattttagttaagaaaactaactttttgtgtgttcgcgctctgaatccgcacaaacagtttcctgtttctctatgaaccctaacccccccaatctcggcggagatcaagtgcaccccctcgcccctcccctggttggtggatgttggatatagaggcgttgcagaaggtattgtgcaggaaaacatagcttctgctattcgttggtttcccctgttcacgtgtcattctctgtttctcttttctcttaaaaaatggaaaacatattgtcccttcagttcaccacttgctcggtggcaattgcagttacttatcttgcagttacttcaaacatggtggccacatcttttgatctgtgtgtgcttataattgtagatttgaaagatgcaacccattgcgataatgattgttttatgtgatatgattagcaaaaatattagattaggcatatttgagcatccctgagaactgccggtgagttgggtctgtgatagatttcttcatctccgagaaatggaattttactc

SEQ ID NO: 109610 - DNA, 1817 bp, Zea Mays
cgagaactagccatacccacgcgacccaactaactactaaagcaccccgtggcggcccttgcgcccgtccaactcacctaacccgaccgcgcggctatataagcaccgcaccccggcgggcctcctctgccattaagactagctaactagcgtgaaagagctcctccgacgactactagctctcgcttgctccgacgacccctgccggccgcctctggtacaacgtacgagaggaagagagacgatcgatggccggcgccaccgtgaccgtggacgaggtgaggaagggccagcgcgcgaccggccccgccaccgtgctggccatcgggacggcgacgcccgccaactgcgtgtaccaggccgactacccggactactacttccggatcaccaagagcgaccacctcaccgacctcaaggagaagttcaagaggatgtgcgacaagtcgatgatccggaagcggtacatgcacctgacggaggagttcctgtcggagaacccgagcatgtgcgcgtacatggcgccgtcgctggacgcgcggcaggacgtggtggtgacggaggtgccgaagctggggaaggcggcggcgcagaaggcgatcaaggagtgggggcagcccaagtcgcggatcacgcacctggtgttctgcaccacgtcgggggtggacatgccgggcgccgactaccagctgaccaaggcgctggggctgcgcccgtccgtgaaccgcctgatgatgtaccagcaggggtgcttcgcgggcggcacggtgctgcgcgtggccaaggacctggcggagaacaaccgcggggcgagggtcctggtggtgtgctcggagatcacggccgtgacgttccgcgggccgtccgagtcgcacctggactcgctcgtggggcaggcgctgttcggcgacggcgcggcggccgtcgtggtgggcgccgacccggacgggcgggtcgagcgcccgctgttccagctcgtgtcggcggcgcagaccatcctgcccgactcggagggcgccatcgacggccacctccgcgaggtggggctgacgttccacctgctcaaggacgtgcccgggctcatctccaagaacatcgagcgcgcgctggaggacgcgttcgagccgctcggcatctccgactggaactccatcttctgggtggcgcaccccggcgggcccgccatcctggaccaggtggaggccagggtcgggctggacaaggccaggatgcgcgccacccgccacgtcctctccgagtacggcaacatgtccagcgcctgcgtgctcttcatcctggacgagatgcgcaagcgctccgccgaggacggccaggccaccaccggcgaggggctcgactggggcgtcctcttcggcttcggcccgggcctcaccgtcgagaccgtcgtgctccacagcgtccccatcaccaccggagcgcccaccgccgcctgagtcgtccatctatcctcgcgatcgctccagacatgaacgacccgacctacgaataatgtatctgcgtaattaattactatctgtcttgtgtcctagtagctgttttaaaacccttaattaattttattatgggcgagctagctcaagagtggagtcataaaaccgcatggatggtgaggtattgtatagtacctgtgtaagacaagcttggctggtttttttattttatattttaatctgtttgctcaagacaaaacaaaaaaaaaaatgaattgttgagctgtcattaatttgcagtgcaccagctcaagttggttgtactcctatcctatgtatgaaatgaaatcccttctagtagtatct

SEQ ID NO: 109611 - DNA, 318 bp, Zea Mays
taagtaacccacgcgttgcgtcaatttggggcgaggatggctccatcggaggcaggcgtagatgggagacgcggcgtcgactgcggcgaggatggctccatcggcgtggaaggcagcctggggaagggtgctaggatttggggcgaagatggctctagtggaggtgcggtgttgatgggaggcgcgacagctgcgttgatggctcgggcgctgttggaggtggccgcgctgatggctcgggcgcagttggaggcgtcgcacaatggtggtggacaagcggggttttcaggttccactcgctcgctacaagagcaataa

SEQ ID NO: 109612 - DNA, 429 bp, Zea Mays
aggggagctgcctgatcatttatgtcagcaggcaagttgaattcttgggggcctatgatgtgatcgatgaggatttcctcatccaaaacctctattggcagctcatgaatctgttgttgcatttcatcagacagctacagaagaagttcctcctatggaatcattgcagaagggacattcccctgaacttcataagcgcatcacatgcttacggcctgccgataataatcatccgcgtggcgaattgaattggatccacatgcgacgggaggagcgagtgcgtagtagtagcacggctactccatcctactggcgttgaatcttcgtcccatctgagacgactagctagctggtgcaacgttcttcttccaacatgtggcttacaaaagttgaatgaatttctctgcacgatttcttccggaaacccac

SEQ ID NO: 109613 - DNA, 4383 bp, Zea Mays
cacacggccgtgaggagcaactctgttcctcatctcccgttcaccccgcgggcgcagggcgcgctctctcctcgtggcgatcgccgaccgtagcggccgctgcccgggttttcgtcggccgcttcgccatgtcttcgctggacccttcgccagcgacgagcacccaacagaagcaattggagagtttggtaaatctactgacgcagggaagcaggttctaccgcaaagcatataatgaactgttctcaggtgtaactactgagcaggatccggattcatcgactaatattcctgagtatatgctttttgggtggcatctcttcttaatgctccatttgagatcaccagaattgttcaaggacctggtgtcctgcatccatggattagttgctgtgttggccatacttttgattcacgtgccagctaaatttaggagcttcacgattgaaggctcttctcacttaatcaaacaaactgagaaaggcgtggatcttattgcttcattatgtcataactatcatacctctgaagaacgtttgaaagaaatgttgcacaagtctcacaatgcaatagaagacattttccatatgaaagcactaagtgcttcagagtgcaaaccagaaaatttggataagatagacacagatgacctgatgtatttcaaaggtctgattgatatggaatgtttccagtcaaatttggaaaaaatggagaaactatgtaattctaatagctgtaaaggggagcttgattttaaatcaattttgatcaataatgattatattccctatgatgagaactcgacgggggattccaccaatttaggacattcaaagtgtgcctttgaaacattggcatctcccacaaagacaataaagaacatgctgactgttcctagttctcctttgtcaccagccaccggtggttcagtcaagattgtgcaaatgacaccagtaacttctgccatgacgacagctaagtggcttcgtgaggtgatatcttcattgccagataagccttcatctaagcttcagcagtttctgtcatcatgcgatagggatttgacaaatgctgtcacagaaagggtcagcatagttttggaagcaatttttccaaccaaatcttctgccaatcggggtgtatcgttaggtctcaattgtgcaaatgcctttgacattccgtgggcagaagccagaaaagtggaggcttccaagttgtactatagggtattagaggcaatctgcagagcggagttacaaaacagcaatgtaaataatctaactccattgctgtcaaatgagcgtttccaccgatgtttgattgcatgttcagcggacttagtattggcgacacataagacagtcatcatgatgtttcctgctgttcttgagagtaccggtctaactgcatttgatttgagcaaaataattgagaactttgtgagacatgaagagaccctcccaagagaattgaaaaggcacctaaattccttagaagaacagcttttggaaagcatggcatgggagaaaggttcatcattgtataactcactgattgttgccaggccatctgttgcttcagaaataaaccgccttggtcttttggctgaaccaatgccatctcttgatgacttagtgtcaaggcagaatgttcgtatcgagggcttgcctgctacaccatctaaaaaacgtgctgctggtccagatgacaacgctgatcctcgatcaccaaagagatcgtgcaatgaatctaggaacacagtagtagagcgcaatttgcagacacctccacccaagcaaagccacatggtgtcaactagtttgaaagcaaaatgccatccactccagtccacatttgcaagtccaactgtctgtaatcctgttggtgggaatgaaaaatgtgctgacgtgacaattcatatattcttttccaagattctgaagttggctgctattagaataagaaacttgtgcgaaagggttcaatgtgtggaacagacagagcgtgtctataatgtcttcaagcagattcttgagcaacagacaacattattttttaatagacacatcgatcaacttatcctttgctgtctttatggtgttgcaaaggtttgtcaattagaactcacattcagggagatactcaacaattacaaaagagaagcacaatgcaagccagaagttttttcaagtatctatattgggagtacgaaccgtaatggggtattagtatcgcgccatgttggtatcattactttttacaatgaggtatttgttccagcagcgaagcctttcctggtgtcactaatatcatctggtactcatccagaagacaagaagaatgctagtggccaaattcctggatcacccaagccatctcctttcccaaatttaccagatatgtccccgaagaaagtttcagcatctcataatgtatatgtgtctcctttgcggcaaaccaagttggatctactgctgtcaccaagttccaggagtttttatgcatgcattggtgaaggcacccatgcttatcagagcccatctaaggatttggctgctataaatagccgcctaaattataatggcaggaaagtaaacagtcgattaaatttcgacatggtgagtgactcagtggtagccggcagtctgggccagataaatggtggttctacctcggatcctgcagctgcatttagccccctttcaaagaagagagagacagatacttgatcaattataaatggtggcctctctcgtatatagctcacagatccgtgctccgtagcagtctattcttctgaataagtggattaactggagcgatttaactgtacatgtatgtgttagtgagaagcagcagtttttaggcagcaaactgtttcaagttagcttttgagctatcaccatttctctgctgattgaacatatccgctgtgtagagtgctaatgaatctttagttttcattgggctgacataacaaatctttatcctagttggctggttgttgggaggcattcatcagggttatatttggttgtcaaaaagtactgtacttaattcacatctttcacatttttcactagcaatagcagccccaaattgctttcctgactaggaacatattctttacaggtataagcatgccaactctaaactatatgaatcctttttatattctcatttttaagtacttctctgtttctgctacttttgtactgtatatttccagcttctccatcagactgatgatcccatattcagtgtgctgcaagtgatttgacatatgtggcttatccttcaggtatgtctcatgttgtgacttcattgctgattgcttttgtaatggtactgttgagttcatttctggttacaatcagcctttactgctttatattgttctactaattttggcttgcacagccaggacgattggttttctgcatcaatcaatcttttttaggacaagatatttttgtatgctacacttcccaaattgcaattaatccagaagtctaccttgttttattctattagttctcagcaacagtgaatgaatatgaatcagtcatgctgatagatgttcatctggttattccaaacaatctgacatcgcatctctttctgcaagtgagatgaagaaaacctgaaatgctatcaccatttaaaacattggcttctggaagttcaggtgattagcaggagacgttctgacattgccattgacatgtacggtagtgatggcaggagacgttcttaaacagcagctgctccttcagcttgtaatgtctgattgtattgaccaagagcatccaccttgccttatggtactaactgaatgagctggtgacgctgactcatctgcataatggcagatgcttaaccatctttaggagctcatgtcatgattccagctgcaccgtgtgcaaatgtgaaggccctgcaagggctttccaggccgcaccaatcctgcttgcttcttgaagatacatatggtgccacctaaataaaagctgtttctggttatgtctgtccttgacatgtcaacagattagtgttgggttgcagtcatgtggtgtttaagtcttggagaaggcgagaagtcattgctgccagcattgtgatcgtcaggcacagaagtactcaaaagtgagagctacttgttgcgagcaaacggagggcgatataggttgatagccaatttcagttctctatatacaagcagcggattttgtttagagttagcttttgagatgcatcatttctttcacatctgattctgtgtgttgtaactcggagtcgcgtagaagttagaatgctaactgaccttaattttcaccgaataatttgctagcgtttttcagtatgaaatccttgtcttaaatt

SEQ ID NO: 109614 - DNA, 4386 bp, Zea Mays
atcacacggccgtgaggagcaactctgttcctcatctcccgttcaccccgcgggcgcagggcgcgctctctcctcgtggcgatcgccgaccgtagcggccgctgcccgggttttcgtcggccgcttcgccatgtcttcgctggacccttcgccagcgacgagcacccaacagcagaagcaattggagagtttggtaaatctactgacgcagggaagcaggttctaccgcaaagcatataatgaactgttctcaggtgtaactactgagcaggatccggattcatcgactaatattcctgagtatatgctttttgggtggcatctcttcttaatgctccatttgagatcaccagaattgttcaaggacctggtgtcctgcatccatggattagttgctgtgttggccatacttttgattcacgtgccagctaaatttaggagcttcacgattgaaggctcttctcacttaatcaaacaaactgagaaaggcgtggatcttattgcttcattatgtcataactatcatacctctgaagaacgtttgaaagaaatgttgcacaagtctcacaatgcaatagaagacattttccatatgaaagcactaagtgcttcagagtgcaaaccagaaaatttggataagatagacacagatgacctgatgtatttcaaaggtctgattgatatggaatgtttccagtcaaatttggaaaaaatggagaaactatgtaattctaatagctgtaaaggggagcttgattttaaatcaattttgatcaataatgattatattccctatgatgagaactcgacgggggattccaccaatttaggacattcaaagtgtgcctttgaaacattggcatctcccacaaagacaataaagaacatgctgactgttcctagttctcctttgtcaccagccaccggtggttcagtcaagattgtgcaaatgacaccagtaacttctgccatgacgacagctaagtggcttcgtgaggtgatatcttcattgccagataagccttcatctaagcttcagcagtttctgtcatcatgcgatagggatttgacaaatgctgtcacagaaagggtcagcatagttttggaagcaatttttccaaccaaatcttctgccaatcggggtgtatcgttaggtctcaattgtgcaaatgcctttgacattccgtgggcagaagccagaaaagtggaggcttccaagttgtactatagggtattagaggcaatctgcagagcggagttacaaaacagcaatgtaaataatctaactccattgctgtcaaatgagcgtttccaccgatgtttgattgcatgttcagcggacttagtattggcgacacataagacagtcatcatgatgtttcctgctgttcttgagagtaccggtctaactgcatttgatttgagcaaaataattgagaactttgtgagacatgaagagaccctcccaagagaattgaaaaggcacctaaattccttagaagaacagcttttggaaagcatggcatgggagaaaggttcatcattgtataactcactgattgttgccaggccatctgttgcttcagaaataaaccgccttggtcttttggctgaaccaatgccatctcttgatgacttagtgtcaaggcagaatgttcgtatcgagggcttgcctgctacaccatctaaaaaacgtgctgctggtccagatgacaacgctgatcctcgatcaccaaagagatcgtgcaatgaatctaggaacacagtagtagagcgcaatttgcagacacctccacccaagcaaagccacatggtgtcaactagtttgaaagcaaaatgccatccactccagtccacatttgcaagtccaactgtctgtaatcctgttggtgggaatgaaaaatgtgctgacgtgacaattcatatattcttttccaagattctgaagttggctgctattagaataagaaacttgtgcgaaagggttcaatgtgtggaacagacagagcgtgtctataatgtcttcaagcagattcttgagcaacagacaacattattttttaatagacacatcgatcaacttatcctttgctgtctttatggtgttgcaaaggtttgtcaattagaactcacattcagggagatactcaacaattacaaaagagaagcacaatgcaagccagaagttttttcaagtatctatattgggagtacgaaccgtaatggggtattagtatcgcgccatgttggtatcattactttttacaatgaggtatttgttccagcagcgaagcctttcctggtgtcactaatatcatctggtactcatccagaagacaagaagaatgctagtggccaaattcctggatcacccaagccatctcctttcccaaatttaccagatatgtccccgaagaaagtttcagcatctcataatgtatatgtgtctcctttgcggcaaaccaagttggatctactgctgtcaccaagttccaggagtttttatgcatgcattggtgaaggcacccatgcttatcagagcccatctaaggatttggctgctataaatagccgcctaaattataatggcaggaaagtaaacagtcgattaaatttcgacatggtgagtgactcagtggtagccggcagtctgggccagataaatggtggttctacctcggatcctgcagctgcatttagccccctttcaaagaagagagagacagatacttgatcaattataaatggtggcctctctcgtatatagctcacagatccgtgctccgtagcagtctattcttctgaataagtggattaactggagcgatttaactgtacatgtatgtgttagtgagaagcagcagtttttaggcagcaaactgtttcaagttagcttttgagctatcaccatttctctgctgattgaacatatccgctgtgtagagtgctaatgaatctttagttttcattgggctgacataacaaatctttatcctagttggctggttgttgggaggcattcatcagggttatatttggttgtcaaaaagtactgtacttaattcacatctttcacatttttcactagcaatagcagccccaaattgctttcctgactaggaacatattctttacaggtataagcatgccaactctaaactatatgaatcctttttatattctcatttttaagtacttctctgtttctgctacttttgtactgtatatttccagcttctccatcagactgatgatcccatattcagtgtgctgcaagtgatttgacatatgtggcttatccttcaggtatgtctcatgttgtgacttcattgctgattgcttttgtaatggtactgttgagttcatttctggttacaatcagcctttactgctttatattgttctactaattttggcttgcacagccaggacgattggttttctgcatcaatcaatcttttttaggacaagatatttttgtatgctacacttcccaaattgcaattaatccagaagtctaccttgttttattctattagttctcagcaacagtgaatgaatatgaatcagtcatgctgatagatgttcatctggttattccaaacaatctgacatcgcatctctttctgcaagtgagatgaagaaaacctgaaatgctatcaccatttaaaacattggcttctggaagttcaggtgattagcaggagacgttctgacattgccattgacatgtacggtagtgatggcaggagacgttcttaaacagcagctgctccttcagcttgtaatgtctgattgtattgaccaagagcatccaccttgccttatggtactaactgaatgagctggtgacgctgactcatctgcataatggcagatgcttaaccatctttaggagctcatgtcatgattccagctgcaccgtgtgcaaatgtgaaggccctgcaagggctttccaggccgcaccaatcctgcttgcttcttgaagatacatatggtgccacctaaataaaagctgtttctggttatgtctgtccttgacatgtcaacagattagtgttgggttgcagtcatgtggtgtttaagtcttggagaaggcgagaagtcattgctgccagcattgtgatcgtcaggcacagaagtactcaaaagtgagagctacttgttgcgagcaaacggagggcgatataggttgatagccaatttcagttctctatatacaagcagcggattttgtttagagttagcttttgagatgcatcatttctttcacatctgattctgtgtgttgtaactcggagtcgcgtagaagttagaatgctaactgaccttaattttcaccgaataatttgctagcgtttttcagtatgaaatccttgtcttaaa

SEQ ID NO: 109615 - DNA, 234 bp, Zea Mays
atggccatggttgccctcccctgcgcccaaaacgcagtcaagcgtggccccagcggcgtcgtctgccccgggcgtggctccagctcgcccaccccctgcccccttgcccaggtgcagcaggccgcgcgcagcccagcctcgcccaggctcgcccagcccagcacgccccgcgtgctctcgcctggcgagcaggagccgccgtcgtctagtcggctgctggtagccttcacctag

SEQ ID NO: 109616 - DNA, 442 bp, Zea Mays
acaaatccacttgctagtataaaagatgagcctgttctgaacaagacaatgcgccgaatagcagaacacaatatggatattgatggaaaacgtcaggaaaggaccctgtccatcaaaggctttagtatgtcagaggctgaaaatactggtcatttttactgtagcccagaggcttcgcgcatgggctgtgctacagaggcaggactcatgcaattttttggtaatggctacgcaacatttgactcaagtggccaaggagtttttttcccgggagcatggttggtggtctagtcttcggattgatagccactggtgtgtgtttttagattccgttgggctgtgtgctcttatgggcagaggccagaagtgactttcaaggacttgtatcatctcgatgtactgttcttgaatgaataaaaatcctcccctttaaaaaaagcaa

SEQ ID NO: 109617 - DNA, 264 bp, Zea Mays
gggtactcggcgacggggtcagcgacgccggcggcgaggctgcggtcgtcctgcacggttgcgaccttgcggaagagcgacctgtccacgaactgctcggcctcgtccagcgccagctccggcgccgccacctccggcaccgtctcccgcttcttcttgtccacccacacgttgggcgcgtacgcaagctgctgccgcgccgtgtgcaggcccagcgtcaccgacagcgcgatcaggcccagcgccacgtacaccggcacgtag

SEQ ID NO: 109618 - DNA, 483 bp, Zea Mays
gagtatagccaaacctcgaaaagaaatttctctcgatcatgtggaagcacgtatgttcatttctctttgggtgttttgctaaaaggagatttcaactgaaattgtgcatccaatcgcacccttgttggaagatcacccgcaaaatatgaagcgacaaatatttgattggacgaaggattattgtatgtcaataagctttcagaatccgaagatgccaatacaaattatttaacgatgcactatggaggttccgattactttggccagcaactaatttatggtctggagaaatctgacttatgtaaggagtacgtttcttggagttggtcaggaactaatttgacacgtgaaagtgcaaaaaaacacggggtttacgcatgcatcagcacaaacagcgagcgccttggtgttacacatggaacgatctatactggttatcgttgcaagtgctcttctggttttgaaggaaatccttatgttcaa

SEQ ID NO: 109619 - DNA, 444 bp, Zea Mays
atggatggtagtagcacagaacaaccaacagactatataggcatactttacataggaacgacaaatagatggctggcagtagcacagaacgacaaagagaaatagtagaagtaccaagggaagcaatgtttctggtttgttcaggcctagactatataggcatgctttacacatcgcgagtatggtcctcgcagcattacacacatatcataactatgaccaagcaagaaaagacatctcttgcagtcaagcacacagcatagcgctgcccatatcttacaagcataaaaccatacgccctacacagcagggggaagttctaacagcaacctagatgaactgggatagttcccaaaagcgatcctcagttcccaaaagcgatcctcaattcccaaaagtgggcctccatagccggtgctgctcgtgtccaaaagcactgcaacc

SEQ ID NO: 109620 - DNA, 249 bp, Zea Mays
atgtcgccgtcgtggccactcatgcgggagatctgcccgctgcgcgttttcccgacttgcagcggtcgcacctcgccgtacgccgtcgcgctcaccgtgctgctccttatctctgtcgccctcctcgcgctcatagcctttggtgtattcttgctccacgtgttgggggcagcggagggggattgcgtgcgtagggaggatgatgccgccggtggaggaggtgtgactgctctaccgtggggaatataa

SEQ ID NO: 109621 - DNA, 1709 bp, Zea Mays
cgagagcttccacctccctcctccccgtcccggccgctctctgcagggcaggcccatgcgggtgaggtaccggtgacgacgcggcggcccacggccggagacgatgaaggggaggctgctgttcaagagccctctcccccgcagctacctctcccatacctccagcgtcacgtccgccgccgtcgccacccaccgcgtctaccaagtctggagaggaaagaatagattcctctgcggcgggcggctcatcttcggcccggacgcgagctccatcgtgctcacggtggcgctcatcatgacgccgctcgcgctgttcgtcgccttcgtctcgttccggctcgccgaggtcatcggaaaacccctcggcgccgccgtcccggtgacggccgtggccgtcggcgtattcgacgtggtggtgctggtgctgacgtcggggcgggaccccgggatcatcccccggaacgcccggccgcctgagcccgactccttcgcgacgacgacgacggagatgagctccggctcccccgcgacgggcgcgtcgtggtcgctgcccccgacgcgggacgtgtacgtgaacggcgtggcggtgaaggtgaagtactgccacacgtgcatgctgtaccggccgccgcgctgctcgcactgctccgtgtgcaacaactgcgtggagcgcttcgaccaccactgcccctgggtggggcagtgcatcgggcgccggaactaccgcttcttcttcctcttcatcgcgtccaccacgttcctgtgcctctacgtgttcggcttctgctgggtggacctgctgctcacctcccggcggcgcggcggcgtcggcatcggccgcgccgtggccgagtcgcccgtctccggctgcctcatcgcctacacgttcgtgacggcgtggttcgtgggcgggctcacggcgttccactcctacctcgtgtgcaccaaccagaccacgtacgagaacttccggtaccggtacgagcgcaaggccaacccgttcaaccgcggcgccggcagtaacgtggccgagatcttctgctcgccggtcccgccgtcccggaacgacttccgggccagggtgtcccccgccgacccggacgccgccgcgctctattacctcggcccgctggcgtccgagtcccggatcagtttctacaccagggccagcggcctcagcttcgatatggccaaggccagcttcgaccgcaactactccgccgccagcgtcgcctcgtcctccgacttcggcgacatctacggcgccggcggcgggctcgaccgagtatcgtcgcaccagcagccgcggcactccatcttcggcgttggcggtggcggccatgccagggagggcaagaagcaggcggaggacgaagcggacgccgtgacggcggagctcggggccaccatgcacatgcactacggccgcggcgccggccgcacgcgcgggagggagttcgggatggtgtgaatgtgatcgagcgcatgcacgcaggggaacgaggggacgggtcgagaagaagcagatgctgccgtgttctcagtctctcagctcgatcgagaatgtgatttgtgcgtgtgcaattttgcgtgatgtgtcgtacgtaagtgtaagtcgtagcatcagcttcgttctcctcgtatatgtctggaaatgggatgccattctacttccggtgcatggtaccctgtagttcaaggattcatgt

SEQ ID NO: 109622 - DNA, 1002 bp, Zea Mays
cagcctccaccgccgcggcacgcgcgggcagccagccagccagccatgaggcagtggaaatccctggtcccggcgctgcacctgcacgccccggcggcctcctgcttcccgcacccgccgtcgccgtcgccttgcccgtcgccgccccgcggggacgacgccaccacgacgccgccgccgccgccgccgcacctgcaggcggtgcggctggtgggctgcgacgggcgcgtgcgcgcgtacgctccgcccgtgacggcgcgggagctgatgcaggcgcacccgcggcacctggtgtgccgcgccgacgcgctgctcatcggcgagaagatccccgccgtggcggcggccgaggagctgcggcccggcgacgcctacttcctgctgcccgcgcacctgttccgctccgccctctccttcgtgccgctcgcctcgtcgctgctgctggtgctgtcggcggcgtccgccgccggcgccggcaagaggcccttcgagctccaccgcacgccggccggcacgctgcagatcaagttctccgacgacttcctcctcccggccggcgacgccgcgcccgcgccgacgaagcgtagccagcccgccgccgcgctgctccgcggggacgaccgcctcgccaaggactacgaggagctggtcggctacgccaagtcccgccgctgggcgcccaagctggacaccatcgacgaggtgccggcgcccgccgctgccgccgaccagcccggtcccgcgccgcccggcgccgggcgcggcaggaggagccgcgcgctgccgttcctcggccgactcggcagccgccgccgccgcgacgacgcctgcagcgccgtcgcctgctccggctagggtgtgggcggtccggtacggtagctttgtcaggcgtcctggtttagtgggctggtcttgtaattagggaagagaaacaaattttggtgctaatcttaatctgtaaaaaaatggtgatggtggccgacagattttcctccgccgttt

SEQ ID NO: 109623 - DNA, 409 bp, Zea Mays
ggccggggacaaaggcgtgcagaaagggagggcgttgcactcggagaccgggcggtgtgtcgccgaacgcgccggccggccaccatcttccatggcctgcgcgcgtgggttctcgcgcgcactgccgctgcggtcctgcccgctggtcggtcactccactccgctcgtgggtggtcagcctccctccccgccgtacttgacgacgaccacgtacaaagtggtagtgtactcgtacgcgcaccaaagaaaaaaggtagcctttggtttgtgcagctagcccgccagccaagtcacgtcgcacgcttgacggctcatgaacgctgtctcactctcattggctgtacgtacccttctcatctgtgtactactcctgagaccttaagtttaattgtatctatatctatcatgt

SEQ ID NO: 109624 - DNA, 1016 bp, Zea Mays
tgttatctatatatgtgtgtgtaatgtgcgagatgtgaggaattccatatttgtgtggcgaggcaagccgtgcgacaagtgccagatgtacgatgaaatgattgaatcggagagcgtcaccgtttgtgtggattatcaagtcaggcaaataacggtcacttggtcgtggaagggcttcttattgcagtcatagtgttccagctctccaggaagagttacaaaccaccaaagaagccactcactgaaaagtgccgctggaccacatacgattgttgatggtaaagaagttgtgaactttgcatcagcaaactacctcagtttaattggcaacgaaaagattattgattcttgcatcagttcattggagaaatatggtgttggttcttgtggtccatgtggcttttatggaacaactgatgtccatcttgactgtgagtcaaagatagctaaatttttggggactccagactccattctttattcatatgggatttctacaatattcaatgtgatacctgccttctgtaagaaaggagatatcatagtcgctgatgagggtgttcactgggcagtgaaaatggtctccatctatcaagaagcactgtggtgtacttcaagcacaatgatatggcttcacttgcaagcactttggaaaaacttactcgtggaaataaacgtgctgaaaagattagacgctacattgttgtagaatccatttaccagaattctggccaaattgcccccttggatgagattgtcaggttgaaggagaaatatcgattccgtgttattctggaggagagtcattcttttggggtgcttggcaagtctgggcgtggccttgctgaacattatggagttcctctcccaaacgaggcctaactgtttggtgaaatgcttgggacaaagtggccatcaagaatggagtcatggaacatcagcaggacactacaagaaactgataaatgttcgtgggttttgttaagaacgtgggtaccgacgttcttatggtagtt

SEQ ID NO: 109625 - DNA, 1038 bp, Zea Mays
tgttatctatatatgtgtgtgtaatgtgcgagatgtgaggaattccatatttgtgtggcgaggcaagccgtgcgacaagtgccagatgtacgatgaaatgattgaatcggagagcgtcaccgtttgtgtggattatcaagtcaggcaaataacggtcacttggtcgtggaagggcttcttattgcagtcatagtgttccagctctccaggaagagttacaaaccaccaaagaagccactcactgaaaagtgccgctggaccacatacgattgttgatggtaaagaagttgtgaactttgcatcagcaaactacctcagtttaattggcaacgaaaagattattgattcttgcatcagttcattggagaaatatggtgttggttcttgtggtccatgtggcttttatggaacaactgatgtccatcttgactgtgagtcaaagatagctaaatttttggggactccagactccattctttattcatatgggatttctacaatattcaatgtgatacctgccttctgtaagaaaggagatatcatagtcgctgatgagggtgttcactgggcagtgaaaatggtctccatctatcaagaagcactgtggtgtacttcaagcacaatgatatggcttcacttgcaagcactttggaaaaacttactcgtggaaataaacgtgctgaaaagattagacgctacattgttgtagaatccatttaccagaattctggccaaattgcccccttggatgagattgtcaggttgaaggagaaatatcgattccgtgttattctggaggagagtcattcttttggggtgcttggcaagtctgggcgtggccttgctgaacattatggagttcctgtgagtgtttggcctcagcttttcttaatgtttcaccataatgccccacctgtggtgtctgaccggggtgcgttgttacctagctcccaaacgaggcctaactgtttggtgaaatgcttgggacaaagtggccatcaagaatggagtcatggaacatcagcaggacactacaag

SEQ ID NO: 109626 - DNA, 821 bp, Zea Mays
ggttgtgttacaaatattcatgcagtatggattacaattgtttaccatgttaagtagttatgattgcatcatatatgatcttctgaggatcagaattaacccttctatttttcttttatacagtgccgctggaccacatacgattgttgatggtaaagaagttgtgaactttgcatcagcaaactacctcagtttaattggcaacgaaaagattattgattcttgcatcagttcattggagaaatatggtgttggttcttgtggtccatgtggcttttatggaacaactgatgtccatcttgactgtgagtcaaagatagctaaatttttggggactccagactccattctttattcatatgggatttctacaatattcaatgtgatacctgccttctgtaagaaaggagatatcatagtcgctgatgagggtgttcactgggcagtgaaaatggtctccatctatcaagaagcactgtggtgtacttcaagcacaatgatatggcttcacttgcaagcactttggaaaaacttactcgtggaaataaacgtgctgaaaagattagacgctacattgttgtagaatccatttaccaggtgcagtgcttttgattgttttgtgttgatttgtgctgtctttttttatatgtccttatgaaagtttggaaaataaaatgtccatttaacctgagcaatctaggcaattcatgaaacctctcttacagtcgtcatggtttgtgaacacagaattctggccaaattgcccccttggatgagattgtcaggttgaaggagaaatatcgattccgtgttattctgga

SEQ ID NO: 109627 - DNA, 1000 bp, Zea Mays
tgttatctatatatgtgtgtgtaatgtgcgagatgtgaggaattccatatttgtgtggcgaggcaagccgtgcgacaagtgccagatgtacgatgaaatgattgaatcggagagcgtcaccgtttgtgtggattatcaagtcaggcaaataacggtcacttggtcgtggaagggcttcttattgcagtcatagtgttccagctctccaggaagagttacaaaccaccaaagaagccactcactgaaaaggagattgatgagctatgtgatgagtgggagccattgtggttgttgttgcatgatgccgctggaccacatacgattgttgatggtaaagaagttgtgaactttgcatcagcaaactacctcagtttaattggcaacgaaaagattattgattcttgcatcagttcattggagaaatatggtgttggttcttgtggtccatgtggcttttatggaacaactgatgtccatcttgactgtgagtcaaagatagctaaatttttggggactccagactccattctttattcatatgggatttctacaatattcaatgtgatacctgccttctgtaagaaaggagatatcatagtcgctgatgagggtgttcactgggcagtgaaaatggtctccatctatcaagaagcactgtggtgtacttcaagcacaatgatatggcttcacttgcaagcactttggaaaaacttactcgtggaaataaacgtgctgaaaagattagacgctacattgttgtagaatccatttaccaggtgcagtgcttttgattgttttgtgttgatttgtgctgtctttttttatatgtccttatgaaagtttggaaaataaaatgtccatttaacctgagcaatctaggcaattcatgaaacctctcttacagtcgtcatggtttgtgaacacagaattctggccaaattgcccccttggatgagattgtcaggttgaaggagaaatatcgattccgtgttattctgga

SEQ ID NO: 109628 - DNA, 947 bp, Zea Mays
tgttatctatatatgtgtgtgtaatgtgcgagatgtgaggaattccatatttgtgtggcgaggcaagccgtgcgacaagtgccagatgtacgatgaaatgattgaatcggagagcgtcaccgtttgtgtggattatcaagtcaggcaaataacggtcacttggtcgtggaagggcttcttattgcagtcatagtgttccagctctccaggaagagttacaaaccaccaaagaagccactcactgaaaagtgccgctggaccacatacgattgttgatggtaaagaagttgtgaactttgcatcagcaaactacctcagtttaattggcaacgaaaagattattgattcttgcatcagttcattggagaaatatggtgttggttcttgtggtccatgtggcttttatggaacaactgatgtccatcttgactgtgagtcaaagatagctaaatttttggggactccagactccattctttattcatatgggatttctacaatattcaatgtgatacctgccttctgtaagaaaggagatatcatagtcgctgatgagggtgttcactgggcagtgaaaatggtctccatctatcaagaagcactgtggtgtacttcaagcacaatgatatggcttcacttgcaagcactttggaaaaacttactcgtggaaataaacgtgctgaaaagattagacgctacattgttgtagaatccatttaccaggtgcagtgcttttgattgttttgtgttgatttgtgctgtctttttttatatgtccttatgaaagtttggaaaataaaatgtccatttaacctgagcaatctaggcaattcatgaaacctctcttacagtcgtcatggtttgtgaacacagaattctggccaaattgcccccttggatgagattgtcaggttgaaggagaaatatcgattccgtgttattctgga

SEQ ID NO: 109629 - DNA, 765 bp, Zea Mays
tgttatctatatatgtgtgtgtaatgtgcgagatgtgaggaattccatatttgtgtggcgaggcaagccgtgcgacaagtgccagatgtacgatgaaatgattgaatcggagagcgtcaccgtttgtgtggattatcaagtcaggcaaataacggtcacttggtcgtggaagggcttcttattgcagtcatagtgttccagctctccaggaagagttacaaaccaccaaagaagccactcactgaaaaggagattgatgagctatgtgatgagtgggagccattgtggttgttgttgcatgagtaatcctacatatcatttcatatatggattaaccggatggtctcactcttgaaactgtgggagtgttggtgcaattcttatactagtttcacttaacttaatagtgccatgtgtggggacctattaatcttgaacatttactcgctagattatatgacatttaaaccatgtactcgtgaataagcagcaagggacaccttgaaccacatagaatatcatttacccttgctacccaaatgcttacatggctacatgcttcttggattgtattctctcttctctgatatcagtatgatcatcaaagcacctaaaatgtgctgctgtatgtatatagctagtgtaatgttgtttcttaggatgcattgcactaacaaaacaacaatttcatcaatggtatgctctcctagtctgtagttataggaatagctcttgaacttcccttgtgatagcagtgctctattt

SEQ ID NO: 109630 - DNA, 791 bp, Zea Mays
tgttatctatatatgtgtgtgtaatgtgcgagatgtgaggaattccatatttgtgtggcgaggcaagccgtgcgacaagtgccagatgtacgatgaaatgattgaatcggagagcgtcaccgtttgtgtggattatcaagtcaggcaaataacggtcacttggtcgtggaagggcttcttattgcagtcatagtgttccagctctccaggaagagttacaaaccaccaaagaagccactcactgaaaaggtcagctgttcttatcgtttgtaactactagaaccagataattcttgatagtggaaggtatcgttcttgtcgtctcttcatgaagcatgtcactgaatgccagcattttgtctctgtaggagattgatgagctatgtgatgagtgggagccattgtggttgttgttgcatgagtaatcctacatatcatttcatatatggattaaccggatggtctcactcttgaaactgtgggagtgttggtgcaattcttatactagtttcacttaacttaatagtgccatgtgtggggacctattaatcttgaacatttactcgctagattatatgacatttaaaccatgtactcgtgaataagcagcaagggacaccttgaaccacatagaatatcatttacccttgctacccaaatgcttacatggctacatgcttcttggattgtattctctcttctctgatatcagtatgatcatcaaagcacctaaaatgtgctgctgtatgtatatagctagtgtaatgttgtttcttaggatgcattgcact

SEQ ID NO: 109631 - DNA, 1579 bp, Zea Mays
tgttatctatatatgtgtgtgtaatgtgcgagatgtgaggaattccatatttgtgtggcgaggcaagccgtgcgacaagtgccagatgtacgatgaaatgattgaatcggagagcgtcaccgtttgtgtggattatcaagtcaggcaaataacgtgtgaaaagatatatcctatttgtgtggtggaacaaataatgcgtagaatactgattggaatgccttgctataaggtgctttatttgtcagaatcccaatttaattatgatggtatagttatgctagagagtataaattaggtacattctagttgtattgacatgataaagcttagattgaagtgtagtgtatgtatcaggtgttctagtggatgtataagtctagcgttagtaaattggtttgtgttatgtgaatgaaactattttcatgagtgtcttagaatctacatatgttggggttagttctacgctttagtggtcatagtacttatatatgcgtagtgtcattagagtagttcttcatttgcaatatgaaccttaggacgaagatgcaactcatacgaagtaattgtgtgcatggttatgaagtatactaatctatctatgtgattaactaggtggttttagctctaatttaggatgatgtgtcagaatagttgaagtaccaagcacatggtgattgtagaagccaaataggagctaaattgaatatattgctgtttagagctgtaggtacagttttaattgtgcagctaatttaacaaagtaaaccatgttttctgtggacatgttatatatgaaagttgtagctcacttctttatcttgcttgtgtaaaaatttcatgaccataggcttagcagtttagaagttatgattttcccaagtccagtttcagaatctgtccagattctgttctgatttcgaaaattgttttgtttgactaaattaaacttataataagcccttagtaattatagaagaattgtagtacttttcttaaggtttccaacaaattttggatcaccctttttggtgatctataagttaagttacagctgtttgaagtgcgatatctgaatctgtccaaatttggacagcagagcctttctcatattttctgaccttgatatatattgaattaacctgggatgtttataaattaattgtagacaattttattagctttctaaagagtctaggatcacctgatttggatgcctgaaactctaattatggatttttgaagtaagtagtcgaattctgtccaaatctgggcagaatttatgtttagttctgtttgacctttctaaaggtcgaatcatgttgtggtgataatataaaagttatagaggactttataagctttccaaaaagtcttggtttactatttttggatgaatatcatgtgagttatgaataaaacaactgattgctgtactgctgtccaaaatcggcaaggattaagatgattgcttggagtttcttttctgtgagtatggtgaccttagtaatacaaaggagttttagtagacatgtttacctagcattaaaaagttgattcagtaatattatgtttataaagg

SEQ ID NO: 109632 - DNA, 141 bp, Zea Mays
aaatgaacctagcaaagtagctatctgtgttccaaattttgcagccagcaacacatgtggtgatctgtactactcactatttttgttcttttgccttgcgtggctgatcaattatggtgtcctccttcctgaaaatggatc

SEQ ID NO: 109633 - DNA, 894 bp, Zea Mays
attgtgtgtgtatccttcggacatgatatataaaatgatttaatgctttacatatatattccttattaatttggtgcacatctatcatcagtaatttaatgatttaatgctttacatatatattccttattaatgctttattccttattaatgctttatataacatgacgtaagcccttagcatatatagttgtgtgctcgattattcatcgataagtcgcttcgcatacactggtgtatcgaccaaggagagatgaatgcgaagaggctgacgctggttctcctcgccattctgatgatgacatgtctcgtgttcgctacaaattgtgcgattgctggcggccatgacgtggagacgacaccggctagcggtctccggtggccgccgccggacagagagaagacgatgttgggaagcagcgacataaacgtcaaattgtgtttgaaggctcagtgcgccggttacaagagctattactgctgcttcactttacctggcttgccgtgctggcctgaccagaagacgtgctggcaagagtgtcccagtcaccagcgactccgatccacccgatccatgaagcacaccaacgcgatgccctccataggtcccagcaggttctcatgagaaaggatccggcctcgaattctcgggctcggagtgacaatatgtgatatcgggtcatgcatggtagcgtgagtgtaggatgataataaataagcaacattccatgcaacagtatatcgtatgggaacatcttgatttatgagattaatcaaagcttgttcctcataatcttatggcaggatataacatacttactttgttctaaaacaaatatacttactcagttttcttgctttatggcttgtttgagggttagaggggatcgaagg

SEQ ID NO: 109634 - DNA, 441 bp, Zea Mays
ttggtcctgctggtagaatggcagcacggtgtagacggtctgcatgacggtcatgacgagtaggaagacggcggcggcgagggacatgaacgcccaggggctccggaagtaggtgtggatgagattggcgcgccacaggttccacggcttcccgcagtaggcgttgacctcccgttgcacagcgtccagcgagctctgcggctcgagcacgacgtccttggagatgctgttgaacagctgggccaccgccttgtcgctgccgacggcgttctggatgatgccgctggtgctgagcagcgccacgtccttggccgagtcgatgatgctgtccatgaagaagacgtaggccgtgacgtcgttgcctgcgccgacgtgcagccgctcgaacgccatcatgttgaggaacatgtactcggtggagtcgtccacggacaccgccgg

SEQ ID NO: 109635 - DNA, 903 bp, Zea Mays
tgctgatgaaaggcatagtggatcatagatagtatttagatcttagatcatgtgctttgctttttgctgcttttatggccttgaagggtttgaataaaaaaaatcggctttggtcacgccttgcctttggtagtacatttcgttaacttgctatatcaactgcaggcgccggaaggaagttgaacttagactaatagaggaggacacagctaaaagagttgagcaagctattaggaagaaggttgaggagagtctgaattgtgatgaaattaagcgtgaaatacaacgtcggattgaggaaggacgaaaaaggatacatgaggaggtagcaatccagatggagaaagaaaaggagtcagccttaaatgaagccaagctgaaagtggaacgagaaaaaaaggagcggaatgagctagagaaaaagcttgaagaagaacgaaagaaggctgaagaggcgttgaggaaagaggcgatggaacagcagcagaaagagctagagcggtatcaggagctggagaggcttcagaaggaaagagaggaggccatgaagcggaaaaaaatggaggaagagcagcagaggcaaaaccagatgaaactgctgggcaagaacaagtcgcggccgaagctgtcatttgcttttgggatgaagtagcgttcgagtcaccgaacgaaattagtgttttagtttcctgtaaccctgtatttcctgaaaccaccattgtctaactttggcagacaaattgggacgtcttaaatcctcctgatctgctttgtaagttgccgtctctcggtgatgtggttttctctgctcctttgctgttcactgttgagttgacgttgcgagaagactgccaaagaagaatccggttggtccatagggatggatagtcgaatgccaacacg

SEQ ID NO: 109636 - DNA, 1213 bp, Zea Mays
aattacaacttcccacagatagattccgcgggctgcgagcatcccccacctcatcggcccccgcgtgcggcggcgggcgactctacctgacctggcctgcgtcctcccgctttccagccagcaagccagactccgcccctctccgaaggctccgatcgtctggtttcgtccagatccggctccgctgaggctctagatcgcgtcgcgcacgatgcaacgcgacctgtcgcggtcgctgtctccgccgcgccggcgtcggcggtcgccatcacccgagcggtaccgcggccggaggggccgtagggaccgaagccctagccgtagcaggtccccctatcgcccctcgtatagaaggaggagccctttcccatccccgagaaggcgtgagagctgttctccatctcctaggaggcgcaatagtccacctccatcacggaagcgttacagaagaaagagcagtccgagtgtcattagctctccagttactgcatctcaaagttcccaccttgggttggaagagaataagaatgctattgatacgcaaaggctacaagaagaaaagaaaaggcgccggaaggaagttgaacttagactaatagaggaggacacagctaaaagagttgagcaagctattaggaagaaggttgaggagagtctgaattgtgatgaaattaagcgtgaaatacaacgtcggattgaggaaggacgaaaaaggatacatgaggaggtagcaatccagatggagaaagaaaaggagtcagccttaaatgaagccaagctgaaagtggaacgagaaaaaaaggagcggaatgagctagagaaaaagcttgaagaagaacgaaagaaggctgaagaggcgttgaggaaagaggcgatggaacagcagcagaaagagctagagcggtatcaggagctggagaggcttcagaaggaaagagaggaggccatgaagcggaaaaaaatggaggaagagcagcagaggcaaaaccagatgaaactgctgggcaagaacaagtcgcggccgaagctgtcatttgcttttgggatgaagtagcgttcgagtcaccgaacgaaattagtgttttagtttcctgtaaccctgtatttcctgaaaccaccattgtctaactttggcagacaaattgggacgtcttaaatcctcctgatctgctttgtaagttgccgtctctcggtgatgtggttttctctgctc

SEQ ID NO: 109637 - DNA, 1168 bp, Zea Mays
aattacaacttcccacagatagattccgcgggctgcgagcatcccccacctcatcggcccccgcgtgcggcggcgggcgactctacctgacctggcctgcgtcctcccgctttccagccagcaagccagactccgcccctctccgaaggctccgatcgtctggtttcgtccagatccggctccgctgaggctctagatcgcgtcgcgcacgatgcaacgcgacctgtcgcggtcgctgtctccgccgcgccggcgtcggcggtcgccatcacccgagcggtaccgcggccggaggggccgtagggaccgaagccctagccgtagcaggtccccctatcgcccctcgtatagaaggaggagccctttcccatccccgagaaggcgtgagagctgttctccatctcctaggaggcgcaatagtccacctccatcacggaagcgttacagaagaaagagcagtccgagtgtcattagctctccagttactgcatctcaaagttcccaccttgggttggaagagaataagaatgctattgatacgcaaaggctacaagaagaaaagaaaaggcgccggaaggaagttgaacttagactaatagaggaggacacagctaaaagagttgagcaagctattaggaagaaggttgaggagagtctgaattgtgatgaaattaagcgtgaaatacaacgtcggattgaggaaggacgaaaaaggatacatgaggaggtagcaatccagatggaacgagaaaaaaaggagcggaatgagctagagaaaaagcttgaagaagaacgaaagaaggctgaagaggcgttgaggaaagaggcgatggaacagcagcagaaagagctagagcggtatcaggagctggagaggcttcagaaggaaagagaggaggccatgaagcggaaaaaaatggaggaagagcagcagaggcaaaaccagatgaaactgctgggcaagaacaagtcgcggccgaagctgtcatttgcttttgggatgaagtagcgttcgagtcaccgaacgaaattagtgttttagtttcctgtaaccctgtatttcctgaaaccaccattgtctaactttggcagacaaattgggacgtcttaaatcctcctgatctgctttgtaagttgccgtctctcggtgatgtggttttctctgctc

SEQ ID NO: 109638 - DNA, 1335 bp, Zea Mays
aattacaacttcccacagatagattccgcgggctgcgagcatcccccacctcatcggcccccgcgtgcggcggcgggcgactctacctgacctggcctgcgtcctcccgctttccagccagcaagccagactccgcccctctccgaaggctccgatcgtctggtttcgtccagatccggctccgctgaggctctagatcgcgtcgcgcacgatgcaacgcgacctgtcgcggtcgctgtctccgccgcgccggcgtcggcggtcgccatcacccgagcggtaccgcggccggaggggccgtagggaccgaagccctagccgtagcaggtccccctatcgcccctcgtatagaaggaggagccctttcccatccccgagaaggcgtgagagctgttctccatctcctaggaggcgcaatagtccacctccatcacggaagcgttacagaagaaagagcagtccgagtgtcattagctctccagttactgcatctcaaagttcccaccttgggttggaagagaataagaatgctattgatacgcaaaggctacaagaagaaaagaaaaggcatttccgaagaaagatactgctgtagttccgcttgttatatttgatgatgcaactggtgatcctttatctactcttgatcagttttgataattcgtttttggatctggaacacactagaggcgccggaaggaagttgaacttagactaatagaggaggacacagctaaaagagttgagcaagctattaggaagaaggttgaggagagtctgaattgtgatgaaattaagcgtgaaatacaacgtcggattgaggaaggacgaaaaaggatacatgaggaggtagcaatccagatggagaaagaaaaggagtcagccttaaatgaagccaagctgaaagtggaacgagaaaaaaaggagcggaatgagctagagaaaaagcttgaagaagaacgaaagaaggctgaagaggcgttgaggaaagaggcgatggaacagcagcagaaagagctagagcggtatcaggagctggagaggcttcagaaggaaagagaggaggccatgaagcggaaaaaaatggaggaagagcagcagaggcaaaaccagatgaaactgctgggcaagaacaagtcgcggccgaagctgtcatttgcttttgggatgaagtagcgttcgagtcaccgaacgaaattagtgttttagtttcctgtaaccctgtatttcctgaaaccaccattgtctaactttggcagacaaattgggacgtcttaaatcctcctgatctgctttgtaagttgccgtctctcggtgatgtggttttctctgctc

SEQ ID NO: 109639 - DNA, 468 bp, Zea Mays
ttttttaattttcatgtaattttattttaagtatttaaactaataaaccaatcagtacttgattactgctaacttatatgttttgcgactgttgttgtaatctacacaatcgcgaacaagatgctaagaggacgaatgtgacattgcacatcactacaaggacaatatgttcctcatgtttcacccaaagctgaagccaacaaatgttcccatcacgcacacataaataaacgtcagaagagaactcctgagcaactggctacatccagacatccacgaacgaggccaacttgccgaagccaacatgaagctgaacctattctggggccggaatcaattgttctccttttcagcatctgcaggtgtacagaagagttagttggcattcaagaaggggcagacaaagattatatacttctgcgggccagatgactggcccaccaaagtgatcagcagggaatgccatcg

SEQ ID NO: 109640 - DNA, 1640 bp, Zea Mays
ttttctttttttgattgattcgatttctccacacgtgctacacctacacgacgcagaattgcagccgaatccatcggagcccacggccgcacgcccgcagcccggccagcggccaccgcatcgcctcgtatgctccgcgcttgcacacgcgtcggcggcgcgggcgcgggcggctgcggccgacgagaacgcctcatggcctccctcatccccttcctccctccctcaccttactccactcacctcccgcgccagccccagtcccagccgccgacagccgctacccagcccgccgcagcggcgcgcccatcccggttccgcctcctgttcgcgcgcgccgcggcgcagcggcagcgcgactccgagccggcgccggcggccgaggagaggcggtcgctggccgtcagaacgggggagctgttcctggggctggcggcgctgctgctgcgcgggaccggggccgagcgtagcggtggggccgcggtggaggagatggaggcgagggacggggtagtgtgggagcagcgcccccaggacgtggacgcggagcggcggcgacgggagctcactagcccaggtttcagcttctccgccgcggggctgctcttcccctaccacctcggcgccgcgcagtgcctcatggaccgcggatacatcaccgagacaactccgttagctggctcatcagctggtgccataatctgtgcagtgatcgcatctgggaacacaatgcaagatgctctgcaggtgaccaaagttctagctgacaactgccgaagtaaaggcacggcgtttcgccttggggctgtactcaaggatgtccttgttgagtttctcccagatgatcttcacattagatgcaatggaagaattcgtgttgctattactcagctatcctggaggcctagggccttgctggtggaccaatttgactccaaagaagatgtcattaatgcagtaattacatcctcctttattcctggatacttagcacccaggccagctaccttcttccgtaataggctcggcattgatgggggccttacattgtttatgccgcccacttctgctgcagaaacagtccgaatatgtgcttttccagccagccgtttgggattgcaagatattgggatcagtcccgattgcaatccagagaacagggctagcccaagacagctgtttaactgggctctggaacctgctgctgatgaaactctagacaaattatacgagcttgggtacctggacgcagctgtatgggctgagcagaattatgctgagcttatcgccaagaatgatcaatcccttgtcgctgattgaattgagttcagtttgcccagaagtaattttggtatccaaagctgagttcatgagaatccatgcctgtaatatattgtaaagatagcaccgtcattgtcgaaggtggcattgttctgcattggatttgggtgtttatgccagcattttcgtagctgtgacaatagtgtagaacaggttgctagcatggccataaaaactgatcagcataatcaaatgtatagattatagatgatgaggtttgacctgagcctaaaacagggggataatggtcctatttgtttcagttttttttttagtttctggccgttagaagttgctgc

SEQ ID NO: 109641 - DNA, 180 bp, Zea Mays
atgtttacaataccaagcacttctacagcaaccacatgtaacttgaaaaagaagtattcttgcaatattgctgctccaaaatatcgattgtttctgggacctaggggacatcaggaacaagaaatggctattcccgcttgtcctcctcagcctcatcttctaagccgaaagcactgctga

SEQ ID NO: 109642 - DNA, 1091 bp, Zea Mays
catgcggatacgcagaataaaaagcgagatctgctagcgataatggtatacctgtggtagtcacccttcatcttgaggtagaagaccttggactcggcgccgccggcggatgggacgaggtgggagtcgagcagggcgaggatgccatcgcagatgcgggcgagctcggtctcgatcttggagcggtaggcgcggatggaggcggcgtgcgcctcgttcccgcggccctcctccttctgctcgatggaggagatgatccgccacgaggccctgcgggcgccgatgacgttcttgtaggcgacggacagcaggttgcgctcctccacggatagctcctcccctccgccggcgccgccggcggagcgcgcgacgcgctccatgaactcgaccatctcctcgtaccgctccgcctgctctgccagcttggccatgtacacgctctcctcccgcgtcggctccgacggcgacatagctgcgagcggcggtagggtgtggtgggacgggacgggtcggcggatcggggtcgccggcagcacggacggtcgcacggttgtgggtggcgcagaggatcctgtggagcggaagcgacgagtttgtgcggaggtgggggaggcgatgggtggccgggtgggggcatttgaggaggacgcgaaccctgggcagcgggtgcggggcccgcatgtcagtgggatgacgtggcgaccaaaggaacgtggcgcgcgccggggagttcggtgcgggagggagtatgtgtggtcggcgttatggctgggaggcggatggacggtggaacacgtgaggagttctggttgggtggaaatggtgtttgctgcgtgaacgaggtgtgggcggggaacgtgaggcggagaggcttgagcggtcacaatctgaggatgtgatgggaggtgaagcttcccccatgcttctgccatttaaattagaacagaataattttaaaatataatctcatatacatctgtagtctaacgatgtacgtagtgtagatattgtttccggtgtttgtattttacgttgagaatgctgatgtactgtgaagatctataaatatacagcttatttttaaattaaga

SEQ ID NO: 109643 - DNA, 2349 bp, Zea Mays
cccttttctccggcttgttccgcgccaataaaagccaggcgcacaaatatctccccgccctcctacttgcagaatctccatttccccccgcaccaaaccagccaaaccactggcgcacgccgaggagagagaaagggggtgtgcggggcggcgaccggcctccgacgacgcggggcgtcgcggcgtcgtggcggtgaagcggatgaggctgtgggaggaggaggacgatgacgaggacgaggaggggatggaagtggacggggaggcggaagatgagccggggtggccgtgtggggcgccggaggcggggcccggcgaaacgaggccggcagcgatcctcgtggcggacgcggcggaggtcgacttccccgtcatctacgtcaacgccgccttcgaggccgccacggggtaccgcgcgcacgaggtgctcgggcggaactgccgattcctacaattccgggatccacatgcccaaaggcgacaccccctcgttgatcccatggtcgtttcagagattcggcgatgtctcagcgaggggatcgaattccaaggcgagctgctgaatttccggaaggacggtgctccacttcacaacagattaaggctcgttcctatgcacggcgatgatggctatgtgacgcatgttatcggaatccagctattctctgaggcgaacatcgatctcagcagcgtatcttatccggtgtacaagcaaaagtccagcagcaggcccagcattcaagatctgaactcatctccccacgagcacgctccgaaaatccagagcgcagaccactgcggcatgcttcagttgtcagacgaagttctcgcacacaacatcctatcccgcctgtccccaagagacgttgcgtccatcggatcggtgtgcaccagaatgcatgagctgaccaagaacgatcacctgaggaagatggtctgccagaacgcgtggggaagggacgtcaccgtgaggctggagatgagcaccaagatggtaggatggggccgtcttgcgagagagctaacaactctcgaggccgcctcatggcggaagttcacggtcggagggcgtgtcgagccttcccggtgcaacttcagtgcctgcgctgttggcaaccggcttgtcctgttcggaggggaaggcgtgaacatgcagcctatggacgacacgttcgtgctcaacctggaggccgcaacgccggagtggcggcgcgtcaaggtttctgcctccccgcccggccggtgggggcacactctgtcgtggctgaacgggtcgtggctggtagtgttcggaggctgcgggcagcaaggtctgctcaacgacgtcttcgtcctcgacctcgacgcccagcagccgacgtggagggaggtcgcgagcgagggccctccgctgccgcggtcctggcacagctcatgtaccctggacggctcgaagctcgtggtctcaggtggctgcgccgagtctggtgtcctcctcagcgacaccttcctcctcgacctcaccaaggagaagcctgcgtggagggagatccctacgtcctggtcgcccccgtcccgcctcggccacaccacgtccgtctacggcgcgaccaagctgttcatgttcggtgggctggcgaagagcggctcgctccggctgcgctccagcgacgcctacacggtggacgtcagcgaggacagcccgcagtggaggcagttggccacgacgaccgggttcccaaacgtcagtccgccgccgaggctcgaccacgtcgcggtgagcctgccctgtggacggatcatcatattcgggggctccatcgcggggctccactcccccgcgcagctgttcctgatcgatcccgcggaggagaagccgatctggaggatcctgaacgtgcctgggcagccccccaagttcgcatgggggcacagcacctgcgtggtcggcggtaccagggtcctggttctcggaggccacactggcgaggaatggatactgaacgagctgcatgagctctgcctggcaagcaggcccgacgaggacggctgatgacttcttttcgttgcacttgcacacatatggttcgttcgtctctctctgttttacgtcctatatatgcgcgctatgtcttgtttgtgtatcatctactttcagtctgttgctgcgtcgtgtcggtccgtcggtatgagaaaaaaaaaagcggaaattgattttttaaaaattagtctggatgagtttagtctattttattgtcattggagaagttctctttcatcggtctaggataagattctatggtctatatgtatgtatattttcatgtctcagaaaacacaaaaaaattattgaaggtccaatgtcttgta

SEQ ID NO: 109644 - DNA, 637 bp, Zea Mays
ccgaacaaacaaagcatttatataaccgctcttggatcactagctagctctcgctcgtcgcaacaagcgaagagcttggtcgttttggttatggcggtgatgaagagcaggacggtcatcgtcgccgccgttctgttggcggttgtcattctgtcctcgctgtgtccatgctacgaagccggcggctgtatcgggaagccgcccaagacgccggcgccgaaaaggccctgcttctcgccctactccgaggaccactgtgaccgccagaactgccgcttcgtctgcatgtcgcacggttacagtgacggtggctggtgtgacgagagggaggtgcgcaaaatgtgctgctgctaccattagttagaataataacaatagcagcgtgtagtgttgtgtgctggtgcatgtatatggatcatccatctctctgtctgtctgcctgcctgtgtggtgcaagttctgaaataaaagaatctgttttgtttcgatctgctagtagcgctgtatgctctatgtccagtagacagtagtgtatctgtattgagacgcggcggtgtgtatgctttctcctacaggattaggtggtcacgacacgagatgtccagaagcaaacacgctcgctctcggtcatttatat

SEQ ID NO: 109645 - DNA, 507 bp, Zea Mays
atggcacccggtattagcctcaagaagctactagccatcggcatggccatctgcgccatgtccctcgcttcggctgccaccgcgaccaagacctccccagagaactacgtcgagctgcacaacgcggcgcgcagcgcggccggcgccgggcgagtgtcgtgggacgccgaggcggcgaggcacgcggccaagcgggccgccgcgggctgcgctgctggcctccggagcatgtcattgcctgttgttgctggtggcgggtatggagagaacgtcttccgtggcacgccggggaaggcctgggcagccgccgacgccgtgcgcgcgtggacggcgccggcggccacggagtacgtgcagctcgtgtggccggcctccgtcagaatcggctgcgcacgcgccgcctgcgccggcggccgcggcgtcgtcattagctgcagctacaaaccagctggtaatttactagttttgactaggaatgattttactatacatacatgttcgtcatag

SEQ ID NO: 109646 - DNA, 455 bp, Zea Mays
aacaaacaaatcatataatctctcttcgtcactagctcgtggtaataagggaagcttgatcatctttccttacggcggtgatgaagagcagcacaatcgtcgcgcttctgttggctgttgccattctgtcctcgctgtctccatgctacgaagccggcggctgcatcgggaaacccaagaagtcaccgccgccgccgagaaggccatacctctcgtcctattccgaggaccaccagaactgccgcttgatctgtagctcgaagggtttcaaggacggtggctggtgtgacgaaagcgtcgagcacaaagtgtgctgctgctcccattagaaatataatatcgtatgttatgttgatgcatatatatgcatcatccatctacctgtgtggtgcaaaattctgaataaaatctacctgtgtggtgcaaaattctgaacaaaattatatggagcaaaa

SEQ ID NO: 109647 - DNA, 403 bp, Zea Mays
gctcgtggtaataagggaagcttgatcatctttccttatggcggtgatgaagagcagcacaatcgtcgcgcttctgttggctgttgccattctgtcctcactgtctccatgctacgaagccggcggctgcatcgggaaacccaagaagtcaccgccgccaccgagaaggccatacttctcgtcctattccgaggaccaccagaactgccgcttgatctgtagctcgaagggtttcaaggacggtggctggtgtgacgaaagcgtggagcacaaagtgtgctgctgctcccattagaaatataatagcgtatgttatgttgatgcatatatatatgcatcatccatctacctgtgtggtgcaaaattctgaataaaacctgaataaaacctgattgagcacaaa

SEQ ID NO: 109648 - DNA, 420 bp, Zea Mays
aacaaacagagcatatattccctcttcactagctcgtggtaataagggaagcttgatcatctttccttatggcggtgatgaagagcagcacaatcgtcgcgcttctattggctgttgccattctgtcctcactgtctccatgctacgaagccggcggctgcatcgggaaacccaagaagtcaccgccgccgccgagaaggccatacttctcgtcctattccgaggaccaccagaactgccgcttgatctgtagctccaagggtttcaaggacggtggctggtgtgacgaaagcgtggagcacaaagtgtgctgctgctcccattagaaatataatagcgtatgttatgttgatgcatatatatatgcatcgtccatctacctgtgtggtgcaaaattctgaataaaatctggcttttttc

SEQ ID NO: 109649 - DNA, 940 bp, Zea Mays
agataattcgacctatgcgctccaaacattgtccaacttgtaagcattgtgttgagcagttcgaccatcactgcccatggatatcaaactgtgttggaaagcgaaataagtgggacttttttgtgtttctttggatggggatagctacatcctttcttggtgctgctgttggattccacagacttcagacagagcctgttatactctcatcttcagaatcgtggatacattttatggtgacaaagcatcctggtgctgtactgttcatgtttcttgatgtctttttgttaactggagctcttattctgactggagcacaagcagtacagatagcacggaacatcacaactaatgaggcagcaaatcgatctcgttacacatatcttcgagggcctgatgggcgtttcagaaatccttacagtcgaggttgccagaggaactgcactgattttcttatcagtggatacagcaatgacgaggaggtcgcatggccaacacttcaacaaacagtacagtgaagatagatgcactggttcatgaaacaaaagtgttattgacagatttaatgcccaagatccctggaaagcttatgctttagcgctccgaatatttcagtttgttcagacactggattgacaatggtgtgaagagcgacctggggtcacattctgagtggcacccttttattataagggtctttagtaagtgctgtcggtcatggaattgtttgatactgtagattgttcgcatgcgtgggtgtgcagcagtatgttttcttttctccggctacatgttttgctaggacaagtcatctattcatgttatcgagatgagtgctgatagtgatagatggtgaatgctggttttctgatctccggtgtagtaagttgaattcacaatcttactccattcacgaaatatacacgggacaactgagcaa

SEQ ID NO: 109650 - DNA, 1741 bp, Zea Mays
ggggctgtgggcattcaattgcttttgcttcctccgttcccccatctggccatctccccttcccctgctcccccgaagcagcaagccagcctgcccacccgcagccatcacctccgccgctctccaccatgaatcccatccaccagcacggcatcgtacccaatccttcgtgactgttgcctccgcgcatctccgggagcaatggaaggaggccgagatgtgttcttaggtgcggcggcaagggcgccgccgccgccgccgtcttgcccgtttcacggatccgctaccgccacccgctccggtggagcgcagatgctcagcttctcctccaatggcgtagcagggttgggtctgtgctcaggtgccagcaagatgcagggtgtgttgtcgagggtgaggaggcccttcactccgacgcagtggatggagctggagcaccaggccctgatctacaagcacttcgctgtgaatgcccctgtgccgtccagcttgctcctccctatcaaaagaagcctcaatccatggagcagccttggctccagctcattgggatgggcaccatttcgttccggctctgctgatgcagaaccaggaagatgccgccgcacagatggcaagaagtggcggtgctctagagatgctgtcggggaccaaaaatactgtgagcgacacataaaacgtggttgccaccgttcaagaaagcatgtggaaggccgaaaggcaacaccgaccactgcagatccaaccatggctgtttctggtggttcattgttgcacagccatgctgttgcttggcagcagcagggcaaaagctcagctgctaatgtgactgatccattctcactagggtccaacaggaatttgctggataagcagaatctaggtgaccagttctctgtatccacttccatggactcctttgacttctcatcatcacattcttccccaaaccaagccaaagttgcattttcaccggtggccatgcagcacgaacatgatcagctgtatcttgtgcatggagccggcagctcagcagaaaacgttaacaagtctcaggatggtcagctgctagtctcgagggaaacaattgacgacggacctctgggcgaggtgttcaagggcaagagttgccagtcagcatccgcagacatcttaactgaccattggacttcgactcgtgacttgcgtcctccaaccggagtcctacaaatgtctagcagcaacacagtgccagcagagaatcacacgagtaacagtagctatctcatggcgaggatggcgaattctcagaccgtcccaacactccactgagtgttcatcaggctggtctttgttgggaccacaaaataactgaagccatgttgatgtcctgagtttgctgatactaggttttcagtcgagtcttgtaactcctgttttagagctgttatatgttcacgtcatgtcgcctttcattttcggttcattcagatgggtgttctaataatttctttccttcttacctgtgaaggatttgagttccaatctgagacgtgggtttgttctaacttggaggtatttatgaatattaggcacttctgatttccattgaagcgagatttctttaaattgtcgaggctgtatttttttcaggcttttcaagtgctatactcttgaatgcttgatactgcctccgttctcgaatatttgtcgcctgttagttcatttttgaactaaaccgcaatagataaataaaaaagaa

SEQ ID NO: 109651 - DNA, 1457 bp, Zea Mays
ggtgtcttgtcacgggcaaaagtggcgcatgttcattattatcccccctgcctttttgctttcgcaagccctgtatgtgtcctggccataaagatgcaatctttatcctctatgcacatacttcacccgaaaaaaagctaaaggggtcactgattggtgctgcttccttaaatcttgcatgtgtgggaactaggaggccattggtcacggggttgggtctgtgctcaggtgccagcaagatgcagggtgtgttgtcgagggtgaggaggcccttcactccgacgcagtggatggagctggagcaccaggccctgatctacaagcacttcgctgtgaatgcccctgtgccgtccagcttgctcctccctatcaaaagaagcctcaatccatggagcagccttggctccagctcattgggatgggcaccatttcgttccggctctgctgatgcagaaccaggaagatgccgccgcacagatggcaagaagtggcggtgctctagagatgctgtcggggaccaaaaatactgtgagcgacacataaaacgtggttgccaccgttcaagaaagcatgtggaaggccgaaaggcaacaccgaccactgcagatccaaccatggctgtttctggtggttcattgttgcacagccatgctgttgcttggcagcagcagggcaaaagctcagctgctaatgtgactgatccattctcactagggtccaacaggaatttgctggataagcagaatctaggtgaccagttctctgtatccacttccatggactcctttgacttctcatcatcacattcttccccaaaccaagccaaagttgcattttcaccggtggccatgcagcacgaacatgatcagctgtatcttgtgcatggagccggcagctcagcagaaaacgttaacaagtctcaggatggtcagctgctagtctcgagggaaacaattgacgacggacctctgggcgaggtgttcaagggcaagagttgccagtcagcatccgcagacatcttaactgaccattggacttcgactcgtgacttgcgtcctccaaccggagtcctacaaatgtctagcagcaacacagtgccagcagagaatcacacgagtaacagtagctatctcatggcgaggatggcgaattctcagaccgtcccaacactccactgagtgttcatcaggctggtctttgttgggaccacaaaataactgaagccatgttgatgtcctgagtttgctgatactaggttttcagtcgagtcttgtaactcctgttttagagctgttatatgttcacgtcatgtcgcctttcattttcggttcattcagatgggtgttctaataatttctttccttcttacctgtgaaggatttgagttccaatctgagacgtgggtttgttctaacttggaggtatttatgaatattaggcacttctgatttccattg

SEQ ID NO: 109652 - DNA, 1542 bp, Zea Mays
ggtgtcttgtcacgggcaaaagtggcgcatgttcattattatcccccctgcctttttgctttcgcaagccctgtatgtgtcctggccataaagatgcaatctttatcctctatgcacatacttcacccgaaaaaaagctaaaggggtcactgattggtgctgcttccttaaatcttgcatgtgtgggaactaggaggccattggtcacgggtactgttccccctactgttcttgcttcccgtgtcctgaccatttcagtattcgttcttgttactgatggtgttcttgtgatgaagggttgggtctgtgctcaggtgccagcaagatgcagggtgtgttgtcgagggtgaggaggcccttcactccgacgcagtggatggagctggagcaccaggccctgatctacaagcacttcgctgtgaatgcccctgtgccgtccagcttgctcctccctatcaaaagaagcctcaatccatggagcagccttggctccagctcattgggatgggcaccatttcgttccggctctgctgatgcagaaccaggaagatgccgccgcacagatggcaagaagtggcggtgctctagagatgctgtcggggaccaaaaatactgtgagcgacacataaaacgtggttgccaccgttcaagaaagcatgtggaaggccgaaaggcaacaccgaccactgcagatccaaccatggctgtttctggtggttcattgttgcacagccatgctgttgcttggcagcagcagggcaaaagctcagctgctaatgtgactgatccattctcactagggtccaacaggaatttgctggataagcagaatctaggtgaccagttctctgtatccacttccatggactcctttgacttctcatcatcacattcttccccaaaccaagccaaagttgcattttcaccggtggccatgcagcacgaacatgatcagctgtatcttgtgcatggagccggcagctcagcagaaaacgttaacaagtctcaggatggtcagctgctagtctcgagggaaacaattgacgacggacctctgggcgaggtgttcaagggcaagagttgccagtcagcatccgcagacatcttaactgaccattggacttcgactcgtgacttgcgtcctccaaccggagtcctacaaatgtctagcagcaacacagtgccagcagagaatcacacgagtaacagtagctatctcatggcgaggatggcgaattctcagaccgtcccaacactccactgagtgttcatcaggctggtctttgttgggaccacaaaataactgaagccatgttgatgtcctgagtttgctgatactaggttttcagtcgagtcttgtaactcctgttttagagctgttatatgttcacgtcatgtcgcctttcattttcggttcattcagatgggtgttctaataatttctttccttcttacctgtgaaggatttgagttccaatctgagacgtgggtttgttctaacttggaggtatttatgaatattaggcacttctgatttccatt

SEQ ID NO: 109653 - DNA, 2033 bp, Zea Mays
attggtcacgggtactgttccccctactgttcttgcttcccgtgtcctgaccatttcagtattcgttcttgttactgatggtgttcttgtgatgaagggttgggtctgtgctcaggtgccagcaagatgcagggtgtgttgtcgagggtgaggaggcccttcactccgacgcagtggatggagctggagcaccaggccctgatctacaagcacttcgctgtgaatgcccctgtgccgtccagcttgctcctccctatcaaaagaagcctcaatccatggagcagccttggctccagctcattgggatgggcaccatttcgttccggctctgctgatgcagaaccaggaagatgccgccgcacagatggcaagaagtggcggtgctctagagatgctgtcggggaccaaaaatactgtgagcgacacataaaacgtggttgccaccgttcaagaaagcatgtggaaggccgaaaggcaacaccgaccactgcagatccaaccatggctgtttctggtggttcattgttgcacagccatgctgttgcttggcagcagcagggcaaaagctcagctgctaatgtgactgatccattctcactagggtccaacaggtgaagtcacctgatcgtctgatcctgcattgttatactcatttctgccacttaagtttgtgaatttttattttctcaacatttttttctcgaacacgcaggagaactgtgcatcatatattaaaagaagtaaaaaagtctaaagaagaccaaaatctgccataagaggcagaaagagataggaagtgggaggggcaccagcacactatattttctcaacataaatgacaatctatggttgatacatgtgccagtctagcagtcagggttcaggacgtaccaaaacattgaaaatgttatatcctttagacattgaaattttgtccatagccattcatagttgaaaattttgttcttgatttctttcaactggtcagtgatttcttcatgtaacctgtcattgatgcattccatcttttgccccgtgcccattcctatatataagattttattattatgtttgtttgttcaaacaattatggtaagcatgtgcaaagaaaggcagtaggaagcactataaataactgaaatgatatggtacttatgtcagtacaaactttagagataggtgaattctgttcatgatgaccctttcaaattttgacgacttactatagtcagcagtgaaagaaaaacaggacagtgtttccttttccttccatgaacttgaaatgttgactctggtttgcaggaatttgctggataagcagaatctaggtgaccagttctctgtatccacttccatggactcctttgacttctcatcatcacattcttccccaaaccaagccaaagttgcattttcaccggtggccatgcagcacgaacatgatcagctgtatcttgtgcatggagccggcagctcagcagaaaacgttaacaagtctcaggatggtcagctgctagtctcgagggaaacaattgacgacggacctctgggcgaggtgttcaagggcaagagttgccagtcagcatccgcagacatcttaactgaccattggacttcgactcgtgacttgcgtcctccaaccggagtcctacaaatgtctagcagcaacacagtgccagcagagaatcacacgagtaacagtagctatctcatggcgaggatggcgaattctcagaccgtcccaacactccactgagtgttcatcaggctggtctttgttgggaccacaaaataactgaagccatgttgatgtcctgagtttgctgatactaggttttcagtcgagtcttgtaactcctgttttagagctgttatatgttcacgtcatgtcgcctttcattttcggttcattcagatgggtgttctaataatttctttccttcttacctgtgaaggatttgagttccaatctgagacgtgggtttgttctaacttggaggtatttatgaatattaggcacttctgatttccat

SEQ ID NO: 109654 - DNA, 482 bp, Zea Mays
ctataagcagccatccacacacacacactgacacacacaaagccattagccatgtcgttcaacaaaaacctagcagtggtcgttggcttcaccttggctctgctcatcgcgtcgaacggtgaagaaacttcctcgtatggcggatcagcgctgtgcgattcaacgacgggggtcgcctgcgcatccgacgcggtctgcgtgaccatctgcaagcgaagggctggacagaactacgtctacggccactgctacaaggagcctagcggcggccgttcgtgcttgtgcaccgtacggtgtgatccacggtcggcggcggcgccggcgccggcgccggcgccggcttggcgcgggatcggaatgctaggctgattcttttttattcgctaattacgtggatctgcggatctgcacataaaccaggacgcctttgaaataatcggcatgccatgctgctggtttgctggatctttatctgttgcatt

SEQ ID NO: 109655 - DNA, 1195 bp, Zea Mays
tatgaggaacctttcatccaatgtctatctacccttgtcagcctcaaatccatggaaataaaaggtaccatggtgagcagcctatgttccgaatgtgacaaattgtaccctggtcctcaacatctttgctccattgatattgagtcgactgcagtgccaagatggatgtcatcgcttcgcttcttgtctagcataaacattgaactattagctctgggagcacaggattttcatgtccttgggagcataccatctctacgttgtctcagtatacatgtgaaggaaaccagagatgaaagattggtcattggcaagtgttatccattccggtgcctaactgagatgcaaatcgattatgaatccatggcggtggtgttcgcaccaggaagtatgcaaaacctcaaagaacttcatttagtgttcggggtgaaagaggtaatgcataagtatggtgattgtaactttggtttggagcacctcatgtcactggagcatgtctctgttaaaacaatgtacagtatcatgcccgaggaggtggaggccgtaaaagatgaatttcagaaatccctggacatgaatcctggcaagcccacgttgatagtagattataagtatccgataaaaaggaagattaggtctcatgcacaagcaataagagcagcaattttgttcgctaatgcaggccgcatccctgctactgaaggattataaacattctctatcgccttgctaataaactgcatattcccttctctaattggcactgcattctcaaggtcgcatgggtactagtggcaaataagctctctgaagtcatgaattttctgcagataatgtaactgcagtaaatgtctacgcgcgtgtttgtaaaaaagagctcaatatctaccttgtaaattcgccatgttcatactcatacagtagtcttaagcttgtagccgacaaaatatttccctttcttgaccgagaaggcgtgattgaatacttttccgtgatgtttgtgatacactggtggcactggtggtctgggtttcaccaaaaatgcagattgcagaggccagaggagaggattcgaaagttcagtacctggcgtctagtgaagcacgctcccggcgccccgtggtgcgcagcgcaaagtcggcgggacactcgctcttcggcggcggcggcggcggcggcacaaaggaggtgcgaa

SEQ ID NO: 109656 - DNA, 882 bp, Zea Mays
gggatgagagctatgaggaacctttcatccaatgtctatctacccttgtcagcctcaaatccatggaaataaaaggtaccatggtgagcagcctatgttccgaatgtgacaaattgtaccctggtcctcaacatctttgctccattgatattgagtcgactgcagtgccaagatggatgtcatcgcttcgcttcttgtctagcataaacattgaactattagctctgggagcacaggattttcatgtccttgggagcataccatctctacgttgtctcagtatacatgtgaaggaaaccagagatgaaagattggtcattggcaagtgttatccattccggtgcctaactgagatgcaaatcgattatgaatccatggcggtggtgttcgcaccaggaagtatgcaaaacctcaaagaacttcatttagtgttcggggtgaaagaggtaatgcataagtatggtgattgtaactttggtttggagcacctcatgtcactggagcatgtctctgttaaaacaatgtacagtatcatgcccgaggaggtggaggccgtaaaagatgaatttcagaaatccctggacatgaatcctggcaagcccacgttgatagtagattataagtatccgataaaagtaaatatactagctcagactttgaaaacagccatacatcattattagctgccttctttcgtatttctttgcattccttatgacaaattaatttgtaattttctcttttgcatagaggaagattaggtctcatgcacaagcaataagagcagcaattttgttcgctaatgcaggccgcatccctgctactgaaggattataaacattctctatcgccttgctaataaactggtacgtgttacacatc

SEQ ID NO: 109657 - DNA, 2541 bp, Zea Mays
tttcttcattaacaaaatactttacaactagtggtgctggtcggtaagagctctgactgagcaaccatggcggagatagtcaccggggcgatgggcactctcttgcccaagctggccaacctgatcaaggaggagtataacctgcagaagaaggtgaggggtgagatcatgttcctggaggctgagctcaagagcatggaggctgctctcatcaaggtctccgaggcacccatcgaccacccacctgacatccaagtcaagctctggacaagggaggtgagagagctgtcctacgacctcgaggacagcatcgacagattcatggtgcgagttggcgatggcaagccacatagtttcaagggattcattgatagaagcctccacctgctgacaaggggcaggattcaacacagcatcggcatagacatcaaggagatcaggagccgcataaaggatgtgagtgaacggcgtgacaggtacaaggttgatttggttccttccaagcctgttggcagaagcatcgacaacctgcggctgtcggctctttacagaaaggcgacagaacttgttggcgccgaagagaagagcagtgaccttgtgagaaggctcatggagggcgacaaggaggcatccaagcagccagttgtactgtctattgctggctttggagggttaggcaagactactcttgctaatcttgtgtatgagaagattaaagggcaatttggctgtggggcatttgtttatgtgtctcataatcctgatgtcgtcaaggttttcaaaaacatgctctaccagcttgatggagacaaatacagggacatcaatcaaggaacatggagtgaagaacaactaatctgggaactgaggaagttccttctgcacaagaggtacttcattgtcattgatgacatatggaatacttctgtgtgggaaacaatccaatgttctttgatgcacaatgaatgtggaagtataataattatcacaactcgtaatattgatgttgcaaaacaagctggaagtgtttatcaaatggaacctctttctctcagtgactcaacaaagttattctgccaaagaatttttggcagtgaagacaaatgtcctccacataatttagctgaagtggctggtaaaatcttacagaaatgtggtggtgtaccattagctatcattaccatggcaagtatgctagccgataaaactggaaaggaaataaatacacataactattggtcacatgtgtaccaatccatgggttctggtctaaatggcagtactaatgtgaagaatatgagaaggatactatcagttagttattatgacctaccttcacatctaaagacttgcttgctatacctaagtttgtttccagaagactacagaattaaaacaagaggtctcatatggaaatggattggtgaaggttttgtccatgaagaacaggggaagaccttatatgaagtaggtgaggattacatcgaagagttaattaacagaagtatgttggaacctgtagatattggccgtgatggtaagactgtttcttgtcggatacatgatatggtccttgatcttatcagtttcttgtcaaatgaggagcattttctaacaaaagtaggtgagcaacagcccatatctcttgatctgcctaaaaagatccaccggttatccctccaaattagccaggaagaggaagtcaagcagctggctacaatgagtttctcccacgtaagatcacttactgtgtccactaaagtgttccagttgatgccaaaactttcggcctttctggtcttacgtgtattgaatttaaagaaatgtaagggagtgaggaatcaccactttaaagatatttgcaatatgtttcacctgagatatttgagtctcaatgcggaatttattactgagatgccacgggagattcagaatctacaatttttgcaagtacttgacataagtaatcttgggcacaaagtaaagatgccaaccattattcacttgcgacagctactgcgtctttgttttaggccgatgtggggcataagactgccagatggattcggaaaactaacctctctacaagaagttaaagggatcataactatcaagttaccaagcatgctgcataatctggggtgtctgaccaatctccggaccttggccatcgacttttgtgattgggatgagagctatgaggaacctttcatccaatgtctatctaaccttgtcagcctcaaatccatggaaataaaaggtaccatggtgagcagcctatgttccgaatgtgacaaattgtaccctggtcctcaacatctttgctccattgatattgagtcgactgcagtgccaagatggatgtcatcgctctgcttcttgtctagcataaacattgaactattagctctgggagcacaggattttcatgtccttgggagcataccatctctacgttgtctcagtatacatgtgaaggaaaccagagatgaaatattggtcattggcaattgttatccattccggtgcctaactgtttga

SEQ ID NO: 109658 - DNA, 2117 bp, Zea Mays
atggataagatcaagtacgaaattcgtgagggtgaacaagaatgggtgaatgaagggcggagtaggcttggactaaaggacaaagacactaagaatggaccgtgggtggctcatattaggctcatgaagagcaatcatacatggcattcagcaccagtgaacaaccaagaactcctgtctgaaatgggtgttttcgatggtgagcttcaaggatctgtatctggaagaagtgttgatgcccatgatatgctctgcattgctgaactaagaaagaaaacggcttcagttcgcagaaatagtgctgtccgacacacagaggaacaacttgttaaatcactcggagtgaagaaatgtatatcgaacagtaaagaggggaaaacaagccctattcaagaacttcagggaaaattgaagggaaacaacaatttctctaggaatattgttttagctttgagtgtctctagggatggccagactaatttatctccagatagactggtgtcaataggaacaaaaaggggttcaagtacaaaggttcttgcctgtaagaaattggctaagaggagaagatccaaggaactgtgcaatctaaatagttcattggatgtgactaggactgaccagcagagaggaagaaaggaagcggcagagccaatgaaagatcaccccttagcattggagtgttcgaaatctgatgctcaagggcagcttgacagaactttggaggatgcacagaacataactgaattatcaaatcaggagaacctgttacccacggtgtctcctggctttatatcaacgtctaatgggaaaggtactaacatacatgatactcaatttgaggaagagccgacaggtatgaacaacagccttattgaacctaatggaaatgatgacatgtgcacagaccatgctgctaccaaattagctaaaagcaaccatgttatggaaacagctaccctacctattgatgggagttcacagtgcatcattgacatttctccattgaggagctgctctgctttggagagatctttgccttcaccaccgcaggcttcgttcgtcaagaggtcacctgtgtggcgtgtagttgacgcaaaacatgtgtttaaggagttacctcaacaaccacatttccttccactccaaaaataccccccaacactgcgtgaaggaatagcattaggtatgatggtgtcattctcggaattggtgaagtttacaatggaagcaagcatagacgacagcatggaatggttcgaggacaaggtcaggacagtctcccttctggaggcaaatggattcagtgtgcaatctatacagagcgtcttgaccgaactgatcgagatcaaatctgagcgcgcccgtatccatggagagatcggcaagctgagttcaaagctagcggagaacacggcttcctcctcccgagtcggtgcactgctcgatgaaaaagatggagccgcagctcagctcgagcaagaactcgggcgcatccgccaggaaagccagaagatggcacaggagaaggagaaaatagatgcagagggcgtgagtatcaagacagcatgcagcgggtacgaggatttgtgcagcgacgcggaacgcaagttcaaagaagtcttggctcagctgcggcggaagggcgccaggtgatgcacaagctttgggtatcgtttcgctgcttctaactctgacacctgtttatgctgtagggctgtagttttatctatgtatcgcagtgggctcagatcgatgtgctgtggttacttttgtgcaagccgttcggtatcgtttatgtatctgtaggtatccatctatggcttaggaagcctgatgaagtctcgactctttataattgctactcctatattaattgccagctagttggaccgtacttagttgcttgtagcatatttagggtgcgtttggacacttgaatcagttctgtttatcatctaaatcagctcaggccttgttcgtttgtgtcggattggtgggtcggaacgattcctaactgaattgcttctctaatttatataaactttgattagctagaacgattccgggtgcaatccgacagaaacgaacaagccctcagctgaatcggtgccaaa

SEQ ID NO: 109659 - DNA, 1137 bp, Zea Mays
ccccggttgccccaaacccccaatcccttaccgatccccaccccaatggccaccgccaccgaatccggcagtgcgccgccggtcgacggcgaagtgagacagcgcggccgtccccgcgggagcgggcgtgggcgtgggcgtgggcgtgggcgtgggcgcgagcgctcgcagagcgcgaggcggagcaaacgcccgcggaagccccggccgtggcggtccgcgtcgccccccgcgctggagccgctagtgcccttgcctccaggcaccgaagtcgaggtccgcattgatgacgacggtttccacgggacctggttcgaggccaccgtcctcgacttcgcgcccgcgcgcggctaccgcaaccccgcgcgctacacagtcaagtacgtgcacctcctcgccgacgacgagggcgcgctctcggagcccttcgcgccgtcccaaatccgcccgcggccgccgcctctgtcgtccccgccgcgcttccaactccacgacatcgtcgaggctttccacaacgaggggtggtggtcgggcatcgtcgtgtccgcccccgacgccaccggcgccggggtcaccgtctcgttccccatcacccgcgaggtcatcgagttcccgtccagcctcgtccgcccccgccgcgactacgtcgccggtgactggattccctcccgggccgcgatggttctccgccccaaccgcgcggtcaaggtctatgaggtcggagagaaggtcgaggtgctgaggaaccgggacgtgtacggcaactcctggttccccgccacggtgagggttgtcatcgacgatctcagctacgtcgtcgagtacttcgatctggaggaggggaagggcggatcggagaaggccaccgagtacctgcattggtggttcatcaggccagctgttgagcattcgccaagcaagcgtgagttccagctccggcctggtgctgccgtggaggcctactgtgatggggcatggtcacttggagtggtgacgagggtcgtcggagaggatgaatatgaggtcggtattattggcaagaagacgagactgctggtgaccaaggttgtggaattgctcaagccacagtatatttggaatggcaaccaatggaggattacaacagctaagtcttga

SEQ ID NO: 109660 - DNA, 841 bp, Zea Mays
gctggcaagcaatatagaccatcatcagttgagcatcccaaccccacgcatcccccgcggaggctcggcgacgggcggctgcgacggtgccggtgcaccttgcaccgcctccacatccaaaagacactgcttggtgcacacgcagatggcgcctccgattatagcaggctcggcgccggcgtctccctcgctcatctgctcctgctggcagaaaccgccggtgtagtgcagtccaaggcagaggggaacgcagacccaggtcttgccgaagcagggagcccaggcgatcggcgtttcgcatgtgttcaacggcgctactcctcccgcttctgctccagctgcgactgcgactgcgactgcgactgcaaccaccgtaatcccttttcagattttttattattttcaaccattagctagtggttcgaacaaatactgcagaaatttacgtacgatgcgaagtgaggagcagggcgacggagatggcggccaccgcggcgttctgcttgctggacgacgccatggtcgtatgaacaggagtgctagctaagtatctgatggctgatgaagtgatgatgatcgaagaatgtgtgtgtctgtgttcggtacttattgaagggtggtggcctgcattagacagttctgtatcctagatacatttgggaatattagtatttgagttttctagatggatatggatatccaaatattagaggctactcttacattgtctatggtgtgtctttgtgcaatggcgtcattttattcaacataatcaactgataggtttggaaatactaatatttgaattttctagatggatatggattatatccaaatatca

SEQ ID NO: 109661 - DNA, 693 bp, Zea Mays
aaggctggatgattatttccattatctaaaaatcagttgagcatcccaaccccacgcatcccccgcggaggctcggcgacgggcggctgcgacggtgccggtgcaccttgctccgcctccacatccacaagcaggcactgcttggtgcacacgcagatggcgcctccgattatagcaggctcggcgccggcgtctccctcgatcacctgctgctgctggcagaaaccgccggtgtagcgcagtccaatgcagaggggaacgcagacccaggtcttgccgaagcagggagcccaggcgatcggcgtttcgcatgtgttcaacggcgctattccttccgcttctgcttcttctgctccagctgcgactgcgactgcaaccaccggcgatggagacggcggccaccacagcgttctgcttgctggacgacgccatggtcgtatgaacaggagtgctgcgtatctgatggctgatggtgatgctcgaagaaggtgtgtgtgttctgtacttattgaagggtggtggcctgcattagacagttctgtatcctagatagatttgggaatactagtatttgaattttcgagatcgatatggatatccaaatatcagacgccattttattcaaaataatcaactgataggtttggaaatactaatatttgaaatttctagatggatatggattatatccaa

SEQ ID NO: 109662 - DNA, 92 bp, Zea Mays
gagttactcgaccgaggtgcttggccctcgcgtgggcttcccttcgcgtaggggcaccaacgaggattagtcgggaccttgcacggttccgg

SEQ ID NO: 109663 - DNA, 1054 bp, Zea Mays
atcccaattcccagtcggccagtcgtccacgctccacggccagaccctgagagctgagaccgtgagacgccacaaacggcaaaccctagctggctagctccctggaggactggaggtgacggctgctggctgcaagactgaaggctccgacgctgtcgctctcgctccgaggtcagcactcagcactcggcagtcggcaccaggcaaggcaaggcagcaagccagcagcccagcacgacggtcgccggcgacaggcgaccagccatcaccgcgtcaggtggccagcgaccagcgtccagcggtacaggcgtacagccattaggcggccagccggccagcgccctcggccagcggcagcgcgcaccgcccagctggccagcttgacagcatcaggcggccagcgccctcgcccctcggccagcgcctaacgctccagcagccaagtcgtcgtcggcaagccactgcgccagttcatggcttggcttcatgctgataatctggtactagtatggagacatggagattggagagtggtcctgtgcggtgcttactgcttagtgcttagtgttgtctgaattggtgttgtgcggtgcttagacatggagataggtactatggattgaattgatgttgtctgttctgttgtgcggtgcttagacctgaccacctgttgtctgttctctattgactgttgtgcttgtgccattgtgcacttgtgccgttgtgcgccttgtgcctgagctagtgcctgtgccacactgccagtctgccactgcgcaatgcgcatgccgcatgatgccgttcaggcgttcagctatggactgaagcggtgaagcctgagctagtgcggacgtgcggtgaagcctaagctagtgcagacgcctgatggctgatgtctgaagcctgatgccgttcagctgttgtgcactatttcactgttttaatttttaaataatctgtgactggaatattgtttcactgttttaatttttaaataatgtgtactgtgtctgtgtactctatagtctatattctctctattattgtttcactg

SEQ ID NO: 109664 - DNA, 2573 bp, Zea Mays
atggctggccgaccgcccgcagcgccgctagttggcaccgccttggcctccgaaagccagtccttgtggccgtttgccggcgttgaggaggttaagcctgacaccgaggtgtgcacggtgctcagcagtgatacccttccacagaccccgcatagtgcgggaagcctacggcactgggtacgccctacaggtgctcagcagtgtggtaaatgtgctttggtatatacaccagaacttgcagtgaataagattatgattggaaatctcatacactgccatgataaggtaaaacatgaagctggcatcaatggcaatattaagatttttacagaagatgagattaaaagaattaccaacaactttaacactcttatcggaaaaggtggctttggagaagtttataggggaacccttgatgatgacaatgagcctgtagctgtgaagaaatatatcaatgaagatttgagagaagtgtttatggaagaagtacgcatccatagtaaaattagccacaagaatgtggtgaagctaataggctattgcattgggaaaagtactctcatgatcgtaatggagtatatgtccacaggaaatctcaatgacatactccactgcactgaaatttcgatccctttggatgtaagattgggtattgctatagggtgtgcagaggcattgagctacatgcattcaatgcatttatcatctggcaaccttatctgtcatggtgatgttaagcctgccaacatacttctaaatgacaatttgacagcaaaaataaccgattttggggtttcaaggcttctggttggtggcatcactcagtacacgacaagtgtaaaaggaagtatagattacatggatcctatatatattcaagaaggccgtcttactccaaggagtgatgtttatagctttggattagttctctgtgaactaatatctagaaaaaggataagaaaaggtgacattaacctcattttatatgtcaataaaggctccgcaagtggtaaagggtttagagaaatgtctgatgctgcaattgcaaatgaggacaatatgaagattctcaaagaaatgaagaaattggcaactgaatgtgtatcactgagcatttataggcgtcctcagatgactgatgtggtcagacgccttcggatgctgagaaaagaattaaaggagagacatgaatattattcagagtcaattttggcatcacaccattcatggcgcaaaaacaacaagcaagagataatcatgcccacctataattctaagatgcagatcaagaagagtctgggctttttcaagaggagccttagtaactctaagatccaatcggaacccagcgatgtgaggattttcacacaggaggagctaaaagaagtcacgaataactactcttatctaatcagtggaggtacttcaggtaaagtttacagaggaacactcgaggacaatacggtggtagcggtgagaatattttctgaagtactcgagggctttgaagaagcgttcgtcaatggtgggatgatcctgtctcagatatcccataggaacatcatcaaactggtgggatattgcttggacgctgactgcccagctttcttgtatgagtacgctgctaagggcagcctatctgatgttctggacgggcatgaagacttcccactggatctacgtgcgaagatcgtggtgaagatcgcagaagcattagaatacctccattcaccagcaactggtattatcagacacggctatgttgtgccatccaagatactcgtagacaataatttcatgccaaagctcaccggcttttcatgggcaaggaggcttatccaggagagtaacactactgccagcgacgacgtaatttctagtcatcagcatccatcgagcgggttcaacaacgacccgatccacgaccactatgtgtcgctaaaactgaagaccgatgtgtaccagttcggtgtcctcctcctgacactgattagcaggaagagctttgtgttttacgccgatcacgacggcctcgtctcgcagttcctcacagcttgccaggaagatggcagtggaagggcgttctttgatgatgatgttgcagtccatggtggagatgttgttctgcttgaggagatggggaggctgtcgctgaagtgtgtttgtgaggaaatcgagcagagaccaacgatgcgagaagtggcagagcaccttcggatgatcacgagatcttggaaggacttcagcgggagctacgcaggagctgaaggcaatactcctgagaggccacctagttcagacattggagattgaccatgagcaatcctgtacatacgacagtgaatgatagatgtgttgtttgtattgtttcgtggtcagtgttagactgctgtttacgtgtagctgctgctattgttgtatgtgtagctgctaggggtgtaaatggtacggatattatctgtctgtattataattcgatctgtctaaaagggctgagatctgatccatatctgagtctgggtattgattatccgaccagatccgatttttatgtgtctttattctcaaagttg

SEQ ID NO: 109665 - DNA, 2372 bp, Zea Mays
cacgaaataaggcacccaaccaccttcccctccgccccaatcgcttgctcccgcacggccgcaccgccgccgacctcgccgccggcaatggcgtggctcgcgcgctccatcgccaactccctcatcgctactgaggaagaacccgaagcaaccgaccggggcccctcggcctccccgggctcgtcctctcccccgcgcggcgtccgcgaggacctctccgagctaaccggcgcgctcgcgaaccgcttccagggcatcgcctccttcctcgcgcccgcggcgcctgggggcggaggcgccctgcgccggccggacccggccgagatcgcgggccggttccgcgccggcctcgcgcggctcccgggccgccaggccgtagcggatctcgccaggatcgcgtcctcgctcctgccccctgagggcgatgcagactgggcggaggaggcagcgggggtcaccgaagaggtggtcgcgttcgcgcgggacgcggcatcgcggcccgagctatggctcgacttccccctcctccccgacgacgcggactcggatgattttgacatgactgatgcgcagcaagatcacgccctggccgtggaaagcttggcgcccgagctggctgatctgaggatcgagctctgccccagccacatgagcgaggactgcttctggaagatatacttcgtactgctgcatcctaagctcaggaaggatgatgccgacattttatccactccacagattctggaagctagggacaagttgtcgcaggaggtgcggtaccggacggagttacaaggcagccacggcgacaccgtacctgtggctctcggcgatgaaggtggcgtttcaggttctcttgtagagggtttgggcgtattgaagggccaagacgactccgccatgctcacgtctttcagcaacacggactacggcaagccacaaccgatcgaacaggacaaggatattgtatcggttcatacgatcggcgagactggagctgtttcttcggataataccggtagcagcggtgtacctgtacagctagtgcccgtgtcgagagacaccaccaccgtggcgccactatctaggacggaagaaagtacgcacgatctctctacggaagacgaagcagcagcagaagaagaagaggagcagggtctgcagatgtctgagatacctttgacggacagctctccccctaaagatggtcaacagaaacaaccactggctgccatcagtgagcgatcaggagctgactatcagaaaagtgataatgttgaggatggcggcgacggcgtcgaagatgacgacggggatgaatggttggaagaggaagcatgggacccgggaaacacgcaaattccgatagcagatgatgaagacgtgtctttcagtgatctggaggaggaagacgatggtgcggcctgacatcgcctgtaggcttggcttgaccgtactgcttacgtagtctgtgcttcctgttccgttatacgattggtacaattgtcttggttgatgtctaatacacgctctcatagtctcattgcttcctgttccgttatacgattggtacggcatgcatgctttgctagctgcccccagctagcagacaactaccagctcactagtcgatcgataagaaactaaacagcgaagcccgcagctagcaaagttcgctcaccagctgcactgcaagctcgtacacatacacaattaataataatcaaccgaaaccagctagtagagttcaaagaaaagctcacataataatacacacacgcacaaaacacgtacgacgacagaaccacacgcaatgcagacgacgaagccggccgacgactggggcgtggggcatgcatcgatcgatctgaggaggtgcgctagccggcctagctgtggcctcctccctggccctgggtgtagatgtagtcggtgtgcgccgccagcgtcctcctcatgaggcactcctcgtcctctcctcctcctcctaccccttcgctgccgcaccgctcgtcgtcgcccgccgcgaagctcatgctcatcgacgacctctcctcggcgcctaccttactcacatctctttgctgctcctcttggcttctcgtcgagctcgccgccgccacagctctcgtcgcgtggccggcgacgacggagaggaggaggaggaggaggaggacagcagacaccagcaccagcagcagcggcagggcggtccgccgtggtgccgatgttggtggcgccgccatgtctgcaagactgcaaccaacctgcactgcaggcttgttgctgttcctttggcgtcagcggcgtggcggatatctgacgacccggccggccggggctcttgctggatttatgtgaagcgttgttgg

SEQ ID NO: 109666 - DNA, 1326 bp, Zea Mays
tcattgccttctcgcttgcttgattgccttcggacttgggttagcatggatggaggcagtcccatgcagaccgtgctgtcggcccccggcgtcaaggacaagaagctggtctccttcacccgcaacgacgatgcgaccaacgacaaggacgccgtcaccggcctcatccgatccatcgtcggcggcgccacgccgtccagccccgcgcagcggacggccttccacgtcttccacatcaacaccgtcgtcgacctcttctcggcctggcgccgcgggctccccgacgtgcgcccctactacgccgtcaagtgcaacccggagccggcgctcctgggcgcgctcgccgcgctgggcgcggggttcgactgcgccagccgcgccgagatggaggccgtgctggcgctcggcgtcccgccgggccgcatcgtctacgccaacccatgcaagcccgagccgcacctcgagtacgccgcgggtgccggcgtcagcctcgccacctacgacaccgaggacgaggtggccaaggtcgcgcgctgccaccccgggtgccagctcctgctccgcctcaaggctcccgacggcggcgtcagcggcggcgacctcatgaacaagtacggcgcgcacgcgcacgaggtggcgccgctcctgcgcgccgcccagcgcgcgggggtcggcgtggccggcgtctccttccacgtcgggagccccgtgtcccgcgtcgacgtgtaccgcggcgccatccaggccgcccgcgccgcgttcgaccaggccgtcgccctcggcatgccgcccatgcgcgtcctcgacgtcggcggcgggttcacggccggcgccgccttcgacgaggcggcggccgtcatccgcgacgcgctcgaccggtccttccgcgacctgcggccctgcgtcgaggtggtcgccgagcccgggcggtacttcgccacgacggcgttcacgctcgccgcgcgcgtcatcgggaggcgcgcgcgcggtgccgcgcgcgagtactggatcgacgacggggtctacggctcgctcaacaacgtgctcatggaccacaaggctccgcgcccgagacctctggccagctgcccgcgccccggcgaggagacgtacgcgtccacggtgttcggcccgacgtgcgactcccaggacaaagtggtcaccgggtatcagctgccggagatgagcgtcggcgactggctcgtcttcgacgacatgggcgcctactccacaagtgccggatccaggttcaacggcttcgactcgtcggagattaagatctacgtggcctattccagctgagcaatcacatcaatggcggcgtca

SEQ ID NO: 109667 - DNA, 2910 bp, Zea Mays
atgcatcctgctgtaaagctcctcatcctccacatcttggccgccgcgttcctgacatccaattctctgcagcttcggcggccaaccggagatggagatgcagcttctgcaagctgcataccgcacgaacgggacgccttgctggcctttaagcatggcataagcagtgaccctatgggcctccttgcctcttggcatcaaaagggctacggagactgctgccggtggagaggtgtccgctgcagcaaccggaccggccatgttctcaagcttcgacttcgtaatgtccatgtaacgtcttcaatttcgtactctcttttcagagacacagcgttgatcggccacataagtcattccttactcgccctggatcaacttgtccaccttgatctcagcatgaacaacgttactggctcaagcggccaaataccagatttcttgggctctttggtgaacttgaggtatctcaacatatccggcatacccttctctggtacagtgccaccccaccttggtaacctctcaaaattgatgtatctcgatctctcctcctgggtttttcaaggtcaaccgtactcaacagacatttcatggttagctggcctatctttgttggagtatcttgacatgagtaaggtaaacctcagcacagttgctgattgggctcatgtggtcaacatgattccttccctgaaggtcctccatcttagttcttgttcacttctaagtgcaaaccaaacactcccacgtattaaccttacagaccttgaaacacttgatctgtctggtaatatttttgaccacccaatgtcatccagctggctttggaatttgacaagcctccaatatctcaatcttgaggctaatcatttttacggtcaagttcctgatgcgctaggggatatggcatctctccaagtcctcgatttgtctggtaatcggcacatgggtactatgacaacaagcttgaagaaactctgcaacctgaccgtcctagacctctgcttttgtaattccaatggagatattaaggaactgatagagcagatgccacaatgccgcaagaacaaactgcagcaattgcatctgggatataacaatattactggaatgatgccaagtcaaatagcacatttgaccagcttagttgttcttgacatctctagtaacaatttaaatgggatcataccatcagtgatggggcagcttgctagtttaagcacccttgacctctctagcaactacctttctggacatgtaccatctgagattggtatgcttgctaatttaactgtactagacctcgaaggtaatgaactgaatggtagtatcacagaaaaacactttgcgaaactagcaaaattgaagcacctatacttatctgggaattccttgagctttgcagtttcctctgaatggttccctacgttcagtttagaagatgcaaaactggaacaatgccaaataggccctcggtttcctagttggcttcagtttcaagtgaatatcctttgggtagatatctcaagcacaggtctagtcgataagcttcctgactggttcagtactacattctcaaaggccacccatttggacatctcccataatcagatccatggaagattgccaaagaacatggaatttatgtcattggagtggttctatctcagttcaaataatttgactggtgaaatcccattgttaccaaaaaatattagcatgttggacctctctctaaactctttatctggaaacctaccaacaaagttcagaactcggcaactactatctctagatttgttctccaatcgcctcactggtggtcttcctgaatctatttgtgaagcgcaagggttaactgaactgaatttaggtaacaatctttttgaggccgagcttcctggatgctttcatactacagccctcaggtttctattaataggtaacaatagtttctcaggtgatttcccagagttcctgcaaaacagcaaccaattggagttcattgacttatcgcgaaataagttctctggaaacttaccacactggatcgggggtttggttcaactccggttcttacatttaagcgagaacatgttcgctggaaatatcccaatcagcatcaaaaaccttacccaccttcatcatctgaacctagccaacaacaggttatcaggtgctataccctggggtctgtcaagtcttacagctatgacacgaaaatatgtgaagaaagctgatattgatggatatccttatggaggctatgaatacttctcccgtgaaatcggtcagtacttctctgtggtcaccaaggggcaacaactgtactacggcatcaaaatttttgaaatggtgagcattgacttatcaaacaacaacttatctggtcgaattccagaagaaatagcttctcttgatgcactgctcaatttgaacctctcaagaaactatttaagtggagaaattccagataagattggggccatgaagtcactcttctccctcgacctctcagacaacgtgctttctggggaaatcccttccagcttatcagatctagcacaattgagctatttggacttatctaataacaatttgacagggccggtaccatctggacagcaacttgacaccctctacgcagagtacccgtctatgtacagtggcaatagtggtctatgtgggcatactattgggaagatctgttcaggaagcaattcatcaaggcaacatgtccatgaacatggttttgagctagtgtcattttattttggacttagtttgggatttattttgggtctttggcttgtgttttgtgtcttgttgttcaagaaagcatggagggttgcttattgctgcctcatcgacaagatatacgatcagatgtatcatgcacatgcttggtaa

SEQ ID NO: 109668 - DNA, 76 bp, Zea Mays
ataacatggtttacaatgttgcgtccaaacaatgtttctcaaaaccatagtatttttggagttgaacaaaaccaca

SEQ ID NO: 109669 - DNA, 1738 bp, Zea Mays
ccgtgactgtgagcacaagaccccccaccggccaccggccaccgccgcgagaagaaccgaccgacaaccgagcatgaaggccgggcctccgcacgtggccatgctggccacgccggggatgggccacctgatcccgctagcggagctggccaagcgcctggcggcgcggcgcggtgccacggccacgctcatcaccttcgcgtccgccgcgtcggccacgcagcgcgcgttcctggcgtctctcccgccctccgtcgccgcgcgcgcgctcccgcccgtcgacctctccgacctgccccgcgacgccgccatcgagacgctgatgaccgcggagtgcgcgcgctcgctccccgcgatcgcggccgtgctcgcggagctcggcgagaccgcccgcctcgtcgcgttcgtcgtcgaccagttcgggatggaggccttcaacgccgccggcgtcagggcggcgcggtgcctcttcatgcccatgaacctccacgcgctctcgctcgtcctccacctccccgagctggccgcctccgtgcccggcgagttccgggacctggccgaaccggtgcggctgcccggctgcgtgcccatcccggggcccgacatcatctcgccgctccaggaccggtccaacccgtcgtacgcggtgatggtgaacctcgccgtacgctgccgcgaagccgccgccgccatcctcgtcaactccttcgacgccgtcgagcctgaggccgccgaggcgctgcgccacccagcagagcccggctggccgcccgtgtaccctgtcggcccgctgatccttcagtccgagtccggcggcaccggcgccgatgtcgacggcacgcctccacgtgcggcgtgcctcgagtggctcgaccggcagccagccaggtcggtcgtctacgtctcgttcggctccggcggcgcgctgccgaaggagcagatgcacgagctggcgctcgggctggagcgcagcgggcagcggttcctgtgggtggtgcgcagccccagcgacgacgaaggcacgctcaacggcaactactacgacgcggagagcaagaaggacccgttcgcgtacctcccggagggtttcgtcgggaggaccaaggaggtgggtctgctggtgccctcgtgggcgccgcagacgcaggtgctggcccacggcgccaccggcgggttcctcacgcactgcgggtggaactccacgctcgagagcctggtgcacggcgtgcccatggtggcctggcccttgttcgccgagcagcggctcaacgcggtgatgctgtcggagggggcaggggctgcgatacggctgcccgagaccaaggacaaggagagcatcgcggcggtggtgagggagctggtggaaggggaagggaagggcgccatggtgcgggccaaggtggcccagctgcagaaggctgcggcagagggcctccgtgagggtggtgccgcaacgacggcacttgacgaggtgatggacaagtgggaggcggaagccaactagaaggtgcattcgcatgcatgcccgacaacacaatcctctccgccaaactctttaaatcatgagttgtcagtgtccatgttcttcaaactctttaattcgttaattatatgtatgcgtggcgtgcataaaggttcgagggattcgtgatgtttatttgggtcactggaatatgcctgtaaaatatgcgtcgtcgtagattactttgccggcagaataaaagtactgttcttcacc

SEQ ID NO: 109670 - DNA, 910 bp, Zea Mays
ctattgggcacgattccgttcctataaacccctgccgcacgcccgcagtggagaaatccccccaaatcacaatccccgtccctcgtctcccgccgccaggacagccatggccaccgccgtatccacccccgcggacctgtcgccggcgccggtcccgagacggcggggccggccgccgaagaaccccgcccccgcacccgcccccgcccccgcccccgccgtggcggaggtgattggggactacgagcgcgagagggccgcgaggatccgggagaacatggagcggatgcagaagctcggcatcctcgacctcgcgcagaccctcagctactccgccgccggctcggctcgaggtaccggcagcggacgtcggcgccggaagcccgtggacccgggtcccgctggcggggccagggtgaagcccgcgtcgccggcgccctcgcggaggtcgctcaggttgaaggacgtggaatcaattagctattgtgaaactgaacctaagaaagagaaacactccgaagttggcaaaattgaggtagtagaggtaggagccaaggaagaaatatacactgaagagcatgacaggcttctgggaacatgctacactccttggacactctttgtcgatggttatggcaaagatggaaaacgcatctatgatcaagtgaggggccaaacctgtcatcagtgccggcagaaaactcttggtcatcatacaagctgctgtaaatgccagattgttcaagggcagttctgtggagattgtttgtatatgaggtatggcgagaatgtgttagaagttaagaagaatcctaactggatatgtccagtttgccgtggcatctgtaattgcagcatatgcagaaccaagaaaggatggtttcctactggtttctgcgtataggaaggt

SEQ ID NO: 109671 - DNA, 190 bp, Zea Mays
cccagagtgctacaggagggaggtcctagaggtagtaagtcacttgtttactccatgatgacaatagcaagcagatcgcggtggtgcctatggatgctacaacaagaaagatcaaaagttcttttggatggatgcaactagatattttgttttgtattttctccaaaagagaaatttgcaagtgaactta

SEQ ID NO: 109672 - DNA, 105 bp, Zea Mays
ttgtttcaacggaattaaaaacaagcataagcatacctatgtgttgcaacggcacacaaactattcaataaaatgttacagtgtgccccaccttgtaaagaaaca

SEQ ID NO: 109673 - DNA, 606 bp, Zea Mays
attgcaacaatcctaggatctccagcgacaaacaaatccaatatacacaagactggaaattttaaacaagaacacaataccaagcaatatacatggcatgcccgatgacaagctgaaaaacaaaatggatgtctactccggaaacgataaaccatgacacttcgagcgattcaacttccaatgaagcacacaccctcgctattcacagaactgcaagaagggaataaatatgcaaaatgctcagctgatcaaccatggactgggacttcgttcgaagcaaccaattgcgcggtcagatcaggacctgtggcgtctccaacgccatgttcaaccgtgaaatcttctggagcagcaggttctgaaggaggggcttcagctggggtttcttgcgctcgcgcaacctttgcccttgaagccttaggtttcgagtttgagatctttggccttgtgaccacgggtcttgcttcagcctttgtggtcgcagacgcctgtgatggagctttcacgactggcctctgaacaggttttctagcaggggcatgaggtttgttgttttccatcgcttcatttaccttgctcgaatttgcagtgctccgtgggctctca

SEQ ID NO: 109674 - DNA, 729 bp, Zea Mays
cagttggaagtccttgttagataattatgcaagtctgcaattgtttagaaattgtcaactatatgttgctagtaacttatatattaatactagagtctgtttcagacttttagagcccgtgttcaatgtacaattagttcaagtttcagtgtacataataactcaattgttttgttttataggatgcacctggctcatcgtcattactcttcacctggcacagtggcacctaacacttgtgcattatgttgagtcttcaagaagaacgtcatcagcaccgaggtggatgtcctgcaagtgcagtgcaacatggcgctctggactattcaagattcaagtcaaattaggctaagatgtttacaatgccgagacgattggaagctgaaatttgtgaatctatggtccataacttctatagttgtttacaagcacaaaagagcaaataatttattgttcccttatgccatatcacactttgatgtttccatgtcacagggggagttctgcttacttcaaaagaacactgacaagctagatttaagacgacgagttcacatggctatagacattatgagtactgtttatctttctataaagttctttgaaattgcaggccaaatcaatgattgatattgttttttgtaattaacaatgattagcagagaattggataaacattctgtgttgtcaagaagcataatgaataaaacagagaagcattaccgtgtc

SEQ ID NO: 109675 - DNA, 1097 bp, Zea Mays
ataaaaactaccgctctacttggcctttccgcgatggctgagactagggtttcagtggcggcggttgcacgacatgagggagcgcagcgaagccagcacaaccgcggtggacaagcgtccccatagacgagatccatggcggagcgctggaagagcgtctcctccgtgccgaaggccgagaacgcgcggccgacgggacgatggccggcggcgaagcccaaggcgtcggacctgctcgcccatagccttgactgcagcctcgaccgcaaggactccatcctcgccgccatccacctcctccgccgctctatggccttcgactccacgacatctctctcgtcgtccgacccagccgctccagacctctacgcgtcctctgacaccgacatcgtctcctctggtagcaactcggtagccagtgatccgccgcgtcagggcatcagcgtgccggcgaggttctggcagaaaaccaatagccgcatgctacatgcaagctcaagaattgcaataagcggtaggtctgattttggaagcaggagtcgttgcatcacattggatgcacctggctcatcgtcattactcttcacctggcacagtggcacctaacacttgtgcattatgttgagtcttcaagaagaacgtcatcagcaccgaggtggatgtcctgcaagtgcagtgcaacatggcgctctggactattcaagattcaagtcaaattaggctaagatgtttacaatgccgagacgattggaagctgaaatttgtgaatctatggtccataacttctatagttgtttacaagcacaaaagagcaaataatttattgttcccttatgccatatcacactttgatgtttccatgtcacagggggagttctgcttacttcaaaagaacactgacaagctagatttaagacgacgagttcacatggctatagacattatgagtactgtttatctttctataaagttctttgaaattgcaggccaaatcaatgattgatattgttttttgtaattaacaatgattagcagagaattggataaacattctgtgttgtcaagaagcataatgaataaaacagagaagcattacc

SEQ ID NO: 109676 - DNA, 942 bp, Zea Mays
ataaaaactaccgctctacttggcctttccgcgatggctgagactagggtttcagtggcggcggttgcacgacatgagggagcgcagcgaagccagcacaaccgcggtggacaagcgtccccatagacgagatccatggcggagcgctggaagagcgtctcctccgtgccgaaggccgagaacgcgcggccgacgggacgatggccggcggcgaagcccaaggcgtcggacctgctcgcccatagccttgactgcagcctcgaccgcaaggactccatcctcgccgccatccacctcctccgccgctctatggccttcgactccacgacatctctctcgtcgtccgacccagccgctccagacctctacgcgtcctctgacaccgacatcgtctcctctggtagcaactcggtagccagtgatccgccgcgtcagggcatcagcgtgccggcgaggttctggcagaaaaccaatagccgcatgctacatgcaagctcaagaattgcaataaggttgttctgaaactccgaaagaggtgggtgttgactatggcatgcactgattttttatttttgcagcggtaggtctgattttggaagcaggagtcgttgcatcacattggtgagtattgaatcttatctattaaaactccttgtcgtttgcttgcaccagagccttccaacgccagcgcaagaagcgtcctgtcagatcgtctattatgagttgggatatatagtttcatatcatttaggcctctaaggtgttatagaagtaaatactctgctttgagatatattgtttaatatcagttaagtgtgcaatagttaaacttcatatttcttgttggagagtgattctgaatagttaatcttgctaaatatgtatattcagaatcacaaacgccagcgcaagaatgacttgtgccattatgcaaatattttc

SEQ ID NO: 109677 - DNA, 1659 bp, Zea Mays
taaataaatatttacgtatcgcagtaataataaccagtatcccattcccatcctgtggagcagcagcagcagacagcagtagctgtgtagacagatcgactcactgttaactgaattccagcgcaagccagcattcattccttcctcttacttaccgtgaactgacaggaaccatggacgagaacggccactacgtcgtcgtcgccctgccctccgcgcgctgcggcggcgacgatgacgagcctacagtcaaggaggaggacgaggaagcggaggagcaggagcagtcgccgaccgaggcgccagcgctacccgccgcccgcgccgtgcggcggcggccgaaccagaagcggaccaagaacttcagcgacagggaggacgagatgctggcgctggcgtggctccgcgtcagcgcggaccccgccgccgggcgcgcgcccttctggagccggctgcacgaccacttccacgcgcaccgggacttcgcgtcggagcgcagcgagaactcgctcctgcaccgctggtccaccgtccaggacaacgtcaggcgcttcgaccgctgcgtcgccgacgtggcgggagcggccgcgggcgcggccgagggagggctcacgccgcaggacacggttgtgcgcgcgctggccctgttcaagtcccgggacaagaacaacaagccgttccagttcatgcactgctggatcctcctgaggtcgcagcggaagtggatggagaggtcgtcgcagtcgcagacctcttcgccgaagctggcgtggaccagtaggccgccgccgtcccagaagaagcagaagacggctccgagcccgagccccagtccgtgcgctccgccgcgtgctctcgacgacggtctagatgctgcagccgcccaagaacgcgaggaggaggaggaggaggctgtgcacgcgatgcagcagccagtggatgggaccgaggaggaggaggagttacagcagggcgggggcgtgggcgtgggcggggctagtctgtacctggaggcggcggacgatctgtggtggggaaagaggaaagcggctgacgacaatggcgaacagcaggccggcgcgaggacgatgcagcagctcagcaacggcgcgcgagagaagcgtgcgctggaacaacagcgcacggtcgcgctggcgctggaccaagccagggctgccaacgaggcgaggagcctcgagataaggaggagagaagtggagctcaggaccaaggaggtggatctgaaggtgatgctggaagaggagaggatcatggccaaggacaccagcgccatgtccgggatacagcagcagtactacaggatgctgcagaacaagatcatgactcggcggttcggtggctcatcttggatggaatgaacggctaggctttttgtgttaattactgtggtggctgcataacaaccgcttagacagcttagagcaggtttatggtctgtttggtttcctacctaaggtgctacaatctgcctaactttagacgtttgaattgaagaactaagcttacacaaaaaagttaggcacgttgtggcgctttaggcagcaaatcaaacagccctttaataatacacccgactgatggctgtaacagcgtaccttttactcatccgtacactagttagctcttcattatattaat

SEQ ID NO: 109678 - DNA, 1916 bp, Zea Mays
ggcgggcgggcggtggagggcgagtgaagacgaggtgcttgcctcgctcggctcacaccccttttcgtctcttctctgcctttcctccgcaatcacagagcgcaagaggagagagagagagagtgaggggggagagagagggctagggttttgtgccccccacgcctcacgcatcgaatccgagccgggtcggggttgctgcgaatcgccggcggtgcttgggctgtgattccattgcaatggcatctgaaactgatgagaaagctaagatggagagtttgacatctgctgcagcctttgtggagggtggcattcaggatgcatgcaacatttgccttgaggccttctgtgagagtgacccttctgcagatcaaccaaaatggatggatcaacacatgagtcaccaaaatccaccacccaacccaatcggtatccaatcaaatactgtagacttagatgctgaagactctgttccatcaagctttacttcgaagaggccgctaggtcatgattcgtccaaggaaaaggcaaagaagcaaaggtctgttgacacatcgtccactttttctgagtacctcaggtggatgggtgaaatatctttggaacggttgtctgtgttcaaattagtagcttcaattgaggagaggaagttggagtctatgaacaaaaacgagaggcaaaaactcatcttggagaggaagaagctaaacctggagaaacttaggatggatcggcagaaattgaaggaggacaaggaagaggaggtcatgatattgggcatggatctgagtaaatgtaaccccctacttcgacaatgctacgaggctaagcaacaggagatattggcaagggttattggaaactcgtcgtcaagcaagtgaggagtgaacgaagttaatttttgttagtggttgagtaagtcatgttatttgttttcgagaaaaactgcatgtttctgaaccatatttttgttcttgttgttccaagttgtttgcaaacttgacatttttcagtatgtcatgcttgaacattgtaatgttggtcgatgctaacctatgatgatgctgaacaggatgctgtcgtttcttctggaaatagcactactgtatctagtcctaggttttttttaacaggtgctgtgtctatattcagatactgtttttatcatgtaagggtccgagaaagaaggcttacacgtgcctattcttcatcttgaaaggtagttccccagcttcgtcctcatcttagagcctcggatggatcaaactaaaactaacaggtggagcagaagtgcagtaacacgatgctccagttccaagttgacaacctggcggtagagcagaagtgcagtaacacgatgctgccatttttatctcaagcactgcataaactgcatgcgtgtggcttaggggaagtccgatctcaaaaaatcttctgtttagggcatgtactaaacatgtacagtggtgtttaatgtggaggctcctaaggtgtttaaggggtgtatttgcaaaaaaaattagagccgtctctccgtgaagagacgcctctggctcgtaaaccaagtagtaacagacgtctcacttcctattgtacgaatttgtcgtctgttctatcgatctgctgctgtacaaatgcatttaattctgtatttattaatagactacatttatagacactccattgtataatagagtctcttagttgtctcttgtgcttggataaccgttttggtgtctcttcactgtacatgcccttatgtcttctgtaaaaaagaacttgtgagaaaagatgtttaccggtacaaataacggatatggcatcttcgtggtgcgcggatcagttacaaatatgattgggacagcgaagtttgctgctgctgatgctatgcaagtgtaccgtgggacggtttcctg

SEQ ID NO: 109679 - DNA, 1190 bp, Zea Mays
cttttcgtctcttctctgcctttcctccgcaatcacagagcgcaagaggagagagagagagagtgaggggggagagagagggctagggttttgtgccccccacgcctcacgcatcgaatccgagccgggtcggggttgctgcgaatcgccggcggtgcttgggctgtgattccattgcaatggcatctgaaactgatgagaaagctaagatggagagtttgacatctgctgcagcctttgtggagggtggcattcaggatgcatgcaacatttgccttgaggccttctgtgagagtgacccttctgcagtaagttgtcattttgttagttgagatattttacatataggggttatatctgtagtaagctgctgttgaaaataagcccttccatttcttacattgttgggcaatattgaaggatcaaccaaaatggatggatcaacacatgagtcaccaaaatccaccacccaacccaatcggtatccaatcaaatactgtagacttagatgctgaagactctgttccatcaagctttacttcgaagaggccgctaggtcatgattcgtccaaggaaaaggcaaagaagcaaaggtctgttgacacatcgtccactttttctgagtacctcaggtggatgggtgaaatatctttggaacggttgtctgtgttcaaattagtagcttcaattgaggagaggaagttggagtctatgaacaaaaacgagaggcaaaaactcatcttggagaggaagaagctaaacctggagaaacttaggatggatcggcagaaattgaaggaggacaaggaagaggaggtcatgatattgggcatggatctgagtaaatgtaaccccctacttcgacaatgctacgaggctaagcaacaggagatattggcaagggttattggaaactcgtcgtcaagcaagtgaggagtgaacgaagttaatttttgttagtggttgagtaagtcatgttatttgttttcgagaaaaactgcatgtttctgaaccatatttttgttcttgttgttccaagttgtttgcaaacttgacatttttcagtatgtcatgcttgaacattgtaatgttggtcgatgctaacctatgatgatgctgaacaggatgctgtcgtttcttctggaaatagcactactgtatctagtcctaggttttttttaacaggtgct

SEQ ID NO: 109680 - DNA, 405 bp, Zea Mays
aaattgttgaccattgggcacaaacagaatggtgccaaatcagttaccgtttcaacaggatcttcacgacaatctggtggtgcctccaaccaaaagttgtcaacgtcggcgatcgtcagagcagcatcgacgaacggcgacggattgaggctcagccctgtgtcgctgcctacgacatcgcttggaggcaacgacgaggctaactcgccggctgcatggactgcgaggtccggcgagagttcgtccggcgaggggactgccggagtttccattgggacgaagaaagagacggagacggagagacggagaggaatcagtccggcgaggggagcgccggaatcagtcggggagccggacagagacgaagaggaagaaaggagcgagctcgcgatccgttctgaataa

SEQ ID NO: 109681 - DNA, 2366 bp, Zea Mays
ccacggtcagtttgctcagatccgggaaggcgggagaacccctcgtctcctgtcctggccactgccgcacggtttcggcgtccgccgtgacgctcgccagcgaccgggcttgcaaatatccgcccgccccgaaccagccgattcggcggccgtggtcctggtccgtcccctccccaccccgcgtccccgccacgggacgggaccaacagctcccgcgcccgccgccgagcccgagacgagaacgccgcccttcccaaccctgctcgccttgcccccttgcactcttgccagaacaaatcccctcgtcaaaacttactataatatcctggcgtagccccgtctcccccctgccggcgcctttcacgccgtgcctctcccacgccttgaccacggccacccgcgcctcctcgcctcccgcaagcccaccccgcgcgcgcccgccccggcggcgttggcgtctccctcctctccggccgctatggcaggggagaacgacccccgcagcggcggcggtcccgttcccgtcgacgcgtgcccgctctgcggcggggccaacgggcccccctcgcgcgtcgccctcgccaggcgggccccgcccggcgacgccctcgcgctggcggtggcgttgtcccccgccgacgaggcgtccgcgctgcgcgaggcgctggcgcggcaccggcgcggcgtcgcggacctgcaggcggagctggaggccgagcgcggcgccgccgcgggcgccgccagcgaggccatgtccatgatcctgcgcctgcagcgcgagaagtctgaggccatgatggaggcgcgccagtaccggcgctacgccgaggagcggttcgcgcacgacgccgccgaggccgccgcgctgcacgacgcgctcggccgccgcgacgccgccgtccgctcgctcgccgccaggctccggtcctgccaggcgcgcctgctccacctcggcttcccttccccgtcctccccgaccccgaccgcggccgaggccgaggccgaccatcccttctcctcctccgacggcgacgacggttaccattccgtccactgcctcgacgaccacctcgccgacgagggcaccccgcgcgccccccacggagctcccagccccccggactccgataagccggtcgtcatgtttggctcgccgcgccgctcgtcacgccacgtccgcacgttctccggcgacggcggcccgtacagctgccgggtcgcgctggccgacgagttcccgctcttcacggacagggacgcgccggggcaggacgacgaggaggaggccgaccgggtgtacacggttgacgcggtgcatggcgtgccggtcatggcgcctgacgacgactgctgcgactttgggaccacgtgggagggcgaggtgggcgctcgtgctggggccgcgggctgggcggaggaggacgagatacaggaactcaaagccaggttgcacgcgttggaggcggatcgggagtctatgcggcacgccatcatggccatgggagatgagaaggcgcaggtcgttctgctcagggagatcgctcagcagctctgcagggacgcggcaccgttccctgctgtcccgctcaaggtgcagccaaggccacagccgtttgtcatggcacagaggaaggtggtgaagaggcactcgtccttcgctaagatcttcattgtcacagtgatcaagtgggtcatgtctatcttttgctggcgacggaaatcagatcgcgtaaggtatccgatcggtatgtgtgggagcaacgtcggattgatgctggtactggataggttccccaaacagagacaaaagaagattcctaaaaggaagctaagtgcctccattctttgataatctgattacaggcgacctagggaaagctgagtcatgcctctgcgattatctgacccgaatgagcagttctctgaacataaaaagctggctttgtgaagaagcaattgttgtcgcacatcgttccaaccctttttcctatgcattctttggttgatttcgtttttggcaatctagctaaaatgttgatatcctttgtgttttcttcctctgtctgccttttttttctacatatatcgttgatattctttttttgtgcagtagcatcgaaaagtccactgtgaataaaacacggaccattttaatcattagcagtaggcagcagagttcgtttttcttttttctatgtcaccttctctcccgttttgtggaacaaaatcatattctgttgtaagcaaatttcaaactgaatagcttgttttgtggggagacttttcttgttttagtgctgtgggatgaagtcggtgtaaatttgaaattttgtttagaagagaattttaaatgtcttggatatatt

SEQ ID NO: 109682 - DNA, 500 bp, Zea Mays
atggcagcggcggcggtaaccctcctccgccttcttctcgcccgactctcctaccacctccgctccgtagaggaggaatctgcggccgaggcggacgcgcctaggtcgttcgtgctcccacagttgccgtggccgaagctgagcgtgaaggaagatgtgtgcccgcatggaagcacaattgttggtattggttcactggatcctcctgcattcgtgtatgacgatgaagactacaaggatgtttttgtgtcagaggcttgcttgctcactcgcgacgagaacgagtggtacagggaaccaatctcggccaatgccacgtctagcaaagaaggtttgcaagcctcagttgctgactgattaagtcaggttctgtatcagttcctgtgactatacagatacagaatttgatcaacgcctcgacatggtaggaaagaacactacggtattggcggggattgttcataagacaatctggttctgaaatggaccattttcattat

SEQ ID NO: 109683 - DNA, 96 bp, Zea Mays
ctaagaccattccctgttctatcattctcattcggtgttgcctttctcattctcccctccacgcaaagctcattcccattcccacatacatccccc

SEQ ID NO: 109684 - DNA, 101 bp, Zea Mays
gtcttattacttcgacaacgccgctgaatgttacgcacaactcaagcaaactacataagtcttattacttcgacaacaccgctgaatgtcacacacaactg

SEQ ID NO: 109685 - DNA, 588 bp, Zea Mays
atggcgtcgtcgtccccgcagcagcacaccgaggtcggctcgtcctcgaacctcgctcaatttaggaatagcggcatcatatccatgaacatgggcgacatcatctgtaacatctacgaccacgagaccgtcaacgctgccgccgccagcgtcagccccggcccggtggatccttcccaggcatgcatcgtagagacggattcgcaggttatgcaggtcgaggaggagcatatagaaccattaagggagcagagcggaactcagcagccaccgagttttggacaatgtggcaaaaatggtgaaccattggagcatatgcaaattttgatagacaaccttgttggatatgatactatacctacaaacagcttggtgatttctcctggtcatggttatttatacaactttgagatgaaggagctttatggtcttagttataggcatgaaacaccagaaggtcctacaagatttggagaaggcatgttaaccccgctggaccccaaccctctattcacgccaaacctcagccatttggaacatcttctcttcctccggttcatctctaatcttcatcgcttcaagtgttag

SEQ ID NO: 109686 - DNA, 2535 bp, Zea Mays
aagatgggctggagaccacacgttgtctctgtgtcatcttctgcactactagtgctgcttcagctcctcgtgctactgatgctgcccgctgatgcgtcgtcatcaagccaactgttccttgaaagaactcagacgacgacgacgacgatctacgtcgtgtacatgggcgagaagaagcacgacgacccttccctcgtcgtggcgtcgcaccacgccacgctggcctccgttcttgggagcaaggatgaagcactcagctccatagtctacagctacaagcacggattctccggtttcgcggcgaagctcacccagccccaagcggaggagcttaaaaaataccctggagttgtgagcgtgaagccaaacacgtaccaccacgtccacacgactcggagctgggattttcttggcatgagctacggccaacagcagtcgtcgtcgtggtcgtcgtcgtcgcggctccttaggaaggccaagtacggcgaagatgtcatcgtcggcgtcatagactcaggcatctggccggaatcccggagcttcgacgacagcgggtacggctacggccccgtgccgaaacggtggaaaggcgtgtgccagacaggccaggcgttcaacgcgagcaactgcaaccggaaggtcatcggcgcgcggtggtacgccgccgacgtcagcgaggaggacctcaagaacgaatacaggtcgccacgggacgccaacggccacggcacgcacaccgcctccacgatcgccggctcgcccgtgcggaacgcgagccaccacggcggcggcctggccgccggcatagcgcgcggcggggcgccgcgcgcgcggctggcaatatacaaggcctgccacgctgtcggcggcagcgcgagctgcggcgacgcctcgatcctcgcggccctcgatgccgccattggggacggcgtcgacctagtgtccctgtcgctgggaggcttaggcgagatctaccagtcgttgcacgccgtggcggccgggatcaccgtggtgctcgctgcagggaacgatggccccgtggagcagtccctcaacaatgccctgccgtggggcatcacggtggccgccgccaccatggaccgcaccttcccgacagtggtcacgctgggcgacggagagaagctggtggggcaatcactgtattaccacaaccgctcagcggcggcatcgacgagcgacgacgacgacttcgcttggcgccatttgatattattccctagctgcgacgagaagaatctggggtcggaaaacatcaccgggaaaatcgtcatatgccgtgcgccggtgttctggtccgactatcctcctccgcggcagcttagcagggccagccgagccgccatcgccggcggggccaagggcatcatcttcgagcagtacagtaccaacagccttgacacccaggtcgtctgccaaggccacctgccatgcgtcgtggtggacagagaatccatattcacgatccaaagtagcgacagcaatgtggccaagatttcgccggcggcgaccatggtcggatcccaggtcgcctcgccgagaatcgcgacgttctcgtcgaggggccccagtgctgagtttccctccgtactcaagcccgacatagcagcccctggagtgagcatcttggcagccatgcgtgactcgtacgtgctcctgtccgggacatccatggcatgccctcacgtctccgccgtcgtcgccttgctcaagtcggtccacccggactggtcgcctgccatgatcaagtctgccattgtcaccacagcatcggtgaccgaccgattcggcctgccgatccaagccaactcggtgcagaggaagccggccgacgccttcgacatgggcggcggcctcatagcgccggacagggccatggaccccggcctggtgtacgacatccagccggaggagtacacaagattggacgaccgcgccgaccgcctcaacctcccgtccatcgccgtgtccgacctcaagaactccgtcacggtctcgcgcaccgtcaccaacgtcgggccggcggaggtggcgacgtaccgggccgtggtcgaggcgccggccggcgtcacgatggacgtggagcctccggtgatcgccttcgagagaggcggcgccaggaacgccacgttcagggtgacgttcgtggcgaagcagcgggtgcagggcggctacgcgttcgggagcctgacgtggctggacgacgccaagcggcactcggtgaggatccccgtcgccgttcggaccgtcgtccgggacctcgtcgccgatgtagcttgatggtcgagttcggtttctgggcacgcacatacatgtgttccgcgttgtttacgtgctgtgtttgtctcgcggcgccgattcgatcgggttcttgtaataagaaagatggcgtggaaggaaaaaaatttggtgcagcactgctgcaaactagagtggtttgcagctcctcacaaaaaagaggatagaccccacccgcagcaacaataatacaactaaaacgttatctgctggacctac

SEQ ID NO: 109687 - DNA, 360 bp, Zea Mays
tctccaacgcccgcaaggacttggctcaggttttacggtggatggggaaaaaaaatctggaccgtcttttgtttcagatcggagcatatccgctactacaggatggatgtgcacactacactacacggtaggtaattcgtcaaatcatgctcgcgcgcggggaaaagcagatgggttgttttggctgtgtggcctgctttggcattgcaaaggtgtgtactgcttgcgactttggcatatatttcgatttcatgcgcatgtggtttgatgctttttattgtggtctgtggtagtatgctatccatgcatgagatatatctgatcatgcttatacgcatgcgcattatagtcccagccagc
